United States Patent Application Publication US 2011/0183924 A1 - sequence listing, part 34

SEQ ID NO: 77562 - DNA, 886 bp, Homo sapiens
gctgatctccagaggatcccccaggaaacagctgtgacaacctccaatcagtttacttcatttcaaaactatttccaatcacaaggaaagatttatttaaaatatactcgtacatttcacctgtggatgtctataacttcatcctcagtatgttcccaaatctgtgctggcattgaaaggacaaaacattatactagtgggtttttctactaattattttttgaagcattattttcccaacacaaaagagcttttttctcggtataatgaaaattgaaatcctatgtgtattcaatagtaaatagacaaattttattttttatttccacttgaagagttacatttcgtataaaagtttacaaataacggtttttattttgattttttcagtataaaaaaagttgccttgatggcatattatgatgtaatgctaattgcttgtaggatagtaaatggtcagtattgaaacctaatctctagctgccgtcttgtagatatgaacgaatgttcaccaagcatgtattttgtattttgttgcattgtacactgcaactaataagccaaggaatcgacatatattaggtgcgtgtactgtttctaaaaaccacaaactaagaatgataaattatcaatatagtttagtatttgctaattttactacactcttttgttatgtatatgtagggaagtcatagggattataaattcaatttgagtaaaatttaaaaccatatattttatgataaagggcctttaacttaagatggccaaagcactgatattatatatttgctgtaaagagaattataagagttttatttttctgatattaaaagttacttaataaagacttgtttccattaaaaaaaaaagtcgacgccttggt

SEQ ID NO: 77563 - DNA, 811 bp, Homo sapiens
gcacaaggaatcatttgtcaacagagtatccgcgctacatttcacctgtggatgtctataacttcatcctcagtatgttcccaaatctgtgctggcattgaaaggacaaaacattatactagtgggtttttctactaattattttttgaagcattattttcccaacacaaaagagcttttttctcggtataatgaaaattgaaatcctatgtgtattcaatagtaaatagacaaattttattttttatttccacttgaagagttacatttcgtataaaagtttacaaataacggtttttattttgattttttcagtataaaaaaagttgccttgatggcatattatgatgtaatgctaattgcttgtaggatagtaaatggtcagtattgaaacctaatctctagctgccgtcttgtagatatgaacgaatgttcaccaagcatgtattttgtattttgttgcattgtacactgcaactaataagccaaggaatcgacatatattaggtgcgtgtactgtttctaaaaaccacaaactaagaatgataaattatcaatatagtttagtatttgctaattttactacactcttttgttatgtatatgtagggaagtcatagggattataaattcaatttgagtaaaatttaaaaccatatattttatgataaagggcctttaacttaagatggccaaagcactgatattatatatttgctgtaaagagaattataagagttttatttttctgatattaaaagttacttaataaagacttgtttccattaaaaaaaaaagtcgacgccttggt

SEQ ID NO: 77564 - DNA, 553 bp, Homo sapiens
cggccccggcacatggagtggttcagagcggcctgggtgcctggcggacagaacttcagagaccacgcagccttccttcgaagacgcacctgcccagcccagcccaggggtgccgtggaggaccaccctggcggagacattgctgatccctggcttggagctccttggggccgccggcctcgacccccaccctagggaatgcagagcctctccgcatgtgtgcgcgtggccgtgtctgtgtatttctacgtgtgtcgctcttcagaagcaacctagttcctggggcagctggactttgcatgttagtgtgagcccccagccccctgcccgccgccccctccccaggccctgcctcctccccaccccctcgtcagccagcgttgctgttccttgcagagaaaaggattgtgggaaactccaggactcttcccaccgcctcccagcgcctgcctgctggggctgcctgcatgcctcccctgcacctgggggtacccgcatccacttcctttcccccttttaacaaaagagaagaacgaattccaaaccactgcca

SEQ ID NO: 77565 - DNA, 455 bp, Homo sapiens
gctgtccttggggctcaaccagtttaccttccattcagccagggatagttgtgcctctcgccacggcctggctaatctgacagctttggaagcatctgacagtaaaagatggtttctcactatggttttaatttgaatttctctaattacgagtgaggacgcatgttttcaaatgcttaagagccatttgttttcatttctcagcgaactatctgtccatattcttattttttattggcttgtaagttatgtgtcagtcactaaagaagttagccctttgtgatgacatggaatatagttcacagcagttcagactgctgtgatccttttgccatgcagaaaaatgttgggtgggcgtggtggctcactcctgtaatcccagcactttgggaggccgaggcgggcggatcacaaggtcaggagatcgagaccatcctgcctaacacggcgaaact

SEQ ID NO: 77566 - DNA, 601 bp, Homo sapiens
cccagtttcctgatgaggagtgcctctgtgacaacatctgtgctgggctcatcttccttgagctcacagtgcccactgaacatcctcctgggactcttcctcaccctgggtttctatactgtctctaccagaggtgcctagctctagtgaagggcactagaggccaaagtatgatgtcctagagccagcacaggccctggggtcatctcttctgccttgtctgcagggcagattatgcccagtccctccacagcagcagagaatgctgggttattggaatgccttcccctctcgttagccttttgcactcaataaatgcttgttttgttggacaacttcagcagcctccttcactggcatgcttgaagagaggttgtcagagcagcagcctccctctctagtttccagggtgttcagtctgagagcccttccatgtctctgttacttgcaattctagtaaggatttgctgtctccccacccagcctcaggatatgggatctccagaggtgcgcaggataggcagagaagaatgacccttaatgtattgcccctgtatctttgccaaggacatttccttttcccaaagtctttttttgctct

SEQ ID NO: 77567 - DNA, 196 bp, Homo sapiens
ttctgatgggagtgaggcctagaaagcaggggcttcatgcagatgcagcagggacactcccaccaagccatcctgggctttggtcatgggtcccacgccaagcacttggacaagtctgttaggaaagggggtggcacatgctcttccgccatctggaaaaatgtggagatccaagggagggcagaaagtgttcttg

SEQ ID NO: 77568 - DNA, 732 bp, Homo sapiens
tgctgggattacaggcataagctaccgtgcctggccaatgctaggcactttttatgggccagggactgatctaagtacttttcatgcacactgcttttcttttctttttttctgagatggagtctcactctgttgcccaggctggagtgcagtggcgcgatctcgactcactgcaacttctgcccacagagttctagcgattctcctgcctcaacctcccgagtagctgggattacaggcgcccgccaccgcacccagctaattttttgtatttttagtggagacggggtttcaccatcttgggcaggctggtcttgaactcctgacctcgtgatccacccgccttggcctcccaaagtgctgggattacaggtgtgagccaccatgacccacctcatgcacgctgcttttctaatttagtgtcttataattgtggagctatgtcttgtgaaaaggtatttccaacaagattctctgagatagttttcccatgtgctttcagtgcctcaggggtggggtagtccataggagcccctgttacccattcaggagtgggtgaggggagaccccagggaccaatgccagcaggaagaggtggggtggttgggaggatggagattgcacatgcttggggacagcttggaggtgcgtgttagaatttttctgagaggggttaaggtgctgttttgtgaagcacaacgagttagtgagtgctaaatctccatgacccct

SEQ ID NO: 77569 - DNA, 119 bp, Homo sapiens
aaaattacctatcaggtactatggtcacagcttaggtgacagaatttttaccccaaacttcagcatcatacaaaatttccatgtaacatacctgcagatgttatgttaaataaataaaa

SEQ ID NO: 77570 - DNA, 837 bp, Homo sapiens
gtgcggccgggttcctaacaggtcatggactggtaccagtctgtggccccagagttggggacccctgccttaatggaacctgcttttcactgaagttgaaaatagatgtggcattctagtttgaaaaaagcagaaatcttgccctttaatccttggagtaaatgtaagtgtcatgagatatttgtcattgtgaaaacctgatccagtggacccagctgtggcatttagtagggtaagcccgtttgtgaaagtcagagagttctaggaagtctttgagacaaaatcttttaaacttgtcagtgatcatccttagtatctgcacatacatactggagctatgtaggctttagtgttgtaacattcaaatgatgtggtttaagtgaaagatcattatacattgtaaaatgtacgtgtatgagactttttttttaatctaatggaatgacattagataaaaaaaaatcaagtgatcaggttaggaattctctagttataccaagtattggtcaactctgtattgccatttgtgtaattaattggtgatgtggatctcctgtaatagtatggctctaagtgttgcaacaattaacagaggccttgtgtatttccacaaatcatcaagtttaattgggagggctttttgaaggtaaacaaagtttttggtgtgtgttgtactttcttttttctggaaactgctccaatatggacagtgggcttagttccaaatagtttagacaagtagactttcacaataaggattggagttacatgcttaaaggagtgttgtaaagaagcttaagatggtccttttatttgcctaatgttaatcagaaagaa

SEQ ID NO: 77571 - DNA, 801 bp, Homo sapiens
  misc_feature (72)..(72): n is a, c, g, or t
aggttctgcggagagagaggctccaagcagtctgggaagtgtagtccagttggcttagcagtagtttcgttnggggggagccgaggttcccggggaaggggctaggtcggcttgaaaagagattatgactgtaccttttaactctgtagctggaacacaagaagtgtttgtttaatgaatgacgtacacatttaagatctgtttggacgctgaggataatcctgtgaattgctaatagttcactgggtttggcccttagtgttgacttcagtatgctgagacggaaaccaacacgcctagagctaaagcttgatgacattgaagagtttgagaacattcgaaaggacctggagacccgtaagaaacagaaggaagatgtggaagttgtaggaggcagtgatggagaaggagccattgggcttagcagtgatcccaagagccgggaacaaatgatcaatgatcggattggttataaaccccaacccaagcccaataatcgttcatctcaatttggaagtcttgaattttagagatggattatcttgcatgccagagcgctggaatggaataaaatgatggcagaagtacaaaccagatttagagaattgagtgcttgcagtcaagcagaatgtacctcctgcagagacaaatcttctgcatgagattactgatgcttcacttgcactctaagctggaatccaaactctggtttgtctcttgaaaatttgactctataaaactgatctgattttctgtttttaaaaataaatatatttttggaaaaatgtgaggcttcccaaa

SEQ ID NO: 77572 - DNA, 1421 bp, Homo sapiens
  misc_feature (5)..(5): n is a, c, g, or t
  misc_feature (10)..(12): n is a, c, g, or t
ggcangaggnnncggccgcccagcagcccgtgggcaggcgcggcggagcgagcggggccggcggcgggcgccgagggacgccgagggacgccgaggcctcgggcgggggctggcccggggttccaggtctccagtgggggctgcagactaagcaaaatgaggcggttcctgaggccagggcatgaccctgtgcgggagaggctcaagcgggacctgttccagtttaacaagacggtggagcatggcttcccgcaccagcccagcgccctcggctacagcccgtccctgcgcatcctggccatcggcacccgttctggagccatcaagctctacggagccccaggcgtggagttcatggggctgcaccaggagaacaacgctgtgacgcagatccacctcctgcccggccagtgccagctggtcaccctgctggatgacaacagcctgcacctttggagcctgaaggtcaagggcggggcatcggagctgcaggaggatgagagcttcacactgcgtggacccccaggggctgcccccagtgccacacagatcaccgtggtcctgccacattcctcctgcgagctgctctacctgggcaccgagagtggcaacgtgtttgtggtgcagctgccagcttttcgtgcgctggaggaccggaccatcagctcggacgcggtgctgcagcggttgccagaggaggcccgccaccggcgtgtgttcgagatggtggaggcactgcaggagcaccctcgagaccccaaccagatcctgatcggctacagccgaggcctcgttgtcatctgggacctacagggcagccgcgtgctctaccacttcctcagcagccagcaactggagaacatctggtggcagcgggacggccgcctgctcgtcagctgtcactctgacggcagctactgccagtggcccgtgtccagcgaagcccagcaaccagagcccctccgcagcctcgtgccttacggtccctttccttgcaaagcgattaccagaatcctctggctgaccactaggcaggggttgcccttcaccatcttccagggtggcatgccacgggccagctacggggaccgccactgcatctcagtgatccacgatggccagcagacggccttcgacttcacctcccgtgtcatcggcttcactgtcctcacagaggcagaccctgcagccagtaggagagcttcgggagtgggtgcccagggttaggtgtgggaggcatggggcaggaccatcagtaaagacagggccaggtgcagtggctcctgcctgtaaccccagtgctgtgggaggccaaggtggtaggatcgcttgaacccaggagttcaagtccagcctggacaacgtagggagacccttgtctctacaaaaaataaaaaaattagccaggtgttgtggcacgt

SEQ ID NO: 77573 - DNA, 1485 bp, Homo sapiens
  misc_feature (5)..(5): n is a, c, g, or t
  misc_feature (10)..(12): n is a, c, g, or t
ggcangaggnnncggccgcccagcagcccgtgggcaggcgcggcggagcgagcggggccggcggcgggcgccgagggacgccgagggacgccgaggcctcgggcgggggctggcccggggttccagatgttggatgtgatccttaaacaaagcaaagatgtctgccgtcgttgaaagttgtttctaaaaggtctccagtgggggctgcagactaagcaaaatgaggcggttcctgaggccagggcatgaccctgtgcgggagaggctcaagcgggacctgttccagtttaacaagacggtggagcatggcttcccgcaccagcccagcgccctcggctacagcccgtccctgcgcatcctggccatcggcacccgttctggagccatcaagctctacggagccccaggcgtggagttcatggggctgcaccaggagaacaacgctgtgacgcagatccacctcctgcccggccagtgccagctggtcaccctgctggatgacaacagcctgcacctttggagcctgaaggtcaagggcggggcatcggagctgcaggaggatgagagcttcacactgcgtggacccccaggggctgcccccagtgccacacagatcaccgtggtcctgccacattcctcctgcgagctgctctacctgggcaccgagagtggcaacgtgtttgtggtgcagctgccagcttttcgtgcgctggaggaccggaccatcagctcggacgcggtgctgcagcggttgccagaggaggcccgccaccggcgtgtgttcgagatggtggaggcactgcaggagcaccctcgagaccccaaccagatcctgatcggctacagccgaggcctcgttgtcatctgggacctacagggcagccgcgtgctctaccacttcctcagcagccagcaactggagaacatctggtggcagcgggacggccgcctgctcgtcagctgtcactctgacggcagctactgccagtggcccgtgtccagcgaagcccagcaaccagagcccctccgcagcctcgtgccttacggtccctttccttgcaaagcgattaccagaatcctctggctgaccactaggcaggggttgcccttcaccatcttccagggtggcatgccacgggccagctacggggaccgccactgcatctcagtgatccacgatggccagcagacggccttcgacttcacctcccgtgtcatcggcttcactgtcctcacagaggcagaccctgcagccagtaggagagcttcgggagtgggtgcccagggttaggtgtgggaggcatggggcaggaccatcagtaaagacagggccaggtgcagtggctcctgcctgtaaccccagtgctgtgggaggccaaggtggtaggatcgcttgaacccaggagttcaagtccagcctggacaacgtagggagacccttgtctctacaaaaaataaaaaaattagccaggtgttgtggcacgt

SEQ ID NO: 77574 - DNA, 487 bp, Homo sapiens
  misc_feature (5)..(5): n is a, c, g, or t
  misc_feature (10)..(12): n is a, c, g, or t
ggcangaggnnncggccgcccagcagcccgtgggcaggcgcggcggagcgagcggggccggcggcgggcgccgagggacgccgagggacgccgaggcctcgggcgggggctggcccggggttccaggtctccagtgggggctgcagactaagcaaaatgaggcggttcctgaggccagggcatgaccctgtgcgggagaggctcaagcgggacctgttccagtttaacaagacggtggagcatggcttcccgcaccagcccagcgccctcggctacagcccgtccctgcgcatcctggccatcggcacccgttctggagccatcaagctagggccaggtgcagtggctcctgcctgtaaccccagtgctgtgggaggccaaggtggtaggatcgcttgaacccaggagttcaagtccagcctggacaacgtagggagacccttgtctctacaaaaaataaaaaaattagccaggtgttgtggcacgt

SEQ ID NO: 77575 - DNA, 360 bp, Homo sapiens
ggtgtacccacctccttgaaagcactcatggctacgctatctcattctgtttctcaggtggatgacaactagagtctagactactgtattaaaggactatgaataagttaagggaaggagtaggagttataatccctatgtgcaaggtccttggggtgctgacaggctgaggataacgcctcagactggactcattaccatgaaggtaggaccgtcacctgcacactggagcaacagatgaagacttggcatcaaggcctcttctacaaggatactgctaatattatacactgttaccatataattgcacatatatatctctctcttcccctcaggatttgagaactcctgagaacaagc

SEQ ID NO: 77576 - DNA, 386 bp, Homo sapiens
gaaatgtttgtatggaggacagaaataattcatttcatggagagacaagaggatcactggcagtaaaactgcaggcattatttatgggagactcaaaggagggaatgccccgtgttggcgggcctgcctttcaatccttgtcacaagtcatgatccagaagctcggccaattgaagaaagggtctccatgaagtggagctcatgacctgcctgcatcagcatcactgggggcattttttaaaaatgcagataccagcactgctggggctggggttgggagtctgcaaactcccctgctggttaaaatacaaactgaggtttcagaactattgtgccaaagaatcataactgactccattgggaagtaatgacccatgatttgattt

SEQ ID NO: 77577 - DNA, 348 bp, Homo sapiens
ccctggtgccctccagcccagggctcggcacacagtgggcttcaggaggtcctggtgaaccaggtgccacctgttacagattccacgggtctccagggacctggggccctttggagcaacaccctggggagcgagaagggaataaaggcatctgcccttcctggtttgcaggaaacagcaatgttactgtgcatgcttgggtatttgatttttcctcgaatacctatgtgatatggatcaaatagcaagattctagcagaggaaacagttaagtgtttccaggggagaagctcaaagtcccaggacacggtgtagccccctgggacgggcagcaagtccagggtggac

SEQ ID NO: 77578 - DNA, 338 bp, Homo sapiens
  misc_feature (11)..(11): n is a, c, g, or t
  misc_feature (133)..(133): n is a, c, g, or t
  misc_feature (135)..(135): n is a, c, g, or t
  misc_feature (263)..(263): n is a, c, g, or t
gccaccggccntgtctctggtccagctagcctcacagggagtggcctctaaaactggccggcccactccatttggaagctgtcccgggttttccgtgaagtcctcccggcctgtggtctcctggatggtctgngnaccaacagcttggggatgaggggaggctcgggggcaagggcaggagccccagccaggcgctgggggtgtggctgatcgaagagctgcaccaccccgtagctggccaggtgagtgtgggcgtccaccanggtgcagacacacattcttttccttgacagcctccttaccctggagtttatagccaaacgtgaggtcgatccaat

SEQ ID NO: 77579 - DNA, 361 bp, Homo sapiens
ctttattggccagtggtgcaaagaaatagtaaaaattcaataaaaatattgcttgaaccaggaagcctcctcatagagttgtggactcttcagagaggttttaccaaagtaagggcagaatgtgtataccgtctttcagggattcaagaaatgtaggcaacaatgtctattattagccctcctctccttccatgagcaaaacccaaattacttgtttttaattggcacaaaagcacattcaatcattacattatcagacattgttcatgtacctatcatatgccaggctgtgtgctaagagctggggatctgaagatgaataaaatgtaccctgccacaatcaggattggcaacaactgac

SEQ ID NO: 77580 - DNA, 958 bp, Homo sapiens
aaaactatgcgtgcctttataaaatatggagctgatgttgctgaaaattaaaatgacaaaatattgtgtttagataaataacaacaatggcaatatttttggcaagaaatcacatattgtccctcccccaagcagtctgttccctgcaattctgaatgtttggtaattctaagcaccctagaggaaggtaacattcttcccttggtgtcagtgctaagctctgagattgttatttgtcaaataaagcacaaatgtgttttcctctagttacgtgaagaccttgtgtggaatgccttactgtttggagaaaatcttggtttggctcttgggctctctggtgatcattttataatgctcattatgggaggtgacgggaagaatggccagcaagatgctctagcctgcagaaaagtcactttagcatttccctgctttgactatggcacacggacatttggaaattcttattctggttttggcaacacaaaaagctttcctttttccccttccctcctggctgactaagctcatcttaatgccactaaattaccaatgccttatttggcaagctgcctggtaaatcaaatgaatgacgacaatactggagatcttgtgtggtcactttctaaagggttttgtgcctcctttatactcttgtctccttctccttctttggcgggtccactcagttatttggctctgtttgggaaggctctgggaaaaatgccatttatctatcttttcaacttgaggggacatgctttcttcacagatttctttgggatggaaagttctttctttaacctgattactgtttctaggtgctgtaaattgctgatcattctcagtaaatcaccagcattctgttctttctcagtcttgacaaagttgccattgtgcatatgtgtatttgtgtgtgtgtgacagggaacatgcatggtttctgaaaaaaaaaaaa

SEQ ID NO: 77581 - DNA, 495 bp, Homo sapiens
atacttttctgtataccagggatttcaaatgaatattagaattcctggagagtgactgaagggctcagaaatatttaaaaacccttcaaagcactggttgaccactattcagagcctggtaatcctcatgcccaacaattactctcacaagttccctgttgcactctctgtataccattagcagtagtgtaattgatacaatctttagggaaataagtttggaggtgccttcattttatttttttgaaacagagtctctgtcgcccaggctggagtacagtggtgtgatctcaactcactgcaacctccgtcttctgggttcaagcaattcttctgcctcagcctcccaagtagctgggattacagacatatgccacccgtctctactaaaaatacaaaaattggccgggcgtgatggcaggtgccatagtcccagctattcaagaggctgaggcagaagaatcgcttgagcctgggaggcagaggttgcagtga

SEQ ID NO: 77582 - DNA, 873 bp, Homo sapiens
attttcttctggtgagctgtctaaccctttgtacacattgacatttttaatatcgtaactgatttcttgatgctagtttagctatattaggaaactgcttctacctagattgaaagaaatttgactcataaacttccaagttagaacaaatatttcttcattattgttgcttttatgtgagtagcatttccctatcttgcagttctgttaacatgaaaatggcatttttccataatagctttaaaataattttttagtaattattacaaaattaaggaaaatctctattaccgttatcttttagcattttttttttcctcagtgatctcaagattgtcttagtctcaatgagatgtagctacaaaaatggcacctcttagcagtgatgaggctcaggatatcggatatcataacaccaatgtcaggataaatatctcttctaaagacgatatttaccttttacaaggttagaaaagtctcatactacctcatctttattgtggcgcttttgtagatcactgagaagcttatcttattaaccaatataccacttcctaaatatccatctttggtgaaagaaaatagttgtggtaagagtacccatgattatagttttttatcagaatttgataagattttctgtttctgtgaaacaattattttaaatatttttcttttaaaaataactttttatcagtacagaaaaacctaagggatgactagcttacaaatattctgttaaggggtagttttataaagaaaaatgatatatagttatgttgtcttttatagtgttaaaattagtatttatatgaaagtcaagatctaagtaccttttcatataattcaaactgattgcttgtgatatgtttt

SEQ ID NO: 77583 - DNA, 464 bp, Homo sapiens
acattctgcttgggtgagtaggccactgaccaagtgagcccggatgctgaaattctacaatgtaagtgccaggagggcagcaaaagagggtcatgccatagggtagcgctgtccgatggaaacagtgtgagccatgagtgtaattttaaattttccaattgccacataaaatgtgaaaagaacgccgggcgcggtggctcatgcctgtaatcccagcactttggcaggctgaggcaggtgatcacctgaagtcaggagttcaagaccagcctggccaacatggcaaaaccccgtctctactaaaaatacaaaaattacttgggcttggtggcgggcgtctataatcccagctacttgggaggctgaggcaggagaaatggcttgaacccgggcggggtgggggtggaggttgcggtgagccgagatcatgccacttgactccagcctggacaaaagggcgaaac

SEQ ID NO: 77584 - DNA, 527 bp, Homo sapiens
cacgtttggcttccgaggggagagctggtgccctactcactgcagggaaatttaaactgggtgaaactgaactggtttccaattgcttgtgttctccatttccagccaagttccaggttttcctagagtacagccaggagcatctgcacctagagaacacagaataaaattgtggaaaccaaacttgtaaatgtttttctcattagcttcaggctcccagccaccaataaactgtaggctttaaaaaatcctgtattattttgcaagttaagagaatgtgcatattccccttatttatatgttcaggattttcttaaaatgttacacatcaagcatttatctgctaagccaccccaaaaggtaacagcattctagtttttgtacaaaagagaaaaaaaattccacttaataaacttgcagtaacttgagcctgttggtggtcttggaggaaacccaaatccaggtttggttgatactgtgtaatgtgaatgcaattagtagcggtttttctaaagtagaaagagatg

SEQ ID NO: 77585 - DNA, 390 bp, Homo sapiens
atctcctcccaggtatactcttctggttcttgcttgtacatgttagccaggtcctacagctcctttggtgtctgaatccatttcttaccacagcagtcccagaacttccccagtttgggactgctgaaatttgacccattattgacttgggggaaagatactgtggaaagaaagcattgttttaaagggagcatagagggtatagggaaatctgggatttgagcaagatgtgcaaatgcatatgctaagaagtctacatcctgactcagagttgccacttcctccccactaagtctttcctcctaagactgaaagcaaaacaagggtgcctacatttatcactttcattcaacactgtcctggaggtcacacagcaattgcaataagatg

SEQ ID NO: 77586 - DNA, 770 bp, Homo sapiens
gaggtggaaatggtgggtgtgctgatgtgtttaggttcctaagaaagattggttggtcttccacgttgcttcttggttctctctctgatctccaacttggattcgtgaaacgagagtctgcattgtaaatatgttttccctggccaaggacagatggtaacatttgcctctctttcggcctgctgaatacaaatttgaagccaaacagggacccaaagggaataagggtcccctcaccatcgtgccccttgacacacacccctaattaggatctactcaaatatcatttaccagacactaataaaaatattgagtcctggccaaaaagaaaaataaaaaaaagttgtatgtttgtggaaacttctgtgagtcactctccagcatctaccctgggtcagtgtgttttgctcccagaataagctaaaatttgaatggaagaagaattctaaacaatctaaggaaaaacttaaacagaataacccctgtactctatgacctatgatataagatttgctcctcttaaattattctgagccaagagcaacgtttatagcttaacaccaagcttgttttctgggggtacagttcttatatggactattaagaataaagtgagtttgggctgggcgtggtggctcacgcctgtaatcccagcactttgggaggctgaggtgggtggatcgaggagttcgagaccagcttgggcaacatgatgaaaccccatctctaccaaaaatacaaaaattagccaggtatgatagtgcacacgt

SEQ ID NO: 77587 - DNA, 374 bp, Homo sapiens
gtgaggaagctgaggtggagccccagtctctgcaagggagtgtagcatgttgaaggagggcacatccagtcctcctactgtaaacagctgtgaataaggtgtcaccctgaggcagacggatggctcagctccttaccacatggatggctccttccttccttcttcagggtgcgctggctctccctggaagtttctctgtggaaacaaaaagtggccctggcctggctcaggcttcatcaccattgctccagcctcctccctgcctccagtaggtccctcacatggttccagagggatctttttaagcccggagctgaccccacccttcttgtggctttatgaagaaaagtacaatctgttagcttgtcaaaaaa

SEQ ID NO: 77588 - DNA, 559 bp, Homo sapiens
gagaatgtaggttaaaagaccgaatgaccgcttcaagcactacacatttttcctcctagtgggagagaacagtgtttgtaaataatgatgaatatataggtttttccatttgtgtaccccttttatctgacttcagatttgtagtttgataggtgacctagtctataggattttttttttttttttgagacggagccacctttgtcacccaggctggagtgcagtggtgtgatctcagctcactgcacctctgcctcctgggttcaagcaattctcctgcctcagcctcccgactagctgagattacaggcacacgccaccatgcctaggtaatttttgtattttgagtagaggcaaggttttgccgtgttggccaggctggtcttcaacccctgacctcaggtaatctggcctgccttggcctcccaaagtgttaggattacaggcgtgacacccaagcacagccaagatgttttaaaagagtcatataagagaaattgtaatcctgttttataaagaggacagtgcagggggaaagctgtacccaatccccctgtat

SEQ ID NO: 77589 - DNA, 305 bp, Homo sapiens
tgacctccttctccacatccagccaggggagagtctcagagagccccagcctgctctccgtgctgctgccagaattgttttcctacaacactctcaggaccagggaaacacagaaagctgttttaggggagcatctggcttctgctcctccaactcattctctgcagagcagcaagagtgaagtacctgcgtgtggagaaggaaccggtaacaggtagtattggggaatctgccccgatattcacgtaagttcttttctatttttcctaagcatcggctggcttgagaaataaagggacagagta

SEQ ID NO: 77590 - DNA, 333 bp, Homo sapiens
tcctattgggctaatagagtgtgtgttatgtgtgaaatctttttgaacagtttctttggagattaagttgatttatgaaataatagttagactaagattgatactaaaatatattgttagaaactaactcttcccttagaactgctgtcttttatattgattatgggaaaaggatggtcagtgtacctgactttcaaatatggtaagattcaaaagtaaattgttaattctgctcctcatccccaccatttgtagctctgtgtgtgtgtgtgtgtgtgtgtgtgtgtgtgtgtgtgtgagagagagagagagagagcacacgcacacatgtat

SEQ ID NO: 77591 - DNA, 816 bp, Homo sapiens
ctcagcttgagctcaaagtggaatcatttattcatgaggttgggttacagacagcggtgaaggccccaaccattgtatatgatatgccatgtctaccattcaagcattgacatccccggaagactttccagaaggcaaataatcttcctaaaagttataggtagaaaaagattatagagggctatttagaattcatcagtttccaggtgacaaaatccattattaaaatttgaaagtatgagagaaaagactggtaaacaggactgtagtcgatacagtcaaagctcttcatcagctttccagttctcaggaatttttccagatttcactagatctggaattaataccccattttttttctgtaattaccagcctgatcaaataactgatttggaatcttccatctacctaattgcatccgtgaaggtgctttccctgtgtcttagagacagaatattgagggtacaatcatctgacgacgaaaagaaggcagagaaagataactcctcccagagctcactggctattattagtagcccggctgtgctgtggttggggccacacctcattttggagtgagggtacttctcaccatctcctccatggtttccagcatcagcttcagcttggttgtcattaatttgaattattctgcaatacttggtgatgcatgtgtgtgactaaaattaaaacctatttaggtgaaattttgacagctcgtctctatgaccttgacagccacttagactatctcaagaaggaaagggcttgactgatagtttcctcctccgttttctttgttcatctgagaaaaca

SEQ ID NO: 77592 - DNA, 383 bp, Homo sapiens
tatattaatctcaaaccagaaaaatggagattattaagttgaatttgttagcatttccaagatgaagttgagactgtctttattcatgttcttcgaattaacattaaaaacaaatacatggatagaacgttttctgtgtcatttatttaggcaatgcatcttacagtggtttttgtggtttggtaaataaatacacaaatttattcatggaaaatacagaaaattagtggggcatggtggtgcacacctgtaatcccagctacttgggaggctgaggcaggagaattgcttaaacctgggaggtggaggttgcagtgagccaagatcgtgccactgcactccagcctgcgtgacagagtgagactctgtctcgggaaaaaaaa

SEQ ID NO: 77593 - DNA, 954 bp, Homo sapiens
catttgtggcggcgctggaggctgcgttcggcaggcgctgcggagacgcgtagaggagcgcgccccccggccgctgccgcccctggcccgtgccgtcaccccgcttctccgcgcctcgggcggtacccagccagtccccagcgccgcgctaccgcgctgaccggccctccagacgcctcccggtacccgggaccccagcccggccgctcgcccgcagcccgccggccgcacacgtccccggagccgggcctagggcgggcggcagcggcggctcggcgcagtcaggctgggctctgtagcgtccccatggccgcggccggctggcgggacggctccggccaggagaagtaccggctcgtggtggtcggcgggggcggcgtgggcaagtcggcgctcaccatccagttcatccagtcctattttgtaacggattatgatccaaccattgaagattcttacacaaagcagtgtgtgatagatgacagagcagcccggctagatattttggatacagcaggacaagaagagtttggagccatgagagaacagtatatgaggactggcgaaggcttcctgttggtcttttcagtcacagatagaggcagttttgaagaaatctataagtttcaaagacagattctcagagtaaaggatcgtgatgagttcccaatgattttaattggtaataaagcagatctggatcatcaaagacaggtaaccgggagaaaggccaccgtttgacgcgcgctaaagggaactacatggggggctcctccagattgtggcatgacggttggatcaagcactctcctgaaactggcccggcgtatcacgcaaatctcgacacgcgagagttgtccctcaccgaaagcacgtggaggacgaagcgacaacggggctaggggctcctcaaaacctctcttgatccgcccggagaacgctcccgctacccca

SEQ ID NO: 77594 - DNA, 2336 bp, Homo sapiens
catttgtggcggcgctggaggctgcgttcggcaggcgctgcggagacgcgtagaggagcgcgccccccggccgctgccgcccctggcccgtgccgtcaccccgcttctccgcgcctcgggcggtacccagccagtccccagcgccgcgctaccgcgctgaccggccctccagacgcctcccggtacccgggaccccagcccggccgctcgcccgcagcccgccggccgcacacgtccccggagccgggcctagggcgggcggcagcggcggctcggcgcagtcaggctgggctctgtagcgtccccatggccgcggccggctggcgggacggctccggccaggagaagtaccggctcgtggtggtcggcgggggcggcgtgggcaagtcggcgctcaccatccagttcatccagtcctattttgtaacggattatgatccaaccattgaagattcttacacaaagcagtgtgtgatagatgacagagcagcccggctagatattttggatacagcaggacaagaagagtttggagccatgagagaacagtatatgaggactggcgaaggcttcctgttggtcttttcagtcacagatagaggcagttttgaagaaatctataagtttcaaagacagattctcagagtaaaggatcgtgatgagttcccaatgattttaattggtaataaagcagatctggatcatcaaagacaggtaacacaggaagaaggacaacagttagcacggcagcttaaggtaacatacatggaggcatcagcaaagattaggatgaatgtagatcaagctttccatgaacttgtccgggttatcaggaaatttcaagagcaggaatgtcctccttcaccagaaccaacacggaaagaaaaagacaagaaaggctgccattgtgtcattttctagaatcccttcagttttagctaccaacggccaggaaaagccctcatcttctctttctctcctcagtttacatcttgttggtacctttctagccttagacaaatgatcaccatgttagccttagacgaagaagctggctagtcctttctgtgaagctaatacaatggtcatttccagacaaatttaaaggaaacactaaggctgcttcaaagattatctgattcctttaaaatatatgtctatatacacagacatgctctttttttaagtgcttacattttaatagagatgaatcagttttggaatctaagctgtttgccaagctgaagctacaggttgtgaaataatttttaacttttggaatcatactgcctactgttactctaaatagaaatatagggttttttttaatgtgaatttttgcctatctttaaacatttcaatgtcagcctttgttaaccttaaatacactgaattgaatctacaaaagtgaaccatctcagacctttactgatactacaacttttgttttctgatggccaaaataccaaatgcctgttgtatttatggattaaaaactgcttataaaaccctgtgttactactcctactcttggagatgataatattctatgtggtcaaatatttggactcatttaggacttagatatttcagtgtacttgattttttaatttaactctttttcacagccacgctaagggtaaaaaggaataatttccttctgtcttccttttcaagtatttctgggtaagggattcaaaaaactaaaactgtttttgtttgtaatataaaatatggaattgatctttccagggtcagagatgattaatgtttttgctatatacttttatacattattttcttatcaaactagttaacaagtatttttatatgtttgtaagcagatatgctttcatagcataccttgtgtatatgtaaagataagtatttaattctcactgttcacttttaactgacaaagaaaaacaagtggaaactacagaaactgtggtagaacttttacttgctggtctggtcttggttgtacccatctttggccagtcacataactactcaagaaaccttcccaatagagtacaacaggatgagactctgaaatcactttcagtattccctgctagatattgattgttatttcaagtattaagtgtaagcttttaatggataattagtataactgtggatggcatctgattttgtttttaattctgtggattgtgtttaagcaattcaatagtatgttcctgattttgagatgctaagtggtattgcacagttgtcactttatcaagtgtgtacaacagtcccatgaagtttatagagcatacccttgtatagcttcaggtgctagaattaaaattgatctgttatcacaa

SEQ ID NO: 77595 - DNA, 2355 bp, Homo sapiens
cacaaatatgtatagctcgagtcctggttgtatttcagtactgaggggctgcggttacgctgtaattgactcgcgcccttgcgtgctgcattcgcacgcccctggcccgtgccgtcaccccgcttctccgcgcctcgggcggtacccagccagtccccagcgccgcgctaccgcgctgaccggccctccagacgcctcccggtacccgggaccccagcccggccgctcgcccgcagcccgccggccgcacacgtccccggagccgggcctagggcgggcggcagcggcggctcggcgcagtcaggctgggctctgtagcgtccccatggccgcggccggctggcgggacggctccggccaggagaagtaccggctcgtggtggtcggcgggggcggcgtgggcaagtcggcgctcaccatccagttcatccagtcctattttgtaacggattatgatccaaccattgaagattcttacacaaagcagtgtgtgatagatgacagagcagcccggctagatattttggatacagcaggacaagaagagtttggagccatgagagaacagtatatgaggactggcgaaggcttcctgttggtcttttcagtcacagatagaggcagttttgaagaaatctataagtttcaaagacagattctcagagtaaaggatcgtgatgagttcccaatgattttaattggtaataaagcagatctggatcatcaaagacaggtaacacaggaagaaggacaacagttagcacggcagcttaaggtaacatacatggaggcatcagcaaagattaggatgaatgtagatcaagctttccatgaacttgtccgggttatcaggaaatttcaagagcaggaatgtcctccttcaccagaaccaacacggaaagaaaaagacaagaaaggctgccattgtgtcattttctagaatcccttcagttttagctaccaacggccaggaaaagccctcatcttctctttctctcctcagtttacatcttgttggtacctttctagccttagacaaatgatcaccatgttagccttagacgaagaagctggctagtcctttctgtgaagctaatacaatggtcatttccagacaaatttaaaggaaacactaaggctgcttcaaagattatctgattcctttaaaatatatgtctatatacacagacatgctctttttttaagtgcttacattttaatagagatgaatcagttttggaatctaagctgtttgccaagctgaagctacaggttgtgaaataatttttaacttttggaatcatactgcctactgttactctaaatagaaatatagggttttttttaatgtgaatttttgcctatctttaaacatttcaatgtcagcctttgttaaccttaaatacactgaattgaatctacaaaagtgaaccatctcagacctttactgatactacaacttttgttttctgatggccaaaataccaaatgcctgttgtatttatggattaaaaactgcttataaaaccctgtgttactactcctactcttggagatgataatattctatgtggtcaaatatttggactcatttaggacttagatatttcagtgtacttgattttttaatttaactctttttcacagccacgctaagggtaaaaaggaataatttccttctgtcttccttttcaagtatttctgggtaagggattcaaaaaactaaaactgtttttgtttgtaatataaaatatggaattgatctttccagggtcagagatgattaatgtttttgctatatacttttatacattattttcttatcaaactagttaacaagtatttttatatgtttgtaagcagatatgctttcatagcataccttgtgtatatgtaaagataagtatttaattctcactgttcacttttaactgacaaagaaaaacaagtggaaactacagaaactgtggtagaacttttacttgctggtctggtcttggttgtacccatctttggccagtcacataactactcaagaaaccttcccaatagagtacaacaggatgagactctgaaatcactttcagtattccctgctagatattgattgttatttcaagtattaagtgtaagcttttaatggataattagtataactgtggatggcatctgattttgtttttaattctgtggattgtgtttaagcaattcaatagtatgttcctgattttgagatgctaagtggtattgcacagttgtcactttatcaagtgtgtacaacagtcccatgaagtttatagagcatacccttgtatagcttcaggtgctagaattaaaattgatctgttatcacaa

SEQ ID NO: 77596 - DNA, 2961 bp, Homo sapiens
  misc_feature (2795)..(2795): n is a, c, g, or t
catttgtggcggcgctggaggctgcgttcggcaggcgctgcggagacgcgtagaggagcgcgccccccggccgctgccgcccctggcccgtgccgtcaccccgcttctccgcgcctcgggcggtacccagccagtccccagcgccgcgctaccgcgctgaccggccctccagacgcctcccggtacccgggaccccagcccggccgctcgcccgcagcccgccggccgcacacgtccccggagccgggcctagggcgggcggcagcggcggctcggcgcagtcaggctgggctctgtagcgtccccatggccgcggccggctggcgggacggctccggccaggagaagtaccggctcgtggtggtcggcgggggcggcgtgggcaagtcggcgctcaccatccagttcatccagtcctattttgtaacggattatgatccaaccattgaagattcttacacaaagcagtgtgtgatagatgacagagcagcccggctagatattttggatacagcaggacaagaagagtttggagccatgagagaacagtatatgaggactggcgaaggcttcctgttggtcttttcagtcacagatagaggcagttttgaagaaatctataagtttcaaagacagattctcagagtaaaggatcgtgatgagttcccaatgattttaattggtaataaagcagatctggatcatcaaagacaggtaacacaggaagaaggacaacagttagcacggcagcttaaggtaacatacatggaggcatcagcaaagattaggatgaatgtagatcaagctttccatgaacttgtccgggttatcaggaaatttcaagagcaggaatgtcctccttcaccagaaccaacacggaaagaaaaagacaagaaaggctgccattgtgtcattttctagaatcccttcagttttagctaccaacggccaggaaaagccctcatcttctctttctctcctcagtttacatcttgttggtacctttctagccttagacaaatgatcaccatgttagccttagacgaagaagctggctagtcctttctgtgaagctaatacaatggtcatttccagacaaatttaaaggaaacactaaggctgcttcaaagattatctgattcctttaaaatatatgtctatatacacagacatgctctttttttaagtgcttacattttaatagagatgaatcagttttggaatctaagctgtttgccaagctgaagctacaggttgtgaaataatttttaacttttggaatcatactgcctactgttactctaaatagaaatatagggttttttttaatgtgaatttttgcctatctttaaacatttcaatgtcagcctttgttaaccttaaatacactgaattgaatctacaaaagtgaaccatctcagacctttactgatactacaacttttgttttctgatggccaaaataccaaatgcctgttgtatttatggattaaaaactgcttataaaaccctgtgttactactcctactcttggagatgataatattctatgtggtcaaatatttggactcatttaggacttagatatttcagtgtacttgattttttaatttaactctttttcacagccacgctaagggtaaaaaggaataatttccttctgtcttccttttcaagtatttctgggtaagggattcaaaaaactaaaactgtttttgtttgtaatataaaatatggaattgatctttccagggtcagagatgattaatgtttttgctatatacttttatacattattttcttatcaaactagttaacaagtatttttatatgtttgtaagcagatatgctttcatagcataccttgtgtatatgtaaagataagtatttaattctcactgttcacttttaactgacaaagaaaaacaagtggaaactacagaaactgtggtagaacttttacttgctggtctggtcttggttgtacccatctttggccagtcacataactactcaagaaaccttcccaatagagtacaacaggatgagactctgaaatcactttcagtattccctgctagatattgattgttatttcaagtattaagtgtaagcttttaatggataattagtataactgtggatggcatctgattttgtttttaattctgtggattgtgtttaagcaattcaatagtatgttcctgattttgagatgctaagtggtattgcacagttgtcactttatcaagtgtgtacaacagtcccatgaagtttatagagcatacccttgtatagcttcaggtgctagaattaaaattgatctgttatcacaaaaaaaaaaaccacaaacaaacaacccaccaaaaaaaacacaccacaaaacacaaccaaaaaaacacaaacaaacctttgtgtggccgaccgacattctgccactacagcaaaaaactttttataaaaaaaccccttatctagtggaggggcgggaagaccacaccagtgaggtaaagagcacaacacgtgctgcacaatatgcgtgttacaacagaaaaaaacatctcgtggtgaaaatacaagaccagggggtggaggtacccccacacccaataaaaaaacggagcgcggggggaggacacaacgagggcgcgctttctcacaaacaaaccacaaaaagaggagggtacacggcgaagagccataacaacgaagagggcgcttacactacacagccaaaggacgtgttccaaacaagcagggcagactcgccctatatataaaaaaaacccgccgcnggcgatcggcgtggcagggacgcgagcgacgacagacaacaagaacaaagcagcacaagaaagacaaacggcagagtagcagcaagataccagcacaccacacgaagcacgcagatagatgcacgactcacagcgagcgagaggcaacgaacgacaagcaaacgcc

SEQ ID NO: 77597 - DNA, 1987 bp, Homo sapiens
  misc_feature (13)..(13): n is a, c, g, or t
gacccacgcgtcngcttctgatccccatggtttctgatgagaaatctgctgtttttctcctgtagtcctattttgtaacggattatgatccaaccattgaagattcttacacaaagcagtgtgtgatagatgacagagcagcccggctagatattttggatacagcaggacaagaagagtttggagccatgagagaacagtatatgaggactggcgaaggcttcctgttggtcttttcagtcacagatagaggcagttttgaagaaatctataagtttcaaagacagattctcagagtaaaggatcgtgatgagttcccaatgattttaattggtaataaagcagatctggatcatcaaagacaggtaacacaggaagaaggacaacagttagcacggcagcttaaggtaacatacatggaggcatcagcaaagattaggatgaatgtagatcaagctttccatgaacttgtccgggttatcaggaaatttcaagagcaggaatgtcctccttcaccagaaccaacacggaaagaaaaagacaagaaaggctgccattgtgtcattttctagaatcccttcagttttagctaccaacggccaggaaaagccctcatcttctctttctctcctcagtttacatcttgttggtacctttctagccttagacaaatgatcaccatgttagccttagacgaagaagctggctagtcctttctgtgaagctaatacaatggtcatttccagacaaatttaaaggaaacactaaggctgcttcaaagattatctgattcctttaaaatatatgtctatatacacagacatgctctttttttaagtgcttacattttaatagagatgaatcagttttggaatctaagctgtttgccaagctgaagctacaggttgtgaaataatttttaacttttggaatcatactgcctactgttactctaaatagaaatatagggttttttttaatgtgaatttttgcctatctttaaacatttcaatgtcagcctttgttaaccttaaatacactgaattgaatctacaaaagtgaaccatctcagacctttactgatactacaacttttgttttctgatggccaaaataccaaatgcctgttgtatttatggattaaaaactgcttataaaaccctgtgttactactcctactcttggagatgataatattctatgtggtcaaatatttggactcatttaggacttagatatttcagtgtacttgattttttaatttaactctttttcacagccacgctaagggtaaaaaggaataatttccttctgtcttccttttcaagtatttctgggtaagggattcaaaaaactaaaactgtttttgtttgtaatataaaatatggaattgatctttccagggtcagagatgattaatgtttttgctatatacttttatacattattttcttatcaaactagttaacaagtatttttatatgtttgtaagcagatatgctttcatagcataccttgtgtatatgtaaagataagtatttaattctcactgttcacttttaactgacaaagaaaaacaagtggaaactacagaaactgtggtagaacttttacttgctggtctggtcttggttgtacccatctttggccagtcacataactactcaagaaaccttcccaatagagtacaacaggatgagactctgaaatcactttcagtattccctgctagatattgattgttatttcaagtattaagtgtaagcttttaatggataattagtataactgtggatggcatctgattttgtttttaattctgtggattgtgtttaagcaattcaatagtatgttcctgattttgagatgctaagtggtattgcacagttgtcactttatcaagtgtgtacaacagtcccatgaagtttatagagcatacccttgtatagcttcaggtgctagaattaaaattgatctgttatcacaa

SEQ ID NO: 77598 - DNA, 2194 bp, Homo sapiens
cgggagggcggagctggaagggtgggaagcaccgatccaccttattgctctggccgaggccagagacctccgggagaggctgggccaccgagccgggctttactgctccgagggtccgggcgtggggctggagctggagccccgcgcgctgcttttccagccgcctgcggccgcgccttcaccgtcggggcgatagcggtggcaacttggccgcggctccgcgtggtctccgggcttccccgcgccgcctgagccggagctgcccgcttcaatcctattttgtaacggattatgatccaaccattgaagattcttacacaaagcagtgtgtgatagatgacagagcagcccggctagatattttggatacagcaggacaagaagagtttggagccatgagagaacagtatatgaggactggcgaaggcttcctgttggtcttttcagtcacagatagaggcagttttgaagaaatctataagtttcaaagacagattctcagagtaaaggatcgtgatgagttcccaatgattttaattggtaataaagcagatctggatcatcaaagacaggtaacacaggaagaaggacaacagttagcacggcagcttaaggtaacatacatggaggcatcagcaaagattaggatgaatgtagatcaagctttccatgaacttgtccgggttatcaggaaatttcaagagcaggaatgtcctccttcaccagaaccaacacggaaagaaaaagacaagaaaggctgccattgtgtcattttctagaatcccttcagttttagctaccaacggccaggaaaagccctcatcttctctttctctcctcagtttacatcttgttggtacctttctagccttagacaaatgatcaccatgttagccttagacgaagaagctggctagtcctttctgtgaagctaatacaatggtcatttccagacaaatttaaaggaaacactaaggctgcttcaaagattatctgattcctttaaaatatatgtctatatacacagacatgctctttttttaagtgcttacattttaatagagatgaatcagttttggaatctaagctgtttgccaagctgaagctacaggttgtgaaataatttttaacttttggaatcatactgcctactgttactctaaatagaaatatagggttttttttaatgtgaatttttgcctatctttaaacatttcaatgtcagcctttgttaaccttaaatacactgaattgaatctacaaaagtgaaccatctcagacctttactgatactacaacttttgttttctgatggccaaaataccaaatgcctgttgtatttatggattaaaaactgcttataaaaccctgtgttactactcctactcttggagatgataatattctatgtggtcaaatatttggactcatttaggacttagatatttcagtgtacttgattttttaatttaactctttttcacagccacgctaagggtaaaaaggaataatttccttctgtcttccttttcaagtatttctgggtaagggattcaaaaaactaaaactgtttttgtttgtaatataaaatatggaattgatctttccagggtcagagatgattaatgtttttgctatatacttttatacattattttcttatcaaactagttaacaagtatttttatatgtttgtaagcagatatgctttcatagcataccttgtgtatatgtaaagataagtatttaattctcactgttcacttttaactgacaaagaaaaacaagtggaaactacagaaactgtggtagaacttttacttgctggtctggtcttggttgtacccatctttggccagtcacataactactcaagaaaccttcccaatagagtacaacaggatgagactctgaaatcactttcagtattccctgctagatattgattgttatttcaagtattaagtgtaagcttttaatggataattagtataactgtggatggcatctgattttgtttttaattctgtggattgtgtttaagcaattcaatagtatgttcctgattttgagatgctaagtggtattgcacagttgtcactttatcaagtgtgtacaacagtcccatgaagtttatagagcatacccttgtatagcttcaggtgctagaattaaaattgatctgttatcacaa

SEQ ID NO: 77599 - DNA, 1951 bp, Homo sapiens
  misc_feature (26)..(26): n is a, c, g, or t
  misc_feature (29)..(29): n is a, c, g, or t
cggcgaattcgtggtgctgctcgctncantcctattttgtaacggattatgatccaaccattgaagattcttacacaaagcagtgtgtgatagatgacagagcagcccggctagatattttggatacagcaggacaagaagagtttggagccatgagagaacagtatatgaggactggcgaaggcttcctgttggtcttttcagtcacagatagaggcagttttgaagaaatctataagtttcaaagacagattctcagagtaaaggatcgtgatgagttcccaatgattttaattggtaataaagcagatctggatcatcaaagacaggtaacacaggaagaaggacaacagttagcacggcagcttaaggtaacatacatggaggcatcagcaaagattaggatgaatgtagatcaagctttccatgaacttgtccgggttatcaggaaatttcaagagcaggaatgtcctccttcaccagaaccaacacggaaagaaaaagacaagaaaggctgccattgtgtcattttctagaatcccttcagttttagctaccaacggccaggaaaagccctcatcttctctttctctcctcagtttacatcttgttggtacctttctagccttagacaaatgatcaccatgttagccttagacgaagaagctggctagtcctttctgtgaagctaatacaatggtcatttccagacaaatttaaaggaaacactaaggctgcttcaaagattatctgattcctttaaaatatatgtctatatacacagacatgctctttttttaagtgcttacattttaatagagatgaatcagttttggaatctaagctgtttgccaagctgaagctacaggttgtgaaataatttttaacttttggaatcatactgcctactgttactctaaatagaaatatagggttttttttaatgtgaatttttgcctatctttaaacatttcaatgtcagcctttgttaaccttaaatacactgaattgaatctacaaaagtgaaccatctcagacctttactgatactacaacttttgttttctgatggccaaaataccaaatgcctgttgtatttatggattaaaaactgcttataaaaccctgtgttactactcctactcttggagatgataatattctatgtggtcaaatatttggactcatttaggacttagatatttcagtgtacttgattttttaatttaactctttttcacagccacgctaagggtaaaaaggaataatttccttctgtcttccttttcaagtatttctgggtaagggattcaaaaaactaaaactgtttttgtttgtaatataaaatatggaattgatctttccagggtcagagatgattaatgtttttgctatatacttttatacattattttcttatcaaactagttaacaagtatttttatatgtttgtaagcagatatgctttcatagcataccttgtgtatatgtaaagataagtatttaattctcactgttcacttttaactgacaaagaaaaacaagtggaaactacagaaactgtggtagaacttttacttgctggtctggtcttggttgtacccatctttggccagtcacataactactcaagaaaccttcccaatagagtacaacaggatgagactctgaaatcactttcagtattccctgctagatattgattgttatttcaagtattaagtgtaagcttttaatggataattagtataactgtggatggcatctgattttgtttttaattctgtggattgtgtttaagcaattcaatagtatgttcctgattttgagatgctaagtggtattgcacagttgtcactttatcaagtgtgtacaacagtcccatgaagtttatagagcatacccttgtatagcttcaggtgctagaattaaaattgatctgttatcacaa

SEQ ID NO: 77600 - DNA, 1780 bp, Homo sapiens
agaggatccccggtgtatcctttgtcttttcagtcacagatagaggcagttttgaagaaatctataagtttcaaagacagattctcagagtaaaggatcgtgatgagttcccaatgattttaattggtaataaagcagatctggatcatcaaagacaggtaacacaggaagaaggacaacagttagcacggcagcttaaggtaacatacatggaggcatcagcaaagattaggatgaatgtagatcaagctttccatgaacttgtccgggttatcaggaaatttcaagagcaggaatgtcctccttcaccagaaccaacacggaaagaaaaagacaagaaaggctgccattgtgtcattttctagaatcccttcagttttagctaccaacggccaggaaaagccctcatcttctctttctctcctcagtttacatcttgttggtacctttctagccttagacaaatgatcaccatgttagccttagacgaagaagctggctagtcctttctgtgaagctaatacaatggtcatttccagacaaatttaaaggaaacactaaggctgcttcaaagattatctgattcctttaaaatatatgtctatatacacagacatgctctttttttaagtgcttacattttaatagagatgaatcagttttggaatctaagctgtttgccaagctgaagctacaggttgtgaaataatttttaacttttggaatcatactgcctactgttactctaaatagaaatatagggttttttttaatgtgaatttttgcctatctttaaacatttcaatgtcagcctttgttaaccttaaatacactgaattgaatctacaaaagtgaaccatctcagacctttactgatactacaacttttgttttctgatggccaaaataccaaatgcctgttgtatttatggattaaaaactgcttataaaaccctgtgttactactcctactcttggagatgataatattctatgtggtcaaatatttggactcatttaggacttagatatttcagtgtacttgattttttaatttaactctttttcacagccacgctaagggtaaaaaggaataatttccttctgtcttccttttcaagtatttctgggtaagggattcaaaaaactaaaactgtttttgtttgtaatataaaatatggaattgatctttccagggtcagagatgattaatgtttttgctatatacttttatacattattttcttatcaaactagttaacaagtatttttatatgtttgtaagcagatatgctttcatagcataccttgtgtatatgtaaagataagtatttaattctcactgttcacttttaactgacaaagaaaaacaagtggaaactacagaaactgtggtagaacttttacttgctggtctggtcttggttgtacccatctttggccagtcacataactactcaagaaaccttcccaatagagtacaacaggatgagactctgaaatcactttcagtattccctgctagatattgattgttatttcaagtattaagtgtaagcttttaatggataattagtataactgtggatggcatctgattttgtttttaattctgtggattgtgtttaagcaattcaatagtatgttcctgattttgagatgctaagtggtattgcacagttgtcactttatcaagtgtgtacaacagtcccatgaagtttatagagcatacccttgtatagcttcaggtgctagaattaaaattgatctgttatcacaa

SEQ ID NO: 77601 - DNA, 1462 bp, Homo sapiens
  misc_feature (1415)..(1415): n is a, c, g, or t
  misc_feature (1462)..(1462): n is a, c, g, or t
catttgtggcggcgctggaggctgcgttcggcaggcgctgcggagacgcgtagaggagcgcgccccccggccgctgccgcccctggcccgtgccgtcaccccgcttctccgcgcctcgggcggtacccagccagtccccagcgccgcgctaccgcgctgaccggccctccagacgcctcccggtacccgggaccccagcccggccgctcgcccgcagcccgccggccgcacacgtccccggagccgggcctagggcgggcggcagcggcggctcggcgcagtcaggctgggctctgtagcgtccccatggccgcggccggctggcgggacggctccggccaggagaagtaccggctcgtggtggtcggcgggggcggcgtgggcaagtcggcgctcaccatccagttcatccagtcctattttgtaacggattatgatccaaccattgaagattcttacacaaagcagtgtgtgatagatgacagagcagcccggctagatattttggatacagcaggacaagaagagtttggagccatgagagaacagtatatgaggactggcgaaggcttcctgttggtcttttcagtcacagatagaggcagttttgaagaaatctataagtttcaaagacagattctcagagtaaaggatcgtgatgagttcccaatgattttaattggtaataaagcagatctggatcatcaaagacaggtaacacaggaagaaggacaacagttagcacggcagcttaaggtaacatacatggaggcatcagcaaagattaggatgaatgtagatcaagctttccatgaacttgtccgggttatcaggaaatttcaagagcaggaatgtcctccttcaccagaaccaacacggaaagaaaaagacaagaaaggctgccattgtgtcattttctagaatcccttcagttttagctaccaacggccaggaaaagccctcatcttctctttctctcctcagtttacatcttgttggtacctttctagccttagacaaatgatcaccatgttagccttagacgaagaagctggctagtcctttctgtgaagctaatacaatggtcatttccagacaaatttaaaggaaacactaaggctgcttcaaagattatctgattcctttaaaatatatgtctatatacacagacatgctctttttttaagtgcttacattttaatagagatgaatcagttttggaatctaagctgtttgccaagctgaagctacaggttgtgaaataatttttaacttttggaatcatactgcctactgttactctaaatagaaatatagggttttttttaatgtgaatttttgcctatctttaaacatttcaatgtcagcctttgttaaccttaatccctgattgattacaaaggaccattagaccnactgactcactttgttttatggctactgccgtgattatgatctgttn

SEQ ID NO: 77602 - DNA, 438 bp, Homo sapiens
caccctccacccctcaactccatactctgttatcttctgggcttaaatgtcacttcctcagggaagctttcgctcatctccctgacagggttgtatactttaatagcaccttacactttcccttcccagaatgtattactgttgtatttaatactttttgtgtgatctgtatttggaaatattgttgtaggctagtatttccatcacagatatgttcttctgcattgttctgcagaggtgggctttagtttatcttgagctgttaagtctgttgtttcaccttatgataaaacaacttggcctcttggctgaattattagcacaatctgtggccaggattagatggaacaaatccagttgttaataatgtaccataaacataactgttggaatttcaggtaacacaggaagaaggacaacagttagcacggcagctta

SEQ ID NO: 77603 - DNA, 2416 bp, Homo sapiens
  misc_feature (2)..(2): n is a, c, g, or t
  misc_feature (476)..(476): n is a, c, g, or t
anagacagaagaaaaaaagcagggggaacgggccggaaatgcgggttcgtgtggggggagcgttcttgggggccgcccctggcccgtgccgtcaccccgcttctccgcgcctcgggcggtacccagccagtccccagcgccgcgctaccgcgctgaccggccctccagacgcctcccggtacccgggaccccagcccggccgctcgcccgcagcccgccggccgcacacgtccccggagccgggcctagggcgggcggcagcggcggctcggcgcagtcaggctgggctctgtagcgtccccatggccgcggccggctggcgggacggctccggccaggagaagtaccggctcgtggtggtcggcgggggcggcgtgggcaagtcggcgctcaccatccagttcatccagaatcatttgttgaagaaatacctccactgtgaatagtatagtacctggatgctctagatgatattnaagaagtaaaggaagcagtcctattttgtaacggattatgatccaaccattgaagattcttacacaaagcagtgtgtgatagatgacagagcagcccggctagatattttggatacagcaggacaagaagagtttggagccatgagagaacagtatatgaggactggcgaaggcttcctgttggtcttttcagtcacagatagaggcagttttgaagaaatctataagtttcaaagacagattctcagagtaaaggatcgtgatgagttcccaatgattttaattggtaataaagcagatctggatcatcaaagacaggtaacacaggaagaaggacaacagttagcacggcagcttaaggtaacatacatggaggcatcagcaaagattaggatgaatgtagatcaagctttccatgaacttgtccgggttatcaggaaatttcaagagcaggaatgtcctccttcaccagaaccaacacggaaagaaaaagacaagaaaggctgccattgtgtcattttctagaatcccttcagttttagctaccaacggccaggaaaagccctcatcttctctttctctcctcagtttacatcttgttggtacctttctagccttagacaaatgatcaccatgttagccttagacgaagaagctggctagtcctttctgtgaagctaatacaatggtcatttccagacaaatttaaaggaaacactaaggctgcttcaaagattatctgattcctttaaaatatatgtctatatacacagacatgctctttttttaagtgcttacattttaatagagatgaatcagttttggaatctaagctgtttgccaagctgaagctacaggttgtgaaataatttttaacttttggaatcatactgcctactgttactctaaatagaaatatagggttttttttaatgtgaatttttgcctatctttaaacatttcaatgtcagcctttgttaaccttaaatacactgaattgaatctacaaaagtgaaccatctcagacctttactgatactacaacttttgttttctgatggccaaaataccaaatgcctgttgtatttatggattaaaaactgcttataaaaccctgtgttactactcctactcttggagatgataatattctatgtggtcaaatatttggactcatttaggacttagatatttcagtgtacttgattttttaatttaactctttttcacagccacgctaagggtaaaaaggaataatttccttctgtcttccttttcaagtatttctgggtaagggattcaaaaaactaaaactgtttttgtttgtaatataaaatatggaattgatctttccagggtcagagatgattaatgtttttgctatatacttttatacattattttcttatcaaactagttaacaagtatttttatatgtttgtaagcagatatgctttcatagcataccttgtgtatatgtaaagataagtatttaattctcactgttcacttttaactgacaaagaaaaacaagtggaaactacagaaactgtggtagaacttttacttgctggtctggtcttggttgtacccatctttggccagtcacataactactcaagaaaccttcccaatagagtacaacaggatgagactctgaaatcactttcagtattccctgctagatattgattgttatttcaagtattaagtgtaagcttttaatggataattagtataactgtggatggcatctgattttgtttttaattctgtggattgtgtttaagcaattcaatagtatgttcctgattttgagatgctaagtggtattgcacagttgtcactttatcaagtgtgtacaacagtcccatgaagtttatagagcatacccttgtatagcttcaggtgctagaattaaaattgatctgttatcacaa

SEQ ID NO: 77604 - DNA, 1504 bp, Homo sapiens
catttgtggcggcgctggaggctgcgttcggcaggcgctgcggagacgcgtagaggagcgcgccccccggccgctgccgcccctggcccgtgccgtcaccccgcttctccgcgcctcgggcggtacccagccagtccccagcgccgcgctaccgcgctgaccggccctccagacgcctcccggtacccgggaccccagcccggccgctcgcccgcagcccgccggccgcacacgtccccggagccgggcctagggcgggcggcagcggcggctcggcgcagtcaggctgggctctgtagcgtccccatggccgcggccggctggcgggacggctccggccaggagaagtaccggctcgtggtggtcggcgggggcggcgtgggcaagtcggcgctcaccatccagttcatccagtcctattttgtaacggattatgatccaaccattgaagattcttacacaaagcagtgtgtgatagatgacagagcagcccggctagatattttggatacagcaggacaagaagagtttggagccatgagagaacagtatatgaggactggcgaaggcttcctgttggtcttttcagtcacagatagaggcagttttgaagaaatctataagtttcaaagacagattctcagagtaaaggatcgtgatgagttcccaatgattttaattggtaataaagcagatctggatcatcaaagacaggtaacacaggaagaaggacaacagttagcacggcagcttaaggtaacatacatggaggcatcagcaaagattaggatgaatgtagatcaagctttccatgaacttgtccgggttatcaggaaatttcaagagcaggaatgtcctccttcaccagaaccaacacggaaagaaaaagacaagaaaggctgccattgtgtcattttctagaatcccttcagttttagctaccaacggccaggaaaagccctcatcttctctttctctcctcagtttacatcttgttggtacctttctagccttagacaaatgatcaccatgttagccttagacgaagaagctggctagtcctttctgtgaagctaatacaatggtcatttccagacaaatttaaaggaaacactaaggctgcttcaaagattatctgattcctttaaaatatatgtctatatacacagacatgctctttttttaagtgcttacattttaatagagatgaatcagttttggaatctaagctgtttgccaagctgaagctacaggttgtgaaataatttttaacttttggaatcatactgcctactgttactctaaatagaaatatagggttttttttaatgtgaatttttgcctatctttaaacatttcaatgtcagcctttgttaaccttaaatacactgaattgaatctacaaaagtgaaccatctcagacctttactgatactacaacttttgttttctgatggccaaaataccaaatgcctgttgtatttatggattaaaaactgcttat

SEQ ID NO: 77605 - DNA, 754 bp, Homo sapiens
agcagattgggcagccaccaccattgagaggaagaaggacaactgggcagagcagtaaaacatcaagcagatgaccaccaagagtggtgagccagacatggccatattctataggaaaggggaagaagataaggtggataaatcagagaaatgtggggtttcaaagaaagaaccagattcataaggaaaaaagacgaaagaaacaacgttagatgtcctcagaggttcagcagcatttaaggatccaagtctcttggatttggtggtttggatgtgtgtaaccttcttaagtggcaagggcagaaggtagacagagaagtgtagcagagtcagtgggcaattgtggtgggaaggaaggaggtaaaatggttgctccgagaagagccagagtaaaatggagacttgtgttttttagtccgcagggaagtgaactaagtttgtaaacctgaagggtgagatccagccatgaaggaaagatgttgaggagctaatgtaagccacaagccaaatcagagttttgggaccaagagtacaagttgatgagttagcatcgaaggagtgaaaagacactttcatcctgagacaggagagaaataacaaatagacagtggaggagaaacttgaggtccagaggagaggggttgcagtatgtcccctggctgttctgccttctccaccgatgtgtagtgggtgttggagtttcactaaagaagtctccatttcaagaatgcaggttggatgcaacccatttcaa

SEQ ID NO: 77606 - DNA, 4755 bp, Homo sapiens
gaggcggctggggcgttgctgtcgtgcgtccgcaggcgtcaggtgctcagacccgagggccgggaagggatttgggtttcacaggaacctggggcgggggtccgctatcttggggctgtcgggaccgctgcttaaatttggcccagtccagacctcgagtcgggcccccagccaggcccacgcccaggtccaggcccaggccggtagggatcctctagggtcccagctcgcctcgatggagctcctcccgccgctgcctcagtccttcctgttgctgctgctgttgcctgccaagcccgcggcgggcgaggactggcagtgcccgcgcaccccctacgcggcctctcgcgactttgacgtgaagtacgtggtgcccagcttctccgccggaggcctggtacaggccatggtgacctacgagggcgacagaaatgagagtgctgtgtttgtagccatacgcaatcgcctgcatgtgcttgggcctgacctgaagtctgtccagagcctggccacgggccctgctggagaccctggctgccagacgtgtgcagcctgtggcccaggaccccacggccctcccggtgacacagacacaaaggtgctggtgctggatcccgcgctgcctgcgctggtcagttgtggctccagcctgcagggccgctgcttcctgcatgacctagagccccaagggacagccgtgcatctggcagcgccagcctgcctcttctcagcccaccataaccggcccgatgactgccccgactgtgtggccagcccattgggcacccgtgtaactgtggttgagcaaggccaggcctcctatttctacgtggcatcctcactggacgcagccgtggctggcagcttcagcccacgctcagtgtctatcaggcgtctcaaggctgacgcctcgggattcgcaccgggctttgtggcgttgtcagtgctgcccaagcatcttgtctcctacagtattgaatacgtgcacagcttccacacgggagccttcgtatacttcctgactgtacagccggccagcgtgacagatgatcctagtgccctgcacacacgcctggcacggcttagcgccactgagccagagttgggtgactatcgggagctggtcctcgactgcagatttgctccaaaacgcaggcgccggggggccccagaaggcggacagccctaccctgtgctgcaggtggcccactccgctccagtgggtgcccaacttgccactgagctgagcatcgccgagggccaggaagtactatttggggtctttgtgactggcaaggatggtggtcctggcgtgggccccaactctgtcgtctgtgccttccccattgacctgctggacacactaattgatgagggtgtggagcgctgttgtgaatccccagtccatccaggcctccggcgaggcctcgacttcttccagtcgcccagtttttgccccaacccgcctggcctggaagccctcagccccaacaccagctgccgccacttccctctgctggtcagtagcagcttctcacgtgtggacctattcaatgggctgttgggaccagtacaggtcactgcattgtatgtgacacgccttgacaacgtcacagtggcacacatgggcacaatggatgggcgtatcctgcaggtggagctggtcaggtcactaaactacttgctgtatgtgtccaacttctcactgggtgacagtgggcagcccgtgcagcgggatgtcagtcgtcttggggaccacctactctttgcctctggggaccaggttttccaggtacctatccgaggccctggctgccgccacttcctgacctgtgggcgttgcctaagggcatggcatttcatgggctgtggctggtgtgggaacatgtgcggccagcagaaggagtgtcctggctcctggcaacaggaccactgcccacctaagcttactgagttccacccccacagtggacctctaaggggcagtacaaggctgaccctgtgtggctccaacttctaccttcacccttctggtctggtgcctgagggaacccatcaggtcactgtgggccaaagtccctgccggccactgcccaaggacagctcaaaactcagaccagtgccccggaaagactttgtagaggagtttgagtgtgaactggagcccttgggcacccaggcagtggggcctaccaacgtcagcctcaccgtgactaacatgccaccgggcaagcacttccgggtagacggcacctccgtgctgagaggcttctctttcatggagccagtgctgatagcagtgcaacccctctttggcccacgggcaggaggcacctgtctcactcttgaaggccagagtctgtctgtaggcaccagccgggctgtgctggtcaatgggactgagtgtctgctagcacgggtcagtgaggggcagcttttatgtgccacaccccctggggccacggtggccagtgtcccccttagcctgcaggtggggggtgcccaggtacctggttcctggaccttccagtacagagaagaccctgtcgtgctaagcatcagccccaactgtggctacatcaactcccacatcaccatctgtggccagcatctaacttcagcatggcacttagtgctgtcattccatgacgggcttagggcagtggaaagcaggtgtgagaggcagcttccagagcagcagctgtgccgccttcctgaatatgtggtccgagacccccagggatgggtggcagggaatctgagtgcccgaggggatggagctgctggctttacactgcctggctttcgcttcctacccccaccccatccacccagtgccaacctagttccactgaagcctgaggagcatgccattaagtttgagtatattgggctgggcgctgtggctgactgtgtgggtatcaacgtgaccgtgggtggtgagagctgccagcacgagttccggggggacatggttgtctgccccctgcccccatccctgcagcttggccaggatggtgccccattgcaggtagggtctgcgtagatggtgaatgtcatatcctgggtagagtggtgcggccagggccagatggggtcccacagagcacgctccttggtatcctgctgcctttgctgctgcttgtggctgcactggcgactgcactggtcttcagctactggtggcggaggaagcagctagttcttcctcccaacctgaatgacctggcatccctggaccagactgctggagccacacccctgcctattctgtactcgggctctgactacagaagtggccttgcactccctgccattgatggtctggattccaccacttgtgtccatggagcatccttctccgatagtgaagatgaatcctgtgtgccactgctgcggaaagagtccatccagctaagggacctggactctgcgctcttggctgaggtcaaggatgtgctgattccccatgagcgggtggtcacccacagtgaccgagtcattggcaaaggccactttggagttgtctaccacggagaatacatagaccaggcccagaatcgaatccaatgtgccatcaagtcactaagtcgcatcacagagatgcagcaggtggaggccttcctgcgagaggggctgctcatgcgtggcctgaaccacccgaatgtgctggctctcattggtatcatgttgccacctgagggcctgccccatgtgctgctgccctatatgtgccacggtgacctgctccagttcatccgctcacctcagcggaaccccaccgtgaaggacctcatcagctttggcctgcaggtagcccgcggcatggagtacctggcagagcagaagtttgtgcacagggacctggctgcgcggaactgcatgctggacgagtcattcacagtcaaggtggctgactttggtttggcccgcgacatcctggacagggagtactatagtgttcaacagcatcgccacgctcgcctacctgtgaagtggatggcgctggagagcctgcagacctatagatttaccaccaagtctgatgtgtggtcatttggtgtgctgctgtgggaactgctgacacggggtgccccaccataccgccacattgacccttttgaccttacccacttcctggcccagggtcggcgcctgccccagcctgagtattgccctgattctctgtaccaagtgatgcagcaatgctgggaggcagacccagcagtgcgacccaccttcagagtactagtgggggaggtggagcagatagtgtctgcactgcttggggaccattatgtgcagctgccagcaacctacatgaacttgggccccagcacctcgcatgagatgaatgtgcgtccagaacagccgcagttctcacccatgccagggaatgtacgccggccccggccactctcagagcctcctcggcccacttgacttagttcttgggctggacctgcttagctgccttgagctaaccccaagctgcctctgggccatgccaggccagagggcagtggccctccaccttgttcctgccctttaactttcagaggcaataggtaaatggggcccattaggtccctcactccacagagtgagccagtgagggcagtcctgcaacatgtatttatggagtgcctgctgtggaccctgtcttctgggcacagtggactcagcagtgaccacaccaacactgacccttgaaccaataaaggaacaaatgactattaaagcacaaaaaaaaaa

SEQ ID NO: 77607 - DNA, 502 bp, Homo sapiens
cccgctggccccatggcaggatgttaacaactgctgactcataatggttgggggttagccaatactggctttcaacaatttggtatggtccaaattttttcctattaaaaaattggtcttgggttcagaacccaagacccaaaaagttgggggatatatatatatgtttttttcctcgagaaagagtctcactctgtcgcccaggcaggagaatggcatgaactcgggaggcggagcttgcagtgagccaagattgcaccactgcactccagcctgggcgacggagcgagactccttctcaaaaaaaaaaaaaatgacatgggctaaagggacagttggaacagatactgctctaaccttctcaccaacctgtgtgaccttgggtataccacttaacctctctgagcctccatttgctcatctgtaaaatggggatgagaaaagttctgtcttcagtgggttctggtgtggatcaatcaggcataggaagattgtagcctct

SEQ ID NO: 77608 - DNA, 4713 bp, Homo sapiens
gaggcggctggggcgttgctgtcgtgcgtccgcaggcgtcaggtgctcagacccgagggccgggaagggatttgggtttcacaggaacctggggcgggggtccgctatcttggggctgtcgggaccgctgcttaaatttggcccagtccagacctcgagtcgggcccccagccaggcccacgcccaggtccaggcccaggccggtagggatcctctagggtcccagctcgcctcgatggagctcctcccgccgctgcctcagtccttcctgttgctgctgctgttgcctgccaagcccgcggcgggcgaggactggcagtgcccgcgcaccccctacgcggcctctcgcgactttgacgtgaagtacgtggtgcccagcttctccgccggaggcctggtacaggccatggtgacctacgagggcgacagaaatgagagtgctgtgtttgtagccatacgcaatcgcctgcatgtgcttgggcctgacctgaagtctgtccagagcctggccacgggccctgctggagaccctggctgccagacgtgtgcagcctgtggcccaggaccccacggccctcccggtgacacagacacaaaggtgctggtgctggatcccgcgctgcctgcgctggtcagttgtggctccagcctgcagggccgctgcttcctgcatgacctagagccccaagggacagccgtgcatctggcagcgccagcctgcctcttctcagcccaccataaccggcccgatgactgccccgactgtgtggccagcccattgggcacccgtgtaactgtggttgagcaaggccaggcctcctatttctacgtggcatcctcactggacgcagccgtggctggcagcttcagcccacgctcagtgtctatcaggcgtctcaaggctgacgcctcgggattcgcaccgggctttgtggcgttgtcagtgctgcccaagcatcttgtctcctacagtattgaatacgtgcacagcttccacacgggagccttcgtatacttcctgactgtacagccggccagcgtgacagatgatcctagtgccctgcacacacgcctggcacggcttagcgccactgagccagagttgggtgactatcgggagctggtcctcgactgcagatttgctccaaaacgcaggcgccggggggccccagaaggcggacagccctaccctgtgctgcaggtggcccactccgctccagtgggtgcccaacttgccactgagctgagcatcgccgagggccaggaagtactatttggggtctttgtgactggcaaggatggtggtcctggcgtgggccccaactctgtcgtctgtgccttccccattgacctgctggacacactaattgatgagggtgtggagcgctgttgtgaatccccagtccatccaggcctccggcgaggcctcgacttcttccagtcgcccagtttttgccccaacccgcctggcctggaagccctcagccccaacaccagctgccgccacttccctctgctggtcagtagcagcttctcacgtgtggacctattcaatgggctgttgggaccagtacaggtcactgcattgtatgtgacacgccttgacaacgtcacagtggcacacatgggcacaatggatgggcgtatcctgcaggtggagctggtcaggtcactaaactacttgctgtatgtgtccaacttctcactgggtgacagtgggcagcccgtgcagcgggatgtcagtcgtcttggggaccacctactctttgcctctggggaccaggttttccaggtacctatccgaggccctggctgccgccacttcctgacctgtgggcgttgcctaagggcatggcatttcatgggctgtggctggtgtgggaacatgtgcggccagcagaaggagtgtcctggctcctggcaacaggaccactgcccacctaagcttactgagttccacccccacagtggacctctaaggggcagtacaaggctgaccctgtgtggctccaacttctaccttcacccttctggtctggtgcctgagggaacccatcaggtcactgtgggccaaagtccctgccggccactgcccaaggacagctcaaaactcagaccagtgccccggaaagactttgtagaggagtttgagtgtgaactggagcccttgggcacccaggcagtggggcctaccaacgtcagcctcaccgtgactaacatgccaccgggcaagcacttccgggtagacggcacctccgtgctgagaggcttctctttcatggagccagtgctgatagcagtgcaacccctctttggcccacgggcaggaggcacctgtctcactcttgaaggccagagtctgtctgtaggcaccagccgggctgtgctggtcaatgggactgagtgtctgctagcacgggtcagtgaggggcagcttttatgtgccacaccccctggggccacggtggccagtgtcccccttagcctgcaggtggggggtgcccaggtacctggttcctggaccttccagtacagagaagaccctgtcgtgctaagcatcagccccaactgtggctacatcaactcccacatcaccatctgtggccagcatctaacttcagcatggcacttagtgctgtcattccatgacgggcttagggcagtggaaagcaggtgtgagaggcagcttccagagcagcagctgtgccgccttcctgaatatgtggtccgagacccccagggatgggtggcagggaatctgagtgcccgaggggatggagctgctggctttacactgcctggctttcgcttcctacccccaccccatccacccagtgccaacctagttccactgaagcctgaggagcatgccattaagtttgagtatattgggctgggcgctgtggctgactgtgtgggtatcaacgtgaccgtgggtggtgagagctgccagcacgagttccggggggacatggttgtctgccccctgcccccatccctgcagcttggccaggatggtgccccattgcaggtagggtctgcgtagatggtgaatgtcatatcctgggtagagtggtgcggccagggccagatggggtcccacagagcacgctccttggtatcctgctgcctttgctgctgcttgtggctgcactggcgactgcactggtcttcagctactggtggcggaggaagcagctagttcttcctcccaacctgaatgacctggcatccctggaccagactgctggagccacacccctgcctattctgtactcgggctctgactacagaagtggccttgcactccctgccattgatggtctggattccaccacttgtgtccatggagcatccttctccgatagtgaagatgaatcctgtgtgccactgctgcggaaagagtccatccagctaagggacctggactctgcgctcttggctgaggtcaaggatgtgctgattccccatgagcgggtggtcacccacagtgaccgagtcattggcaaaggccactttggagttgtctaccacggagaatacatagaccaggcccagaatcgaatccaatgtgccatcaagtcactaagtcgcatcacagagatgcagcaggtggaggccttcctgcgagaggggctgctcatgcgtggcctgaaccacccgaatgtgctggctctcattggtatcatgttgccacctgagggcctgccccatgtgctgctgccctatatgtgccacggtgacctgctccagttcatccgctcacctcagcggacccgcggcatggagtacctggcagagcagaagtttgtgcacagggacctggctgcgcggaactgcatgctggacgagtcattcacagtcaaggtggctgactttggtttggcccgcgacatcctggacagggagtactatagtgttcaacagcatcgccacgctcgcctacctgtgaagtggatggcgctggagagcctgcagacctatagatttaccaccaagtctgatgtgtggtcatttggtgtgctgctgtgggaactgctgacacggggtgccccaccataccgccacattgacccttttgaccttacccacttcctggcccagggtcggcgcctgccccagcctgagtattgccctgattctctgtaccaagtgatgcagcaatgctgggaggcagacccagcagtgcgacccaccttcagagtactagtgggggaggtggagcagatagtgtctgcactgcttggggaccattatgtgcagctgccagcaacctacatgaacttgggccccagcacctcgcatgagatgaatgtgcgtccagaacagccgcagttctcacccatgccagggaatgtacgccggccccggccactctcagagcctcctcggcccacttgacttagttcttgggctggacctgcttagctgccttgagctaaccccaagctgcctctgggccatgccaggccagagggcagtggccctccaccttgttcctgccctttaactttcagaggcaataggtaaatggggcccattaggtccctcactccacagagtgagccagtgagggcagtcctgcaacatgtatttatggagtgcctgctgtggaccctgtcttctgggcacagtggactcagcagtgaccacaccaacactgacccttgaaccaataaaggaacaaatgactattaaagcacaaaaaaaaaa

SEQ ID NO: 77609 - DNA, 1357 bp, Homo sapiens
caggatcccttggccagtttagtgctctgaggtctggttgccaatgagaatgtgtggtgtgagccttgggccctggatcccctctcatcgactcattatgcacctcacaccaggccactttggagttgtctaccacggagaatacatagaccaggcccagaatcgaatccaatgtgccatcaagtcactaagtcgcatcacagagatgcagcaggtggaggccttcctgcgagaggggctgctcatgcgtggcctgaaccacccgaatgtgctggctctcattggtatcatgttgccacctgagggcctgccccatgtgctgctgccctatatgtgccacggtgacctgctccagttcatccgctcacctcagcggaaccccaccgtgaaggacctcatcagctttggcctgcaggtagcccgcggcatggagtacctggcagagcagaagtttgtgcacagggacctggctgcgcggaactgcatgctggacgagtcattcacagtcaaggtggctgactttggtttggcccgcgacatcctggacagggagtactatagtgttcaacagcatcgccacgctcgcctacctgtgaagtggatggcgctggagagcctgcagacctatagatttaccaccaagtctgatgtgtggtcatttggtgtgctgctgtgggaactgctgacacggggtgccccaccataccgccacattgacccttttgaccttacccacttcctggcccagggtcggcgcctgccccagcctgagtattgccctgattctctgtaccaagtgatgcagcaatgctgggaggcagacccagcagtgcgacccaccttcagagtactagtgggggaggtggagcagatagtgtctgcactgcttggggaccattatgtgcagctgccagcaacctacatgaacttgggccccagcacctcgcatgagatgaatgtgcgtccagaacagccgcagttctcacccatgccagggaatgtacgccggccccggccactctcagagcctcctcggcccacttgacttagttcttgggctggacctgcttagctgccttgagctaaccccaagctgcctctgggccatgccaggccagagggcagtggccctccaccttgttcctgccctttaactttcagaggcaataggtaaatggggcccattaggtccctcactccacagagtgagccagtgagggcagtcctgcaacatgtatttatggagtgcctgctgtggaccctgtcttctgggcacagtggactcagcagtgaccacaccaacactgacccttgaaccaataaaggaacaaatgactattaaagcacaaaaaaaaaa

SEQ ID NO: 77610 - DNA, 4410 bp, Homo sapiens
gaggcggctggggcgttgctgtcgtgcgtccgcaggcgtcaggtgctcagacccgagggccgggaagggatttgggtttcacaggaacctggggcgggggtccgctatcttggggctgtcgggaccgctgcttaaatttggcccagtccagacctcgagtcgggcccccagccaggcccacgcccaggtccaggcccaggccggtagggatcctctagggtcccagctcgcctcgatggagctcctcccgccgctgcctcagtccttcctgttgctgctgctgttgcctgccaagcccgcggcgggcgaggactggcagtgcccgcgcaccccctacgcggcctctcgcgactttgacgtgaagtacgtggtgcccagcttctccgccggaggcctggtacaggccatggtgacctacgagggcgacagaaatgagagtgctgtgtttgtagccatacgcaatcgcctgcatgtgcttgggcctgacctgaagtctgtccagagcctggccacgggccctgctggagaccctggctgccagacgtgtgcagcctgtggcccaggaccccacggccctcccggtgacacagacacaaaggtgctggtgctggatcccgcgctgcctgcgctggtcagttgtggctccagcctgcagggccgctgcttcctgcatgacctagagccccaagggacagccgtgcatctggcagcgccagcctgcctcttctcagcccaccataaccggcccgatgactgccccgactgtgtggccagcccattgggcacccgtgtaactgtggttgagcaaggccaggcctcctatttctacgtggcatcctcactggacgcagccgtggctggcagcttcagcccacgctcagtgtctatcaggcgtctcaaggctgacgcctcgggattcgcaccgggctttgtggcgttgtcagtgctgcccaagcatcttgtctcctacagtattgaatacgtgcacagcttccacacgggagccttcgtatacttcctgactgtacagccggccagcgtgacagatgatcctagtgccctgcacacacgcctggcacggcttagcgccactgagccagagttgggtgactatcgggagctggtcctcgactgcagatttgctccaaaacgcaggcgccggggggccccagaaggcggacagccctaccctgtgctgcaggtggcccactccgctccagtgggtgcccaacttgccactgagctgagcatcgccgagggccaggaagtactatttggggtctttgtgactggcaaggatggtggtcctggcgtgggccccaactctgtcgtctgtgccttccccattgacctgctggacacactaattgatgagggtgtggagcgctgttgtgaatccccagtccatccaggcctccggcgaggcctcgacttcttccagtcgcccagtttttgccccaacccgcctggcctggaagccctcagccccaacaccagctgccgccacttccctctgctggtcagtagcagcttctcacgtgtggacctattcaatgggctgttgggaccagtacaggtcactgcattgtatgtgacacgccttgacaacgtcacagtggcacacatgggcacaatggatgggcgtatcctgcaggtggagctggtcaggtcactaaactacttgctgtatgtgtccaacttctcactgggtgacagtgggcagcccgtgcagcgggatgtcagtcgtcttggggaccacctactctttgcctctggggaccaggttttccaggtacctatccgaggccctggctgccgccacttcctgacctgtgggcgttgcctaagggcatggcatttcatgggctgtggctggtgtgggaacatgtgcggccagcagaaggagtgtcctggctcctggcaacaggaccactgcccacctaagcttactgagttccacccccacagtggacctctaaggggcagtacaaggctgaccctgtgtggctccaacttctaccttcacccttctggtctggtgcctgagggaacccatcaggtcactgtgggccaaagtccctgccggccactgcccaaggacagctcaaaactcagaccagtgccccggaaagactttgtagaggagtttgagtgtgaactggagcccttgggcacccaggcagtggggcctaccaacgtcagcctcaccgtgactaacatgccaccgggcaagcacttccgggtagacggcacctccgtgctgagaggcttctctttcatggagccagtgctgatagcagtgcaacccctctttggcccacgggcaggaggcacctgtctcactcttgaaggccagagtctgtctgtaggcaccagccgggctgtgctggtcaatgggactgagtgtctgctagcacgggtcagtgaggggcagcttttatgtgccacaccccctggggccacggtggccagtgtcccccttagcctgcaggtggggggtgcccaggtacctggttcctggaccttccagtacagagaagaccctgtcgtgctaagcatcagccccaactgtggctacatcaactcccacatcaccatctgtggccagcatctaacttcagcatggcacttagtgctgtcattccatgacgggcttagggcagtggaaagcaggtgtgagaggcagcttccagagcagcagctgtgccgccttcctgaatatgtggtccgagacccccagggatgggtggcagggaatctgagtgcccgaggggatggagctgctggctttacactgcctggctttcgcttcctacccccaccccatccacccagtgccaacctagttccactgaagcctgaggagcatgccattaagtttgagtatattgggctgggcgctgtggctgactgtgtgggtatcaacgtgaccgtgggtggtgagagctgccagcacgagttccggggggacatggttgtctgccccctgcccccatccctgcagcttggccaggatggtgccccattgcaggtagggtctgcgtagatggtgaatgtcatatcctgggtagagtggtgcggccagggccagatggggtcccacagagcacgctccttggtatcctgctgcctttgctgctgcttgtggctgcactggcgactgcactggtcttcagctactggtggcggaggaagcagctagttcttcctcccaacctgaatgacctggcatccctggaccagactgctggagccacacccctgcctattctgtactcgggctctgactacagaagtggccttgccactttggagttgtctaccacggagaatacatagaccaggcccagaatcgaatccaatgtgccatcaagtcactaagtcgcatcacagagatgcagcaggtggaggccttcctgcgagaggggctgctcatgcgtggcctgaaccacccgaatgtgctggctctcattggtatcatgttgccacctgagggcctgccccatgtgctgctgccctatatgtgccacggtgacctgctccagttcatccgctcacctcagcggaaccccaccgtgaaggacctcatcagctttggcctgcaggtagcccgcggcatggagtacctggcagagcagaagtttgtgcacagggacctggctgcgcggaactgcatgctggacgagtcattcacagtcaaggtggctgactttggtttggcccgcgacatcctggacagggagtactatagtgttcaacagcatcgccacgctcgcctacctgtgaagtggatggcgctggagagcctgcagacctatagatttaccaccaagtctgatgtggtaccaagtgatgcagcaatgctgggaggcagacccagcagtgcgacccaccttcagagtactagtgggggaggtggagcagatagtgtctgcactgcttggggaccattatgtgcagctgccagcaacctacatgaacttgggccccagcacctcgcatgagatgaatgtgcgtccagaacagccgcagttctcacccatgccagggaatgtacgccggccccggccactctcagagcctcctcggcccacttgacttagttcttgggctggacctgcttagctgccttgagctaaccccaagctgcctctgggccatgccaggccagagggcagtggccctccaccttgttcctgccctttaactttcagaggcaataggtaaatggggcccattaggtccctcactccacagagtgagccagtgagggcagtcctgcaacatgtatttatggagtgcctgctgtggaccctgtcttctgggcacagtggactcagcagtgaccacaccaacactgacccttgaaccaataaaggaacaaatgactattaaagcacaaaaaaaaaa

SEQ ID NO: 77611 - DNA, 4273 bp, Homo sapiens
gaggcggctggggcgttgctgtcgtgcgtccgcaggcgtcaggtgctcagacccgagggccgggaagggatttgggtttcacaggaacctggggcgggggtccgctatcttggggctgtcgggaccgctgcttaaatttggcccagtccagacctcgagtcgggcccccagccaggcccacgcccaggtccaggcccaggccggtagggatcctctagggtcccagctcgcctcgatggagctcctcccgccgctgcctcagtccttcctgttgctgctgctgttgcctgccaagcccgcggcgggcgaggactggcagtgcccgcgcaccccctacgcggcctctcgcgactttgacgtgaagtacgtggtgcccagcttctccgccggaggcctggtacaggccatggtgacctacgagggcgacagaaatgagagtgctgtgtttgtagccatacgcaatcgcctgcatgtgcttgggcctgacctgaagtctgtccagagcctggccacgggccctgctggagaccctggctgccagacgtgtgcagcctgtggcccaggaccccacggccctcccggtgacacagacacaaaggtgctggtgctggatcccgcgctgcctgcgctggtcagttgtggctccagcctgcagggccgctgcttcctgcatgacctagagccccaagggacagccgtgcatctggcagcgccagcctgcctcttctcagcccaccataaccggcccgatgactgccccgactgtgtggccagcccattgggcacccgtgtaactgtggttgagcaaggccaggcctcctatttctacgtggcatcctcactggacgcagccgtggctggcagcttcagcccacgctcagtgtctatcaggcgtctcaaggctgacgcctcgggattcgcaccgggctttgtggcgttgtcagtgctgcccaagcatcttgtctcctacagtattgaatacgtgcacagcttccacacgggagccttcgtatacttcctgactgtacagccggccagcgtgacagatgatcctagtgccctgcacacacgcctggcacggcttagcgccactgagccagagttgggtgactatcgggagctggtcctcgactgcagatttgctccaaaacgcaggcgccggggggccccagaaggcggacagccctaccctgtgctgcaggtggcccactccgctccagtgggtgcccaacttgccactgagctgagcatcgccgagggccaggaagtactatttggggtctttgtgactggcaaggatggtggtcctggcgtgggccccaactctgtcgtctgtgccttccccattgacctgctggacacactaattgatgagggtgtggagcgctgttgtgaatccccagtccatccaggcctccggcgaggcctcgacttcttccagtcgcccagtttttgccccaacccgcctggcctggaagccctcagccccaacaccagctgccgccacttccctctgctggtcagtagcagcttctcacgtgtggacctattcaatgggctgttgggaccagtacaggtcactgcattgtatgtgacacgccttgacaacgtcacagtggcacacatgggcacaatggatgggcgtatcctgcaggtggagctggtcaggtcactaaactacttgctgtatgtgtccaacttctcactgggtgacagtgggcagcccgtgcagcgggatgtcagtcgtcttggggaccacctactctttgcctctggggaccaggttttccaggtacctatccgaggccctggctgccgccacttcctgacctgtgggcgttgcctaagggcatggcatttcatgggctgtggctggtgtgggaacatgtgcggccagcagaaggagtgtcctggctcctggcaacaggaccactgcccacctaagcttactgagttccacccccacagtggacctctaaggggcagtacaaggctgaccctgtgtggctccaacttctaccttcacccttctggtctggtgcctgagggaacccatcaggtcactgtgggccaaagtccctgccggccactgcccaaggacagctcaaaactcagaccagtgccccggaaagactttgtagaggagtttgagtgtgaactggagcccttgggcacccaggcagtggggcctaccaacgtcagcctcaccgtgactaacatgccaccgggcaagcacttccgggtagacggcacctccgtgctgagaggcttctctttcatggagccagtgctgatagcagtgcaacccctctttggcccacgggcaggaggcacctgtctcactcttgaaggccagagtctgtctgtaggcaccagccgggctgtgctggtcaatgggactgagtgtctgctagcacgggtcagtgaggggcagcttttatgtgccacaccccctggggccacggtggccagtgtcccccttagcctgcaggtggggggtgcccaggtacctggttcctggaccttccagtacagagaagaccctgtcgtgctaagcatcagccccaactgtggctacatcaactcccacatcaccatctgtggccagcatctaacttcagcatggcacttagtgctgtcattccatgacgggcttagggcagtggaaagcaggtgtgagaggcagcttccagagcagcagctgtgccgccttcctgaatatgtggtccgagacccccagggatgggtggcagggaatctgagtgcccgaggggatggagctgctggctttacactgcctggctttcgcttcctacccccaccccatccacccagtgccaacctagttccactgaagcctgaggagcatgccattaagtttgagtatattgggctgggcgctgtggctgactgtgtgggtatcaacgtgaccgtgggtggtgagagctgccagcacgagttccggggggacatggttgtctgccccctgcccccatccctgcagcttggccaggatggtgccccattgcaggtagggtctgcgtagatggtgaatgtcatatcctgggtagagtggtgcggccagggccagatggggtcccacagagcacgctccttggtatcctgctgcctttgctgctgcttgtggctgcactggcgactgcactggtcttcagctactggtggcggaggaagcagctagttcttcctcccaacctgaatgacctggcatccctggaccagactgctggagccacacccctgcctattctgtactcgggctctgactacagaagtggccttgcactccctgccattgatggtctggattccaccacttgtgtccatggagcatccttctccgatagtgaagatgaatcctgtgtgccactgctgcggaaagagtccatccagctaagggacctggactctgcgctcttggctgaggtcaaggatgtgctgattccccatgagcgggtggtcacccacagtgaccgagtcattggcaaaggccactttggagttgtctaccacggagaatacatagaccaggcccagaatcgaatccaatgtgccatcaagtcactaagtcgcatcacagagatgcagcaggtggaggccttcctgcgagaggggctgctcatgcgtggcctgaaccacccgaatgtgctggctctcattggtatcatgttgccacctgagggcctgccccatgtgctgctgccctatatgtgccacggtgacctgctccagttcatccgctcacctcagcggaaccccaccgtgaaggacctcatcagctttggcctgcaggtagcccgcggcatggagtacctggcagagcagaagtttgtgcacagggacctggctgcgcggaactgcataacagccgcagttctcacccatgccagggaatgtacgccggccccggccactctcagagcctcctcggcccacttgacttagttcttgggctggacctgcttagctgccttgagctaaccccaagctgcctctgggccatgccaggccagagggcagtggccctccaccttgttcctgccctttaactttcagaggcaataggtaaatggggcccattaggtccctcactccacagagtgagccagtgagggcagtcctgcaacatgtatttatggagtgcctgctgtggaccctgtcttctgggcacagtggactcagcagtgaccacaccaacactgacccttgaaccaataaaggaacaaatgactattaaagcacaaaaaaaaaa

SEQ ID NO: 77612 - DNA, 3861 bp, Homo sapiens
gaggcggctggggcgttgctgtcgtgcgtccgcaggcgtcaggtgctcagacccgagggccgggaagggatttgggtttcacaggaacctggggcgggggtccgctatcttggggctgtcgggaccgctgcttaaatttggcccagtccagacctcgagtcgggcccccagccaggcccacgcccaggtccaggcccaggccggtagggatcctctagggtcccagctcgcctcgatggagctcctcccgccgctgcctcagtccttcctgttgctgctgctgttgcctgccaagcccgcggcgggcgaggactggcagtgcccgcgcaccccctacgcggcctctcgcgactttgacgtgaagtacgtggtgcccagcttctccgccggaggcctggtacaggccatggtgacctacgagggcgacagaaatgagagtgctgtgtttgtagccatacgcaatcgcctgcatgtgcttgggcctgacctgaagtctgtccagagcctggccacgggccctgctggagaccctggctgccagacgtgtgcagcctgtggcccaggaccccacggccctcccggtgacacagacacaaaggtgctggtgctggatcccgcgctgcctgcgctggtcagttgtggctccagcctgcagggccgctgcttcctgcatgacctagagccccaagggacagccgtgcatctggcagcgccagcctgcctcttctcagcccaccataaccggcccgatgactgccccgactgtgtggccagcccattgggcacccgtgtaactgtggttgagcaaggccaggcctcctatttctacgtggcatcctcactggacgcagccgtggctggcagcttcagcccacgctcagtgtctatcaggcgtctcaaggctgacgcctcgggattcgcaccgggctttgtggcgttgtcagtgctgcccaagcatcttgtctcctacagtattgaatacgtgcacagcttccacacgggagccttcgtatacttcctgactgtacagccggccagcgtgacagatgatcctagtgccctgcacacacgcctggcacggcttagcgccactgagccagagttgggtgactatcgggagctggtcctcgactgcagatttgctccaaaacgcaggcgccggggggccccagaaggcggacagccctaccctgtgctgcaggtggcccactccgctccagtgggtgcccaacttgccactgagctgagcatcgccgagggccaggaagtactatttggggtctttgtgactggcaaggatggtggtcctggcgtgggccccaactctgtcgtctgtgccttccccattgacctgctggacacactaattgatgagggtgtggagcgctgttgtgaatccccagtccatccaggcctccggcgaggcctcgacttcttccagtcgcccagtttttgccccaacccgcctggcctggaagccctcagccccaacaccagctgccgccacttccctctgctggtcagtagcagcttctcacgtgtggacctattcaatgggctgttgggaccagtacaggtcactgcattgtatgtgacacgccttgacaacgtcacagtggcacacatgggcacaatggatgggcgtatcctgcaggtggagctggtcaggtcactaaactacttgctgtatgtgtccaacttctcactgggtgacagtgggcagcccgtgcagcgggatgtcagtcgtcttggggaccacctactctttgcctctggggaccaggttttccaggtacctatccgaggccctggctgccgccacttcctgacctgtgggcgttgcctaagggcatggcatttcatgggctgtggctggtgtgggaacatgtgcggccagcagaaggagtgtcctggctcctggcaacaggaccactgcccacctaagcttactgagttccacccccacagtggacctctaaggggcagtacaaggctgaccctgtgtggctccaacttctaccttcacccttctggtctggtgcctgagggaacccatcaggtcactgtgggccaaagtccctgccggccactgcccaaggacagctcaaaactcagaccagtgccccggaaagactttgtagaggagtttgagtgtgaactggagcccttgggcacccaggcagtggggcctaccaacgtcagcctcaccgtgactaacatgccaccgggcaagcacttccgggtagacggcacctccgtgctgagaggcttctctttcatggagccagtgctgatagcagtgcaacccctctttggcccacgggcaggaggcacctgtctcactcttgaaggccagagtctgtctgtaggcaccagccgggctgtgctggtcaatgggactgagtgtctgctagcacgggtcagtgaggggcagcttttatgtgccacaccccctggggccacggtggccagtgtcccccttagcctgcaggtggggggtgcccaggtacctggttcctggaccttccagtacagagaagaccctgtcgtgctaagcatcagccccaactgtggctacatcaactcccacatcaccatctgtggccagcatctaacttcagcatggcacttagtgctgtcattccatgacgggcttagggcagtggaaagcaggtgtgagaggcagcttccagagcagcagctgtgccgccttcctgaatatgtggtccgagacccccagggatgggtggcagggaatctgagtgcccgaggggatggagctgctggctttacactgcctggctttcgcttcctacccccaccccatccacccagtgccaacctagttccactgaagcctgaggagcatgccattaagtttgagtatattgggctgggcgctgtggctgactgtgtgggtatcaacgtgaccgtgggtggtgagagctgccagcacgagttccggggggacatggttgtctgccccctgcccccatccctgcagcttggccaggatggtgccccattgcaggtaggcactccctgccattgatggtctggattccaccacttgtgtccatggagcatccttctccgatagtgaagatgaatcctgtgtgccactgctgcggaaagagtccatccagctaagggacctggactctgcgctcttggctgaggtcaaggatgtgctgattccccatgagcgggtggtcacccacagtgaccgagtcattggcaaaggccactttggagttgtctaccacggagaatacatagaccaggcccagaatcgaatccaatgtgccatcaagtcactaagtcgcatcacagagatgcagcaggtggaggccttcctgcgagaggggctgctcatgcgtggcctgaaccacccgaatgtgctggctctcattggtatcatgttgccacctgagggcctgccccatgtgctgctgccctatatgtgccacggtgacctgctccagttcatccgctcacctcagcggaaccccaccgtgaaggacctcatcagctttggcctgcaggtagcccgcggcatggagtacctggcagagcagaagtttgtgcacagggacctggctgcgcggaactgcatgctggacgagtcattcacagtcaaggtggctgactttggtttggcccgcgacatcctggacagggagtactatagtgttcaacagcatcgccacgctcgcctacctgtgaagtggatggcgctggagagcctgcagacctatagatttaccaccaagtctgatgtgtggactcagcagtgaccacaccaacactgacccttgaaccaataaaggaacaaatgactattaaagcacaaaaaaaaaa

SEQ ID NO: 77613 - DNA, 523 bp, Homo sapiens
cagggaatctgagtgcccgaggggatggagctgctggctttacactgcctggctttcgcttcctacccccaccccatccacccagtgccaacctagttccactgaagcctgaggagcatgccattaagtttgaggtaagtgtaagggataggggcagggacagttggggatctgaaagtaggggccagcctactggctggtcctcatgaccctctctgcagtatattgggctgggcgctgtggctgactgtgtgggtatcaacgtgaccgtgggtggtgagagctgccagcacgagttccggggggacatggttgtctgccccctgcccccatccctgcagcttggccaggatggtgccccattgcaggtaggagcccagctggacctccctgggaaacacgggcagagggcctacaggctgggcctgagttgccacctgcccccaggtctgcgtagatggtgaatgtcatatcctgggtagagtggtgcggccagggccagatggggtcccacagagcacgc

SEQ ID NO: 77614 - DNA, 556 bp, Homo sapiens
cactccctgccattgatggtctggattccaccacttgtgtccatggagcatccttctccgatagtgaagatgaatcctgtgtgccactgctgcggaaagagtccatccagctaagggacctggactctgcgctcttggctgaggtcaaggatgtgctgattccccatgagcgggtggtcacccacagtgaccgagtcattggcaaaggtgtgggggccaggtggggctggggcagagatggagtctcaagatgacataggctaggccaggcgtggtggctcactcctgtaatcccagcactttgggaggccgaggcgggcagatcatgaggtcaggagatcgagaccgtcctggctaacacagtgaaaccccgtctctactaaaaatacaaaaaaatattagccagccatggtggcaggcgcctgtagtcccagctacttgggaggctgaggcaggagaatggcatgaactcgggaggcggagcttgcagtgagccaagattgcaccactgcactccagcctgggcgacggagcgagactccttctcaaaaaaaaa

SEQ ID NO: 77615 - DNA, 4487 bp, Homo sapiens
gaggcggctggggcgttgctgtcgtgcgtccgcaggcgtcaggtgctcagacccgagggccgggaagggatttgggtttcacaggaacctggggcgggggtccgctatcttggggctgtcgggaccgctgcttaaatttggcccagtccagacctcgagtcgggcccccagccaggcccacgcccaggtccaggcccaggccggtagggatcctctagggtcccagctcgcctcgatggagctcctcccgccgctgcctcagtccttcctgttgctgctgctgttgcctgccaagcccgcggcgggcgaggactggcagtgcccgcgcaccccctacgcggcctctcgcgactttgacgtgaagtacgtggtgcccagcttctccgccggaggcctggtacaggccatggtgacctacgagggcgacagaaatgagagtgctgtgtttgtagccatacgcaatcgcctgcatgtgcttgggcctgacctgaagtctgtccagagcctggccacgggccctgctggagaccctggctgccagacgtgtgcagcctgtggcccaggaccccacggccctcccggtgacacagacacaaaggtgctggtgctggatcccgcgctgcctgcgctggtcagttgtggctccagcctgcagggccgctgcttcctgcatgacctagagccccaagggacagccgtgcatctggcagcgccagcctgcctcttctcagcccaccataaccggcccgatgactgccccgactgtgtggccagcccattgggcacccgtgtaactgtggttgagcaaggccaggcctcctatttctacgtggcatcctcactggacgcagccgtggctggcagcttcagcccacgctcagtgtctatcaggcgtctcaaggctgacgcctcgggattcgcaccgggctttgtggcgttgtcagtgctgcccaagcatcttgtctcctacagtattgaatacgtgcacagcttccacacgggagccttcgtatacttcctgactgtacagccggccagcgtgacagatgatcctagtgccctgcacacacgcctggcacggcttagcgccactgagccagagttgggtgactatcgggagctggtcctcgactgcagatttgctccaaaacgcaggcgccggggggccccagaaggcggacagccctaccctgtgctgcaggtggcccactccgctccagtgggtgcccaacttgccactgagctgagcatcgccgagggccaggaagtactatttggggtctttgtgactggcaaggatggtggtcctggcgtgggccccaactctgtcgtctgtgccttccccattgacctgctggacacactaattgatgagggtgtggagcgctgttgtgaatccccagtccatccaggcctccggcgaggcctcgacttcttccagtcgcccagtttttgccccaacccgcctggcctggaagccctcagccccaacaccagctgccgccacttccctctgctggtcagtagcagcttctcacgtgtggacctattcaatgggctgttgggaccagtacaggtcactgcattgtatgtgacacgccttgacaacgtcacagtggcacacatgggcacaatggatgggcgtatcctgcaggtggagctggtcaggtcactaaactacttgctgtatgtgtccaacttctcactgggtgacagtgggcagcccgtgcagcgggatgtcagtcgtcttggggaccacctactctttgcctctggggaccaggttttccaggtacctatccgaggccctggctgccgccacttcctgacctgtgggcgttgcctaagggcatggcatttcatgggctgtggctggtgtgggaacatgtgcggccagcagaaggagtgtcctggctcctggcaacaggaccactgcccacctaagcttactgagttccacccccacagtggacctctaaggggcagtacaaggctgaccctgtgtggctccaacttctaccttcacccttctggtctggtgcctgagggaacccatcaggtcactgtgggccaaagtccctgccggccactgcccaaggacagctcaaaactcagaccagtgccccggaaagactttgtagaggagtttgagtgtgaactggagcccttgggcacccaggcagtggggcctaccaacgtcagcctcaccgtgactaacatgccaccgggcaagcacttccgggtagacggcacctccgtgctgagaggcttctctttcatggagccagtgctgatagcagtgcaacccctctttggcccacgggcaggaggcacctgtctcactcttgaaggccagagtctgtctgtaggcaccagccgggctgtgctggtcaatgggactgagtgtctgctagcacgggtcagtgaggggcagcttttatgtgccacaccccctggggccacggtggccagtgtcccccttagcctgcaggtggggggtgcccaggtacctggttcctggaccttccagtacagagaagaccctgtcgtgctaagcatcagccccaactgtggctacatcaactcccacatcaccatctgtggccagcatctaacttcagcatggcacttagtgctgtcattccatgacgggcttagggcagtggaaagcaggtgtgagaggcagcttccagagcagcagctgtgccgccttcctgaatatgtggtccgagacccccagggatgggtggcagggaatctgagtgcccgaggggatggagctgctggctttacactgcctggctttcgcttcctacccccaccccatccacccagtgccaacctagttccactgaagcctgaggagcatgccattaagtttgagtatattgggctgggcgctgtggctgactgtgtgggtatcaacgtgaccgtgggtggtgagagctgccagcacgagttccggggggacatggttgtctgccccctgcccccatccctgcagcttggccaggatggtgccccattgcaggtaggcactccctgccattgatggtctggattccaccacttgtgtccatggagcatccttctccgatagtgaagatgaatcctgtgtgccactgctgcggaaagagtccatccagctaagggacctggactctgcgctcttggctgaggtcaaggatgtgctgattccccatgagcgggtggtcacccacagtgaccgagtcattggcaaaggccactttggagttgtctaccacggagaatacatagaccaggcccagaatcgaatccaatgtgccatcaagtcactaagtcgcatcacagagatgcagcaggtggaggccttcctgcgagaggggctgctcatgcgtggcctgaaccacccgaatgtgctggctctcattggtatcatgttgccacctgagggcctgccccatgtgctgctgccctatatgtgccacggtgacctgctccagttcatccgctcacctcagcggaaccccaccgtgaaggacctcatcagctttggcctgcaggtagcccgcggcatggagtacctggcagagcagaagtttgtgcacagggacctggctgcgcggaactgcatgctggacgagtcattcacagtcaaggtggctgactttggtttggcccgcgacatcctggacagggagtactatagtgttcaacagcatcgccacgctcgcctacctgtgaagtggatggcgctggagagcctgcagacctatagatttaccaccaagtctgatgtgtggtcatttggtgtgctgctgtgggaactgctgacacggggtgccccaccataccgccacattgacccttttgaccttacccacttcctggcccagggtcggcgcctgccccagcctgagtattgccctgattctctgtaccaagtgatgcagcaatgctgggaggcagacccagcagtgcgacccaccttcagagtactagtgggggaggtggagcagatagtgtctgcactgcttggggaccattatgtgcagctgccagcaacctacatgaacttgggccccagcacctcgcatgagatgaatgtgcgtccagaacagccgcagttctcacccatgccagggaatgtacgccggccccggccactctcagagcctcctcggcccacttgacttagttcttgggctggacctgcttagctgccttgagctaaccccaagctgcctctgggccatgccaggccagagggcagtggccctccaccttgttcctgccctttaactttcagaggcaataggtaaatggggcccattaggtccctcactccacagagtgagccagtgagggcagtcctgcaacatgtatttatggagtgcctgctgtggaccctgtcttctgggcacagtggactcagcagtgaccacaccaacactgacccttgaaccaataaaggaacaaatgactattaaagcacaaaaaaaaaa

SEQ ID NO: 77616 - DNA, 1519 bp, Homo sapiens
atagtggaggcatgagaagctaaagccaccccctgtccctacaagctcctcattccctctccccacagcactccctgccattgatggtctggattccaccacttgtgtccatggagcatccttctccgatagtgaagatgaatcctgtgtgccactgctgcggaaagagtccatccagctaagggacctggactctgcgctcttggctgaggtcaaggatgtgctgattccccatgagcgggtggtcacccacagtgaccgagtcattggcaaaggccactttggagttgtctaccacggagaatacatagaccaggcccagaatcgaatccaatgtgccatcaagtcactaagtcgcatcacagagatgcagcaggtggaggccttcctgcgagaggggctgctcatgcgtggcctgaaccacccgaatgtgctggctctcattggtatcatgttgccacctgagggcctgccccatgtgctgctgccctatatgtgccacggtgacctgctccagttcatccgctcacctcagcggaaccccaccgtgaaggacctcatcagctttggcctgcaggtagcccgcggcatggagtacctggcagagcagaagtttgtgcacagggacctggctgcgcggaactgcatgctggacgagtcattcacagtcaaggtggctgactttggtttggcccgcgacatcctggacagggagtactatagtgttcaacagcatcgccacgctcgcctacctgtgaagtggatggcgctggagagcctgcagacctatagatttaccaccaagtctgatgtgtggtcatttggtgtgctgctgtgggaactgctgacacggggtgccccaccataccgccacattgacccttttgaccttacccacttcctggcccagggtcggcgcctgccccagcctgagtattgccctgattctctgtaccaagtgatgcagcaatgctgggaggcagacccagcagtgcgacccaccttcagagtactagtgggggaggtggagcagatagtgtctgcactgcttggggaccattatgtgcagctgccagcaacctacatgaacttgggccccagcacctcgcatgagatgaatgtgcgtccagaacagccgcagttctcacccatgccagggaatgtacgccggccccggccactctcagagcctcctcggcccacttgacttagttcttgggctggacctgcttagctgccttgagctaaccccaagctgcctctgggccatgccaggccagagggcagtggccctccaccttgttcctgccctttaactttcagaggcaataggtaaatggggcccattaggtccctcactccacagagtgagccagtgagggcagtcctgcaacatgtatttatggagtgcctgctgtggaccctgtcttctgggcacagtggactcagcagtgaccacaccaacactgacccttgaaccaataaaggaacaaatgactattaaagcacaaaaaaaaaa

SEQ ID NO: 77617 - DNA, 4201 bp, Homo sapiens
gaggcggctggggcgttgctgtcgtgcgtccgcaggcgtcaggtgctcagacccgagggccgggaagggatttgggtttcacaggaacctggggcgggggtccgctatcttggggctgtcgggaccgctgcttaaatttggcccagtccagacctcgagtcgggcccccagccaggcccacgcccaggtccaggcccaggccggtagggatcctctagggtcccagctcgcctcgatggagctcctcccgccgctgcctcagtccttcctgttgctgctgctgttgcctgccaagcccgcggcgggcgaggactggcagtgcccgcgcaccccctacgcggcctctcgcgactttgacgtgaagtacgtggtgcccagcttctccgccggaggcctggtacaggccatggtgacctacgagggcgacagaaatgagagtgctgtgtttgtagccatacgcaatcgcctgcatgtgcttgggcctgacctgaagtctgtccagagcctggccacgggccctgctggagaccctggctgccagacgtgtgcagcctgtggcccaggaccccacggccctcccggtgacacagacacaaaggtgctggtgctggatcccgcgctgcctgcgctggtcagttgtggctccagcctgcagggccgctgcttcctgcatgacctagagccccaagggacagccgtgcatctggcagcgccagcctgcctcttctcagcccaccataaccggcccgatgactgccccgactgtgtggccagcccattgggcacccgtgtaactgtggttgagcaaggccaggcctcctatttctacgtggcatcctcactggacgcagccgtggctggcagcttcagcccacgctcagtgtctatcaggcgtctcaaggctgacgcctcgggattcgcaccgggctttgtggcgttgtcagtgctgcccaagcatcttgtctcctacagtattgaatacgtgcacagcttccacacgggagccttcgtatacttcctgactgtacagccggccagcgtgacagatgatcctagtgccctgcacacacgcctggcacggcttagcgccactgagccagagttgggtgactatcgggagctggtcctcgactgcagatttgctccaaaacgcaggcgccggggggccccagaaggcggacagccctaccctgtgctgcaggtggcccactccgctccagtgggtgcccaacttgccactgagctgagcatcgccgagggccaggaagtactatttggggtctttgtgactggcaaggatggtggtcctggcgtgggccccaactctgtcgtctgtgccttccccattgacctgctggacacactaattgatgagggtgtggagcgctgttgtgaatccccagtccatccaggcctccggcgaggcctcgacttcttccagtcgcccagtttttgccccaacccgcctggcctggaagccctcagccccaacaccagctgccgccacttccctctgctggtcagtagcagcttctcacgtgtggacctattcaatgggctgttgggaccagtacaggtcactgcattgtatgtgacacgccttgacaacgtcacagtggcacacatgggcacaatggatgggcgtatcctgcaggtggagctggtcaggtcactaaactacttgctgtatgtgtccaacttctcactgggtgacagtgggcagcccgtgcagcgggatgtcagtcgtcttggggaccacctactctttgcctctggggaccaggttttccaggtacctatccgaggccctggctgccgccacttcctgacctgtgggcgttgcctaagggcatggcatttcatgggctgtggctggtgtgggaacatgtgcggccagcagaaggagtgtcctggctcctggcaacaggaccactgcccacctaagcttactgagttccacccccacagtggacctctaaggggcagtacaaggctgaccctgtgtggctccaacttctaccttcacccttctggtctggtgcctgagggaacccatcaggtcactgtgggccaaagtccctgccggccactgcccaaggacagctcaaaactcagaccagtgccccggaaagactttgtagaggagtttgagtgtgaactggagcccttgggcacccaggcagtggggcctaccaacgtcagcctcaccgtgactaacatgccaccgggcaagcacttccgggtagacggcacctccgtgctgagaggcttctctttcatggagccagtgctgatagcagtgcaacccctctttggcccacgggcaggaggcacctgtctcactcttgaaggccagagtctgtctgtaggcaccagccgggctgtgctggtcaatgggactgagtgtctgctagcacgggtcagtgaggggcagcttttatgtgccacaccccctggggccacggtggccagtgtcccccttagcctgcaggtggggggtgcccaggtacctggttcctggaccttccagtacagagaagaccctgtcgtgctaagcatcagccccaactgtggctacatcaactcccacatcaccatctgtggccagcatctaacttcagcatggcacttagtgctgtcattccatgacgggcttagggcagtggaaagcaggtgtgagaggcagcttccagagcagcagctgtgccgccttcctgaatatgtggtccgagacccccagggatgggtggcagggaatctgagtgcccgaggggatggagctgctggctttacactgcctggctttcgcttcctacccccaccccatccacccagtgccaacctagttccactgaagcctgaggagcatgccattaagtttgagtatattgggctgggcgctgtggctgactgtgtgggtatcaacgtgaccgtgggtggtgagagctgccagcacgagttccggggggacatggttgtctgccccctgcccccatccctgcagcttggccaggatggtgccccattgcaggtaggcactccctgccattgatggtctggattccaccacttgtgtccatggagcatccttctccgatagtgaagatgaatcctgtgtgccactgctgcggaaagagtccatccagctaagggacctggactctgcgctcttggctgaggtcaaggatgtgctgattccccatgagcgggtggtcacccacagtgaccgagtcattggcaaaggccactttggagttgtctaccacggagaatacatagaccaggcccagaatcgaatccaatgtgccatcaagtcactaagtcgcatcacagagatgcagcaggtggaggccttcctgcgagaggggctgctcatgcgtggcctgaaccacccgaatgtgctggctctcattggtatcatgttgccacctgagggcctgccccatgtgctgctgccctatatgtgccacggtgacctgctccagttcatccgctcacctcagcggaaccccaccgtgaaggacctcatcagctttggcctgcaggtagcccgcggcatggagtacctggcagagcagaagtttgtgcacagggacctggctgcgcggaactgcatgctggacgagtcattcacagtcaaggtggctgactttggtttggcccgcgacatcctggacagggagtactatagtgttcaacagcatcgccacgctcgcctacctgtgaagtggatggcgctggagagcctgcagacctatagatttaccaccaagtctgatgtggtaccaagtgatgcagcaatgctgggaggcagacccagcagtgcgacccaccttcagagtactagtgggggaggtggagcagatagtgtctgcactgcttggggaccattatgtgcagctgccagcaacctacatgaacttgagctaaccccaagctgcctctgggccatgccaggccagagggcagtggccctccaccttgttcctgccctttaactttcagaggcaataggtaaatggggcccattaggtccctcactccacagagtgagccagtgagggcagtcctgcaacatgtatttatggagtgcctgctgtggaccctgtcttctgggcacagtggactcagcagtgaccacaccaacactgacccttgaaccaataaaggaacaaatgactattaaagcacaaaaaaaaaa

SEQ ID NO: 77618 - DNA, 4091 bp, Homo sapiens
gaggcggctggggcgttgctgtcgtgcgtccgcaggcgtcaggtgctcagacccgagggccgggaagggatttgggtttcacaggaacctggggcgggggtccgctatcttggggctgtcgggaccgctgcttaaatttggcccagtccagacctcgagtcgggcccccagccaggcccacgcccaggtccaggcccaggccggtagggatcctctagggtcccagctcgcctcgatggagctcctcccgccgctgcctcagtccttcctgttgctgctgctgttgcctgccaagcccgcggcgggcgaggactggcagtgcccgcgcaccccctacgcggcctctcgcgactttgacgtgaagtacgtggtgcccagcttctccgccggaggcctggtacaggccatggtgacctacgagggcgacagaaatgagagtgctgtgtttgtagccatacgcaatcgcctgcatgtgcttgggcctgacctgaagtctgtccagagcctggccacgggccctgctggagaccctggctgccagacgtgtgcagcctgtggcccaggaccccacggccctcccggtgacacagacacaaaggtgctggtgctggatcccgcgctgcctgcgctggtcagttgtggctccagcctgcagggccgctgcttcctgcatgacctagagccccaagggacagccgtgcatctggcagcgccagcctgcctcttctcagcccaccataaccggcccgatgactgccccgactgtgtggccagcccattgggcacccgtgtaactgtggttgagcaaggccaggcctcctatttctacgtggcatcctcactggacgcagccgtggctggcagcttcagcccacgctcagtgtctatcaggcgtctcaaggctgacgcctcgggattcgcaccgggctttgtggcgttgtcagtgctgcccaagcatcttgtctcctacagtattgaatacgtgcacagcttccacacgggagccttcgtatacttcctgactgtacagccggccagcgtgacagatgatcctagtgccctgcacacacgcctggcacggcttagcgccactgagccagagttgggtgactatcgggagctggtcctcgactgcagatttgctccaaaacgcaggcgccggggggccccagaaggcggacagccctaccctgtgctgcaggtggcccactccgctccagtgggtgcccaacttgccactgagctgagcatcgccgagggccaggaagtactatttggggtctttgtgactggcaaggatggtggtcctggcgtgggccccaactctgtcgtctgtgccttccccattgacctgctggacacactaattgatgagggtgtggagcgctgttgtgaatccccagtccatccaggcctccggcgaggcctcgacttcttccagtcgcccagtttttgccccaacccgcctggcctggaagccctcagccccaacaccagctgccgccacttccctctgctggtcagtagcagcttctcacgtgtggacctattcaatgggctgttgggaccagtacaggtcactgcattgtatgtgacacgccttgacaacgtcacagtggcacacatgggcacaatggatgggcgtatcctgcaggtggagctggtcaggtcactaaactacttgctgtatgtgtccaacttctcactgggtgacagtgggcagcccgtgcagcgggatgtcagtcgtcttggggaccacctactctttgcctctggggaccaggttttccaggtacctatccgaggccctggctgccgccacttcctgacctgtgggcgttgcctaagggcatggcatttcatgggctgtggctggtgtgggaacatgtgcggccagcagaaggagtgtcctggctcctggcaacaggaccactgcccacctaagcttactgagttccacccccacagtggacctctaaggggcagtacaaggctgaccctgtgtggctccaacttctaccttcacccttctggtctggtgcctgagggaacccatcaggtcactgtgggccaaagtccctgccggccactgcccaaggacagctcaaaactcagaccagtgccccggaaagactttgtagaggagtttgagtgtgaactggagcccttgggcacccaggcagtggggcctaccaacgtcagcctcaccgtgactaacatgccaccgggcaagcacttccgggtagacggcacctccgtgctgagaggcttctctttcatggagccagtgctgatagcagtgcaacccctctttggcccacgggcaggaggcacctgtctcactcttgaaggccagagtctgtctgtaggcaccagccgggctgtgctggtcaatgggactgagtgtctgctagcacgggtcagtgaggggcagcttttatgtgccacaccccctggggccacggtggccagtgtcccccttagcctgcaggtggggggtgcccaggtacctggttcctggaccttccagtacagagaagaccctgtcgtgctaagcatcagccccaactgtggctacatcaactcccacatcaccatctgtggccagcatctaacttcagcatggcacttagtgctgtcattccatgacgggcttagggcagtggaaagcaggtgtgagaggcagcttccagagcagcagctgtgccgccttcctgaatatgtggtccgagacccccagggatgggtggcagggaatctgagtgcccgaggggatggagctgctggctttacactgcctggctttcgcttcctacccccaccccatccacccagtgccaacctagttccactgaagcctgaggagcatgccattaagtttgagtatattgggctgggcgctgtggctgactgtgtgggtatcaacgtgaccgtgggtggtgagagctgccagcacgagttccggggggacatggttgtctgccccctgcccccatccctgcagcttggccaggatggtgccccattgcaggtaggcactccctgccattgatggtctggattccaccacttgtgtccatggagcatccttctccgatagtgaagatgaatcctgtgtgccactgctgcggaaagagtccatccagctaagggacctggactctgcgctcttggctgaggtcaaggatgtgctgattccccatgagcgggtggtcacccacagtgaccgagtcattggcaaaggccactttggagttgtctaccacggagaatacatagaccaggcccagaatcgaatccaatgtgccatcaagtcactaagtcgcatcacagagatgcagcaggtggaggccttcctgcgagaggggctgctcatgcgtggcctgaaccacccgaatgtgctggctctcattggtatcatgttgccacctgagggcctgccccatgtgctgctgccctatatgtgccacggtgacctgctccagttcatccgctcacctcagcggaaccccaccgtgaaggacctcatcagctttggcctgcaggtagcccgcggcatggagtacctggcagagcagaagtttgtgcacagggacctggctgcgcggaactgcatgctggacgagtcattcacagtcaaggtggctgactttggtttggcccgcgacatcctggacagggagtactatagtgttcaacagcatcgccacgctcgcctacctgtgaagtggatggcgctggagagcctgcagacctatagatttaccaccaagtctgatgtgtggtcatttggtgtgctgctgtgggaactgctgacacggggtgccccaccataccgccacattgacccttttgaccttacccacttcctggcccagggtcggcgcctgccccagcctgagtattgccctgattctctgtaccaagtgatgcagcaatgctgggaggcagacccagcagtgcgacccaccttcagagtactagtgggggaggtggagcagatagtgtctgcactgcttggggaccattatgtgcagctcgccctgagttagcagctcgcccctgagtacagtaccctgagtacagtacgc

SEQ ID NO: 77619 - DNA, 423 bp, Homo sapiens
gcacccctgagtcacctgtctttcacccacaggttttccaggtacctatccgaggccctggctgccgccacttcctgacctgtgggcgttgcctaagggcatggcatttcatgggctgtggctggtgtgggaacatgtgcggccagcagaaggagtgtcctggctcctggcaacaggaccactgcccacctaagcttactgaggtatggcttccctggcagggcacaggtaagagtgggacaggctgggcctggggtggtggtcagcaagtcttgatcacaatttttctcaggtctggggggtgtccttcatatctacaaggagggcattcttgtcagaggggatgccacatgcaaagacttggaggcaggaaagtgcttgaatgcaagtgactccaaatggctggagcgtggggaaggcaag

SEQ ID NO: 77620 - DNA, 1565 bp, Homo sapiens
gtactttgggaggctgaggtgggccgatcatttgaagttaggagtttgagaccagcctgaccaatatggtaaaaccccgtctctactaaaaatacaaaaaaattagcctggcgtggtggcgcatgcctgtagtcccataggctgtagctactgggaggaggcggagcttgcagtgagccgagatcacgccactgctctccagcctgggcgacagagtgagactctgtgtcaaaaacaaacaaacaaacaaaaaaggcaaaattggagctgtccaggccaggacaccccgatgtccaggggcttccatacgaacaggcacatgggctgggaagtacatgaggcccctgggtagaagggtctgtcagttctctcctcccttgccctctgggagggtcctcctaacatagcttccaggaggtgggaggagcagttactgtcagcaggtgtcagccaggtgtcagcttctcctggggatctctagatgtctgcttgtgatttttggcaagtatatgcaaatgagcctcctctcctgccctgagacaagtatctgcagtgtgaacctggcagcctcagacccaaggggctcagaggaaacttctctggtttctagagctctgtgctccttcagagaagtcttccttccttccagtcagtgtccctgtgaagctgggatactcatttcctgtgtaccgggcaaacaccggattgctgattttgagaaatgcctctcgatggacctgtaacctgctggagtctgggatggtagctgtgggctggacttggctgatgggatgacccggtggctagtgcagcatcacacaagcctggttcaagtcttggctgtgtcatttcctgctgagggaccaggcactgaatttcctacctcttagggtcattacctatgaggttaaagctacctcatgggattgttatacgccactaatgttgaggcagacacctcttggcagggtgactgctcatcttagaccctccccttttctgcgaatttgggccccttgatcctctgatgggagctgaaaggatgagaggtgggcatctagatttagggaggctgttcaggctttgcaggtcccttacctgaacacatagaaaccctggagctgtgactgtgtccatgtgtgtgtgtttgtctgtgtgtgttgcgggggatgggcacctgcatgaatgtggtagagaaaatggctctgctcagagggaagatacgcatagcaaggcagggaccagaggaatcacaggcgcctggagagcagccgggcaccgcctccagggacctgccggcttccctcagtcctccaggggcccagcactcttcctttaggccctgtgagcgtcccttgtcaggatacattctctcattttgctgaagctgatttgattgggtgtctgtttctcgcagccaaaagagctctgaatgaggaaagtgcttctgtgctaactccccgcgtctcctgaatttcagtcattcatgtacccgcctcgaaatttttgcaatatctgtgtaccaactgtccatttacttaataaagaagttttctttaaattaa

SEQ ID NO: 77621 - DNA, 2052 bp, Homo sapiens
  misc_feature (1577)..(1577): n is a, c, g, or t
gtactttgggaggctgaggtgggccgatcatttgaagttaggagtttgagaccagcctgaccaatatggtaaaaccccgtctctactaaaaatacaaaaaaattagcctggcgtggtggcgcatgcctgtagtcccataggctgtagctactgggaggaggcggagcttgcagtgagccgagatcacgccactgctctccagcctgggcgacagagtgagactctgtgtcaaaaacaaacaaacaaacaaaaaaggcaaaattggagctgtccaggccaggacaccccgatgtccaggggcttccatacgaacaggcacatgggctgggaagtacatgaggcccctgggtagaagggtctgtcagttctctcctcccttgccctctgggagggtcctcctaacatagcttccaggaggtgggaggagcagttactgtcagcaggtgtcagccaggtgtcagcttctcctggggatctctagatgtctgcttgtgatttttggcaagtatatgcaaatgagcctcctctcctgccctgagacaagtatctgcagtgtgaacctggcagcctcagacccaaggggctcagaggaaacttctctggtttctagagctctgtgctccttcagagaagtcttccttccttccagtcagtgtccctgtgaagctgggatactcatttcctgtgtaccgggcaaacaccggattgctgattttgagaaatgcctctcgatggacctgtaacctgctggagtctgggatggtagctgtgggctggacttggctgatgggatgacccggtggctagtgcagcatcacacaagcctggttcaagtcttggctgtgtcatttcctgctgagggaccaggcactgaatttcctacctcttagggtcattacctatgaggttaaagctacctcatgggattgttatacgccactaatgttgaggcagacacctcttggcagggtgactgctcatcttagaccctccccttttctgcgaatttgggccccttgatcctctgatgggagctgaaaggatgagaggtgggcatctagatttagggaggctgttcaggctttgcaggtcccttacctgaacacatagaaaccctggagctgtgactgtgtccatgtgtgtgtgtttgtctgtgtgtgttgcgggggatgggcacctgcatgaatgtggtagagaaaatggctctgctcagagggaagatacgcatagcaaggcagggaccagaggaatcacaggcgcctggagagcagccgggcaccgcctccagggacctgccggcttccctcagtcctccaggggcccagcactcttcctttaggccctgtgagcgtcccttgtcaggatacattctctcattttgctgaagctgatttgattgggtgtctgtttctcgcagccaaaagagctctgaatgaggaaagtgcttctgtgctaactccccgcgtctcctgaatttcagtcattcatgtacccgcctcgaaatttttgcaatatctgtgtaccaactgtccatttacttaataaagaagttttctttaaattaaaaaaaaaaaaanaaaaaaaaaaaaaaaaaaaaaaaaaaaaaaaaaaaaaagagagagagagaggcgagaagagaaaaaacaaaaaaaaaaaacaaaaaaaacacaaaagagagaggagagagaggcgaggaaacacaaaaagggaggagcagaggagagcgggaggccacaaggcaaagcgagtatcccacgaacagccgaaaacatcatgggcggcacggaaccaaccgctgcgcgccggagcgtaactcgtccccgacaacaaaaaaaaaaagagagccgcgcgcggggaagcaaccaaaccgaagagagcgtggtggaagaaacaccacacaacaagaaggaaggtggactctcggcagcgacatcaaagcaggaggtgccgctctcgctcgccaagcgagggggtgcacacgcgagcagagcgcgaccacatcgagaaacaagcgaccgccgcgccagggagagagaaacgagaaacagcgac

SEQ ID NO: 77622 - DNA, 967 bp, Homo sapiens
cccctgacaactcccttgccccacgcggggtcccctggactcctgccgcacagagcggcttctgcgtcccgatgcgctccagaccccttggtcccagcggcccgaggcttcccatcccggctccctcccacgctcctctcctgtcagcttttcaggggcggggctcgtgcgtctcgcggtcctcccagccctctgcgaatgccgcccctcctgcctttagcgtccgcgctccgccagtgctcctccctctgcttgtgccttccctccgccccaccctcctcgcttctggcgctccaaggcttttctccccgcagccaggcagccagatttttgtttctcttctttattttttctttcttttcttttctcttctcttccttctttcctttctctctctctttttctgagacggagtctcgctctgtcgcccaggctggagtacgatggcgcgatctcggctcaatgcaccttccgcctcccgagttcaagggattctcctgtctcagcctcccgaatacctgggattacaggcgcccgccaccatgcccagctaatttttgtatttttagtagagatggggtttaaccatgttggccaggctggtctcgaactcctgacctcaagtgatctgcccgccccagcctcccagagtgctgggaatacaggcgtgagccactgcgcccggcctcgttttcttatatctctacaaacctaatactgtttttgtctcttaaaaatctacatatgtatggcagagcacggtggctcacgcctgcaatcccatcactttgggaggccaaggcgcgggggggatcacgaggtctggagatcgagaccatcctggctaacccagtgaaaccccgtctctactaaaaaatacaaaaaaattagccgggcgtggtagcgggcgcctgtagtcccagctacttgggaggctgaggcaggagaatgacgtcaactcgggagg

SEQ ID NO: 77623 - DNA, 325 bp, Homo sapiens
ctagatcttgttggaaagaagatgaagatttatgaagggggatagaaggaaatatattgcatttctttttatcctctgcttggtatttttctcttcctctcctgtacttcaacccctataagtctcaactttcatgcatgccacacatggcatatagtatttggaaatgggaaagctgcagtgtgtcttgacctactttccagtgactgtacaattacaaataagaagttgatgctatataaagtagtactacattctacactgaaaagaacatatggagaagcaaagagtgcgtttgcccaagcagcaccaatttttaaaactc

SEQ ID NO: 77624 - DNA, 776 bp, Homo sapiens
ctcatgttcactttttaaaatcggagcttcccagacctcagttttgttttgttattttccattatctgcagctgtctcctttcccctctctcacctatactctactgatcagtgactgctggctcctttgttacccatccttctctttctccacattttttctcttctcatccctttcagttctggactgtttccttcttcctccctgtctttcatttagtcattcattgaatgtacttactaagcacatatagcataatcaggctgtgttgggtaggcatcccgagttctatgagataaagaaagaatgggatatgattaccaattttaagaagcatctaaaacaacctgttatgttttagcaaattgcccccaaaggacccattagggaggaaaacgttcatgtcctttttgcgtatcatctcaagcagtacccatgatggctgggatcccagaacccacctttgagaatgctgccgtatttgcgtgtggttgacaaggttgggccagacactcaggaaatagggttgtcgtcctacctcccccactaacttcctgtaagaacttcagcccctctcaggacctttttctttaccaataaaattcagaaattgggctcaatcagtaattcccaagttattttccaaagaacatgaattttgtggaactttaatagatatcatgcaaaaaaaaatgtgggagggattgttccatggtcaaatggtcttggaaataactcgtttaaacaaaaataaaactgtttctttacccacaaa

SEQ ID NO: 77625 - DNA, 485 bp, Homo sapiens
cagtctcttgcctcagcacctaggtaatcctccgcccacacagatatttgaagccagtgacactgtcctcctaaaatgtctctggatttgccgtcaggatttgctgtaggatgtgttttgtaactcaacctgtgatctgtcctccaaaggacagcctcaggaacgtggggaatctgatcgcctgtatcctacctctgtgtgggcagaggagctgctttttgtgttcagggtgataatgcattttctatttcatttaaattcactctcggccttctttccagattagtagcaggcccagtgtctctcctgggaataccctagtccccttgagttgtcccaagaatcgctagaggtggctcagtcctgtttccccggggaaaggccaaacctctccattctcttggcgagagttaagaaccagccacaattgtaagctgccattgcttctgctgcttccatagggtgttgctgctgacccactgatc

SEQ ID NO: 77626 - DNA, 337 bp, Homo sapiens
aacagactttggagccagtcccatgtgagtttgagtctcagagtgactctgggcaagttacttaggctttctgagactcactttcctcctttataaatcaggaagaataatccattgctcattgagttgttaatgagacataaatgagatagtgtatctaaaatgtgatttgttaagtctaatacgtaatagatgcctatttgagtgtttctgatactcaggatggttcttgggatatattttcccatggaacaaaaagcagactactcatgaccactcggattttatgttcagccacattagggctcttatggcctgacctgaagacctaccattt

SEQ ID NO: 77627 - DNA, 640 bp, Homo sapiens
attagattgggcccatgtggataaaccagggcaatctcctatttttagtaaactgattagcatctttaatttcatctgcaatcttaattcctctttgccatgtatcataagatatatacaggttccaaagattaagatgtagacatctttgggtggccattattctgcctaccacacacaatatgtcctctgactgtaatggaaccaaactggaaatcagtaatagaaatacataccaccacgcctggctaattttatttttgtagagatggggtctcgctgctcaggccagtctggagctcctgggcttatgtgatcctcttgccttggcatcccaaagtggtgggattataggcatgaaccactgcacccggcttaatttacgttttatagtgtgcaattcaatgttttgggtttttttttctttttaaagcatatttacagagttgtgcaaccgtcaccactatctaacttaagaatattttagccaggcatggtaggtagcacgtgcctgtagtccatgctacttgggaggctgaggcaggaggattgctcgagcccgggaggttaaggctgcagtgagctatgatcacacccactgtacgtcagtctgcttgacagagtgagaccttgtttcaaa

SEQ ID NO: 77628 - DNA, 3775 bp, Homo sapiens
atttagactcgttcctttaacccctgggctctgtgtgtatgtgtgtgttttccatatttataactcctgcacatgacaaaggtcctgatacattgtaaggactcagttaatgtttgtggattgcttccttattgatctgttttcacaaaaatgctgccaaaaaatgtcaagcaggataatgatgaggttacaagagagacaagtgaatgggcaagaagagactaagggtaaagtaagaggactaacttccattgactgcttacgaaatgccacgcactgtgctgaggactttatataaatatctcatttaattcttataaaagcccaataaagaaataattatcaccccagtcccaccacctgtttttgcatgattgtggccatgatatcaaaataatcaaatagatggtatttggaggtatataatagtctttacctatgccttccatacatcagggcctcaatggtgcttgactaggatttgcactgtgggttagtatagttcatgggttgttatttgaagctgactcttgtgttcatgcaggagggcaggaatcttcctggctgttctgtctgcccctgttaccctcagtgaaaatgaaaagaagcacagtacatagtggttgacaggaatgaaggtttccaaccttctaactgtggttggagagcttcctgtgtggcatttcccctccttcctggaactctttagtattgtaggaaatgagtgacttgggcaattgcgatagacttcaagcaattggattcactgaagaacattttatggaggaggaggaggaggaacacaaaatcttgaaagctctgggttgagagaaaccatcaagggtatccacgttaaccactaagcaagcttttgaatcccctgatagtattccaaattgccatctctgtgaccttgaacaaaaaacttcacctctcttagtgagtttccacataggcaaaaacaaaaacaaaaatgaaaaaaactaaacaaaaccttctagggttgtcgtgaagatcagagagaacgtactcctggaatatattaggtacccagtacaagttttaaaaatagactttatttttagagcagttttaggttcatagcataactgatcataaggtacagagttgacatataccctgtgattccctggatggcctccccactagaaatatccacccactggagtggtacatttgttacaattgatgaacctatattgacatgcccttatcaccgaaagtccatagattacataagggcttgctcttggtgctgtacattgtctgggtttggacaaatgtataaaaggccattatagtatcatacagaggagtttcactgctgaaaaaatcctctgtgctcctctaattcatccctccttccccaccaacccctggcaaccactgatccttttactgcctccatagttttgccttttccagaatgtcatacagttggagtcacatggagtaaccttttcagattggcttctttcacttagtaatatgcacttaaagttctatgtattttcatggcttgatagctcatctcttttagccctcttttatgccattgtctggatgtaccacagtttacttattcattcacctactgaaggacatcttggttgcttctaagttttggcaactatgaataaagctgctataaacattagcgtgcaggtttttgtgtggatattagatttcaactcatgggtactcagtattttttaaatgaaaaatatatctgtccttactcccataaattcctcctttccatcaattcttcccaaggtgagggatcagtgcatacaagaggcccaatttgcagcaaaatgctcattaattagccaagaggctgcggtggcacagcaagtaaacaacgtactacaaatctgtttacagcggcttctgcagacattttaaaacaattaaactgtcaagggggcctggagacaagagctttgcattttaataggaaatgattaaatctcaggcattattgccttcgatgtgtctaggctttaagaagagggcagagtattgattgaggcctccaggaaggcaggaagcttacttgtgctgcttgaccgcaatgcagtgaaagcttggagatctgtaactccttgggctggaattaaaggccagtagccaaaaatttaactggatttgtcaccttctgtttagttggactctgcctgtaggaacagatgatagatcatgacctccggggtattattcgtcaattggcagagagagagagagagagagagagccccttgctgatggcatctattagaaaaggctgaatgacacagcgccatgtggtgacctcagtatttacactatctggattaaaaccattgtaaagcaagtgaaagccacccatgtagtcactgcctgagtcaactaatgcaaactgcactctaacctgtgaatatgtgtgtgccacagttatgacggacacgcagtctcaaacatctagtgtattcaccttctctattgatttcatctattcacaggtgctggtcagatcacatgtggttcttgccctctagctactcacagtccagtaaatgagggaacatgtaagcagctgggtacaatccaatacagtgatagatgttgttggctacagtgaggggaccaaggaggtcacattcaaattgagagatgtggaggggctggcagaaaattctttctagagaaggttctacttgaaagattagtaggcagacaaggggacaaggacacttcaaactgagggaagttcttgaacaaacctgtggaggtgtgaaaaagcctagtacattccaagaacccagtctggtagtgtggaacctgagtcctctggtactttttaaaggatggggtgaccttagtcctcaggtttaaaaacttaatcaataaatgatgacgttattgaaatatatcaccacataatgctaaatagaacaggtgagcactaccattctctgtgcctttctattgcttaaaatccttccatttgtcatacttcttaaaagtatgccaattggagaacaagacacttgcttccaaaatgagaatacctttgtgaaaattgacaaatttgtgtgaattagcttaatcagattgctttcttccacaacacctgaccaagaccagccactctgatgacgaggagaatagggggatgtggaatgcaaaagaaggtaggagcatggggtactgagggtggagagggctcctcttgcagtggaattacaggcagctagggagcagcacaaaggccctgcatggctgagaattagtttaggggaaaggaaagagaggatagcagaaataaattttacctgacttgcaatttggctccatgtcggctctcatttggtttatttctgtgctgtctagacatcaacagattgagctgctcccatccctggggacccccttccccactacactgaccagtgcagccccctgcagggccattataagaagctatggcacagctgaaagactgagtctcttgattagacctgataagaccactcatattaagatgacttaattttgtcccttgagaaatgcctttttaagagctcccacattggccaagagagactgcctccatattaagctgttcatagttattcactaacaggaggcttttgcataaggctctctgctataaattcctcctgggataatgagaggctcccctatgtgaatcccaggatcactttcttctaccaggtttaccccctgctacatcccatcgacaggtgct

SEQ ID NO: 77629 - DNA, 482 bp, Homo sapiens
aggtggtgtgttgtcctccatttgatatagagattgtggctggtgacgggaactcaaacttgcccccaattcggtgaccttttccccttgattttaactctcaaggtcacacattagataggaagcatggtcccgagattcttgaaatgtagagaaaatacatgaaggacatttggctgtagtctctaaggatgctgcgcagtgctatttgtttgaaaagagacacacacacacacagagaagagtcttatgaatatagagcctgatgactcgtctcttgagtttttcatgtccccccgagtttagaatcccaggctaatagagcctcagcggtttctgaagtcactttctccacagagggcacatgcccaggttctctctgcctgtcccatcttgcctgtgaaaccagagatccagaaagaagtggaatgcatggaacctaaggggagctaactttcaaaaataaatagatgctgattggt

SEQ ID NO: 77630 - DNA, 461 bp, Homo sapiens
taaactcatgcatcccacatacaaatatattcctgatcaagcggcaccaggccctaaaatctcaatccatccttacattgagtcacccacagcagtccatacacgcagagaagcaaggtcctttccatactccatggcacccaagcacagagtacagatggctttgtgtggaggcagtttactatcaaagatatgaggagactttgaagtcaggaaaacattggttctggcccagcaccgctacttccaactcctgacaagttgttttatctcccctagtctctcttttcttattggtagagaagagagtacacctactcaaatggtcattgtgagacttccatgagttaatttggagtttttaagcagtgtctggtacatattaagtgttcaataaaggctactgctatagtcaccatcatcatttaattttttttatcttgacgatcagaaatcttaat

SEQ ID NO: 77631 - DNA, 270 bp, Homo sapiens
ggctacagtaaatcgaggcaagtatgttagtgctagaatttctatatcccttgatgccaggtgcagtgctctgcattgtgaagacacttttctgtgtttgaggccctggagggagaaaggtagctttggccatcatttttcagcgatcagaagccatgcttcagtacagcagcttttaggtaggatcaggcagaggtagtgagatacaaaagctgcaagtgactcgagagctgttctttgatttggaagtgtgtagccctgttctactaa

SEQ ID NO: 77632 - DNA, 693 bp, Homo sapiens
aatttttctaaagataggtgatatagagctcctgtttggatgctctgcagataataaaagatgaaagatttatacaatctgaggagaaagcagagtatgtgcttcaagtaataacgtgtaaagagaacaaaatgatggtatgggaggcagaaagaaaataattgatgagagaggaatttctcaaataggtataaggggaggtaatctagttaacctttagaggggatggcttaaccacaaagaacccagacaaagaggtaagcaaatatatgataacatccttgtaggtatgaatatgtggtggtgggtttgagaaagttttgtttgttctattttctgtgaaacagaaagcaaggtcatcagctgagagtgaggatgagataagaggtactggaggtttgagaagagagaaaaaatgaatacccagtggtccaggacaaggtcggcaaactgggcaacatacatatttttccgtagatatgtggtcacagatcattttttaaagttcactttcaaaatcctcttcttcatgatgtcatctctaaaactgatctgcctgagaatggagatgcaatataggcttttctttcccacctctcctttcactgtctctactccataccccactccttttctgggttctactatggtgccttgtctctggttggtaaaatttcttgaattccaagcaaa

SEQ ID NO: 77633 - DNA, 566 bp, Homo sapiens
cccagccagcagcggtaacccactcccattcccttcaatgttgtaggagctttgttcttttgttcttcgaaagaaatcttgctgctagtctctctttgggtctgtgctgtctttatgagctgtaacactcaccatgaaggtctgcagcttctttcctgaaaccaccgagaccacaaacccaccaggaggaactaacaactccggactcaccgccctttagagctgtaatgctcactgcgagggtctgcggcttcactcctgaagtcggcgagaccacgaacccaccagaaggaaaaaactccggacacgtccgaatatcagaaggaacaaaccccggacacaccatctttaagaactgtaacactcaccgcgagggtcggcagcttcattcttgaagtcagggagaccaagaacccaccaattccagacacactaatataaagtgttaacattaggggaaactgggtgaggggtgaagcttatatgagaactctgtatcagttttgtaccttttttgtaaattgaaaaatattctaaaataaaaaggaaaataatttttcttccca

SEQ ID NO: 77634 - DNA, 290 bp, Homo sapiens
aacttccccagacttcctggcctcaccctctgcctaggcgaaaccccgcaggccaggaacatcccttacgtgagggtgtgcgacagggtagtggctaatccatcctgcttttgtcaaggcactggcaacacagctcaccccagccagaacgaacaccaagtgcacactgggaatatcccccgatctacctaaggagctgtgccccgtggtcagagaccatctacacgtcatcacacacgccaccctgtaccagccgtagtaaatcagccagtttaatcagacgtattatt

SEQ ID NO: 77635 - DNA, 1768 bp, Homo sapiens
ttttgtaaatgggttgtgttggggagagggattaaagggagggaattctacatttctctatgtatgtataactggatatattttaaatggaggcatgctgcaattctcattcacacataaaaaaatcacatcacaaaagggaagagtttacttcttgtttcaggatgtttttagatttttgaggtgcttaaatagctattcgtatttttaaggtgtctcatccagaaaaaatttaatgtgcctgtaaatgttccatagaatcacaagcattaaagagttgttttatttttacataacccattaaatgtacatgtatatatgtatatatgtatatgtgcgtgtatatacatatatatgtatacacacatgcacacacagagatatacacataccattacattgtcattcacagtcccagcagcatgactatcacatttttgataagtgtcctttggcataaaataaaaatatcctatcagtcctttctaagaagcctgaattgaccaaaaaacatccccaccaccactttataaagttgattctgctttatcctgcagtattgtttagccatcttctgctcttggtaaggttgacatagtatatgtcaatttaaaaaataaaagtctgctttgtaaatagtaattttacccagtggtgcatgtttgagcaaacaaaaatgatgatttaagcacactacttattgcatcaaatatgtaccacagtaagtatagtttgcaagctttcaacaggtaatatgatgtaattggttccattatagtttgaagctgtcactgctgcatgtttatcttgcctatgctgctgtatcttattccttccactgttcagaagtctaatatgggaagccatatatcagtggtaaagtgaagcaaattgttctaccaagacctcattcttcatgtcattaagcaataggttgcagcaaacaaggaagagcttcttgctttttattcttccaaccttaattgaacactcaatgatgaaaagcccgactgtacaaacatgttgcaagctgcttaaatctgtttaaaatatatggttagagttttctaagaaaatataaatactgtaaaaagttcattttattttatttttcagccttttgtacgtaaaatgagaaattaaaagtatcttcaggtggatgtcacagtcactattgttagtttctgttcctagcacttttaaattgaagcacttcacaaaataagaagcaaggactaggatgcagtataggtttctgcttttttattagtactgtaaacttgcacacatttcaatgtgaaacaaatctcaaactgagttcaatgtttatttgctttcaatagtaatgccttatcattgaaagaggcttaaagaaaaaaaaaatcagctgatactcttggcattgcttgaatccaatgtttccacctagtctttttattcagtaatcatcagtcttttccaatgtttgtttacacagatagatcttattgacccatatggcactagaactgtatcagatataatatgggatcccagctttttttcctctcccacaaaaccaggtagtgaagttatattaccagttacagcaaaatactttgtgtttcacaagcaacaataaatgtagattctttatactgaagctattgacttgtagtgtgttggtgaaatgcatgcaggaaaatgctgttaccataaagaacggtaaaccacattacaatcaagccaaaagaataaaggtttcgcttttgtttttgtatttaaaaaa

SEQ ID NO: 77636 - DNA, 1836 bp, Homo sapiens
  misc_feature (14)..(14): n is a, c, g, or t
  misc_feature (17)..(17): n is a, c, g, or t
  misc_feature (41)..(41): n is a, c, g, or t
  misc_feature (43)..(43): n is a, c, g, or t
agccaatcttatgnggntatgcaccaagattgaaaacccgntntgatgtttaaaaaaaggcagctgacgcgatccaggattcgcatggttggttgggagagcatagggaggaattctacatttctctatgtatgtataactggatatattttaaatggaggcatgctgcaattctcattcacacataaaaaaatcacatcacaaaagggaagagtttacttcttgtttcaggatgtttttagatttttgaggtgcttaaatagctattcgtatttttaaggtgtctcatccagaaaaaatttaatgtgcctgtaaatgttccatagaatcacaagcattaaagagttgttttatttttacataacccattaaatgtacatgtatatatgtatatatgtatatgtgcgtgtatatacatatatatgtatacacacatgcacacacagagatatacacataccattacattgtcattcacagtcccagcagcatgactatcacatttttgataagtgtcctttggcataaaataaaaatatcctatcagtcctttctaagaagcctgaattgaccaaaaaacatccccaccaccactttataaagttgattctgctttatcctgcagtattgtttagccatcttctgctcttggtaaggttgacatagtatatgtcaatttaaaaaataaaagtctgctttgtaaatagtaattttacccagtggtgcatgtttgagcaaacaaaaatgatgatttaagcacactacttattgcatcaaatatgtaccacagtaagtatagtttgcaagctttcaacaggtaatatgatgtaattggttccattatagtttgaagctgtcactgctgcatgtttatcttgcctatgctgctgtatcttattccttccactgttcagaagtctaatatgggaagccatatatcagtggtaaagtgaagcaaattgttctaccaagacctcattcttcatgtcattaagcaataggttgcagcaaacaaggaagagcttcttgctttttattcttccaaccttaattgaacactcaatgatgaaaagcccgactgtacaaacatgttgcaagctgcttaaatctgtttaaaatatatggttagagttttctaagaaaatataaatactgtaaaaagttcattttattttatttttcagccttttgtacgtaaaatgagaaattaaaagtatcttcaggtggatgtcacagtcactattgttagtttctgttcctagcacttttaaattgaagcacttcacaaaataagaagcaaggactaggatgcagtataggtttctgcttttttattagtactgtaaacttgcacacatttcaatgtgaaacaaatctcaaactgagttcaatgtttatttgctttcaatagtaatgccttatcattgaaagaggcttaaagaaaaaaaaaatcagctgatactcttggcattgcttgaatccaatgtttccacctagtctttttattcagtaatcatcagtcttttccaatgtttgtttacacagatagatcttattgacccatatggcactagaactgtatcagatataatatgggatcccagctttttttcctctcccacaaaaccaggtagtgaagttatattaccagttacagcaaaatactttgtgtttcacaagcaacaataaatgtagattctttatactgaagctattgacttgtagtgtgttggtgaaatgcatgcaggaaaatgctgttaccataaagaacggtaaaccacattacaatcaagccaaaagaataaaggtttcgcttttgtttttgtatttaaaaaa

SEQ ID NO: 77637 - DNA, 324 bp, Homo sapiens
agaccatgtgctttatctacaaggtgctggttggggatatgaagatgaataaaaagaacttagctctcttgtagtaacttctggtatagtgcacaaacatgcttatattactgtaataacagtaatactgtaatagaggaacattccagtggtacctgagtatggagaagtcagcaaaggatttctggaggtgacatttgaactgagccttgaaatatgatgaggatgatgtcaggtgtataagcaagggttgaagctgaaggagtagcaaggaccaggtgttataataaagacctggtaatccaggttaagaaatttagacat

SEQ ID NO: 77638 - DNA, 397 bp, Homo sapiens
gtcacccttcttagacctgtgggccttgcttattttccaaatggtactgacattcaacctcaatatttgctgaatttctcttgcttcctggtactggcgtctcttagccaacaccattccattgctccaggattaggaaaatgttactgtaatacacatttggcttagttaactcataacgataagtgatttaaatgcacacttaacaaagagtctgtgattgaaacaaagacacctaacttctcaggtaaaaaatttatatatatgtgtgtgtgtgtgtgtgtgtgtgtgtgtgtgtgtgtgtgtgtgttcccatacataaatttgacatttagttttttttgtttgttttttggttttttttggctctgtcgcccaggctggagtgcagtggcat

SEQ ID NO: 77639 - DNA, 1122 bp, Homo sapiens
aaattatgcaacatttgagaaacatcttaaaagctaaacatgctagggatccttttcctaatataacatttcatagaaataagaaagaaataataattatttcttttttcttctagttggaatttttacacttctgatgagtatccagatgtctttgtgggcacaaaagaaacataagatttatctgagaaaattcaattcatatattcatagaaaatcagcaatgattccattcatattgtaaaaaaagaatcttatctcctatagaaaacagcaacatataaattcaataaataagacttagttaaggatagttaactattatactccaacaattcatgagcaacagtatatacactgagtaaaaatataaaatagtaaaatttcactaaatttagagaaatgcacatggtaataaaaagtataaattataaatgcaattaactaagaacagctctgaatgtatttgcatgggattggtccttgaataaaattgtcttacttcattaatacttcacaatactatttgcataagacaaaataccacagcaaaaaaaaaaatctgattaaaaaatgaaaaagcgatctgaacagacatttcccaaaggaagacatatacatggtcaataagtatatttttaaaatgctcaacattaactattcatacagaaatgcaaatcaaaaccacaatgagatatcatctcatcctaattaaggtgactattttcaaaaagacaaaaaatatgacagccgtggtggttcatatctgtaatcctaacactttgacaggccaaggcaggggaattgcttgagttcagaagtttgagatctgggcaacatattgagactctgtctctaaaaagcatattgagactctgtctctacaaaaaaattttaaaaagtaaaaattagctgggcgtggtggcacatgccagtaggtagtcccagctactcgaggttgctccagctcaggcgttcaaggctacagagagccatgattaaaccaaggcactccagcctgggtgacagagtgagactgtctcaaaataaaataaaaataacatattggtgaagatgcggggaaaaaaaaagactcttagacacactgctggtgggaatgta

SEQ ID NO: 77640 - DNA, 1134 bp, Homo sapiens
caatgcctgtttcccaagtccaaattataaccccttcacatggatgtttttcctggtttcatgtcctaactacacctatgagattggatcatggattagtttcacagtcatgacacaaacactgccagttggaatttttacacttctgatgagtatccagatgtctttgtgggcacaaaagaaacataagatttatctgagaaaattcaattcatatattcatagaaaatcagcaatgattccattcatattgtaaaaaaagaatcttatctcctatagaaaacagcaacatataaattcaataaataagacttagttaaggatagttaactattatactccaacaattcatgagcaacagtatatacactgagtaaaaatataaaatagtaaaatttcactaaatttagagaaatgcacatggtaataaaaagtataaattataaatgcaattaactaagaacagctctgaatgtatttgcatgggattggtccttgaataaaattgtcttacttcattaatacttcacaatactatttgcataagacaaaataccacagcaaaaaaaaaaatctgattaaaaaatgaaaaagcgatctgaacagacatttcccaaaggaagacatatacatggtcaataagtatatttttaaaatgctcaacattaactattcatacagaaatgcaaatcaaaaccacaatgagatatcatctcatcctaattaaggtgactattttcaaaaagacaaaaaatatgacagccgtggtggttcatatctgtaatcctaacactttgacaggccaaggcaggggaattgcttgagttcagaagtttgagatctgggcaacatattgagactctgtctctaaaaagcatattgagactctgtctctacaaaaaaattttaaaaagtaaaaattagctgggcgtggtggcacatgccagtaggtagtcccagctactcgaggttgctccagctcaggcgttcaaggctacagagagccatgattaaaccaaggcactccagcctgggtgacagagtgagactgtctcaaaataaaataaaaataacatattggtgaagatgcggggaaaaaaaaagactcttagacacactgctggtgggaatgta

SEQ ID NO: 77641 - DNA, 1088 bp, Homo sapiens
caatgcctgtttcccaagtccaaattataaccccttcacatggatgtttttcctggtttcatgtcctaactacacctatgagttggaatttttacacttctgatgagtatccagatgtctttgtgggcacaaaagaaacataagatttatctgagaaaattcaattcatatattcatagaaaatcagcaatgattccattcatattgtaaaaaaagaatcttatctcctatagaaaacagcaacatataaattcaataaataagacttagttaaggatagttaactattatactccaacaattcatgagcaacagtatatacactgagtaaaaatataaaatagtaaaatttcactaaatttagagaaatgcacatggtaataaaaagtataaattataaatgcaattaactaagaacagctctgaatgtatttgcatgggattggtccttgaataaaattgtcttacttcattaatacttcacaatactatttgcataagacaaaataccacagcaaaaaaaaaaatctgattaaaaaatgaaaaagcgatctgaacagacatttcccaaaggaagacatatacatggtcaataagtatatttttaaaatgctcaacattaactattcatacagaaatgcaaatcaaaaccacaatgagatatcatctcatcctaattaaggtgactattttcaaaaagacaaaaaatatgacagccgtggtggttcatatctgtaatcctaacactttgacaggccaaggcaggggaattgcttgagttcagaagtttgagatctgggcaacatattgagactctgtctctaaaaagcatattgagactctgtctctacaaaaaaattttaaaaagtaaaaattagctgggcgtggtggcacatgccagtaggtagtcccagctactcgaggttgctccagctcaggcgttcaaggctacagagagccatgattaaaccaaggcactccagcctgggtgacagagtgagactgtctcaaaataaaataaaaataacatattggtgaagatgcggggaaaaaaaaagactcttagacacactgctggtgggaatgta

SEQ ID NO: 77642 - DNA, 308 bp, Homo sapiens
cccactaagctttgtttgtgaccataaatattacaagtatacactgatttcaagacatgcttggggactgccaagacctccattatgttgctgatgtgtgtgctgtgctagtgcctttcatgttctttcttaaagttaaattagtgctgggtgaagcccatagtgtctcatgagttcagcagtcagtgtgaaccccaaaccattgccgtcagtcaagcagactgggcagtgggatcctagaccagttctcaaaaagggaactccactggtattgcaccattagctgtaggtactcttgattgccatta

SEQ ID NO: 77643 - DNA, 464 bp, Homo sapiens
gctttacattgttctggtatccagtggagcaaatcatcctacttgaagagtcagactccatgccaaatttctatgtgtcatttttcaggcccaaccataggcagttacaaaggccgtacacctcatgaaggaaagctaccctccccatgccagacttggggcacagccaatgcattgcagtctctgaagaaagttgcagtcaaggacccagacccccggcccagccatgctcttaggcatatctgcattcctagtccaagcacctctgtttagaggtctctttattggtggcctcctctaaacaattctgagaccattttactgggatcaggaaccttgatgccacttgtcttcactttcagtatttagtacttttccactcctagcacttttccctctttccccatgattccttgtaacaccatgatgagttacgcgtgtttttgaactttgtgtataccatg

SEQ ID NO: 77644 - DNA, 2869 bp, Homo sapiens
agcggggggcgggaggagccgcgctcctaagcgggagggagatccgccgcggagttacgggaaagttggtccgagttcccagagtttccctctgtggtgccctaggctcggccggccggtgccccggctcctttcctcctttcggccttcgccgtccaccaggtccctctctctgtccccggccgccatggagcagccgccggcgcctaagagtaaactaaaaaagctgagtgaagacagtttgactaagcagcctgaagaagtttttgatgtattagagaagcttggagaagggtcttatggaagtgtatttaaagcaatacacaaggaatccggtcaagttgtcgcaattaaacaagtacctgttgaatcagatcttcaggaaataatcaaagaaatttccataatgcagcaatgtgacagcccatatgttgtaaagtactatggcagttattttaagaatacagacctctggattgttatggagtactgtggcgctggctctgtctcagacataattagattacgaaacaagacattaatagaagatgaaattgcaaccattcttaaatctacattgaaaggactagaatatttgcactttatgagaaaaatacacagagatataaaagctggaaatattctcctcaatacagaaggacatgcaaaattggcagattttggagtggctggtcagttaacagatacaatggcaaaacgcaatactgtaataggaactccattttggatggctcctgaggtgattcaagaaataggctataactgtgtggccgacatctggtcccttggcattacttctatagaaatggctgaaggaaaacctccttatgctgatatacatccaatgagggctatttttatgattcccacaaatccaccaccaacattcagaaagccagaactttggtccgatgatttcaccgattttgttaaaaagtgtttggtgaagaatcctgagcagagagctactgcaacacaacttttacagcatccttttatcaagaatgccaaacctgtatcaatattaagagacctgatcacagaagctatggagatcaaagctaaaagacatgaggaacagcaacgagaattggaagaggaagaagaaaattcggatgaagatgagctggattcccacaccatggtgaagactagtgtggagagtgtgggcaccatgcgggccacaagcacgatgagtgaaggggcccagaccatgattgaacataatagcacgatgttggaatccgacttggggaccatggtgataaacagtgaggatgaggaagaagaagatggaactatgaaaagaaatgcaacctcaccacaagtacaaagaccatctttcatggactactttgataagcaagacttcaagaataagagtcacgaaaactgtaatcagaacatgcatgaacccttccctatgtccaaaaacgtttttcctgataactggaaagttcctcaagatggagactttgactttttgaaaaatctaagtttagaagaactacagatgcggttaaaagcactggaccccatgatggaacgggagatagaagaacttcgtcagagatacactgcgaaaagacagcccattctggatgcgatggatgcaaagaaaagaaggcagcaaaacttttgagtctaatttcctctctgtttttaactattctggagaccaagaaaccactaggaattgaaggaatatttggatatttttaatcctaagattttgccctacaattaggcagaggtcaaaaagtgacaatggtacatgcccaggtaaattcccaaaaggcagaattgacagttgtatctgctgtgcattcactctaagatgaggagaacaaaagaagtgtattctcttgttctgtcagctgcataccagtaataaaactgttatgaaatggattttcaaggtctctaaaccttgaaaatccaaagctattgttgcattgtacagcactgaagggctttatgttacaatattctttattcctatctagtatactaggctatttattgtatccccttaggtaaacttatttatttatgctattttgctttgtttcattttttaaggacaagatcaggatagctttggtgaaggtagggtcatattaatatgatgataatgtgcaaccaatttatactttctgcagggagctatggggtacattccttgatttccaggatagtttttcaaataggaaagcaataatggcagtagttctcaaatgggctaggccttttttatattgaagcaataattccatttttaccctttgaaattttgtttttttgatttttgatgtttggtacaaatagaactatatatatttaggtaaaatagatctatcgtgtttaaaaccaaagaaatcaatggaacccttgcacaaaaaagtgtgataaatatttttaaataaaaacttaatacaaatgtaatttgttaatattgtttcatgttttatgtgtagatctaatagctgaactgattcaaactgtaataagctcatcaatttcatttctatgaaaatgtgctctgttgtcacaggatgtttctgttgattttattcatttcctgggaattggtaaacatcatgttcctgatgataacccagtagcaaaaacatttgtactgagtggtacaagccttggggactgaaaaaaaaaagattaaaaccattaaaaagaaactcatttttacgctgaatgaacatttatatgattgcattgggaccagtcatttcctaagctacatatggccatcttgacagtgttttttcttttgtgtgtttaattattatgtgtaaatcataaagacaaataaatttcactgtgccaccca

SEQ ID NO: 77645 - DNA, 804 bp, Homo sapiens
ggggtatggaaaacaggctcttaagtataatgtttattgttatgaaagtgtaacttggtactcaatctccatagatgccagtacagcaatatctatttaaaataaaaatccatatattctttgatccaacagttgcacttctaggaatttattctacagaaatatttaaccatgtgtgaaataacatgtgtaaaaatattcgtagaacattgaaattgtaaaagattggaaagatcctaaatgtctgtcaacaagttggaaacaatttaaagtacaagaaaaagagttactggaaaaatacacctatgtacacacaacatatatacatatcttaatgcttataatgaagtatctctggaaaaataagcaagaaactggcctccagaaaagcatccttttatcaagaatgccaaacctgtatcaatattaagagacctgatcacagaagctatggagatcaaagctaaaagacatgaggaacagcaacgagaattggaagaggaagaagaaaattcggtttgtaattatcttcaaaaagttgatttttttcttctgagttatttgtctgtaattctgttaaaatatattaaaagcacttactgttttactatacaagtaagatatgttttttcattgaatctcaaaatatatttggtttgccttatatgtttgctatctttttctgatgtcttaagaattagtgattagtggaatgtaatgttgataggatgaacttccacagtacctagtatctagttgatactaactctgggtttgttaaataaatattgtcttgaatttata

SEQ ID NO: 77646 - DNA, 2939 bp, Homo sapiens
agcggggggcgggaggagccgcgctcctaagcgggagggagatccgccgcggagttacgggaaagttggtccgagttcccagagtttccctctgtggtgccctaggctcggccggccggtgccccggctcctttcctcctttcggccttcgccgtccaccaggtccctctctctgtccccggccgccatggagcagccgccggcgcctaagagtaaactaaaaaagctgagtgaagacagtttgactaagcagcctgaagaagtttttgatgtattagagaagcttggagaagggtcttatggaagtgtatttaaagcaatacacaaggaatccggtcaagttgtcgcaattaaacaagtacctgttgaatcagatcttcaggaaataatcaaagaaatttccataatgcagcaatgtgacagcccatatgttgtaaagtactatggcagttattttaagaatacagacctctggattgttatggagtactgtggcgctggctctgtctcagacataattagattacgaaacaagacattaatagaagatgaaattgcaaccattcttaaatctacattgaaaggactagaatatttgcactttatgagaaaaatacacagagatataaaagctggaaatattctcctcaatacagaaggacatgcaaaattggcagattttggagtggctggtcagttaacagatacaatggcaaaacgcaatactgtaataggaactccattttggatggctcctgaggtgattcaagaaataggctataactgtgtggccgacatctggtcccttggcattacttctatagaaatggctgaaggaaaacctccttatgctgatatacatccaatgagggctatttttatgattcccacaaatccaccaccaacattcagaaagccagaactttggtccgatgatttcaccgattttgttaaaaagtgtttggtgaagaatcctgagcagagagctactgcaacacaacttttacagcatccttttatcaagaatgccaaacctgtatcaatattaagagacctgatcacagaagctatggagatcaaagctaaaagacatgaggaacagcaacgagaattggaagaggaagaagaaaattcggatgaagatgagctggattcccacaccatggtgaagactagtgtggagagtgtgggcaccatgcgggccacaagcacgatgagtgaaggggcccagaccatgattgaacataatagcacgatgttggaatccgacttggggaccatggtgataaacagtgaggatgaggaagaagaagatggaactatgaaaagaaatgcaacctcaccacaagtacaaagaccatctttcatggactactttgataagcaagacttcaagaataagagtcacgaaaactgtaatcagaacatgcatgaacccttccctatgtccaaaaacgtttttcctgataactggaaagttcctcaagatggagactttgactttttgaaaaatctaagtttagaagaactacagatgcggttaaaagcactggaccccatgatggaacgggagatagaagaacttcgtcagagatacactgcgaaaagacagcccattctggatgcgatggatgcaaagaaaagaaggcagcaaaacttttgagtctaatttcctctctgtttttaactattctggagaccaagaaaccactaggaattgaaggaatatttggatatttttaatcctaagattttgccctacaattaggcagaggtcaaaaagtgacaatggtacatgcccaggtaaattcccaaaaggcagaattgacagttgtatctgctgtgcattcactctaagatgaggagaacaaaagaagtgtattctcttgttctgtcagctgcataccagtaataaaactgttatgaaatggattttcaaggtctctaaaccttgaaaatccaaagctattgttgcattgtacagcactgaagggctttatgttacaatattctttattcctatctagtatactaggctatttattgtatccccttaggtaaacttatttatttatgctattttgctttgtttcattttttaaggacaagatcaggatagctttggtgaaggtagggtcatattaatatgatgataatgtgcaaccaatttatactttctgcagggagctatggggtacattccttgatttccaggatagtttttcaaataggaaagcaataatggcagtagttctcaaatgggctaggccttttttatattgaagcaataattccatttttaccctttgaaattttgtttttttgatttttgatgtttggtacaaatagaactatatatatttaggtaaaatagatctatcgtgtttaaaaccaaagaaatcaatggaacccttgcacaaaaaagtgtgataaatatttttaaataaaaacttaatacaaatgtaatttgttaatattgtttcatgttttatgtgtagatctaatagctgaactgattcaaactgtaataagctcatcaatttcatttctatgaaaatgtgctctgttgtcacaggatgtttctgttgattttattcatttcctgggaattggtaaacatcatgttcctgatgataacccagtagcaaaaacatttgtactgagtggtacaagccttggggactgaaaaaaaaaagattaaaaccattaaaaagaaactcatttttacgctgaatgaacatttatatgattgcattgggaccagtcatttcctaagctacatatggccatcttgacagtgttttttcttttgtgtgtttaattattatgtgtaaatcataaagacaaataaatttcactgtgccacccaaaaaatatagtcgacgcggtcggcgatttagtatagtagtccaccgggaatctcgaccggacctcagcgg

SEQ ID NO: 77647 - DNA, 2250 bp, Homo sapiens
ggggtatggaaaacaggctcttaagtataatgtttattgttatgaaagtgtaacttggtactcaatctccatagatgccagtacagcaatatctatttaaaataaaaatccatatattctttgatccaacagttgcacttctaggaatttattctacagaaatatttaaccatgtgtgaaataacatgtgtaaaaatattcgtagaacattgaaattgtaaaagattggaaagatcctaaatgtctgtcaacaagttggaaacaatttaaagtacaagaaaaagagttactggaaaaatacacctatgtacacacaacatatatacatatcttaatgcttataatgaagtatctctggaaaaataagcaagaaactggcctccagaaaagcatccttttatcaagaatgccaaacctgtatcaatattaagagacctgatcacagaagctatggagatcaaagctaaaagacatgaggaacagcaacgagaattggaagaggaagaagaaaattcggatgaagatgagctggattcccacaccatggtgaagactagtgtggagagtgtgggcaccatgcgggccacaagcacgatgagtgaaggggcccagaccatgattgaacataatagcacgatgttggaatccgacttggggaccatggtgataaacagtgaggatgaggaagaagaagatggaactatgaaaagaaatgcaacctcaccacaagtacaaagaccatctttcatggactactttgataagcaagacttcaagaataagagtcacgaaaactgtaatcagaacatgcatgaacccttccctatgtccaaaaacgtttttcctgataactggaaagttcctcaagatggagactttgactttttgaaaaatctaagtttagaagaactacagatgcggttaaaagcactggaccccatgatggaacgggagatagaagaacttcgtcagagatacactgcgaaaagacagcccattctggatgcgatggatgcaaagaaaagaaggcagcaaaacttttgagtctaatttcctctctgtttttaactattctggagaccaagaaaccactaggaattgaaggaatatttggatatttttaatcctaagattttgccctacaattaggcagaggtcaaaaagtgacaatggtacatgcccaggtaaattcccaaaaggcagaattgacagttgtatctgctgtgcattcactctaagatgaggagaacaaaagaagtgtattctcttgttctgtcagctgcataccagtaataaaactgttatgaaatggattttcaaggtctctaaaccttgaaaatccaaagctattgttgcattgtacagcactgaagggctttatgttacaatattctttattcctatctagtatactaggctatttattgtatccccttaggtaaacttatttatttatgctattttgctttgtttcattttttaaggacaagatcaggatagctttggtgaaggtagggtcatattaatatgatgataatgtgcaaccaatttatactttctgcagggagctatggggtacattccttgatttccaggatagtttttcaaataggaaagcaataatggcagtagttctcaaatgggctaggccttttttatattgaagcaataattccatttttaccctttgaaattttgtttttttgatttttgatgtttggtacaaatagaactatatatatttaggtaaaatagatctatcgtgtttaaaaccaaagaaatcaatggaacccttgcacaaaaaagtgtgataaatatttttaaataaaaacttaatacaaatgtaatttgttaatattgtttcatgttttatgtgtagatctaatagctgaactgattcaaactgtaataagctcatcaatttcatttctatgaaaatgtgctctgttgtcacaggatgtttctgttgattttattcatttcctgggaattggtaaacatcatgttcctgatgataacccagtagcaaaaacatttgtactgagtggtacaagccttggggactgaaaaaaaaaagattaaaaccattaaaaagaaactcatttttacgctgaatgaacatttatatgattgcattgggaccagtcatttcctaagctacatatggccatcttgacagtgttttttcttttgtgtgtttaattattatgtgtaaatcataaagacaaataaatttcactgtgccaccca

SEQ ID NO: 77648 - DNA, 1831 bp, Homo sapiens
agcggggggcgggaggagccgcgctcctaagcgggagggagatccgccgcggagttacgggaaagttggtccgagttcccagagtttccctctgtggtgccctaggctcggccggccggtgccccggctcctttcctcctttcggccttcgccgtccaccaggtccctctctctgtccccggccgccatggagcagccgccggcgcctaagagtaaactaaaaaagctgagtgaagacagtttgactaagcagcctgaagaagtttttgatgtattagagaagcttggagaagggtcttatggaagtgtatttaaagcaatacacaaggaatccggtcaagttgtcgcaattaaacaagtacctgttgaatcagatcttcaggaaataatcaaagaaatttccataatgcagcaatgtgacagcccatatgttgtaaagtactatggcagttattttaagaatacagacctctggattgttatggagtactgtggcgctggctctgtctcagacataattagattacgaaacaagacattaatagaagatgaaattgcaaccattcttaaatctacattgaaaggactagaatatttgcactttatgagaaaaatacacagagatataaaagctggaaatattctcctcaatacagaaggacatgcaaaattggcagattttggagtggctggtcagttaacagatacaatggcaaaacgcaatactgtaataggaactccattttggatggctcctgaggtgattcaagaaataggctataactgtgtggccgacatctggtcccttggcattacttctatagaaatggctgaaggaaaacctccttatgctgatatacatccaatgagggctatttttatgattcccacaaatccaccaccaacattcagaaagccagaactttggtccgatgatttcaccgattttgttaaaaagtgtttggtgaagaatcctgagcagagagctactgcaacacaacttttacagcatccttttatcaagaatgccaaacctgtatcaatattaagagacctgatcacagaagctatggagatcaaagctaaaagacatgaggaacagcaacgagaattggaagaggaagaagaaaattcggatgaagatgagctggattcccacaccatggtgaagactagtgtggagagtgtgggcaccatgcgggccacaagcacgatgagtgaaggggcccagaccatgattgaacataatagcacgatgttggaatccgacttggggaccatggtgataaacagtgaggatgaggaagaagaagatggaactatgaaaagaaatgcaacctcaccacaagtacaaagaccatctttcatggactactttgataagcaagacttcaagaataagagtcacgaaaactgtaatcagaacatgcatgaacccttccctatgtccaaaaacgtttttcctgataactggaaagttcctcaagatggagactttgactttgtaagtacattttaattcttcaatttatgttttctccttctatattttatcatcaaattgagaagcatagttcatatgtatatgaactgtgtgtatgtatatacaattatagaccatatgttaatattcattatacagccatatacatggttagagaaattgtgaaactgtagcttgcttatagaaatgtacttgcagagaaatacttttttatagttaaataaatcatagctcaaatttaaataaatattcaggactccttaaaactaaaatgacaactattttaaaagatgttttcaataatgcaaatatgagatacttctgaca

SEQ ID NO: 77649 - DNA, 1913 bp, Homo sapiens
agcggggggcgggaggagccgcgctcctaagcgggagggagatccgccgcggagttacgggaaagttggtccgagttcccagagtttccctctgtggtgccctaggctcggccggccggtgccccggctcctttcctcctttcggccttcgccgtccaccaggtccctctctctgtccccggccgccatggagcagccgccggcgcctaagagtaaactaaaaaagctgagtgaagacagtttgactaagcagcctgaagaagtttttgatgtattagagaagcttggagaagggtcttatggaagtgtatttaaagcaatacacaaggaatccggtcaagttgtcgcaattaaacaagtacctgttgaatcagatcttcaggaaataatcaaagaaatttccataatgcagcaatgtgacagcccatatgttgtaaagtactatggcagttattttaagaatacagacctctggattgttatggagtactgtggcgctggctctgtctcagacataattagattacgaaacaagacattaatagaagatgaaattgcaaccattcttaaatctacattgaaaggactagaatatttgcactttatgagaaaaatacacagagatataaaagctggaaatattctcctcaatacagaaggacatgcaaaattggcagattttggagtggctggtcagttaacagatacaatggcaaaacgcaatactgtaataggaactccattttggatggctcctgaggtgattcaagaaataggctataactgtgtggccgacatctggtcccttggcattacttctatagaaatggctgaaggaaaacctccttatgctgatatacatccaatgagggctatttttatgattcccacaaatccaccaccaacattcagaaagccagaactttggtccgatgatttcaccgattttgttaaaaagtgtttggtgaagaatcctgagcagagagctactgcaacacaacttttacagcatccttttatcaagaatgccaaacctgtatcaatattaagagacctgatcacagaagctatggagatcaaagctaaaagacatgaggaacagcaacgagaattggaagaggaagaagaaaattcggatgaagatgagctggattcccacaccatggtgaagactagtgtggagagtgtgggcaccatgcgggccacaagcacgatgagtgaaggggcccagaccatgattgaacataatagcacgatgttggaatccgacttggggaccatggtgataaacagtgaggatgaggaagaagaagatggaactatgaaaagaaatgcaacctcaccacaagtacaaagaccatctttcatggactactttgataagcaagacttcaagaataagagtcacgaaaactgtaatcagaacatgcatgaacccttccctatgtccaaaaacgtttttcctgataactggaaagttcctcaagatggagactttgactttatagagccttactgggcccgtgcagattttccacttcctcggctgtggcccttggcatctgcggttatattcaacaggagcaccaacggtggccaagaagtcactaggatggtggctaaaggggaggagctgagctacaccccacttgatggaacgcaaagactgtggtgaggttggagagcagtgctgtgcgtccttcctcagccttaacgagtgcggggcaaggttaacacagatttctacacccttttgctgcatacacagacgaggccacctgcagatgccaccactgctcagtgaatcagcagaagccttggaaagccttgtgagttccacaggacacagaattgcttgagcttgagccaaattgtctctgttatccattgctacattaaaaaaacacttcaaa

SEQ ID NO: 77650 - DNA, 730 bp, Homo sapiens
agcggggggcgggaggagccgcgctcctaagcgggagggagatccgccgcggagttacgggaaagttggtccgagttcccagagtttccctctgtggtgccctaggctcggccggccggtgccccggctcctttcctcctttcggccttcgccgtccaccaggtccctctctctgtccccggccgccatggagcagccgccggcgcctaagagtaaactaaaaaagctgagtgaagacagtttgactaagcagcctgaagaagtttttgatgtattagagaagcttggagaagggtcttatggaagtgtatttaaagcaatacacaaggaatccggtcaagttgtcgcaattaaacaagtacctgttgaatcagatcttcaggaaataatcaaagaaatttccataatgcagcaatgtgacagcccatatgttgtaaagtactatggcagttattttaagaatacagacctctggattgttatggagtactgtggcgctggctctgtctcagacataattagattacgaaacaagacaggattcttaacagataccactgaaggaagtgctagctgtgatttgagaatggatctaacgcttttccatcttggagctgaattcttacattaccttcttctatatgaagcagatcctctctcatgtgttttctccctcttggtgttttcagtataaatctgaccattttgaaatagttgggtatggacctat

SEQ ID NO: 77651 - DNA, 2539 bp, Homo sapiens
agcggggggcgggaggagccgcgctcctaagcgggagggagatccgccgcggagttacgggaaagttggtccgagttcccagagtttccctctgtggtgccctaggctcggccggccggtgccccggctcctttcctcctttcggccttcgccgtccaccaggtccctctcttctgtctcagacataattagattacgaaacaagacattaatagaagatgaaattgcaaccattcttaaatctacattgaaaggactagaatatttgcactttatgagaaaaatacacagagatataaaagctggaaatattctcctcaatacagaaggacatgcaaaattggcagattttggagtggctggtcagttaacagatacaatggcaaaacgcaatactgtaataggaactccattttggatggctcctgaggtgattcaagaaataggctataactgtgtggccgacatctggtcccttggcattacttctatagaaatggctgaaggaaaacctccttatgctgatatacatccaatgagggctatttttatgattcccacaaatccaccaccaacattcagaaagccagaactttggtccgatgatttcaccgattttgttaaaaagtgtttggtgaagaatcctgagcagagagctactgcaacacaacttttacagcatccttttatcaagaatgccaaacctgtatcaatattaagagacctgatcacagaagctatggagatcaaagctaaaagacatgaggaacagcaacgagaattggaagaggaagaagaaaattcggatgaagatgagctggattcccacaccatggtgaagactagtgtggagagtgtgggcaccatgcgggccacaagcacgatgagtgaaggggcccagaccatgattgaacataatagcacgatgttggaatccgacttggggaccatggtgataaacagtgaggatgaggaagaagaagatggaactatgaaaagaaatgcaacctcaccacaagtacaaagaccatctttcatggactactttgataagcaagacttcaagaataagagtcacgaaaactgtaatcagaacatgcatgaacccttccctatgtccaaaaacgtttttcctgataactggaaagttcctcaagatggagactttgactttttgaaaaatctaagtttagaagaactacagatgcggttaaaagcactggaccccatgatggaacgggagatagaagaacttcgtcagagatacactgcgaaaagacagcccattctggatgcgatggatgcaaagaaaagaaggcagcaaaacttttgagtctaatttcctctctgtttttaactattctggagaccaagaaaccactaggaattgaaggaatatttggatatttttaatcctaagattttgccctacaattaggcagaggtcaaaaagtgacaatggtacatgcccaggtaaattcccaaaaggcagaattgacagttgtatctgctgtgcattcactctaagatgaggagaacaaaagaagtgtattctcttgttctgtcagctgcataccagtaataaaactgttatgaaatggattttcaaggtctctaaaccttgaaaatccaaagctattgttgcattgtacagcactgaagggctttatgttacaatattctttattcctatctagtatactaggctatttattgtatccccttaggtaaacttatttatttatgctattttgctttgtttcattttttaaggacaagatcaggatagctttggtgaaggtagggtcatattaatatgatgataatgtgcaaccaatttatactttctgcagggagctatggggtacattccttgatttccaggatagtttttcaaataggaaagcaataatggcagtagttctcaaatgggctaggccttttttatattgaagcaataattccatttttaccctttgaaattttgtttttttgatttttgatgtttggtacaaatagaactatatatatttaggtaaaatagatctatcgtgtttaaaaccaaagaaatcaatggaacccttgcacaaaaaagtgtgataaatatttttaaataaaaacttaatacaaatgtaatttgttaatattgtttcatgttttatgtgtagatctaatagctgaactgattcaaactgtaataagctcatcaatttcatttctatgaaaatgtgctctgttgtcacaggatgtttctgttgattttattcatttcctgggaattggtaaacatcatgttcctgatgataacccagtagcaaaaacatttgtactgagtggtacaagccttggggactgaaaaaaaaaagattaaaaccattaaaaagaaactcatttttacgctgaatgaacatttatatgattgcattgggaccagtcatttcctaagctacatatggccatcttgacagtgttttttcttttgtgtgtttaattattatgtgtaaatcataaagacaaataaatttcactgtgccaccca

SEQ ID NO: 77652 - DNA, 1859 bp, Homo sapiens
tgtcttttagctttgatctccatagcttctgtgatcaggtctcttaatattgatacaggtttggcattcttgctaaaagacatgaggaacagcaacgagaattggaagaggaagaagaaaattcggatgaagatgagctggattcccacaccatggtgaagactagtgtggagagtgtgggcaccatgcgggccacaagcacgatgagtgaaggggcccagaccatgattgaacataatagcacgatgttggaatccgacttggggaccatggtgataaacagtgaggatgaggaagaagaagatggaactatgaaaagaaatgcaacctcaccacaagtacaaagaccatctttcatggactactttgataagcaagacttcaagaataagagtcacgaaaactgtaatcagaacatgcatgaacccttccctatgtccaaaaacgtttttcctgataactggaaagttcctcaagatggagactttgactttttgaaaaatctaagtttagaagaactacagatgcggttaaaagcactggaccccatgatggaacgggagatagaagaacttcgtcagagatacactgcgaaaagacagcccattctggatgcgatggatgcaaagaaaagaaggcagcaaaacttttgagtctaatttcctctctgtttttaactattctggagaccaagaaaccactaggaattgaaggaatatttggatatttttaatcctaagattttgccctacaattaggcagaggtcaaaaagtgacaatggtacatgcccaggtaaattcccaaaaggcagaattgacagttgtatctgctgtgcattcactctaagatgaggagaacaaaagaagtgtattctcttgttctgtcagctgcataccagtaataaaactgttatgaaatggattttcaaggtctctaaaccttgaaaatccaaagctattgttgcattgtacagcactgaagggctttatgttacaatattctttattcctatctagtatactaggctatttattgtatccccttaggtaaacttatttatttatgctattttgctttgtttcattttttaaggacaagatcaggatagctttggtgaaggtagggtcatattaatatgatgataatgtgcaaccaatttatactttctgcagggagctatggggtacattccttgatttccaggatagtttttcaaataggaaagcaataatggcagtagttctcaaatgggctaggccttttttatattgaagcaataattccatttttaccctttgaaattttgtttttttgatttttgatgtttggtacaaatagaactatatatatttaggtaaaatagatctatcgtgtttaaaaccaaagaaatcaatggaacccttgcacaaaaaagtgtgataaatatttttaaataaaaacttaatacaaatgtaatttgttaatattgtttcatgttttatgtgtagatctaatagctgaactgattcaaactgtaataagctcatcaatttcatttctatgaaaatgtgctctgttgtcacaggatgtttctgttgattttattcatttcctgggaattggtaaacatcatgttcctgatgataacccagtagcaaaaacatttgtactgagtggtacaagccttggggactgaaaaaaaaaagattaaaaccattaaaaagaaactcatttttacgctgaatgaacatttatatgattgcattgggaccagtcatttcctaagctacatatggccatcttgacagtgttttttcttttgtgtgtttaattattatgtgtaaatcataaagacaaataaatttcactgtgccaccca

SEQ ID NO: 77653 - DNA, 866 bp, Homo sapiens
attgatttctctacttcgacttgccctttatggaggtcaaacatcaccagtccttaggtaatacctcggaggccactatctccagacacatcattgtcttgggaaagggtctggggcacctgcatgtctgtgccttggtttccatgtgtccctactggagagaattatgcatagagagcgtggcaggcattgggactaaacaataattgcacccttattccatgtgggggaagggtgggaacttcaggagtgtgctgagggggatttggggaagtggaaacttgacccaatgatgagtattggtgaacctggatccaacaggaaaatgacttgacacctgagccagccacagccccaaatggatcttttccctactcagtgcaatttgacccttattgtccatataagcagagtaaagaagttggggacataaggctgctgctggactgagactctaggctgcatcaaacactgctgaattaaattttaagatgggatagcacatgcatgctccaaataaaaggagatattgctgtgacaaatgcaacacaccatttagaaacatctcttgatttagagtgagtcatcaaaagctttttaatcctgcagtatggagagtcagtggtgctttggtgccctgcctgtttcctgggtatccggcacagccttataccacgagcctctcatatgactgggtactgccttcctaatgagcctggacagtggcttgctcctttagagcacacactggtttgcactgcttcctggaaactacctccctgctaataagccttcccagtaataagcctccctgacaatgcgcctcctgacacatgcttcctcaagtctgtgcctccaaaccccat

SEQ ID NO: 77654 - DNA, 806 bp, Homo sapiens
acgttctctactcatatatgggagctaaacgaattgatcctcatggaggtagtgaatagactggcagttatcagaggctgggaatggtagtggggagtaaaaaggggtgggttaatgggtacaaaaatacagtcagataaaaggaataagcactactttttgatagtacaataggtcaactgtagttaacaataatttattttatatttcaaaatagctagaagagaatatttggattgttcccaacacaaagaaatgataagtgtttggggtaatggatatttcaattacccacaatttaacagttatgcattgtatgcttgtaccaaaaaatcacatgtgccccataaatatgttcaactactatacattcagaaaaattaaaaataaaaagtagatatcttgcattaccatggagtcacatattaaattgagctcatgataaaatgcacaatgaaatggcttgcttggtggtctgaagaaaaatagtcaaagtacagattgtaaggttgaacaatttaaaaaataaatagaggagcaatctgcagaaatttgtagagggtgagacaaaaggaggaatgtaggatgagtccaaagccttcagctgaggtgactgggcagatagtgatggctttaagtgaaataaggacaaatgaaacaagagggttgggcgcgatggctcacccctgtaatcccagcattttgagaggctgaggcaggtggatcacctgaggtcaggaattttgagaccagcctggccaacatggtgaaaccctgtctctactagaaatacaaaaattagctgg

SEQ ID NO: 77655 - DNA, 301 bp, Homo sapiens
cttagagttaatgtgtaaagattgttattaaataagaatcaaaagaagtgatttaaacactaaagaggtagcaaagaaccaaagtaagttgaagaattactgtgttctttaaagacaaaagcagaaatgaatcaactaagaaaaagagagaatgaaaccaaagaacaggttttggaagggggcagacagcgatgaagcggggagagtaaagacaagtagacctggagccggtgtggtggaaaaaggagagaaatcatagcgtgtaagaagtagtaatcgtcgaaggaaggtgaatgcaagc

SEQ ID NO: 77656 - DNA, 807 bp, Homo sapiens
attgaaaactacaacatgttaatggaagcaaggcacctgttgaaggaaaaagaagatccatccttatagaaatagttgaaggcaactgagaaaaggtgaagccattatgagttgccagaaagctgtacttgagttaaacatagggtcacagcttgggccaaagagtcctgagagaacagaaggtgtaactgcatttgaagactatggcacaggcctgcttgaaaaccaactcagcgtgggtgactttgtaaaaatacagaaggcctttgagttacttacaatgcatctttagacgctatcatttccagtacaaccagcaatacaaatagtgtggtgatggcttggagagagaaatcaaaaaagcgtcttaatatgacatccttcaacattgcccagggcattcatgcttttgattatcactctcggctcaatttaattgcaactgctggcattaacaataaagtttgcctttggaatccctatgtggtctctaaaccagtgggtgtcctttggggccactcagccagtgtaatagccgtccaattctttgtggaaagaaaacaacttttcagcttctccaaggataaagttttgagactctgggatattcaacaccagctgtccatccagaggatagcttgttctttccccaaaagtcaggacttcagatgtctcttccactttgatgaagcccatggacgacttttcatctcgtttaataaccagctagcattggttggcaatgaaaagtgaagccagcaagagggtgaaaagccatgagaaagcagtcacttgtgttctttacaa

SEQ ID NO: 77657 - DNA, 1412 bp, Homo sapiens
cttagtaacacgttgatgagaaatctactttttccactcttgactcactctgagccttcacagggcagtctgcgaagattgcaggcattgtttgttcttgtcttggatttatgcctttaaatttcaccttttattacacagctatagcaggcctttttatgagactaacctggcctctccactaaaggatgtgtgactttctggggacagaagagtacagtccctgacatcacacactgcagagatggataaccaaggagtaatctactcagacctgaatctgcccccaaacccaaagaggcagcaacgaaaacctaaaggcaataaaagctccattttagcaactgaacaggaaataacctatgcggaattaaaccttcaaaaagcttctcaggattttcaagggaatgacaaaacctatcactgcaaagatttaccatcagctccagagaagctcattgttgggatcctgggaattatctgtcttatcttaatggcctctgtggtaacgatagttgttattccctcacgtcattgtggccattgtcctgaggagtggattacatattccaacagttgttactacattggtaaggaaagaagaacttgggaagagagtttgctggcctgtacttcgaagaactccagtctgctttctatagataatgaagaagaaatgaaatttctgtccatcatttcaccatcctcatggattggtgtgtttcgtaacagcagtcatcatccatgggtgacaatgaatggtttggctttcaaacatgagataaaagactcagataatgctgaacttaactgtgcagtgctacaagtaaatcgacttaaatcagcccagtgtggatcttcaataatatatcattgtaagcataagctttagaggtaaagcgtttgcatttgcagtgcatcagataaattgtatatttcttaaaatagaaatatattatgattgcataaatcttaaaatgaattatgttatttgctctaataagaaaattctaaatcaattattgaaacaggatacacacaattactaaagtacagacatcctagcatttgtgtcgggctcattttgctcaacatggtatttgtggttttcagcctttctaaaagttgcatgttatgtgagtcagcttataggaagtaccaagaacagtcaaacccatggagacagaaagtagaatagtggttgccaatgtctgagggaggttgaaataggagatgacctctaactgatagaacgttactttgtgtcgtgatgaaaactttctaaatttcagtagtggtgatggttgtaactctgcgaatatactaaacatcattgatttttaatcattttaagtgcatgaaatgtatgctttgtacacgacacttcaataaagctatccagaaaaaaaaaa

SEQ ID NO: 77658 - DNA, 1466 bp, Homo sapiens
cttagtaacacgttgatgagaaatctactttttccactcttgactcactctgagccttcacagggcagtctgcgaagattgcaggcattgtttgttcttgtcttggatttatgcctttaaatttcaccttttattacacagctatagcaggcctttttatgagactaacctggcctctccactaaaggatgtgtgactttctggggacagaagagtacagtccctgacatcacacactgcagagatggataaccaaggagtaatctactcagacctgaatctgcccccaaacccaaagaggcagcaacgaaaacctaaaggcaataaaagctccattttagcaactgaacaggaaataacctatgcggaattaaaccttcaaaaagcttctcaggattttcaagggaatgacaaaacctatcactgcaaagatttaccatcagctccagagaagctcattgttgggatcctgggaattatctgtcttatcttaatggcctctgtggtaacgatagttgttattccctctacattaatacagaggcacaacaattcttccctgaatacaagaactcagaaagcacgtcattgtggccattgtcctgaggagtggattacatattccaacagttgttactacattggtaaggaaagaagaacttgggaagagagtttgctggcctgtacttcgaagaactccagtctgctttctatagataatgaagaagaaatgaaatttctgtccatcatttcaccatcctcatggattggtgtgtttcgtaacagcagtcatcatccatgggtgacaatgaatggtttggctttcaaacatgagataaaagactcagataatgctgaacttaactgtgcagtgctacaagtaaatcgacttaaatcagcccagtgtggatcttcaataatatatcattgtaagcataagctttagaggtaaagcgtttgcatttgcagtgcatcagataaattgtatatttcttaaaatagaaatatattatgattgcataaatcttaaaatgaattatgttatttgctctaataagaaaattctaaatcaattattgaaacaggatacacacaattactaaagtacagacatcctagcatttgtgtcgggctcattttgctcaacatggtatttgtggttttcagcctttctaaaagttgcatgttatgtgagtcagcttataggaagtaccaagaacagtcaaacccatggagacagaaagtagaatagtggttgccaatgtctgagggaggttgaaataggagatgacctctaactgatagaacgttactttgtgtcgtgatgaaaactttctaaatttcagtagtggtgatggttgtaactctgcgaatatactaaacatcattgatttttaatcattttaagtgcatgaaatgtatgctttgtacacgacacttcaataaagctatccagaaaaaaaaaa

SEQ ID NO: 77659 - DNA, 1560 bp, Homo sapiens
  misc_feature (2)..(4): n is a, c, g, or t
gnnngcatgccccagaggtacagatgtatatgtctcccaggaagtctctgtgggtgaaggactgatctcaagttgtggctgacactagttaaagccaaggtagagggctgtttcagggtctacattgagactacagttgatatgcctacctcctgagacactagtgtgtgagtctcctcctgggcccctgggcaaatggttttggcagcatgaccaaggcctaaatggggctgaaggcaagcacaggaggatgggtcccttttcaggtctggagatggaatcactgttgctatagcaggcctttttatgagactaacctggcctctccactaaaggatgtgtgactttctggggacagaagagtacagtccctgacatcacacactgcagagatggataaccaaggagtaatctactcagacctgaatctgcccccaaacccaaagaggcagcaacgaaaacctaaaggcaataaaagctccattttagcaactgaacaggaaataacctatgcggaattaaaccttcaaaaagcttctcaggattttcaagggaatgacaaaacctatcactgcaaagatttaccatcagctccagagaagctcattgttgggatcctgggaattatctgtcttatcttaatggcctctgtggtaacgatagttgttattccctcacgtcattgtggccattgtcctgaggagtggattacatattccaacagttgttactacattggtaaggaaagaagaacttgggaagagagtttgctggcctgtacttcgaagaactccagtctgctttctatagataatgaagaagaaatgaaatttctgtccatcatttcaccatcctcatggattggtgtgtttcgtaacagcagtcatcatccatgggtgacaatgaatggtttggctttcaaacatgagataaaagactcagataatgctgaacttaactgtgcagtgctacaagtaaatcgacttaaatcagcccagtgtggatcttcaataatatatcattgtaagcataagctttagaggtaaagcgtttgcatttgcagtgcatcagataaattgtatatttcttaaaatagaaatatattatgattgcataaatcttaaaatgaattatgttatttgctctaataagaaaattctaaatcaattattgaaacaggatacacacaattactaaagtacagacatcctagcatttgtgtcgggctcattttgctcaacatggtatttgtggttttcagcctttctaaaagttgcatgttatgtgagtcagcttataggaagtaccaagaacagtcaaacccatggagacagaaagtagaatagtggttgccaatgtctgagggaggttgaaataggagatgacctctaactgatagaacgttactttgtgtcgtgatgaaaactttctaaatttcagtagtggtgatggttgtaactctgcgaatatactaaacatcattgatttttaatcattttaagtgcatgaaatgtatgctttgtacacgacacttcaataaagctatccagaaaaaaaaaa

SEQ ID NO: 77660 - DNA, 493 bp, Homo sapiens
ctaagactctacttgagctagaaatgttgagcagatccatttctcccctctacatcaaagccaactgtcagtggggaatagaaaaaaaggatgaacttccaggcattttatggactggtgcttaataaaaagagtgcctagtaaagtgcaaatgatagaaacatgaataataaatgtagtccttttacaagctgaccttaattggaaaaagtactcatggggacggatggaagagaaaaaagaaaggcagtgtcttgagtggattttttgacagcagagttccaaagggatgggatgatggaagagcctgttgcaaattttgatagcctctcagctaacattgctcctctaacacatttagccaaaaacagcagcccgtgaatcagtaatgagttaaggtgagctagaactaaatctcccaagggaaaaacagtcctataagtaactggcatactcctttattcacagggcatggcaggaagccaaaagtgaa

SEQ ID NO: 77661 - DNA, 335 bp, Homo sapiens
aggcatgagccactgctcctggcctaaagtgtataaagttttaaagcatgatttagacctgtatacaagtataatctcaactatgaaaatatataacatgtaaacagaaaaatttggaataaaatatccaaatctattttaaatgaaagaagtcttaggagacttcttaaagttatatatttcccatgatctcagcttcccttttctttcctttgaaagtagctgactgccgtatgctaacccgctaggctttattttttcatgcatagtcaccaatcttccaggtttcacatatttttgaatacatgcactgcgacacaggaccagagatgtaa

SEQ ID NO: 77662 - DNA, 210 bp, Homo sapiens
aagtgatcaaatttatgaattattatagcattcctgaaagagaaggagaaaaagcaaataacctgggaaacatatttgaagaataattcaagaaaaatctctctaatcttgctagagatgttgacatcctgatacaagaaatccagagaccatctacaaagtaaacaccaccaaggcagatagtcatgagactgttcaagtccaatgctt

SEQ ID NO: 77663 - DNA, 626 bp, Homo sapiens
ttttaacttacatcttgtttatattttttctaacaacatctagacttaatcattactgtatcttccctctgaacaacatgaaaacttgtgtactttcactaccccattgcctagccttatcatgaacttgaggttcaaagagttaatccctctgttcattattgctttttgcacactccattctattctcttagattttttgctgtaatttttagaacacttcctctaggagtttctaatggttcgttacctacacctttccctcaaccccacccagatgacctaagtcaagatgaaagaaaagatccttctgcaagaaatctctttacctatcaactcatttatttgcccacttgatcttctgtttctccagtctcagagaatccagcatccactgttctgcccagtatttatccattgacctgtgctctgtctggatcctatcttctctcaactcttgaactttttcttttttggtgtttgcatttacttatgctatattaaacctcttggttcctttctcatagccagtaggttcctctctctacttcaactgtttttcaatgccatagattccttctggcaaatattctgtacctcttcttcatgtcttggtaaagcctatt

SEQ ID NO: 77664 - DNA, 417 bp, Homo sapiens
tgacagaaagtgaaaagacaaatgatattttaataatattatgaaaatagtttttaccttgtagaccccctgaaatggtcttcggcatctgtagtggtcccagaccataccttgaaaactactgcattttacgaagaagattgtttcggtaatgactgattaaatcctatcaaggaaatgaaggccaaatgtagttatctttttattttttcatgttccttttaggatgtaaaataaaggttatttgttaacaaaaccgtaaaccaaggaaacatttaaaataggattctgttttacaaaagttgtctagtctctaaagcatttcttctcatagatactaagacttagcattggaccaagatattgtaaaaacatgtacaactataccctgaaggaagagctcttcagtgtctttga

SEQ ID NO: 77665 - DNA, 408 bp, Homo sapiens
ttaagcagtctccatcgcgcaggctggagtgcagtgacgcgatctcggttcactgcaacctctgcctcctgggttcaagtcattcttctgcctcagcctcccgagtagcttagattacaggcatgcgccactacgcatagctaatttttgtatttttagtggagatggggttttgccatattggtcaggctggtctcaaactcctgacctcaggagatccacccggttgggccacccgaagtggtgggattacaggcgtgagccaccatgcctagccttcgatggcttttaatgtctttaaactacagtggttccttggtatcctttgggtagtggttatagtacctctcccctattcctgacacccatggataccaaaatctgcaggtgcttgagtcccttatataa

SEQ ID NO: 77666 - DNA, 361 bp, Homo sapiens
gtgatctgcctgccttggcctcccaaagtgctgagattataggagtgagccaccatgcccagccaactcctaatctttaaaggtgcaaatattttacttatttgaaacagtaacatttttgggagtaaatctggtttattttttagtctcaaaactgaactgcatttcaaccaaagatctattctgaagcaaataagttctcagcacttaaatcaaccaaaaacaatataaaaattcttatctaggccagtagcagtgtttcatgcctgtaatcccaatactttgggagactgaggcaggaggaccacttgaggccaggggttcaagaccagctggccagtctaggtgacaggcaatgtaa

SEQ ID NO: 77667 - DNA, 749 bp, Homo sapiens
cggtaataccaccttccatgcaggccagttttgaagactgaatgagataatgcctgtagaactacttagactggtacaaaataaacacattcacaatgtcaactattgtgcgtgctgtccctgcgtggtgacagtaccacagagagtgttgtccccattgtatctgtccagtgctttgtgagtgtgtgtttgtttttagtggaatgaattcttttcctcattcatgagcatagaggctgatagaaattccaggcaatctgatctacctcgaggtccctcccctgggccctcacacaaagccagaaaacagaaatgagtcctttctccctgtctggcttctggaggctggccatagggcctgaaacggcatccctgccaagctaacacaggttcctgggtgcccaaagtgtgcccgcccctgccagatggcagacagtgcccatagctgccacaccctccaccccagcacactcaggaccatgctcttgttgctactcacccttcagtcaaaaaatcaaacaaaacacaacgggccctggagagctgtcctcaggtttcctccttcccaggaggaagcaaaggtgaaaggaaaaagggtttctgcataaggtgcccacctttggggagtctgaatttctgccctcttattttattaatattatttgctgctatgctgttcagtcgtgaagcccagggccccacacagagtgacgcctctgggtcccgcggtggatggaaagggcggatct

SEQ ID NO: 77668 - DNA, 827 bp, Homo sapiens
cttttacaatggtaaggaatctcagtttggctggagaatagacttcaaatgccagctgaaatccagacggtgattggcctcaaagatggtgaaattaggtttttacatgcttattctcctcttaatgcccaatgagtaactggtttttctcccattttcttattaaaggaaaatgaaaaactgagtaggctgcaaatgatgggattttatttggctctgcaaggatttttataaatactacagcagctgtttacatgttttccatgattgccccatgcatatcagaatgattctgctcattgtttcatgcataagcccacatttgactagtttatctttgaatgtttgccattctcattttgtttgcactcctttgggtaatattagttacctgatgaagggactctcctgtatttggaattccaagctcttccaacttcagaatgccatgtctttactacatatattatgtagtactgttaaacaatcagtttgagatctgtagcacaattcacagagcaacaatctctcctgtatttccaaataaagtctttgaagggaatgatatttgcagaatgtgctatagtggtaaatttagagagtacaagataattacttgtaattatggcaatttctgtaagggaaatcatcttaatttgttcccactaagaaatagaattgctctactcatagcgtgtgaatctttttaggagattaatgcggtgtgccttcattactttgaatggacattacagcttttcactacatctgaaattaccccttaattcatgcttctgtttgaatttctgctaaatgcagtcttcact

SEQ ID NO: 77669 - DNA, 737 bp, Homo sapiens
cgtaatccgcctgccttggccttccaaagtggggattacaggtgtgagccactgtgcccagccctttctcactgacttataagagtactctctgtgtgctgcttctgcttgctggttacccgcccactcctctgtctttgccactctgttaaagcggcccttgggatggcgagcaggggaccccacagcactgtccccagggaattcaagtcctgtgaccgccagtgacttactccgtttccttggggcttttcccacctcaacctgtattgtttctttttcataaataaattcagcattatagtatcattaaaagaagccttaaagaggcgtatttttccttttggttgaaggaagggaatagttaataatagttttcacctcttctcccaaaaagtacagtccaaatttgtgcacagagattgctgtggtattcaagaggtacttgcattttagctccttaattccctggccagtgttagctgtttagtgccccctcacccatcccatttaggcacatcccaatagacagagccaggctgagttacagggggagagtgtcatctctggccccgattaagatggccttgtcacagtgaccgctgagtaggcatggatgagtgggatatttagctgaggaaccctttccctttcctactaaggggggcaacttaagggaactccaaatgtttcgggggttcccacattccattctggcaacttaatccacatccttc

SEQ ID NO: 77670 - DNA, 6229 bp, Homo sapiens
gcccatgagcgcgccgcggcccgggctggcgtgcgggtgcggctgcggcggccgcgcggcggggccccgggaggcgggtcgctgagcggggcgcgcggccccgaggatgcgggagcgggagcgggagcagcgctggcgtcaatgctcccttcctcgggccattggagactccgttgctttttaatggcggcagcggctgctgggtgagcagctggaggccggacagtgttcgtcccatccggagaggatcgctttctcctggcgtcaccagcgctgggttggtgggggtagcttttccctctttgctcctccattcttgaagaaagaagaagatgccactgccatttgggttgaaactgaaacgcacccggcgctacacggtgtccagcaagagttgcctggttgcccggatccaactgcttaataacgagtttgtggagttcaccctgtccgtggagagcactggccaggaaagcctcgaggccgtggcccagaggctggagctgcgggaggtcacttacttcagcctctggtactacaacaagcaaaatcagcgccggtgggtagatttggaaaaacctttgaagaagcagctggataaatatgcattggaacctaccgtctattttggagtggtgttttatgtgccttcagtttctcagctgcagcaggagattaccaggtatcagtattatctgcaactgaagaaagatatcttggaaggaagtattccttgtaccttagaacaagcaattcagctagcaggcttagctgttcaagcggattttggtgactttgatcagtatgaatcccaggactttcttcagaaatttgccttgtttcctgtgggatggttacaagatgaaaaagtattggaagaagcaacccaaaaagtggccttactacatcagaaatacagagggctcacagctcctgatgctgaaatgctgtacatgcaggaggtagagagaatggatggctatggagaagagagctaccctgctaaggatagccaaggaagtgacatatccattggagcgtgtcttgaaggtatctttgtgaaacacaagaatggaaggcatcctgtggtatttaggtggcatgacattgccaacatgtcccacaacaagtccttttttgcattagagctggcaaataaagaggagaccattcaatttcaaactgaagacatggaaacagcaaaatacatttggagactctgtgttgcgcgacacaagttttacagactaaaccagtgtaacctgcaaactcagactgtcacagtgaacccaatcaggaggaggtcttcttcaaggatgtctctgcctaaaccccagccctacgtgatgcctcccccaccgcagttgcactataatggacattatacagaaccatatgcttcttcccaagataacctctttgtgcccaaccagaacggatactactgtcactctcagacaagcttggatagagcccagattgacttcaacggtcggatccgtaatggcagtgtctacagtgcacacagcaccaactccttaaataatcctcagccctacttgcagccctcgccgatgtcgtccaaccctagcatcaccgggagtgacgtcatgaggcctgactacctcccgtcccatcggcacagcgccgtgatacccccgtcctaccgccccaccccagactatgagactgtgatgaagcagctcaacaggggcctggtgcatgcggaacggcagagccactcgctgcgaaacctcaacatcggcagctcgtacgcctacagcaggcccgcggcgctggtctacagccagcccgagatccgcgagcacgcacagctcccctcgccagcggccgcacactgcccgttcagcctgagctacagcttccacagcccgtctccctacccctaccctgccgagcggcggcccgtggtgggcgcggtcagcgtgccggagctgaccaatgcgcagctgcaggcgcaggactacccgtctcccaacatcatgcggacgcaggtgtaccggccacccccaccctacccgccccccaggcccgccaacagcacgccagacctgtcccgccacctttacatcagcagcagcaaccccgacctcatcacgcggcgcgtgcaccactcggtgcaaacgttccaggaggacagcctgcccgtggcgcactcgctgcaggaggtcagcgagcccctcaccgccgcgcgccacgcgcagctgcacaaacggaacagcatcgaggtggccgggctcagccacggcctggagggcctgcggctcaaggagcgcaccctatccgcgtcggcggcagaggtggcgccgcgagccgtctcggtgggctcccagcccagcgttttcaccgagaggacacagcgagaagggccggaggaggcggagggcttgaggtacggccataagaagtccctgtcggacgccaccatgctaatccacagcagcgaggaggaggaggacgaggacttcgaggaggagagcggggcccgggcgccccctgcacgtgcgcgcgagcctcggcccggcctggcccaggacccacctggctgccctcgcgtcctgctcgccgggcccctgcacatcctggagcccaaggcccacgtcccagacgcggagaagaggatgatggacagcagccccgtccgcacgaccgcagaggcccagcggccctggagagacgggctgctgatgccctccatgtcggagtccgacctcaccacgtcaggccgctaccgagcccggagggactctctgaagaaaaggccggtgtcggaccttctctctgggaagaagaacatcgtggaagggctcccgcctctagggggaatgaaaaagactcgagtagatgcaaaaaaaattggtcctcttaaactggctgccctaaatggactctccctatctcgagtgcctctgcctgatgaaggaaaggaagtggctaccagagcaacgaatgatgaaaggtgtaaaattctggaacaacgattagaacaaggaatggtattcacagaatatgaaagaattcttaagaaacggctagttgatggggagtgctcaacagcacgactccctgaaaatgcagaaagaaatcgattccaagatgttcttccttatgatgatgcgagagtggagttggtcccaactaaagaaaacaacactggttacatcaacgcatcacatattaaggtctctgtcagtggaatcgaatgggattatattgccacacagggaccattacagaatacctgtcaagatttttggcagatggtatgggaacagggaattgcaattatagcaatggtgacagcagaagaggagggtggaagggagaagagctttaggtactggccacgacttggttccaggcacaacactgtcacctatggaaggtttaagatcacgacccggttccgcacagactctggctgctatgccaccacaggcctgaagatgaagcacctccttactgggcaagagaggaccgtctggcacctccaatacacagactggcctgaacatggctgtccagaagacctcaagggatttttatcatatcttgaagagatccagtctgttcgacgccatacaaatagcacaagtgatccccaaagccccaaccctccgttgttggtccactgcagtgctggggtaggaaggactggcgtggtgattttgtcggagatcatgatcgcctgcctggaacacaatgaggtgctggacatcccgagagtgctggacatgctgaggcaacagagaatgatgctggtgcagactctctgccagtacacatttgtgtacagagtcctcatccagttcctgaaaagctccaggctcatctaagctcccacaatttcttacggggccagtcatgtgaagcgtttacagcttaaaaaaaaagcgcttgcctaactcatactttcccgttgacacttgatccacgcagcgtggcactgggacgtaagtggcgcagtctgaatggcggcacgctgaaggaaacgtgcgaagcacaggctgaagaggggtttctaacctgggaaaggtgctcaaggaggacttggtttcaagggccttgccctgccccggtctgtccggtttgcagtacttgcacacattttggagattgtattttctagacaattctctattttactgaagctatgctgggcaattctggcaatcattaaagtgcatagatttctatcttaaactaatttttgataatggagtttttattttatgacaaatatttagggatttttctagtgagaaacaactttgtgtaaggatgatccacagatatgagttgctcctatataactttgtatttaaaaatcatgttattatcttttgttattttttaaaaaccttgggtacttaataatggtttagttgccaaactgaaaactatactgagaatctgtgttattttgaaacatcaaaaggatttttctatccagaacattttttatcctaaaaattctatatagttgtaccttctgtttttcaaatgagagctcaattcatttagatactgaaatgagtcagttaatgtaaagttgaggatgaaggcacattatttaaaatgtaagagaataagcattattttttcagtattattcatagatctaaatgaatttgattttattggttgaaaatgaagtgaaaaacaattgcctagggtggttttaagcacttttttgttaaaaacaaatctgagttttaatatatgtgttgctttgtagatgacacaataacaatgggcgctgagaagcgttttgggagagattaaggactaagagtatgtaagatgactaggacaagagtaggtggagtgtgatggtaaatgcaggatgccttcgtctttacaaaaatgcagtattatctatactcagactgaggtgctgggatggcgagcaggggaccccacagcactgtccccagggaattcaagtcctgtgaccgccagtgacttactccgtttccttggggcttttcccacctcaacctgtattgtttctttttcataaataaattcagcattatagtatcattaaaagaagccttaaagaggcgtatttttccttttggttgaaggaagggaatagttaataatagttttcacctcttctcccaaaaagtacagtccaaatttgtgcacagagattgctgtggtattcaagaggtacttgcattttagctccttaattccctggccagtgttagctgtttagtgccccctcacccatcccatttaggcacatcccaatagacagagccaggctgagttacagggggagagtgtcatctctggccccgattaagatggccttgtcacagtgaccgctgagtaggcatggatgagtgggatatttagctgaggaaccctttcccttttccttctttttggggtctcttcttacagtgaacttccaaaatgtcaaatctagggctgtttcccaaattacactattctaggcatcattttgattcccatgtcactccttaactcacttccttgagcactacatgtatgttgtcagccacgagacaggacttcctaaatagtgtgtgcaccagcctaactctgccttacccagaaaccaaccacctaagaggaaaactcagaagatattaatgaaaactaattgaaagtacgcacacttctcatgtaggaacaaaattaaaattttacatttttattttacaaaattaaaaaattacattttgtaggaacaaaatgtaaattttgtaaatacaaaattctttttaaagtcctgtttaaagaacagtagaactaagtgaaaatattcagaacgagctccttagaagaaaggaataagaactttttactggaactattttccatctctagaaaaagtgcttcttcccctccccctccctctccatggtacgtttttgtgaaaatgcttttctgtcaggtttaaacaaacagtttgacatagctcgttgacaagaacatattgtaaaacaaatctaattaaagagtaatatgtggtctatttgtgttcctgttgtaataatttgataagtaaacttctgagggcaaaattactgtttaatattactcttaaaatgttgcatgtttggcgtcattcctaagagccatgtaattttaaacttttaattgcagttagtgaatatgaaaggatttctgaataaaaatctatccacattaaaaaaaattgaaatag

SEQ ID NO: 77671 - DNA, 4222 bp, Homo sapiens
gcccatgagcgcgccgcggcccgggctggcgtgcgggtgcggctgcggcggccgcgcggcggggccccgggaggcgggtcgctgagcggggcgcgcggccccgaggatgcgggagcgggagcgggagcagcgctggcgtcaatgctcccttcctcgggccattggagactccgttgctttttaatggcggcagcggctgctgggtgagcagctggaggccggacagtgttcgtcccatccggagaggatcgctttctcctggcgtcaccagcgctgggttggtgggggtagcttttccctctttgctcctccattcttgaagaaagaagaagatgccactgccatttgggttgaaactgaaacgcacccggcgctacacggtgtccagcaagagttgcctggttgcccggatccaactgcttaataacgagtttgtggagttcaccctgtccgtggagagcactggccaggaaagcctcgaggccgtggcccagaggctggagctgcgggaggtcacttacttcagcctctggtactacaacaagcaaaatcagcgccggtgggtagatttggaaaaacctttgaagaagcagctggataaatatgcattggaacctaccgtctattttggagtggtgttttatgtgccttcagtttctcagctgcagcaggagattaccaggtatcagtattatctgcaactgaagaaagatatcttggaaggaagtattccttgtaccttagaacaagcaattcagctagcaggcttagctgttcaagcggattttggtgactttgatcagtatgaatcccaggactttcttcagaaatttgccttgtttcctgtgggatggttacaagatgaaaaagtattggaagaagcaacccaaaaagtggccttactacatcagaaatacagagggctcacagctcctgatgctgaaatgctgtacatgcaggaggtagagagaatggatggctatggagaagagagctaccctgctaaggatagccaaggaagtgacatatccattggagcgtgtcttgaaggtatctttgtgaaacacaagaatggaaggcatcctgtggtatttaggtggcatgacattgccaacatgtcccacaacaagtccttttttgcattagagctggcaaataaagaggagaccattcaatttcaaactgaagacatggaaacagcaaaatacatttggagactctgtgttgcgcgacacaagttttacagactaaaccagtgtaacctgcaaactcagactgtcacagtgaacccaatcaggaggaggtcttcttcaaggatgtctctgcctaaaccccagccctacgtgatgcctcccccaccgcagttgcactataatggacattatacagaaccatatgcttcttcccaagataacctctttgtgcccaaccagaacggatactactgtcactctcagacaagcttggatagagcccagattgacttcaacggtcggatccgtaatggcagtgtctacagtgcacacagcaccaactccttaaataatcctcagccctacttgcagccctcgccgatgtcgtccaaccctagcatcaccgggagtgacgtcatgaggcctgactacctcccgtcccatcggcacagcgccgtgatacccccgtcctaccgccccaccccagactatgagactgtgatgaagcagctcaacaggggcctggtgcatgcggaacggcagagccactcgctgcgaaacctcaacatcggcagctcgtacgcctacagcaggcccgcggcgctggtctacagccagcccgagatccgcgagcacgcacagctcccctcgccagcggccgcacactgcccgttcagcctgagctacagcttccacagcccgtctccctacccctaccctgccgagcggcggcccgtggtgggcgcggtcagcgtgccggagctgaccaatgcgcagctgcaggcgcaggactacccgtctcccaacatcatgcggacgcaggtgtaccggccacccccaccctacccgccccccaggcccgccaacagcacgccagacctgtcccgccacctttacatcagcagcagcaaccccgacctcatcacgcggcgcgtgcaccactcggtgcaaacgttccaggaggacagcctgcccgtggcgcactcgctgcaggaggtcagcgagcccctcaccgccgcgcgccacgcgcagctgcacaaacggaacagcatcgaggtggccgggctcagccacggcctggagggcctgcggctcaaggagcgcaccctatccgcgtcggcggcagaggtggcgccgcgagccgtctcggtgggctcccagcccagcgttttcaccgagaggacacagcgagaagggccggaggaggcggagggcttgaggtacggccataagaagtccctgtcggacgccaccatgctaatccacagcagcgaggaggaggaggacgaggacttcgaggaggagagcggggcccgggcgccccctgcacgtgcgcgcgagcctcggcccggcctggcccaggacccacctggctgccctcgcgtcctgctcgccgggcccctgcacatcctggagcccaaggcccacgtcccagacgcggagaagaggatgatggacagcagccccgtccgcacgaccgcagaggcccagcggccctggagagacgggctgctgatgccctccatgtcggagtccgacctcaccacgtcaggccgctaccgagcccggagggactctctgaagaaaaggccggtgtcggaccttctctctgggaagaagaacatcgtggaagggctcccgcctctagggggaatgaaaaagactcgagtagatgcaaaaaaaattggtcctcttaaactggctgccctaaatggactctccctatctcgagtgcctctgcctgatgaaggaaaggaagtggctaccagagcaacgaatgatgaaaggtgtaaaattctggaacaacgattagaacaaggaatggtattcacagaatatgaaagaattcttaagaaacggctagttgatggggagtgctcaacagcacgactccctgaaaatgcagaaagaaatcgattccaagatgttcttccttatgatgatgcgagagtggagttggtcccaactaaagaaaacaacactggttacatcaacgcatcacatattaaggtctctgtcagtggaatcgaatgggattatattgccacacagggaccattacagaatacctgtcaagatttttggcagatggtatgggaacagggaattgcaattatagcaatggtgacagcagaagaggagggtggaagggagaagagctttaggtactggccacgacttggttccaggcacaacactgtcacctatggaaggtttaagatcacgacccggttccgcacagactctggctgctatgccaccacaggcctgaagatgaagcacctccttactgggcaagagaggaccgtctggcacctccaatacacagactggcctgaacatggctgtccagaagacctcaagggatttttatcatatcttgaagagatccagtctgttcgacgccatacaaatagcacaagtgatccccaaagccccaaccctccgttgttggtccactgcagtgctggggtaggaaggactggcgtggtgattttgtcggagatcatgatcgcctgcctggaacacaatgaggtgctggacatcccgagagtgctggacatgctgaggcaacagagaatgatgctggtgcagactctctgccagtacacatttgtgtacagagtcctcatccagttcctgaaaagctccaggctcatctaagctcccacaatttcttacggggccagtcatgtgaagcgtttacagcttaaaaaaaaagcgcttgcctaactcatactttcccgttgacacttgatccacgcagcgtggcactgggacgtaagtggcgcagtctgaatggcggcacgctgaaggaaacgtgcgaagcacaggctgaagaggggtttctaacctgggaaaggtgctcaaggaggacttggtttcaagggccttgccctgccccggtctgtccggtttgcagtacttgcacacattttggagattgtattttctagacaattctctattttactgaagctatgctgggcaattctggcaatcattaaagtgcatagatttctatctta

SEQ ID NO: 77672 - DNA, 6352 bp, Homo sapiens
gcccatgagcgcgccgcggcccgggctggcgtgcgggtgcggctgcggcggccgcgcggcggggccccgggaggcgggtcgctgagcggggcgcgcggccccgaggatgcgggagcgggagcgggagcagcgctggcgtcaatgctcccttcctcgggccattggagactccgttgctttttaatggcggcagcggctgctgggtgagcagctggaggccggacagtgttcgtcccatccggagaggatcgctttctcctggcgtcaccagcgctgggttggtgggggtagcttttccctctttgctcctccattcttgaagaaagaagaagatgccactgccatttgggttgaaactgaaacgcacccggcgctacacggtgtccagcaagagttgcctggttgcccggatccaactgcttaataacgagtttgtggagttcaccctgtccgtggagagcactggccaggaaagcctcgaggccgtggcccagaggctggagctgcgggagggatgaggtctcactccatcacccaggctggagtacagtggcaccgtcatagctcaatgcatcctcaaacacctaggctcaagtgatccttttgccttagcctgccaagagctgggactacaggtcacttacttcagcctctggtactacaacaagcaaaatcagcgccggtgggtagatttggaaaaacctttgaagaagcagctggataaatatgcattggaacctaccgtctattttggagtggtgttttatgtgccttcagtttctcagctgcagcaggagattaccaggtatcagtattatctgcaactgaagaaagatatcttggaaggaagtattccttgtaccttagaacaagcaattcagctagcaggcttagctgttcaagcggattttggtgactttgatcagtatgaatcccaggactttcttcagaaatttgccttgtttcctgtgggatggttacaagatgaaaaagtattggaagaagcaacccaaaaagtggccttactacatcagaaatacagagggctcacagctcctgatgctgaaatgctgtacatgcaggaggtagagagaatggatggctatggagaagagagctaccctgctaaggatagccaaggaagtgacatatccattggagcgtgtcttgaaggtatctttgtgaaacacaagaatggaaggcatcctgtggtatttaggtggcatgacattgccaacatgtcccacaacaagtccttttttgcattagagctggcaaataaagaggagaccattcaatttcaaactgaagacatggaaacagcaaaatacatttggagactctgtgttgcgcgacacaagttttacagactaaaccagtgtaacctgcaaactcagactgtcacagtgaacccaatcaggaggaggtcttcttcaaggatgtctctgcctaaaccccagccctacgtgatgcctcccccaccgcagttgcactataatggacattatacagaaccatatgcttcttcccaagataacctctttgtgcccaaccagaacggatactactgtcactctcagacaagcttggatagagcccagattgacttcaacggtcggatccgtaatggcagtgtctacagtgcacacagcaccaactccttaaataatcctcagccctacttgcagccctcgccgatgtcgtccaaccctagcatcaccgggagtgacgtcatgaggcctgactacctcccgtcccatcggcacagcgccgtgatacccccgtcctaccgccccaccccagactatgagactgtgatgaagcagctcaacaggggcctggtgcatgcggaacggcagagccactcgctgcgaaacctcaacatcggcagctcgtacgcctacagcaggcccgcggcgctggtctacagccagcccgagatccgcgagcacgcacagctcccctcgccagcggccgcacactgcccgttcagcctgagctacagcttccacagcccgtctccctacccctaccctgccgagcggcggcccgtggtgggcgcggtcagcgtgccggagctgaccaatgcgcagctgcaggcgcaggactacccgtctcccaacatcatgcggacgcaggtgtaccggccacccccaccctacccgccccccaggcccgccaacagcacgccagacctgtcccgccacctttacatcagcagcagcaaccccgacctcatcacgcggcgcgtgcaccactcggtgcaaacgttccaggaggacagcctgcccgtggcgcactcgctgcaggaggtcagcgagcccctcaccgccgcgcgccacgcgcagctgcacaaacggaacagcatcgaggtggccgggctcagccacggcctggagggcctgcggctcaaggagcgcaccctatccgcgtcggcggcagaggtggcgccgcgagccgtctcggtgggctcccagcccagcgttttcaccgagaggacacagcgagaagggccggaggaggcggagggcttgaggtacggccataagaagtccctgtcggacgccaccatgctaatccacagcagcgaggaggaggaggacgaggacttcgaggaggagagcggggcccgggcgccccctgcacgtgcgcgcgagcctcggcccggcctggcccaggacccacctggctgccctcgcgtcctgctcgccgggcccctgcacatcctggagcccaaggcccacgtcccagacgcggagaagaggatgatggacagcagccccgtccgcacgaccgcagaggcccagcggccctggagagacgggctgctgatgccctccatgtcggagtccgacctcaccacgtcaggccgctaccgagcccggagggactctctgaagaaaaggccggtgtcggaccttctctctgggaagaagaacatcgtggaagggctcccgcctctagggggaatgaaaaagactcgagtagatgcaaaaaaaattggtcctcttaaactggctgccctaaatggactctccctatctcgagtgcctctgcctgatgaaggaaaggaagtggctaccagagcaacgaatgatgaaaggtgtaaaattctggaacaacgattagaacaaggaatggtattcacagaatatgaaagaattcttaagaaacggctagttgatggggagtgctcaacagcacgactccctgaaaatgcagaaagaaatcgattccaagatgttcttccttatgatgatgcgagagtggagttggtcccaactaaagaaaacaacactggttacatcaacgcatcacatattaaggtctctgtcagtggaatcgaatgggattatattgccacacagggaccattacagaatacctgtcaagatttttggcagatggtatgggaacagggaattgcaattatagcaatggtgacagcagaagaggagggtggaagggagaagagctttaggtactggccacgacttggttccaggcacaacactgtcacctatggaaggtttaagatcacgacccggttccgcacagactctggctgctatgccaccacaggcctgaagatgaagcacctccttactgggcaagagaggaccgtctggcacctccaatacacagactggcctgaacatggctgtccagaagacctcaagggatttttatcatatcttgaagagatccagtctgttcgacgccatacaaatagcacaagtgatccccaaagccccaaccctccgttgttggtccactgcagtgctggggtaggaaggactggcgtggtgattttgtcggagatcatgatcgcctgcctggaacacaatgaggtgctggacatcccgagagtgctggacatgctgaggcaacagagaatgatgctggtgcagactctctgccagtacacatttgtgtacagagtcctcatccagttcctgaaaagctccaggctcatctaagctcccacaatttcttacggggccagtcatgtgaagcgtttacagcttaaaaaaaaagcgcttgcctaactcatactttcccgttgacacttgatccacgcagcgtggcactgggacgtaagtggcgcagtctgaatggcggcacgctgaaggaaacgtgcgaagcacaggctgaagaggggtttctaacctgggaaaggtgctcaaggaggacttggtttcaagggccttgccctgccccggtctgtccggtttgcagtacttgcacacattttggagattgtattttctagacaattctctattttactgaagctatgctgggcaattctggcaatcattaaagtgcatagatttctatcttaaactaatttttgataatggagtttttattttatgacaaatatttagggatttttctagtgagaaacaactttgtgtaaggatgatccacagatatgagttgctcctatataactttgtatttaaaaatcatgttattatcttttgttattttttaaaaaccttgggtacttaataatggtttagttgccaaactgaaaactatactgagaatctgtgttattttgaaacatcaaaaggatttttctatccagaacattttttatcctaaaaattctatatagttgtaccttctgtttttcaaatgagagctcaattcatttagatactgaaatgagtcagttaatgtaaagttgaggatgaaggcacattatttaaaatgtaagagaataagcattattttttcagtattattcatagatctaaatgaatttgattttattggttgaaaatgaagtgaaaaacaattgcctagggtggttttaagcacttttttgttaaaaacaaatctgagttttaatatatgtgttgctttgtagatgacacaataacaatgggcgctgagaagcgttttgggagagattaaggactaagagtatgtaagatgactaggacaagagtaggtggagtgtgatggtaaatgcaggatgccttcgtctttacaaaaatgcagtattatctatactcagactgaggtgctgggatggcgagcaggggaccccacagcactgtccccagggaattcaagtcctgtgaccgccagtgacttactccgtttccttggggcttttcccacctcaacctgtattgtttctttttcataaataaattcagcattatagtatcattaaaagaagccttaaagaggcgtatttttccttttggttgaaggaagggaatagttaataatagttttcacctcttctcccaaaaagtacagtccaaatttgtgcacagagattgctgtggtattcaagaggtacttgcattttagctccttaattccctggccagtgttagctgtttagtgccccctcacccatcccatttaggcacatcccaatagacagagccaggctgagttacagggggagagtgtcatctctggccccgattaagatggccttgtcacagtgaccgctgagtaggcatggatgagtgggatatttagctgaggaaccctttcccttttccttctttttggggtctcttcttacagtgaacttccaaaatgtcaaatctagggctgtttcccaaattacactattctaggcatcattttgattcccatgtcactccttaactcacttccttgagcactacatgtatgttgtcagccacgagacaggacttcctaaatagtgtgtgcaccagcctaactctgccttacccagaaaccaaccacctaagaggaaaactcagaagatattaatgaaaactaattgaaagtacgcacacttctcatgtaggaacaaaattaaaattttacatttttattttacaaaattaaaaaattacattttgtaggaacaaaatgtaaattttgtaaatacaaaattctttttaaagtcctgtttaaagaacagtagaactaagtgaaaatattcagaacgagctccttagaagaaaggaataagaactttttactggaactattttccatctctagaaaaagtgcttcttcccctccccctccctctccatggtacgtttttgtgaaaatgcttttctgtcaggtttaaacaaacagtttgacatagctcgttgacaagaacatattgtaaaacaaatctaattaaagagtaatatgtggtctatttgtgttcctgttgtaataatttgataagtaaacttctgagggcaaaattactgtttaatattactcttaaaatgttgcatgtttggcgtcattcctaagagccatgtaattttaaacttttaattgcagttagtgaatatgaaaggatttctgaataaaaatctatccacattaaaaaaaattgaaatag

SEQ ID NO: 77673 - DNA, 1471 bp, Homo sapiens
cgtaatccgcctgccttggccttccaaagtggggattacaggtgtgagccactgtgcccagccctttctcactgacttataagagtactctctgtgtgctgcttctgcttgctggttacccgcccactcctctgtctttgccactctgttaaagcggcccttgggatggcgagcaggggaccccacagcactgtccccagggaattcaagtcctgtgaccgccagtgacttactccgtttccttggggcttttcccacctcaacctgtattgtttctttttcataaataaattcagcattatagtatcattaaaagaagccttaaagaggcgtatttttccttttggttgaaggaagggaatagttaataatagttttcacctcttctcccaaaaagtacagtccaaatttgtgcacagagattgctgtggtattcaagaggtacttgcattttagctccttaattccctggccagtgttagctgtttagtgccccctcacccatcccatttaggcacatcccaatagacagagccaggctgagttacagggggagagtgtcatctctggccccgattaagatggccttgtcacagtgaccgctgagtaggcatggatgagtgggatatttagctgaggaaccctttcccttttccttctttttggggtctcttcttacagtgaacttccaaaatgtcaaatctagggctgtttcccaaattacactattctaggcatcattttgattcccatgtcactccttaactcacttccttgagcactacatgtatgttgtcagccacgagacaggacttcctaaatagtgtgtgcaccagcctaactctgccttacccagaaaccaaccacctaagaggaaaactcagaagatattaatgaaaactaattgaaagtacgcacacttctcatgtaggaacaaaattaaaattttacatttttattttacaaaattaaaaaattacattttgtaggaacaaaatgtaaattttgtaaatacaaaattctttttaaagtcctgtttaaagaacagtagaactaagtgaaaatattcagaacgagctccttagaagaaaggaataagaactttttactggaactattttccatctctagaaaaagtgcttcttcccctccccctccctctccatggtacgtttttgtgaaaatgcttttctgtcaggtttaaacaaacagtttgacatagctcgttgacaagaacatattgtaaaacaaatctaattaaagagtaatatgtggtctatttgtgttcctgttgtaataatttgataagtaaacttctgagggcaaaattactgtttaatattactcttaaaatgttgcatgtttggcgtcattcctaagagccatgtaattttaaacttttaattgcagttagtgaatatgaaaggatttctgaataaaaatctatccacattaaaaaaaattgaaatag

SEQ ID NO: 77674 - DNA, 1034 bp, Homo sapiens
gcgttatttttcttacccagtgtctgtatattatatagtatacttataatacaataagctagcaaaaagaaaatgtcactaaaaaaatcacaaagaagaaaaagtatactcttcattaagtggaggtggatcatcataaaggtcttttcccttttcatctttacatttagtaggcatggatgagtgggatatttagctgaggaaccctttcccttttccttctttttggggtctcttcttacagtgaacttccaaaatgtcaaatctagggctgtttcccaaattacactattctaggcatcattttgattcccatgtcactccttaactcacttccttgagcactacatgtatgttgtcagccacgagacaggacttcctaaatagtgtgtgcaccagcctaactctgccttacccagaaaccaaccacctaagaggaaaactcagaagatattaatgaaaactaattgaaagtacgcacacttctcatgtaggaacaaaattaaaattttacatttttattttacaaaattaaaaaattacattttgtaggaacaaaatgtaaattttgtaaatacaaaattctttttaaagtcctgtttaaagaacagtagaactaagtgaaaatattcagaacgagctccttagaagaaaggaataagaactttttactggaactattttccatctctagaaaaagtgcttcttcccctccccctccctctccatggtacgtttttgtgaaaatgcttttctgtcaggtttaaacaaacagtttgacatagctcgttgacaagaacatattgtaaaacaaatctaattaaagagtaatatgtggtctatttgtgttcctgttgtaataatttgataagtaaacttctgagggcaaaattactgtttaatattactcttaaaatgttgcatgtttggcgtcattcctaagagccatgtaattttaaacttttaattgcagttagtgaatatgaaaggatttctgaataaaaatctatccacattaaaaaaaattgaaatag

SEQ ID NO: 77675 - DNA, 400 bp, Homo sapiens
gactctccctatctcgagtgcctctgcctgatgaaggaaaggaagtggctaccagagcaacgaatgatgaaagggtatgtatgggacacacagggctttgtgccttctctggaacaaccggtaaatactacgcaaatgccttcatgagattttggtgaattttctaacacaatttaataataaatgagtgttaaggaattttgtaatatgggcctcaaaattggggcaaatgtatagctaatgtcttaatagataatttcaggttcgaatgctgattttttgtttgtttgtttctcagtgttcttttttaccttctcctggccttttggagcagtcttgattttgatggccttaaagtgagaagaaatctacaaaaatacaggagcatacaggggaaaag

SEQ ID NO: 77676 - DNA, 481 bp, Homo sapiens
cggttccgcacagactctggctgctatgccaccacaggcctgaagatgaagcacctccttactgggcaagagaggaccgtctggcacctccaatacacagactggcctgaacatggctgtccagaagacctcaagggatttttatgtgagtgactttaactttgttccgaggacagctgcctctggaggtgttaaacagagaggaacatttatgtttccgaaatatttcctttatgttatctcatataagcttcggacttgttttaacataaagaatacaagtgttttggggagggttaacgaggtttataaattatgatttggtagtgagtagaatgccacagctgactcagtatctccgtcatttcattttgtagatcagaaagtggacagaggtagtgacttgctcagggtcacactgtccctttgtggttgggtttggttcactggcacccagtgctctttatctgcagtcctctta

SEQ ID NO: 77677 - DNA, 5541 bp, Homo sapiens
gcccatgagcgcgccgcggcccgggctggcgtgcgggtgcggctgcggcggccgcgcggcggggccccgggaggcgggtcgctgagcggggcgcgcggccccgaggatgcgggagcgggagcgggagcagcgctggcgtcaatgctcccttcctcgggccattggagactccgttgctttttaatggcggcagcggctgctgggtgagcagctggaggccggacagtgttcgtcccatccggagaggatcgctttctcctggcgtcaccagcgctgggttggtgggggtagcttttccctctttgctcctccattcttgaagaaagaagaagatgccactgccatttgggttgaaactgaaacgcacccggcgctacacggtgtccagcaagagttgcctggttgcccggatccaactgcttaataacgagtttgtggagttcaccctgtccgtggagagcactggccaggaaagcctcgaggccgtggcccagaggctggagctgcgggaggtcacttacttcagcctctggtactacaacaagcaaaatcagcgccggtgggtagatttggaaaaacctttgaagaagcagctggataaatatgcattggaacctaccgtctattttggagtggtgttttatgtgccttcagtttctcagctgcagcaggagattaccaggtatcagtattatctgcaactgaagaaagatatcttggaaggaagtattccttgtaccttagaacaagcaattcagctagcaggcttagctgttcaagcggattttggtgactttgatcagtatgaatcccaggactttcttcagaaatttgccttgtttcctgtgggatggttacaagatgaaaaagtattggaagaagcaacccaaaaagtggccttactacatcagaaatacagagggctcacagctcctgatgctgaaatgctgtacatgcaggaggtagagagaatggatggctatggagaagagagctaccctgctaaggatagccaaggaagtgacatatccattggagcgtgtcttgaaggtatctttgtgaaacacaagaatggaaggcatcctgtggtatttaggtggcatgacattgccaacatgtcccacaacaagtccttttttgcattagagctggcaaataaagaggagaccattcaatttcaaactgaagacatggaaacagcaaaatacatttggagactctgtgttgcgcgacacaagttttacagactaaaccagtgtaacctgcaaactcagactgtcacagtgaacccaatcaggaggaggtcttcttcaaggatgtctctgcctaaaccccagccctacgtgatgcctcccccaccgcagttgcactataatggacattatacagaaccatatgcttcttcccaagataacctctttgtgcccaaccagaacggatactactgtcactctcagacaagcttggatagagcccagattgacttcaacggtcggatccgtaatggcagtgtctacagtgcacacagcaccaactccttaaataatcctcagccctacttgcagccctcgccgatgtcgtccaaccctagcatcaccgggagtgacgtcatgaggcctgactacctcccgtcccatcggcacagcgccgtgatacccccgtcctaccgccccaccccagactatgagactgtgatgaagcagctcaacaggggcctggtgcatgcggaacggcagagccactcgctgcgaaacctcaacatcggcagctcgtacgcctacagcaggcccgcggcgctggtctacagccagcccgagatccgcgagcacgcacagctcccctcgccagcggccgcacactgcccgttcagcctgagctacagcttccacagcccgtctccctacccctaccctgccgagcggcggcccgtggtgggcgcggtcagcgtgccggagctgaccaatgcgcagctgcaggcgcaggactacccgtctcccaacatcatgcggacgcaggtgtaccggccacccccaccctacccgccccccaggcccgccaacagcacgccagacctgtcccgccacctttacatcagcagcagcaaccccgacctcatcacgcggcgcgtgcaccactcggtgcaaacgttccaggaggacagcctgcccgtggcgcactcgctgcaggaggtcagcgagcccctcaccgccgcgcgccacgcgcagctgcacaaacggaacagcatcgaggtggccgggctcagccacggcctggagggcctgcggctcaaggagcgcaccctatccgcgtcggcggcagaggtggcgccgcgagccgtctcggtgggctcccagcccagcgttttcaccgagaggacacagcgagaagggccggaggaggcggagggcttgaggtacggccataagaagtccctgtcggacgccaccatgctaatccacagcagcgaggaggaggaggacgaggacttcgaggaggagagcggggcccgggcgccccctgcacgtgcgcgcgagcctcggcccggcctggcccaggacccacctggctgccctcgcgtcctgctcgccgggcccctgcacatcctggagcccaaggcccacgtcccagacgcggagaagaggatgatggacagcagccccgtccgcacgaccgcagaggcccagcggccctggagagacgggctgctgatgccctccatgtcggagtccgacctcaccacgtcaggccgctaccgagcccggagggactctctgaagaaaaggccggtgtcggaccttctctctgggaagaagaacatcgtggaagggctcccgcctctagggggaatgaaaaagactcgagtagatgcaaaaaaaattggtcctcttaaactggctgccctaaatggactctccctatctcgagtgcctctgcctgatgaaggaaaggaagtggctaccagagcaacgaatgatgaaaggtgtaaaattctggaacaacgattagaacaaggaatggtattcacagaatatgaaagaattcttaagaaacggctagttgatggggagtgctcaacagcacgactccctgaaaatgcagaaagaaatcgattccaagatgttcttccttatgatgatgcgagagtggagttggtcccaactaaagaaaacaacactggttacatcaacgcatcacatattaaggtctctgtcagtggaatcgaatgggattatattgccacacagggaccattacagaatacctgtcaagatttttggcagatggtatgggaacagggaattgcaattatagcaatggtgacagcagaagaggtaggtacttatttctcttaagtgattttctcagcctctgaagaacagttaatgttaatcatctggaatccctgccccggtctgtccggtttgcagtacttgcacacattttggagattgtattttctagacaattctctattttactgaagctatgctgggcaattctggcaatcattaaagtgcatagatttctatcttaaactaatttttgataatggagtttttattttatgacaaatatttagggatttttctagtgagaaacaactttgtgtaaggatgatccacagatatgagttgctcctatataactttgtatttaaaaatcatgttattatcttttgttattttttaaaaaccttgggtacttaataatggtttagttgccaaactgaaaactatactgagaatctgtgttattttgaaacatcaaaaggatttttctatccagaacattttttatcctaaaaattctatatagttgtaccttctgtttttcaaatgagagctcaattcatttagatactgaaatgagtcagttaatgtaaagttgaggatgaaggcacattatttaaaatgtaagagaataagcattattttttcagtattattcatagatctaaatgaatttgattttattggttgaaaatgaagtgaaaaacaattgcctagggtggttttaagcacttttttgttaaaaacaaatctgagttttaatatatgtgttgctttgtagatgacacaataacaatgggcgctgagaagcgttttgggagagattaaggactaagagtatgtaagatgactaggacaagagtaggtggagtgtgatggtaaatgcaggatgccttcgtctttacaaaaatgcagtattatctatactcagactgaggtgctgggatggcgagcaggggaccccacagcactgtccccagggaattcaagtcctgtgaccgccagtgacttactccgtttccttggggcttttcccacctcaacctgtattgtttctttttcataaataaattcagcattatagtatcattaaaagaagccttaaagaggcgtatttttccttttggttgaaggaagggaatagttaataatagttttcacctcttctcccaaaaagtacagtccaaatttgtgcacagagattgctgtggtattcaagaggtacttgcattttagctccttaattccctggccagtgttagctgtttagtgccccctcacccatcccatttaggcacatcccaatagacagagccaggctgagttacagggggagagtgtcatctctggccccgattaagatggccttgtcacagtgaccgctgagtaggcatggatgagtgggatatttagctgaggaaccctttcccttttccttctttttggggtctcttcttacagtgaacttccaaaatgtcaaatctagggctgtttcccaaattacactattctaggcatcattttgattcccatgtcactccttaactcacttccttgagcactacatgtatgttgtcagccacgagacaggacttcctaaatagtgtgtgcaccagcctaactctgccttacccagaaaccaaccacctaagaggaaaactcagaagatattaatgaaaactaattgaaagtacgcacacttctcatgtaggaacaaaattaaaattttacatttttattttacaaaattaaaaaattacattttgtaggaacaaaatgtaaattttgtaaatacaaaattctttttaaagtcctgtttaaagaacagtagaactaagtgaaaatattcagaacgagctccttagaagaaaggaataagaactttttactggaactattttccatctctagaaaaagtgcttcttcccctccccctccctctccatggtacgtttttgtgaaaatgcttttctgtcaggtttaaacaaacagtttgacatagctcgttgacaagaacatattgtaaaacaaatctaattaaagagtaatatgtggtctatttgtgttcctgttgtaataatttgataagtaaacttctgagggcaaaattactgtttaatattactcttaaaatgttgcatgtttggcgtcattcctaagagccatgtaattttaaacttttaattgcagttagtgaatatgaaaggatttctgaataaaaatctatccacattaaaaaaaattgaaatag

SEQ ID NO: 77678 - DNA, 464 bp, Homo sapiens
tctttttgtgtgggactgacacaaccctcttaaccttaccacatctggaaacttgcttgaactgctgaatctcagaccctatctcagacctaagagtcataattgctcttaatcaaggttgtcaggtgattcttatgtacattaagtttgcaaaatgcagctctattgaaatacagaggaccagaaattgtataattgagaataaggtgaggagaggaaggggtgcatgtgtgtatgtgtgagagactgggaggatgcatttcacttgtgtatgtaattgtgggagtgtgttctcattttacttgaaaaagcagctcactgagctataattcacataccatgcagttcacctattgaaagtgtactgtttaaaccacttattggttttaagtgtgttcacagccttgtgcacccataaccgcaatcaattttggaacgtttttacacctggaaagaaaccccat

SEQ ID NO: 77679 - DNA, 381 bp, Homo sapiens
agccaatatgctccttcaacaattttcttagaaatctctttagctatgtattctatttcactgctcccaaattctacattctgtaaaacactggaacataaacacaatttagccaaggtcttttctactttataacaaggatacccttttctcaaatttccaacaatgtgttccccatttccatctggaagttcactagaatggcatttactgtccatatttttatcaacgttctgttccatgttacttagatatgctttttttttttttttttggagacggagtttcacccttgttgcccaggttagagtgcaatggagcagtctgatctgggctcactgcaacttccgcctcccgggttcaagtgattcgcctgcctca

SEQ ID NO: 77680 - DNA, 840 bp, Homo sapiens
gcctgaagcctgaggccaagctgaaggccaagcctgctggggggcacagagccagacaggacacagtgggctcgccaacactgcagaggaaaggggttctctctctgggcccaacagcactggtcccgcaagcctcaggccccctaagggctggtcggtgctgcacagagagagtgtctccaccccaggccatggtacgtgcccggttcactgtcccaccacgtgcctccatccagctacgttggtcaggtctaggatgtgccactcggctctcggggacctcagctgagcgaccgcattgcccaggatgctggaaatcctcacgataggccccaggccggagggctgggtgggggtatggctggccccctggcacaccagtccccagtgctggaaaagagctcaaagcccatgccctggggccttcaccctgcaggcctatcacatccactctcccagcgccctggctgtaggctctccctctcttccaaacgggagggccgtcctgcaggcccgtacacaggcgcttcatatccacagctggaaactaggtcgctgctggtgagaggcagcaggggacggtccacaggctttcgcagcacccttcctctgccactggttccctgggtcactgtgcaaaagcagaggctgcaaagtctgtggtggaacccgggaagccggagaaggaacacgggggcctttgaggcttcttcccgctgcccgattcctttcaggctcggcctgatttctctttgagacttgggctggttctgcccctcacacttccttgctggtctggacatttttcagcctcatctgtcctcttcttctcttcccaca

SEQ ID NO: 77681 - DNA, 387 bp, Homo sapiens
tgagaggaaaatatcccttttctaaaaaaataaaaaattaaaaataaaaacctcggtgtaaagtggaattctctagagaatgcattgtgcacaaaatgaccttcctcagtgtattactgggatggagggagtcgtctctctgtggggtagcaaataagccctgtggccccctcaatccacctcagcctccacagagcatcagttgctgtttcatcccgggttggtccagacagccactgccagtccactagagggagcacttgagaggaaacccatttgctttcattgatctagatctcaaataaaatttcatcttagaggctgggcgcggtggctcatgcctgtaatcttagcacgtcgggaggccaaggtgggtggagcacgagg

SEQ ID NO: 77682 - DNA, 123 bp, Homo sapiens
ggccttctaacgttggtggaagtggctttggcttattgggtcggattctaggccattcattccaacctttagagacatcccagctttccctagcccagagtctgcagcccctccaccatccca

SEQ ID NO: 77683 - DNA, 689 bp, Homo sapiens
ggcagggaatgatttactgtggaagttctcataccaacagttatgtttactccaacttataaccgcacatctgcaggtgactaaaattgtgcaagcggaaagtgagttcaaacactgacatgcatacctgtttgaatcagtgatttgaaccctaggaatacattagtgtatacaaatatggaaaccacagggaaaaaaaaagcatttctagttattactatgataatgaagaatgagaaaaacaagaaaaacaggaaaataagaagtcataaaatgctaagtattctgtgatgaatgtactttttcattcaggtaaactcatttttttatttaggtaaaatacaaataaatacctaaattttatttaggtaaccctctctgttaaaaaacaaatggatcaaatgctatccaaattacctaaagtgggaggcgggggtatgattaaataatataaacatatttaaaaactattttcaaaaggatgtaatataggtagacaaagtatccagaaagatacaatgggcacaacctaaaaatatttaagtctaaggatggaggtaatctgggcactgggaaatcaattaagtatatatagaaatgattcaaatgccttccctcagcaagaatttgcctattctatgtctaccacagttggacactagattagtttggatctacagcaagaaata

SEQ ID NO: 77684 - DNA, 655 bp, Homo sapiens
cagaaaggctggggctgcctgggccaggcctccctgcgctgcccgggctatgcacaggactgggaggatcccccaagctccctgtgtccaaggggctcaggaggaagcctggggcaaagagaccattgccatacctgatcttggggaggtgggacgaggtgggggagaagggagaagccccaccctgtcctgccctgcccactgcaggctgaggcgtctcccgaggccctcacccacctgcactgtggcgggtcccctgtggctcacctgtacagcggcccttcctcgggcagcaagctccccacccacactggctgtgctggttcctgggctgatggggataaggaggctgtgagcaaaggggcaggtggctctggggaggcctggggcgagaatgcagggaggctcagaagtggtgggcgtccttgctgggccagggagccggtctgaggcagggactgtcccctcctatcctgcggcccagacccggccccaccccccaccgcagcccttgcttatcttcaggagtcctggtgttgtccctaatggccaccaaggcccgcccaactccactgcctcctcgaagcagtgcaacttgaggtgttggggtctccccaccgtggccaggcaccctaagtctggacagagaccccag

SEQ ID NO: 77685 - DNA, 260 bp, Homo sapiens
gaggtgcattatgtatatattttaatttttttcatagatgatggtgtccagtatataatttgagaccaggtgcagtgtctaatgcctgtaatccaacaatttggaggctgaggcgggatcgcttgaagccagagtttgagaccagcctgagcagtgtagtgagacctcgtctctacaaaaatttaaaattaattagccaagtgtggtggtgcacacctgtagccccaggtagtcatcaggctgaggcaggaggatcactt

SEQ ID NO: 77686 - DNA, 364 bp, Homo sapiens
ctgggattacaggcgtaagccaccgagcccagcctgtatttttagtagagaccgggtttcaccatcttggccaggttattcttcaactcctgaactcatgatccatccacctcggcctctcaaagtgctgggattacagacgtgagccactgcgcccggcctacaatatctattataatgcacttctctctttttttttttttttttaacactaagaagatatttcaggctgggtgtggtggctcccatctgtaacatctgcaatcctagcattttgggaggctgacacttaagcctcggagttcaagaccagcctgggcaacatagtgagaccctctcctctataaaacaataaaataaaaca

SEQ ID NO: 77687 - DNA, 442 bp, Homo sapiens
catttttaataacaaagagaatgctaaatgaacttggttgggggggcggggaagaaaaacacatcgtactgtatacaaagaactgccttaatcatggcagatttttgcctttggttcacatgttgctgaccaaaggctacaattctgttctgaatgtgcactcctaatttatttgatttaatttattcaatttattaacttagttttcttagaccaggctgaatacctaatatgtggctttttggctgaggctttttacttctgtttagaaatttgatgcctattttaggaaccagaaaaagataaattgcttcagtagaagagaccatatttaactttaaaaagtgaggaggaatgtgctttttaattatgctctcataagtctaatcttttgggggtttagtagcacatagataaatattaaaggtggttacatataata

SEQ ID NO: 77688 - DNA, 2875 bp, Homo sapiens
cggaaagcccttaggtggagagcgatgtggggcgcggcagggggatcgcgtagaggaaccttcgcgcaccgcctctccgggtctgggaatctgctgaactccttgcctctcctggggtccctcgaacgccccagctaagaagggcgggggccttgccagggcgcgagcaacatgacgttcaaggtcttcctgtggcttctgtaaagaaatgttcacgtgggagcctgtccacatgggctgtactaaggatctggcacgaggaagaaatatcactgcagaacctgaagccctccgttggaagggtcgttcactcgagtacctattctaagtaacagtgacacaaaacacatgttagaaaaaaacaaaaagtatggtaggttatactgttttttaaaagaaacttttatttatgccttttgctgttaagtcctctaattttacattggaactgagtcattcttggagcaaaactagaataggtttgtatttgttttctttttggatgtgtatctaaattgtacataattaagaaaaagcaagtaatggaaaagctggagatgtagaacttagttccttctaacttagtatgcaattgaaagcctcaagtcaagactcctgtgtattgttttgtattaggactctattgtacaaatatttgagtaccttaatatgagtcagttactttttctagatcttggatccatgccagacaacgcacattctgcagacactggttactccagtggctccttactggaaacatataatatcagtgataagtgctgtgaagaaaataaaacaatgatgtgctggtatggatttttaacttttttatgtgatgaaccacagaatgatggttttaaatgtatgaaatacatagaattgcaacagaaaccagttatgaaataatgaagatattaaatatgacatctatattttagtaaagcattagtgaggactgtaaatgatctttaaagaatttggcttaaatttaatctaaaattgctatcaggtatttcacatcgctgtaatttttgcctgcattcgtaactgaagagataagtaaatgtcagaggttaagataaatctttttctttttttacctgtccatatttacaaacattctgcgttccgtacatagacgcctggataagaacccctgtgcaagaatgactttggtgctactttaaaaaaagtggttggggaagacctcataggaaatgacatcaataatagattgcatgataacctatactagttcttactgttaccaatttaaattctaactgcttaaaagctaacacggtccttccctttttttgagcacctgatttgaagtactttgagtaggcctcaagtgtcgtatgcaagtactaatctagggggtgtgcctttttcaaaagtgatttttggagaagataggatgtagtattatagcaaggaaaattcagcatctgggatgatcatttccttctgattagagaaatttaccttgttaatattctgttcacccaacccttctaccctcagtgttgaccaatactggaaaaaatttagggctttggagtgaaattttaaaagttcaaaaccttgatctattaattagtttgcttaccttgaggaagttgcttatcttaatcttctatttgaacttcaagtacaaaaaccctactcacggacttaactgtgaccattaaatgagataaccaaaaggctgaagatgatagtgagttgattttaccttttttctacatacagatgtttcagttctttcattagtggttgaaggtctgcgttctttttctccctccactccctccttgactacccccagaatgagctttgatggtctctactgggcctttgggggggatacattatcctgttgtttttgttctgttacttatatataatactcatggatttatttctacttctcttccattttctaatttataataacatgtgcatcttgttttccctgccaaactaaatttcgtgagggggtacatactgcacagttttttttgtcacatactgcttatgacacatgaatatgcagagcttgtcaagctctttaattaagtttaaaatgctaattgagtgaatcaaaacttaaccattatggttaggctaaaaatgtcagcttgtgtttatatagtgcttacctcagtattggaaatgccatgagtttagtatcagaaggacattattactagtgcattttaaagtgataccagtcatagttgcaaaagaaagtacacaatgggaaatggaagagaaatgtagggaatcaaaacaactagttttttcctttataacggaagttttataattcatcttttatgtaagtgtaattctcattaaaaataccctaaagcttaaagtttgcaaggctgcccagcctaacccacaacagtttgatgctgccccctagcgtttgattcccttcaccttttgctaaaataaggtaatgtttaaattacaattagatttacttactgctgtaaatctggtctattttagtttcctctgggtagttagtgttgctaataagatggacgtaagtgtttttgaactggtgaattctgattgcttttagcccccagttttccaaataggggtgaattttgggtagagatagaacaatcaccaagttaccttgctccaaaaaagaaatttacgtatgggattgttttcaaagcgggaagttagctgtgtaaataacaacaattttatatatttaatctgggcttctccttatcttgaatgatataaaaatctactttctagattaatttagttccatataactttgtattgctttgactgtactgataataaagtttgaaagtgttaaatttaaaaaaaaagc

SEQ ID NO: 77689 - DNA, 597 bp, Homo sapiens
ggcacgagcataccccatttgtgagctttctttgagggccaactttgttctctaaaaccagccagggcatgcttttccctcaccagctctgaattcttccaggctaggcaactggaaaagcctgggcttagaaactgctttgttggcttacggcccagctgagctgaccaaaatagccaagagaaagactgtttgcacagtgtgaaattcctccaggggaaataccatagcaaaaagccaagaaagccagacccacgatggcaggaacccacaggcaaaaaaagccgagttacccccaaggcctgggttgtggagatgggagcctagttctctccagaagaaaaagcttcctaaagcctactgttgtggtatttctgtaggcgcgttttcatcatcctgctgggtctcaagagtagcattctcagtgaaaggaacagtcgaacagcctgcagcctggtggccagggctcagaggtctctcttcctgttacgtgctctccccaagtcaggcctagaaagaccgtgggacagggacacactcccagctctgtgttgatgggacagtgccgaagggtgcctggagtatgcactggcaggt

SEQ ID NO: 77690 - DNA, 296 bp, Homo sapiens
gcgcgaattcatcatcctgctgcgcgaattcatcatcctgctaattcatcatcctgccgcgcgaattcatcatcctgctgcgcgttttcatcatcctgctgggtctcaagagtagcattctcagtgaaaggaacagtcgaacagcctgcagcctggtggccagggctcagaggtctctcttcctgttacgtgctctccccaagtcaggcctagaaagaccgtgggacagggacacactcccagctctgtgttgatgggacagtgccgaagggtgcctggagtatgcactggcaggt

SEQ ID NO: 77691 - DNA, 565 bp, Homo sapiens
cttgtagaggagaaaatggttgtacttaaccatcctgcttgtaaagtttattcagaggatagtctgtatgtccagccaccatgtttacttctcaaagtgcaagtctgatgaatagtactgtatctccatatgtggtaatgtgagcatttcatcatgaagtacctgctgctatgtctgtgaagttgggtgtaacatcataagaatatgaaaccagtattggtgtaaatctaatgaaaataaccctatgtatatttgtagcagtcttgaatctctatttaaggtaatttgctgtaatataacaaatattcattctgtttttcatcccttccttgccagttttatatcaagcatgaattccaatggtttgacagcaaaattatctgtgaaagtttaaaaggcacttttctgctgtgatttttggattgagtgtggagtgttatgtacagtttgatgggatatatcattttagaaccccagatttaattctagtccaattaattttgtttaactacctcgttttcagtgctgttttgggtgcacaagtaaacactacctgtgaaacttg

SEQ ID NO: 77692 - DNA, 382 bp, Homo sapiens
gtttcactcttgttgcccaggctagaatgcagtggcgatcttggctcactgtaacctctgcctcccgggttcaagtgattctcctgcctcagcctccctagtagctgggactataggtgcatgctgccacacccagctaatttttttgtatttttagtagagacagggtttcgacatattggccaggctggtcttgaactcctgatctcaagtgatctgcccacctaggtctcccaaagtgctgggattgctggcctgagccaccgcaccctgcctagaacatgctttttaatagtgtctctaaccatcatgtttagggccttagtgcttacctcttaaagaagggctgctgttgaggattccttgagatagtgtttgaaaa

SEQ ID NO: 77693 - DNA, 275 bp, Homo sapiens
ggtaggacccgacaccgcggtcgtacccgccttcttttctgtcccagagtacagcctgggatctccaggggggagactgaatgagtgctgtcgaggaccggcgagagtctggaacgttcgcgccttcgtaggagaacgaggaggtgacggacagggaacggggagcggccgttgggtgggacgcctgagaccctcgggaaatggccgggtcgccgactgtttgcaccactggcatcctgcagcactgtgagatacggccccgtttgttcccagaa

SEQ ID NO: 77694 - DNA, 131 bp, Homo sapiens
cgaacaggcactgaggcctggggagctgtcacaaacggctgcctgatgggggagggttaccgtaattgccggattaacttgggggactttaaactgcattcctctttaaaatataaagtataattgttgat

SEQ ID NO: 77695 - DNA, 387 bp, Homo sapiens
attttgaatcatattttacttataggtttgctgtatatactgattaaacttctgaacctaaagattctctataattaaactagcacaaatataatctgtcccttacccacattgtaagaatgtctggtgggggaaatccaatattgaccttcacattccacatggaaaatctttgtccccagagtgcaattagggtgattaaaaataagccgcttttgtgagtctcaagtttgttccccaaacaagcagcatcagcaactggaaatttgttagacatgcaaattatccagtcccacctgagacttcagcccagatctatgaatcaaaaattttggagtgaccctggcaatatggactttaataagcccctaggatggttctgatgca

SEQ ID NO: 77696 - DNA, 360 bp, Homo sapiens
tcatggattagtcgttcttttcctgccttcctctctagccttgctgctcaagagccatagactaagaatgagaagggctgttaaagacacctctagtgcagccttttaaatttaccgataagaaatcagaggcctgaagagaagtgagttgcctgaaagcccacagcaagtcagtgacaggccaagaccagatccaggctgcctgactccagtttcttcctcgggcccccatgacctttccaggcgccatgtatgtttctccctggtctcagggtgagggtagaagataacctttctgaaagaggccacgtccctggcctcccagtgaagcactaggtgaagccaggccaaaaagaaagc

SEQ ID NO: 77697 - DNA, 502 bp, Homo sapiens
gaggaagaagggcagctgggagatgaagctgtcaggatgggccgcatcccatttcctgcctcgtttcagttcaactttccaacagacctccctggctcgtcttgctcttctctaatggacaaacaaacaggctcagagaggtggtgtgacttgcccaaggtcactcagcttggatgctatggaacagggacgtccactgtcccagtctgtttatgggaagccgctctgcaactgtcctgacccaccacatgccccaccgctgtttctcttgccctgaccccttgttccctggaccagggtggcacagctccaggctcttgggcccttcccgagggcaggcacctgtgactgtgtccccaaagacctgagtggctgagggggccccacagagcttggacttcctggaggacaaggaggggtctgccagccacccccaccacgcccgccccagggctcccctggagcttccatgccagccggactcaggtgggtctggaggagc

SEQ ID NO: 77698 - DNA, 475 bp, Homo sapiens
gtttagaagtaggaaaatccacttcagttttaaagacactgattgttttagtgtattggagcttctatcacaaaaaaacagtgtagcctgggtggcttataagcaatagaaatgtatttctcacagttccagaagccacaaagtgcaagatcaaggcgctggcagatttggtgtctggtgagggcccactccctggctcatagatggctgtcttttcattgtgtccttgcatggtggcagggatgcgggagcactctccggggcctctcatagaagggcctggattccattcatgagggcttcactcccatgacccaatcacctcccaaaggccatgcctcctaattccatccccttaggggttaggattttgacatgtgagttttggtaggggacacaggcattcactctatagcactgataaacattctttgataatagccattattttagtgggtaaggtgtttttaaatac

SEQ ID NO: 77699 - DNA, 3342 bp, Homo sapiens
  misc_feature (226)..(226): n is a, c, g, or t
  misc_feature (494)..(494): n is a, c, g, or t
  misc_feature (690)..(691): n is a, c, g, or t
  misc_feature (925)..(926): n is a, c, g, or t
  misc_feature (934)..(934): n is a, c, g, or t
  misc_feature (1174)..(1177): n is a, c, g, or t
  misc_feature (1927)..(1927): n is a, c, g, or t
  misc_feature (2163)..(2164): n is a, c, g, or t
  misc_feature (2424)..(2424): n is a, c, g, or t
  misc_feature (2443)..(2443): n is a, c, g, or t
  misc_feature (2664)..(2664): n is a, c, g, or t
  misc_feature (2694)..(2694): n is a, c, g, or t
  misc_feature (2700)..(2701): n is a, c, g, or t
  misc_feature (3084)..(3084): n is a, c, g, or t
  misc_feature (3311)..(3311): n is a, c, g, or t
ctataatcccagctagaaaaaaagaaatacgttggtcaatatgagaggttgagttttacagttgaaggggaagggtgcagcgatattaattggctgtttctgacagtagtttggcacatagttgtatgtacactctgctccagtaaaatgaaatgcgaccacagtcaacggttacctatttatgctggagggtgtttggcaatcaactgttaatttaagtgagatnccattctgccgcttagccatggcagagcacacacatgtgcactcagggaaagcagatggaataggttataaacagaagcaaactccaattcaggagacatgttcacgcagaaatagtactatgatgcaacatacatcacaaaaacaaatggaaattgtgtttgtttgtttttgagatacagtcttgctctttcgccaggccagagtgcagtggcacaatctcagctcactgcaacatccatctcccaggttcaagcgattctcctgcngggccgcccagcccgcgtcacccggcagcaaacacgcagggtgagtgtgcgggctgcccaggcagtgcagagcggagagagctgcgtggggccacactcactcgcactcacaccgggggggcacgccggcctgggaccccgtgtgcgcactccctggggacaagcggggagccagcaggacagggacccgcagaanncatactcacacgttcctgcaggtgccagcacatgctggcttcgttcgctctcacgggacacacgcaggtgtgcaaggacaatgcaagtgcacgcacacgtgtgcagacacgtagtggaagcatccactggctcacacctgtaggacacacacacacacacaaacatgcacacatacagagttggttgaggatctgttaacaccgtacaccccctaatgcatgctcgcgcgcaannacgcacgngcgcacacacacacacgcacacacacacacacacacgtgatcaagggcacccagggcagaatcttccatacccctaacaaggacccctaacaagacgcacaaacacgcacccatagaagtaatcaggggaccctaccaggacacggagtcacactcctaggcatgtgtggacaggctgcctacccacgggcaggacatggacatgctcaactatacgaggacactgcaggcacagtctgnnnncacatactctcaggtcacataaacacagcactctgtaacctcgagtcagtccctcacttggtcagtgagtgggctgaagcacccactggacagggtggctgagaaccaggacagggcctgggaagtgagtgatgcaatgaggttgggcggtaccaccccccacccaaccacccagtccaggcttcccacataatcgggtcactaaacaaatcccagaggcccagcccagctgttgcctggctttccagaaacagaactcggttgggaatggcagctgcttggacaggtctgtccccagaaagccctgggcatggatggattcctgtctaccctctggtttccactgacacatttatctaccaacattttgtccaagtctcctcttctgagccctcaccagaatcacccttaatgaagagtcacagggagaagacgtccacccacacatcaggagacaggcctggaacagagccttcctgcacagcctcagaagggacccaccctggtgacaccttgatcttggactgacactcatgacctccagtactgtgagacagtaacattctgttgttgaaggtgcccagtctgtggtactgtaaaacagccctgggaaactaacgcagcctgttagcccacagatggtgaagggatggaatgctccacggagctccaggcttactatctacagcccccaaagtgtgctgcggacccttggtgggtgtaggtatgcaaggtaattttgggtggttnaaggtgaataatttcaattgacataataatgtatttatcttgctgggtaaatgagggataccaactgttaggaaccaggcaacacagcaggaggtgagcagccagccagtagcaaagcttcatctgtagaaacagccacttccatccctcgcataccgcatgagctctgcctcctgtcagatgagcggtgccgttagattctcacagaagcatgaacctactgtgaactgcgcatnncagggatctagattgcgtgctccttatgagaacctaatgcctgatgatctgtgactgtctcatcactgccagatggaaccacgtagttgcaggaaaacaagttcagggctcccactgattctacattatggtgagttgtgtaattatttcattatatattacagtaaaataatagaaataaagcacacaataaatgtaatgggcttgaatcatctccatatcatcccttccccttctcccgggtccgtggaagagttgtnttcaagaaaactggtctcnggtagcaaaaaggttgggaaccactggtgtaaatgctttaaggaatagttaagcagcttaaagtttacatgctacaaaaaatacaggtttaaatgctaataaaaatgggtgcaaatgaaaacactctcttgctgtggtccaaggaatcttaggcattctatcagaaagacttacagcttggagttgcagctgccctcccacatcctgtccactgtaacccntgcaacacacaaacacgcacacacacacangcacanncacacacacacacacacacacacacacacacacacacactgtgtttcatgccctcactagggtggcctgggagggaatgcgtgggttttttttgttttttgtttttttgagatggaatttcactcttgttgcctaggctggagtgcaatggcgcaatctcggctctctgcaacttccgcctcctgggttcaagcaattctcctgcctcagcctcccgagtagctgggactacaggcatgtgcaccatgcctgggtaattctgtatttttagtagggatggggtttctccatgttggtcaggctggtctcgaactcccgatctcaggtgatccgcccgcctcagccttctaaagtgctgggattacaggcgtgagtcaccgcgnccagccgggaatgcatgcttttaggagaaacgaagacaactcaggaccctcattctcctggtgtttgcgcaagtgccttctccgtagaccatgcttcagtctctttcttagttctccttcttactgaaagagaagcagagccccagcatgtacccagctgcttagggcccaagcaagtgcgcaagtttcctggggagcctagtgagtggaaggcactgcagatcctncccaaaagaggcgtcggttttttatggatcc

SEQ ID NO: 77700 - DNA, 439 bp, Homo sapiens
attccttcttatggctgaatattcaattgtgtgaacgtgtgtgtgtgtttgtgtgtgtgtatactgcacaatttgtttatccattcatctgttgatagacacttgggttgtttcccccttttagctgttgtgaataatactgtgaatgttggtgtacaagtttgaatccttgctttcagttctctcataccttagaatgaaattgctgaatcatatggtaattctaagtttaactttatgaggagtcaccaaactatttttcacagcaactgcatcagcatttacatttctatcagcagtgcacaagggttcccatctttgcacatccacaccaacaatttatgttttttaataatcaccattttaacaaatatgaagtataatcgatgcattcttaatttcctcttagtttttaagactaaatgagtcagttggtgtg

SEQ ID NO: 77701 - DNA, 380 bp, Homo sapiens
ctgtgaactctactgtcccaggacaatgggactaggacttggggttcactctgccacactggtccttcctgttctgtttattgtgcgcagtaaatcaactctcctgtttgcgcagcggttctgtgttctagattatttataagattgaaatccattgtttatttttctcagcaggtttattgagccagtcaagaataaaatactgtcttaagcagtagagtaagccattagccaattgcaacttggcttcaaattaatccctaaagggtgtgcacatgaacacacacactttgtatgtcccacatacatgtgtgtactggaggtgagagccaggggaggtggaggagctttagtggtgccagatctctgcagctttgtaa

SEQ ID NO: 77702 - DNA, 283 bp, Homo sapiens
tttctttttcctcttttaaaaaaaaaaacataaatagtggtatactatacatactcctctgcaccttgctttttctattaattctattgctagttctatttatttatattcagagaattttccttgtcagtacgtaaagagcttctactttttgaacatgtacatagtatccaattgtaaagctataccacagttagtctcttattgacaaatatttgttatcacaatgctgtaagaaatctatctatctatctatctatctatctatctatctatctatata

SEQ ID NO: 77703 - DNA, 559 bp, Homo sapiens
tggggagttgcatcttcatgaagatctttcaccacaaactccaccagatgctccagggaagactgtggagtcctgacaaagatgccggggggcatagaaaggtgatgcaaaaatcaacctggatccctctgccccattttcccatcacaataaagttgtcatctgctggggggtaagatgggcaacagaactgtcttgcagctgagggaagggaagagaataaagactgtcagccctggaggaggggtgagaatacatatcagatccaaacctccagctggagaagaggcatggttcttgtggaggccatgagacccagggatacaagctgtaagaccaagggataatcaggacatcagaactccgtccatcccagggcagcaaataagcatcagttaaaagtaatattgaaacattactaggaagcatgcatgagacaggctctccctgaggatcagggaaaagggatacgtaaagctgaagatggggcagactttgagaagaaacctctagaaactcagactccataccaaacccaaggtattgctaggagagtttg

SEQ ID NO: 77704 - DNA, 626 bp, Homo sapiens
gttacaggcagaaacgtgattatatacattctctgaagttgctaaatgtccttgaagaatacatcacagacgagcagaaagaggaagaagaagaagagggagaagaggaagaactaattagaatatttcaagaacaacagaagaagtggcaacaatatagaagtgttaggagagagaggctgaaagagatgaagctgctacgtgaccaattcgtaaaggctcttgaggactttgaagacctttgtgacagagttttttccgatgaagacagtgaacttgataactagacatgtttttaaataaaatcatgtcagaactcttttggaaaagttggcacttacccagttgtctcttcaacctctgttattctgatgactgaagaaagaacttgaacctatgttatatgatacaagcacaacttgagctacagtaaactacatgacagtgttttgataattgttgtataaatcggtatagctcctctgtcactcgtctgttaaatgccagacctcgtttctatgatctgttgaatgaatcctagacacttctgtgagaaagcagggattgcatagttatgtacacggtcaattaaattttaacattaaagataatttagatttcgaaaa

SEQ ID NO: 77705 - DNA, 372 bp, Homo sapiens
gctggtcttgaactcctgctcttaagcgatctgcccgcctcagcctcccaaagtgctgggattacaggtgtgagccaccacgcccggtctgatttttgtattttttgtagggatgggggtttccccatgttacccaggctgctcttgaactcctggcttcaagcaatccacctgcttcggcctcccaaagtggtgggatttcaggagtaagccactgcacccagccttgttcatttcaatattcctgatgaagtactccatctgatctcatttgctcttagaaatctgcttgctggttaccctgtgcagtggctcacacttgtaatcccagcactttgggagactgaggtaggaggattgcttgatgccagg

SEQ ID NO: 77706 - DNA, 329 bp, Homo sapiens
tggaagaaacatttctccaccctaactcaatatttaggacttttccactcccagacctttcccctttcctttccccttgctccagcgtccataaaatcccaagagcctttttttggaagctcctttaggagtgagccagataccgtgtctatgctagtcctgctaattcttgactggtgctggtccatggaaaaaaaattgatcaggaggagtcaccattttcttcaggttaacctcttgcttatcctgtccctgtaagtgattaaaggtttcactgttactttcatttttgcttcttgcttcatttttgcttcttggctactctgata

SEQ ID NO: 77707 - DNA, 478 bp, Homo sapiens
caacctctggctccctactgatgaataaaactttcattagcctgtcccccaatcctgcactcccttcccaattatcatccaattgttttctctccatcagagacaaacatttgtttagggactatttcaaacatacttaaaaagtacagagaaccatgtagtaaacaaagatttaacagacattgacattttgccatatttcactagggttttcccgtttatggaaaaaaaatgcaggccgggtacagtggctcatgcctgtaatcccagcactttggaaggttgaggcaggtggatcacttgaggccgggagttcaagaccagcctagccaacacagcaaaaccctatctctactaaaaatacaaaaattagcagagagtggtggcatgcacctgtattcccagctactcaggaggctgaggcatgcaaatcacttgaacccaggaggcagaggttgcagtgagccaagatcacgca

SEQ ID NO: 77708 - DNA, 464 bp, Homo sapiens
atgcgagtgtggcccctttgcattacgagctgccggagccagacctcagaacttgcttggacgcggtctgcaaggggctgggcgtggggctgaacggcttctcttcctctcctgcagcagagccacagcacatgcacaccttaccacaaagctcccgtcttcaccactcgcattcctggccaccagagagggtcctgcccaagggcaccctgcaacatcgtcatgcttcatcgttgcaagggccacaagatgcaccagggctgagatggcaaccaggagcaaaggagtgcctggtgaggtgtactctgacatggacacaaagctgataaaagactgcctggtatgccagagagagcaggatccctggaagagatggccatctggacttcccaggaccacaggccaagcacagtggctcatgactataatcccagaactttggaaggctgaggtgggtagatcac

SEQ ID NO: 77709 - DNA, 678 bp, Homo sapiens
ggatgaaggggtcatttttcactggtaggctgaaaaatgaccccttcatcatcaggctctgcgttctaccaaattgtatgtaaaaagacacatctgttttgtgataggattttttcacatttttgggtactatgagctgcattgatggaagacagcaggcaatatgtggtgacagttaactcacagacataaacatgcaaaatactttgctgtctctggggatattgccatttttcttactgtgagcaacagcaccaacaccaagttaacaggatgcaacatgtgtatgactctaaaagccctaagtagttggtaacttcctgggccttcaatcatagcaatttgatgagggaaggaaggggagaggatttgttgggtaatcaagacattcccgtatatgtctgatttcatggaactgctctattttgtttgtgtgtattgtatatgtatatgtgtatgtgtgcgtgtatgtgtgtgtctgtagcttcagtttttaagtgtaaggactaaataaactaactgaaattttactttcagaaggaattctgaagttttaaaaaagttaataatagctagaatatcttgctgaaaatgtactataaaattttgcctgctgggcgtggtggctcacgcctgtaatcccagcactttgggaggccaaggtgggtggatcatgag

SEQ ID NO: 77710 - DNA, 3393 bp, Homo sapiens
  misc_feature (1053)..(1053): n is a, c, g, or t
  misc_feature (1056)..(1056): n is a, c, g, or t
acaaagtcttgctctgtcacccaggctggagtgcagtggcgcaatcacggctctctgcagcctcgacctccggggctcaagctattctcctgcctcaccctcctgagtagatgggactacaggtacgtgcggctatctagctaattttttaaatcttaagtagagacattggtctcactgtgttgcccagactggtcttgaactcctaggttgaagggatcttccagcctctgcctcccgaagtgctgtattacagaacatatgcagtaatgtcacctcaaaagagagttaagaacgtccaggcacaaaacaggacttcacaaggtagtagtagttttcagaccacgctttcagcctggaaagtaaaacaggatccaagcaactcgaagaacatctcaaaacatggacaaaacaatccagtgggagattatgaacatgctgatgatcaagctgaagaagatgctttgcaaatggcagtgggatattttgagaaaggtcccattaaagcttcacagaataaagataaaaccttggaaaaacacttgaaaactgtggaaaatgtggcttggaagaatgggttagcttcagaagaaattgatattctattaaatattgcactcagtggcaaatttggaaatgctgtaaacacacggatattgaagtgcatgatcccagcaacagtaatatcagaagattctgtggttaaggcagtctcctggctttgtgttggcaagtgttctggtagcaccaaggtacttttttatcgttggctggttgcaatgtttgacttcattgatcgtaaggagcaaattaacttgctctatggcttcttttttgcttcattgcaagatgatgcactgtgcccttatgtttgccatttgttatatttacttaccaaaaaagagaatgtcaaaccatttcgtgtgagaaaactgcttgatcttcaggccaaaatgggaatgcagcctcatctccaggctttgttgtcactgtataagttctttgctcctgctctgatttcagtatctttgcctgtaaggaagaagatatatnttnagaattcagagaatctatggaagacggctctgcttgccgtgaagcaaagaaaccggggaccttctccagaacctctgaagttgatgttaggtccagctaatgttcgtcctctaaaaagaaagtggaattctctctcagttataccagtgctcaattccagtagctacactaaagaatgtggaaaaaaagagatgagtctttctgattgtctgaatagaagtggatcatttccactagaacaacttcaaagcttcccccaacttttacagaacatccattgcttagagctgccttctcagatgggctcagtgctaaacaactctctgctgcttcactacattaactgtgtcagagatgagccagtcttgctgaggttttattactggttgagtcaaacattacaagaagaatgtatttggtacaaggtgaataattatgaacatggaaaagaatttaccaacttcctggataccatcatcagggcagagtgcttcttacaagaggggttttattcctgtgaagcattcctgtataagagccttcctctctgggatggcctttgttgtcggtcacagttccttcagcttgtgagctggattccttttagtagcttctctgaggtgaaaccacttctttttgaccatctagcgcagctcttctttacatcaaccatttatttcaagtgtagtgtgcttcagagtctgaaagagctattgcagaattggctgttgtggctttctatggacattcacatgaaacctgttacaaacagtcctctagagacaactttgggtggatccatgaactctgtgtctaaactgatccactatgtagggtggctatccactactgcaatgcgcttggagagcaacaatactttcttgctgcactttattttggatttctatgagaaggtgtgtgacatatatataaattataaccttccattagtggtattgtttcctcctgggatcttctattctgcactcctcagcctggataccagcatcctgaaccagctgtgttttattatgcacagatatcgtaaaaatttgactgccgcaaagaaaaatgagttggtacaaaagacaaaatcagagttcaatttcagcagcaagacttatcaagaatttaatcactatttgacatcaatggttggttgcctgtggacgtccaaaccctttgggaaaggaatatatattgaccctgaaatcctagaaaaaactggagtggctgaatataaaaacagtttaaatgtagtccatcatccttctttcttgagttacgctgtttcctttttgctacaggaaagcccagaagaaaggacagtaaacgtgagctctattcggggaaagaaatggagctggtatttggactatttattttcacaggggttacaaggcttgaaactttttataagaagtagtgttcatcattcttccattcccagagcagagggcataaactgcaacaatcaatattaaatgaatgttgacataaactgaacacactggactaaactcactcctcattgctagagcaaagtggctcatcttgagttcccattttcatttcactgacagactgccatcctcaaggagtactcagactggccttctgttcatggcttaggagagccttggtgtgcctaactgatttttcaaaatttagatttttttagcctaccagtgaaaaatgaccccttcatcatcaggctctgcgttctaccaaattgtatgtaaaaagacacatctgttttgtgataggattttttcacatttttgggtactatgagctgcattgatggaagacagcaggcaatatgtggtgacagttaactcacagacataaacatgcaaaatactttgctgtctctggggatattgccatttttcttactgtgagcaacagcaccaacaccaagttaacaggatgcaacatgtgtatgactctaaaagccctaagtagttggtaacttcctgggccttcaatcatagcaatttgatgagggaaggaaggggagaggatttgttgggtaatcaagacattcccgtatatgtctgatttcatggaactgctctattttgtttgtgtgtattgtatatgtatatgtgtatgtgtgcgtgtatgtgtgtgtctgtagcttcagtttttaagtgtaaggactaaataaactaactgaaattttactttcagaaggaattctgaagttttaaaaaagttaataatagctagaatatcttgctgaaaatgtactataaaattttgcctgctgggcgtggtggctcacgcctgtaatcccagcactttgggaggccaaggtgggtggatcatgag

SEQ ID NO: 77711 - DNA, 2344 bp, Homo sapiens
  misc_feature (1034)..(1034): n is a, c, g, or t
  misc_feature (1037)..(1037): n is a, c, g, or t
ctttcctaggaacctaggaaataactcggaacctgtaacgtcccactggtttggacatattcctctcctgatctggcctcatctgttccagggaggtgggattgagcctagtgcaggctacagtcaaacctcttctggacttctgcgacagccttttatttggtttcttgccgctccttgacctctaacattctcgtctctgcactgcagctaacatgatcgtcaaacacaaatcagaacatatgcagtaatgtcacctcaaaagagagttaagaacgtccaggcacaaaacaggacttcacaaggtagtagtagttttcagaccacgctttcagcctggaaagtaaaacaggatccaagcaactcgaagaacatctcaaaacatggacaaaacaatccagtgggagattatgaacatgctgatgatcaagctgaagaagatgctttgcaaatggcagtgggatattttgagaaaggtcccattaaagcttcacagaataaagataaaaccttggaaaaacacttgaaaactgtggaaaatgtggcttggaagaatgggttagcttcagaagaaattgatattctattaaatattgcactcagtggcaaatttggaaatgctgtaaacacacggatattgaagtgcatgatcccagcaacagtaatatcagaagattctgtggttaaggcagtctcctggctttgtgttggcaagtgttctggtagcaccaaggtacttttttatcgttggctggttgcaatgtttgacttcattgatcgtaaggagcaaattaacttgctctatggcttcttttttgcttcattgcaagatgatgcactgtgcccttatgtttgccatttgttatatttacttaccaaaaaagagaatgtcaaaccatttcgtgtgagaaaactgcttgatcttcaggccaaaatgggaatgcagcctcatctccaggctttgttgtcactgtataagttctttgctcctgctctgatttcagtatctttgcctgtaaggaagaagatatatnttnagaattcagagaatctatggaagacggctctgcttgccgtgaagcaaagaaaccggggaccttctccagaacctctgaagttgatgttaggtccagctaatgttcgtcctctaaaaagaaagtggaattctctctcagttataccagtgctcaattccagtagctacactaaagaatgtggaaaaaaagagatgagtctttctgattgtctgaatagaagtggatcatttccactagaacaacttcaaagcttcccccaacttttacagaacatccattgcttagagctgccttctcagatgggctcagtgctaaacaactctctgctgcttcactacattaactgtgtcagagatgagccagtcttgctgaggttttattactggttgagtcaaacattacaagaagaatgtatttggtacaaggtgaataattatgaacatggaaaagaatttaccaacttcctggataccatcatcagggcagagtgcttcttacaagaggggttttattcctgtgaagcattcctgtataagagccttcctctctgggatggcctttgttgtcggtcacagttccttcagcttgtgagctggattccttttagtagcttctctgaggtgaaaccacttctttttgaccatctagcgcagctcttctttacatcaaccatttatttcaagtgtagtgtgcttcagagtctgaaagagctattgcagaattggctgttgtggctttctatggacattcacatgaaacctgttacaaacagtcctctgtgagttatctaacggtcttccacaagagacgatctgtatacaaatgtttgcatatgtttaatagtgtggcgtgaaacaatttttttcatgtaaatgcttagtagtacttttttggaagacttttttgtgacttttcactcttcttcccccacaatcctgaaaggaaggctaattctctaagttcctattgtgtaaatcagaaagcaacccttatctgctaaatgacttctttcaagagttaatataacaaaacactagagagatgagactagaatttgcaactttgacttccattcagtttaactcattttataaattatattcttatatttaaagccaattttcatgatggctagaaaaatctctaacgtaattttgcgtacaactttgtttttatgtttctgtgctgtattttggttatatgtgttaatttatcttaactttggagtttaaaataagagccctaaattgttaaatgtgtgctttaccttcaaagtaaaagtaaaagactaaatttcaaggaactgc

SEQ ID NO: 77712 - DNA, 3351 bp, Homo sapiens
  misc_feature (1053)..(1053): n is a, c, g, or t
  misc_feature (1056)..(1056): n is a, c, g, or t
acaaagtcttgctctgtcacccaggctggagtgcagtggcgcaatcacggctctctgcagcctcgacctccggggctcaagctattctcctgcctcaccctcctgagtagatgggactacaggtacgtgcggctatctagctaattttttaaatcttaagtagagacattggtctcactgtgttgcccagactggtcttgaactcctaggttgaagggatcttccagcctctgcctcccgaagtgctgtattacagaacatatgcagtaatgtcacctcaaaagagagttaagaacgtccaggcacaaaacaggacttcacaaggtagtagtagttttcagaccacgctttcagcctggaaagtaaaacaggatccaagcaactcgaagaacatctcaaaacatggacaaaacaatccagtgggagattatgaacatgctgatgatcaagctgaagaagatgctttgcaaatggcagtgggatattttgagaaaggtcccattaaagcttcacagaataaagataaaaccttggaaaaacacttgaaaactgtggaaaatgtggcttggaagaatgggttagcttcagaagaaattgatattctattaaatattgcactcagtggcaaatttggaaatgctgtaaacacacggatattgaagtgcatgatcccagcaacagtaatatcagaagattctgtggttaaggcagtctcctggctttgtgttggcaagtgttctggtagcaccaaggtacttttttatcgttggctggttgcaatgtttgacttcattgatcgtaaggagcaaattaacttgctctatggcttcttttttgcttcattgcaagatgatgcactgtgcccttatgtttgccatttgttatatttacttaccaaaaaagagaatgtcaaaccatttcgtgtgagaaaactgcttgatcttcaggccaaaatgggaatgcagcctcatctccaggctttgttgtcactgtataagttctttgctcctgctctgatttcagtatctttgcctgtaaggaagaagatatatnttnagaattcagagaatctatggaagacggctctgcttgccgtgaagcaaagaaaccggggaccttctccagaacctctgaagttgatgttaggtccagctaatgttcgtcctctaaaaagaaagtggaattctctctcagttataccagtgctcaattccagtagctacactaaagaatgtggaaaaaaagagatgagtctttctgattgtctgaatagaagtggatcatttccactagaacaacttcaaagcttcccccaacttttacagaacatccattgcttagagctgccttctcagatgggctcagtgctaaacaactctctgctgcttcactacattaactgtgtcagagatgagccagtcttgctgaggttttattactggttgagtcaaacattacaagaagaatgtatttggtacaaggtgaataattatgaacatggaaaagaatttaccaacttcctggataccatcatcagggcagagtgcttcttacaagaggggttttattcctgtgaagcattcctgtataagagccttcctctctgggatggcctttgttgtcggtcacagttccttcagcttgtgagctggattccttttagtagcttctctgaggtgaaaccacttctttttgaccatctagcgcagctcttctttacatcaaccatttatttcaagtgtagtgtgcttcagagtctgaaagagctattgcagaattggctgttgtggctttctatggacattcacatgaaacctgttacaaacagtcctctagagacaactttgggtggatccatgaactctgtgtctaaactgatccactatgtagggtggctatccactactgcaatgcgcttggagagcaacaatactttcttgctgcactttattttggatttctatgagaaggtgtgtgacatatatataaattataaccttccattagtggtattgtttcctcctgggatcttctattctgcactcctcagcctggataccagcatcctgaaccagctgtgttttattatgcacagatatcgtaaaaatttgactgccgcaaagaaaaatgagttggtacaaaagacaaaatcagagttcaatttcagcagcaagacttatcaagaatttaatcactatttgacatcaatggttggttgcctgtggacgtccaaaccctttgggaaaggaatatatattgaccctgaaatcctagaaaaaactggagtggctgaatataaaaacagtttaaatgtagtccatcatccttctttcttgagttacgctgtttcctttttgctacagggaaagaaatggagctggtatttggactatttattttcacaggggttacaaggcttgaaactttttataagaagtagtgttcatcattcttccattcccagagcagagggcataaactgcaacaatcaatattaaatgaatgttgacataaactgaacacactggactaaactcactcctcattgctagagcaaagtggctcatcttgagttcccattttcatttcactgacagactgccatcctcaaggagtactcagactggccttctgttcatggcttaggagagccttggtgtgcctaactgatttttcaaaatttagatttttttagcctaccagtgaaaaatgaccccttcatcatcaggctctgcgttctaccaaattgtatgtaaaaagacacatctgttttgtgataggattttttcacatttttgggtactatgagctgcattgatggaagacagcaggcaatatgtggtgacagttaactcacagacataaacatgcaaaatactttgctgtctctggggatattgccatttttcttactgtgagcaacagcaccaacaccaagttaacaggatgcaacatgtgtatgactctaaaagccctaagtagttggtaacttcctgggccttcaatcatagcaatttgatgagggaaggaaggggagaggatttgttgggtaatcaagacattcccgtatatgtctgatttcatggaactgctctattttgtttgtgtgtattgtatatgtatatgtgtatgtgtgcgtgtatgtgtgtgtctgtagcttcagtttttaagtgtaaggactaaataaactaactgaaattttactttcagaaggaattctgaagttttaaaaaagttaataatagctagaatatcttgctgaaaatgtactataaaattttgcctgctgggcgtggtggctcacgcctgtaatcccagcactttgggaggccaaggtgggtggatcatgag

SEQ ID NO: 77713 - DNA, 835 bp, Homo sapiens
tagagagctagcaccatgaaataccctgctgccaaataaccttccccaaatacttgtttttatcatacttcttccttgcttaaaataaaatgataaaacataacaggatatagaatattcaagatttttttaattccagaattcaataattaagagaaacaatgtttttatatgaatgatgaagaaatatacatgtgtatatgtaacataaaagatattttcacgggtaagcaaatatatatataaagccctgtaatagctcaccatggcagcttggagcaatagttaaaaaaaagcacaggttcttttttggacggagtgggagatggaggtacatgggtttttaagtcacctggattcatgacctagccacaaaggcactgtgtacccttaaagagttacagcctttaaaagaggtttatatcctgatatggtttggctgtctccccaacccaaatcctcatcttgaattgcagctcccataatccccatgtgtcatgggagggaccatcaggaggtaactgaatcataggggcaggtttttcctgcactgttctcatgacagtgagtaagtctcccaatatctgatggttttataaagggcagttcccctgcacatgatctcttgcctgctgacatgtaagagatgactttgcttctccttcgccttctgccatgactatgaggcctccccagtcatgtgaaccgtgagtgcattaaacctctttttcttaataaattactcagtctcgggtatatctgtattaacagtgtgaaaatgaactaatacaatatctttctccatttttaatgtgatatttgtgaacatcttaca

SEQ ID NO: 77714 - DNA, 731 bp, Homo sapiens
agcgcacaaagctgcctttgctgttacaaacagccgacagagggcgccggaccagcggtaacggacccaccagcgaccctaacccgcggtcgccccttcctcaaggagacccgcgcttggggtccgcagagtggaggcccgggcgcttggggattagggtccgcaggcctcgtgagcagcgagtaaacgccgcctttcacggctctgactacagagggagagctctaccgccgcctcccccgagacatttttctcatggaacattttagcgagaccgttttaccaatgtgccagtgtattgaggggactgacggctcaaaatcagatcgtgccgtagtcagtgttagagattcagggccatttctgcggagaaagacccgaattcggagaaaggggaaaatcatgaacaatcaggaagcgagcttacaaagtgctgtccacctttcagtggacagggcaccccgggggaaaaggaaaatgtgtgccccaatgtaggtgattttattaagttttaatggttattttttcctacaacaaagtagttgaaaaaactgaaaactattaaaacacattattttaagtttaaatatgccaagaccagacttttttttttttttttgtaagtttctgattttaatgtaggcaaacatcagaatattttcaaaattacttttctgcttactcattttcaattaagaacattaccatgtttggcaatatctcatgaacca

SEQ ID NO: 77715 - DNA, 915 bp, Homo sapiens
  misc_feature (720)..(720): n is a, c, g, or t
  misc_feature (749)..(749): n is a, c, g, or t
  misc_feature (799)..(799): n is a, c, g, or t
ctctgcagccgtgaagcccccgcggggccctgcaggtggctggcggcacctgcacacggtggttctctgttcctttttcctcctcaaccactgaggttaaaaaaagtgttaaaagccaccctttttgtttttttgagacggagtctcgctctgtcgcccaggctggagtgcagtggtgcgatctcggctcactccgagctccgcctcccgggttcacgccgttctcccgcctcagcctcccgcgtagctgggactacaggcgcccgccaccgcgcccggctaatttttcgtatttttagtggagacggggtttcaccgtgttagccaggatggtctcgatctcctgacctcgcgatccgcccgcctcggcctcccgaagcgctgggatgacaggcgtgagccgccgcgcccgcccattttttttaaacgtgttggggtttgggtttcagccacaggccttctgcgatgagaggaaacccaggacgcgcagccccaggtcaggcccgcggaacagccgggcggactccggggctcgcagactcgcgacccgcgtgccatgaacctccgcgccggaggcggcagcagcgagcgcggggctggatccagcgtagcggggcggccgggcggatccagcgcagccgggagacagatgcgaggcggcggtcagcaggtgccgaacccacggcaggcttccgtggccagcagccctagaggaatggncatcctgtccctgcgagcccctgggcccnggcaggcgatgcaggtgggatgctatggaatatgatgagaaagctggccngttccggcaaggcccactcaaaccctttcaacaagcagtcgggcgagacagcatgagcaggccctggtgagaggcccggacgtcactccggaagaggccttgcttgagctgccctg

SEQ ID NO: 77716 - DNA, 616 bp, Homo sapiens
gtcactagaaaaattactaaaaacatgagaataggtgaaaatgagtgaggctcttcattatatatacgggaggggagggatggaccatttatgagaaaatggtgaaagcaaacatttccttgccccagcatttgatgaatatgatagtgaaaaacaagtgtccccctttggcctgaatgaagtaagggaggaaaaaatcaaattagcagaaactagatgaaatatgacatggggcatccatggtcaaagtaaaagcacagcctttttaatctctagctgtaataactggagaacatgagtccattcatagcacagaggtggtgtctagactaattacatacatgccgattctttcagcaaatcatagttctcaatgtcattttaatgattatacataaagaagaatcttctcactctcgcgtaggaataattacattcttcagcactttatatgccaaaaaaaaaggtcatttgtagttatagtgattaattacctttgttttctggccaaaaacacaaggtggacaataatgaactaattacatattaccacaagactctgatgttcaaaagtatactaatgataactgtcttcacagattttatgggatttacc

SEQ ID NO: 77717 - DNA, 213 bp, Homo sapiens
gactgggaaggataatggcagaaaggaaatacagaaagtttgtattaaaatatggctaatacaaatatgagatatgctgcattttaatgtactgtaggttaaatttgcaaacctattctgtagagtaagcatgtagcagtttgtgttgctttccattagtctgtgcctggggttacatgtataaagcagcagttcccccagactagtgattct

SEQ ID NO: 77718 - DNA, 841 bp, Homo sapiens
ttcacgggaagacaacggaaatccaaggaaagctacgaaggctgttatcagagaaaaatttcctcgaagcactttagctgtcactttgaagtgttagtgacatcctttggcagtgattaaatgtgccacatgccactaatcttgtttagaatccttaaagaggacagcagcccttacacaggatgcttcgatctgatgacgatggtgtttatgcagtgatgtgtggctcacaggcacgtatacaacaccatcaactcttccatctcatacctcatcagagctttccatctgatcccatttggagaaggatatcacacctgaggaatccacgtgtaagctattgctcttgtatgagttcaggtgcacacgcactgtggacgcacactgcactgtgccccccaacggctgacaacgtggagccgggatgcaggagcatccgccttctccaagcttctctcccacctctcactgtgatactgagcagaactccccaaagaaaaatcatttctcaactgtgaaactagggaagactaaccagatgtgatagcacactgtattctgatcgaaagtgaactattcttccatcatattggtcaagctttcaaaaacacttacctatacttcagggcgaaagattctcagcatcctctaacaaatgtttgcctcagaaccattgaaaagaaaaggtttagaattaatgacagagaacaatgtacccacagctgcattttgctcttttgaaaattagatatttttctgcagataatactacagaaccacaataaaagttatcatcatgcttcacatctagtaatgaacgtgaaacaagcaccctcgaata

SEQ ID NO: 77719 - DNA, 348 bp, Homo sapiens
gagctcgctctctttccgtgtggcctcagggtcttcccctctccactgagccactccatgtggttgcttcaacagagtagccagacttcttactagcagttcagggttcccaaaagtgcaaaggtaaaagctagcgatacttcttaaagactagacccggccgggcacggtggctcatgcctgtaatcccagctctttgggaggcagaggcaggtggatcacaaggtcaggagttcgagaccagcgtggccagcatggtgaaacccccatctctactaaaaatacaaaaaattagccagacatggtggtacatgcctgtaatcccagctgctcgggagactgaggcaa

SEQ ID NO: 77720 - DNA, 438 bp, Homo sapiens
ttaatctagttaatcctgatatcctcttgctcagcagagaatggtggttaagaccactaatttagagccagactctcagacaactccactacttcctacctaagtgactgaaaaactgggcctgttttccttttctataaaatgggaataataacctcattggatagttgggagaactgaatgagttcatacatataaaggacttagaacagcacaacactcaagggacggggttaggggagttgtttgttgtgtacctttcacactttttgatatttgtaatatggacatgaatctttcattttaaaaaaccaagcaaacaaaaaccctcccatcaaaaacatatgaaaatagagtgaaacacaagttaaagaatgaatgtggaaaaactctgaagataaacaaaatctgggtgacagagcaagactccatctcaaa

SEQ ID NO: 77721 - DNA, 462 bp, Homo sapiens
gatgacagggctgagtctcaccaacacactgagtaccttaaggctctcaggataatgggaaaaaaaagaaccagaatccaccccccgccccaccagccacacacacacaagtccacaaaggaacaggcacccacatgctgtaccctggggcccttccaaccctgatgcgccaactcccgacatgctgcctctagccttgacctttctcagaaatgatagcttagcggatgtttggcagatctcaacagtcaagccaagatccagctgcagtcaaaacacaatacgcctggtggagcctcttccaggttcaaacacgggaaccacgctcggagctggacccggacccgagcctcttccaggctcagacacgggaaccacgcccagagccggacccgagcctcttccaggctcagacacgggaagggaaccacgcccagagccggacccgagcctcttccaggc

SEQ ID NO: 77722 - DNA, 398 bp, Homo sapiens
tcagaatgaagccacctacgtatagtcagtcttggctggaaaaaggtgagcgctttcacctttttcagcatccctatctagtctttctgggtaggccaaactttgtaattattaccctcaatattttgtaaagttattctcccatatccaccctcaccccacccatgagtccctgagatcttacactcctgctccaaagtcctgcttctccttttatactttgactttggttgatgaacattttatactgctatcccccacccccgtgtctgggtgtagttttagagtacttccaattattcagttcctccattatcacttgtattatatacaacgtgccaccttatattttctgtcgtagtatattgtatggctccagaaaggtagcagggtataaa

SEQ ID NO: 77723 - DNA, 347 bp, Homo sapiens
ccccatctctcctctcttcccctcacagatgtgcacccccgccaatacccctgctacaccccccaacttccctgacgctctcaccatgttctcccgtctcaaggcctccgagagcttccacagcggtggcagcggcacgccgatggccgcgacagccacgtcacccccgccacacttcccccatgccgccaccagcagctctgcggcctccagctggcccacgcgggcctcgcccccgggggcccacagcaccaccagccacagccgcccctgtggactccaacacccccttctccggcttcagactggccacccctggccccccaacaggccacctcagaacccag

SEQ ID NO: 77724 - DNA, 267 bp, Homo sapiens
cggagatttggggccccagtgccactgccctcccccgccccgtccccgttgtgcgtcatgctgttttttaaaaacctgtttccaaatttgtatggaatggcaaactgttggggggtcggtttggggagggagggtttgcatgaaagacacacgcacaccacaccgcacgcacaagcaggcccggcgccggcgtccggggggcagaaggaggtgagctcgccggctcctcctccccgcggccattctgtcccctcctggggtgagggg

SEQ ID NO: 77725 - DNA, 393 bp, Homo sapiens
tttttttgagacagggtcttgctatgttcctcaggctggtcttgaacacctgggctcaagtgatcctcctgtctcaacctcccaaagtgctgggattataggcatgagccaccatgaccagcctattttaaaaaaaaacttaaattaaaattttttaaagagatggggtctgggtatgttgcctaggctggcctccaactcctgggctcaaatggtcctccaacctcaggctctcaagtagctgggttacaggcatgtaccactgcatctggctcatattcttaatccaaacaagatggtttctacatagtgttgcatagtgtacactcaaaaattatttaattttcagggatcacctgtgccagtgcaagagaatagaaacaaagacttacc

SEQ ID NO: 77726 - DNA, 691 bp, Homo sapiens
ttgactatctagagggctgattttgaaactgttataatgaaagatggtatttgaaaacttttgatgggggaaattgtcatcatatttatattttgaaaagtgtttccttatttacgcattattgacttcctattgagactcaaaattttaagtacaactggtaaagaattcaatggatcaaattcagtaaatctgaagtcactggaataaaggcccctaagaaaaaaaaatgtgtcaattttaaaggtctttcctaactgaagaccattttgtgatagagccaaaggttaataaaatcagtagtgaatgtagcaattttacagataagctattcacaacaagtgtagttacttgaataaaaagctaattcagttctaaaatgccacatgcagtagcagtgaatagctgcttttaggtgctttctggaggaggataaaatacagaatcacggcactcttctcttccagcgtccctggctgcctgtaaattgctgtgaatggggctgtgggctgacaggctctattaagacaaactgcctttctcatcggagagataaaataaatcaggtgtttagtcaaattaaaatacttcagctggagcaggccctggggagcactgatccacctgactaatctgagagaaactcaagacagatgtggtttggggataaagacgaccccatggaacaaaa

SEQ ID NO: 77727 - DNA, 893 bp, Homo sapiens
gggctccgaaaggagagcgtggtgtctggaggtgatcggaagggactggctggagtgtggcgggctgacaggtctgaggcctgaaggacttccgggaaccgcaaagcacggtgtgcctccgctgtcctgaagaaaaagccgcgcgcggacgactggccggcccgcgcttgcagctcccagaagttgacaggcatcctccggtgaccggtgtgagtatggcatcaggatgatttgactgcaagcaacagaaaaatcaaacaaaaatggcctaagccaagaagagaaatgattatttcacattccaagaagtttgggagtcgagtggttaaacggctaattaatctagagctcaacagtatcacccaggacccattttcactatggtggctaaagctctgcacccttcaggcttgcaccatggcagcagcagtgacagtaaagacacccttacaccacaatgctccatgaccagggagagggtctcctctctcctgcccctttctggaggctccaccgaagatttctcttcacattccgtttctcattcctgaagcagttgctggcaacagggatggacttaccgcaatgggtacagagcaactaagattcaccactaggtgagtcctttggaaaacacttggccatccaatatataaacaaatctggtactcctgtcaggaaagaggtaggtaattcccaacagccaatagtgtctgccacaagtgaaatatctcatcagagaaaactgagtaggtaatacatgattctgtgttttctctgttttctgcctttgctttttccatttggtaagactcacctgtgttcctctttgtggctctttctccttgataatacaaccctggtttagttcagatacaggtggcaataggcca

SEQ ID NO: 77728 - DNA, 235 bp, Homo sapiens
tgagatttcaccaagttatgtctaggtgtgtgtcatttaaaaaataaccctgtctgggacttgggcctttcaatatgcaatctaaagtcttctggcaggtcagggaaattttcgtctgttattttttaaatagcacttctcttccatctgttctctctttctttctctctttcccgggcctcgacttggagcctggagctgcgcttagtgttgaaatgcaaacatgaacaaggct

SEQ ID NO: 77729 - DNA, 752 bp, Homo sapiens
agctgggattacaggtgcccacgaccatgcctggctaattttgtatttttagtggagatagggattcaccatgttggccaggctggtctcaacctctggacctcaggtgatccacccgcctcggcctcctaaagtgctggagattacaggcatgagccaccacgcccggaccatgatgcagatttcaagctatgaacatgattctctggagtttaccatttgtcttttaattggcaaatttgatgcagaattgggaagagaagcacacaattgactctcgtcagctggcacaagctggtgccagtgcaccactgtatatatccatggccctctgtgaagctagagtttactactaaaatttgtgctccataaatatacaaaggcactagtaagagaaaaaatataaagagaatataaactaaattcaaattagggagctcaaatggagaaaattgacagataatatttttgaaactttgaaaagtagtatttgtctagattcaccttttattaccttttcctttttttcttttccttttttttttttttttgagacggagtttctctcttgttacccaggctggagtgcaatggcacgcaatctcagctcattgcaacctcggctcactgtaaccttcaccttccgtgttcaaatgattctcctgcctcagccttccgagtagctgggattacaggcacccaccaccatgcccagctaattctttgtatttttagtggagatggggtttcac

SEQ ID NO: 77730 - DNA, 636 bp, Homo sapiens
agctgggattacaggtgcccacgaccatgcctggctaattttgtatttttagtggagatagggattcaccatgttggccaggctggtctcaacctctggacctcaggtgatccacccgcctcggcctcctaaagtgctggagattacaggcatgagccaccacgcccggaccatgatgcagatttcaagctatgaacatgattctctggagtttaccatttgtcttttaattggcaaatttgatgcagaattgggaagagaagcacacaattgactctcgtcagctggcacaagctggtgccagtgcaccactgtatatatccatggccctctgtgaagctagagtttactactaaaatttgtgctccataaatatacaaaggcactttgggaggccgtttcttgtatttttgaagttcccaagattagctggagagtatttgataacactctggctaatctgtcaagaagcgggggagaaaacctgccatctatttaatagcttttaagcagttcaatttctgtaatgagaagataaatctggaaacacccaccagagggatgcctctacaaagtcctgatgctgcaaaagagcatctttggagctacacatcaagagagcagcgactctcgacc

SEQ ID NO: 77731 - DNA, 403 bp, Homo sapiens
ggcaagattcgcaatctctctagggttcgctgcctccctctttgaaaatgtacctgttgagctgtgatgatcctgaaggtcttttacagctccaagattctaagtacatgagctgaataagaggggtcacactgaagaggttccctgagaaactgaccctcaataaaaacggtcgaatcaacattccataagacaaaatgagttataagacagatgtcaattggttggctcaaaatcattagtcactagagaaataaaaatcaaaaccacagtgtgataccatttcacactcaccaggatggctatttaaaacaaaacacaatgccaggtgcagtggctcacacctgtaatcccagcattttgggaggccaaggcaggtggatcacaaggtcaggagatcaag

SEQ ID NO: 77732 - DNA, 502 bp, Homo sapiens
ggtggccccaggcctcccgggggtgggaagagccaggctgagccttataaaggactgctctttgtccaaacacacacatctcactcatccttctactcgtgacgcttcccagctctggctttttgaaagcaaagatgagcaacactcaagctgagaggtccataataggcatgatcgacatgtttcacaaatacaccagacgtgatgacaagattgacaagccaagcctgctgacgatgatgaaggagaacttccccaacttccttagtgcctgtgacaaaaagggcacaaattacctcgccgatgtctttgagaaaaaggacaagaatgaggataagaagattgatttttctgagtttctgtccttgctgggagacatagccacagactaccacaagcagagccatggagcagcgccctgttccgggggcagccagtgacccagccccaccaatgggcctccagagaccccaggaacaataaaatgtcttctcccaccaga

SEQ ID NO: 77733 - DNA, 442 bp, Homo sapiens
ggcttggggtgcaggccagcccagactgactactggctgaaagatctgctttgggaagctttttgaaagcaaagatgagcaacactcaagctgagaggtccataataggcatgatcgacatgtttcacaaatacaccagacgtgatgacaagattgacaagccaagcctgctgacgatgatgaaggagaacttccccaacttccttagtgcctgtgacaaaaagggcacaaattacctcgccgatgtctttgagaaaaaggacaagaatgaggataagaagattgatttttctgagtttctgtccttgctgggagacatagccacagactaccacaagcagagccatggagcagcgccctgttccgggggcagccagtgacccagccccaccaatgggcctccagagaccccaggaacaataaaatgtcttctcccaccaga

SEQ ID NO: 77734 - DNA, 425 bp, Homo sapiens
ggtggccccaggcctcccgggggtgggaagagccaggctgagccttataaaggactgctctttgtccaaacacacacatctcactcatccttctactcgtgacgcttcccagctctggctttttgaaagcaaagatgagcaacactcaagctgagaggtccataataggcatgatcgacatgtttcacaaatacaccagacgtgatgacaagattgacaagccaagcctgctgacgatgatgaaggagaacttccccaacttccttagtgcctgtgacaaaaagggcacaaattacctcgccgatgtctttgagaaaaaggacaagaatgaggataagaagattgatttttctgagtttctgtccttgctgggagacatagccacagccatttaggtacagcctttaggtacagccatttaggta

SEQ ID NO: 77735 - DNA, 1137 bp, Homo sapiens
ggtggccccaggcctcccgggggtgggaagagccaggctgagccttataaaggactgctctttgtccaaacacacacatctcactcatccttctactcgtgacgcttcccagctctggctttttgaaagcaaagatgagcaacactcaagctgagaggtccataataggcatgatcgacatgtttcacaaatacaccagacgtgatgacaagattgacaagccaagcctgctgacgatgatgaaggagaacttccccaacttccttagtgcctgtgacaaaaagggcacaaattacctcgccgatgtctttgagaaaaaggacaagaatgaggataagaagattgatttttctgagtttctgtccttgctgggagacatagccacagactaccacaagcagagccatggagcagcgccctgttccgggggcagccagtgacccagccccaccaatgggcctccagagaccccaggaacaataaaatgtcttctcccaccagaaaaagaaaaaaaaaaaaaaaaaaaaaaaaaaacacaaaacacaaaaaacaaaaacaaaaaaaaaagagagagagaaaagaagaagaaaagaaagagaggaagaagagggaagagaaagaaagagaagagaagaggaacgagcaaagaggcgagaggcgaccagaacacagccgacagaatcaaacagaaggagacgaaagcaagagcgagagaaggaacaccagagagaaggagaaggagagagccgcgagcgaacagagcgaagacgcgagagcagggaaagaagccacagagaacacaaacgaaagacagcggacgagaaggagcgggagcaacaacaagggagaggaggggaggagaggaggaggggaggcgcgacagacaggagagacggagggggcaggagcgagagaaggaggggaacgagagggaaggacggaggggcgacgggaggcgggcgagggggggaggagaggggggaaaggagaaggcgagaagagagggggaggagaacggggagaccggaggaggaggagggggaggggaagggaaggggcagggtggggggggagggaggagggcggggggggggggagggcgggggggaggcgggggggggggggggcgggggggga

SEQ ID NO: 77736 - DNA, 529 bp, Homo sapiens
ggtggccccaggcctcccgggggtgggaagagccaggctgagccttataaaggactgctctttgtccaaacacacacatctcactcatccttctactcgtgacgcttcccagctctggctttttgaaagcaaagatgagcaacactcaagctgagaggtccataataggcatgatcgacatgtttcacaaatacaccagacgtgatgacaagattgacaagccaagcctgctgacgatgatgaaggagaacttccccaacttccttagtgcctgtgacaaaaagggcacaaattacctcgccgatgtctttgagaaaaaggacaagaatgaggataagaagattgatttttctgagtttctgtccttgctgggagacatagccacagactaccacaagcagagccatggagcagcgccctgttccgggggcagccagtgacccagccccaccaatgggcctccagagaccccaggaacaataaaatgtcttctcccaccagacacttgccttattttcttcttctcttt

SEQ ID NO: 77737 - DNA, 345 bp, Homo sapiens
aaataacttgtggattaaagaagatgtcacgagggaaatcaggatatattttgaaataattgaaatcagaacacaacatatcaaaatgtgtgggatacagctaaagcaatgtttagagggaaattaaaaccattaattattagaaaataaggaagttctcaaatcaataatataaatttttatcttaagaaactaggaaaaaagaacaaattaaacctaagtacacagaagacagtaattaagagcaggggcaaatgaaaccataaacagaaaacaatagagaaatcaaaagctggccttttgaaaagatcaataacattgataacctatagtcagattggtcag

SEQ ID NO: 77738 - DNA, 344 bp, Homo sapiens
caaagcctatgctttgcttaacacatagaatggaattgcattaatgtgagaaagcatttcgaaaatgatggagtctgtagagatgctaggaattgttttcatgatcattacctgaagcttcatcctaaaatgtgctgactcttaatttaagtatatgcaacccaaagttatctaggcctgtcagcctcagccttaagctctagtcttagcactgtgatgcatgaagagaaatgtaatttctactccaaaagtgttttaagataacataagattggccgagcgcagtggctcacgcctgtaatcccagcactttgggaggcagaggcaggaggataacgaggtca

SEQ ID NO: 77739 - DNA, 394 bp, Homo sapiens
gtatcaactattaggaagtggttaaacaagattaaagtgttttgatatgtattaacattgaaacagtgaagtagaggagaatagggctaggggaaggtcaaaaaatattttagacttattcataatgttgaaacttttaacacaatgactacattaagatatgtcagtctcctagggtatcatttcctgtcctcaactttgccaattatataatcagatgctataagcaggtatatttagattctccagaaaagaagggtttgcttcattttcttaaaacaattttaggattgtgcagcatttttgagcttcaacaaaaattataaacctctctctaggaaagacatacacaaaatacagatatttttctaaattaataaatgtttaggagaaa

SEQ ID NO: 77740 - DNA, 482 bp, Homo sapiens
ataataattcttagaagaattgtgttttctcaacacaccctcctgagatcgcccccttccctgttttattgtgaacctttcctatttttctaccccatgccaggtgtttctaggtgtggcaaatatttctgtttctttcccatcatgtagaggtgttgccggggcactcacaggaactgcatttcccaggttcccttgcacctcagtagggccatggaaggcttctcagctgtggcaaatgcatggaagtaacaactggcaccttcagcccaaaggtaacatggagatgtctcttccccttggtgcctccctctacccactggcagaatgcagagaacaccaaggacttacagaaggcagagcctcatgatggaaggagcctggatccctgaatgaccatctggaaggctgactgaccaggaacatcctcttgggactgtgaagtatgcaagaaataaattttcattgtgctaaggccctgg

SEQ ID NO: 77741 - DNA, 455 bp, Homo sapiens
ggtcttctcttgaaaatgggaggataaggccaaattggggccagattctcacatggcaacagctaggtagtgactgccttcctatatggggcacaacttcctgttcacctgagaccctcctggcctgtgtccccatccacattgcctgtctggcacctataagcatttagtctaaattctactaagcagagacatctgttttcttctctaagggcacaacttccattaaaactaatcttttggtcctagggaagccacatggggaagaggcatacaaacacgggcttctgagttagataaacctaggctgaaatctcagctttgttctttgttagcagagtgagcctggacaaattacttactcccaacctcagaatgggagcaataatatatacacctgaaatggtggttgtaatgatcatgtgagagaatgtatcagaagcagctagcacata

SEQ ID NO: 77742 - DNA, 276 bp, Homo sapiens
  misc_feature (23)..(23): n is a, c, g, or t
gaaccaaagccacagttgggcangctaatctttagcaatattactccaaaaagcttcaacatgtcatggaccactcaagctgggctttttgcaaagattgttatcaatgtgagtgacgctcactcactgcatgagtcccagcaattcacagtctcaggagatgcaaagcaagctcacatcacaggcttggtggagaacactggctatgacgtcagtgtggcaggaaccaccttggctggggatcccaccagacccctcactgcctttgtcattaca

SEQ ID NO: 77743 - DNA, 939 bp, Homo sapiens
aatataactataatgcttcactaataccttaaaaatgcctagtgaactaactcagtacattatataatggccaagtgaaagttttgtgttttcatgtcctgtttttctttgaaattatatagcccagaaattagctcattatctgaaaaacgtatgaagaactgatgaattgtataatacaggagtattgccattgaatgtactgtttgatttattcaagcaggtaatgaacaatgttgtcaaactctctaatgagacatcataattaggacataagctaaaaggggcattactccggcagtctttttttcttaatcctagtaccatacatattctttggcatgaaagaatgaaaagcattagtaaacaactgaagtcctaccatggctctgtagggtttttggaacaattcctggaattggaaagtgaaaatggatagcatgtgggggaaaccctcatctgagtagcaagattttagtaaagatgactaagccattaacagcatgcattcatatttaattttattgactcctgccatcagcttttgtagatcttttgggtggaaggttgtgatttttactgggaggacttgagtagaagtggatgattaaaattgaggagtatataattctttctgggactgcttaaatgttattgtttgaaaatgccttcactttccccctttggtcaaagagatgtgcttaaaattcttattccttcacaataaataattttgattttcttagacaggtttgtgtttaggtatgagtttctcttttacttcatctagcaattctctctgtggtcagaagaactctgaagaaagctttgagggaaatgaatataactcttaaattattatatgtgtgtgtatatatatagtttaactttaaaaataatttattagtcatcataaagaaataaatgtctctggctcaa

SEQ ID NO: 77744 - DNA, 732 bp, Homo sapiens
ggcactctgtagatctttcataaaaattttttgagtgaattaatgaattcataaactattcattaaatgattactctgtgataactaatgacagtatcagttaacatatattgacattaccacacaccagggattcttctttttttttttttttttggagagtctccctctgtcacctaggttggagtgcagtggtgcaatctaactgcagcctctacctcccatgctcaagcaatcctcagcctcctgagtggctgggactataggcacatactaccacacctggctaatttttgtatagatggtgtttcgtcacattgcccaggctggccttgaattcctgggctcaagtaatcgcctgccttggcctcccaaagtgctggaattacaggctcagccctgggggggttattctaataacttgataggtactattatcattttttctcacaataaccctatgggataacatctcagaaactgacaaattcagaaatgtgtcagttcctgaaaaaggaaactttgggatggttggctgtacttttaaccactactctgtcttgtctctgcatgtgtgggcatgaactttgttaggttctgaggaggaggatggggggttgggaggagctgcatatgttctctgccccagaagaatcatggcccaggggaagaggtagcaaaaggaacaactattccagtatgacttgatcagtttcttgatggacatgtgtg

SEQ ID NO: 77745 - DNA, 509 bp, Homo sapiens
acaaatttaagtcattaatgttactgattggagttcatttctcagatttcacatagttgttgggcacagaaaatttggaaactttggctttcattcttgcacagactaatttagcatcatattcttgttctttgctgatttatcaggtaaggaaaaagtcaagtaaaatgatttggatgcctcactgccagggaatgcttgataaattaaaagcctggcttcctagggacattctgactactgttgtttataaccaagatcttttgcaaccttagacttcccaggaaaagcctgggctttgttgctgcaggaaggagaacagggaggaaaatatctttcagatttaatcagtgagaaactactaggaattagccactatgctagggaatacccaatcattattttgatacttttgtaagctgaagcatcatttaggggcctagcaggtttgctttctgatcatattcaaagccttcacctgggtgaactcctgtgagaacctataattc

SEQ ID NO: 77746 - DNA, 765 bp, Homo sapiens
caagattattgtcaatccctgaatgtctggagttacctcccatggatttttttttcctttggcctgggttttataaacaacttgaacatcatatcatataggataacaaaggaggaagttaacttaattcacctcagacttcagcctaagattcaatcaaattcatccttcagcctgtcttgtttcttctttatgtttcttttacttattgctgctaggatcctacataggatttctatagaaatgtatgaaattctgtggtcactgcatgtcaggattgcacagtatgttacaatacaatttcaaagagaacccacatttgtgagatttacagaccaaggtgtggtggaggaggtagaattgcagatcagataaaaagtgagcttacacttgaacttagttattcactgtgacctaaatttagtcctattgtaatatgtgcctgtcacaacacaaatacccctcttgaaagagatttactcatctatccaagcacttaatttggaaattttattgtcctattgcaaaatgaaacaaaattaaaagtggcctcgagtacttggtaagttacttaaaatttttacaaaaatatcccactcaatgccaaatctttcagtcctcaaaggcatttaagtccaatagtcatgctttaaatatggctttaaattatgccaccaaaatggtgcacttcacagattcaccagactgtagcatcataaagttaatttacagtttttacaacattgcttctacattcttactggt

SEQ ID NO: 77747 - DNA, 411 bp, Homo sapiens
tttttttttggtgggagattttgaatactgatttaatattctcacaagtttctattcagattttctatttcttcatgatttagtcttggtaggtttcttcttgttgctaggaagttgttcttgtaggttatccaattttttgtagtataattgttcataacacgtttataatcctttttatttctataaagtcagtagtaatgtccccacttctacttctgattttggtaatttgagtcttctcccttttttcttagtttatctagccaatgtttgtcaattttattgatgtttttaagtgattaacttttgatttcattgattttcaccattggttttctattctctattttgtttatctctgctctaatctattaattccttacttctgatagtttgggtttaatttat

SEQ ID NO: 77748 - DNA, 1163 bp, Homo sapiens
attaatatagttaactctgcttaaacacagtcaatatatttgtggcactctttgcacattggaattaaacaaatcttcattcctttttcttctttactcctatacccaatcaatcatagtttctttcaattgttcttaaatttcagatatttcagttttccatctccattaactcattgtaaccacctgattcatcccatatccatttttttctgatttattaatccctaaaagatctccctaaacttgaggtttgacccctctgcaatgcagtgaaaatgagtgtgatagctattttttgtgtgtgtgtcaactttaccaggatactgaaagaactggtaaaatcattatttctggctgtgtctgtgagaatatttctggaaaagatgaatgtttgaatcaggagactgagtacagaacatcttccctcatcaatatgggcaggcatcatccaatctgttgaggacaaaaaaaaaaaacaaaaaaatttggaggaagtctgaatttgaagtaggagatgggactcaactccaaaggtggggcttgaacatgggaccaaattgaggactagctaaaacaggtcaggagtggaaacagctttcctaaacacacgcctaccagtatgccatgagagtttaccattgccatggcaacacccagaagttaccacccctttccatgacaatgacccaacaatctggaagttaccacccttttcccagaaatttctgtataaactgccccctaatttgcatataattaaaattggatataaatactgcagaactgcctctgtgctgctactctggccacactgcctacggggtatccctgctccacaaggagcagtgcttctgctgctgcttcagtacactgctgcttcaataaaagttgctttttaataccactggcttgcccttgaattctttcctgggttaaaccaagaactcttctgggcttagctgtcattttggggcttgcctgtcctgcagcaaattcattgtctctccttaagctggaacattcatcttctcttgccttcacccatgggcagttcttgattattaggagttcagcctaagacagggagttacgccactgactcctgtgattctcagaccttcggacttagactgaattatgccactagctttcctgggtct

SEQ ID NO: 77749 - DNA, 273 bp, Homo sapiens
gctggttgtgtagccatagactggcgccggactctgaactggttattactggtctgtaatgagataagcccacacactgtatttagaaacttttatagaaacttgacagagtatacaaaaaaattaaccgggcatggtggcacatgcctgtaatcccagttgctcaagaggctgaggcaggagacttgcttgaacccgggaggcggaggttgcagtgaaccgagatcatgccactgcactccagcatgtgtgacagagccagactccatctag

SEQ ID NO: 77750 - DNA, 311 bp, Homo sapiens
acagctgtgtctgcagttggtgggaccccatctcatgaaagcacgagcgcaagggcgagggctgctttctattctagtctgatagtctgacgggctggaggagtccgggagagctgacaggggtcttaaccgccagcagggatgggcctgaatacagttgggaaatacctacggggtccaggcagaggactgcacaagccactcaacatgaaggtgaaggaaaaggaggctcaagaacggctctgggtggggctggggccgggtgcggtggctcacgccggtgatcccagcactttgggaggctgaggtgg

SEQ ID NO: 77751 - DNA, 746 bp, Homo sapiens
caaaaacaaaaaaaaaaagaagggtgattatttactttacccaaagacctataaattactacttcatatcctaagacatttcagaaattaaaatataaacatcattactctaaggcagttccttaataaggaaagcttgtttatagcaaaaataagatatactaaggagaaagtttcagataagtcctttagttacttttaaataaatttgaaaaaaaaatttttaacatttctattacagaaagttttaaaaattgaaatatactgaataacattttcattcaaaattgtcataactaattcaattaaaattttttaaatacaagtactgtcatcagtaataactaacattcttttaatggttattatggaccaaatattcatgtcaaacactatagcagccccttaaagtagaatcattattatatcaattgcacagattaaaaaaaaatccaccgtgcccagcctaatttttgtattttagtagagacagggtttcaccatgttgtcccaggctgggcttgaactccagagctcaatcttcttgcctcagcctcccaaagtgttgggattacaggcgtgagccactgccctcagcccattttctttaaagcagtaataaatgtatcttttgcgattttccagtctcagcatgtctttcatctgacagcagatagacacacagctctttctctgagaggaatagagactggttttgaaaccgagctctgtgtatagtgtttgaa

SEQ ID NO: 77752 - DNA, 642 bp, Homo sapiens
  misc_feature (555)..(555): n is a, c, g, or t
  misc_feature (602)..(602): n is a, c, g, or t
  misc_feature (609)..(609): n is a, c, g, or t
caaaaacaaaaaaaaaaagaagggtgattatttactttacccaaagacctataaattactacttcatatcctaagacatttcagaaattaaaatataaacatcattactctaaggcagttccttaataaggaaagcttgtttatagcaaaaataagatatactaaggagaaagtttcagataagtcctttagttacttttaaataaatttgaaaaaaaaatttttaacatttctattacagaaagttttaaaaattgaaatatactgaataacattttcattcaaaattgtcataactaattcaattaaaattttttaaatacaagtactgtcatcagtaataactaacattcttttaatggttattatggaccaaatattcatgtcaaacactatagcagccccttaaagtagaatcattattatatcaattgcacagattaaaaaaaaatcaaaaaactcgagactagttctcctcgtgccgaattcggcacgagccaaagcagcagctgtattgccgcagttctagcttcaccttcacgatgtttccttggntccagaggcaccagaaacgtacacctgattttatgacaaatacggtnatgctgnattagctagtggagccactttctgtattggtac

SEQ ID NO: 77753 - DNA, 140 bp, Homo sapiens
gagactccatctgaaaaaaaaaaaaaaaagtataaatagttatgactgaacaactatgaactgtataaaaatatcccattaaactcatagtgaaagtatctccaactaaaaaaaaagaagaaagaataaaaaacacattt

SEQ ID NO: 77754 - DNA, 1628 bp, Homo sapiens
  misc_feature (707)..(707): n is a, c, g, or t
  misc_feature (710)..(710): n is a, c, g, or t
  misc_feature (719)..(719): n is a, c, g, or t
  misc_feature (722)..(722): n is a, c, g, or t
  misc_feature (724)..(724): n is a, c, g, or t
  misc_feature (727)..(727): n is a, c, g, or t
  misc_feature (730)..(730): n is a, c, g, or t
  misc_feature (733)..(733): n is a, c, g, or t
  misc_feature (747)..(747): n is a, c, g, or t
  misc_feature (753)..(753): n is a, c, g, or t
  misc_feature (756)..(756): n is a, c, g, or t
  misc_feature (758)..(758): n is a, c, g, or t
  misc_feature (761)..(762): n is a, c, g, or t
tattttcatttaccgggcggtttataatacccacagcttttttaaggccgcactttcggcattaaacaatttctctcggattccatatttagaaaaccttccccctttgaggagtataccccccccaaacaaaacccgggcccagtttttgtcgcgcaacgaaaagccaaatgacaaaacctttcccggggtgtggcatttaataagcggcgtacacaaagtttcccaaatgaaaaggggaattagcccaaccaaattatgggagttcccacatcattgggccccccgagtttaaattttaagctccggtcccaaattttgtgggaatttgtggcggaataacaattcacacggagaaacgcttatgacagtattccgattttaaccggctccattttgggaaatttgccctagaagtcaaaaaactggccaggggggcatctcttgatggccgttaacaatttggtaaaaacccgggtaagaccgcaaaatttattaggaatgtgaacccccctttggggataaaattttgtaccagttggagaaggtctcttccttaaactggggaactcttgttaccccaatttcttcttgaaaaacggtaatttaagttgaggcaccttaaaacttgccattgtggtgcctcttgaaactgggccctctggttcggtaaaagccaacttgccccttcccaacaccaatcagcnagntgagccccnacncntgnccnagntccaggacctgccnctgagncgngnctnntagtcctagtgccttcagggtccgaggagcatcaggctcctgcagagccccatccccccgccacacccacacggtggagctgcctcttccttcccctcctccctgttgcccatactcagcatctcggatgaaagggctcccttgtcctcaggctccacgggagcggggctgctggagagagcggggaactcccaccacagtggggcatccggcactgaagccctggtgttcctggtcacgtcccccaggggaccctgcccgcttcctggacttcgtgccttactgagtctctaagactttttctaataaacaagccagtgcgtgtacaaaaaaaaaagaaaaaataaacaaaaaaatcaacaaaccaaaaaaacaaaaaaagggggcgggcgcggccataaaaagtatatcccccctcaggggggcggccagtaatgacagcagtagcacccaggttttctttgaccacagagggggcgcccctatcagagaggcggctcggatatataatatagacgaagaggagcggccggggcggccgcggcgtacaacaacgcgctgggacacggggaaaccaactcggcacgcacggtggggagaactctgtgtggggaaggaggaccccttatctttgtgctgtggggggggtgaacacatatagttgcggacaccaactacactctcagaagagagaattatagaggcgcgtctgaggggacaaatattataacaaccttttcaaggggcgtttctaagaggggtgctgtaacaccaccgccgtgcaaatatgtattctgcgcggcgtgaagaagaagaattttggtctagcgggggtaagtagtaatttcgataaaatattttttgtc

SEQ ID NO: 77755 - DNA, 2343 bp, Homo sapiens
gcagacaggttgacctgcaaaaaaagacaggggaggcatggaaacaaaggacccatcgcaaatgttttccatgctgatctccaaagtgtcccacccccagcctggggcctctgggagccttggtcctgagcagccaacacaccagcccagacagctgcaagtcaccatggacgctgaaggcctggcgctgctgctgccgcccgtcaccctggcagccctggtggacagctggctccgagaggactgcccagggctcaactacgcagccttggtcagcggggcaggcccctcgcaggcggcgctgtgggccaaatcccctggggtactggcagggcagcctttcttcgatgccatatttacccaactcaactgccaagtctcctggttcctccccgagggatcgaagctggtgccggtggccagagtggccgaggtccggggccctgcccactgcctgctgctgggggaacgggtggccctcaacacgctggcccgctgcagtggcattgccagtgctgccgccgctgcagtggaggccgccaggggggccggctggactgggcacgtggcaggcacgaggaagaccacgccaggcttccggctggtggagaagtatgggctcctggtgggcggggccgcctcgcaccgctacgacctgggagggctggtgatggtgaaggataaccatgtggtggccgccggtggcgtggagaaggcggtgcgggcggccagacaggcggctgacttcgctctgaaggtggaagtggaatgcagcagcctgcaggaggccgtgcaggcagctgaggctggtgccgaccttgtcctgctggacaacttcaagccagaggagctgcaccccacggccaccgtgctgaaggcccagttcccgagtgtggctgtggaagccagtgggggcatcaccctggacaacctcccccagttctgcgggccgcacatagacgtcatctccatggggatgctgacccaggcggccccagcccttgatttctccctcaagctgtttgccaaagaggtggctccagtgcccaaaatccactagtcctaaaccggaagaggatgacaccggccatgggttaacgtggctcctcaggaccctctgggtcacacatctttagggtcagtggccaatggggcacatttggcactagcttgagcccaactctggctctgccacctgctgctcctgtgacctgtcagggctgacttcacctctgctcatctcagtttcctaatctgtaaaatgggtctaataaaggatcaaccacatggggttctgcggtgataatgagcacatagtgaggggtcagcaaatgtcagaagttacctgggacagccgggcacgatggctcacacctgtaatcccagcactttgggaggctgaggcgggaagatcacttgagttcaggagtttgagaccagcctggccaacatggtgaaaccccatctctaccaaaaatagaagaattagctgggtgtggtggcacgcgcctgtaatcccagctacttaggaggctgaggcaggagaatcgcttgaacccaggaagtggaggttgcagtgagctgatggtgccactgcactccagcctgggtgatagagcgagactctgtctccaaagaagaaacaaaggaaagaaagagagaaagagagagggagggagggagggagggaaaggaaggatggaaagaaaggaagaaaggcaggcaaaagccccagacaggccaaaaccttcatccttcatgcacccaacctgtaccaaacaccagcatggcctggctgtgagtgcacagcagatggaggtttgctgggcagagacactgggctggcctagacactgcctttggtgataccctaaaccaaaggggccagtcccacagtaagaaggagaccactactactcctgctgccctcctccccccaccttgcctagtttacaagacaggaggaaagagagaaagcaaaaagttagaaaacaaaacaaaacagaagtaagataaatagccagaagaccttggcgacaccacccggccctggtagttaaaaaaaagtaacaataataataatatcaacccctgacctaaactacttgtgttatctgtaaattccagacattgtatgaaaaagcattgcaaaactttctgctctgttagctgatgcgtgtagcccccagtcacgttccccgcttgcttgagatatcatgaccctttcacgtggaccccttagagttgtaagcctttaaaaaggccaagaatttctttttcagggatctcagctattaagatgcaagtctgccaatgctcctggccaaataaacctcttccttc

SEQ ID NO: 77756 - DNA, 1286 bp, Homo sapiens
gcagacaggttgacctgcaaaaaaagacaggggaggcatggaaacaaaggacccatcgcaaatgttttccatgctgatctccaaagtgtcccacccccagcctggggcctctgggagccttggtcctgagcagccaacacaccagcccagacagctgcaagtcaccatggacgctgaaggcctggcgctgctgctgccgcccgtcaccctggcagccctggtggacagctggctccgagaggactgcccagggctcaactacgcagccttggtcagcggggcaggcccctcgcaggcggcgctgtgggccaaatcccctggggtactggcagggcagcctttcttcgatgccatatttacccaactcaactgccaagtctcctggttcctccccgagggatcgaagctggtgccggtggccagagtggccgaggtccggggccctgcccactgcctgctgctgggggaacgggtggccctcaacacgctggcccgctgcagtggcattgccagtgctgccgccgctgcagtggaggccgccaggggggccggctggactgggcacgtggcaggcacgaggaagaccacgccaggcttccggctggtggagaagtatgggctcctggtgggcggggccgcctcgcaccgctacgacctgggagggctggtgatggtgaaggataaccatgtggtggccgccggtggcgtggagaaggcggtgcgggcggccagacaggcggctgacttcgctctgaaggtggaagtggaatgcagcagcctgcaggaggccgtgcaggcagctgaggctggtgccgaccttgtcctgctggacaacttcaagccagaggagctgcaccccacggccaccgtgctgaaggcccagttcccgagtgtggctgtggaagccagtgggggcatcaccctggacaacctcccccagttctgcgggccgcacatagacgtcatctccatggggatgctgacccaggcggccccagcccttgatttctccctcaagctgtttgccaaagaggtggctccagtgcccaaaatccactagtcctaaaccggaagaggatgacaccggccatgggttaacgtggctcctcaggaccctctgggtcacacatctttagggtcagtggccaatggggcacatttggcactagcttgagcccaactctggctctgccacctgctgctcctgtgacctgtcagggctgacttcacctctgctcatctcagtttcctaatctgtaaaatgggtctaataaaggatcaaccac

SEQ ID NO: 77757 - DNA, 2414 bp, Homo sapiens
gcagacaggttgacctgcaaaaaaagacaggggaggcatggaaacaaaggacccatcgcaaatgttttccatgctgatctccaaagtgtcccacccccagcctggggcctctgggagccttggtcctgagcagccaacacaccagcccagacagctgcaagtcaccatggacgctgaaggcctggcgctgctgctgccgcccgtcaccctggcagccctggtggacagctggctccgagaggactgcccagggctcaactacgcagccttggtcagcggggcaggcccctcgcaggcggcgctgtgggccaaatcccctggggtactggcagggcagcctttcttcgatgccatatttacccaactcaactgccaagtctcctggttcctccccgagggatcgaagctggtgccggtggccagagtggccgaggtccggggccctgcccactgcctgctgctgggggaacgggtggccctcaacacgctggcccgctgcagtggcattgccagtgctgccgccgctgcagtggaggccgccaggggggccggctggactgggcacgtggcaggcacgaggaagaccacgccaggcttccggctggtggagaagtatgggctcctggtgggcggggccgcctcgcaccgctacgacctgggagggctggtgatggtgaaggataaccatgtggtggccgccggtggcgtggagaaggcggtgcgggcggccagacaggcggctgacttcgctctgaaggtggaagtggaatgcagcagcctgcaggaggccgtgcaggcagctgaggctggtgccgaccttgtcctgctggacaacttcaagccagaggtaaggtgggctctgcctccggggagggatctgtggtgggctcttacctccccttggcttgtgtcccgcaggagctgcaccccacggccaccgtgctgaaggcccagttcccgagtgtggctgtggaagccagtgggggcatcaccctggacaacctcccccagttctgcgggccgcacatagacgtcatctccatggggatgctgacccaggcggccccagcccttgatttctccctcaagctgtttgccaaagaggtggctccagtgcccaaaatccactagtcctaaaccggaagaggatgacaccggccatgggttaacgtggctcctcaggaccctctgggtcacacatctttagggtcagtggccaatggggcacatttggcactagcttgagcccaactctggctctgccacctgctgctcctgtgacctgtcagggctgacttcacctctgctcatctcagtttcctaatctgtaaaatgggtctaataaaggatcaaccacatggggttctgcggtgataatgagcacatagtgaggggtcagcaaatgtcagaagttacctgggacagccgggcacgatggctcacacctgtaatcccagcactttgggaggctgaggcgggaagatcacttgagttcaggagtttgagaccagcctggccaacatggtgaaaccccatctctaccaaaaatagaagaattagctgggtgtggtggcacgcgcctgtaatcccagctacttaggaggctgaggcaggagaatcgcttgaacccaggaagtggaggttgcagtgagctgatggtgccactgcactccagcctgggtgatagagcgagactctgtctccaaagaagaaacaaaggaaagaaagagagaaagagagagggagggagggagggagggaaaggaaggatggaaagaaaggaagaaaggcaggcaaaagccccagacaggccaaaaccttcatccttcatgcacccaacctgtaccaaacaccagcatggcctggctgtgagtgcacagcagatggaggtttgctgggcagagacactgggctggcctagacactgcctttggtgataccctaaaccaaaggggccagtcccacagtaagaaggagaccactactactcctgctgccctcctccccccaccttgcctagtttacaagacaggaggaaagagagaaagcaaaaagttagaaaacaaaacaaaacagaagtaagataaatagccagaagaccttggcgacaccacccggccctggtagttaaaaaaaagtaacaataataataatatcaacccctgacctaaactacttgtgttatctgtaaattccagacattgtatgaaaaagcattgcaaaactttctgctctgttagctgatgcgtgtagcccccagtcacgttccccgcttgcttgagatatcatgaccctttcacgtggaccccttagagttgtaagcctttaaaaaggccaagaatttctttttcagggatctcagctattaagatgcaagtctgccaatgctcctggccaaataaacctcttccttc

SEQ ID NO: 77758 - DNA, 2141 bp, Homo sapiens
gcagacaggttgacctgcaaaaaaagacaggggaggcatggaaacaaaggacccatcgcaaatgttttccatgctgatctccaaagtgtcccacccccagcctggggcctctgggagccttggtcctgagcagccaacacaccagcccagacagctgcaagtcaccatggacgctgaaggcctggcgctgctgctgccgcccgtcaccctggcagccctggtggacagctggctccgagaggactgcccagggctcaactacgcagccttggtcagcggggcaggcccctcgcaggcggcgctgtgggccaaatcccctggggtactggcagggcagcctttcttcgatgccatatttacccaactcaactgccaagtctcctggttcctccccgagggatcgaagctgagtatgggctcctggtgggcggggccgcctcgcaccgctacgacctgggagggctggtgatggtgaaggataaccatgtggtggccgccggtggcgtggagaaggcggtgcgggcggccagacaggcggctgacttcgctctgaaggtggaagtggaatgcagcagcctgcaggaggccgtgcaggcagctgaggctggtgccgaccttgtcctgctggacaacttcaagccagaggagctgcaccccacggccaccgtgctgaaggcccagttcccgagtgtggctgtggaagccagtgggggcatcaccctggacaacctcccccagttctgcgggccgcacatagacgtcatctccatggggatgctgacccaggcggccccagcccttgatttctccctcaagctgtttgccaaagaggtggctccagtgcccaaaatccactagtcctaaaccggaagaggatgacaccggccatgggttaacgtggctcctcaggaccctctgggtcacacatctttagggtcagtggccaatggggcacatttggcactagcttgagcccaactctggctctgccacctgctgctcctgtgacctgtcagggctgacttcacctctgctcatctcagtttcctaatctgtaaaatgggtctaataaaggatcaaccacatggggttctgcggtgataatgagcacatagtgaggggtcagcaaatgtcagaagttacctgggacagccgggcacgatggctcacacctgtaatcccagcactttgggaggctgaggcgggaagatcacttgagttcaggagtttgagaccagcctggccaacatggtgaaaccccatctctaccaaaaatagaagaattagctgggtgtggtggcacgcgcctgtaatcccagctacttaggaggctgaggcaggagaatcgcttgaacccaggaagtggaggttgcagtgagctgatggtgccactgcactccagcctgggtgatagagcgagactctgtctccaaagaagaaacaaaggaaagaaagagagaaagagagagggagggagggagggagggaaaggaaggatggaaagaaaggaagaaaggcaggcaaaagccccagacaggccaaaaccttcatccttcatgcacccaacctgtaccaaacaccagcatggcctggctgtgagtgcacagcagatggaggtttgctgggcagagacactgggctggcctagacactgcctttggtgataccctaaaccaaaggggccagtcccacagtaagaaggagaccactactactcctgctgccctcctccccccaccttgcctagtttacaagacaggaggaaagagagaaagcaaaaagttagaaaacaaaacaaaacagaagtaagataaatagccagaagaccttggcgacaccacccggccctggtagttaaaaaaaagtaacaataataataatatcaacccctgacctaaactacttgtgttatctgtaaattccagacattgtatgaaaaagcattgcaaaactttctgctctgttagctgatgcgtgtagcccccagtcacgttccccgcttgcttgagatatcatgaccctttcacgtggaccccttagagttgtaagcctttaaaaaggccaagaatttctttttcagggatctcagctattaagatgcaagtctgccaatgctcctggccaaataaacctcttccttc

SEQ ID NO: 77759 - DNA, 179 bp, Homo sapiens
gcagacaggttgacctgcaaaaaaagacaggggaggcatggaaacaaaggacccatcgcaaatgttttccatgctgatctccaaagtggtgagtttatgtgtgatttttattttgtttatgctcttctgtattttccgaatttcatacaataaatatctgttacttttacaatatgaaa

SEQ ID NO: 77760 - DNA, 279 bp, Homo sapiens
gctgcagtgagctatcattgcaccactgcactccagcctgggcgacaggttgagaccctgtctcaaaaacaaaacaaagcaaaaacaaccccaaagtctggtttccttattaaccccaagttcatggtccacccgaagcttttcaaatgtcagtcccggctccccgcgccccagctgcagtgctgggccctatcgtcaccctcgccctcccggctccctgcgccccagtgccaggtgctgggcccagtcctcacccttgtcctcccggctgcccagcag

SEQ ID NO: 77761 - DNA, 349 bp, Homo sapiens
ttgcagtgagccgagatcgtgtcattgcactctagtctgggcgacagagcaagactccgtcttggaaaaaaatttaaaaaaagaaaatataaaatatggtataagattaaatatattagttatgaaaataattgtaaatggcttattgaacttatagtcagtaaaaatcatgtttttgaaaattatgtaatgactttggaaaataccagcaatataatgttaagtggggaaaaaagcaagttactcctctgtaatacatatgattttagttttgtaataaaaattcccaaccatatatgcacttatagggaaacaaaggacccatcgcaaatgttttccatgctgatct

SEQ ID NO: 77762 - DNA, 2338 bp, Homo sapiens
ggcctggcagaggacaggagggaggcttggggagcctgggaagggccggctgacagcttgatgggccctccctccctccacagtcccacccccagcctggggcctctgggagccttggtcctgagcagccaacacaccagcccagacagctgcaagtcaccatggacgctgaaggcctggcgctgctgctgccgcccgtcaccctggcagccctggtggacagctggctccgagaggactgcccagggctcaactacgcagccttggtcagcggggcaggcccctcgcaggcggcgctgtgggccaaatcccctggggtactggcagggcagcctttcttcgatgccatatttacccaactcaactgccaagtctcctggttcctccccgagggatcgaagctggtgccggtggccagagtggccgaggtccggggccctgcccactgcctgctgctgggggaacgggtggccctcaacacgctggcccgctgcagtggcattgccagtgctgccgccgctgcagtggaggccgccaggggggccggctggactgggcacgtggcaggcacgaggaagaccacgccaggcttccggctggtggagaagtatgggctcctggtgggcggggccgcctcgcaccgctacgacctgggagggctggtgatggtgaaggataaccatgtggtggccgccggtggcgtggagaaggcggtgcgggcggccagacaggcggctgacttcgctctgaaggtggaagtggaatgcagcagcctgcaggaggccgtgcaggcagctgaggctggtgccgaccttgtcctgctggacaacttcaagccagaggagctgcaccccacggccaccgtgctgaaggcccagttcccgagtgtggctgtggaagccagtgggggcatcaccctggacaacctcccccagttctgcgggccgcacatagacgtcatctccatggggatgctgacccaggcggccccagcccttgatttctccctcaagctgtttgccaaagaggtggctccagtgcccaaaatccactagtcctaaaccggaagaggatgacaccggccatgggttaacgtggctcctcaggaccctctgggtcacacatctttagggtcagtggccaatggggcacatttggcactagcttgagcccaactctggctctgccacctgctgctcctgtgacctgtcagggctgacttcacctctgctcatctcagtttcctaatctgtaaaatgggtctaataaaggatcaaccacatggggttctgcggtgataatgagcacatagtgaggggtcagcaaatgtcagaagttacctgggacagccgggcacgatggctcacacctgtaatcccagcactttgggaggctgaggcgggaagatcacttgagttcaggagtttgagaccagcctggccaacatggtgaaaccccatctctaccaaaaatagaagaattagctgggtgtggtggcacgcgcctgtaatcccagctacttaggaggctgaggcaggagaatcgcttgaacccaggaagtggaggttgcagtgagctgatggtgccactgcactccagcctgggtgatagagcgagactctgtctccaaagaagaaacaaaggaaagaaagagagaaagagagagggagggagggagggagggaaaggaaggatggaaagaaaggaagaaaggcaggcaaaagccccagacaggccaaaaccttcatccttcatgcacccaacctgtaccaaacaccagcatggcctggctgtgagtgcacagcagatggaggtttgctgggcagagacactgggctggcctagacactgcctttggtgataccctaaaccaaaggggccagtcccacagtaagaaggagaccactactactcctgctgccctcctccccccaccttgcctagtttacaagacaggaggaaagagagaaagcaaaaagttagaaaacaaaacaaaacagaagtaagataaatagccagaagaccttggcgacaccacccggccctggtagttaaaaaaaagtaacaataataataatatcaacccctgacctaaactacttgtgttatctgtaaattccagacattgtatgaaaaagcattgcaaaactttctgctctgttagctgatgcgtgtagcccccagtcacgttccccgcttgcttgagatatcatgaccctttcacgtggaccccttagagttgtaagcctttaaaaaggccaagaatttctttttcagggatctcagctattaagatgcaagtctgccaatgctcctggccaaataaacctcttccttc

SEQ ID NO: 77763 - DNA, 2025 bp, Homo sapiens
tagtcaggctgggtgttaatcggcaccgagggcaagtcaccatggacgctgaaggcctggcgctgctgctgccgcccgtcaccctggcagccctggtggacagctggctccgagaggactgcccagggctcaactacgcagccttggtcagcggggcaggcccctcgcaggcggcgctgtgggccaaatcccctggggtactggcagggcagcctttcttcgatgccatatttacccaactcaactgccaagtctcctggttcctccccgagggatcgaagctggtgccggtggccagagtggccgaggtccggggcccgcctcgcaccgctacgacctgggagggctggtgatggtgaaggataaccatgtggtggccgccggtggcgtggagaaggcggtgcgggcggccagacaggcggctgacttcgctctgaaggtggaagtggaatgcagcagcctgcaggaggccgtgcaggcagctgaggctggtgccgaccttgtcctgctggacaacttcaagccagaggagctgcaccccacggccaccgtgctgaaggcccagttcccgagtgtggctgtggaagccagtgggggcatcaccctggacaacctcccccagttctgcgggccgcacatagacgtcatctccatggggatgctgacccaggcggccccagcccttgatttctccctcaagctgtttgccaaagaggtggctccagtgcccaaaatccactagtcctaaaccggaagaggatgacaccggccatgggttaacgtggctcctcaggaccctctgggtcacacatctttagggtcagtggccaatggggcacatttggcactagcttgagcccaactctggctctgccacctgctgctcctgtgacctgtcagggctgacttcacctctgctcatctcagtttcctaatctgtaaaatgggtctaataaaggatcaaccacatggggttctgcggtgataatgagcacatagtgaggggtcagcaaatgtcagaagttacctgggacagccgggcacgatggctcacacctgtaatcccagcactttgggaggctgaggcgggaagatcacttgagttcaggagtttgagaccagcctggccaacatggtgaaaccccatctctaccaaaaatagaagaattagctgggtgtggtggcacgcgcctgtaatcccagctacttaggaggctgaggcaggagaatcgcttgaacccaggaagtggaggttgcagtgagctgatggtgccactgcactccagcctgggtgatagagcgagactctgtctccaaagaagaaacaaaggaaagaaagagagaaagagagagggagggagggagggagggaaaggaaggatggaaagaaaggaagaaaggcaggcaaaagccccagacaggccaaaaccttcatccttcatgcacccaacctgtaccaaacaccagcatggcctggctgtgagtgcacagcagatggaggtttgctgggcagagacactgggctggcctagacactgcctttggtgataccctaaaccaaaggggccagtcccacagtaagaaggagaccactactactcctgctgccctcctccccccaccttgcctagtttacaagacaggaggaaagagagaaagcaaaaagttagaaaacaaaacaaaacagaagtaagataaatagccagaagaccttggcgacaccacccggccctggtagttaaaaaaaagtaacaataataataatatcaacccctgacctaaactacttgtgttatctgtaaattccagacattgtatgaaaaagcattgcaaaactttctgctctgttagctgatgcgtgtagcccccagtcacgttccccgcttgcttgagatatcatgaccctttcacgtggaccccttagagttgtaagcctttaaaaaggccaagaatttctttttcagggatctcagctattaagatgcaagtctgccaatgctcctggccaaataaacctcttccttc

SEQ ID NO: 77764 - DNA, 859 bp, Homo sapiens
gcagacaggttgacctgcaaaaaaagacaggggaggcatggaaacaaaggacccatcgcaaatgttttccatgctgatctccaaagtgtcccacccccagcctggggcctctgggagccttggtcctgagcagccaacacaccagcccagacagctgcaagtcaccatggacgctgaaggcctggcgctgctgctgccgcccgtcaccctggcagccctggtggacagctggctccgagaggactgcccagggctcaactacgcagccttggtcagcggggcaggcccctcgcaggcggcgctgtgggccaaatcccctggggtactggcagggcagcctttcttcgatgccatatttacccaactcaactgccaagtctcctggttcctccccgagggatcgaagctggtgccggtggccagagtggccgaggtccggggccctgcccactgcctgctgctgggggaacgggtggccctcaacacgctggcccgctgcagtggcattgccagtgctgccgccgctgcagtggaggccgccaggggggccggctggactgggcacgtggcaggcacgaggaagaccacgccaggcttccggctggtggagatccagtgcccaaaatccactagtcctaaaccggaagaggatgacaccggccatgggttaacgtggctcctcaggaccctctgggtcacacatctttagggtcagtggccaatggggcacatttggcactagcttgagcccaactctggctctgccacctgctgctcctgtgacctgtcagggctgacttcacctctgctcatctcagtttcctaatctgtaaaatgggtctaataaaggatcaaccac

SEQ ID NO: 77765 - DNA, 1970 bp, Homo sapiens
caatatttggtatcttcatatgttatctctaggtagatttacaggttagtcatagtgcagaaatataggacagaatcagtgtgctataatgtcattctctagaacccattccctttattttcattttaggaaaagcctttacctcctctcaaagacctcgacctaccagcccattttctactgacagtaacaccagtgcagccctgagtcaaagtcagaggcctcggcccactaaaaaacacaagggagggcggatggaccaacaaccagcattgcctcatcgaagggaaggaatgacagatgaggaggccttggtgccctatagcaagcccagtttcccatctccaggtggccacagctcatcaggaacagcttcttctaagggatccactggacctaggaaaaccgaggtgttgagagcaggccaccagcgcaatgccagcgaccttcttgacataggatatatgggctccaacagtcaaggacagtttacaggtgaattatagtaaatgagaggagacatacaaagctgctctgaaggaccatcaggtccggactcatggaagtgatgactctaaacagtgcaatgaacaatttatttatgtactattaaaagaactgtaaatgcaatgtaaagacacacagccacacatatcccacagatattttcattgtgttcttctcttaagtacaccacccaccttaactctttcttgtcaggagtatataaaaaagaaagaaaacaaaactcgccctacaggaagaaaaggattctcctctgtatataatttcttttgtgcattgctatgcaagctcactctttttagctctgctcatattattgtctgttcttattggtctgttgtactatatgtgaattaataggctgtggtgccatatattaacttttaattgtgtaacttttatgtttaaattttgcactgcaattttatttggtgataagcacaaatctctactcctcatgacatgaagaaaaagactgaatgtgaagggagtttctgtactgtaagctagattggataatgatggctgtaacaaatcatgttagatggttttcagttggggtgtagaaataggaagatgcaaaggaacaatggtgttggcaaagtcttctttgaatatcagggactgagtcaataaaaaaaatagtagaaaggtggcttttactattgacaaaagccggggtcaaaaaaagtagtttaagtcttaagactgaatatgcattaaagtatgcaggtagcaaagatgtaataaatttgcttaaaaaaagaaattaaagttttatttagaatcaattttacctgtcattgtaattgacccatctgagaattacaataagcaagaggaaattaaggtgttttgcaagagctgtatttatattacagttttttaaaaacattttctgaattatcgtaattaagctctccaactcgttaagtcagaatataatatgaagttccccaaggaaacgaacaaaatgaactctagaatatctagcaaatagttaaagaagcaatttattattagggcatactcgggctgtttccaaatataaactctattgcaatatcttatttcatctttctaatacatgtacagtgcacactagaggatagagctgcatcacttaaattcatgacttaaaaaataatacagtttatatacaacttgttttttatttgattaagaagtgaagtttacgccacccaatgtatagccaaattgtacgtgcttaaaaaacagtgccgagagtatgttcagttcgcagtaagtagatttattggaataaatattctatggtacattctcagaaattggcttccaactaaaatacgtttgacccattttgaataaggaaattgaaaagaaaaatttaaaaggagaaaaaaatgcatgtttataaactttttaaataaaaccagaccttgtaagtggacattaataattgt

SEQ ID NO: 77766 - DNA, 1698 bp, Homo sapiens
ggttgcacactgcaacaaggtgtcggatcagaggaggccttggtgccctatagcaagcccagtttcccatctccaggtggccacagctcatcaggaacagcttcttctaagggatccactggacctaggaaaaccgaggtgttgagagcaggccaccagcgcaatgccagcgaccttcttgacataggatatatgggctccaacagtcaaggacagtttacaggtgaattatagtaaatgagaggagacatacaaagctgctctgaaggaccatcaggtccggactcatggaagtgatgactctaaacagtgcaatgaacaatttatttatgtactattaaaagaactgtaaatgcaatgtaaagacacacagccacacatatcccacagatattttcattgtgttcttctcttaagtacaccacccaccttaactctttcttgtcaggagtatataaaaaagaaagaaaacaaaactcgccctacaggaagaaaaggattctcctctgtatataatttcttttgtgcattgctatgcaagctcactctttttagctctgctcatattattgtctgttcttattggtctgttgtactatatgtgaattaataggctgtggtgccatatattaacttttaattgtgtaacttttatgtttaaattttgcactgcaattttatttggtgataagcacaaatctctactcctcatgacatgaagaaaaagactgaatgtgaagggagtttctgtactgtaagctagattggataatgatggctgtaacaaatcatgttagatggttttcagttggggtgtagaaataggaagatgcaaaggaacaatggtgttggcaaagtcttctttgaatatcagggactgagtcaataaaaaaaatagtagaaaggtggcttttactattgacaaaagccggggtcaaaaaaagtagtttaagtcttaagactgaatatgcattaaagtatgcaggtagcaaagatgtaataaatttgcttaaaaaaagaaattaaagttttatttagaatcaattttacctgtcattgtaattgacccatctgagaattacaataagcaagaggaaattaaggtgttttgcaagagctgtatttatattacagttttttaaaaacattttctgaattatcgtaattaagctctccaactcgttaagtcagaatataatatgaagttccccaaggaaacgaacaaaatgaactctagaatatctagcaaatagttaaagaagcaatttattattagggcatactcgggctgtttccaaatataaactctattgcaatatcttatttcatctttctaatacatgtacagtgcacactagaggatagagctgcatcacttaaattcatgacttaaaaaataatacagtttatatacaacttgttttttatttgattaagaagtgaagtttacgccacccaatgtatagccaaattgtacgtgcttaaaaaacagtgccgagagtatgttcagttcgcagtaagtagatttattggaataaatattctatggtacattctcagaaattggcttccaactaaaatacgtttgacccattttgaataaggaaattgaaaagaaaaatttaaaaggagaaaaaaatgcatgtttataaactttttaaataaaaccagaccttgtaagtggacattaataattgt

SEQ ID NO: 77767 - DNA, 1729 bp, Homo sapiens
gagagagagagagagagagagagagagagagagagagagagagagagagagagagagagatgaggaggccttggtgccctatagcaagcccagtttcccatctccaggtggccacagctcatcaggaacagcttcttctaagggatccactggacctaggaaaaccgaggtgttgagagcaggccaccagcgcaatgccagcgaccttcttgacataggatatatgggctccaacagtcaaggacagtttacaggtgaattatagtaaatgagaggagacatacaaagctgctctgaaggaccatcaggtccggactcatggaagtgatgactctaaacagtgcaatgaacaatttatttatgtactattaaaagaactgtaaatgcaatgtaaagacacacagccacacatatcccacagatattttcattgtgttcttctcttaagtacaccacccaccttaactctttcttgtcaggagtatataaaaaagaaagaaaacaaaactcgccctacaggaagaaaaggattctcctctgtatataatttcttttgtgcattgctatgcaagctcactctttttagctctgctcatattattgtctgttcttattggtctgttgtactatatgtgaattaataggctgtggtgccatatattaacttttaattgtgtaacttttatgtttaaattttgcactgcaattttatttggtgataagcacaaatctctactcctcatgacatgaagaaaaagactgaatgtgaagggagtttctgtactgtaagctagattggataatgatggctgtaacaaatcatgttagatggttttcagttggggtgtagaaataggaagatgcaaaggaacaatggtgttggcaaagtcttctttgaatatcagggactgagtcaataaaaaaaatagtagaaaggtggcttttactattgacaaaagccggggtcaaaaaaagtagtttaagtcttaagactgaatatgcattaaagtatgcaggtagcaaagatgtaataaatttgcttaaaaaaagaaattaaagttttatttagaatcaattttacctgtcattgtaattgacccatctgagaattacaataagcaagaggaaattaaggtgttttgcaagagctgtatttatattacagttttttaaaaacattttctgaattatcgtaattaagctctccaactcgttaagtcagaatataatatgaagttccccaaggaaacgaacaaaatgaactctagaatatctagcaaatagttaaagaagcaatttattattagggcatactcgggctgtttccaaatataaactctattgcaatatcttatttcatctttctaatacatgtacagtgcacactagaggatagagctgcatcacttaaattcatgacttaaaaaataatacagtttatatacaacttgttttttatttgattaagaagtgaagtttacgccacccaatgtatagccaaattgtacgtgcttaaaaaacagtgccgagagtatgttcagttcgcagtaagtagatttattggaataaatattctatggtacattctcagaaattggcttccaactaaaatacgtttgacccattttgaataaggaaattgaaaagaaaaatttaaaaggagaaaaaaatgcatgtttataaactttttaaataaaaccagaccttgtaagtggacattaataattgt

SEQ ID NO: 77768 - DNA, 3198 bp, Homo sapiens
gtcaaaatgagtctgctgatgtttacacaactactgctctgtggatttttatatgttcgggttgatggatcgcgtcttcgccaggaggactttcccccgcggattgtggagcatccttccgatgtcatcgtctctaagggcgagcccacgactctgaactgcaaggcggagggccggccaacgcccaccattgagtggtacaaagatggggagcgagtggagactgacaaggacgatccccggtcccacaggatgcttctgcccagcggatccttattcttcttgcgcatcgtgcacgggcgcaggagtaaacctgatgaaggaagctacgtttgtgttgcgaggaactatcttggtgaagcagtgagtcgaaatgcgtctctggaagtggcattgttacgagatgacttccgacaaaaccccacagatgttgtagtggcagctggagagcctgcaatcctggagtgccagcctccccggggacacccagaacccaccatctactggaaaaaagacaaagttcgaattgatgacaaggaagaaagaataagtatccgtggtggaaaactgatgatctccaataccaggaaaagtgatgcagggatgtatacttgtgttggtaccaatatggtgggagaaagggacagtgacccagcagagctgactgtctttgaacgacccacatttctcaggaggccaattaaccaggtggtactggaggaagaagctgtagaatttcgttgtcaagtccaaggagatcctcaaccaactgtgaggtggaaaaaggatgatgcagacttgccaagaggaaggtatgacatcaaagacgattacacactaagaattaaaaagaccatgagtacagatgaaggcacctatatgtgtattgctgagaatcgggttggaaaaatggaagcctctgctacactcaccgtccgagctcccccacagtttgtggttcggccaagagatcagattgttgctcaaggtcgaacagtgacatttccctgtgaaactaaaggaaacccacagccagctgttttttggcagaaagaaggcagccagaacctacttttcccaaaccaaccccagcagcccaacagtagatgctcagtgtcaccaactggagacctcacaatcaccaacattcaacgttccgacgcgggttactacatctgccaggctttaactgtggcaggaagcattttagcaaaagctcaactggaggttactgatgttttgacagatagacctccacctataattctacaaggcccagccaaccaaacgctggcagtggatggtacagcgttactgaaatgtaaagccactggtgatcctcttcctgtaattagctggttaaaggagggatttacttttccgggtagagatccaagagcaacaattcaagagcaaggcacactgcagattaagaatttacggatttctgatactggcacttatacttgtgtggctacaagttcaagtggagagacttcctggagtgcagtgctggatgtgacagagtctggagcaacaatcagtaaaaactatgatttaagtgacctgccagggccaccatccaaaccgcaggtcactgatgttactaagaacagtgtcaccttgtcctggcagccaggtacccctggaacccttccagcaagtgcatatatcattgaggctttcagccaatcagtgagcaacagctggcagaccgtggcaaaccatgtaaagaccaccctctatactgtaagaggactgcggcccaatacaatctacttattcatggtcagagcgatcaacccccaaggtctcagtgacccaagtcccatgtcagatcctgtgcgcacacaagatatcagcccaccagcacaaggagtggaccacaggcaagtgcagaaagagctaggagatgtccttgtccgtcttcataatccagttgtgctgactcccaccacggttcaggtcacatggacggttgatcgccaaccccagtttatccaaggctaccgagtgatgtatcgtcagacttcaggtctgcaggcgacatcttcgtggcagaatttagatgccaaagtcccgactgaacgaagtgctgtcttagtcaacctgaaaaagggggtgacttatgaaattaaagtacggccatattttaatgagttccaaggaatggatagtgaatctaaaacggttcgtactactgaagaagccccaagtgccccaccacagtctgtcactgtactgacagttggaagctacaatagcacaagtattagtgtttcctgggatcctcctcctccagatcaccagaatggaattatccaagaatacaagatctggtgtctaggaaatgaaacgcgattccatatcaacaaaactgtggatgcagccattcggtccgtaataattggtggattattcccaggtattcaataccgggtagaggttgcagctagtaccagtgcaggggttggagtaaagagtgagccacagccaataataatcgggagacgcaatgaagttgtcattactgaaaacaataacagcataactgagcaaatcactgatgtggtgaagcaaccagcctttatagctggtattggtggtgcctgctgggtaattctgatgggttttagcatatggttgtattggcgaagaaagaagaggaagggactcagtaattatgctgttacgtttcaaagaggagatggaggactaatgagcaatggaagccgtccaggtcttctcaatgctggtgatcccagctatccatggcttgctgattcttggccagccacgagcttgccagtaaataatagcaacagtggcccaaatgagattggaaattttggccgtggagatgtgctgccaccagttccaggccaaggggataaaacagcaacgatgctctcagatggagccatttatagtagcattgacttcactaccaaaaccagttacaacagttccagccaaataacacaggctaccccatatgccacgacacagatcttgcattccaacagcatacatgaattggctgtcgatctgcctgatccacaatggaaaagctcaattcagcaaaaaacagatctgatgggatttggttattctctacctgatcagaacaaaggtaacaatgccttactttacattcctgactaccgattggctgagggattgtctaatagaatgcca

SEQ ID NO: 77769 - DNA, 305 bp, Homo sapiens
aacgacccacatttctcaggaggccaattaaccaggtggtactggaggaagaagctgtagaatttcgttgtcaagtccaaggagatcctcaaccaactgtgaggtggaaaaaggatgatgcagacttgccaagaggaaggtaagaccaacatatggatggaagattgttagataaccaatgaataattagaaaataaaaggacagctacaatgccaccaccaaacactcctatgtcttggggtactttcactcatgtgatttttacatatgcaagccacatatttactgtttgtatgttaaagtc

SEQ ID NO: 77770 - DNA, 5610 bp, Homo sapiens
gtcaaaatgagtctgctgatgtttacacaactactgctctgtggatttttatatgttcgggttgatggatcgcgtcttcgccaggaggactttcccccgcggattgtggagcatccttccgatgtcatcgtctctaagggcgagcccacgactctgaactgcaaggcggagggccggccaacgcccaccattgagtggtacaaagatggggagcgagtggagactgacaaggacgatccccggtcccacaggatgcttctgcccagcggatccttattcttcttgcgcatcgtgcacgggcgcaggagtaaacctgatgaaggaagctacgtttgtgttgcgaggaactatcttggtgaagcagtgagtcgaaatgcgtctctggaagtggcattgttacgagatgacttccgacaaaaccccacagatgttgtagtggcagctggagagcctgcaatcctggagtgccagcctccccggggacacccagaacccaccatctactggaaaaaagacaaagttcgaattgatgacaaggaagaaagaataagtatccgtggtggaaaactgatgatctccaataccaggaaaagtgatgcagggatgtatacttgtgttggtaccaatatggtgggagaaagggacagtgacccagcagagctgactgtctttgaacgacccacatttctcaggaggccaattaaccaggtggtactggaggaagaagctgtagaatttcgttgtcaagtccaaggagatcctcaaccaactgtgaggtggaaaaaggatgatgcagacttgccaagaggaaggtatgacatcaaagacgattacacactaagaattaaaaagaccatgagtacagatgaaggcacctatatgtgtattgctgagaatcgggttggaaaaatggaagcctctgctacactcaccgtccgagctcccccacagtttgtggttcggccaagagatcagattgttgctcaaggtcgaacagtgacatttccctgtgaaactaaaggaaacccacagccagctgttttttggcagaaagaaggcagccagaacctacttttcccaaaccaaccccagcagcccaacagtagatgctcagtgtcaccaactggagacctcacaatcaccaacattcaacgttccgacgcgggttactacatctgccaggctttaactgtggcaggaagcattttagcaaaagctcaactggaggttactgatgttttgacagatagacctccacctataattctacaaggcccagccaaccaaacgctggcagtggatggtacagcgttactgaaatgtaaagccactggtgatcctcttcctgtaattagctggttaaaggagggatttacttttccgggtagagatccaagagcaacaattcaagagcaaggcacactgcagattaagaatttacggatttctgatactggcacttatacttgtgtggctacaagttcaagtggagagacttcctggagtgcagtgctggatgtgacagagtctggagcaacaatcagtaaaaactatgatttaagtgacctgccagggccaccatccaaaccgcaggtcactgatgttactaagaacagtgtcaccttgtcctggcagccaggtacccctggaacccttccagcaagtgcatatatcattgaggctttcagccaatcagtgagcaacagctggcagaccgtggcaaaccatgtaaagaccaccctctatactgtaagaggactgcggcccaatacaatctacttattcatggtcagagcgatcaacccccaaggtctcagtgacccaagtcccatgtcagatcctgtgcgcacacaagatatcagcccaccagcacaaggagtggaccacaggcaagtgcagaaagagctaggagatgtccttgtccgtcttcataatccagttgtgctgactcccaccacggttcaggtcacatggacggttgatcgccaaccccagtttatccaaggctaccgagtgatgtatcgtcagacttcaggtctgcaggcgacatcttcgtggcagaatttagatgccaaagtcccgactgaacgaagtgctgtcttagtcaacctgaaaaagggggtgacttatgaaattaaagtacggccatattttaatgagttccaaggaatggatagtgaatctaaaacggttcgtactactgaagaagccccaagtgccccaccacagtctgtcactgtactgacagttggaagctacaatagcacaagtattagtgtttcctgggatcctcctcctccagatcaccagaatggaattatccaagaatacaagatctggtgtctaggaaatgaaacgcgattccatatcaacaaaactgtggatgcagccattcggtccgtaataattggtggattattcccaggtattcaataccgggtagaggttgcagctagtaccagtgcaggggttggagtaaagagtgagccacagccaataataatcgggagacgcaatgaagttgtcattactgaaaacaataacagcataactgagcaaatcactgatgtggtgaagcaaccagcctttatagctggtattggtggtgcctgctgggtaattctgatgggttttagcatatggttgtattggcgaagaaagaagaggaagggactcagtaattatgctgttacgtttcaaagaggagatggaggactaatgagcaatggaagccgtccaggtcttctcaatgctggtgatcccagctatccatggcttgctgattcttggccagccacgagcttgccagtaaataatagcaacagtggcccaaatgagattggaaattttggccgtggagatgtgctgccaccagttccaggccaaggggataaaacagcaacgatgctctcagatggagccatttatagtagcattgacttcactaccaaaaccagttacaacagttccagccaaataacacaggctaccccatatgccacgacacagatcttgcattccaacagcatacatgaattggctgtcgatctgcctgatccacaatggaaaagctcaattcagcaaaaaacagatctgatgggatttggttattctctacctgatcagaacaaaggtaacaatggtgggaaaggtggaaaaaagaagaaaaataaaaactcttctaaaccacagaaaaacaatggatccacttgggccaatgtccctctacctccccccccagtccagccccttcctggcacggagctggaacactatgcagtggaacaacaagaaaatggctatgacagtgatagctggtgcccaccattgccagtacaaacttacttacaccaaggtctggaagatgaactggaagaagatgatgatagggtcccaacacctcctgttcgaggcgtggcttcttctcctgctatctcctttggacagcagtccactgcaactcttactccatccccacgggaaggagatgcaacccatgctgcaggctcacctgggatgagttgacaagagcctattcagtttgatatagcaaaacaaacatggcacattcaaagcaataatcaacctccacagcctccagttccaccgttaggttatgtgtctggagccttgatttctgatttggaaacggatgttgcagatgatgatgccgacgacgaagaggaagctttagaaatccccaggcccctgagagcactggaccagactcctggatccagcatggacaatctagacagctctgtgacaggaaaagcctttacctcctctcaaagacctcgacctaccagcccattttctactgacagtaacaccagtgcagccctgagtcaaagtcagaggcctcggcccactaaaaaacacaagggagggcggatggaccaacaaccagcattgcctcatcgaagggaaggaatgacagatgaggaggccttggtgccctatagcaagcccagtttcccatctccaggtggccacagctcatcaggaacagcttcttctaagggatccactggacctaggaaaaccgaggtgttgagagcaggccaccagcgcaatgccagcgaccttcttgacataggatatatgggctccaacagtcaaggacagtttacaggtgaattatagtaaatgagaggagacatacaaagctgctctgaaggaccatcaggtccggactcatggaagtgatgactctaaacagtgcaatgaacaatttatttatgtactattaaaagaactgtaaatgcaatgtaaagacacacagccacacatatcccacagatattttcattgtgttcttctcttaagtacaccacccaccttaactctttcttgtcaggagtatataaaaaagaaagaaaacaaaactcgccctacaggaagaaaaggattctcctctgtatataatttcttttgtgcattgctatgcaagctcactctttttagctctgctcatattattgtctgttcttattggtctgttgtactatatgtgaattaataggctgtggtgccatatattaacttttaattgtgtaacttttatgtttaaattttgcactgcaattttatttggtgataagcacaaatctctactcctcatgacatgaagaaaaagactgaatgtgaagggagtttctgtactgtaagctagattggataatgatggctgtaacaaatcatgttagatggttttcagttggggtgtagaaataggaagatgcaaaggaacaatggtgttggcaaagtcttctttgaatatcagggactgagtcaataaaaaaaatagtagaaaggtggcttttactattgacaaaagccggggtcaaaaaaagtagtttaagtcttaagactgaatatgcattaaagtatgcaggtagcaaagatgtaataaatttgcttaaaaaaagaaattaaagttttatttagaatcaattttacctgtcattgtaattgacccatctgagaattacaataagcaagaggaaattaaggtgttttgcaagagctgtatttatattacagttttttaaaaacattttctgaattatcgtaattaagctctccaactcgttaagtcagaatataatatgaagttccccaaggaaacgaacaaaatgaactctagaatatctagcaaatagttaaagaagcaatttattattagggcatactcgggctgtttccaaatataaactctattgcaatatcttatttcatctttctaatacatgtacagtgcacactagaggatagagctgcatcacttaaattcatgacttaaaaaataatacagtttatatacaacttgttttttatttgattaagaagtgaagtttacgccacccaatgtatagccaaattgtacgtgcttaaaaaacagtgccgagagtatgttcagttcgcagtaagtagatttattggaataaatattctatggtacattctcagaaattggcttccaactaaaatacgtttgacccattttgaataaggaaattgaaaagaaaaatttaaaaggagaaaaaaatgcatgtttataaactttttaaataaaaccagaccttgtaagtggacattaataattgt

SEQ ID NO: 77771 - DNA, 1267 bp, Homo sapiens
gtcaaaatgagtctgctgatgtttacacaactactgctctgtggatttttatatgttcgggttgatggatcgcgtcttcgccaggaggactttcccccgcggattgtggagcatccttccgatgtcatcgtctctaagggcgagcccacgactctgaactgcaaggcggagggccggccaacgcccaccattgagtggtacaaagatggggagcgagtggagactgacaaggacgatccccggtcccacaggatgcttctgcccagcggatccttattcttcttgcgcatcgtgcacgggcgcaggagtaaacctgatgaaggaagctacgtttgtgttgcgaggaactatcttggtgaagcagtgagtcgaaatgcgtctctggaagtggcattgttacgagatgacttccgacaaaaccccacagatgttgtagtggcagctggagagcctgcaatcctggagtgccagcctccccggggacacccagaacccaccatctactggaaaaaagacaaagttcgaattgatgacaaggaagaaagaataagtatccgtggtggaaaactgatgatctccaataccaggaaaagtgatgcagggatgtatacttgtgttggtaccaatatggtgggagaaagggacagtgacccagcagagctgactgtctttgaacgacccacatttctcaggaggccaattaaccaggtggtactggaggaagaagctgtagaatttcgttgtcaagtccaaggagatcctcaaccaactgtgaggtggaaaaaggatgatgcagacttgccaagaggaaggtatgacatcaaagacgattacacactaagaattaaaaagaccatgagtactgggatgagttgacaagagcctattcagtttgatatagcaaaacaaacatggcacattcaaagcaataatcaacctccacagcctccagttccaccgttaggttatgtgtctggagccttgatttctgatttggaaacggatgttgcagatgatgatgccgacgacgaagaggaagctttagaaatccccaggcccctgagagcactggaccagactcctggatccagcatggacaatctagacagctctgtgacaggtaacggaaccaatttaataggaaaaactgacctattggtaacattaaaatgcatcaaaagtcaactacttccttattgtaagatttattccactccatctatttctgtaacattttaaatgtgttaatattaaatacaaaattcaa

SEQ ID NO: 77772 - DNA, 319 bp, Homo sapiens
agaggagcaaagtcacaatgcacaggggagtgcagacagagacgggaacaatttgtgaccatactcagttattctggccaacagtatgtgggaaaactaaaggtttcaaatcaggagaacagaccaatccagatcaaaacacagttcaagattaggccagggcagagacctaggtagcaagttaaaaacaggtcagagacccagttactggaaatgcctgcgtccaagcacaagaaattcagtcacttaggagacacagtacaggcctacctagtttcagagatcactgctggtggtttattaactcctagtccattca

SEQ ID NO: 77773 - DNA, 621 bp, Homo sapiens
agacatgaaaggtgacccttctgaatccagtgtcagcagactagcatggctgtccagatcacaggatattacggatctttcaaacagaatgccaaactataaagatgtgtggaatatgagcacaatatatactatgtgagtaaagaagctacaggctgcgggtaataggagaactacttcaaagcagctatgggaaagctaaaaggggttagaagtaggagaaggttattagaacgtcattaggccatttcatggaagccaagagcagaaaggccacggatgtatggactggagccaggattggagcatgggggagcctgcatggattggtgactttttccacagagtgtgggttcgtgcctctttagctgtagatcagtactctgtccataggtctataggacagaaaaggatggccaagagctcctgaattttacatgttccagtccagggactaaagagatttctctttccaacccagtctacacaattgatgaggaagaaacaggagtttccccaggtcaggtgtgacccctgatcaatcaattgtggatgggcacagagtcggggaaggattttgattaaccgggctcgggtctcctctgcccgcagaagtgaata

SEQ ID NO: 77774 - DNA, 398 bp, Homo sapiens
atccatttagaaacccaccttgtgttgctaattatctccccatgagcaggtcctctctccaataaattgcatgttgtagtaaaaaaatgggctcatgtttctggagtatttttcgttgtgtgtagtgcaatacaggaactttaaagaacaccatgggacccatgtgaaatgccactagtgaagctggaagtgcgcccaagaacagagaaaagtcacgacatgacaagaaaaacttaaattgcttgatacatactagagattgaatggttgccctccacaccacacagataattcattgtgtcaacatgtagacttacagaatcgaatgcagtacagtcccataattgtattgtctcttatgattttcttaataacatttttttctctagcttccttat

SEQ ID NO: 77775 - DNA, 1424 bp, Homo sapiens
tggccaagcctttgctcagtactcgggcctttctatacacatacgaagtcacagtggaaagaaaccctatcagtgtaaggaatgtgggaaagccttcactacatccacaagtcttattcagcatacaagaattcacacaggagagaagccttatgaatgtgttgaatgtgggaagaccttcattacttcttcccgtcgtagtaaacatttgaaaactcatagtggagaaaagccctttgtatgcaagatatgtgggaaagcatttctatattcctcacgccttaatgttcacctgcgaactcataccggagagaaacccttcgtatgtaaagaatgtgggaaagcatttgctgtttcctcacgcctaagtagacatgaaagaattcacactggggagaaaccctatgaatgcaaggatatgagtgttaccatttagcccatcggttgccatctttaattattggcaatgacaccaaagattatcagatttgtcctaaatgccttttggaggttgtaatgactcatggattggccttagataccatcctgagggtctgaaattaaacctacaggttctgaatacaacatcatggttgcctgagtctgggcatctgtgaagaagggtcatggatggtgaggtcagtactgcaggctgcctcaccttggtgattagattcctaagatcatagcattaacaagttgtgtatgagataaatcatgcagattgaccccagcccctgttggttagtggctgccagtgtggcacatttatgtcaaaatttaccagaagccaagatgatgtaggaccccaaaggtgggttgttaagagatgctcctccaagggtctcttctgatcccacggatcctgcagagcgtgtcaggaatgaaaccatccataactgccagtgccctttcacagctgattatttctgtgtccccttgtaaaatctaagaagtgtgacagccttgcctgttctgccttgtatgtctattttagatggcacaatgtaagtggcaatgtctcttctagtataatccagtctctcttctcacttctgtcaaggtggctgatatagtccatgaatcccactcatgatctctttatcagatgatcgttcagccacactttgaggattctcttcagtacaagttttctaatttttgcattatggataggctgagaattttccaaatctccaagttctggttcctttttccttaacaattttttctgcaattcaggtctccttttgcatttttgctgagaccagctgggtcatggagaccctgacccagcagctctagaggaattaagacaaagacacagaaatagagtgcagagtgggaatcggggctcacagccttcagagctgagagccttgaacagagtttgacccacatatttattgacagtaagcctgtga

SEQ ID NO: 77776 - DNA, 1383 bp, Homo sapiens
tggccaagcctttgctcagtactcgggcctttctatacacatacgaagtcacagtggaaagaaaccctatcagtgtaaggaatgtgggaaagccttcactacatccacaagtcttattcagcatacaagaattcacacaggagagaagccttatgaatgtgttgaatgtgggaagaccttcattacttcttcccgtcgtagtaaacatttgaaaactcatagtggagaaaagccctttgtatgcaagatatgtgggaaagcatttctatattcctcacgccttaatgttcacctgcgaactcataccggagagaaacccttcgtatgtaaagaatgtgggaaagcatttgctgtttcctcacgcctaagtagacatgaaagaattcacactggggagaaaccctatgaatgcaaggatatgagtgttaccatttagcccatcggttgccatctttaattattggcaatgacaccaaagattatcagatttgtcctaaatgccttttggaggttgtaatgactcatggattggccttagataccatcctgagggtctgaaattctgggcatctgtgaagaagggtcatggatggtgaggtcagtactgcaggctgcctcaccttggtgattagattcctaagatcatagcattaacaagttgtgtatgagataaatcatgcagattgaccccagcccctgttggttagtggctgccagtgtggcacatttatgtcaaaatttaccagaagccaagatgatgtaggaccccaaaggtgggttgttaagagatgctcctccaagggtctcttctgatcccacggatcctgcagagcgtgtcaggaatgaaaccatccataactgccagtgccctttcacagctgattatttctgtgtccccttgtaaaatctaagaagtgtgacagccttgcctgttctgccttgtatgtctattttagatggcacaatgtaagtggcaatgtctcttctagtataatccagtctctcttctcacttctgtcaaggtggctgatatagtccatgaatcccactcatgatctctttatcagatgatcgttcagccacactttgaggattctcttcagtacaagttttctaatttttgcattatggataggctgagaattttccaaatctccaagttctggttcctttttccttaacaattttttctgcaattcaggtctccttttgcatttttgctgagaccagctgggtcatggagaccctgacccagcagctctagaggaattaagacaaagacacagaaatagagtgcagagtgggaatcggggctcacagccttcagagctgagagccttgaacagagtttgacccacatatttattgacagtaagcctgtga

SEQ ID NO: 77777 - DNA, 419 bp, Homo sapiens
ttagaaataaaaatatcagctctacctagacctaatgaaaatcagcattttaacatggacccccccaggggcttcctttgcacattaagtataagaagtgctgcccagcctagcacagggcctagcacagggtggtgtccagttagtgtagttttcttctttccaaattaaatgagttttaacccatgaacttgactacctttgccataaaaagaaacaaaaacaacccaacaataacaactataaccacaaaatacaagattgatgtattctctcatttgagcttatttttggtagtcctcccaaacagaaaatatatatacatatatatgggatttccttctctttgacattatttatgctgacctcttgaaacagaatgttaaaattgaattttgagcaagataccaagaaaaaat

SEQ ID NO: 77778 - DNA, 248 bp, Homo sapiens
caacacactgaaattaatcctaaaatagtacttaaggtttgttttaatttttttgtgtgtgggagaatattttcttttctcaaactcatctttagtgtggaaaaagcatagctctctttgtaacactgaaataatgagtcaaaacttcagaacttctgaccttcctggtagtgactgatttaatttacaaccgctctatcaaaacatttaattcagttctcctctctaaagctattttcagtcaacag

SEQ ID NO: 77779 - DNA, 453 bp, Homo sapiens
attgctgggacaatttgcctcgaaaacctgtatgattgcattacagaggagatactcagtgttccttttctcttctgttcagataccctgcagatttacccatctctgccttcctctctgagagtgcttatcttttcataaagcagaatcattacattcccgacgtgtcatcaaaagtgtctacaggctgggcatggtggctcacgtctgtaatcccaacactttgggaggccaaggcaggaggaatgcttgagctcgggaggtcaggactagcctgggcaacatagggagacactctgactctacaaaaaaaattttttttaattatctaggtctgctggtacattcctgtgttcccagctactcaggaggctgggataggaggatcacttgaaattgggaggtcaagtctgcagtgagctgtgatcatgccactgcactccagcctaggct

SEQ ID NO: 77780 - DNA, 650 bp, Homo sapiens
cacttttccaaatgctggtcctgatggatggaacaggctccccttttactttatttcataagtggtttataaccctgaggctgagaaacgatataaatgagggggaaagaagtatcctacaagaaatacccagttaaagaaaagaaaactggagaaaccaagcccccatttcttttttttttttctccaatgcctttttgaagcacctaaaggccaaggaattttgaaatgagaactcgacagtgaaatgtttctcattttcaaacaaagaaacatttcttactcttgggtgttttgtgtgcagaaacacttttttgatatgtcatatttaaaggtgagaatgatccacttggtcagtagatccgtggagcgtcaggaagatggaaagaggaaagggccccgaatgacccacctgcgtatcttttgcatatgtttccaaaaatacaagtctgttcatcatactcgatttttcctttgtttttattcacgttttagcattccttttctgcattaaaaaaatgtatgcagtcctgctgctgccttcaaactagctttgtgatttgaagcttcactttctcatctataaaattcattcagcagcacccactgtgccttctgtagcacttccatccacctgacagtatgtatct

SEQ ID NO: 77781 - DNA, 576 bp, Homo sapiens
gaaaaaaaaatccagctaatcacagcagcaatcattatgccaacttgccttctggctcacttacttgtagagtcactactccagtataatgtggcccttgtcacaagactcttttcattttctattctataaagtctaagacattgtgagatgataagtcttctattggagcttctttcctaagttcttcatactaagaaaactacagatgccagctggtctggagggcctagtaagaacctgactcataaagaaatgcagttgctgtttcttgatgatttcatgtcccttatcctaagcaatcgatgacctcaaattttccagcccctcactctccacaaatccccatgaaaacccttgcccagagccccttgacagaacagatttgaggcttgagaattcctcccatttcctcattgggtgacttgtgattattaaaccctttctctactgcaaccctgctgtcagtgtattggtctgttgctgtgcagtgggcatagaaaactggcagtcctgtaacaagcagttgtgcagctgagggtggaagtaggggtggtaggagaagagaagaatttt

SEQ ID NO: 77782 - DNA, 650 bp, Homo sapiens
aacagtgtttccccctacaatccacaagcataaacattaaggaacacagctttgaagggtgtttatatgggacagtgtttaacagaaagtcctattacaatattaactctaaatgcatctcacttctctcatatcaaccactccatgtttttctccctaggccttagctgaaaaatacttggctttctatctttcctctaagacctcttcccacttcaaaactgttatcgttgaattattaatttcagttcaaaagctctttgctttaaagttataagggtctaggttttcatgattctcatcaagagtcaaaatcttactggttctcatctttttaactttctattttttaatttctttttttctcttttggcaaacatgaggaagaaactgccagcagaaatacaggtggaagcacctcctactatagccttctcttgtatttttaaagcagctttgtcatatggttaatgaaggagaaagtcgacaacatgtgtagtgtgtatgtctgctgtcagcatattgcagtgtgtgaccatgtttgtttccagttatctgaagtatcttcccaatctgatatctcttcctttaaagaattttttgtcatttaaaaataatcatgtttattctatgatatgtataaaatgagg

SEQ ID NO: 77783 - DNA, 430 bp, Homo sapiens
tctctacaaaaaatacaaaaattagctgggcccggtggcatgtgccgtgtagtcctcatcctactagtgggaggatcgcttcagcccgggaggttgaggctgcagtgagctgtgattgtgccactgcactccagcccgggcaacagagcaagaccctgtctcaaaaatgtgtatgtgtgtatatatatatatttattttagtggttgccttagggtttgcaatatacattcacaactaatcaaaatccactttcaaataatgctgtgctgcttcacaggtagtgcaaataccttgtaaccaagtattcccagttcactcctcccactgcttataacattgctgtcatttatttcatttatccttaggctacagtcacccaatacacaaattttattttgaacaaattgttaatgtgttagagcaattaaa

SEQ ID NO: 77784 - DNA, 351 bp, Homo sapiens
cttttgacagaagtgttttgggtttgggataattttggattttggaatatctgcattatacttataagttgagcatcccaaatatgaaatgctgcagtgagcatttctttggagtgtcatgttggtgttcaaaaactgtttggattttggagcattttggattttcgattttcagatttgtgttcctcaatctctgtggtttaaggctgagagaatagatctaatcagcagtcagtagagctcattagtagaggagagaggagagttttcttttaagaaggctatggggtcttgtgaagagacgagatagcttgtatttaattcacctgacagtcattagctagtaaaaat

SEQ ID NO: 77785 - DNA, 754 bp, Homo sapiens
aaaatgcaacattacataaataagaaatagatggtagggggtgggggcaggacctaaaattaagccaccagtaaaagtagttctttaaaaaaaaaaagtgttttttatattgctgacctgggagacctgtgcacttctacagatgttggcaaattcagctgtaggccccactcatggacacctgatctgttatggttcatagtgcccataagatgtagacaaattactcaaggaatacacaattattcctgaccctaacattagaaagtctcccacagaagactttctaatatgatgaatatctcttcctatatgttaagttcacaaaagggccctcacccactgtagaccgaggcattgtgacaaagcatttctacaggccccagtacaatacaggccaattactagacagcagagcagtttatcatgttttccattttgccacaaagttcaaaaccaagttatctttgtcctcagagggagcacatggtttcctcttcctgatttcctgtttccatatatattttgctggctttcttgccattttgttataacccaccttgggtcctttcgtatacttgatcttaaccaaaaggtgtaggagcaatggtggatccctttttttttctttttttcttttttttttttttttcttaattttcaccacaccattcaagagagaaatgggtccttttttaaaagagaaggctataaataagtcaccagtccctactctcccatccatgaagcatct

SEQ ID NO: 77786 - DNA, 652 bp, Homo sapiens
tgggattacaggcgtgagccaccgcgcctggccagcttggtgaatttctacatgtacaaacaccagtgaggtcaccgctcacattgaggcttagattattgtagcacccacaaggctccctgtggcgccttctaattcataaccttcccattgtggggaactaatcacagtttatttacgtactcccctattgctaggcacttacattgcttccaatctttcactcttacaaatagtgcttcagtgaacttccttgtacatacacatttgtctacatctgattgcctccttcagataaacttttagaagttgtgaatttcagtacgctcatatccacagggtcagagggtatgagcttattgaaatgctcccagttggccgggcatggtggctcacgcctgtaatcccagcactttgggaggctgaggcgggtggatcacctgaagtcaggagttccagagcagcctgaccaacatgacgaaaccgcatctctactaaaaatacaaaaattagctgggcatggtggcatgcaactgtaattccagctactcaggaggctgaggcacgagaatcacttgaacccaagaggtagaggtgagcccagatggcaccatttcactccagcctgggcaacaaagcgagactctgcctc

SEQ ID NO: 77787 - DNA, 564 bp, Homo sapiens
attcggcacagccatccagtcccataggatcttatgcccttctccaagggcataagatcctatgggactggagaaggggtgagggctgtcttaaaacccagccttcccttttctttttttttttcttgagacggactcttgctctgtcacctgggctgcagtgcagtggcgtgatcttggctcactgcaacctctgcctcctgggttcaagtgattctcctgccccagcctccctaagagctgggattaaaagcgtgcgccccaatgctccgctaatttttgtatttttggtggagatggggtttcaccatgttggccaggctagacttgaactcctgacctcaggtgatctgcccacctcggcctcctaaagtgctgggattacaggcatgagcaaccacacctgtccccttttcttttttcaaagaagagttttcatgaccatttgcttttcttccaactgaccaatatgttaaacttagcaacaagtttatcttggagatccatatttccagttgattaatgagtagaagttaactgaagatttgcagcttaaaaaaaaaa

SEQ ID NO: 77788 - DNA, 708 bp, Homo sapiens
  misc_feature (231)..(231): n is a, c, g, or t
agcggctgaagcaggagaatcgcttgaacccgggaaagggagattgcagtaaaccaagatcgtaccaccacactccagcttggatgacagagcgagactctgtctcaaaaaaaaaaaaaaattcattgtgacaattggtattgatcccaccttatatgagcgtacttagaaatagttaaatttcaccagaagaccagaaagtagaaccaggtggttatcagaaggccaagngggttggaggagcctgctcagcggcgagttattggcttcaagaagtcacagaagttctcagtttggggaatgataacaaaattctgggagctgggttggggaagtgcatgtattggcacaacagtgtgcaatgtcacttaatggccactggaactttacaccttaaaatggttaaaccagtaaaatttatgtcaaatatattttacccataattaaccatttttaaaaattggatgggaaatattatttggcaatgggaatagttgcaagtggttggttaattggttcaaaccaccttggtactggctcattgggttgagggagattagagggaagaaatttgcaaaagatgtttggctagtgtgtactacaagatttcagatgacttgttgcctggtatagtagctgcacttctttaaactttgctatactgtatatacagccaggaatgtttttctcaaggacatggcagctacc

SEQ ID NO: 77789 - DNA, 95 bp, Homo sapiens
ccttagttaacatttactggtgctcacctaggattggctattctgagggattgcatagaaaccaagctccacttgctgtccttgggaaggttata

SEQ ID NO: 77790 - DNA, 443 bp, Homo sapiens
tataaaagaaaactttctttgggaggagattgggtatcacttcgtttcttatacttcttaccctgcattatacaataatgacttcaaatatatgtatagtcttatctgtgggaaagttagatcttcatttatatagggtattgagttgcatccatgtatgtggtgaaaacaaagcttatatctaataaatagagaactgattgtcattcataagggccaaactttcttactttgaagtgatgtatctgaagtaaataatatgccctaatagaatctgatgtggtagaataagttgaatatattatcaaaagtaattagaatagaacagcactgtccattagaaatataaatgggagccacatgtgtgattttaaattttctagtagacacagtaaatgagtaaaaagcagatgacattagtattagtaatacattttatttaa

SEQ ID NO: 77791 - DNA, 353 bp, Homo sapiens
gcaggagaatggtgtgaacccgggaggcggagcttgcagtgaggcaaggtcacgccactgcactccagcctgggcgacagagcgagactctgtctcagaaaaaaaaaaaaaaaatcccagcacttcgggagtctgtaatcccagcactttgggaggccaagagtttgagaccagcatagccaacatggtgaaaccccgtctctactaaaaatacaaaaattgggcacggtggctcacacctataatcccagcaattttcgaggccaaggcgggtggatcacctgaggtcaggagttccagaccagcctggacaacatggtgaaaccccatctctacaaaaaatacaaaaatta

SEQ ID NO: 77792 - DNA, 294 bp, Homo sapiens
tggtgggattacaggcgtgagccacggtgcccagcccaccatgcccattcctaacaagtgccctccatctagagagagaggcaaggcccaaaatgtggaaatacaagggcagtctgtttggcaccccttgccaggatttatggtcttctgagcccctctcctaagggtcacaatgacctctgctcatgaaggagtcgtctcagtggttccatgaaggtccttagcctttaatgagcagttcggcaccctccatcaaagagcatgtggtccagttccaccaagatccctgttccc

SEQ ID NO: 77793 - DNA, 178 bp, Homo sapiens
gtaaggcgaggggcacagcctgagtctccaaacagctgccagcaaggctccaaagcagccacaatagcagctagtctgcagggcctcagcctgccaggaggagacctgcacccattcaaaagcgtacttctctgtgttgggttgtgactccacaaacacagtttgcagctttcagaat

SEQ ID NO: 77794 - DNA, 346 bp, Homo sapiens
tttgatggtgaggaacatatctgtcttcttcatggttgtttttccccagtgcctggcacatagaagacatttgataatattcattgactgaatgaatatgatgttcaatgtattaatcatttcccatttctactttgcatattctgtcttaaataatgattgtattttctgtagagtctcactttggatattagatgtgtactaggattaagtaaaaataactgaacaatgttctaaaaattctgagatttctatcggagaaatatttacatctgcaaaatttttcctagaaaataagttcccagaaatgatacatttttgatgtccaataaataaattattcatt

SEQ ID NO: 77795 - DNA, 345 bp, Homo sapiens
tcttttctaaatgtttggtagaattcaccagtaaagtcatccatttctgggctttttttgatagaagatttttgataactgattagattgccttacttgtatttgtctgtttagattttctatttcataattcaatcttgataggttgtatgcttctaggaatttattgatttcttctagattatccaatttgtttggatataattgttcatagtagcctcttagaatcctttgtgttttgtaatatcacctgttatatcctttttcatttctcattttatttgagtcttttctcctttttccttcgtctcactgaaggtttgttaactttatcttttcaaaaaa

SEQ ID NO: 77796 - DNA, 311 bp, Homo sapiens
gaagaagaaaatacaaatcaccagtaatcccacaacccagcagcaactgctattaatatttaaactatttcctttcagggttttttggagggagaggcagccatactcttgtatcgtgtttatgaacttaatattatgagcattttcccatgtacatagctattcttcaaaaacatggtttttattggttgttttggtgcccaaatatttttctttagtttcagtgttatttaaaacagcattcataatcccagcactttgggaggccaagggaggtggatcatttgagctcaggagtttgagaccagagc

SEQ ID NO: 77797 - DNA, 730 bp, Homo sapiens
cacctgggttgagagggagcagcagtgctatggatcttcctcagaagaacatgaagttgcttctgtggaactggttatctgccatggcctcaacaatccataatccagtcatggagaggattccccatggtcagaagtcaacttgcacatctagttaaagtccaaggtaactgcaaacagtggaacatggcttaggttttgaagcctcgttattggatatagtctttatcctaagttctgaggagccataaaaatagttttccagaatggatttttttttttagataaaaagattatctaccttttgggggtggaatatcttattttgtttttgaatttgtctttgttataaagaagagtaaaacaaagatgtgtaagtgtgagtctgtgtgagctagtttctgatgtctaaacagcaattacctatggagaatacatcattcaaagtaatagcttttgttcaaacatttttaggaagtaataatacatttcttcctggacagttgataaaagttccatccatagcatatttccagaatatccctagatgatgaatttaaacatgccttctcagaaattaaatcttttgactttgaaccacaagttagcatttatttgttgaagagaagaatgtgtggtgatgtcttacctgaatgttggttgttactgatatattacaattttcaaggtgataagcttgagctattaaataataaaaagtattaaagta

SEQ ID NO: 77798 - DNA, 1482 bp, Homo sapiens
tctgctggactttgttgaacccaggggtgccaagtagcagctggctatgctcagagtctgaaggttgtccagtgatttgaagcagaaggacaaacactctcccctgaacacctggctccaggccttctgcacctcagccctgtccttccagcatcaatcctttcaaacataaggtacttcagtcttgttaagaggcatgttgggggtttcagagcctactggggcaggaaaggggagggtagtggtggtggtagaatcagacccactgaaatgttagatgggtagatatgccctgccagtccctggcggttccatcccctccgaggcccaggcacatgagtgaagaggccaacgtgtgtatccagcccaagtgagccttcagatgattctagccccaactggtgtcttagagcaactgcatgagaccccaggcgagaaccaccttgttgaaccaggcagcccagagaactgtaaaagataattgttttaagccatgtattgtgtgtgtgagagagacagaaagagagtgaatgttagttttatgaccattagataaagactttcaactttaatatggtggaaagtatcctgggttacaaatgctagaaatgtgcacctgcctgcttagtaatatcccatgtatagctcaacgaatattgagcacctagcagggtccttttccgtggatgaagggctactaaaatatttcatgtccttgttttcatggggaacttgatgcaggacagctcattaataatccagctacctctgtgccccaaaaccattcaaaccttgtcagaaaatagaggaaaccaaaaatagaaaagcattaaccaagaaacaaaaaggcacagcaactcttaacagtatcagggcttagccattccattgagggctgaggtttttataactaattaggctaaaaaaaagatttaagaccagaaattgctaaagccataaaagccagtccaatgtgaagccagatctgtcgttcaccaagagaaggacaagccagggctgaggggattccggcaggcgctgtggcccattcacagcttgaatgtaaacattatgttgtgtgtctggcatgagactgtgaagaaaacagccaacaccacacacacatcagctttatgactctggaaaaatcaggaagcacatttagaaacataaagtatttccagggttggtcagagaacctgctgtgccatcactcctttgtctttgctgctgtgattaaaaaatgttgacaagcgtcagtgggttgcccttatcgcaaatgttagtacaaggtcaagtgagactctattaagacatttcctccatccagccattcagttacaggccgcgggaacgtcctctttacaagaccagaggagctctgaaaagatccaccaaagtttatttcatcagtcctgaaacaaatttgatctttcagaaatattagtaaaaaaaaataaataatggccggaaacctgaaaa

SEQ ID NO: 77799 - DNA, 828 bp, Homo sapiens
atgcatttcttaaagggatttagtgcagttattttaaataatttatgcacgcacacacacatacatatatcccccgagtacatattttttccctttttacttgtgtgcaatcagtagctacaatgactgaaatccacttctttggactgtgacatttaagcaaatcttgtatctagaaaccgaaatgcccagagtctcgcacaagctgttcgtctgggccaccaactcacacagccgccgcccagcgcctcggcacgcgtgctcatcttgtgtaaaagtaaaagttgctcatgtcattagctcggctctgagtttgcatgagaaaccagcgcagctctcgagccacgggagaaaacacgatctgctgcggagcccagtgacctgaaactgtagcagtgactcgagacctgtcctctcctcgacgtcgccctataaccctcccgctttatttaggatccgcttttccgagagcagccactcaggcaacccccggaaggtttgttaggagtttctccttgaaacgctttccgattccatcttttgaaatccagcaggcgagagtcacgacagactccaggacctcttgagcgctgtccgcagccccacggtaggagtagccctagtgcacgagacttggcggtggctgaaaagctcgcccaaacgcacgcaccacctctctgcggggttgcggattgcgggttgcggtctttgtccgctcgcccttcctccggggccgcacactcccgcatctggccggcaggtggcgcggttggctcacgatgagctgcggccggggctggagaggctcctccacctcccagcggccgc

SEQ ID NO: 77800 - DNA, 478 bp, Homo sapiens
caacccaaaacagactaatgtacaagaaatttgcaaagcccctctccctctatgccagacacttgcctaataatgttcaggaattatatgtaatgtatacaagctgcagtaaaaacaaaaaaaatctatatgggactctttaactgcaaagaccttgagatgacacatctttttcaatgtattttgattttactacaacaactagctcagagggagctttatagggagcaatattactcattaactctttgttgaatgaattaatgaactagtgagtggattaataaaattaggccagttaagggaacacactgtttctacgccagttggctattttgggtttaaatatttttaaaattactgttggttctgctctttttttttgaaacaaggtcttgctctgtcacccaggctgcagtgagccatgatcatgccactgcactctagtctgggtaacagagcaagatcctatcttgga

SEQ ID NO: 77801 - DNA, 669 bp, Homo sapiens
aggcgtgagccaccgcgcccggcctcggtaaaatgttttataaaggcagtttctgccctctccccgcgtcccccacccccctccacggacctacttacccagcctctgagccgcagtgccctcctctgtaaagtgggtatatcagagcgccaagtgcctggattacaggaaagggctgcgtttagctgcgcacccggccacggctgggacaaacacgcgcagtgacacgcggcggctgcggttcccgcgctggccgcggtcgggctctggcgctcctgagcccgcgctcggcccgcaggacgtggagaccacgtacttctgcaacacgtgcggacagcccctatgcgcgcgctgccgcgacgagacgcaccgagcacgcatgttcgcgcgccacgacatcgtggccctgggtcagcgaagccgcgacgtgccccagaagtgcacgctgcacgcagagccctacctcttgttctccaccgacaagaagttgctgttgtgcatccgctgcttccgcgacatgcagaaggagagccgggcacactgcgtggacctggaatcggcttacgtgcagggctgcgagcggctggagcaggcggtgctggtgagcgcaggggcctggcgcgcggggccgcgcggcggcgatcgcgagcctgaccacgccctgtcccc

SEQ ID NO: 77802 - DNA, 222 bp, Homo sapiens
tgaggctccaccctgatgacctcatcgcatcccaaaggccccaccactaacccatcgccttgggggtgaagatttcaacactggaatttcagattcagaccccagcactgagtgcatgagtgcacgcttctgtgtgtgcacaagcatgagtgcaagtgcatgtctgtgtccacgtgtgtgtgcatgtgaatacctgtgtgtgcaggtgtgtatgcaagtgtg

SEQ ID NO: 77803 - DNA, 150 bp, Homo sapiens
tagatttcaggaaaagcattaattttaaaacagataccagtgtgtaagttttaagcaggctaaaatttgactgtatgttaatagttgaaggccagactttcagtaaaacagatctttatctctaaaaacttttttatcctttcatcattg

SEQ ID NO: 77804 - DNA, 218 bp, Homo sapiens
acctacatcctctattcattatttctaaatggggaactactgttatttgaggtagggtaattatttgtgctacactcttggcagcttccaagatggtttgcattcctggcctttggattctaaatgccagtaacacctcagtcatactgacaaacaaaatgcctctgtacatttccaaatgtgagcagctgtcagcagggggcttaagctaggtgcag

SEQ ID NO: 77805 - DNA, 893 bp, Homo sapiens
ggagagtgatcatcttttttcgtttaattaagatgtgttgctgtctcttctcagccatacatggtattgagttttagattagaatgggaaagcctagtattctggctagataatttttggttatattacacattttctgaacatcttcagatacttcagcatacgaggataaaaaccacgtagcaaagccaaatgaaaattattttttgttttatttacactggagtgtttcataattcatgtggataattgttagggcaatgaaaaatcacttttggaatactaaccgataatcatgtgattgactagaggccgaagtgtgctatgttccatgtagataatttttggaaataatggcttcattaagatacaattcacatattatatagttcattcatttaaattgtacaatttggtgctttttaaaatattcatgtagttatgcaaacatcaccacaattttagaacatttttatcatcccaaaaaggaaacactcatacccattagcagtcattccctaacgccccaggcctaggcaaccactaatccactttctccatttagatcatattttttaaataattattttccaaattataatttagagcaaatttggaaattttctgcttattatagtgtgactattcaaaaactagtgcttttcttgcatagtaatgtattgattttcaggttaacacctttgttatttttcaggttcttacttagcactagaagaaattaattcttaaacggcatcttattgttattgtagggatgagcgaagagcctctctgtttactcaattttaggaacactctttttggaatttaattcattcctaaggcagagaagacagggaacagtatactaaacctaaaaaataagcaaaaat

SEQ ID NO: 77806 - DNA, 487 bp, Homo sapiens
cagagtctcactctgtcacttaggttggagtgcagtggtccgatgttggctcattgcagcctttgcctcccgggttcaagtgattctcatgcctcagcctccagagtagctgggattacaggtgtgcaccaccacactcagctaattttcatgaggttggtcaggctggtctcaaactcctgatctcaagtgatccgcccacctcggcctcccaaagtgttaggattacaggcacgtgagcctccgcacccggccaattttttgtatctttagtagagacagggtttcgccatgttgcccagggcagtctcaaactcctgagctcaagcaatccgcccgcctcagcctctcaaagtgctgggattacaggtgagccactgcgcccagccaaatgcattgtcaacttacagtatttccaacttacgatgagtttattggtacataaccctgtcataagtcaagaagcatctgtattgtcataattgtt

SEQ ID NO: 77807 - DNA, 498 bp, Homo sapiens
gtagttaggctaagattggaaaaatgattagaagttggccaaccagggtggagtatgggggtagggaggtagtgtttaggtggaggaatatcacatgcagaggttgagtggtgagaaagttcttgaggatggtaaggagctccacattttcatggatgccacagctcacaggtgattcatcttgaacatacagccaataaacacccaaagactttcccatcttgtaccaaggcaggtggatttttttttttttcaagactgaatctctgttgccaggctggagtggagtggcacgatctctgctcactgcaatctctacctcccaggttcaagcgtttctcccaaggcaagtggattttgaaatcaagaaaatggggttcatgagagaaattcttggcccctgttgctgtcaggaaggcttttagactaaaaagaatggagctaatgaaagcagttggatagggcaagcgtgtgagcattggctttcactggcttagg

SEQ ID NO: 77808 - DNA, 664 bp, Homo sapiens
tgatacatcctatatataaattttagcatcatttttcaatatttttaaaatgcaatgaagatctcaatggcaggtgaaaaatgatatctgcaagtgattttttaaatgggagcttattcaattttgtaattatagctgtatgtgaagaacaaacaaaatacatgtgcaaaatataataacagcaatatctgcctggtatttctaaaggactttggttacatataattcttgtacgcatgataagaaaaggaatgttaatttttaactcaacaaatacagcgttcctataaggtggtctgtacagtatattggtttgtataattcacacattaagtgaaaggaaagaaagagatgaggagtggaaacacttatctcatactcttgtctagttgaatattgttttttccatctttgacatttgaattttgtagtacagtgcagtatgaggtgtttaaagcctataaactgttatttaactaatactgttttctaaaatactttccatgatctaagaaaataatttctagtttcttgggctatgtattaactgggcattctaaaacgtcacttctcatcactcccatgatagtacaatttcctgcttccctcctaaatcgctagtgctccaccagtctcctttgccagctcccttcctttgcctgct

SEQ ID NO: 77809 - DNA, 658 bp, Homo sapiens
aggctgaggcagaaggatcacttggaaaaaaaaaagtagaaagaatgtaacatcctaaatatatatatatttggtttcggcccccagttcttgacacagtttttattttgtttgttttttgagacaggatcttgctctgttgcccagactggagtgcagtggtgcaatcacggctcactgcagtcttgacctccagggctcaagcgatcctcctgcctcagcctctggaatagctgggatcacaggtgcatgccaccatgcccagccctgacactgagctcctaagtcccttgaatttcctaagttacaggggtgctagcagcatgttttgttctaacatttggttttgatcccagtccctggcacagagctcctaagtccgttggaatttcccgggtgacaggagtgtcttttgttctaatgaggtaactcctgggtgggctgatcaccagagagatcaagctgcaatgaggagcttggaactttcagccccaccaccccccagcttcctccagagactggagaggagctggagattgagttaagaatcgatgacgcctatgtgatgaggcctccgtcaacatcccgatagggtttggagagcttccaggctgctgaatgcattcccgtgcgcagggggtagcgtaccccaactcca

SEQ ID NO: 77810 - DNA, 799 bp, Homo sapiens
tacgtgttccagtaaataccccattttcccccaagcaaattagaattggctttctctgtcacttgcaaccaagagagtcttgactagtataagcctctagcataggacctcacacattagttcctgtaaaatagcaactatcatcaccgttattcatatgataaatgagcaagccatcctctttggtaactgtaaactgtagaaatgaaaagtgcatgcagtatgctcaataacttttgtctcccctcttattcccagcctgctcctttgtcctttccaaattcacatcttgacctccaaggaaaccctcaacattcattaaaagcagagcccacccatcttataaaaatagtcccagactcacccaagtcacgaatattccgctaggcagcatttgctcccatgttacacaagtgatcccttcctagactataagcaactgggagcaggtgtccagcttcaattcactttcaagcctttgagcaaaaattgtacaaatatttgcacagcctcctttgtcccgtactgtagacttaaagaaacaatgagctactgcctctacacttaaagggactttaccatggggaaagacaaatagtctaggacagagactgagatgacagatgacaataccagggagtcctctaggggatggaggtggagtggttatttgcaccatgttctaagttccaaaggcctgtgctgcctgcagtcttgacttatgacagattttatacatccacactaaacctttcttctgtgcccatcacagtatccagagaataaatttcatttcaaa

SEQ ID NO: 77811 - DNA, 431 bp, Homo sapiens
tcactaacatgaccaaaccatatcaatttattcaatttttgcaatatttgtattattaatgctttgtattattaatgcttttttggaattatttgtattattaatatacttattaatatttgtattaatgattttaatatgtaatatattatatattccttttatagaaatatgtcagaatatttatttagaaatttatatatatttattatttagaaacatttaacatttaaaaataagtaatgtcctaaataaacaatgtaatgttctaaataaacatttcttagaaatatatttgtatgcgtatgcccatatgtgcacgtgtgtgtgtgtatgccagctgtaaaaagaaaattctctactttgtatttttgataattagaattatagtggtggtgatttgctttgatataaaacatttgacaaacatc

SEQ ID NO: 77812 - DNA, 415 bp, Homo sapiens
gccacacactggagagggagagctagagagtgagacagcaggggagctgagggtgaatggctgctgttagaagccctggagacagcctgaggtcagagcccagccccactcctggctgtgtgatcttgagcagggctgttaacttcactaggacttggtttcggtttctcatagagaataggtacagtgtgaattaaatatatatagcttgaataaagtgcccagcttgtgggtagctgctgccatcatcatcaccatcaccatcatcaccatcaccatcatcatcatcatcatcatcatcatcatcatcatcatcatcatctcaggcacaggggctttaaggacaacatgcccagtttaagaagaacacaactctcttcatttatagcgcccctccatcagtgagtagacgctt

SEQ ID NO: 77813 - DNA, 344 bp, Homo sapiens
ttaatggtttatagagtattttatggcattcacctaaatctctttccattttgcccaagatcctggcgagggaaacaaggtagaaattttacagattttactcctccggagagagccttttccttataactacgactctagttaggacattttttgttgcaagaaatttgcgatttatcctaaggaaaatgggatatagtataaggatacctagggtaagaaacttcaaaccccttagagacccagctactgctccgattgctcaaggtttcgtgctctgcgctcaagggctgcgttttggtgtctttgttctgcccaattttcttattgtctaattttccttt

SEQ ID NO: 77814 - DNA, 1012 bp, Homo sapiens
aattatacttttgtgaatatatcacggagtcattaggcattcagcttcatcacagcaggtcaggggtctcactgatggcatacaatatagtgatcgggtactctgacttggtagcacagtaagacagacttgccttaaacttatgagtaaggaaaataacgattcggggtgacgcccgaatcctcactgctaatgtgagacgaatttttgagcgggtaaaggtcgccctcaaggtgacccgcctactttgcgggatgcctgggagttgcgatctgcccgaccttattcacgcctaaaaagtagactgactgtggggtggtcgtgttttttgtttcttgttggtaggtggtgaatgcgtttttttcgttgttttctccgttactcaggctgccagttgcttggcagtcttgtcgctggctgtggacgctctgcacttcatcaccgtccccagctgcgctttgagccggtctaaggttgcccacagtattgacgttgggacccacgaaactggcaatttccatgtgtgcggccttacccagttctcccaaacttctgcgtataaccgcttctctgtgcttcagaaagataagtccggccccggcctcacacagcagctcagttcgtgacagcgtttaatatgtaaaatggagcaaataatttatagggcgttgggagagttaaagagactaattcatttacgtgttaaatacagggaatggcttttgcattgatataaccccagcctccagcatgcgccagacctgacgtaggtgttcggcacatattttgtccaatcactctaaaaatacactccatgcccttagaacaggtggggttatgtcctcttggccatcaggcatcaggagctccgtgcagaaactgggtaagaggccaggagcggtggctcatgtctgtaatctcagcactttgggaggctgaggcgggtggatcacctgaagtcaggaggtcgagaccagcctggccaacacggagaaaccccgtctctactgaa

SEQ ID NO: 77815 - DNA, 295 bp, Homo sapiens
caaacaccgcaatctcaggccccacccagacctactgactcagactccgaattaaaactccagatgactcatgtgcatgctgatttcaagaagcatgtaatcttcaaacccttttgctcacattaaaagaattttgcaaattatgtaccccttgcatgtttttatgctgctatctaaaactttccccaaatgtttagttgcaaaagaatgccattccagtgtgttgtaaacatggatcttttttaaaaagtcttatttcagattgcgtgtttggggatcctcagagtcaccccag

SEQ ID NO: 77816 - DNA, 390 bp, Homo sapiens
caaacaccgcaatctcaggccccacccagacctactgactcagactccgaattaaaactccagatgactcatgtgcatgctgatttcaagaagcatgtaatcttcaaacccttttgctcacattaaaagaattttgcaaattatgtaccccttgcatgtttttatgctgctatctaaaactttccccaaatgtttagttgcaaaagaatgccattccagtgtgttgtaaacatggatcttttttaaaaagtcttatttcactttttaaccattcccttcatgattcattttatttttttttttatgtatttatttgtttattttttgagacaagagtctccctctgtctcctaggctggagtgcagtggcgccatctcggctcactgcaa

SEQ ID NO: 77817 - DNA, 955 bp, Homo sapiens
taaagctaatgggaggccatcaggctgggggcaaggaggagagcccggatcctgctaaggtgcagacataaacgagtatcagccattattctggaggttataagatatgcaccttccccaattacccctgcaatcacaccattattgtagattggcccttagagtatcttttcaggttttttggcatgtctgacactcatggctctacttggacccaccaaccctgctcctatggctccacccagaagccattcagcctagaggacagctctgaccccccctgtgatttcatacaatcagcagcaagtaactgttacctcaccatccccaccccttctgccagactgcctttgaaaaacctctaacctgtgagcacgagatgattccagaacaaactctgtctcccatgtggcatgaccagccttgggtctcttaaactttttctccactataatgccatggtctttatgcagcaggcaggaagaattcaggtggttataattccgtatgtgctttttgaacatttttctactgggctattgctctcttcataatgatttttttaacttctctctataaggaactgatttcatctgaaattgaagagacaatcagagaaaaactatagaccactcatgatggttgttatatgtgcttggctgggccatgggtcccagtgtttggtgaaacacagcagcagatgtccctcacacacatgccctcttggttctgtttctttgaagaaccccaggaaaacacacaaaggaaaaacaactcgatagacagaagattcttcaatgacaacaatggaagccatcttcaccattcaactaaacttgaatgggatattatcaaacttaaaaaaaaattatcaactgatcgtgtaatcagtttcatcttttaagacaggaaatgaaataaagtatttacagatgaatgtaaaatgaacttatca

SEQ ID NO: 77818 - DNA, 1145 bp, Homo sapiens
tcttccaggatcgcgcattagcggacgctggctacgggtggccgggcgggatgtaaccggctgctgagctggcagttctgtgtccccaggcttcggcccggccgccgccgcacataaactgcgaggaggagctttacgacttctcggtcttcggggccgggcgcagcaagggccagactctgcgctagcaggcgctgcgcgccaaccggccggcccctgtcgcagaaggtgcaaccgatcgcactgtcgcgcagaagctcctcaatggccagcgccagctgcagccccggctgcccactcgcctcacctgagcctgggtggaacaatccaaagttttaatcaaagaagtcttgccgtttatttatgacagaaagaacacacgcaggacttgaaagatgttactaataatgtccactacgagaactatggaatcagaaaactggcagctgtgacttatcatggagttgataacaagaagaataaagggcagctcactaagagccctctggcacaaatggaagaagaaagaagggagcaagtagctaaaattaagaagatggagatggagatggagcaggtgtttgagatgaaggtcaaagaaaaagttcaaaaactgaaggactctgaagctgagtctgcagatgtggatcctgactcctgagagaagtagctcaccgtgacgaagctgcgtttgcttttatcgatttgcaaatcaaagaagggggacatattgggagaaggccccccaaaatctggccataaactggccacaaaactggccataaaatctctgcagcactgtgacatgctcatgatggccataacgcccacgctggaaggttttgggtttaccggaatgaaggcaaggaacacctggcctgcccagggcagaaaaccacttaaaggcattcttaaaccacaaacagtagcatgagcgatctgtgccttaagggcatgttcctgctgcagataactagccagacccacccctttatttcaggccatcccttcatttcccataagggatacttttagttaattgaatatctatagaaacaatgctaatgactggtttgctgttaataaataagtgggtaaatctctgttcggggctctcagctctgaaggctgtgagacccctgatt

SEQ ID NO: 77819 - DNA, 347 bp, Homo sapiens
catgtaactttttttattcttgaaatttgtgaatactatagagatgtatttgaacaagaatactttgttttataggaccatttacctcttgctgtggtgggtagtaatactatcattgaagttaatggcaaaagggtcataggaaggcagtatccttggagtgttgctgaaggtaaggttttcttcagtgaatgagtttctataagatctcaaaactgattaaaaatttgtatttatagtaaggagtataatatgcacactgtattgatataatctagatttcaaggatagtactgatttcaggttcttgtagtctcattttcctcttaaatacattcatatttttc

SEQ ID NO: 77820 - DNA, 1491 bp, Homo sapiens
atttaccggaatttcggaggcttcgggtacccccgttaccaagtttgcgcaaggactttatttgtgtatgaatgaaaaagagggaaataacctttactgaactaaagacatgcctggataaattacacacagttaaaggagagaaaattagggaatgtgatatttttgctaacaggttgggccttatttataatgtagtgtcaaggaaactcctagcgtcgcaacattgggcagggtaatgacaaaacatcccagcagacatatctactatcttgaaacccttctagatgtcgagttatacatttagtttctattagtcaaaaagaccttggagacatttccttcattaggtggcaagaaagaaaagatggagaaaaggataaacttaatataagaatccacagagcagtagtttgatagatatctgagaatagtaggaaaaaaattgggtaatcccaaaataaatcagtgatttcagtatgaagttttctcaacataaatctgctataattaaaaattacaggccttcaggaagtgtcgagtctgggacgcccagcgcgggcccgagcagggggaagggaagcgcagctcggtccgcgtgggtggaggggacgtgaagccgccctgagatgatggttgaggaagggctctacggctcccaagctaggccaaatgcctccggcggccgcgcccgggcgccccttcccctgtggggcaaccctagcttgggacgcgtgaaccacctccgtagctgccccaccagcacccccagccgtgcgcccctgcaccatgcagctgccctgcgcatggagccgcgagggacagcaggcccagccctcagcaccacctgcctgccaggaggttcgggaaactggcgccgcagcggagagggcatctgtccaacgcctcccccggggctcagctgcgggcccccaggcataggcacccatgacccttctgtgttgtttgtctttgtatagtctgcagatgtggatcctgactcctgagagaagtagctcaccgtgacgaagctgcgtttgcttttatcgatttgcaaatcaaagaagggggacatattgggagaaggccccccaaaatctggccataaactggccacaaaactggccataaaatctctgcagcactgtgacatgctcatgatggccataacgcccacgctggaaggttttgggtttaccggaatgaaggcaaggaacacctggcctgcccagggcagaaaaccacttaaaggcattcttaaaccacaaacagtagcatgagcgatctgtgccttaagggcatgttcctgctgcagataactagccagacccacccctttatttcaggccatcccttcatttcccataagggatacttttagttaattgaatatctatagaaacaatgctaatgactggtttgctgttaataaataagtgggtaaatctctgttcggggctctcagctctgaaggctgtgagacccctgatt

SEQ ID NO: 77821 - DNA, 2010 bp, Homo sapiens
tcttccaggatcgcgcattagcggacgctggctacgggtggccgggcgggatgtaaccggctgctgagctggcagttctgtgtccccaggcttcggcccggccgccgccgcacataaactgcgaggaggagctttacgacttctcggtcttcggggccgggcgcagcaagggccagactctgcgctagcaggcgctgcgcgccaaccggccggcccctgtcgcagaaggtgcaaccgatcgcactgtcgcgcagaagctcctcaatggccagcgccagctgcagccccggctgcccactcgcctcacctgagcctgggtggaacaatccaaagttttaatcaaagaaggtggtattcagttgctgcttacaatagttgataccccaggatttggagatgcagtggataatagtaattgctggcagcctgttatcaattacattgatagtaaatttgaggactacctaaatgcagaatcgcaagtgaacagatgtcagatgcctggtaacagggtgcactgttgtttatacttcattgctccttcaggacatggaccgttacataactgaagactcccaccttcaggcaggattgggtagtacatgtttgtaactacctggcattgccttttgttgagacttaaaccattggatattgagtttacaaagcatttgcatgaaaaagtgaatatcatcccacttattgccaaagcagacacactcatgccagaggaatgccaacagtttaaaaaacagataaagaaatccaagaacataaagttaaaatatatgaatttccagaaacagatgatgaagaagaaaaaaaacttgttaaaaagataaaggaccatttacctcttgctgtggtgggtagtaatactatcattgaagttaatggcaaaagggtcataggaaggcagtatccttggagtgttgctgaagttgaaaatggtgaacattgtgattttacagttttaagaaatatgttgataagaacacacgcaggacttgaaagatgttactaataatgtccactacgagaactatggaatcagaaaactggcagctgtgacttatcatggagttgataacaagaagaataaagggcagctcactaagagccctctggcacaaatggaagaagaaagaagggagcaagtagctaaaattaagaagatggagatggagatggagcaggtgtttgagatgaaggtcaaagaaaaagttcaaaaactgaaggactctgaagctgaggtacagcggaccttcctggcatcagaaaaaggcctccagaaaaagagacacaggaactgatttcatctgaaattgaagagacaatcagagaaaaactatagaccactcatgatggttgttatatgtgcttggctgggccatgggtcccagtgtttggtgaaacacagcagcagatgtccctgtgagtagatgttgctttgaaggtatcttttagatgtgatgaacatttgtcatcagtagactttgagtaaggcagatagcccgtcacaatgtggatgggccttatccaattagttgaaggcctttgaaaaaagactgagatcccaaacgaagaaggaattctgcctccagacagccttccaactcaagtagcaacataacctcctccctgcggctctagcctgctggcctttcctatagacttcagacttgccagccccacaatcatgtaagccaattccttaaaataaattctctgtcctgtttttgccccctctctctttctgacagcacacacatgccctcttggttctgtttctttgaagaaccccaggaaaacacacaaaggaaaaacaactcgatagacagaagattcttcaatgacaacaatggaagccatcttcaccattcaactaaacttgaatgggatattatcaaacttaaaaaaaaattatcaactgatcgtgtaatcagtttcatcttttaagacaggaaatgaaataaagtatttacagatgaatgtaaaatgaacttatca

SEQ ID NO: 77822 - DNA, 1681 bp, Homo sapiens
tcttccaggatcgcgcattagcggacgctggctacgggtggccgggcgggatgtaaccggctgctgagctggcagttctgtgtccccaggcttcggcccggccgccgccgcacataaactgcgaggaggagctttacgacttctcggtcttcggggccgggcgcagcaagggccagactctgcgctagcaggcgctgcgcgccaaccggccggcccctgtcgcagaaggtgcaaccgatcgcactgtcgcgcagaagctcctcaatggccagcgccagctgcagccccggctgcccactcgcctcacctgagcctgggtggaacaatccaaagttttaatcaaagaaggtggtattcagttgctgcttacaatagttgataccccaggatttggagatgcagtggataatagtaattgctggcagcctgttatcaattacattgatagtaaatttgaggactacctaaatgcagaatcgcaagtgaacagatgtcagatgcctggtaacagggtgcactgttgtttatacttcattgctccttcaggacatggaccgttacataactgaagactcccaccttcaggcaggattgggtagtacatgtttgtaactacctggcattgccttttgttgagacttaaaccattggatattgagtttacaaagcatttgcatgaaaaagtgaatatcatcccacttattgccaaagcagacacactcatgccagaggaatgccaacagtttaaaaaacagataaagaaatccaagaacataaagttaaaatatatgaatttccagaaacagatgatgaagaagaaaaaaaacttgttaaaaagataaaggaccatttacctcttgctgtggtgggtagtaatactatcattgaagttaatggcaaaagggtcataggaaggcagtatccttggagtgttgctgaagttgaaaatggtgaacattgtgattttacagttttaagaaatatgttgataagaacacacgcaggacttgaaagatgttactaataatgtccactacgagaactatggaatcagaaaactggcagctgtgacttatcatggagttgataacaagaagaataaagggcagctcactaagagccctctggcacaaatggaagaagaaagaagggagcaagtagctaaaattaagaagatggagatggagatggagcaggtgtttgagatgaaggtcaaagaaaaagttcaaaaactgaaggactctgaagctgaggtacagcggaccttcctggcatcagaaaaaggcctccagaaaaagagacacaggaactgatttcatctgaaattgaagagacaatcagagaaaaactatagaccactcatgatggttgttatatgtgcttggctgggccatgggtcccagtgtttggtgaaacacagcagcagatgtccctcacacacatgccctcttggttctgtttctttgaagaaccccaggaaaacacacaaaggaaaaacaactcgatagacagaagattcttcaatgacaacaatggaagccatcttcaccattcaactaaacttgaatgggatattatcaaacttaaaaaaaaattatcaactgatcgtgtaatcagtttcatcttttaagacaggaaatgaaataaagtatttacagatgaatgtaaaatgaacttatca

SEQ ID NO: 77823 - DNA, 2130 bp, Homo sapiens
tcttccaggatcgcgcattagcggacgctggctacgggtggccgggcgggatgtaaccggctgctgagctggcagttctgtgtccccaggcttcggcccggccgccgccgcacataaactgcgaggaggagctttacgacttctcggtcttcggggccgggcgcagcaagggccagactctgcgctagcaggcgctgcgcgccaaccggccggcccctgtcgcagaaggtgcaaccgatcgcactgtcgcgcagaagctcctcaatggccagcgccagctgcagccccggctgcccactcgcctcacctgagcctgggtggaacaatccaaagttttaatcaaagaaggtggtattcagttgctgcttacaatagttgataccccaggatttggagatgcagtggataatagtaattgctggcagcctgttatcaattacattgatagtaaatttgaggactacctaaatgcagaatcgcaagtgaacagatgtcagatgcctggtaacagggtgcactgttgtttatacttcattgctccttcaggacatggaccgttacataactgaagactcccaccttcaggcaggattgggtagtacatgtttgtaactacctggcattgccttttgttgagacttaaaccattggatattgagtttacaaagcatttgcatgaaaaagtgaatatcatcccacttattgccaaagcagacacactcatgccagaggaatgccaacagtttaaaaaacagataaagaaatccaagaacataaagttaaaatatatgaatttccagaaacagatgatgaagaagaaaaaaaacttgttaaaaagataaaggaccatttacctcttgctgtggtgggtagtaatactatcattgaagttaatggcaaaagggtcataggaaggcagtatccttggagtgttgctgaagttgaaaatggtgaacattgtgattttacagttttaagaaatatgttgataagaacacacgcaggacttgaaagatgttactaataatgtccactacgagaactatggaatcagaaaactggcagctgtgacttatcatggagttgataacaagaagaataaagggcagctcactaagagccctctggcacaaatggaagaagaaagaagggagcaagtagctaaaattaagaagatggagatggagatggagcaggtgtttgagatgaaggtcaaagaaaaagttcaaaaactgaaggactctgaagctgaggtacagcggaccttcctggcatcagaaaaaggcctccagaaaaagagacacaggtactagcaattccaaattatccagagcccttctaagttgtaagatctgaaagaaatgtctgccatctatattctcagccacacttagtttcttaatctgcaagatggaattaataatagtacttactttatgatgctgttgcagaaattcactgagttgctacacgccaaacactgagaacccagctgggcatataataagcattctattgcatggcattattgcatcatttttacttctattactgctactgcttgtaactgcttgtaactgtttgtgcttttttgatatgaaagtccaccatcagggagcactgtagtggaaaaggtattaggccaggcatagcctttagttctctggccttgggtccttcatctgtgatattcagttaacaatacctagccagtaggggtgttaaagattaaataaatgtgagaatgtgcctgttgcttaatcttcctcaaagggttatggactctcagagccagaagaaggtcatctctcctttgctcctcgtatgctgggatctgccacatcaatggcaacagctgggcctccagaatttgctccagggtgtttggaagtcctgacaccctcctgatcttctctgtaacatgcacactttggcctgtgtcagtttgctggaaccacatcaggccggccctcttcctgggacaaaattctttctttttctttctttctttttctttctctttctttctttttctttctctttctttctcttttcccttccttccttccttccttccttccttccttccttccttccttcccttttcttttcttttctttctactgtgac

SEQ ID NO: 77824 - DNA, 1913 bp, Homo sapiens
tcttccaggatcgcgcattagcggacgctggctacgggtggccgggcgggatgtaaccggctgctgagctggcagttctgtgtccccaggcttcggcccggccgccgccgcacataaactgcgaggaggagctttacgacttctcggtcttcggggccgggcgcagcaagggccagactctgcgctagcaggcgctgcgcgccaaccggccggcccctgtcgcagaaggtgcaaccgatcgcactgtcgcgcagaagctcctcaatggccagcgccagctgcagccccggctgcccactcgcctcacctgagcctgggtggaacaatccaaagttttaatcaaagaaggtggtattcagttgctgcttacaatagttgataccccaggatttggagatgcagtggataatagtaattgctggcagcctgttatcaattacattgatagtaaatttgaggactacctaaatgcagaatcgcaagtgaacagatgtcagatgcctggtaacagggtgcactgttgtttatacttcattgctccttcaggacatggaccgttacataactgaagactcccaccttcaggcaggattgggtagtacatgtttgtaactacctggcattgccttttgttgagacttaaaccattggatattgagtttacaaagcatttgcatgaaaaagtgaatatcatcccacttattgccaaagcagacacactcatgccagaggaatgccaacagtttaaaaaacagataaagaaatccaagaacataaagttaaaatatatgaatttccagaaacagatgatgaagaagaaaaaaaacttgttaaaaagataaaggaccatttacctcttgctgtggtgggtagtaatactatcattgaagttaatggcaaaagggtcataggaaggcagtatccttggagtgttgctgaagttgaaaatggtgaacattgtgattttacagttttaagaaatatgttgataagaacacacgcaggacttgaaagatgttactaataatgtccactacgagaactatggaatcagaaaactggcagctgtgacttatcatggagttgataacaagaagaataaagggcagctcactaagagccctctggcacaaatggaagaagaaagaagggagcaagtagctaaaattaagaagatggagatggagatggagcaggtgtttgagatgaaggtcaaagaaaaagttcaaaaactgaaggactctgaagctgaggtacagcggaccttcctggcatcagaaaaaggcctccagaaaaagagacacaggaactgatttcatctgaaattgaagagacaatcagagaaaaactatagaccactcatgatggttgttatatgtgcttggctgggccatgggtcccagtgtttggtgaaacacagcagcagatgtccctgtgagtagatgttgctttgaaggtatcttttagatgtgatgaacatttgtcatcagtagactttgagtaaggcagatagcccgtcacaatgtggatgggccttatccaattagttgaaggcctttgaaaaaagactgagatcccaaacgaagaaggaattctgcctccagacagccttccaactcaagtagcaacataacctcctccctgcggctctagcctgctggcctttcctatagacttcagacttgccagccccacaatcataaccccaggaaaacacacaaaggaaaaacaactcgatagacagaagattcttcaatgacaacaatggaagccatcttcaccattcaactaaacttgaatgggatattatcaaacttaaaaaaaaattatcaactgatcgtgtaatcagtttcatcttttaagacaggaaatgaaataaagtatttacagatgaatgtaaaatgaacttatca

SEQ ID NO: 77825 - DNA, 1764 bp, Homo sapiens
tcttccaggatcgcgcattagcggacgctggctacgggtggccgggcgggatgtaaccggctgctgagctggcagttctgtgtccccaggcttcggcccggccgccgccgcacataaactgcgaggaggagctttacgacttctcggtcttcggggccgggcgcagcaagggccagactctgcgctagcaggcgctgcgcgccaaccggccggcccctgtcgcagaaggtgcaaccgatcgcactgtcgcgcagaagctcctcaatggccagcgccagctgcagccccggctgcccactcgcctcacctgagcctgggtggaacaatccaaagttttaatcaaagaaggtggtattcagttgctgcttacaatagttgataccccaggatttggagatgcagtggataatagtaattgctggcagcctgttatcaattacattgatagtaaatttgaggactacctaaatgcagaatcgcaagtgaacagatgtcagatgcctggtaacagggtgcactgttgtttatacttcattgctccttcaggacatggaccgttacataactgaagactcccaccttcaggcaggattgggtagtacatgtttgtaactacctggcattgccttttgttgagacttaaaccattggatattgagtttacaaagcatttgcatgaaaaagtgaatatcatcccacttattgccaaagcagacacactcatgccagaggaatgccaacagtttaaaaaacagataaagaaatccaagaacataaagttaaaatatatgaatttccagaaacagatgatgaagaagaaaaaaaacttgttaaaaagataaaggaccatttacctcttgctgtggtgggtagtaatactatcattgaagttaatggcaaaagggtcataggaaggcagtatccttggagtgttgctgaagttgaaaatggtgaacattgtgattttacagttttaagaaatatgttgataagaacacacgcaggacttgaaagatgttactaataatgtccactacgagaactatggaatcagaaaactggcagctgtgacttatcatggagttgataacaagaagaataaagggcagctcactaagagccctctggcacaaatggaagaagaaagaagggagcaagtagctaaaattaagaagatggagatggagatggagcaggtgtttgagatgaaggtcaaagaaaaagttcaaaaactgaaggactctgaagctgagtctgcagatgtggatcctgactcctgagagaagtagctcaccgtgacgaagctgcgtttgcttttatcgatttgcaaatcaaagaagggggacatattgggagaaggccccccaaaatctggccataaactggccacaaaactggccataaaatctctgcagcactgtgacatgctcatgatggccataacgcccacgctggaaggttttgggtttaccggaatgaaggcaaggaacacctggcctgcccagggcagaaaaccacttaaaggcattcttaaaccacaaacagtagcatgagcgatctgtgccttaagggcatgttcctgctgcagataactagccagacccacccctttatttcaggccatcccttcatttcccataagggatacttttagttaattgaatatctatagaaacaatgctaatgactggtttgctgttaataaataagtgggtaaatctctgttcggggctctcagctctgaaggctgtgagacccctgatt

SEQ ID NO: 77826 - DNA, 1628 bp, Homo sapiens
tcttccaggatcgcgcattagcggacgctggctacgggtggccgggcgggatgtaaccggctgctgagctggcagttctgtgtccccaggcttcggcccggccgccgccgcacataaactgcgaggaggagctttacgacttctcggtcttcggggccgggcgcagcaagggccagactctgcgctagcaggcgctgcgcgccaaccggccggcccctgtcgcagaaggtgcaaccgatcgcactgtcgcgcagaagctcctcaatggccagcgccagctgcagccccggctgcccactcgcctcacctgagcctgggtggaacaatccaaagttttaatcaaagaaggtggtattcagttgctgcttacaatagttgataccccaggatttggagatgcagtggataatagtaattgctggcagcctgttatcaattacattgatagtaaatttgaggactacctaaatgcagaatcgcaagtgaacagatgtcagatgcctggtaacagggtgcactgttgtttatacttcattgctccttcaggacatggaccgttacataactgaagactcccaccttcaggcaggattgggtagtacatgtttgtaactacctggcattgccttttgttgagacttaaaccattggatattgagtttacaaagcatttgcatgaaaaagtgaatatcatcccacttattgccaaagcagacacactcatgccagaggaatgccaacagtttaaaaaacagataaagaaatccaagaacataaagttaaaatatatgaatttccagaaacagatgatgaagaagaaaaaaaacttgttaaaaagataaaggaccatttacctcttgctgtggtgggtagtaatactatcattgaagttaatggcaaaagggtcataggaaggcagtatccttggagtgttgctgaagttgaaaatggtgaacattgtgattttacagttttaagaaatatgttgataagaacacacgcaggacttgaaagatgttactaataatgtccactacgagaactatggaatcagaaaactggcagctgtgacttatcatggagttgataacaagaagaataaagggcagctcactaagagccctctggcacaaatggaagaagaaagaagggagcaagtagctaaaattaagaagatggagatggagatggagcaggtgtttgagatgaaggtcaaagaaaaagttcaaaaactgaaggactctgaagctgaggaactgatttcatctgaaattgaagagacaatcagagaaaaactatagaccactcatgatggttgttatatgtgcttggctgggccatgggtcccagtgtttggtgaaacacagcagcagatgtccctcacacacatgccctcttggttctgtttctttgaagaaccccaggaaaacacacaaaggaaaaacaactcgatagacagaagattcttcaatgacaacaatggaagccatcttcaccattcaactaaacttgaatgggatattatcaaacttaaaaaaaaattatcaactgatcgtgtaatcagtttcatcttttaagacaggaaatgaaataaagtatttacagatgaatgtaaaatgaacttatca

SEQ ID NO: 77827 - DNA, 1114 bp, Homo sapiens
cgatgagccggccataattggaagtggagtgtctctacttggacccaccaaccctgctcctatggctccacccagaagccattcagcctagaggacagctctgaccccccctgtgatttcatacaatcagcagcaagtaactgttacctcaccatccccaccccttctgccagactgcctttgaaaaacctctaacctgtgagcacgagatgattccagaacaaactctgtctcccatgtggcatgaccagccttgggtctcttaaactttttctccactataatgccatggtctttatgcagcaggcaggaagaattcaggtggttataattccgtatgtgctttttgaacatttttctactgggctattgctctcttcataatgatttttttaacttctctctataaggaactgatttcatctgaaattgaagagacaatcagagaaaaactatagaccactcatgatggttgttatatgtgcttggctgggccatgggtcccagtgtttggtgaaacacagcagcagatgtccctgtgagtagatgttgctttgaaggtatcttttagatgtgatgaacatttgtcatcagtagactttgagtaaggcagatagcccgtcacaatgtggatgggccttatccaattagttgaaggcctttgaaaaaagactgagatcccaaacgaagaaggaattctgcctccagacagccttccaactcaagtagcaacataacctcctccctgcggctctagcctgctggcctttcctatagacttcagacttgccagccccacaatcatgtaagccaattccttaaaataaattctctgtcctgtttttgccccctctctctttctgacagcacacacatgccctcttggttctgtttctttgaagaaccccaggaaaacacacaaaggaaaaacaactcgatagacagaagattcttcaatgacaacaatggaagccatcttcaccattcaactaaacttgaatgggatattatcaaacttaaaaaaaaattatcaactgatcgtgtaatcagtttcatcttttaagacaggaaatgaaataaagtatttacagatgaatgtaaaatgaacttatca

SEQ ID NO: 77828 - DNA, 1882 bp, Homo sapiens
aaagacaaggtcttgctatgttgcccaactggcctcaaactcctgagctcaaagtgatcctcccacatgctcctcccacatcacatcactataggcacacaccactgcccctggtttattttgaacagttctttaatttttaggatattgtttcaagttactgtccttattgacaattttcccaccagtgacccctgtaccttgttcccagctctctctgtcatgcccaggcaactttcagttgctgagttgaggctttagaacttacataccccttaaaaataggcaccagagaaattgatttgcatctctcttttgtagtttacctctctactcccaagtaatattcctgtttgtgatacattctttaaaaataaaagtaaagaatcttaaagttcttggctccctttttcattttggttaccttaagatttttttctaaagtgattcccccttcacttacaccactgaattttttaaatgtattatataataaatatattttttaccaataatgagaaaatgtgtgatttcccctttcaaaatttcaaagttgtttccggagagctcattttagttaggttgacatctgtttctgaggattaaactacagtaaggtaataatatagtacacttctctgtcatgcccttacattgagtactatgttagtgttaaatctcaaaaaaattgatctgagctgttttgcatttcccctcccttgtttttaccccccaagttcctgtgaaatattttttgaaaagactaggcttagtgaaaatataatatttgcggtctatttttttcttacagttgaaaatggtgaacattgtgattttacagttttaagaaatatgttgataagagaacacacgcaggacttgaaagatgttactaataatgtccactacgagaactatggaatcagaaaactggcagctgtgacttatcatggagttgataacaagaagaataaagggcagctcactaagagccctctggcacaaatggaagaagaaagaagggagcaagtagctaaaattaagaagatggagatggagatggagcaggtgtttgagatgaaggtcaaagaaaaagttcaaaaactgaaggactctgaagctgaggtacagcggaccttcctggcatcagaaaaaggcctccagaaaaagagacacaggaactgatttcatctgaaattgaagagacaatcagagaaaaactatagaccactcatgatggttgttatatgtgcttggctgggccatgggtcccagtgtttggtgaaacacagcagcagatgtccctgtgagtagatgttgctttgaaggtatcttttagatgtgatgaacatttgtcatcagtagactttgagtaaggcagatagcccgtcacaatgtggatgggccttatccaattagttgaaggcctttgaaaaaagactgagatcccaaacgaagaaggaattctgcctccagacagccttccaactcaagtagcaacataacctcctccctgcggctctagcctgctggcctttcctatagacttcagacttgccagccccacaatcatgtaagccaattccttaaaataaattctctgtcctgtttttgccccctctctctttctgacagcacacacatgccctcttggttctgtttctttgaagaaccccaggaaaacacacaaaggaaaaacaactcgatagacagaagattcttcaatgacaacaatggaagccatcttcaccattcaactaaacttgaatgggatattatcaaacttaaaaaaaaattatcaactgatcgtgtaatcagtttcatcttttaagacaggaaatgaaataaagtatttacagatgaatgtaaaatgaacttatca

SEQ ID NO: 77829 - DNA, 1567 bp, Homo sapiens
tgatcatggctagctgtttcatgtgtacactcgtgactacgaactcctagtcatgacgaagtaaagtacgaatcttaaagttcttggctccctttttcattttggttaccttaagatttttttctaaagtgattcccccttcacttacaccactgaattttttaaatgtattatataataaatatattttttaccaataatgagaaaatgtgtgatttcccctttcaaaatttcaaagttgtttccggagagctcattttagttaggttgacatctgtttctgaggattaaactacagtaaggtaataatatagtacacttctctgtcatgcccttacattgagtactatgttagtgttaaatctcaaaaaaattgatctgagctgttttgcatttcccctcccttgtttttaccccccaagttcctgtgaaatattttttgaaaagactaggcttagtgaaaatataatatttgcggtctatttttttcttacagttgaaaatggtgaacattgtgattttacagttttaagaaatatgttgataagagaacacacgcaggacttgaaagatgttactaataatgtccactacgagaactatggaatcagaaaactggcagctgtgacttatcatggagttgataacaagaagaataaagggcagctcactaagagccctctggcacaaatggaagaagaaagaagggagcaagtagctaaaattaagaagatggagatggagatggagcaggtgtttgagatgaaggtcaaagaaaaagttcaaaaactgaaggactctgaagctgaggtacagcggaccttcctggcatcagaaaaaggcctccagaaaaagagacacaggaactgatttcatctgaaattgaagagacaatcagagaaaaactatagaccactcatgatggttgttatatgtgcttggctgggccatgggtcccagtgtttggtgaaacacagcagcagatgtccctgtgagtagatgttgctttgaaggtatcttttagatgtgatgaacatttgtcatcagtagactttgagtaaggcagatagcccgtcacaatgtggatgggccttatccaattagttgaaggcctttgaaaaaagactgagatcccaaacgaagaaggaattctgcctccagacagccttccaactcaagtagcaacataacctcctccctgcggctctagcctgctggcctttcctatagacttcagacttgccagccccacaatcatgtaagccaattccttaaaataaattctctgtcctgtttttgccccctctctctttctgacagcacacacatgccctcttggttctgtttctttgaagaaccccaggaaaacacacaaaggaaaaacaactcgatagacagaagattcttcaatgacaacaatggaagccatcttcaccattcaactaaacttgaatgggatattatcaaacttaaaaaaaaattatcaactgatcgtgtaatcagtttcatcttttaagacaggaaatgaaataaagtatttacagatgaatgtaaaatgaacttatca

SEQ ID NO: 77830 - DNA, 2002 bp, Homo sapiens
aaagacaaggtcttgctatgttgcccaactggcctcaaactcctgagctcaaagtgatcctcccacatgctcctcccacatcacatcactataggcacacaccactgcccctggtttattttgaacagttctttaatttttaggatattgtttcaagttactgtccttattgacaattttcccaccagtgacccctgtaccttgttcccagctctctctgtcatgcccaggcaactttcagttgctgagttgaggctttagaacttacataccccttaaaaataggcaccagagaaattgatttgcatctctcttttgtagtttacctctctactcccaagtaatattcctgtttgtgatacattctttaaaaataaaagtaaagaatcttaaagttcttggctccctttttcattttggttaccttaagatttttttctaaagtgattcccccttcacttacaccactgaattttttaaatgtattatataataaatatattttttaccaataatgagaaaatgtgtgatttcccctttcaaaatttcaaagttgtttccggagagctcattttagttaggttgacatctgtttctgaggattaaactacagtaaggtaataatatagtacacttctctgtcatgcccttacattgagtactatgttagtgttaaatctcaaaaaaattgatctgagctgttttgcatttcccctcccttgtttttaccccccaagttcctgtgaaatattttttgaaaagactaggcttagtgaaaatataatatttgcggtctatttttttcttacagttgaaaatggtgaacattgtgattttacagttttaagaaatatgttgataagagaacacacgcaggacttgaaagatgttactaataatgtccactacgagaactatggaatcagaaaactggcagctgtgacttatcatggagttgataacaagaagaataaagggcagctcactaagagccctctggcacaaatggaagaagaaagaagggagcaagtagctaaaattaagaagatggagatggagatggagcaggtgtttgagatgaaggtcaaagaaaaagttcaaaaactgaaggactctgaagctgaggtacagcggaccttcctggcatcagaaaaaggcctccagaaaaagagacacaggtactagcaattccaaattatccagagcccttctaagttgtaagatctgaaagaaatgtctgccatctatattctcagccacacttagtttcttaatctgcaagatggaattaataatagtacttactttatgatgctgttgcagaaattcactgagttgctacacgccaaacactgagaacccagctgggcatataataagcattctattgcatggcattattgcatcatttttacttctattactgctactgcttgtaactgcttgtaactgtttgtgcttttttgatatgaaagtccaccatcagggagcactgtagtggaaaaggtattaggccaggcatagcctttagttctctggccttgggtccttcatctgtgatattcagttaacaatacctagccagtaggggtgttaaagattaaataaatgtgagaatgtgcctgttgcttaatcttcctcaaagggttatggactctcagagccagaagaaggtcatctctcctttgctcctcgtatgctgggatctgccacatcaatggcaacagctgggcctccagaatttgctccagggtgtttggaagtcctgacaccctcctgatcttctctgtaacatgcacactttggcctgtgtcagtttgctggaaccacatcaggccggccctcttcctgggacaaaattctttctttttctttctttctttttctttctctttctttctttttctttctctttctttctcttttcccttccttccttccttccttccttccttccttccttccttccttcccttttcttttcttttctttctactgtgac

SEQ ID NO: 77831 - DNA, 1067 bp, Homo sapiens
aaagacaaggtcttgctatgttgcccaactggcctcaaactcctgagctcaaagtgatcctcccacatgctcctcccacatcacatcactataggcacacaccactgcccctggtttattttgaacagttctttaatttttaggatattgtttcaagttactgtccttattgacaattttcccaccagtgacccctgtaccttgttcccagctctctctgtcatgcccaggcaactttcagttgctgagttgaggctttagaacttacataccccttaaaaataggcaccagagaaattgatttgcatctctcttttgtagtttacctctctactcccaagtaatattcctgtttgtgatacattctttaaaaataaaagtaaagaatcttaaagttcttggctccctttttcattttggttaccttaagatttttttctaaagtgattcccccttcacttacaccactgaattttttaaatgtattatataataaatatattttttaccaataatgagaaaatgtgtgatttcccctttcaaaatttcaaagttgtttccggagagctcattttagttaggttgacatctgtttctgaggattaaactacagtaaggtaataatatagtacacttctctgtcatgcccttacattgagtactatgttagtgttaaatctcaaaaaaattgatctgagctgttttgcatttcccctcccttgtttttaccccccaagttcctgtgaaatattttttgaaaagactaggcttagtgaaaatataatatttgcggtctatttttttcttacagttgaaaatggtgaacattgtgattttacagttttaagaaatatgttgataagagaacacacgcaggacttgaaagatgttactaataatgtccactacgagaactatggaatcagaaaactggcagctgtgacttatcatggagttgataacaagaagaataaagggcagctcactaagtaagtatatatttttttctccaaaaaaaggtattctttctgtagtcagtaatcatattgtttcattttcattaaatt

SEQ ID NO: 77832 - DNA, 474 bp, Homo sapiens
aacaaaatggagaaatttctacaagcaagcactgtttacaataaaataatatagacttcaatacataagtgcttggacatagtgtattaggtatgacagcataatagagtacttacaatgaattattaaagttataatgaacaagtgtgagttgggaaaaataaaattataagccattccatacaggtggcataagaacactaaaaatgagagtttggggtggatgtatgcacaaaaactagtgttaggataataataattgaccagacttatttgtgtatgaatgaaaaagagggaaataacctttactgaactaaagacatgcctggataaattacacacagttaaaggagagaaaattagggaatgtgatatttttgctaacaggttgggccttatttataatgtagtgtcaaggaaactcctagcgtcgcaacattgggcagggtaatgacaaaacatcccagcagacat

SEQ ID NO: 77833 - DNA, 304 bp, Homo sapiens
ttaatataagaatccacagagcagtagtttgatagatatctgagaatagtaggaaaaaaattgggtaatcccaaaataaatcagtgatttcagtatgaagttttctcaacataaatctgctataattaaaaattacaggccttcaggaagtgtcgagtctgggacgcccagcgcgggcccgagcagggggaagggaagcgcagctcggtccgcgtgggtggaggggacgtgaagccgccctgagatgatggttgaggaagggctctacggctcccaagctaggccaaatgcctccggcggccgc

SEQ ID NO: 77834 - DNA, 1039 bp, Homo sapiens
  misc_feature (19)..(19): n is a, c, g, or t
ctcgtccctatatcttgtntagaacacacgcaggacttgaaagatgttactaataatgtccactacgagaactatggaatcagaaaactggcagctgtgacttatcatggagttgataacaagaagaataaagggcagctcactaagagccctctggcacaaatggaagaagaaagaagggagcaagtagctaaaattaagaagatggagatggagatggagcaggtgtttgagatgaaggtcaaagaaaaagttcaaaaactgaaggactctgaagctgaggtacagcggaccttcctggcatcagaaaaaggcctccagaaaaagagacacaggaactgatttcatctgaaattgaagagacaatcagagaaaaactatagaccactcatgatggttgttatatgtgcttggctgggccatgggtcccagtgtttggtgaaacacagcagcagatgtccctgtgagtagatgttgctttgaaggtatcttttagatgtgatgaacatttgtcatcagtagactttgagtaaggcagatagcccgtcacaatgtggatgggccttatccaattagttgaaggcctttgaaaaaagactgagatcccaaacgaagaaggaattctgcctccagacagccttccaactcaagtagcaacataacctcctccctgcggctctagcctgctggcctttcctatagacttcagacttgccagccccacaatcatgtaagccaattccttaaaataaattctctgtcctgtttttgccccctctctctttctgacagcacacacatgccctcttggttctgtttctttgaagaaccccaggaaaacacacaaaggaaaaacaactcgatagacagaagattcttcaatgacaacaatggaagccatcttcaccattcaactaaacttgaatgggatattatcaaacttaaaaaaaaattatcaactgatcgtgtaatcagtttcatcttttaagacaggaaatgaaataaagtatttacagatgaatgtaaaatgaacttatca

SEQ ID NO: 77835 - DNA, 1682 bp, Homo sapiens
tcaagtatctgagccagatgctgcgggacctgcccagctgcccgtgtgcctacccactggaggccatggacagccctgtgagcctacaggacgagcaccagggccgcagcttccggtggagggatgccagtggccctcgcgagcgcctggacatctaccagcccacggcgcgcttctgcctgcgttccatgctgtctggggagagcagcacactggccgcccagcactgctgctatgacgaggacagccggctgctgacccgtggcaagggcgccggcatgcccaacctcatcagcaccgacttctcacctaagctgcacttcaagttcgacacgacgccctggatcctgtgcaagggggactggagccgcctccacgctgtgctccctcccaacaacggccgagcctgcaccgacaaccccctggaggaggagtacctagcacagttgcaggaggccaaggagtactagtgacggggttgctgaacagacactgcagggagagggcaggcggctgctgctgttgcacgggagaactttcctggtagggccctcacccgcccctgcccagacagggtgaggaaagggctcccccagtgaggttggtccgaggctgtgtgccctctgccagcgaccccgaagcagatatctcagtggggttagtgagaaggttgaagggtatgtagggcccagggtgggtgtccctgggagccctggaaatgtgcatatgtgcatgtgtctgccggggcctccctctgctgcctgctgggaccctggccactcatttttctcctccttgggagctgggctcttctgccctggctctgcacataagtgttagccagcagctccagaaaaatcccgattcccgggatctgccacgagtcactcctactccaccctgatggccagcagaggaagggccactcttctcatgggcacagccatcctttgccgggggggcatccagcccgggtggccacccctccttatctctgggtggtgcacatgcccttctttccccactccctgccacgagccactgcacaggaggctatctgtagccccaagctgcctttctgttggacaccaactttagtcttgggctgcaagccagcccagctgaggcgaagtggactccaggcagggaatgggttgcccaattctggtccctttcctttgctcagccccctctgttctgctgattgtagggatgtgcagggctgggagttggcactccccccgagtggggaggtgacagcttgtcacagtagccaggcttgggtgggttcagcactagctcgggacggtgtgtcacacgtctatagtaaaccagttctctgggaggggaaaaaagccctgatttattgcatttgggcagcttctgtggtgtaaattctcccagcagtgtcccatgtcatgctgccagcatcactgaatgcactgaactcagagttgggaagagatgcacataatcgctctcccggcacacctcatgcctcttccctgcctccccattcccctggctgcacttccttgccttctatggggttgaaatgttgaagtctcaactgtctctgttcacaagagccaccaaaagttaggggacttcagtcctagcccccagatggccgccctgaagctctctgggctcctcagcaataaagcactttattttcaaat

SEQ ID NO: 77836 - DNA, 408 bp, Homo sapiens
ctcccaaagtgctaggattacaggcttgagccaccagcctagccataaatagtttttttaacgtagcttacaatttagtagaacttagattctttttaatcagcatattgctgaccagttttatgaaggactctgtgctgttcactatggtagtcataagccacatgtagctattaaaattaaataaacttaagttcatgaccagaatggccaacatggtgaaaccctgtctctactaaaaattcaaaaattaatcaggcgtggtggcaaacacctataatcccagctactcaggaggctgaggcatgagaatcacttgaacctgggaggtggagattgtagtgagctgaggtcattccactgcactccagcctgagtgacagtgtgacactccatgtcaaaaaaaaa

SEQ ID NO: 77837 - DNA, 401 bp, Homo sapiens
gaggaaacaatagggcagaggaaacaatcagatatgcatttgtctcaaatgcatataatattcagtcatgagcctcagagggatgattgagttccacaaggaaattccttgtgggcaaattggaggaaagtatgtcgctttttaaaatctttgtagctatcttatttaggaataaaatggagccaggtgcagtggctcacgcctataatcccagcactttgggaggccgaggcgagtggccttatgcaggcttcatgcaggacaggaggtagccctgagctggtaggatttggacagatgaagcaaatgagtgaaaggtcattccaagtcaagaggtcaggagttcaagagcttgtgctcaggaattagagaccagcctaggtaacatggcgaaacccctt

SEQ ID NO: 77838 - DNA, 740 bp, Homo sapiens
aaataatccagtaagtaacgttccaaagcttcatcaaccctgtgccaaactttaacagtggttgaatcttccctggagcagcaaaatctgacactcaacaacaggagaggcagaaggagcagctgccaggagcaatgtacctaccccatcgctttatcttgcaactgctggcaccatccccttcactttcaggaaccattctacatcaaactctgctttccaagaacttttcctctacacattccattctcctccccctataccataaagcttctggctaatgttcatggcatgaatgatactgccttcaaatggcaaagaatagcactttagtatcagacagacaggttcaaatcttagttccatgactgactagcttttgttccctggagcaaattacttaacctgttttgcactctcaattttctacatataaaagaacgctagtgctcacttcacagtttttagaagatgggagaaataaattcagtgcccaagtgtttactcagcaaatacgtttttcttcccttgtgcaccaaaggaaaaaaaactgagggtatcatataaaatttgggagaagggagaggccatagcatgaccaggtcttttttaaaagttttatgttcataataaaagtcatgaaacaagagaatctaaaggtcttagcattttagacttcactgtcaacaggaaaacttccagaaatcatacaaaaaggatgaacatacacaggcaagctt

SEQ ID NO: 77839 - DNA, 1719 bp, Homo sapiens
ccaaaggacttctatgatgaccacgtcttaacccccaaatctaccatcaaataaattggacgtgataaacatgcatgtgagattcttaaattcggatgccattctcagcctatcttatgcctgcttggtgcaagaaacatgagtcttagggtcaagtgaacaggggctggaatcctggctctgccccttatttactacaggatcttgtacaagtcacttcccctctttgtctcagactcttcattcataaaatacaaatatcaatcccttcctgccaggctgttttcagagtcaaggatatgtatataaacactgaccagtgtttctggtacatggaaaacactctggaaatgccaattctgtgaacactcagtaagggcttgaggttctgttcatcgtctgagaccacaaagaatggaaatagaagggttccaggctggttcatagcacaggccattctccatttaaattttaaattaaaacaaacatatgaatgtaaaaactgtcaacactgcacaaataacttgaaatcttagaaacataaatattgaatgaactgaatgaatacagaaaaagtattatttgaaaagtgaggtggaatgtcagacttcaataatgtaaggtataatttaatgctgatacaaagttagtaccattaagtataaaaaaaaagaacccttttcttaaaataagaattaatatttcctagagactcttctgagtaagatttctacgacctcctcttggtgattaaaacaacaacatcaaagtcctaaaatactgtccaagaatgagaaattaaaataatttgaaaacacagaaaattcatgtcttaaaatcaaagatttaagaaggaattcctgggcaaggtattttcctactacatctgtggattcattttaaagttgataataatccagcaggaatgagaaatcagtgtttcttaatgatgccaaataagtgaaaaatgctggatataccacataaccttttggaggacataaggcagtagattctctaaagcaaacagcggaagtgtaagggagattgtgcgatgtagtttagaaggagggttttctcccagaaattggctgaactagatatgatgtcatatcttagctctgccactgttgagctagatgacttttaacaagttgcttctctctgagtctctattaccactggtggtccaaagaacacattcatactaaaagctaaagaacagacagcacttaaaggtaagaatctggatatgccagagggttctccatcctgtctctccaatacctcaccaccacaaaatgttttacaggactgctgaagcagacagacggattagacagataaataaatagataatgaatgaatggatgaatgaatgattctgataaatcacaaaagctctccagaggaaaggttcctcaagaacctcagcagatggtactgggttcttactgaatgctaatcaagcagaaccttttttccagtcattcatctaatcaatattaagcttctaatatgtatcatgtacagtattagacacaggttgaccaaatatattacctgccttcatggagctaacaagctataaactgggataaccatgggccagaagccctatcattcaagaaatggcaggggccagcgacggtagctcacacctgtaatcccagcactttgggaggcaaagctgggaggatcactagagcccaggagttc

SEQ ID NO: 77840 - DNA, 494 bp, Homo sapiens
tctgttaggattttattttaatattcatcttggattccaactagatttcactttttttaagtgattgctctagtgattacaatatacctccttaacttttcagtttgtttacaggtgccctttatttttattttgttgttgttgttgtttttgtattttttttctttctttttgagacggagtctcgctctgtagcccaggctggagtgcagtggcgcgatctcggctcactgcaagttccgcctcccgggttcacgccattctcctgcctcagcctctggagtagctgggactacaggcgcccgccaccatgcccggctaattttatgtatttttagtagtgacggggtttcaccgtgttagtttacagtttatattgtatcacttcatgtaaaatatagaaaacttgaaagtatataatcccatattccctccctgtcttttatgccatagttgtatgtaatactctacacattttgtaaatcccacaattt

SEQ ID NO: 77841 - DNA, 438 bp, Homo sapiens
aatctgtgaacatatatttttatttatcttaaatacctaagagtgaaattgttggttcatatgtggttatatattcaactttgtaagaatctaccaaaatgattttccaagtatatgtataatgttatggtcatcagaactacatgatagttagagttggttaacatactcactgcaatggattgacttttctgtgattcagctatcccactcttaggcgtatacccaagagaaactcataatgtccttgtgtgcagcttgtatgctaatgattttagtagtattttttgtaatagccaaaaggtggaaacaatgaaaactttcatgaaatgattaatgaattaacaaaatattatatatctatatattatcattaatcaatgaaaagaatgaagtggtatacaagaaacaacacagataaaccttgaaagtatacta

SEQ ID NO: 77842 - DNA, 495 bp, Homo sapiens
acaattccttggtacccacaaatatccagcctacatccaacttctcccactttctccaaacaaaaggttttttataggtttttcaaacccagatcgcatcaaggttgattcactaagactctttggtctcttttagcctcaaaacactacccaaccttttctttggcttgttttatcatgacataccaccttgtgaaaaccaggctccaatcctggctgtaccattcacttagtctgttcccttggcttgtatttaagaactgaactttagtttctccgtctgactttcctcatatatcatcctcattttacaatctcactatgtgtattagaagaacatccaattaccacgtgcctgtggttgatgattccaagtgggttcagtgctaatcagtcaggaggtgcactgcaggctgtttaccttgggtctgattagcataacattcttgttcctcatgggcttggccagttatcttttcataaggagatcccagc

SEQ ID NO: 77843 - DNA, 436 bp, Homo sapiens
gtcatgcatctgagaggctgccatgatttctccccaaaacacattggcaggtgtaaaattattgaatgaacccatcccacatgtgggctgtgtttctggctgggtttgacccacatgcatgtctgtgggctgctctgtctagactcttcaatattccagccacattttgtgccttagaatgaaattgctgtcgagatattgatctccgtttttgtcggggtgcaggaattttattctatgttgtcaggatcccctctggatggtgtaataatattgtgagatagttctttagcatatctttaaatcttcatatttattttgaaaaaattagaaattttagaaatatgcattcattttttgcaccatctagaattaacaactgatagtattttgacttattggcttccttttttaaataaaaaattaaaatattaca

SEQ ID NO: 77844 - DNA, 1024 bp, Homo sapiens
gggtgcactgctcatcttcgcgctcctggccgccgcggtcgccagcgactactggtacatcctggaggtggcggacgccggcaatggcagcgcctggcccgggcgcgcagagctgctctcctcgcactcggggctctggcgcatctgcgaagggcagaacggctgcatcccgctggtcgacccttttgccagtgagagcctggacgtctccacctcggtgcagcacctcatcttgctgcaccgtgcagtcattgtggtcctgcccctgagcctggtccttctcgtgtgtggctggatctgcggcctgctcagctccctggcccagagcgtgtctctgctgcttttcaccggctgctacttcctgctggggagtgtcctgacactggcgggggtcagcatctacatcagctactcgcacctggcctttgcggagacggtgcagcagtatggcccgcagcacatgcagggcgtccgcgtcagcttcggctggtccatggccctggcctggggctcctgtgccttggaggcattcagcggaaccctcctgctctcagctgcctggaccctcagcctgagccccccaatctgtggtcatctgagtccccagcaggtgggagggagagggggagactgaggcccagagcggcagagggacccacccagatcgcctggcgccagagagatgccgtctcaggccaaggcctccctggcctctgttctgtccactctccccgaagggcaggcttggtggagaagaggctgatgagagggcccgagagcccctccgatttgcaggggtgggggggcaaggagctgagcggatccagatgtacccctctgccccctcccttgttctcaaggcctgctaggtacttttcactgagcccttcccgggaagaagcaggcacccagttcttgtccttgtcctggccaggctgctgctgcttccggccccgaccttccttttgcagcaacccgggggaggtatgccactgtgagtgccctggtgggcacactgagctgg

SEQ ID NO: 77845 - DNA, 440 bp, Homo sapiens
gcctttaaggacaaatccagaccctcagataggggcagaaaagcaaagaatcacagattcttagagctaacatcttaaagggtctagaactgtccagatttccaatattctgcctcattgttttcatgagcagtcagaattacttagaaattccagacggttgaccaggcacggtggctcacgcctgtaatcccagcactttggggggccaaggtgggtggatcacctgaggtcaggagttcgagaccagcctggccaacatggtgaaacccccgtctctactaaaaatacaaaaattagccaggcatggtggcacacacctgtaatcccacctactcgggaggctgaggcaggagaatcacttgaacccaggaggtgggggttgcagtgagccgagatcacaccattgcactccagcctgggcgacaagagcaaaactc

SEQ ID NO: 77846 - DNA, 761 bp, Homo sapiens
tatttcattcacgggcgtgggctttagattggtaaattacatggccccttgtcttacaatttacaatcagtgggagaccgtggaaagagagggagagggagaccgtggggagagggagaccgtggggagagggagagggagagggagagggcttttgaccatttttaaacagggttatttgttttcttactattaagttgagttccttttatattttagatattaaacctttgttggatgtatactttgcaaatataatattttctcccattctataggttgtcgcttcactatcggttgtttcctttgctgtgcagaagctttttagtttgatgtagtttgatttgcccattgtttgcttttgttgcctgtgcttttgaagtcttgttcataaacttcttgcccatataaatgtaatgaagcatttctcctgtgtttcctctagcagtttcatagtttcaggtcttaaatctatgtctttaattcatcttgagttgatttgtgtatatggtgggagataagggtttaattcattcttctgcatgtggattttcagttttcccagcatcgtttattgaaagactgtactttcttttcaataaatgtgtgttcttggtgcctttgttgaatatcagttgggctgtaaatgtgtggatttattcctgggttctctgttccattgatctatctgtttttataccagtaccatgctgtttttataactttagttttatggcatattttgaagtcaggtattatga

SEQ ID NO: 77847 - DNA, 213 bp, Homo sapiens
ttttttttttgtatttttagcagagacaggtgtcactgtgttggccaggctggtttcaaattcctgacgtcaagtgatccgcctgcctcagcctccaaaattgttggtattacaggcgtgagccaccatgcccggcaagttcaatctttacaaaattgttttagaaacagggtctcactctgttgcccagggtggaatacagtggcatgatca

SEQ ID NO: 77848 - DNA, 627 bp, Homo sapiens
aacagtgctgttgaatttaaccctggtaaggtaacttgatagtttatcttcacaggtgtgagacaaagaacagaactcaatcatccctctgctcacctgagacaaatgcacatctgattgctttctctgccctattgtttatgtaaaaattcagattcactaagccagactaaggattcagtaaaaggctaatcagagactcaaaagaatgcaacaacttgcctcttagctacctatgacctggaagcccccacttcaagttgtcctgtatttccagactgaaccaatgtataccttacacatactgactgatgtctcatgtctccctaaaatgtataaaaccaagctgtgccccaaaaaccttgggcacatgtcatcaggacctcctgaggctgtgtcatggggtgtccttaaccttggcaaaataaactttctgaattgattgagacctgtctcagatactttgggttcacaacaggctacatctggccttgactggcttggactggttttgactggccacaattggtttatgtcagttttgactggtcttggccatttccaacaagtttacaccagtttcacctgaccacaaacggttcagactggctctgtctggctactatc

SEQ ID NO: 77849 - DNA, 459 bp, Homo sapiens
atcactctgtatgcctttgtgtactcatagtttatctcccacttataggtgagaacatgcagtatttggttttccattcctgagttagttcacttagaataatgtatccagctttatcaaagttgttgtaaaagacattatttcattccttttttatggctgagtagtattccgttgtgtgtgtatgccatgttttctttactcatttaacttatatatttttcaacaaaaacataattctttgaagaatgacagatgtctgatatcaatcaacatggataaaaggactaacttcttccatgtaataaacatgttcatatttctctgaaatgacagaataggccttttccccttttatggtccatttcactatggtgtttaattgatcagtcgagaatgaagaaaacattctttgaaaagtatctgccagaattttgtttagaatggtcagccttaact

SEQ ID NO: 77850 - DNA, 527 bp, Homo sapiens
cacagcccagcctcatcaatggggctcagaagtctctgcatgtcagtgtgattgcctccatgtctccagccttctgatgtggctccttgcaggtccctgactgcttggccaagcccggcccatgcatatgtgtagagtcttgccttgggccttctcgagtatcccttgatgttctgcccaggaggagggtcccccgtcttcaccgatggaataggaagaataatggcctcccagacacgcccatgccccagtccccagccgctgtgaggatgctgccttgcacggccacagggactttgcaggtgtgatgaagatatggaccccaagatgacagacctccctggattaagtgagcataatggaatcacaggcccttaaaagtggaagaagaaggcaaaagagtccaaaaggtgaagaggccaggtagacagaagctctgtgtgggagagggagctgagccaccactgcaggctttaaggtgggggaagggttgagaaccaggcccatgcctgatctctaggagctga

SEQ ID NO: 77851 - DNA, 836 bp, Homo sapiens
agcgcgtaaatcacaagtgaaaaacaccatcagcatgaaaagtaaaagactgaacctgagcctctgaataaaacctggatttgaaaaagcctaatttatatataatatatatttaagaaacatagaaaaacagcaaagataatttctctctagcatataacataggcaacaaaaacaaaaattgaaataaaaaatactgggcaccctcacaccatgttgtgacattcatgtttacacttcctgttgatatagattactaaagaataggaaactaacacaaataggtccacatgtaattaaggcatttttttcataatccagatcaaataagagtccatataaaaagcagttcttcttaaataaaagttcacattaaaaaattacatctcacaggaggaaatgaaccaacatgaggaattatcccaaaatagtggttgggactatgctaatgcccgtggcccaaatgtggcctgaggattatttttgtaaagatgttaattagcaatggttcttaaacttttaaagagttctaaaataaaaaccaaagtatataaaaaagagagaatatgtgatatacaacacttaaaatatttactctctggcattttccagaagaaaaaattgctgaccccaattaataaatatctatttgatagtctcagaattttctgacttctctggctgtttttcattgatgcagaaaaagtaattgataaaataaaatactactttattatgaaaatgttcggggccgggcacagtggctcatgcctgtgatcccagcactttttgggaggccgaggcaggtggatcatgaggtcaggagatcgagacca

SEQ ID NO: 77852 - DNA, 3549 bp, Homo sapiens
  misc_feature (2075)..(2075): n is a, c, g, or t
  misc_feature (2593)..(2593): n is a, c, g, or t
  misc_feature (2660)..(2660): n is a, c, g, or t
  misc_feature (2973)..(2973): n is a, c, g, or t
  misc_feature (3018)..(3018): n is a, c, g, or t
tcaaatgcccctttcattatgaaactcttttttaacttttaatttaagttcaggggtatgtgtgcagatttgttacataggtaaacttgtgtcatggggctttgttgtacaggttgtttcatcacccaggtattattttattttcattttagttttttaaatttctttttagaggcggggtctcactgtgttttgcccaggctggtctcgaactcctcctggtctcaagcaatcctctcgcctctgcctccccaagtgttgggattataggcatgagctactgcactcagcccaccatttgttttaaaaagggtggatcctatttgtataaaaagccatgtgcattttctgtgtacttgtctacacattaatttccaggctgggcgtggtggctcacgcttgtaatcccagcactttgggaggccaaggggaggcagatcatgaggttaggagatcgaaaccatcctggctaacacggtgaaaccccgtctctactaaaaatacaaaaacaaaattagcagggtgttgtggcgggcgcctgtagtcccagctactcaggaggctgaggcaggagaatggcatgaacccgggaggtggagcttgcagtgagctgagattgcgccactgccctccagcctggacaacagagtgaggctccgtcttaaaggaaaaaaatttctggaatgatgtccaataaatcagagagagggactagaagactaatgaggacagaagcttttattcttaacacctatattttgctaccatttatattgtcatcatatgcatataacattttaacatttaaaaactagtttaaacagaaatggttgccctggaatgtggcctgtgttctttcaagggaggccagcagtttctacagtggctgagatggtaccttcatctcacacacctacgcaggagtgcatttgtgctttgatgtggttgtcccttgaagaaggaagcagttctctttttcttttttcccttttccattataggatcagtcacttcttggggcattagtagtctcatttccagtggcatcttcccttggcaaaaggaatcccagataggacctcatctttctaaacaaatgctgttttgggtcctaaccatcccatgtttgctttgaatatgtttaagttgcctggaattatcaacaaaagaattaaatttattgtaggtcagggcatcttttgactcattgtataaaacattcactttaaatgtataccgaaatgtcctttaggccgggcgcagtggctcatgcctgtaatcccagcactttgggaggccaaggcaggtggatcacctgaggtcaggagttcaagaccagcctggccaacatggtgaaatcccgtctctactaaaaatataaaaattagccgggcatggtggcgggtgcctgtaatcccagctactaggggggctgagacaggagaatcgcttgaacttgggaggcggaggttgcagtgagccgagatcactccactgccctccagcctgggcaacaaagcaagactccatctcaaaaaaaaaaaaaaaaaaaaaaaaaaatgtccctcatacctaaaccttacctcttgctaatttgctgagggttcattttagataaaaggtgtttaggttttcatattatgtttgtaactgtatagctatgattcagtttcctaaatgaaaaaagaaactgttttaatgtacagactatttagatttgaaaagactgtgagagctttttcttttatagcaagacaagtcaagaatagaaggcacactgcgagagggatgtcttttgaaagaaaagaaacactactttttatattctcaaatcactgaagaaagctttagacataatttcaaacactagctcctgtttaattcagatgcacagaatgcattaaaaccacgagtgtagtggacgtgatttatacattctcttagcacaaatcagtacctatcttcactgtaattagacttttcttcctttctccttctcaaaagctacttttgaaaccttatgttttccctggacatattttctgtacttcataaaatagctcagttctgcaacnaactgcaaatatttgcaaaagggaacaaatgtaaaataaacgtcccctaatgcagtgtttggtgaagaaacatatgtctgacattagttggttaacctgaaaaatagtaagaaacaactctacttaggggaaagggggtagaattgagcccgtactgtgcaaatcaagagaaagctataatttacgcaatttttattaaagagaatacaagtgctgtaggcttggggtggtgctaggtcatatttaagcctaattgagctttttctatatcattagaaaaatgggccaagtttcctatattatagggtaaatacaacattttcttcctgcaaatattaaataccactggctttttaagacgtaaacatccaaatctcaaatgtctttattcatgccaatgcaatacaataaaaatattccccatatacacttaaatcactgcaagtaagccttagaatccccacaagtattattacttactatatctcagaaactttcacacacattatttcaaatanagttctcccaaaaaaaccctgcggagagatacctgtaaaccaaggctgagactagcctagacagttngttctttagacaacaggagtggagatttgaacccagctattgtgactcaagcaagcctagggcatgtttctgagatctctaaggtgtgcgctgtgaaaccggtggctcattttatgggttggatttccaaacacgactatcacaatcatgccaggaatcaatgactgacttcttgcctccgtggcctgaagttctcctctgcacctcctacctttttgccatttcagtgatgcaccaaagggtggagttgaagaacatcagttttgctgctgcttgttggcaatactctcaaaaaggcgtggggagggagagntgtaactcacccctgaagtcaagcctggagattacttgtcaggantgtcaaaagcatttgttaagcaaccttcttcctggcattttaagaagaaagccgcatacatagatcaaatcccttccttcagaaacctgtactctctgaacagagccttggaattcagcctagagaaagaatacttggtggttcatagaacttggttcacaaaagagtgcttgctgcccacgcattttgcacaatgactcccaaacacacagaatgcacattggcaacaattttacgcgtgtttccaaaagtgctgactggaattgaagggacacatttggcactttttttttttgaaatggggtctcactccagcctgggcgacagagtgagactatgtctcaaaaaaattaaattaaaattaaaattgagcctgatgtggtggcacatgcctgtagttccagctatgcaggaagttaagatgggaggatcccttgagcttgggagatcaaggctgcagtgagctgtgattgtaactactgcattctagcctaagaaacagaaagagacactgtctcaaaaaaaaaaaaa

SEQ ID NO: 77853 - DNA, 2567 bp, Homo sapiens
tcaaatgcccctttcattatgaaactcttttttaacttttaatttaagttcaggggtatgtgtgcagatttgttacataggtaaacttgtgtcatggggctttgttgtacaggttgtttcatcacccaggtattattttattttcattttagttttttaaatttctttttagaggcggggtctcactgtgttttgcccaggctggtctcgaactcctcctggtctcaagcaatcctctcgcctctgcctccccaagtgttgggattataggcatgagctactgcactcagcccaccatttgttttaaaaagggtggatcctatttgtataaaaagccatgtgcattttctgtgtacttgtctacacattaatttccaggctgggcgtggtggctcacgcttgtaatcccagcactttgggaggccaaggggaggcagatcatgaggttaggagatcgaaaccatcctggctaacacggtgaaaccccgtctctactaaaaatacaaaaacaaaattagcagggtgttgtggcgggcgcctgtagtcccagctactcaggaggctgaggcaggagaatggcatgaacccgggaggtggagcttgcagtgagctgagattgcgccactgccctccagcctggacaacagagtgaggctccgtcttaaaggaaaaaaatttctggaatgatgtccaataaatcagagagagggactagaagactaatgaggacagaagcttttattcttaacacctatattttgctaccatttatattgtcatcatatgcatataacattttaacatttaaaaactagtttaaacagaaatggttgccctggaatgtggcctgtgttctttcaagggaggccagcagtttctacagtggctgagatggtaccttcatctcacacacctacgcaggagtgcatttgtgctttgatgtggttgtcccttgaagaaggaagcagttctctttttcttttttcccttttccattataggatcagtcacttcttggggcattagtagtctcatttccagtggcatcttcccttggcaaaaggaatcccagataggacctcatctttctaaacaaatgctgttttgggtcctaaccatcccatgtttgctttgaatatgtttaagttgcctggaattatcaacaaaagaattaaatttattgtaggtcagggcatcttttgactcattgtataaaacattcactttaaatgtataccgaaatgtcctttagtgctgggattacaggcatgagccatgacacccggcctgtaattttctttaaagactgccactgggtggaacccactgggcccagtgagaactacggaaaagagacccattcttgccctcattgttagtgtccacatccggatttacctaaaccccacccaggtggcatttgcatagtaatgaaaaaccggtattttctagctgtgaatcacacttcaaatcctgagcggctgactgtcaggggtgcgtcaggcctgcttgctgggagaatggacgagctggttgtggagcgggcgggtcccgccacccgtgggctcagcactggactgctcccagaacattaaaggtctggctgatgttccatgccacatctggacatgaagacccatgtctgcccttctgtagaagggccaaagaagaaaggaggcatcacatgtttctgctgtggggggcccttccgagcagcagacaggagcaaggtacaggagtggcctgattctggggtttccctgccccccctggggtccctaaactgctgtgtgatatgtttctaactatctggacagctcacccaagagtcagttgttcccagtcgcttcttgctgaggataagccaaaagagggccgggggccaatctggtttctttcaagtgaaattatgcttctcaagcagagaatgattgcccacagcagttaaaccttgtttaatggtaattaaattgcttttcttcactttgaaaaatctcttaattttctgtacaaaggcaggaagcatttttctttgattctacaggatgtttctaagtatggtgtaatcagttcatcttaccttgccgggctctgaaagaatgagtgtgtgggatcagatttagaaatgcctcaaaggttagaaagccgagtgctgccgattaactcaagctcagatgaccaaaaaaaaaaaaaaaaaaaaaagctgcttttcccctcacttctccctctggttctgcctcagtactttgcttaggagtttctaaaagcaggcacagttgcctgcggggctggtgtgtgtcaccttcgcaaagtgcagatgaggtctggcatgtcccatcttgttcctgcctgactacaactctgcacacagacagtgttgatctggcttggagcccatagtggcaatccttggagtggaggcagcagagatctcagttcttcctagtgcttgagaagttaactaactgtctttcccatgaggaaaatgttttgagactgtagaagcagagaagagacttcgccaaagcccatagaaaataaaaagcaaaccctcaagcatgaaaatc

SEQ ID NO: 77854 - DNA, 183 bp, Homo sapiens
ctcaagccatccacctccctcggcttcccagagtgctgggattacaggcatgagccatgacacccggcctgtaattttctttaaagactgccactgggtggaacccactgggcccagtgagaactacggaaaagagacccattcttgcaagccgaaacccagcacactgcgccgtactagatc

SEQ ID NO: 77855 - DNA, 253 bp, Homo sapiens
ataatgcaaataacagtgcaattatcaacagtctgattaagaatatgtcttaggactttgaagaatacagtttcagtggagtaaactattttttgtgatctgtttacttatattatcctgactttaaacattttttagcataagaaaatagtaaaaaaatattttaatgatataaaatccttggctactagctaggagtcgctctgtgctatagtagaaaaatatggagactgggagctgtgtgatctatttt

SEQ ID NO: 77856 - DNA, 407 bp, Homo sapiens
cttttaggctcatctacagggccagctagagccctcgccgccatgtcatctccttggataacctttctttgcagtggccctcagctgcaaaagcctaagaacaaatccagaggaagctggcctccgaggaggaatgcacacggaaccaccctgtctccggggagcttggagttttagttttgtccaagctcgcagggcaaggctgcccactcatcttgcggagggacacagctaagaggggcttttgtggaggttctcctccaagcaaagatcctggtttgggctctgatctacacacaaaagtagcaggaccctgcagctttgttgacaaaacatttggaaaatgcacccatgccaccaggccacctgcctatttctagcaatcacttctggttgaattctttaaa

SEQ ID NO: 77857 - DNA, 587 bp, Homo sapiens
gatcttgttaaatttagattctgatttggtagatcttgagttgggtcagagataacaaaccctcaggtgacggtgaagttactggtcctgggaccacagtttgattagtaaggatatagggccttaagggccatgtaagactatataaatatgaaactattgaaatcaccaagggaatgagggtaaatagagaagaggaaagggctaagggctgagccctggcgcactccagcattaagaggatggcgagacaggaggagccagcaaagaagcctaagaaggcgtggccacaaagcgagaaggaaacccacagggcccatgaatgtaaataaatttcaggcaacatcagtcagtatagttttctgtgttttctccaggaagccaagtaaattgtttcatggaggaagaagtgatcaaccgtgtgaaatcttgcttgataggtcaagtaagaggaaagctaagaattgattattgagtttgacaacatagtggttattgacaagcaggtagctgggtagcgtgagggcaaaaggcttattggagtgggtttcaaagagaagagaggagagaaatcagagatagtgaat

SEQ ID NO: 77858 - DNA, 327 bp, Homo sapiens
ccagggttcacggccacccccactgccgtttcttgcacctgtactgtgagccttgcacccactgcaagctctgacagctttggctctcagggcctggccagcacctacattctgcagatgaggaagctgaggcttagtgagtaacttgcccagagtcacgaggttaggaagtggggtgtatcaggatgagattcagactctggtcctttttttttttttttttttaaacgagacggagtcttgctttgtcgcccagcctggagtgcagtggcgtgatcctggctcactgcaacctccacctcccaggttcaagcgattctcttgcct

SEQ ID NO: 77859 - DNA, 540 bp, Homo sapiens
agcacctctgtgcagcattccttcctccagggtatggcaggacctttctcaaatgaggatcttatggcccacaatcagaaaggcaggggaagattagaggagggcaggggaaggtcagagagagagattatattttctgaggtctgctcctgagacttaaagcactccaacattataacagaagactatgggagttatgccaacaaccatggatgaaaacatgttttatatataatatatatattatatataattatatattatgtattattatatataattatatattatatatattttatatatactcgcaagaggttaattcagaaaattgctactgtggttgctactttttgtcctttaacaaccaatttaaagtaaaattttgactgaaatagcaattgatttttgagaaatgtcagcaatcgcaatgataataattttttagccattatcccaaaggaaacgagtgatgttttcaaaatgtacttcaatccttcagcaataatcagataaataaatttcctgtaaaattataat

SEQ ID NO: 77860 - DNA, 362 bp, Homo sapiens
tagacacattggcacggtgactcacccctgtaatcccagcactttgggaggccatagtgggaagatcacttgagcccaggagtttgagaccagcctgggcaacatagtgagacaccccctccccccgccatcttaacaaaagaaaaagaaatttaaaaataaaaaataaaataaaataaaaataggcacatggttagattgctaagacatattactaggtggggaggaaaaaagaaagttgtacaatgtgatgtcattttaaaaattgatgatagatgccaggtctgatggctcccaagggaggatcgcttgaggtcaggagtttgagaccagtctgggcaacatagcaagaccccctctct

SEQ ID NO: 77861 - DNA, 327 bp, Homo sapiens
ttcattgacatagggcattatgtacgtgatatcagtgcttatgaagaattggtatccaagctgaatttattagtggaggatgaactgaagcaaattgctgaaaatattgaaagcattaatcagaacaaagctcctttgaaatatataggcaactatgcaattttggatcatcttggaagtggagcttttggctgtgtttacaaggttagaaagcatagtggtcaaaatcttttagcaatgaaagaggtcaatttacataacccagcatttggaaaggataagaaagatcgagacagcagcgtaaggaatattgtttctgaattaaca

SEQ ID NO: 77862 - DNA, 704 bp, Homo sapiens
ccggatccacttttcggcaaagtgacgtggacgtcaacagcaatggcggaaggagaagatgtgccgccgctgccaacgtcgagcggcgacggctgggaaaaagatcttgaagaagctctggaagcaggaggttgtgatcttgaaacgttgagaaatataattcaaggaagaccgctgcctgctgatctgagggccaaagtttggaagattgctctgaatgttgcaggaaaaggtgatagtttggcatcatgggatggtattttagacttgccagaacagaacactattcacaaagattgcctgcagtttattgaccagctttcagtgccagaggagaaggcagcagaattacttttggatattgaatctgtaattaccttttattgtaaatcacgtaacattaaatatagcacatcccttagctggatacatctactgaaaccattggtgcatcttcaactgccacgcagcgatttatacaactgcttttatgccataatgaataagtacattcccaggtaaaatatgattcagttattgtagtttttaaaagtgaatacaggcctggtttgctttgagctaaagttgctagatttactttggcggtaaagtaaaaggttcaaataattttgaggattgtttgatccataattgttattttatttttgtggttataaacattttttaaaagattctttagttaa

SEQ ID NO: 77863 - DNA, 3672 bp, Homo sapiens
ccggatccacttttcggcaaagtgacgtggacgtcaacagcaatggcggaaggagaagatgtgccgccgctgccaacgtcgagcggcgacggctgggaaaaagatcttgaagaagctctggaagcaggaggttgtgatcttgaaacgttgagaaatataattcaaggaagaccgctgcctgctgatctgagggccaaagtttggaagattgctctgaatgttgcaggaaaaggtgatagtttggcatcatgggatggtattttagacttgccagaacagaacactattcacaaagattgcctgcagtttattgaccagctttcagtgccagaggagaaggcagcagaattacttttggatattgaatctgtaattaccttttattgtaaatcacgtaacattaaatatagcacatcccttagctggatacatctactgaaaccattggtgcatcttcaactgccacgcagcgatttatacaactgcttttatgccataatgaataagtacattcccagggattgttcccagaaagggagaccatttcatctcttcaggttgctcatccaataccatgagcctgagctttgttcttatcttgatacaaagaaaattactccagactcctatgcactcaactggcttggaagtctttttgcatgttactgttccactgaagtcactcaggcaatatgggatggatatctacaacaagcagatccattttttatttatttcttaatgttaattatccttgttaatgcaaaagaagttattttaacacaagagtcagacagcaaagaagaagttatcaagttcttggaaaatactccatccagtctgaatatagaagatatagaagaccttttctctctggctcagtattattgcagcaaaacaccggcttcttttaggaaggataatcaccatctctttggtagtactttgttgggaattaaggatgatgatgcagatctgagtcaggctctttgtctggccatctccgtgtcagagatccttcaagcgaatcagctacaaggggaaggagtccggttctttgtggtggattgccgtcctgcagaacaatataatgctgggcatttatcaactgctttccacttagattcagacctgatgcttcagaatccatctgagtttgcacagtcagtaaaatccttgctggaagcacagaagcagtccattgagtctggctccatagctggtggggagcacctctgttttatgggcagtggcagggaggaagaagacatgtatatgaacatggtcctggcacactttttacagaaaaacaaagaatatgtgagtattgccagtggaggatttatggcactgcagcagcacctggcagacattaatgtggatggaccagaaaatggatatggccattggattgctagtacctcaggctcaaggagcagtatcaattctgttgatggtgaatctcctaatggctcaagtgatagaggaatgaaatcactagtaaataaaatgactgtggctttgaagacaaaatccgttaatgtcagggaaaaagttatcagttttatagagaatacatcaactcctgtggatcggcatgtgagcagcagtgacagagtgggcaagccttaccgtggcgtaaagcctgttttcagcattggggatgaagaagaatacgacacagatgaaattgacagttcttcaatgtcagatgatgatagaaaagaggttgtaaacattcagacttggataaacaaaccagatgtcaaacatcattttccttgtaaagaagtaaaagaaagtggacacatgtttcccagtcatctgttggttactgcaacacatatgtactgtttaagggagattgtttcacggaaaggattggcttatatacagtctcgacaagcgctgaattctgtagttaaaattacatccaaaaaaaaacatcctgaactcattaccttcaagtatggaaatagcagtgcttcaggaatagaaatcttggcaatcgaaaggtatttgattccaaatgcaggggatgcaactaaagccataaaacagcagatcatgaaagttttggatgctttggaaagttaatataaaagaaaattatataaaaagaaattaagacaaccaagagaaacatggacatatacctcctgactgaatactaactggagacctttcatttgctcatggggctgcttaaatagcaggtctaagaaagtgtaaattattataatcaatctgtggacagtaaactttttaaaaatttttcttctgcattttggttttataaaatgatgtattataaaggtcagttattaaattactttgaagtaactgaccctgtgcccttatggactaagtaagggtacagaatgcagttctgttttgaagagctgttttaagggaacatgcatcactttcgggttcaaaaacaactgtacacatacatatctgcagtgtcttcactgaaaattagagatagaattagttgaagagacttccttaattgctacattgttttactcactgagcaatatcagaaactaaaacatagattaataattcactcactgtttctattcttcttaaaaagagtgaaatctttttaatggaatggttgaagattcctgccaactcaaaatacagtacagctagtaaaatgttgaaacatcagtttctaaatcacctttgctccattagctaattttttggacactaaatgcttcaaagataagaaacttcatcctaatgatttctaaagagcagttaaaagcattaaaataagtaggtaggctgttaagattaaaattaacattttggggacagaattgtgtctgtaaaaatgtcattggttttattacaagtggattattttattcatattttaaaacaaatgtttaagccacattgatttatcctcattgaggattatggtctgtgaccacagtaatatccacttatataaatgccaaataatcagagagcttataaagtacaattgtttttgtcatcattttctgaatttctttctcttcttttggttttgtcctctcattgaagttccagtggtttgaaattagttttggacacattgtcttaatgtactgaaaattgctctgctgtattttgcagcgttcttcatttaatttataatggtccatattagacacatttggtaagagaagtccaggaacacatttagggccatggaatagtattttgtaaaatccatttgggaagttgcaatacccacaatctgacatgtcctaaaatgtaagggattatctctaaggggttgatgggagaaatatttagatgtaccctgttaacagccagtcattttgatttacttatggaaatcaagtgaataaaaggcaacataatttgggaaattttattctaatatctaataaaaacagtttgagtggttgaagacatctgcatgaaattgcacctaggtgcattacttgatataactctcccctaaaactgttgtaattgcattttttcccttttcttggcacccctttagaaatgtactgaagtctcatttttcacccatttcagccatgggacatttttcataatattaatgtaaagatgtttgtgttactgtttataaattacaattgtaaataaattactagtttgcccaaaactttg

SEQ ID NO: 77864 - DNA, 3560 bp, Homo sapiens
ccggatccacttttcggcaaagtgacgtggacgtcaacagcaatggcggaaggagaagatgtgccgccgctgccaacgtcgagcggcgacggctgattgctctgaatgttgcaggaaaaggtgatagtttggcatcatgggatggtattttagacttgccagaacagaacactattcacaaagattgcctgcagtttattgaccagctttcagtgccagaggagaaggcagcagaattacttttggatattgaatctgtaattaccttttattgtaaatcacgtaacattaaatatagcacatcccttagctggatacatctactgaaaccattggtgcatcttcaactgccacgcagcgatttatacaactgcttttatgccataatgaataagtacattcccagggattgttcccagaaagggagaccatttcatctcttcaggttgctcatccaataccatgagcctgagctttgttcttatcttgatacaaagaaaattactccagactcctatgcactcaactggcttggaagtctttttgcatgttactgttccactgaagtcactcaggcaatatgggatggatatctacaacaagcagatccattttttatttatttcttaatgttaattatccttgttaatgcaaaagaagttattttaacacaagagtcagacagcaaagaagaagttatcaagttcttggaaaatactccatccagtctgaatatagaagatatagaagaccttttctctctggctcagtattattgcagcaaaacaccggcttcttttaggaaggataatcaccatctctttggtagtactttgttgggaattaaggatgatgatgcagatctgagtcaggctctttgtctggccatctccgtgtcagagatccttcaagcgaatcagctacaaggggaaggagtccggttctttgtggtggattgccgtcctgcagaacaatataatgctgggcatttatcaactgctttccacttagattcagacctgatgcttcagaatccatctgagtttgcacagtcagtaaaatccttgctggaagcacagaagcagtccattgagtctggctccatagctggtggggagcacctctgttttatgggcagtggcagggaggaagaagacatgtatatgaacatggtcctggcacactttttacagaaaaacaaagaatatgtgagtattgccagtggaggatttatggcactgcagcagcacctggcagacattaatgtggatggaccagaaaatggatatggccattggattgctagtacctcaggctcaaggagcagtatcaattctgttgatggtgaatctcctaatggctcaagtgatagaggaatgaaatcactagtaaataaaatgactgtggctttgaagacaaaatccgttaatgtcagggaaaaagttatcagttttatagagaatacatcaactcctgtggatcggcatgtgagcagcagtgacagagtgggcaagccttaccgtggcgtaaagcctgttttcagcattggggatgaagaagaatacgacacagatgaaattgacagttcttcaatgtcagatgatgatagaaaagaggttgtaaacattcagacttggataaacaaaccagatgtcaaacatcattttccttgtaaagaagtaaaagaaagtggacacatgtttcccagtcatctgttggttactgcaacacatatgtactgtttaagggagattgtttcacggaaaggattggcttatatacagtctcgacaagcgctgaattctgtagttaaaattacatccaaaaaaaaacatcctgaactcattaccttcaagtatggaaatagcagtgcttcaggaatagaaatcttggcaatcgaaaggtatttgattccaaatgcaggggatgcaactaaagccataaaacagcagatcatgaaagttttggatgctttggaaagttaatataaaagaaaattatataaaaagaaattaagacaaccaagagaaacatggacatatacctcctgactgaatactaactggagacctttcatttgctcatggggctgcttaaatagcaggtctaagaaagtgtaaattattataatcaatctgtggacagtaaactttttaaaaatttttcttctgcattttggttttataaaatgatgtattataaaggtcagttattaaattactttgaagtaactgaccctgtgcccttatggactaagtaagggtacagaatgcagttctgttttgaagagctgttttaagggaacatgcatcactttcgggttcaaaaacaactgtacacatacatatctgcagtgtcttcactgaaaattagagatagaattagttgaagagacttccttaattgctacattgttttactcactgagcaatatcagaaactaaaacatagattaataattcactcactgtttctattcttcttaaaaagagtgaaatctttttaatggaatggttgaagattcctgccaactcaaaatacagtacagctagtaaaatgttgaaacatcagtttctaaatcacctttgctccattagctaattttttggacactaaatgcttcaaagataagaaacttcatcctaatgatttctaaagagcagttaaaagcattaaaataagtaggtaggctgttaagattaaaattaacattttggggacagaattgtgtctgtaaaaatgtcattggttttattacaagtggattattttattcatattttaaaacaaatgtttaagccacattgatttatcctcattgaggattatggtctgtgaccacagtaatatccacttatataaatgccaaataatcagagagcttataaagtacaattgtttttgtcatcattttctgaatttctttctcttcttttggttttgtcctctcattgaagttccagtggtttgaaattagttttggacacattgtcttaatgtactgaaaattgctctgctgtattttgcagcgttcttcatttaatttataatggtccatattagacacatttggtaagagaagtccaggaacacatttagggccatggaatagtattttgtaaaatccatttgggaagttgcaatacccacaatctgacatgtcctaaaatgtaagggattatctctaaggggttgatgggagaaatatttagatgtaccctgttaacagccagtcattttgatttacttatggaaatcaagtgaataaaaggcaacataatttgggaaattttattctaatatctaataaaaacagtttgagtggttgaagacatctgcatgaaattgcacctaggtgcattacttgatataactctcccctaaaactgttgtaattgcattttttcccttttcttggcacccctttagaaatgtactgaagtctcatttttcacccatttcagccatgggacatttttcataatattaatgtaaagatgtttgtgttactgtttataaattacaattgtaaataaattactagtttgcccaaaactttg

SEQ ID NO: 77865 - DNA, 3717 bp, Homo sapiens
ccggatccacttttcggcaaagtgacgtggacgtcaacagcaatggcggaaggagaagatgtgccgccgctgccaacgtcgagcggcgacggctgggaaaaagatcttgaagaagctctggaagcaggaggttgtgatcttgaaacgttgagaaatataattcaaggaagaccgctgcctgctgatctgagggccaaagtttggaagattgctctgaatgttgcaggaaaaggtgatagtttggcatcatgggatggtattttagacttgccagaacagaacactattcacaaagattgcctgcagtttattgaccagctttcagtgccagaggagaaggcagcagaattacttttggatattgaatctgtaattaccttttattgtaaatcacgtaacattaaatatagcacatcccttagctggatacatctactgaaaccattggtgcatcttcaactgccacgcagcgatttatacaactgcttttatgccataatgaataagtacattcccagggattgttcccagaaagggagaccatttcatctcttcaggttgctcatccaataccatgagcctgagctttgttcttatcttgatacaaagaaaattactccagactcctatgcactcaactggcttggaagtctttttgcatgttactgttccactgaagtcactcaggcaatatgggatggatatctacaacaagcagatccattttttatttatttcttaatgttaattatccttgttaatgcaaaagaagttattttaacacaagagtcagacagcaaagaagaagttatcaagttcttggaaaatactccatccagtctgaatatagaagatatagaagaccttttctctctggctcagtattattgcagcaaaacaccggcttcttttaggaaggataatcaccatctctttggtagtactttgttgggaattaaggatgatgatgcagatctgagtcaggctctttgtctggccatctccgtgtcagagatccttcaagcgaatcagctacaaggggaaggagtccggttctttgtggtggattgccgtcctgcagaacaatataatgctgggcatttatcaactgctttccacttagattcagacctgatgcttcagaatccatctgagtttgcacagtcagtaaaatccttgctggaagcacagaagcagtccattgagtctggctccatagctggtggggagcacctctgttttatgggcagtggcagggaggaagaagacatgtatatgaacatggtcctggcacactttttacagaaaaacaaagaatatgtgagtattgccagtggaggatttatggcactgcagcagcacctggcagacattaatgtggatggaccagaaaatggatatggccattggattgctagtacctcaggctcaaggagcagtatcaattctgttgatggtgaatctcctaatggctcaagtgatagaggaatgaaatcactagtaaataaaatgactgtggctttgaagacaaaatccgttaatgtcagggaaaaagttatcagttttatagagaatacatcaactcctgtggatcgaatgtctttcaatcttccttggccagacagatcatgtacagagcggcatgtgagcagcagtgacagagtgggcaagccttaccgtggcgtaaagcctgttttcagcattggggatgaagaagaatacgacacagatgaaattgacagttcttcaatgtcagatgatgatagaaaagaggttgtaaacattcagacttggataaacaaaccagatgtcaaacatcattttccttgtaaagaagtaaaagaaagtggacacatgtttcccagtcatctgttggttactgcaacacatatgtactgtttaagggagattgtttcacggaaaggattggcttatatacagtctcgacaagcgctgaattctgtagttaaaattacatccaaaaaaaaacatcctgaactcattaccttcaagtatggaaatagcagtgcttcaggaatagaaatcttggcaatcgaaaggtatttgattccaaatgcaggggatgcaactaaagccataaaacagcagatcatgaaagttttggatgctttggaaagttaatataaaagaaaattatataaaaagaaattaagacaaccaagagaaacatggacatatacctcctgactgaatactaactggagacctttcatttgctcatggggctgcttaaatagcaggtctaagaaagtgtaaattattataatcaatctgtggacagtaaactttttaaaaatttttcttctgcattttggttttataaaatgatgtattataaaggtcagttattaaattactttgaagtaactgaccctgtgcccttatggactaagtaagggtacagaatgcagttctgttttgaagagctgttttaagggaacatgcatcactttcgggttcaaaaacaactgtacacatacatatctgcagtgtcttcactgaaaattagagatagaattagttgaagagacttccttaattgctacattgttttactcactgagcaatatcagaaactaaaacatagattaataattcactcactgtttctattcttcttaaaaagagtgaaatctttttaatggaatggttgaagattcctgccaactcaaaatacagtacagctagtaaaatgttgaaacatcagtttctaaatcacctttgctccattagctaattttttggacactaaatgcttcaaagataagaaacttcatcctaatgatttctaaagagcagttaaaagcattaaaataagtaggtaggctgttaagattaaaattaacattttggggacagaattgtgtctgtaaaaatgtcattggttttattacaagtggattattttattcatattttaaaacaaatgtttaagccacattgatttatcctcattgaggattatggtctgtgaccacagtaatatccacttatataaatgccaaataatcagagagcttataaagtacaattgtttttgtcatcattttctgaatttctttctcttcttttggttttgtcctctcattgaagttccagtggtttgaaattagttttggacacattgtcttaatgtactgaaaattgctctgctgtattttgcagcgttcttcatttaatttataatggtccatattagacacatttggtaagagaagtccaggaacacatttagggccatggaatagtattttgtaaaatccatttgggaagttgcaatacccacaatctgacatgtcctaaaatgtaagggattatctctaaggggttgatgggagaaatatttagatgtaccctgttaacagccagtcattttgatttacttatggaaatcaagtgaataaaaggcaacataatttgggaaattttattctaatatctaataaaaacagtttgagtggttgaagacatctgcatgaaattgcacctaggtgcattacttgatataactctcccctaaaactgttgtaattgcattttttcccttttcttggcacccctttagaaatgtactgaagtctcatttttcacccatttcagccatgggacatttttcataatattaatgtaaagatgtttgtgttactgtttataaattacaattgtaaataaattactagtttgcccaaaactttg

SEQ ID NO: 77866 - DNA, 2749 bp, Homo sapiens
ttaatggctaacaatgcttctttattatgggagagattgattgatatctccttatggtataacaaaagtcacaatcggttttctgttatcctttatgtcataaaaatgttgcagaaattatctgttaatacttgaaagatttcctttcaaagaagaaaacgtaaagcctatacagttatcatcacattggcgtcagttaagaaaagttatccgtgtacagagggttttagaaggaagaataggaaggtttgctctagcttggaggcctttactcctttacagacgtgcagaaagaaatacctgtgattatttccttcagtccttttttctcagctgtgacatgtttattgtatttcgttggtaatgaatttttccaaagagtgttgatattttaggtttttcttttttttttaatttatcttaagcactgcagcagcacctggcagacattaatgtggatggaccagaaaatggatatggccattggattgctagtacctcaggctcaaggagcagtatcaattctgttgatggtgaatctcctaatggctcaagtgatagaggaatgaaatcactagtaaataaaatgactgtggctttgaagacaaaatccgttaatgtcagggaaaaagttatcagttttatagagaatacatcaactcctgtggatcggcatgtgagcagcagtgacagagtgggcaagccttaccgtggcgtaaagcctgttttcagcattggggatgaagaagaatacgacacagatgaaattgacagttcttcaatgtcagatgatgatagaaaagaggttgtaaacattcagacttggataaacaaaccagatgtcaaacatcattttccttgtaaagaagtaaaagaaagtggacacatgtttcccagtcatctgttggttactgcaacacatatgtactgtttaagggagattgtttcacggaaaggattggcttatatacagtctcgacaagcgctgaattctgtagttaaaattacatccaaaaaaaaacatcctgaactcattaccttcaagtatggaaatagcagtgcttcaggaatagaaatcttggcaatcgaaaggtatttgattccaaatgcaggggatgcaactaaagccataaaacagcagatcatgaaagttttggatgctttggaaagttaatataaaagaaaattatataaaaagaaattaagacaaccaagagaaacatggacatatacctcctgactgaatactaactggagacctttcatttgctcatggggctgcttaaatagcaggtctaagaaagtgtaaattattataatcaatctgtggacagtaaactttttaaaaatttttcttctgcattttggttttataaaatgatgtattataaaggtcagttattaaattactttgaagtaactgaccctgtgcccttatggactaagtaagggtacagaatgcagttctgttttgaagagctgttttaagggaacatgcatcactttcgggttcaaaaacaactgtacacatacatatctgcagtgtcttcactgaaaattagagatagaattagttgaagagacttccttaattgctacattgttttactcactgagcaatatcagaaactaaaacatagattaataattcactcactgtttctattcttcttaaaaagagtgaaatctttttaatggaatggttgaagattcctgccaactcaaaatacagtacagctagtaaaatgttgaaacatcagtttctaaatcacctttgctccattagctaattttttggacactaaatgcttcaaagataagaaacttcatcctaatgatttctaaagagcagttaaaagcattaaaataagtaggtaggctgttaagattaaaattaacattttggggacagaattgtgtctgtaaaaatgtcattggttttattacaagtggattattttattcatattttaaaacaaatgtttaagccacattgatttatcctcattgaggattatggtctgtgaccacagtaatatccacttatataaatgccaaataatcagagagcttataaagtacaattgtttttgtcatcattttctgaatttctttctcttcttttggttttgtcctctcattgaagttccagtggtttgaaattagttttggacacattgtcttaatgtactgaaaattgctctgctgtattttgcagcgttcttcatttaatttataatggtccatattagacacatttggtaagagaagtccaggaacacatttagggccatggaatagtattttgtaaaatccatttgggaagttgcaatacccacaatctgacatgtcctaaaatgtaagggattatctctaaggggttgatgggagaaatatttagatgtaccctgttaacagccagtcattttgatttacttatggaaatcaagtgaataaaaggcaacataatttgggaaattttattctaatatctaataaaaacagtttgagtggttgaagacatctgcatgaaattgcacctaggtgcattacttgatataactctcccctaaaactgttgtaattgcattttttcccttttcttggcacccctttagaaatgtactgaagtctcatttttcacccatttcagccatgggacatttttcataatattaatgtaaagatgtttgtgttactgtttataaattacaattgtaaataaattactagtttgcccaaaactttg

SEQ ID NO: 77867 - DNA, 2629 bp, Homo sapiens
aaatgtgaagataacccttaagacacctgcacttatatgagaagccttaaccaatcatattggaatttgaatatttggtgttagtaacttattttacctaacagacatgaaggtagcaccaggcattgtcctaatagttttacaataaaattgactgatttagttcttactataaccctgacaggtagatattgttagcactattttacagaggaggaatcagaaacacaaaaggctaaataacttccgcaaggccaaacagatctaagcattggttttaatatggatattgaaattgtttaaaatttaatttttacatatttaagagcattcagcctaccaaggccttatgccacttttgctaacataatttctttatcttcttttaatttccttaacatagctctcctaaaactatgggtagtacatggggttttgggggggtcaggtaaggaataattacattttgtgtgaatattcaaatgatgcttggtaaaaatctttgataacttcttaagtgattatttctctcctaaaattctttgaatataggcatgtgagcagcagtgacagagtgggcaagccttaccgtggcgtaaagcctgttttcagcattggggatgaagaagaatacgacacagatgaaattgacagttcttcaatgtcagatgatgatagaaaagaggttgtaaacattcagacttggataaacaaaccagatgtcaaacatcattttccttgtaaagaagtaaaagaaagtggacacatgtttcccagtcatctgttggttactgcaacacatatgtactgtttaagggagattgtttcacggaaaggattggcttatatacagtctcgacaagcgctgaattctgtagttaaaattacatccaaaaaaaaacatcctgaactcattaccttcaagtatggaaatagcagtgcttcaggaatagaaatcttggcaatcgaaaggtatttgattccaaatgcaggggatgcaactaaagccataaaacagcagatcatgaaagttttggatgctttggaaagttaatataaaagaaaattatataaaaagaaattaagacaaccaagagaaacatggacatatacctcctgactgaatactaactggagacctttcatttgctcatggggctgcttaaatagcaggtctaagaaagtgtaaattattataatcaatctgtggacagtaaactttttaaaaatttttcttctgcattttggttttataaaatgatgtattataaaggtcagttattaaattactttgaagtaactgaccctgtgcccttatggactaagtaagggtacagaatgcagttctgttttgaagagctgttttaagggaacatgcatcactttcgggttcaaaaacaactgtacacatacatatctgcagtgtcttcactgaaaattagagatagaattagttgaagagacttccttaattgctacattgttttactcactgagcaatatcagaaactaaaacatagattaataattcactcactgtttctattcttcttaaaaagagtgaaatctttttaatggaatggttgaagattcctgccaactcaaaatacagtacagctagtaaaatgttgaaacatcagtttctaaatcacctttgctccattagctaattttttggacactaaatgcttcaaagataagaaacttcatcctaatgatttctaaagagcagttaaaagcattaaaataagtaggtaggctgttaagattaaaattaacattttggggacagaattgtgtctgtaaaaatgtcattggttttattacaagtggattattttattcatattttaaaacaaatgtttaagccacattgatttatcctcattgaggattatggtctgtgaccacagtaatatccacttatataaatgccaaataatcagagagcttataaagtacaattgtttttgtcatcattttctgaatttctttctcttcttttggttttgtcctctcattgaagttccagtggtttgaaattagttttggacacattgtcttaatgtactgaaaattgctctgctgtattttgcagcgttcttcatttaatttataatggtccatattagacacatttggtaagagaagtccaggaacacatttagggccatggaatagtattttgtaaaatccatttgggaagttgcaatacccacaatctgacatgtcctaaaatgtaagggattatctctaaggggttgatgggagaaatatttagatgtaccctgttaacagccagtcattttgatttacttatggaaatcaagtgaataaaaggcaacataatttgggaaattttattctaatatctaataaaaacagtttgagtggttgaagacatctgcatgaaattgcacctaggtgcattacttgatataactctcccctaaaactgttgtaattgcattttttcccttttcttggcacccctttagaaatgtactgaagtctcatttttcacccatttcagccatgggacatttttcataatattaatgtaaagatgtttgtgttactgtttataaattacaattgtaaataaattactagtttgcccaaaactttg

SEQ ID NO: 77868 - DNA, 2335 bp, Homo sapiens
gtactggtgataactaagtcaaaaagactgctgccttgattagttgaaattggcttttctttgtttttctttgtacttgggatgatggaaacatcttctttataatgtacactctgggtgagaaaaactaaactgtaccatattttttgttttaaagctgttgcattttttttataatcattttgttctgtcctctgccttgatttgctatagaatgtctttcaatcttccttggccagacagatcatgtacagagcggcatgtgagcagcagtgacagagtgggcaagccttaccgtggcgtaaagcctgttttcagcattggggatgaagaagaatacgacacagatgaaattgacagttcttcaatgtcagatgatgatagaaaagaggttgtaaacattcagacttggataaacaaaccagatgtcaaacatcattttccttgtaaagaagtaaaagaaagtggacacatgtttcccagtcatctgttggttactgcaacacatatgtactgtttaagggagattgtttcacggaaaggattggcttatatacagtctcgacaagcgctgaattctgtagttaaaattacatccaaaaaaaaacatcctgaactcattaccttcaagtatggaaatagcagtgcttcaggaatagaaatcttggcaatcgaaaggtatttgattccaaatgcaggggatgcaactaaagccataaaacagcagatcatgaaagttttggatgctttggaaagttaatataaaagaaaattatataaaaagaaattaagacaaccaagagaaacatggacatatacctcctgactgaatactaactggagacctttcatttgctcatggggctgcttaaatagcaggtctaagaaagtgtaaattattataatcaatctgtggacagtaaactttttaaaaatttttcttctgcattttggttttataaaatgatgtattataaaggtcagttattaaattactttgaagtaactgaccctgtgcccttatggactaagtaagggtacagaatgcagttctgttttgaagagctgttttaagggaacatgcatcactttcgggttcaaaaacaactgtacacatacatatctgcagtgtcttcactgaaaattagagatagaattagttgaagagacttccttaattgctacattgttttactcactgagcaatatcagaaactaaaacatagattaataattcactcactgtttctattcttcttaaaaagagtgaaatctttttaatggaatggttgaagattcctgccaactcaaaatacagtacagctagtaaaatgttgaaacatcagtttctaaatcacctttgctccattagctaattttttggacactaaatgcttcaaagataagaaacttcatcctaatgatttctaaagagcagttaaaagcattaaaataagtaggtaggctgttaagattaaaattaacattttggggacagaattgtgtctgtaaaaatgtcattggttttattacaagtggattattttattcatattttaaaacaaatgtttaagccacattgatttatcctcattgaggattatggtctgtgaccacagtaatatccacttatataaatgccaaataatcagagagcttataaagtacaattgtttttgtcatcattttctgaatttctttctcttcttttggttttgtcctctcattgaagttccagtggtttgaaattagttttggacacattgtcttaatgtactgaaaattgctctgctgtattttgcagcgttcttcatttaatttataatggtccatattagacacatttggtaagagaagtccaggaacacatttagggccatggaatagtattttgtaaaatccatttgggaagttgcaatacccacaatctgacatgtcctaaaatgtaagggattatctctaaggggttgatgggagaaatatttagatgtaccctgttaacagccagtcattttgatttacttatggaaatcaagtgaataaaaggcaacataatttgggaaattttattctaatatctaataaaaacagtttgagtggttgaagacatctgcatgaaattgcacctaggtgcattacttgatataactctcccctaaaactgttgtaattgcattttttcccttttcttggcacccctttagaaatgtactgaagtctcatttttcacccatttcagccatgggacatttttcataatattaatgtaaagatgtttgtgttactgtttataaattacaattgtaaataaattactagtttgcccaaaactttg

SEQ ID NO: 77869 - DNA, 2443 bp, Homo sapiens
ccggatccacttttcggcaaagtgacgtggacgtcaacagcaatggcggaaggagaagatgtgccgccgctgccaacgtcgagcggcgacggctgggaaaaagatcttgaagaagctctggaagcaggaggttgtgatcttgaaacgttgagaaatataattcaaggaagaccgctgcctgctgatctgagggccaaagtttggaagattgctctgaatgttgcaggaaaaggtgatagtttggcatcatgggatggtattttagacttgccagaacagaacactattcacaaagattgcctgcagtttattgaccagctttcagtgccagaggagaaggcagcagaattacttttggatattgaatctgtaattaccttttattgtaaatcacgtaacattaaatatagcacatcccttagctggatacatctactgaaaccattggtgcatcttcaactgccacgcagcgatttatacaactgcttttatgccataatgaataagtacattcccagggattgttcccagaaagggagaccatttcatctcttcaggttgctcatccaataccatgagcctgagctttgttcttatcttgatacaaagaaaattactccagactcctatgcactcaactggcttggaagtctttttgcatgttactgttccactgaagtcactcaggcaatatgggatggatatctacaacaagcagatccattttttatttatttcttaatgttaattatccttgttaatgcaaaagaagttattttaacacaagagtcagacagcaaagaagaagttatcaagttcttggaaaatactccatccagtctgaatatagaagatatagaagaccttttctctctggctcagtattattgcagcaaaacaccggcttcttttaggaaggataatcaccatctctttggtagtactttgttgggaattaaggatgatgatgcagatctgagtcaggctctttgtctggccatctccgtgtcagagatccttcaagcgaatcagctacaaggggaaggagtccggttctttgtggtggattgccgtcctgcagaacaatataatgctgggcatttatcaactgctttccacttagattcagacctgatgcttcagaatccatctgagtttgcacagtcagtaaaatccttgctggaagcacagaagcagtccattgagtctggctccatagctggtggggagcacctctgttttatgggcagtggcagggaggaagaagacatgtatatgaacatggtcctggcacactttttacagaaaaacaaagaatatgtgagtattgccagtggaggatttatggcactgcagcagcacctggcagacattaatgtggatggaccagaaaatggatatggccattggattgctagtacctcaggctcaaggagcagtatcaattctgttgatggtgaatctcctaatggctcaagtgatagaggaatgaaatcactagtaaataaaatgactgtggctttgaagacaaaatccgttaatgtcagggaaaaagttatcagttttatagagaatacatcaactcctgtggatcggcatgtgagcagcagtgacagagtgggcaagccttaccgtggcgtaaagcctgttttcagcattggggatgaagaagaatacgacacagatgaaattgacagttcttcaatgtcagatgatgatagaaaagaggttgtaaacattcagacttggataaacaaaccagatgtcaaacatcattttccttgtaaagaagtaaaagaaagtggacacatgtttcccagtcatctgttggttactgcaacacatatgtactgtttaagggagattgtttcacggaaaggattggcttatatacagtctcgacaagcgctgaattctgtagttaaaattacatccaaaaaaaaacatcctgaactcattaccttcaagtatggaaatagcagtgcttcaggaatagaaatcttggcaatcgaaaggtatttgattccaaatgcaggggatgcaactaaagccataaaacagcagatcatgaaagttttggatgctttggaaagttaatataaaagaaaaaaaaaaaaaaaaaaaaaaaaaaaaaaacggggggttttttttggggggggggaaaaaagggtaagaaagggggcccacgtggacaataagcggcgttagcccggagacccacagctctgttcgtgtacccaagaggggcgaacaaatatcggcgacggtcaccacccctataagagaggaggagcgcagactaatataagctttcgagaaaaagaccacgcgaggtataagcccggcgaatctaagcgatacggccgcggcaaaaaactgaatacacacaaagaaccaaaggcaacagaggaagaggagacaagagggagcagacgagataaac

SEQ ID NO: 77870 - DNA, 1991 bp, Homo sapiens
  misc_feature (1941)..(1941): n is a, c, g, or t
  misc_feature (1954)..(1954): n is a, c, g, or t
  misc_feature (1975)..(1975): n is a, c, g, or t
  misc_feature (1982)..(1982): n is a, c, g, or t
  misc_feature (1991)..(1991): n is a, c, g, or t
ccggatccacttttcggcaaagtgacgtggacgtcaacagcaatggcggaaggagaagatgtgccgccgctgccaacgtcgagcggcgacggctgggaaaaagatcttgaagaagctctggaagcaggaggttgtgatcttgaaacgttgagaaatataattcaaggaagaccgctgcctgctgatctgagggccaaagtttggaagattgctctgaatgttgcaggaaaaggtgatagtttggcatcatgggatggtattttagacttgccagaacagaacactattcacaaagattgcctgcagtttattgaccagctttcagtgccagaggagaaggcagcagaattacttttggatattgaatctgtaattaccttttattgtaaatcacgtaacattaaatatagcacatcccttagctggatacatctactgaaaccattggtgcatcttcaactgccacgcagcgatttatacaactgcttttatgccataatgaataagtacattcccagggattgttcccagaaagggagaccatttcatctcttcaggttgctcatccaataccatgagcctgagctttgttcttatcttgatacaaagaaaattactccagactcctatgcactcaactggcttggaagtctttttgcatgttactgttccactgaagtcactcaggcaatatgggatggatatctacaacaagcagatccattttttatttatttcttaatgttaattatccttgttaatgcaaaagaagttattttaacacaagagtcagacagcaaagaagaagttatcaagttcttggaaaatactccatccagtctgaatatagaagatatagaagaccttttctctctggctcagtattattgcagcaaaacaccggcttcttttaggaaggataatcaccatctctttggtagtactttgttgggaattaaggatgatgatgcagatctgagtcaggctctttgtctggccatctccgtgtcagagatccttcaagcgaatcagctacaaggggaaggagtccggttctttgtggtggattgccgtcctgcagaacaatataatgctgggcatttatcaactgctttccacttagattcagacctgatgcttcagaatccatctgagtttgcacagtcagtaaaatccttgctggaagcacagaagcagtccattgagtctggctccatagctggtggggagcacctctgttttatgggcagtggcagggaggaagaagacatgtatatgaacatggtcctggcacactttttacagaaaaacaaagaatatgtgagtattgccagtggaggatttatggcactgcagcagcacctggcagacattaatgtggatggaccagaaaatggatatggccattggattgctagtacctcaggctcaaggagcagtatcaattctgttgatggtgaatctcctaatggctcaagtgatagaggaatgaaatcactagtaaataaaatgactgtggctttgaagacaaaatccgttaatgtcagggaaaaagttatcagttttatagagaatacatcaactcctgtggatcggcatgtgagcagcagtgacagagtgggcaagccttaccgtggcgtaaagcctgttttcagcattggggatgaagaagaatacgacacagatgaaattgacagttcttcaatgtcagatgatgatagaaaagaggttgtaaacattcagacttggataaacaaaccagatgtcaaacatcattttccttgtaaagaagtaaaagaaagtggacacatgtttcccagtcatctgttggttactgcaacacatatgtactgtttaagggagattgtttcacggaaaggattggcttatatacagtctcgacaagcgctgaattctgtagttaaaattacatccaaaaanagaaatcttggcnatcgaaaggtatttgattccnaatgcangggatgcan

SEQ ID NO: 77871 - DNA, 163 bp, Homo sapiens
tttttccccttcattttcattgtggctctttaaatattggggtttttcctaaaaaaaatttcaaatttacaaatatatgtgaaacacaggcttgtcaagtttttaactttaaaaaaattgtctagatgcttcagaatccatctgagtttgcacagtcagtaaa

SEQ ID NO: 77872 - DNA, 727 bp, Homo sapiens
gggacaaaatatgtagggaaacccaacaattgcctagtgatcttggatattagatataggatatggtgcattgaatgagaatagtttatgaatataggtaatagcgttaaaaaatctgaaacgtaatatactccatttcaataaaaaatatattattgtagtgatttctatgttgtatggaactttttattatatttattatattttcaatcattgcaggattatctgttaataaaatattaattttgcatacaattaaaaggtgttaatgtgtagcttacttgtttatagattaacctctgtttatatcttttaactcaattttatttagagttgaacatttctaataattgagatggttgaaacaacacctgttttgaattaaatttacttaaaaattctttttcttttaatgctttttttgtctcaagtcatctgttggttactgcaacacatatgtactgtttaagggagattgtttcacggaaaggattggcttatatacagtctcgacaagcgctgaattctgtagttaaaattacatccaaaaaaaaacatcctgaactcattaccttcaagtatggaaatagcagtgcttcaggaatagaaatcttggcaatcgaaaggtaagattttccttaagataatattatctgaattcagatattatctgaattactgtagttcactataaagagtttgtttctttattttggggaatggatgg

SEQ ID NO: 77873 - DNA, 1365 bp, Homo sapiens
gagtcgctgggtgcagagccagaggaacgccagcgaccccagcagcgctgcggacggtgctggccgtggccgctgcggcccccgtgtccaggtgggccaggacgcagcctctgggcgccgtcgcttttccagcatcgcagaggcaaaagcgtggcagtgggacccaaaaggtaggactgaggctctagaacttgcacctgtgcagggactgcaaaccagacctgggaggaccctttcagcagcccccactccaccctatcccaggacttcccagcgacccgccgttctgggagataccgggagcgtgatcagggggcggggccgtttccaaggcaaccgcttatttgcatagggtcccgtcctggccaacgagggcgccccaaatgttcaggacatagaagaaggggttaactggcccggatctcctcctcgccttccaagcccgctaagcactggggttatctacccattccccagaaggggagactgaggcagcccaccagccaaaggaggcgaccagactggggctgcgttttaccatttcagaagcggcttgagctggtctgagctataataataaacactggcggtggaggcgagggcgaccacagggctgaggtcagggctaggattccggtgtctctacgtaggttgcttgaatggggggcaccctggcatggacgctgctgttgccgctgctgctgcgggagtcagacagcctagaaccgtcgtgcaccgtgtcctccgcggatgtggactggaacgcggagttcagtgccacgtgcctgaatttcagtggcctcagcctgagcctgcctcacaaccagtctctgcgggccagcaacgtgattctccttgacctgtctgggaacggcctgcgagagcttccagtgaccttctttgcccacctgcagaagcttgaggtcctgaacgtgctacgcaaccccttgtctcgtgtggatggggcgctggccgcccgctgtgaccttgacctgcaggccgactgcaactgtgccctggagtcctggcacgacatccgccgagacaactgctctggccagaagcctctgctctgctgggacacaaccagctcccagcacaacctctctgccttcctggaggtcagctgcgcccctggcctggcctctgcaactatcggggcagtggtggtcagcgggtgcctgcttcttggacttgccatcgctggccctgtgctggcctggagactctggcgatgccgagtggccagaagccgggagctgaacaaaccctgggctgctcaggatgggcccaagcccggtttaggcttgcagccacggtacggcagccggagcgcccccaagccccaagtggccgtgccatcct

SEQ ID NO: 77874 - DNA, 885 bp, Homo sapiens
gagtcgctgggtgcagagccagaggaacgccagcgaccccagcagcgctgcggacggtgctggccgtggccgctgcggcccccgtgtccaggtgggccaggacgcagcctctgggcgccgtcgcttttccagcatcgcagaggcaaaagcgtggcagtgggacccaaaaggttgcttgaatggggggcaccctggcatggacgctgctgttgccgctgctgctgcgggagtcagacagcctagaaccgtcgtgcaccgtgtcctccgcggatgtggactggaacgcggagttcagtgccacgtgcctgaatttcagtggcctcagcctgagcctgcctcacaaccagtctctgcgggccagcaacgtgattctccttgacctgtctgggaacggcctgcgagagcttccagtgaccttctttgcccacctgcagaagcttgaggtcctgaacgtgctacgcaaccccttgtctcgtgtggatggggcgctggccgcccgctgtgaccttgacctgcaggccgactgcaactgtgccctggagtcctggcacgacatccgccgagacaactgctctggccagaagcctctgctctgctgggacacaaccagctcccagcacaacctctctgccttcctggaggtcagctgcgcccctggcctggcctctgcaactatcggggcagtggtggtcagcgggtgcctgcttcttggacttgccatcgctggccctgtgctggcctggagactctggcgatgccgagtggccagaagccgggagctgaacaaaccctgggctgctcaggatgggcccaagcccggtttaggcttgcagccacggtacggcagccggagcgcccccaagccccaagtggccgtgccatcct

SEQ ID NO: 77875 - DNA, 989 bp, Homo sapiens
gagtcgctgggtgcagagccagaggaacgccagcgaccccagcagcgctgcggacggtgctggccgtggccgctgcggcccccgtgtccaggtgggccaggacgcagcctctgggcgccgtcgcttttccagcatcgcagaggcaaaagcgtggcagtgggacccaaaagaagcggcttgagctggtctgagctataataataaacactggcggtggaggcgagggcgaccacagggctgaggtcagggctaggattccggtgtctctacgtaggttgcttgaatggggggcaccctggcatggacgctgctgttgccgctgctgctgcgggagtcagacagcctagaaccgtcgtgcaccgtgtcctccgcggatgtggactggaacgcggagttcagtgccacgtgcctgaatttcagtggcctcagcctgagcctgcctcacaaccagtctctgcgggccagcaacgtgattctccttgacctgtctgggaacggcctgcgagagcttccagtgaccttctttgcccacctgcagaagcttgaggtcctgaacgtgctacgcaaccccttgtctcgtgtggatggggcgctggccgcccgctgtgaccttgacctgcaggccgactgcaactgtgccctggagtcctggcacgacatccgccgagacaactgctctggccagaagcctctgctctgctgggacacaaccagctcccagcacaacctctctgccttcctggaggtcagctgcgcccctggcctggcctctgcaactatcggggcagtggtggtcagcgggtgcctgcttcttggacttgccatcgctggccctgtgctggcctggagactctggcgatgccgagtggccagaagccgggagctgaacaaaccctgggctgctcaggatgggcccaagcccggtttaggcttgcagccacggtacggcagccggagcgcccccaagccccaagtggccgtgccatcct

SEQ ID NO: 77876 - DNA, 267 bp, Homo sapiens
tttagaagctaatgcctgcctctcagcctccttcaaattccaaagaaaataatttacaagttaatttcagtctcctgggtccgtttattcttcctaataatcatttactgcccttcaaaaaaattgtctacactttccatttccttcttcccctatcaagaacaggcataggctgggtgcggtggctcacacctgtaatcccagaactttgggaggccgaggtgggtggatcatgaggtcaggagatcgagaccatcctggataaca

SEQ ID NO: 77877 - DNA, 231 bp, Homo sapiens
gcctcccatggtgctgggattaaaggcgtgaaccactgcgcccggcctatttttagcctttctaaataattgttttaggtgtttctcttgaatagagcatatagttggttctttatgaacccaaatgaagatcttttccatttaataagtgaagtaagccctttcacatgtgttaagatgaatatgtttgctgtcaaccctgccagattattttatgctgtaattattata

SEQ ID NO: 77878 - DNA, 151 bp, Homo sapiens
tggcagatctgcggtggctccctcctttctgagtcattacacactcttctggatcattcctttcatttttccttttcctctcctctcccctattttcattcccctatcactgcaaagccaaaaccaaaacgtggaaggggacctagccgag

SEQ ID NO: 77879 - DNA, 450 bp, Homo sapiens
tatcattttatatcactttgattttgaactatataactgtattaccaatatatttttaaattaaggaaaccatagatggaatgtaaaatttttatctttattgaaacaatatttttgctaccggggttaataaaatcactatataccttgacttccatctggaatcttgttgtactgaaaacagggtcaattttagattggaggagttgggggagaggaagggtaggaagagaaatatattttgtcttccagcaaatacattagagacacagaaatgtttaaaatgttgtccctggcttccaggagctcaatgactagtagttggatcaatcagtatttaacgttcaatataatactaatgtactcagaatattattcttgcttattcatatatatacatatgatatttcaatttaagcaattataaacattgcaaatttttctatttat

SEQ ID NO: 77880 - DNA, 513 bp, Homo sapiens
ttacataacttccgtttctgctgaaattctctatgttgttgtctacttgtgttttacattttattacagaaaatttgaaacgtagcaagagaattatgtaacaaacccctgtggacccatcaaccagcttcaataattatccacattttgtcagcatgtttcatctaccccccacttccaccccatgcatagttttagtgaaggggagtgctggagtatttgtcagcaaatctcagacttcatatcatttcactgttaaatgcttcaatttgtgtttctaacagagaaggccccctttttataaaatgtgactaccatgccgttattacacccaccgaatgaacagtgacgaaggagttctttgaacttttagtgaattcagggtggaagtggtattgggatgaagaagctctggtctagatttatcccctttacccaaaacaatgggggaattcattgaaggggatcttggggcttaagctggcacttggcccaccccttacaagactttca

SEQ ID NO: 77881 - DNA, 788 bp, Homo sapiens
attatgtatctcccatgccagccttttttcttctttctcaaaattgtttaggctgctctgggtctattgcattatatatgaattttagataaactttgtgaatttagaaaaaggaaatgtcacctgggattttgatagaggttgcattaaatctatagatccatttggaaaatattgccaggctaacaacattaacctttataaacaatgaatagtcaaaggtttttttccatttttttcaaaatgttttctatagtttttgtgtatatatcttatacttaacttgataaacttatttttgatgtcatctcagatggaacattctgaattttttgttttagattgttaattgctagcatatagaaattcagaggattttatatatgttgaccttatatactggaagtttgttgaactcatttctaaattctaaccatatttgattagagccctttggacattttatacgtaagatcatgtcatatgccaacagacatagtttgacttcctttccatactggaagccttacatttatttttctagactaattgccatgtctatatcctccagtacaatgttaaaaacaagtgtcaagagtggaaatccttgtcttgtttctaatcttggagaaattagtgaacctttcagataacttatgatgatatgttggttggttttttatggatcccctttaaaaggaagacagttcccttatctgcctcatttgctgcatgtccttctcatagggagtttgagaattctcaagtgcctatgcatcttctgagat

SEQ ID NO: 77882 - DNA, 775 bp, Homo sapiens
gggggttctgttcttttgtatgccctgcatctttcttagtttactcccttattgtggttgaggaacagcttcccgataaaaggtacataagaagtgacatttttgctggccagcacggtggctcatgcctgtaatcccagcactttgggaggccgaggtgggtggatcacttgaggacaggagtttgagaccagcttggccaacatggtgaaacccccatctctaccaaaaataaaaaaacgagccgggcatagtggtgcatgcctgtagtcctagctacttgggaggctgaggcatgagaactgcttgcacctgggaggcggaagttgcagtgagctgagatcacaccactgcaccaccgcaacctgtcttaaaaaataaaaataaagaagtaacatttttgggagctggtgtgcctggaaacctttttattccacctacccttacactaattgaggctggagataacattgccttggaattttaaagatattgatctactttcttctaatatctgatgttatttgaggcattcagattctcagtcctttgtatgaaacttttaaaattttttctagttcaggtattctttgtagtgaaattcacaatggcataccctagtgcgggtctgtttttatatattgtgctgggcattggaaagccatggctttcagtttcaccaatgatttcctctgctgtttcttctgttctctttatggcatgcttattattcagatctgaggccttttgttctggtcttttctttcctactttc

SEQ ID NO: 77883 - DNA, 283 bp, Homo sapiens
gtttgtttatatttatactcatattttgctgtcaacttaaactatgcactgaaatatcttcttggaaagtatatcttatgtatttgattattttttattatgaagcagtagcaagttgttcttagcagttgtttgagtttatatggtaagtagccaagtaatttctttaaaagtcttatattcagttttgccttatactgtgaagctcatttaaagtcaacaacactatattttatagaaagtatttattttcctttattaagccataggaacaacagtggcc

SEQ ID NO: 77884 - DNA, 234 bp, Homo sapiens
gtgggttttcgatacatgccctctaccagattgaaggagtttctattttgagtttgctaatgaaaacatattgtttcattgttttaatcatcagaatttaatcttattaaaatattttctgcatttagtgatttttttttttcctctctgattccatttacatattttctactgctgaaccatcactggatttccagcataaatccaacttggccataattttgtttatatgtt

SEQ ID NO: 77885 - DNA, 414 bp, Homo sapiens
agataagggtgacaacttccaagctgttcacttgtcagatctggaaactagaagagcgctcagtttttgtatacatttctttttccctggcttctcctgagcctgaaatctttccaaatggtagttgtggtcccaagtccaagaagtgataagaaaaacaatgggaattaagattttagatagaacaaatggagtgaactgcaaggcagggccccaactttgtaactgcgtctctcttctcaaggtgttctgaatccaaacaggtccattgagggcagccctgtccttccaaagcccactgctgaatttgggtgatgctagtaacacagaacagtctcttatgctcaggtcaggcacatttacacacaggccaattctttagggctgactcttggaaacgcaattgaattgttc

SEQ ID NO: 77886 - DNA, 626 bp, Homo sapiens
  misc_feature (626)..(626): n is a, c, g, or t
attttacacattcagtagattagaagtagttatttaatctttggttagcataataaaagatcttctagggacattttttgcttgcagtggaaggctagttaaatgtgttcattagtcatgaatctgctttttctatagctgttggaaacgtagctcccctgtgatacagttgtagaatacagaaatctcgttttgctgttacggtacggtagtctacttactttcttccaaaccattaatgttatagttacctttaattgcgtaggtcctatcacccctcaattttaagactctaagcctggcattttatcttacaaaatgaaatataaagacttgtactcagagtatgtgtgtgttttccatatacccattcctaaagtagagaaagatgagggattcgccagaaactgatttctaataaattatccagaaactgaccccttctcacctcttctgttactgtcactgtggtttcagccacagcatcctttgctgcattgttaccttagtttcctgactgtatccttcctcacacctgtaatcctagcactttgggaggctgaggcagatggatcacctgaggtcaggagtttgagaccagactggccaacatggtaaaaccccgn

SEQ ID NO: 77887 - DNA, 314 bp, Homo sapiens
gtgttcttgcgaagtgagtctttcgggtctgtttgcaccccattggcggcgttgtggcacatgtctcactgtgcctctgactccccactcggcgctggagttcccaccccaaatgttgttctgcgagtgcatcttctggctgcttttcccctctgcaaactcctccatccactcccaggggtggacactaggctgcctccaactgcctgccactccagatgacaccaagtgcgtgtcctcccccacaccaccgtgcagcagcctgctgtgagaactgtcccaggagaggggttgctgggtcttgtggagacaca

SEQ ID NO: 77888 - DNA, 1266 bp, Homo sapiens
taatgctactgctaaaaactagtaaactaccagtaaactgtgaagacagaagtaactcctgtgatctatatgtttgtgcagatggtggagcttttctgctcctaaagcctgagaaatgcaaatgtggcttcgttaatgcaaatgcttcctacgccagactttatgaaactcctcctaaagttgaattcttatccaagtggacatatgttagggtgccattgtaattcaggtagagtgtcagagtggtggctggcaccaacggtagatgttctcaacattagcgttattcaggtaagactacaacaatgatgaacatgtcaaaactttcctttaaaaggaacaatcagaaaaactctttaacaaatgtttttctttccgtagtattttaattaaaatttttaaaattttaaaatttactaaatttatgaacgtttttatcccacttgagatgaatacttatttatagtccctgtcccatgaagcttctgtggatttgctttgtttgtcatttgtggtatgtttgataacaaaaatattagtggcacaaaagcagttatattgaatgcttttgttttagagaaaatttcactctgtactagaaaatgtagatgatgtgagtcaaagttcattaatatttacctgaaaatttgtgtataaaggtaaccttggggcagtttattttgcttagacccctcagcttcttgatagagtgaggtgagggcatatgtaagtcagtaaactattctgttagtaaagtcaaaggcgtaatctaaattaattatgcttttaactaacacagaagaaatcatgtgacctcattctcaaagctcgtaacatccacctggccaatcttaagatgtggatagagttcttttttttcttttttcaatttttacaataatttttgacacattggaagctgtgcatgtttatggggggcacaatttggatgtttccaatacatgtatatgttgtgtaatgatcaaatcggagtacttagcatatctatcatctcgtgcatttatcatttctttgtggcgagaacatttaaaaatcctattttctagctattttgtaatatacactaccttactgttgcgaaccatagtcaccctactgtgcaatagaacacctgaacttattcctcctatctagttgtaactttgtacccattgaccccccttcccttccttccactctcccctccccagtctctggtaaccactgttctgttccctatgagataaaactttttttgtcttccat

SEQ ID NO: 77889 - DNA, 395 bp, Homo sapiens
tgtatagagtgacaatgcttttactagccaatggttaaactaatacaccacaacttaattattcaataatacattattttattcactaaaataaatatagatttgtaaaatagttcatgtatctgctaggcctgatatttatcacatctacagataacatttgggatgcatatttttcagagtctacctaaaataactctgagggcgtcatggaccatgaactactgtaccatatctgtaatacttggatggttactaagaataaagaaaatgaccacagggaattgggaattgtctttttaccatttataaagattccacgttatcaggcacatttcatgttttcttggcttttttttttttgacggagtttcactcttgttgcccaggctaga

SEQ ID NO: 77890 - DNA, 799 bp, Homo sapiens
tccttagcattgtttgagatcacacatattgctacaagtagatctggcgtatttattttcactaacataaatattttaccatatgaatatatcataatttatttggccattcttttcttgatagatacctaggttggttcttttattattgctattattgttatttaatcactgtgtttattatttacaatgttacttgaaatatttgtgttcttttcctctgtgcacatagcaagagttttctgagggaaaaaaggctaaaatggtatcattaggttaagataattgcatcttcaactattagatattgccaaagtatttaccaaaatgattgtatcaattaacacatctgcacaaaggcttcccattcccaaagtgctggtccttgtcagcacttgattctgccaaatatgtaattttttttggtcaatctgatggttactaaatgatacttaattattgttttattttgcctttccctgattactaacaagcctgagtatcttttcacatgtttgtggatcaagtaggtttctagtcatgcatattgtttgttcatctttttgcctattttaaattaagttttgtttttctatattaatacataagtatatttacatatactggatattaattctttataattaaagccattgtaaataccatttcatggtctatgactcctaatttttcattatgtttatgctgctttgttgataagagaattttgtatccttcatgatttgtgtttttcatatgttgttgaataaacattcctttaatctaagatcataaaata

SEQ ID NO: 77891 - DNA, 451 bp, Homo sapiens
gagggcaggtgggagaggggagatcttagcaacagcctcaacctgtctgtctttctgtttctatttggaggctcctgcttccacttccagtaggtttcactaactcctcttgcctgaagttgtcaccagggttgagtgtgtgtttttgagtgtgtgtttggcacacagagggcagaagatacatgtttcttagtctcacaactcatggcaaggatattggagaagtaagagatgatgtgacaaggggaggggttggaactagcctgggggctggctttgtaggtgaggactcccagttccgctgtctctagtcctggaactttgtggtagaggttacggggtcacagcaattctgttcatctggtgggccccaggcagggttccagctgccccctttcccagcaagaaacccactgacctgccagagttggttggtccacatgaatttcct

SEQ ID NO: 77892 - DNA, 508 bp, Homo sapiens
tttagacagggtctcgctctatcacgaaagctagggtacagtggcttgattacagctcactgcagccttgaactcctgggctcaagtgatcctcccaccacagcttcccaatagaaatggggtcttgctatgttgcccaggctggtcgtgaactcctgggctcaaggaatcctcctgccttagcctattaaaatgctgggattacaggtgtgagccaccacgcccagccaagggtagtttttgattaatcagtttatgtaaggactgcagccaagtcctgaacctacaggctgccacccaataacctgagtgacagtgagcgactgggcttactgccttccttctttttattattcttagaagatcctaagtcttacaagaaccattctcgcctacatttccactcagataacttcaacagcccaagtcaaggagaaatgaaatgttgcaagtagttctatccttggataacagtaatccaatgcacttttcaactcctcccccattt

SEQ ID NO: 77893 - DNA, 684 bp, Homo sapiens
aaaatatttgtgaagaggacaaagtggtatatggcatctcctttgatgctttcatataaaaggaagttgcagagagatgactccggggacactattaattttgtcttcacacaatcagtccataatatgcaaagttgtacatactatacatacagtacttaacggggtatcaagtttattctcttagcactgagcaggatgttctgagatgtgcaaaccttttgctaattcatctgtatgatgattaggttactggttggagaaatttcctcaatatggtatactgtgctttgatatcaggtgctaataatttgctgcaaacaggacctagagaattacttttaaagacaaccttttgatctttccagattaaaacatacaaaagaataggttacactcttgtaaggaaaaagcttacagaacttactaactacagctgtctgtgccatagcctggttggtcaggtggcctattgggaagtatataagtgccagtagaactgagttcatatgtctcagaagtagtaattgtttctattacatggataccatatggaccagaatgttcatacagccaggtataagctccacaaagacagagattagtgtttgtctgaggtaccgctgtgccccagtacttagaaaagtacctgacatttataaagcactaccatattgaagaata

SEQ ID NO: 77894 - DNA, 414 bp, Homo sapiens
tgagatgaagtcttgctctgtcgcccaggctggagtgtagtggcacgatctcagctcactgcaacctccgactcccgggttcaagcaattctcttgtctctgcctcctgagtagctggaattacaggcacacaccaccatgcctggctaatttttgtatttttagtagagacgcggtttcaccttggcctcccaaagtgctgggattacaggcatgagccactgtgcctggccgagatggggtttctccatgttggtcaggctggtctggaactcccaacctcaggtgatctgcccgcctcagcctcccaaactgctaggattacaggtgtgagccaccacacccggccttacaggtcaggattttcttcattatttctcccaacaagcctgcatttcccagcctgtgctgatc

SEQ ID NO: 77895 - DNA, 229 bp, Homo sapiens
gtggtaacttttttaaaaaacataaataccatacaattcatccttttaaagtgtgtaattcagtggtttttggtatattcagtgttgcacagtcatcaccactaattccagaatattttcatcactcccacggctgtatctcccatttctctcttccctgcagatcctggcaaccgctgatctactttctgtctcttacagacttatctgttctggacatttcacataa

SEQ ID NO: 77896 - DNA, 466 bp, Homo sapiens
gctcgtttgtgtggcaggactgtggggatttggacggacatagcctcgtgttcagcccgggtctcatgttcccagacctggaaggccttcccgccttcttggaccatcctccggtgacggtgtcctgatgccgtaggtttctggtttgtctgttttgtactaaaacactcctggttgtcagcccttctcccacgtgtgttggaggccgggactgtagccgcagctgatctaagttcaccagcgggagctggtggctgtcctgagctcagctgacaccccatctttgaaaatcagccatctttggagggcagggaggagatcaggaaagatagctaatggatgccaggcctaatacctaggtgatgggatgctctgtgcagcaatccagcatggcacacgtttacctatggaacacacctgcacatcctgcacgtgtacccctgaacttaaaagttggaaataaaaa

SEQ ID NO: 77897 - DNA, 389 bp, Homo sapiens
gcaaaatgtctttctggagagcctgggcagccagaggggaaaggtcaagaaacctatcctggccctgggaaagtggagggtaaggcagagccagccatgagaaaggatgatgtttgcccaggcatgaaatgtatcagcggatgatctctcacatggaagaagccaaagcagctacacccaatggcttagcaataagaaacaccaaaccagacaaacaccactgctgctgggaaagggacctggcagaaggaaaaggctgttcagagagcagaggtatttcgtgtgagccttttagggcttcttgtctctttagaccacatgcacatattacttgtataaaataatgcaccagatacaaacaatgaaatacaagtgctgagttcgataga

SEQ ID NO: 77898 - DNA, 3153 bp, Homo sapiens
cgctgctggtacgcgccgggattttgggatacccggccagacaccctcacctgcggtgcccagctgcccaggctgaggcaagagaaggccagaaaccatgcccatggggtctctgcaaccgctggccaccttgtacctgctggggatgctggtcgcttcctgcctcggacggctcagctggtatgacccagatttccaggcaaggctcacccgttccaactcgaagtgccagggccagctggaggtctacctcaaggacggatggcacatggtttgcagccagagctggggccggagctccaagcagtgggaggaccccagtcaagcgtcaaaagtctgccagcggctgaactgtggggtgcccttaagccttggccccttccttgtcacctacacacctcagagctcaatcatctgctacggacaactgggctccttctccaactgcagccacagcagaaatgacatgtgtcactctctgggcctgacctgcttagaaccccagaagacaacacctccaacgacaaggcccccgcccaccacaactccagagcccacagctcctcccaggctgcagctggtggcacagtctggcggccagcactgtgccggcgtggtggagttctacagcggcagcctggggggtaccatcagctatgaggcccaggacaagacccaggacctggagaacttcctctgcaacaacctccagtgtggctccttcttgaagcatctgccagagactgaggcaggcagagcccaagacccaggggagccacgggaacaccagcccttgccaatccaatggaagatccagaactcaagctgtacctccctggagcattgcttcaggaaaatcaagccccagaaaagtggccgagttcttgccctcctttgctcaggtttccagcccaaggtgcagagccgtctggtggggggcagcagcatctgtgaaggcaccgtggaggtgcgccagggggctcagtgggcagccctgtgtgacagctcttcagccaggagctcgctgcggtgggaggaggtgtgccgggagcagcagtgtggcagcgtcaactcctatcgagtgctggacgctggtgacccaacatcccgggggctcttctgtccccatcagaagctgtcccagtgccacgaactttgggagagaaattcctactgcaagaaggtgtttgtcacatgccaggatccaaaccccgcaggcctggccgcaggcacggtggcaagcatcatcctggccctggtgctcctggtggtgctgctggtcgtgtgcggcccccttgcctacaagaagctagtgaagaaattccgccagaagaagcagcgccagtggattggcccaacgggaatgaaccaaaacatgtctttccatcgcaaccacacggcaaccgtccgatcccatgctgagaaccccacagcctcccacgtggataacgaatacagccaacctcccaggaactcccgcctgtcagcttatccagctctggaaggggttctgcatcgctcctccatgcagcctgacaactcctccgacagtgactatgatctgcatggggctcagaggctgtaaagaactgggatccatgagcaaaaagccgagagccagacctgtttgtcctgagaaaactgtccgctcttcacttgaaatcatgtccctatttctaccccggccagaacatggacagaggccagaagccttccggacaggcgctgctgccccgagtggcaggccagctcacactctgctgcacaacagctcggccgcccctccacttgtggaagctgtggtgggcagagccccaaaacaagcagccttccaactagagactcgggggtgtctgaagggggccccctttccctgcccgctggggagcggcgtctcagtgaaatcggctttctcctcagactctgtccctggtaaggagtgacaaggaagctcacagctgggcgagtgcattttgaatagttttttgtaagtagtgcttttcctccttcctgacaaatcgagcgctttggcctcttctgtgcagcatccacccctgcggatccctctggggaggacaggaaggggactcccggagacctctgcagccgtggtggtcagaggctgctcacctgagcacaaagacagctctgcacattcaccgcagctgccagccaggggtctgggtgggcaccaccctgacccacagcgtcaccccactccctctgtcttatgactcccctccccaaccccctcatctaaagacaccttcctttccactggctgtcaagcccacagggcaccagtgccacccagggccctgcacaaaggggcgcctagtaaaccttaaccaacttggttttttgcttcacccagcaattaaaagtcccaagctgaggtagtttcagtccatcacagttcatcttctaacccaagagtcagagatggggctggtcatgttcctttggtttgaataactcccttgacgaaaacagactcctctagtacttggagatcttggacgtacacctaatcccatggggcctcggcttccttaactgcaagtgagaagaggaggtctacccaggagcctcgggtctgatcaagggagaggccaggcgcagtcactgcggcggctccctaagaaggtgaagcaacatgggaacacatcctaagacaggtcctttctccacgccatttgatgctgtatctcctgggagcacaggcatcaatggtccaagccgcataataagtctggaagagcaaaagggagttactaggatatggggtgggctgctcccagaatctgctcagctttctgcccccaccaacaccctccaaccaggccttgccttctgagagcccccgtggccaagcccaggtcacagatcttcccccgaccatgctgggaatccagaaacagggaccccatttgtcttcccatatctggtggaggtgagggggctcctcaaaagggaactgagaggctgctcttagggagggcaaaggttcgggggcagccagtgtctcccatcagtgccttttttaataaaagctctttcatctatagtttggccaccatacagtggcctcaaagcaaccatggcctacttaaaaaccaaaccaaaaataaagagtttagttgaggagaaaaa

SEQ ID NO: 77899 - DNA, 2597 bp, Homo sapiens
cgctgctggtacgcgccgggattttgggatacccggccagacaccctcacctgcggtgcccagctgcccaggctgaggcaagagaaggccagaaaccatgcccatggggtctctgcaaccgctggccaccttgtacctgctggggatgctggtcgcttcctgcctcggacggctcagctggtatgacccagatttccaggcaaggctcacccgttccaactcgaagtgccagggccagctggaggtctacctcaaggacggatggcacatggtttgcagccagagctggggccggagctccaagcagtgggaggaccccagtcaagcgtcaaaagtctgccagcggctgaactgtggggtgcccttaagccttggccccttccttgtcacctacacacctcagagctcaatcatctgctacggacaactgggctccttctccaactgcagccacagcagaaatgacatgtgtcactctctgggcctgacctgcttagaaccccagaagacaacacctccaacgacaaggcccccgcccaccacaactccagagcccacagctcctcccaggctgcagctggtggcacagtctggcggccagcactgtgccggcgtggtggagttctacagcggcagcctggggggtaccatcagctatgaggcccaggacaagacccaggacctggagaacttcctctgcaacaacctccagtgtggctccttcttgaagcatctgccagagactgaggcaggcagagcccaagacccaggggagccacgggaacaccagcccttgccaatccaatggaagatccagaactcaagctgtacctccctggagcattgcttcaggaaaatcaagccccagaaaagtggccgagttcttgccctcctttgctcaggtttccagcccaaggtgcagagccgtctggtggggggcagcagcatctgtgaaggcaccgtggaggtgcgccagggggctcagtgggcagccctgtgtgacagctcttcagccaggagctcgctgcggtgggaggaggtgtgccgggagcagcagtgtggcagcgtcaactcctatcgagtgctggacgctggtgacccaacatcccgggggctcttctgtccccatcagaagctgtcccagtgccacgaactttgggagagaaattcctactgcaagaaggtgtttgtcacatgccaggatccaaaccccgcaggcctggccgcaggcacggtggcaagcatcatcctggccctggtgctcctggtggtgctgctggtcgtgtgcggcccccttgcctacaagaagctagtgaagaaattccgccagaagaagcagcgccagtggattggcccaacgggaatgaaccaaaacatgtctttccatcgcaaccacacggcaaccgtccgatcccatgctgagaaccccacagcctcccacgtggataacgaatacagccaacctcccaggaactcccgcctgtcagcttatccagctctggaaggggttctgcatcgctcctccatgcagcctgacaactcctccgacagtgactatgatctgcatggggctcagaggctgtaaagaactgggatccatgagcaaaaagccgagagccagacctgtttgtcctgagaaaactgtccgctcttcacttgaaatcatgtccctatttctaccccggccagaacatggacagaggccagaagccttccggacaggcgctgctgccccgagtggcaggccagctcacactctgctgcacaacagctcggccgcccctccacttgtggaagctgtggtgggcagagccccaaaacaagcagccttccaactagagactcgggggtgtctgaagggggccccctttccctgcccgctggggagcggcgtctcagtgaaatcggctttctcctcagactctgtccctggtaaggagtgacaaggaagctcacagctgggcgagtgcattttgaatagttttttgtaagtagtgcttttcctccttcctgacaaatcgagcgctttggcctcttctgtgcagcatccacccctgcggatccctctggggaggacaggaaggggactcccggagacctctgcagccgtggtggtcagaggctgctcacctgagcacaaagacagctctgcacattcaccgcagctgccagccaggggtctgggtgggcaccaccctgacccacagcgtcaccccactccctctgtcttatgactcccctccccaaccccctcatctaaagacaccttcctttccactggctgtcaagcccacagggcaccagtgccacccagggccctgcacaaaggggcgcctagtaaaccttaaccaacttggttttttgcttcacccagcaattaaaagtcccaagctgaggtagtttcagtccatcacaaataaaatatatgtttgaggaaagtataaaaaacctcgaggtggggccccggtccccaattcggccctttagggggccgttttacaatttaactggccggccgtttaccaaccgcgtgaactgggaaaacccgggggttacccaactaaatggctctgcaaaaatacccctttttgcgactg

SEQ ID NO: 77900 - DNA, 420 bp, Homo sapiens
agttggagggcagaaaggagttagaggcatgatccttttcagatagaaacttttcaggaaaagaaaatagtccagttgtttaaaaaaccctggattttaaaaagagcttagagagtcggcctaagtaattggtgcaagacagtttaaacagaaacagggagtctcacagcaagttggctggaggagctgactcatacattgcaacataattatttcccaaataacatgcaaacaagagtgggctcaagctttctggtctctctctccctaacaagataaattagaaagaaataaagtcaaatccaggaagacttcatagaggtaaggcctggaactggttcttaaagaaccactagaattcagagaagcaaaaggagtaagagtgggcataggacttacaaagcaattcatttggagaag

SEQ ID NO: 77901 - DNA, 1307 bp, Homo sapiens
cggcagtgactttgtgttccaggcccgagtgctgggccaccaccaccaggcccaggagacccgctatgaggtgcgcatccagctcgtctacaagaaccgctcgccactgcgggcacgcgagtacgtgtgggcgccaggccactgcccctgcccgatgctggcaccccaccgggactacctgatggctgtccagcgtcttgtcagccccgacggcacacaggaccagctgctgctgccccacgccggctacgcccggccctggagccctgcggaggacagccgcatacgcctgactgcccggcgctgtcctggctgagcccctgcaggagccccggccacacacagcaagaaagatacatctgaccagcctcaacgtcaacgtatttcccctctcaccctggcttccaggcagctctgaaatacgtcccacctgtgcagctatgtgactccctcccacacacgcttaagacacctctgcatgcagtcaaagccactgtcacaagccggcaggcactggtgaggaggcactaaggagactctgacttttatttcgcctctctccttggctgccaggaagctcatagctatttatactcagaaagtttaacgctgctttctttctctttgcgcgcgtcacacttgcttggagacactgtcatgaacgagcatgacaccctgctgccctgggtacccagaagatcatctgtttacttcccagacactgtgctgtctctgctctctgctactcacacacaccctcatgtgtgaagggcagagacactgtcacaaacaggcatgccccttagaagacatgcctaaccaggcactgtaacgtaccaacgtaccaatttccccttttcccctggctaccaggaaactcggagacaatcttttcagcctcagcatttctggctggatttccacccatcaacacgtgcttgctcctcctttttttttttttctgaggtagacccttgctctgtcacctaggctgaagtgcggtggtgcaatcatggctcactgcagcctcaaattcctgggctcaagcgatcctcccacctcagcctccacagcagctggaactccaggtgtgaatcaccatgcccggctaacttttaaattttttgtagagatggggtcttgctacgttgcccacactgctctccaactactggcctcaaacgatcctcctgcctcggcctcccaaagcactggaatttcaggcatgcactatcgtactggctgttcaccccccttttattcctctttaatttttacaagcactttttaaaaaaaaattttacttt

SEQ ID NO: 77902 - DNA, 693 bp, Homo sapiens
cggcagtgactttgtgttccaggcccgagtgctgggccaccaccaccaggcccaggagacccgctatgaggtgcgcatccagctcgtctacaagaaccgctcgccactgcgggcacgcgagtacgtgtgggcgccaggccactgcccctgcccgatgctggcaccccaccgggactacctgatggctgtccagcgtcttgtcagccccgacggcacacaggaccagctgctgctgccccacgccggctacgcccggccctggagccctgcggaggacagccgcatacgcctgactgcccggcgctgtcctggctgagcccctgcaggagccccggccacacacagcaagaaagatacatctgaccagcctcaacgtcaacgtatttcccctctcaccctggcttccaggcagctctgaaatacgtcccacctgtgcagctatgtgactccctcccacacacgcttaagacacctctgcatgcagtcaaagccactgtcacaagccggcaggcactgagatggggtcttgctacgttgcccacactgctctccaactactggcctcaaacgatcctcctgcctcggcctcccaaagcactggaatttcaggcatgcactatcgtactggctgttcaccccccttttattcctctttaatttttacaagcactttttaaaaaaaaattttacttt

SEQ ID NO: 77903 - DNA, 522 bp, Homo sapiens
gtagagatagggtctagctatgttgcccaggctggtctcaaactcctggcctcaagtgatcctcacacctcagcctcccaaagtgttgggaatacaggcatgaacactgtgccctgccaactttttatatcttaattttggaacataccttcacgtatagtatcacgtttgatccacctaacaacttcgagaaatgaacaagatagatgctattatccacttttcatgacttaaaagatacagaaggaagtctaggtcatggaacatcttgccctgggtcacacaggtagttaacagtggagtgaggactgtcccacatcctcaagtcccttgccaggtgcatgtcccttaaaccaccctgcctaatgccggcaaggcccagagggcagcacttggcccagttgcactgggaaagaaaaggggctgatgtttctttttctttatgaaatatttggggtttttggctcttattgcaggaagcaagaaatgagaatctttcatttccttacccagccttcctgt

SEQ ID NO: 77904 - DNA, 565 bp, Homo sapiens
  misc_feature (419)..(419): n is a, c, g, or t
  misc_feature (426)..(426): n is a, c, g, or t
  misc_feature (482)..(482): n is a, c, g, or t
  misc_feature (515)..(515): n is a, c, g, or t
  misc_feature (548)..(548): n is a, c, g, or t
  misc_feature (562)..(562): n is a, c, g, or t
caagaaggaaagcagttgttgaagctacagaagcccaggccagggctcccactggctgtagctgtgctctgggtccccaggtccctgcgcagccaccagggccccaccagaccatgggttccttattctggacaaaccctcctctgctggaaccctggactttggccccagtccctttaagagctgaaagggctgtgctgagagcactggcctctgcactcaactggaaccaattttcaccatgattttaaaaattaaaaaaacctggcagagcccgcctagaaagggacggcctctcccctcctacctgccaccgctggggaggcacagagctcgccagcgtccctggaagtcccctcaggaaatggaaagtggagtgcccttggtctggtagcaccatgtggggagggacccagctnggcgcangcccctggtgggccttttagaatccagacctccctgccggaatgccccgaaggcgngaggccgggctgtgctgcaggaaacccaatctncagatgccaaaggaacttgaaggggaagctganaaatcggctgtgtnccc

SEQ ID NO: 77905 - DNA, 428 bp, Homo sapiens
gccaccattatgctgtacctccaagcataatggtacatccacacacaccaaggcacctcgctcatgcaaggtgtgtgtcctctaacaaagtttcacactctaaacccagataacttttcaaacccaagttctgttgattcccctactttgagtgctccatagatgctcatttgtctactaaacactgccccaggcaattaaatattccaaagtgaccagcagaatttttatgttaattctgacattgcgttgttagtacaagtgtttttcccccttcaaatttatgtctttgttactgataaatgtaactgataatgcgtttttcagctgtgttgccaagcatatttatataaaaatatactcagattgttttcagaatttgacaaagatgatagcaataatgataatcttatttgttttataccaat

SEQ ID NO: 77906 - DNA, 600 bp, Homo sapiens
tacaagcagtgatggttcttctgccagcctgccgccatgggattgctctgtataagaagacaggtgcattctggaaacttgaatcactaaggggaggagcttcaattttgatcccagatatgctttaaactgtcttcagcttgtaggtggggttctgctggggacctgcccctatctgcctaggcatttggctgcctcctgtcactatcactaccaacatgtaatagctcaccaaaatgttgtatttcaactgggcagataaaacagatgctaataacctcaagagaagaatgttccttacagaagaaggaatatttcccaactcatttaatgaggccaacattattctgataccaaaactatacaaaagcattacaaggaaagagaactacagaccattattcctgatgtacaggccctgtcttcttccaagtcttttgtcttcagtggtgtctgcatgaagtggaatcattttcccaagcctgccaaatcaagaataaactcatctaagaagggtggagaagcctatctgaagggatggttacccatattgtgaaaaaactgtaaatgctttcaattaaatgatgatataatatatca

SEQ ID NO: 77907 - DNA, 424 bp, Homo sapiens
atacaatatagacacataataagaaaggtcttcaaatatataatcacagcagagtcaaatctgtgaatcaaaactattctttatgtgcataattaaccatttcaaagaagagttgggaaaaatatttaaggatatgaaacagttatgccattttcaatgttcatttttaattccacctcgtaaaatacatctaaaatagtagaaaagtttaaagtctgttaaattatcctggagaataggaaaatagacgacttgccaggtttggcctaggagaaaatgcctagtagccctgtttatttttttccacatattctaaaaaaataaggaagcattgcctaactttcgtacatttcatataaatataaggtaacattgtatcttttgtccatttccatagaggttaagagaaaaaatcaagtttaaa

SEQ ID NO: 77908 - DNA, 398 bp, Homo sapiens
ttacactatttaatctatctttcatgtctctgaacctctctttaatactttccatttaaaaatctctctgtattatactctggctatttttgcagatccagctctgtgttcactaattatcttctcagatgtatctaattgagtgttatgtctgttcattaaatttttactttcaattattttatttttgatttctataaattcttttttaaatattagctctacattttagaattccttgatttctgacattttggatccttcctttatttctttaaatatgttacagatgtgtattttatattctatgcaaatatctgaaatttttcgtggatctcattttgtggtctattttttttgcactccagcctgggtgacagagggagactccatctcaa

SEQ ID NO: 77909 - DNA, 413 bp, Homo sapiens
cttaagggcagcctcgaccgcctcctgtcctcctgcctccctccactcgtttctggcacactggcaagtgtgagcattgacaagaatgaccgggctaaggagacctgtcctgtttcaagacagagacattctggctgggtgcagtggctcacacctgtaatcccagcaccttgggaggctgaggcaggtggatcacctgaggtcagaagttcaagatcagcctggccaacatggtgaaaccccatctctactaaaaatacaaaaagtggccgggcatggtggcatgtgcctgtaatccctgctactcaggaggcgtggcaggagaattgcttgaatccaggaggtgaatgttgcagtgagctgagatcacgccaaggcactccagcctgggtgacagagcgagactctgtctc

SEQ ID NO: 77910 - DNA, 773 bp, Homo sapiens
gtgacagcctcagctgtgacaaaggagagaaaacagaaagacctgggaaagtgcaaggatgaagcaattaagtttgagaaatgtgatgtgaggtttaggaaaggtggattttagccccagcagacttttagctggacacggacctaataccttgagacttcattgttcccattaaagaaaaaattatcttctgactttctaggggtttgggggtcccagatatcaaaagatttaaaccacttaggaggtttccattggaaggagaagactgtctttagcccactgcatcccctcaagccatcccaagctttctctgtgccagggactggacgcacgctaaaatacgaacctgtgtggacttctttcttaggagcctttgcaccagcacaagaaagagacagagacagtgatggcgagactcaagcacgcatatcttgatggactccaaaatgctcttcctaattccttctctgtggctcattcttcatcctctatttgcattggtatgccaattcattgctgacacttcagtggatgacttggaagtgatttttaaaaaattattacatcaatgtcagtatgacaaactttgccagttcaaatgtgtactgccttggaagtggcattgcatgaggaaaaattattttctaacaaaaataggaataaaattcaaaattatatataaaaatctaaaatgaaaacgacagaacctgtagtaacctctgcatgatgtaaaggtggttgcaataaaaatcgcgaggaaaactgaaaag

SEQ ID NO: 77911 - DNA, 248 bp, Homo sapiens
ggttgcagtgagccgagatcgtgccactgcactccagtctggtgacagagcaagactccgtctcaaagacaaaacaaaacaaaagccccctgcattgctgtgtggaaaacgtggtgatgccccccacagaataggagactaagcagagagtcactaaaggataaccacccatcgagtgtagaggctattcagatgttatagcacttagcaataagtgaaagacacaggactggccaggcgcggcggct

SEQ ID NO: 77912 - DNA, 635 bp, Homo sapiens
  misc_feature (617)..(617): n is a, c, g, or t
  misc_feature (619)..(619): n is a, c, g, or t
ccaataatttttgagaagtgaatggcctcattattatcaagtagtttccaagatttagtttgtcattgttttatagagccagaagcctgaaaacctaagtcctagttcagactatactactatttgtggcatagttctttgtgggaattatttttactttgcctctctgtgcttttcctttctaagaaattgagtaataatacttaactagtaaatgtttaatattatggtaaaataatagttgtcaagtactttgaagacttaaatgatatgtatattaacttttttactctcattcattttgaaaagtatcagagcctcagattaagagtgattggatagtttttactttgttgcattttctgtgtgaaattatgtagctcataagctattatcttgtatatgtgtgtttacgtgagtaaagtgattatgcttatgtctattttagttactgtgtgtgaatgtaattttttaatttttttgaatggagccctccgcctcccaggagaatcgcttgaacccaggaggcaggataatcgcttgaacctggtaggcaaaggctgcaatgagccgagattgcaccactgcactccagccagggctggagcgagactctnantaaaaacaaaaaaaaa

SEQ ID NO: 77913 - DNA, 328 bp, Homo sapiens
atatgtatttattcaagtgcttaggaaaattatcaattcaacaaactacaattttgttttagacatgaataactgaaggtggtgggaggagggtagagagatgttggtcaaaggatacaaaattttcattagataagaggactaagttcaagagatctgttatgcaacctggtgactatgtagttgataacaatatattacattcttgaaaaatgctaagagagtagattttaagtgtattcaccacaaaaatgataactatgtatggtaatgcaaatgtcgattagctttatttagccattgcacaatgtatatctatttcagaaca

SEQ ID NO: 77914 - DNA, 348 bp, Homo sapiens
  misc_feature (15)..(15): n is a, c, g, or t
  misc_feature (23)..(23): n is a, c, g, or t
aggccggtacggccngagagtanggatccgccgccgccggccgcccgccggccgccacgaccccagtccccggcgggcgggcggaggaggcgaccgccgcgcgctgctgcactcatcctgccgccgccgcgatgcgcagaggggccgagccgcctgggggccgccgccgccgccgcgccgcaccatgaagctccgcagcaaggcggcggcgctgctcttgctcgcgctggccgcgctgctgctggcgctgctgtccctgcgcgctggccgcgctgagcccccagcgctgcccgcgcgccccgcgtccgccccgcagcgccaccccgcgcctgtccccgcgcgctggcc

SEQ ID NO: 77915 - DNA, 303 bp, Homo sapiens
tcctctgtagttcaggtttgcaaattttggcaggtcacatgacttatgtgagatccagtgttcatattttgaatggcaataataatctttgtcaatatacccccgcaaggtgacaatgagaaacttcagcttctgaatgacatgtattatcattgccaaatgataatattttttggaatatgccttgataatctgtcataatttttataatgagccatcttataactatcctgttactgcattaacaaggattatacaagctgctgtaacaaataagtcccaaaatttcagtggcccaacaca

SEQ ID NO: 77916 - DNA, 150 bp, Homo sapiens
ggagaggagaaccgctccttccttggatgccaccactgtcactgccaactctgctgaccgtcaccagcagtgcagcccccaacagtacccaacttgcccccctccatggctaatcctgccctcaatagcgccccccacctccactccccc

SEQ ID NO: 77917 - DNA, 477 bp, Homo sapiens
tcatataagctttcaaagttgatgaatgtaaggtgtcttgtttcaaggtagatgttttcacatacagatgtcttaccagagatttttcattgagcaaatatttcatattttatttaatagattttctattatttatcttagtgattttattctgctgaatgaaaaattttcattactgactagccatcttggtattaaaatcatttcagttggtagcaagactatttttcaaaaaatctttcttctgatttccagatcaattttaaaaggaacatcttgaattatgcagatcaactctatatctgagtgtgtgaaattgatagattctgaaatatcatgaaatctgagttgcattgttaaacagtaacattagtggagtggcttcaattgactggagtacaaagttgaggaatgtttattcggaggcaggaagaccatgaagtataaagcccatgtttgctcctatattttgtattt

SEQ ID NO: 77918 - DNA, 539 bp, Homo sapiens
tttgaatctttagaattttatttataaaacttcaaaaaatagacttttactactgtcatgcctctggcttcagatgggtgacattcaagaagaggaccaaagttgtagaccttagttacaacaatgatccagaagaaagataaattattttcagataagagctgacaaactatgattaatgcttctctgatgattgttagcatttatgtaataattctcagggtgtgagctttaaacattttaaaattaattttcaatctgagaattgattaaaatagacaaaaacaaacaaacaaacaaacccaagaagtcttagaggcaaggctctggtcaggaaacaaaaggttagtgctctaaaaatccttctcattttttattaaaataattttcagttctataagttgcattgaaaaaaatcaagcatactcactaaacattcttgtgctgaatattcacaaataataaacagatttctagttaaacatgacagatgaaacacatgtgtttatcaacactgcttctctaaacttcactgagtt

SEQ ID NO: 77919 - DNA, 566 bp, Homo sapiens
gggttagttgtcagtatctttcccagttgttccgccccctacccccgcctcccgcaccgcgcccctctccggctgccctctccgcgtggggcaaggctccgagggcagcattcagtagccatttagctttggaaggagaggtgattcgaatggcccggctcctcctgtcaccatgctaggcactttggccgcgcaggtgctgacctgaacctggttcatccctttctgaccaaaacttgtccttcatgccaatctggctgcctgtcagttgttgctagggcagcctcagttggcagcccagagctgtgaccgggtgttggagcgggagcctggccatttaaaggccttataccgaaggggggttgcccaggctgcccttgggaacctggaaaaagcaactgctgacctcaagaaggtgctggcgatagatcccaaaaaccgggcagcccaggaggaactggggaaggtggtcattcaggggaagaaccaggatgcagggctggctcagggtctgcgcaagatgtttggctgattaaaagttaaaccttaaaagagaaaaaaaattg

SEQ ID NO: 77920 - DNA, 1314 bp, Homo sapiens
atgtgggtggaacggggaagctggagcagatttttggaggaaagcaaaactggggactttcaggactaggggcctgggtctcagaagaatgggaaaggacgagaaaggagtctaaataagaaccctgctattagcattgtttggttttcttttcaggtgctgacctgaacctggttcatccctttctgaccaaaactgttcactcaccgtggaagggactaagcatccatatggagacgccaccagtcaatacaattggagaaaaggacacctctcagccgcaacaagagtgggaaaagaaccttcgggagaaccttgattcagttattcagattaggcagcagccccgagaccctcctaccgaaacgcttgagctggaagtaagcccagatccagccagccaaattctagagcatactcaaggagctgaaaaactggttgctgaacttgaaggagactctcataagtctcatggatcaaccagtcagatgccagaggcccttcaagcttctgatctctggtactgccccgatgggagctttgtcaagaagatcgtaatccgtggccatggcttggacaaacccaaactaggctcctgctgccgggtactggctttggggtttcctttcggatcagggccgccagagggctggacagagctaactatgggcgtagggccatggagggaggaaacttggggggagctcatagagaaatgcttggagtccatgtgtcaaggtgaggaagcagagcttcagctgcctgggcactctggacctcctgtcaggctcacactggcatccttcactcaaggccgagactcctgggagctggagactagcgagaaggaagccctggccagggaagaacgtgcaaggggcacagaactatttcgagctgggaaccctgaaggagctgcccgatgctatggacgggctcttcggctgctcctgactttacccccacctggccctccagaacgaactgtccttcatgccaatctggctgcctgtcagttgttgctagggcagcctcagttggcagcccagagctgtgaccgggtgttggagcgggagcctggccatttaaaggccttataccgaaggggggttgcccaggctgcccttgggaacctggaaaaagcaactgctgacctcaagaaggtgctggcgatagatcccaaaaaccgggcagcccaggaggaactggggaaggtggtcattcaggggaagaaccaggatgcagggctggctcagggtctgcgcaagatgtttggctgattaaaagttaaaccttaaaagagaaaaaaaattg

SEQ ID NO: 77921 - DNA, 1354 bp, Homo sapiens
gggttagttgtcagtatctttcccagttgttccgccccctacccccgcctcccgcaccgcgcccctctccggctgccctctccgcgtggggcaaggctccgagggcagcattcagtagccatttagctttggaaggagaggtgattcgaatggcccggctcctcctgtcaccatgctaggcactttggccgcgcaggtgctgacctgaacctggttcatccctttctgaccaaaactgttcactcaccgtggaagggactaagcatccatatggagacgccaccagtcaatacaattggagaaaaggacacctctcagccgcaacaagagtgggaaaagaaccttcgggagaaccttgattcagttattcagattaggcagcagccccgagaccctcctaccgaaacgcttgagctggaagtaagcccagatccagccagccaaattctagagcatactcaaggagctgaaaaactggttgctgaacttgaaggagactctcataagtctcatggatcaaccagtcagatgccagaggcccttcaagcttctgatctctggtactgccccgatgggagctttgtcaagaagatcgtaatccgtggccatggcttggacaaacccaaactaggctcctgctgccgggtactggctttggggtttcctttcggatcagggccgccagagggctggacagagctaactatgggcgtagggccatggagggaggaaacttggggggagctcatagagaaatgcttggagtccatgtgtcaaggtgaggaagcagagcttcagctgcctgggcactctggacctcctgtcaggctcacactggcatccttcactcaaggccgagactcctgggagctggagactagcgagaaggaagccctggccagggaagaacgtgcaaggggcacagaactatttcgagctgggaaccctgaaggagctgcccgatgctatggacgggctcttcggctgctcctgactttacccccacctggccctccagaacgaactgtccttcatgccaatctggctgcctgtcagttgttgctagggcagcctcagttggcagcccagagctgtgaccgggtgttggagcgggagcctggccatttaaaggccttataccgaaggggggttgcccaggctgcccttgggaacctggaaaaagcaactgctgacctcaagaaggtgctggcgatagatcccaaaaaccgggcagcccaggaggaactggggaaggtggtcattcaggggaagaaccaggatgcagggctggctcagggtctgcgcaagatgtttggctgattaaaagttaaaccttaaaagagaaaaaaaattg

SEQ ID NO: 77922 - DNA, 401 bp, Homo sapiens
tggatgaatgaaagatacatggatggattgatggaggatagatggatgaatggatggatgaaagagtgaatgtgttgcacggatgagtggatccattaatcaatggaagagtagatgtttgcctggatgaatgtagagtttgactctccttaaaatccttagagttttctttaagggtcctccaccctgaggcttaccctggccacccaaatgctatggcaagaacctaaattcttaccccaattccacttcctcttcagatacccaatgataaaatgagatattaaagggaagatcactttgcaactgatcaagtgctacaaaaatttcagcctgaggcaggaccgttcaggacagtctaactgcctttgttgtccctctgaacagtggatatattttca

SEQ ID NO: 77923 - DNA, 1065 bp, Homo sapiens
gtgccggagcctggcctggtgctctgggctctgccttctggttcctggaggcatcaaaggctgcatccgttctgccaacagctgttcggagagactcgttccagatcatcccgtcattttcagtttgttggacattttacagcttcaccaggagaatgtgcaactttattccagcattcgatgcatttttatagaaacactttggaaacactttggatgaaccaaggccttttccttatttaagtagactcagaacactccctttcttttcttttctctctctctctctcttttttttttacgaaagacttagaattgcatttgtccttttgtgggtgtcctgtgagaggtgatatgggggctaagaggactggctttctaatagaagaagtgagcgcctgagaggacaatttggtcattggacacggattgcaggctttgagaagcgctcagaggcccagggcggcgggctcagccattcggcttggggcaccaggctccccagagacaatgctcagtattcattcatacacagacgatggaagaagccacttcttccctgggcggtgtgggtttcccccagctcttcccacacgtgtgttaggaaatgcccgtgaacttgccctctgggctttttaatgagaggcttggcgcatgcggcacccagcggctgcttccctgcaagccagcgacttgccgagcagaatgagctctgctcctgagccccggtagctgcttcctcatctgcatttcatctggagcagggcaggtaaccacaggaggaggcatgcccgaggcagccaggactgggcgggaaggtgctccctggatatactctgtgaaccttctggaaggctgctggcagtttttcctttttgtccaccaccctgctctttttaataattgtacataatccgtgtatttgttttacctgctcatcttctaaactggcgagccctatagttcgttctcattgttagattttgccttttacaagtgtccccaacctgcaataaacttttccctcttgaaaaaaagtaatcagggatgggcaaaggtttctgt

SEQ ID NO: 77924 - DNA, 1031 bp, Homo sapiens
gtgccggagcctggcctggtgctctgggctctgccttctggttcctggaggcatcaaaggctgcatccgttctgccaacagctgttcggagagactcgttccagatcatcccgtcattttcagtttgttggacattttacagcttcaccaggagaatgtgcaactttattccagcattcgatgcatttttatagaaacactttggaaacactttggatgaaccaaggccttttccttatttaagtagactcagaacactccctttcttttcttttctctctctctctctcttttttttttacgaaagacttagaattgcatttgtccttttgtgggtgtcctgtgagaggtgatatgggggctaagaggactggctttctaatagaagaagtgagcgcctgagaggacaatttggtcattggacacggattgcaggctttgagaagcgctcagaggcccagggcggcgggctcagccattcggcttggggcaccaggctccccagagacaatgctcagtattcattcatacacagacgatggaagaagccacttcttccctgggcggtgtgggtttcccccagctcttcccacacgtgtgttaggaaatgcccgtgaacttgccctctgggctttttaatgagaggcttggcgcatgcggcacccagcggctgcttccctgcaagccagcgacttgccgagcagaatgagctctgctcctgagccccggtagctgcttcctcatctgcatttcatctggagcagggcaggtaaccacaggaggaggcatgcccgaggcagccaggactgggcgggaaggtgctccctggatatactctgtgaaccttctggaaggctgctggcagtttttcctttttgtccaccaccctgctctttttaataattgtacataatccgtgtatttgttttacctgctcatcttctaaactggcgagccctatagttcgttctcattgttagattttgccttttacaagtgtccccaacctgcaataaacttttccctcttga

SEQ ID NO: 77925 - DNA, 1009 bp, Homo sapiens
gtgccggagcctggcctggtgctctgggctctgccttctggttcctggaggcatcaaaggctgcatccgttctgccaacagctgttcggagagactcgttccagatcatcccgtcattttcagtttgttggacattttacagcttcaccaggagaatgtgcaactttattccagcattcgatgcatttttatagaaacactttggaaacactttggatgaaccaaggccttttccttatttaagtagactcagaacactccctttcttttcttttctctctctctctctcttttttttttacgaaagacttagaattgcatttgtccttttgtgggtgtcctgtgagaggtgatatgggggctaagaggactggctttctaatagaagaagtgagcgcctgagaggacaatttggtcattggacacggattgcaggctttgagaagcgctcagaggcccagggcggcgggctcagccattcggcttggggcaccaggctccccagagacaatgctcagtattcattcatacacagacgatggaagaagccacttcttccctgggcggtgtgggtttcccccagctcttcccacacgtgtgttaggaaatgcccgtgaacttgccctctgggctttttaatgagaggcttggcgcatgcggcacccagcggctgcttccctgcaagccagcgacttgccgagcagaatgagctctgctcctgagccccggtagctgcttcctcatctgcatttcatctggagcagggcaggtaaccacaggaggaggcatgcccgaggcagccaggactgggcgggaaggtgctccctggatatactctgtgaaccttctggaaggctgccgccagggtgtctttcacactcgacaccctgctccgacgaacaatggtacataagcacgtctagctgttcgacttgtcatgatgattcctccactggcgacccatacagttcgttctcaatataggtttaccctgtggggatcgcatgta

SEQ ID NO: 77926 - DNA, 438 bp, Homo sapiens
agacacccatggaattagtagttttcaaggtggctttgaatagagcattttcaacaaagaacagtaagtttttagagaatacaagactgaggaaaaggactttgaatctgtagccgtagtaaattttggaagggcaaatcaatatggcgggtagaggctagttggtgaagcttattaacacagattcttttccaggctaaagttgtcttcagtggttaacctttgtttctcctagtagagaggtgggcaggataccttttgtctttgcaaatctatgtcttgatttaggcaagtggaaggcagagaggtttcttgcatctgctccttcaaaactaccttcagtagaacaatccttcctattttggggtagcatattctggtttcccagaacatacttcagtcaaaacaacatatcacagcagattaaatacagagcca

SEQ ID NO: 77927 - DNA, 1027 bp, Homo sapiens
aaaaatccatcacagtttgcagcttttaaaagaaaaataagagattatgtactctgcgcacgtacacatctacaattggtttttaattcgtgttattgcacacactgtagaagacattgtcatcagacaatggttaatttctcgattgattcatttatttgacatctaagctgtcatagtaacttagtgtttatttgcatttaatactgagtaggtgcccatataatttggggtacaaaggtataatagcatttacacagtccattccttaagggtccagatatcctgactgtttgcctactggtcttctaccctttctacctaatgtgtctactgggtcttctggtatttcttgggggaagcgcagtttgattggtcttacataaatattttgactgtggtcatgggactcttggcatttaagtagaagctagtgttagtgtgttgccaggcaggagctaggtgatgagtccctgactataggtgctaagagcgtaggtgtgacccattatccagttttatgttgtgtggagcaactccggtagaattggccatgttcttaattctcctttgctttacggtttttagacagctgaggcagagtggtatgattaggcttagttatgtatcttgttggatgctcaaggagctatatacattactaaaaattctaagatttctattgcttaaatttacttctcccatttcattttgagaattaacatgtttgccatttatcataatttttaaaaatcagtttatctgtattaagtacaatggtgaaaagttatttttgaaattaaccttgggttaaattttctaatgagagcatactattaagtgaagtaaccagccaaatgaaaaacatgtaagcattttggtcatttgttttcaaaagatatgttacttacgggctcttctgcaagggggatttctttttgtttctatgctatagagtggagttgtatgaagaggttagattctaaagtcgatgcatagaatgaaaatcacatgtagtaaaaaaaaa

SEQ ID NO: 77928 - DNA, 1604 bp, Homo sapiens
aggtatagctatgcttttgattttataagtgattttgtcatctttccaaaaacgagaacgcaaagactgttaggagctgtttttatgattaagtgaattggggtctagagaaggggaagataagtaaagttggagactagaactcaacatataaccaggccatacacgttgctgttagaatcacttctgtgctctgcaaacctattttctcccagaggaaccagcttcagaacagttttagataaagctgtgcaagcagatggacaagtgaaagaatgttaccagtctcatcgtgacaccatcgtgcttttgtgtaagccagagcctgagctgaatgctgccatcccttctgctaatccagcaaagaccatgcagggcagtgaggttgtaaatgtcttaaaatccttattgtcaaatcttgatgaagtaaagaaggaaagagagggtctggagaatgacttgaaatctgtgaattttgacatgacaagcaagtttttgacagccctggctcaagatggtgtgataaatgaagaagctctttctgttactgaactagatcgagtctatggaggtcttacaactaaagtccaagaatctctaaagaaacaggagggacttcttaaaaatattcaggtctcacatcaggaattttcaaaaatgaaacaatctaataatgaagctaacttaagagaagaagttttgaagaatttagctactgcatatgacaactttgttgaacttgtagctaatttgaaggaaggcacaaagttttacaatgagttgactgaaatcctggtcaggttccagaacaaatgcagtgatatagtttttgcacggaagacagaaagagatgaactcttaaaggacttgcaacaaagcattgccagagaacctagtgctccttcaattcctacacctgcgtatcagtcctcaccagcaggaggacatgcaccaactcctccaactccagcgccaagaaccatgccgcctactaagccccagcccccagccaggcctccaccacctgtgcttccagcaaatcgagctccttctgctactgctccatctccagtgggggctgggactgctgcgccagctccatcacaaacgcctggctcagctcctcctccacaggcgcagggaccaccctatcccacctatccaggatatcctgggtattgccaaatgcccatgcccatgggctataatccttatgcgtatggcagtataatatgccatatccaccagtgtatcaccagagtctggacaggctccataccccgggaacccagagcttaataacccttccctcaggccccacagaagtcttactatcacaggagtatatgtctggttcgaaggtcagtgattagatcgagggaagaaataccacctgtatagtgttctaactctacgcctggtaggtatgagctcccggagaagcaggataatggttacgtagaaggccctccatgttacacattgaaaggcggggcacaagatagatgtgttgacaagaagacgaccggtgagagactacagaggagaacagaagggagagcactgggatgagcatcaaaaacaagtgttagtaatttcaaaga

SEQ ID NO: 77929 - DNA, 848 bp, Homo sapiens
aggtatagctatgcttttgattttataagtgattttgtcatctttccaaaaacgagaacgcaaagactgttaggagctgtttttatgattaagtgaattggggtctagagaaggggaagataagtaaagttggagactagaactcaacatataaccaggccatacacgttgctgttagaatcacttctgtgctctgcaaacctattttctcccagaggaaccagcttcagaacagttttagataaagctgtgcaagcagatggacaagtgaaagaatgttaccagtctcatcgtgacaccatcgtgcttttgtgtaagccagagcctgagctgaatgctgccatcccttctgctaatccagcaaagaccatgcagggcagtgaggttgtaaatgtcttaaaatccttattgtcaaatcttgatgaagtaaagaaggaaagagagggtctggagaatgacttgaaatctgtgaattttgacatgacaagcaagtttttgacagccctggctcaagatggtgtgataaatgaagaagctctttctgttactgaactagatcgagtctatggaggtcttacaactaaagtccaagaatctctaaagaaacaggagggacttcttaaaaatattcaggtctcacatcaggaattttcaaaaatgaaacaatctaataatgaagctaacttaagagaagaagttttgaagaatttagctactgcatatgacaactttgttgaacttgtagctaatttgaaggaaggcacaaagttttacaatgagttgactgaaatcctggtcaggttccagaacaaatgcagtgatatagtcttgctgtggaagggtaccgg

SEQ ID NO: 77930 - DNA, 949 bp, Homo sapiens
aggtatagctatgcttttgattttataagtgattttgtcatctttccaaaaacgagaacgcaaagactgttaggagctgtttttatgattaagtgaattggggtctagagaaggggaagataagtaaagttggagactagaactcaacatataaccaggccatacacgttgctgttagaatcacttctgtgctctgcaaacctattttctcccagaggaaccagcttcagaacagttttagataaagctgtgcaagcagatggacaagtgaaagaatgttaccagtctcatcgtgacaccatcgtgcttttgtgtaagccagagcctgagctgaatgctgccatcccttctgctaatccagcaaagaccatgcagggcagtgaggttgtaaatgtcttaaaatccttattgtcaaatcttgatgaagtaaagaaggaaagagagggtctggagaatgacttgaaatctgtgaattttgacatgacaagcaagtttttgacagccctggctcaagatggtgtgataaatgaagaagctctttctgttactgaactagatcgagtctatggaggtcttacaactaaagtccaagaatctctaaagaaacaggagggacttcttaaaaatattcaggtctcacatcaggaattttcaaaaatgaaacaatctaataatgaagctaacttaagagaagaagttttgaagaatttagctactgcatatgacaactttgttgaacttgtagctaatttgaaggaaggcacaaagttttacaatgagttgactgaaatcctggtcaggttccagaacaaatgcagtgatatagtttttgcacggaagacagaaagagatgaactcttaaagcctgagacctgggaggaagctggagaaaagatgccctctgaatctttgtgtttggctgcccaggctcgcctttacaccagaagga

SEQ ID NO: 77931 - DNA, 918 bp, Homo sapiens
aggtatagctatgcttttgattttataagtgattttgtcatctttccaaaaacgagaacgcaaagactgttaggagctgtttttatgattaagtgaattggggtctagagaaggggaagataagtaaagttggagactagaactcaacatataaccaggccatacacgttgctgttagaatcacttctgtgctctgcaaacctattttctcccagaggaaccagcttcagaacagttttagataaagctgtgcaagcagatggacaagtgaaagaatgttaccagtctcatcgtgacaccatcgtgcttttgtgtaagccagagcctgagctgaatgctgccatcccttctgctaatccagcaaagaccatgcagggcagtgaggttgtaaatgtcttaaaatccttattgtcaaatcttgatgaagtaaagaaggaaagagagggtctggagaatgacttgaaatctgtgaattttgacatgacaagcaagtttttgacagccctggctcaagatggtgtgataaatgaagaagctctttctgttactgaactagatcgagtctatggaggtcttacaactaaagtccaagaatctctaaagaaacaggagggacttcttaaaaatattcaggtctcacatcaggaattttcaaaaatgaaacaatctaataatgaagctaacttaagagaagaagttttgaagaatttagctactgcatatgacaactttgttgaacttgtagctaatttgaaggaaggcacaaagttttacaatgagttgactgaaatcctggtcaggttccagaacaaatgcagtgatatagtctttgctggtgggacgcttccccccagctcctcgaagcgacccaatgagtcgtccgagcacccccccgtgattgatgtgcctcctggtctg

SEQ ID NO: 77932 - DNA, 108 bp, Homo sapiens
gagggaggggacgatgagtggtttggtgtacaccaagcttgtccaacccacggcccaggatggctttgaatgtggcccaacacaaataaacttcttaaacattccgta

SEQ ID NO: 77933 - DNA, 346 bp, Homo sapiens
gggctttccaagctatgcaaagaacccctgaaatgaggagctactgagagcctttttgcaaaagaggaacatgactctccttacactgagaaggataatctggctgctctataaagactagaccaagtagggcaaaaatcacaccaagagaccagtttaaggctactgcattgatccaaagaagtgagagtgatttagactagggtggtagcaatagaagtagtgagaagtggcccaactgaagacgcattttgatggtagggacaagggagtttggtgaggtagtaggtatggggcagagaaaaagtcaagtcaccacagtgccagcggtttttgatgactcaag

SEQ ID NO: 77934 - DNA, 854 bp, Homo sapiens
ggcgggtgactacttccggtgcagtgaaggctcggggctgaagcggggtaattcctctcctgcaattacttttggatggaagtatgcccctttctcagtagaagatggtaatcttggagaatgaccatggagaaggggatgagttctggagaagggctgccttccagatcatctcaggtttcggctggtaaaataacagccaaagagttggaaacaaagcagtcctataaagagaaacgaggaggctttgtgttggtgcatgcaggtgcaggttatcattctgaatccaaagccaaggagtataaacatgtatgcaaacgagcttgtcagaaggcaattgaaaagctgcaggccggtgctcttgcaactgacgcagtcactgcagcactggtggaacttgaggattctccttttacaaatgcaggaatgggatctaatctaaatctgttaggtgaaattgagtgtgatgccagcataatggatggaaaatccttaaattttggagcagttggagcactgagtggtatgtgggcattatgacctactatctttggaaaatcatgcacgtgaccatttcatgccttctaaagatgattacagtctttttcaccatttctgcttggaatagtgtttaaaacaaatgttctttttttattgaatttaaaacatacagtcttagttataagtagtttttggtttgaatttgatcattctcctgtatcccttgaagagattaaagacatttaagacatgatttagaatattaattttacaatttgaaatacacactatattttttgttgtaaaaaatttcaggtaatataaataaaatttacctttgatcctccaaaaga

SEQ ID NO: 77935 - DNA, 2356 bp, Homo sapiens
ggcgggtgactacttccggtgcagtgaaggctcggggctgaagcggggtaattcctctcctgcaattacttttggatggaagtatgcccctttctcagtagaagatggtaatcttggagaatgaccatggagaaggggatgagttctggagaagggctgccttccagatcatctcaggtttcggctggtaaaataacagccaaagagttggaaacaaagcagtcctataaagagaaacgaggaggctttgtgttggtgcatgcaggtgcaggttatcattctgaatccaaagccaaggagtataaacatgtatgcaaacgagcttgtcagaaggcaattgaaaagctgcaggccggtgctcttgcaactgacgcagtcactgcagcactggtggaacttgaggattctccttttacaaatgcaggaatgggatctaatctaaatctgttaggtgaaattgagtgtgatgccagcataatggatggaaaatccttaaattttggagcagttggagcactgagtggaatcaagaacccagtctcggttgccaacagactcttatgtgaagggcagaagggcaagctctcggctggcagaattcctccctgctttttagttggagaaggagcctacagatgggcagtagatcatggaataccctcttgccctcctaacatcatgaccacaagattcagtttagctgcatttaaaagaaacaagaggaaactagagctggcagaaagggtggacacagattttatgcaactaaagaaaagaagacaatcaagtgagaaggaaaatgactcaggcactttggacacggtaggcgctgtggttgtggaccacgaagggaatgttgctgctgctgtctccagtggaggcttggccttgaaacatccggggagagttgggcaggctgctctttatggatgtggctgctgggctgaaaatactggagctcataacccctactccacagctgtgagtacctcaggatgtggagagcatcttgtgcgcaccatactggctagagaatgttcacatgctttacaagctgaggatgctcaccaagccctgttggagactatgcaaaacaagtttatcagttcacctttccttgccagtgaagatggcgtgcttggcggagtgattgtcctccgttcatgcagatgttctgccgagcctgactcctcccaaaataagcagacacttctagtggaatttctgtggagccacacgacggagagcatgtgtgtcggatatatgtcagcccaggatgggaaagccaagactcacatttcaagacttcctcctggtgcggtggcaggacagtctgtggcaatcgaaggtggggtgtgccgcctggagagcccagtgaactgacccttcaggctgagtgtgaagcgtctcagaggcatttcagaacctgagcttttgggggtttttaactgaagttggttgttttatctttcttgttttataattcctattgcaacctcgtgcactgctcgagacacaagtgctgctgtagttagcgcttagtgacacgcgggcctttggtgggtgagcgggactgtgtgtgagtgtgtgcgcgtatgtgcgcacatatgtgtatgtgtggagtatgtgtgtttgcttctccgtggatgaaatagaaactcctcattgtgtgaccaggaatggttaaatcatctttacaaaatgtgtgctttaactgtttacaagtaaaacctaaagttgcaggaaacattttttatttcgtaaagaggtaccaactgtcgctgatgtgatatgtcagaactgaagagtaaatctacttgtttaaatgacttgacagtggtagtgctccatttaataacagtaataagtaataaagtgtttttatttgttaaccagtttaagtggatcctgtggtaacttaaactgttgttctcatcccttatatggggcatttttctttaacaaagaatggtttcagtgaaacaatctagcagagaattaatgtcagaacctttttaaataatagtctgattgatacagtttgtacttatttcatcaagcttttctaagcttaaatattgcatagcttcgagctgtatggactatattatgaaagaatatgtaaagagaacatacagtaatgcacagtccttaatttgtgtataatggaaagttatttacaatataacactgtaaataagaaagcaaagtttatgggaaaattcaatattatctttgtttttgtttaaatatatttttaagataaaggcacaaaaataaaagaagcgtattactgggtatagtatgtgactcctcttctcagactaataaattatcttttgaatccttaaataga

SEQ ID NO: 77936 - DNA, 2287 bp, Homo sapiens
ggcgggtgactacttccggtgcagtgaaggctcggggctgaagcggggtaattcctctcctgcaattacttttggatggaagtatgcccctttctcagtagaagatggtaatcttggagaatgaccatggagaaggggatgagttctggagaagggctgccttccagatcatctcaggtttcggctggtaaaataacagccaaagagttggaaacaaagcagtcctataaagagaaacgaggaggctttgtgttggtgcatgcaggtgcaggttatcattctgaatccaaagccaaggagtataaacatgtatgcaaacgagcttgtcagaaggattctccttttacaaatgcaggaatgggatctaatctaaatctgttaggtgaaattgagtgtgatgccagcataatggatggaaaatccttaaattttggagcagttggagcactgagtggaatcaagaacccagtctcggttgccaacagactcttatgtgaagggcagaagggcaagctctcggctggcagaattcctccctgctttttagttggagaaggagcctacagatgggcagtagatcatggaataccctcttgccctcctaacatcatgaccacaagattcagtttagctgcatttaaaagaaacaagaggaaactagagctggcagaaagggtggacacagattttatgcaactaaagaaaagaagacaatcaagtgagaaggaaaatgactcaggcactttggacacggtaggcgctgtggttgtggaccacgaagggaatgttgctgctgctgtctccagtggaggcttggccttgaaacatccggggagagttgggcaggctgctctttatggatgtggctgctgggctgaaaatactggagctcataacccctactccacagctgtgagtacctcaggatgtggagagcatcttgtgcgcaccatactggctagagaatgttcacatgctttacaagctgaggatgctcaccaagccctgttggagactatgcaaaacaagtttatcagttcacctttccttgccagtgaagatggcgtgcttggcggagtgattgtcctccgttcatgcagatgttctgccgagcctgactcctcccaaaataagcagacacttctagtggaatttctgtggagccacacgacggagagcatgtgtgtcggatatatgtcagcccaggatgggaaagccaagactcacatttcaagacttcctcctggtgcggtggcaggacagtctgtggcaatcgaaggtggggtgtgccgcctggagagcccagtgaactgacccttcaggctgagtgtgaagcgtctcagaggcatttcagaacctgagcttttgggggtttttaactgaagttggttgttttatctttcttgttttataattcctattgcaacctcgtgcactgctcgagacacaagtgctgctgtagttagcgcttagtgacacgcgggcctttggtgggtgagcgggactgtgtgtgagtgtgtgcgcgtatgtgcgcacatatgtgtatgtgtggagtatgtgtgtttgcttctccgtggatgaaatagaaactcctcattgtgtgaccaggaatggttaaatcatctttacaaaatgtgtgctttaactgtttacaagtaaaacctaaagttgcaggaaacattttttatttcgtaaagaggtaccaactgtcgctgatgtgatatgtcagaactgaagagtaaatctacttgtttaaatgacttgacagtggtagtgctccatttaataacagtaataagtaataaagtgtttttatttgttaaccagtttaagtggatcctgtggtaacttaaactgttgttctcatcccttatatggggcatttttctttaacaaagaatggtttcagtgaaacaatctagcagagaattaatgtcagaacctttttaaataatagtctgattgatacagtttgtacttatttcatcaagcttttctaagcttaaatattgcatagcttcgagctgtatggactatattatgaaagaatatgtaaagagaacatacagtaatgcacagtccttaatttgtgtataatggaaagttatttacaatataacactgtaaataagaaagcaaagtttatgggaaaattcaatattatctttgtttttgtttaaatatatttttaagataaaggcacaaaaataaaagaagcgtattactgggtatagtatgtgactcctcttctcagactaataaattatcttttgaatccttaaataga

SEQ ID NO: 77937 - DNA, 1239 bp, Homo sapiens
  misc_feature (1149)..(1149): n is a, c, g, or t
  misc_feature (1197)..(1197): n is a, c, g, or t
  misc_feature (1211)..(1211): n is a, c, g, or t
  misc_feature (1224)..(1224): n is a, c, g, or t
  misc_feature (1238)..(1238): n is a, c, g, or t
ggcgggtgactacttccggtgcagtgaaggctcggggctgaagcggggtaattcctctcctgcaattacttttggatggaagtatgcccctttctcagtagaagatggtaatcttggagaatgaccatggagaaggggatgagttctggagaagggctgccttccagatcatctcaggtttcggctggtaaaataacagccaaagagttggaaacaaagcagtcctataaagagaaacgaggaggctttgtgttggtgcatgcaggtgcaggttatcattctgaatccaaagccaaggagtataaacatgtatgcaaacgagcttgtcagaaggcaattgaaaagctgcaggccggtgctcttgcaactgacgcagtcactgcagcactggtggaacttgaggattctccttttacaaatgcaggaatgggatctaatctaaatctgttaggtgaaattgagtgtgatgccagcataatggatggaaaatccttaaattttggagcagttggagcactgagtggaatcaagaacccagtctcggttgccaacagactcttatgtgaagggcagaagggcaagctctcggctggcagaattcctccctgctttttagttggagaaggagcctacagatgggcagtagatcatggaataccctcttgccctcctaacatcatgaccacaagattcagtttagctgcatttaaaagaaacaagaggaaactagagctggcagaaagggtggacacagattttatgcaactaaagaaaagaagacaatcaagtgagaaggaaaatgactcaggcactttggacacggtaggcgctgtggttgtggaccacgaagggaatgttgctgctgctgtctccagtggaggcttggccttgaaacatccggggagagttgggcaggctgctctttatggatgtggctgctgggctgaaaatactggagctcataacccctactccacagctgtgagtacctcaggatgtggagagcatcttgtgcgcaccatactggctagagaatgttcacatgctttacaagctgaggatgctcaccaagccctgttggagactatgcaaaacaagtttatcatgtttatagttttaacccctacatgtaggtgtatggtccttttncaaaaacaattttttcctggaatttctagtgtgaggattctccttttnacaaatggcagggntggggatctaatnctaaatctgtttant

SEQ ID NO: 77938 - DNA, 1197 bp, Homo sapiens
ggcgggtgactacttccggtgcagtgaaggctcggggctgaagcggggtaattcctctcctgcaattacttttggatggaagtatgcccctttctcagtagaagatggtaatcttggagaatgaccatggagaaggggatgagttctggagaagggctgccttccagatcatctcaggtttcggctggtaaaataacagccaaagagttggaaacaaagcagtcctataaagagaaacgaggaggctttgtgttggtgcatgcaggtgcaggttatcattctgaatccaaagccaaggagtataaacatgtatgcaaacgagcttgtcagaaggcaattgaaaagctgcaggccggtgctcttgcaactgacgcagtcactgcagcactggtggaacttgaggtgtacacacacagttacacttcatggagttgcatccagccaagtatccatgtccttcttgtgaagaggcagagaaaatcacctctcccaagaatttccaccttctgaacaagggaaatgtatcctgaagagctgtacgcagatgggaggcaacttgtttgcttgttctgctgctagagcattgatttaattagaagacaggctgtgggtggccatgtgcagacaaagaagcaccagacagagcccatttagcctgggacagtaaaaatgtttatagttttaacccctacatgtaggtgtatggtccttttcaaaaacaatttttcctgaattctagtgtgaggattctccttttacaaatgcaggaatgggatctaatctaaatctgttaggtgaaattgagtgtgatgccagcataatggatggaaaatccttaaattttggagcagttggagcactgagtggtatgtgggcattatgacctactatctttggaaaatcatgcacgtgaccatttcatgccttctaaagatgattacagtctttttcaccatttctgcttggaatagtgtttaaaacaaatgttctttttttattgaatttaaaacatacagtcttagttataagtagtttttggtttgaatttgatcattctcctgtatcccttgaagagattaaagacatttaagacatgatttagaatattaattttacaatttgaaatacacactatattttttgttgtaaaaaatttcaggtaatataaataaaatttacctttgatcctccaaaaga

SEQ ID NO: 77939 - DNA, 569 bp, Homo sapiens
aggattttcttctgggaaggctcttcagatatcttatttgacccattgccctaatatttcttaaatgttatatttaatgttttttatttttattttataggattcagtttagctgcatttaaaagaaacaagaggaaactagagctggcagaaagggtggacacagattttatgcaactaaagaaaagaagacaatcaagtgagaaggtcaggtggtgtttgaaatattcaaattaatgtatcagatgatatatcttctgcatttagatacaagctttaggacgatacaattcagtagaaatagaatgtgtgtcacatatgtactttaaagtttttcagtagctacattaaaaatatgttcataatattaggctcataaaagagaaaaagaaagtagaaagaaacaagggaaattaattttaatatattttatttaaaccagtggatctaaaatataactttgaaatatgatcagggaaaaattattaatgagctattttacattatcgtttttagtattaagtcttcagaaccagtttgagttttccacatctcaattataacactaa

SEQ ID NO: 77940 - DNA, 2699 bp, Homo sapiens
ggcgggtgactacttccggtgcagtgaaggctcggggctgaagcggggtaattcctctcctgcaattacttttggatggaagtatgcccctttctcagtagaagatggtaatcttggagaatgaccatggagaaggggatgagttctggagaagggctgccttccagatcatctcaggtttcggctggtaaaataacagccaaagagttggaaacaaagcagtcctataaagagaaacgaggaggctttgtgttggtgcatgcaggtgcaggttatcattctgaatccaaagccaaggagtataaacatgtatgcaaacgagcttgtcagaaggcaattgaaaagctgcaggccggtgctcttgcaactgacgcagtcactgcagcactggtggaacttgaggtgtacacacacagttacacttcatggagttgcatccagccaagtatccatgtccttcttgtgaagaggcagagaaaatcacctctcccaagaatttccaccttctgaacaagggaaatgtatcctgaagagctgtacgcagatgggaggcaacttgtttgcttgttctgctgctagagcattgatttaattagaagacaggctgtgggtggccatgtgcagacaaagaagcaccagacagagcccatttagcctgggacagtaaaaatgtttatagttttaacccctacatgtaggtgtatggtccttttcaaaaacaatttttcctgaattctagtgtgaggattctccttttacaaatgcaggaatgggatctaatctaaatctgttaggtgaaattgagtgtgatgccagcataatggatggaaaatccttaaattttggagcagttggagcactgagtggaatcaagaacccagtctcggttgccaacagactcttatgtgaagggcagaagggcaagctctcggctggcagaattcctccctgctttttagttggagaaggagcctacagatgggcagtagatcatggaataccctcttgccctcctaacatcatgaccacaagattcagtttagctgcatttaaaagaaacaagaggaaactagagctggcagaaagggtggacacagattttatgcaactaaagaaaagaagacaatcaagtgagaaggaaaatgactcaggcactttggacacggtaggcgctgtggttgtggaccacgaagggaatgttgctgctgctgtctccagtggaggcttggccttgaaacatccggggagagttgggcaggctgctctttatggatgtggctgctgggctgaaaatactggagctcataacccctactccacagctgtgagtacctcaggatgtggagagcatcttgtgcgcaccatactggctagagaatgttcacatgctttacaagctgaggatgctcaccaagccctgttggagactatgcaaaacaagtttatcagttcacctttccttgccagtgaagatggcgtgcttggcggagtgattgtcctccgttcatgcagatgttctgccgagcctgactcctcccaaaataagcagacacttctagtggaatttctgtggagccacacgacggagagcatgtgtgtcggatatatgtcagcccaggatgggaaagccaagactcacatttcaagacttcctcctggtgcggtggcaggacagtctgtggcaatcgaaggtggggtgtgccgcctggagagcccagtgaactgacccttcaggctgagtgtgaagcgtctcagaggcatttcagaacctgagcttttgggggtttttaactgaagttggttgttttatctttcttgttttataattcctattgcaacctcgtgcactgctcgagacacaagtgctgctgtagttagcgcttagtgacacgcgggcctttggtgggtgagcgggactgtgtgtgagtgtgtgcgcgtatgtgcgcacatatgtgtatgtgtggagtatgtgtgtttgcttctccgtggatgaaatagaaactcctcattgtgtgaccaggaatggttaaatcatctttacaaaatgtgtgctttaactgtttacaagtaaaacctaaagttgcaggaaacattttttatttcgtaaagaggtaccaactgtcgctgatgtgatatgtcagaactgaagagtaaatctacttgtttaaatgacttgacagtggtagtgctccatttaataacagtaataagtaataaagtgtttttatttgttaaccagtttaagtggatcctgtggtaacttaaactgttgttctcatcccttatatggggcatttttctttaacaaagaatggtttcagtgaaacaatctagcagagaattaatgtcagaacctttttaaataatagtctgattgatacagtttgtacttatttcatcaagcttttctaagcttaaatattgcatagcttcgagctgtatggactatattatgaaagaatatgtaaagagaacatacagtaatgcacagtccttaatttgtgtataatggaaagttatttacaatataacactgtaaataagaaagcaaagtttatgggaaaattcaatattatctttgtttttgtttaaatatatttttaagataaaggcacaaaaataaaagaagcgtattactgggtatagtatgtgactcctcttctcagactaataaattatcttttgaatccttaaataga

SEQ ID NO: 77941 - DNA, 2623 bp, Homo sapiens
ggcgggtgactacttccggtgcagtgaaggctcggggctgaagcggggtaattcctctcctgcaattacttttggatggaagtatgcccctttctcagtagaagatggtaatcttggagaatgaccatggagaaggggatgagttctggagaagggctgccttccagatcatctcaggtttcggctggtaaaataacagccaaagagttggaaacaaagcagtcctataaagagaaacgaggaggctttgtgttggtgcatgcaggtgcaggttatcattctgaatccaaagccaaggagtataaacatgtatgcaaacgagcttgtcagaaggcaattgaaaagctgcaggccggtgctcttgcaactgacgcagtcactgcagcactggtggaacttgaggtgtacacacacagttacacttcatggagttgcatccagccaagtatccatgtccttcttgtgaagaggcagagaaaatcacctctcccaagaatttccaccttctgaacaagggaaatgtatcctgaagagctgtacgcagatgggaggcaacttgtttgcttgttctgctgctagagcattgatttaattagaagacaggctgtgggtggccatgtgcagacaaagaagcaccagacagagcccatttagcctgggacagtaaaagattctccttttacaaatgcaggaatgggatctaatctaaatctgttaggtgaaattgagtgtgatgccagcataatggatggaaaatccttaaattttggagcagttggagcactgagtggaatcaagaacccagtctcggttgccaacagactcttatgtgaagggcagaagggcaagctctcggctggcagaattcctccctgctttttagttggagaaggagcctacagatgggcagtagatcatggaataccctcttgccctcctaacatcatgaccacaagattcagtttagctgcatttaaaagaaacaagaggaaactagagctggcagaaagggtggacacagattttatgcaactaaagaaaagaagacaatcaagtgagaaggaaaatgactcaggcactttggacacggtaggcgctgtggttgtggaccacgaagggaatgttgctgctgctgtctccagtggaggcttggccttgaaacatccggggagagttgggcaggctgctctttatggatgtggctgctgggctgaaaatactggagctcataacccctactccacagctgtgagtacctcaggatgtggagagcatcttgtgcgcaccatactggctagagaatgttcacatgctttacaagctgaggatgctcaccaagccctgttggagactatgcaaaacaagtttatcagttcacctttccttgccagtgaagatggcgtgcttggcggagtgattgtcctccgttcatgcagatgttctgccgagcctgactcctcccaaaataagcagacacttctagtggaatttctgtggagccacacgacggagagcatgtgtgtcggatatatgtcagcccaggatgggaaagccaagactcacatttcaagacttcctcctggtgcggtggcaggacagtctgtggcaatcgaaggtggggtgtgccgcctggagagcccagtgaactgacccttcaggctgagtgtgaagcgtctcagaggcatttcagaacctgagcttttgggggtttttaactgaagttggttgttttatctttcttgttttataattcctattgcaacctcgtgcactgctcgagacacaagtgctgctgtagttagcgcttagtgacacgcgggcctttggtgggtgagcgggactgtgtgtgagtgtgtgcgcgtatgtgcgcacatatgtgtatgtgtggagtatgtgtgtttgcttctccgtggatgaaatagaaactcctcattgtgtgaccaggaatggttaaatcatctttacaaaatgtgtgctttaactgtttacaagtaaaacctaaagttgcaggaaacattttttatttcgtaaagaggtaccaactgtcgctgatgtgatatgtcagaactgaagagtaaatctacttgtttaaatgacttgacagtggtagtgctccatttaataacagtaataagtaataaagtgtttttatttgttaaccagtttaagtggatcctgtggtaacttaaactgttgttctcatcccttatatggggcatttttctttaacaaagaatggtttcagtgaaacaatctagcagagaattaatgtcagaacctttttaaataatagtctgattgatacagtttgtacttatttcatcaagcttttctaagcttaaatattgcatagcttcgagctgtatggactatattatgaaagaatatgtaaagagaacatacagtaatgcacagtccttaatttgtgtataatggaaagttatttacaatataacactgtaaataagaaagcaaagtttatgggaaaattcaatattatctttgtttttgtttaaatatatttttaagataaaggcacaaaaataaaagaagcgtattactgggtatagtatgtgactcctcttctcagactaataaattatcttttgaatccttaaataga

SEQ ID NO: 77942 - DNA, 613 bp, Homo sapiens
ggcgggtgactacttccggtgcagtgaaggctcggggctgaagcggggtaattcctctcctgcaattacttttggatggaagtatgcccctttctcagtagaagatggtaatcttggagaatgaccatggagaaggggatgagttctggagaagggctgccttccagatcatctcaggtttcggctggtaaaataacagccaaagagttggaaacaaagcagtcctataaagagaaacgaggaggctttgtgttggtgcatgcaggtgcaggttatcattctgaatccaaagccaaggagtataaacatgtatgcaaacgagcttgtcagaaggcaattgaaaagctgcaggccggtgctcttgcaactgacgcagtcactgcagcactggtggaacttgagctcatgtggaaaggacaatttcaggtactgtgtgtgctaactaacctcttcctggacatcataaagaatccaactaaaacaaagtttaaaactatttcaaatgtgaaagtttattgaagccaatattctattttagagatttgtgttatgtttttgacaagtaactgtactgtaattatgtggctttcaattaaaaaatgtgaaaactgtt

SEQ ID NO: 77943 - DNA, 298 bp, Homo sapiens
tccacgttgacaccttctgcacaggtgcatttgtgagtcccctcggtgtctctgcagcatctatgtgtggatgaatagtgaagccacatgaggcctggtctgaagcagagaagatccgctcagcatcacgttgaatcccaagcccgcatctccgtgggctccaggacaatcctatgaaaatgacaccgtcggttcattgttcacatcggggaggagaattccgtctgaaaatgagcgtgacttcactgacacccaagtccgtggcacagccctgtgctgagctccacagacctacagt

SEQ ID NO: 77944 - DNA, 196 bp, Homo sapiens
cagaggatacttccatggtccgtgcctccccatctcccagcaattctgcatttccaagattggcacctctggtcctctgcacggtgaagccccttcctttcaattccccagtagccagtgctctaatccaccaggtctcaggcatgatctatgtttctccacactcgctttctgaggagagttttgcctgggttct

SEQ ID NO: 77945 - DNA, 381 bp, Homo sapiens
tttttgacaaataagacattacaatataattttttaaaaacaggagacaatactatgcaatattatgtaatttgcatagggacagtgactagaacgatatggccgggtacagtggctcactcctataatcccagcactttgggaggtcaaggagagtgcataacttgaggtcaggagttcgagaccagcctggccaacatggtgaaaccccatctctactaaaaatacaaaaattagttgggcgtgctggcgcacgcctgtaatccccactacttgggtgtctgagacaagagaatcgcttgaacctgggaggcggaggttgcagtgagctgagatcgtgccactgcactccagcctgggtgactgagcaagactgtctca

SEQ ID NO: 77946 - DNA, 327 bp, Homo sapiens
ccaaagtgctggattataggtgtaaaccaccatgcccagccctggacaagttccttaacctctttgtgcctcattttcctttactgtaaatgaggataatattagtaccacctacattcaatacacttaaaatagggcctggctcataacagtaagcactagatgaatgttggctactatagtctaataaccataacactcctacagctgactttaccaagaggcagtggcaaaactcaaatgtgaatctaggctttctgaggctaactgcctcaagtcacggagaaagacatgcccagattattaaaaacattattcaacatagaa

SEQ ID NO: 77947 - DNA, 2272 bp, Homo sapiens
tgcggagtccatcatggtccttccacatcgacctggggccctccatgctgggtgacgtcctcagcatcatggacaaggaggagtgggaccccgaggagggggagggtggttaccatggcgatgagggcgccgctggcaccatcacccaggctcccccgtacgccgtggcggccctcccctggcaaggcaggaaggcaaggctggcccagacttgccctccctcccctcccatgctctggaggatgaggggtgggcagcagcggcccccagccccggctcagcccgcagcatgggcagccacaccacacgggacagcagctccctctccagctgcacctcaggcatcctggaggagcgcagccctgccttccgggggccggacagggcccgggctgctgtctcaagacagccagacaaggagttctccttcatggatgaggaggaggaggatgaaatccgtgtgtgaggcggacagtgggtggccaccgggagctcttggctgcatcttctccctgcccccaccccactatgacctttgaccctacggcgcaggggcagccaggacccttgattcagaccatggaccctggaccttgtagatgagggacactggcctggccctcgggtcttcggaggacgtagggggctggcatgggtgccgactggctgcctgacttcatcatgctccctgcacttaggctgcgtgggacaagggctgtgttgtcacagcaggaataggttttcctctgttggcctccctttcctccaccctggcctcaaatggatgccagatgccaaccccagttctggccacgtacagccagcgggtcagcccagaggcagcctcagctccagggctaaggactctcggctcccattttctctgctggcgtttctgctgtgcccagcagtggctgctggggaagcagctgcagcaggagggagacggtcttgcctctcagcccctccctgccccaccccagctcctgccctggaaatctggagccccttggagctgagctggacggggggccagctgcgagcatgtgcactaaacgcagccctttccaggggaagagaacaggatggagaatggaaggaaagccccccaggcttcgtgaattgcaagaagggacccttccaggatgacactaggaacagggctagggcactcgctcagtccctaggggcttgtttgttctttattattgtgtttaaatccttatagagcaatatcaggatggtgttaataggtctgcctcagaatgagaatcaatccttttagaaaacctttatactaagcctcctcttcaaaattcacagtggcgattagcggactggagtctggtggcgattagcggactggagtctggggacatccgtggcaaagacaccagctcaactttagtgcttcccaactttatttagaatgacatggggtgggtgtctggtgtgtgtgttttccctacgcacctcccatagctattaacaactgaggaaggccagtgcagaatatttttggagaacgattttttttttaaataatatatcattcctatggggggaaagccttttttttctttttggctgagttattccctccctcccctcaataccctcagtactgactacttccctttcttttctcaggcctccccccaccgacttttgaggccagggttggccagatttagcaaaaccaaaacagagtgctgagttaaacgcaaatttcaggtaaacaaaagataattttctagcattaatatgccccacgcaatatttggaacacttatgtgaaaaatgatttgtttttctgaaattcacgtttctctctgagtcctgtaactgtccccgaggggattgagcagaagctcgggtatgagccctgaggttgactgccggttatttttctgtcctgggaacagcctgacccacctccctgtctccatgtagccagtgaggggagggggagacacagaaccaaccacagccaggggcgtccccatggcgactgtggcccggcccctcctctcttgcctgactctcctctcttgcctgactctagacactaacttagttccaggttcggtgccctgttggtgctcctgtttccaatagcttaggtcccatggtgggggaggaacctcaggggctatgcagcccccgccagctgccctcgaatcccgtccaggccaattccagattctaaactgatttttttcatgatattgtcaaaacagtgaggaaacattaaaaaaaaagccctaaagca

SEQ ID NO: 77948 - DNA, 1016 bp, Homo sapiens
tcgctattgtatctcggcgttgcttggagcctccctcgcgtggtgtgttccccggtttgtggccctctcggtcttccctacctggagatttttcacgacgtcttcggtttacccccgcggcgctttttttaactgtgggaggaattctcccggcccctagtttcctagtgccccgggttcttccttagggtacccgcgttgtgcccacgttgcccgcttctcctctaggggccgccgcgcccctacggcttggttcttggaaagctttttccaggggcctctgtcgtgcccacacacgtttttttttttgtttccttttttttctttttggctgagttattccctccctcccctcaataccctcagtactgactacttccctttcttttctcaggcctccccccaccgacttttgaggccagggttggccagatttagcaaaaccaaaacagagtgctgagttaaacgcaaatttcaggtaaacaaaagataattttctagcattaatatgccccacgcaatatttggaacacttatgtgaaaaatgatttgtttttctgaaattcacgtttctctctgagtcctgtaactgtccccgaggggattgagcagaagctcgggtatgagccctgaggttgactgccggttatttttctgtcctgggaacagcctgacccacctccctgtctccatgtagccagtgaggggagggggagacacagaaccaaccacagccaggggcgtccccatggcgactgtggcccggcccctcctctcttgcctgactctcctctcttgcctgactctagacactaacttagttccaggttcggtgccctgttggtgctcctgtttccaatagcttaggtcccatggtgggggaggaacctcaggggctatgcagcccccgccagctgccctcgaatcccgtccaggccaattccagattctaaactgatttttttcatgatattgtcaaaacagtgaggaaacattaaaaaaaaagccctaaagca

SEQ ID NO: 77949 - DNA, 2286 bp, Homo sapiens
tgcggagtccatcatggtccttccacatcgacctggggccctccatgctgggtgacgtcctcagcatcatggacaaggaggagtgggaccccgaggagggggagggtggttaccatggcgatgagggcgccgctggcaccatcacccaggctcccccgtacgccgtggcggccctcccctggcaaggcaggaaggcaaggctggcccagacttgccctccctcccctcccatgctctggaggatgaggggtgggcagcagcggcccccagccccggctcagcccgcagcatgggcagccacaccacacgggacagcagctccctctccagctgcacctcaggcatcctggaggagcgcagccctgccttccgggggccggacagggcccgggctgctgtctcaagacagccagacaaggagttctccttcatggatgaggaggaggaggatgaaatccgtgtgtgaggcggacagtgggtggccaccgggagctcttggctgcatcttctccctgcccccaccccactatgacctttgaccctacggcgcaggggcagccaggacccttgattcagaccatggaccctggaccttgtagatgagggacactggcctggccctcgggtcttcggaggacgtagggggctggcatgggtgccgactggctgcctgacttcatcatgctccctgcacttaggctgcgtgggacaagggctgtgttgtcacagcaggaataggttttcctctgttggcctccctttcctccaccctggcctcaaatggatgccagatgccaaccccagttctggccacgtacagccagcgggtcagcccagaggcagcctcagctccagggctaaggactctcggctcccattttctctgctggcgtttctgctgtgcccagcagtggctgctggggaagcagctgcagcaggagggagacggtcttgcctctcagcccctccctgccccaccccagctcctgccctggaaatctggagccccttggagctgagctggacggggggccagctgcgagcatgtgcactaaacgcagccctttccaggggaagagaacaggatggagaatggaaggaaagccccccaggcttcgtgaattgcaagaagggacccttccaggatgacactaggaacagggctagggcactcgctcagtccctaggggcttgtttgttctttattattgtgtttaaatccttatagagcaatatcaggatggtgttaataggtctgcctcagaatgagaatcaatccttttagaaaacctttatactaagcctcctcttcaaaattcacagtggcgattagcggactggagtctggtggcgattagcggactggagtctggggacatccgtggcaaagacaccagctcaactttagtgcttcccaactttatttagaatgacatggggtgggtgtctggtgtgtgtgttttccctacgcacctcccatagctattaacaactgaggaaggccagtgcagaatatttttggagaacgattttttttttaaataatatatcattcctatggggggaaagccttttttttctttttggctgagttattccctccctcccctcaataccctcagtactgactacttccctttcttttctcaggcctccccccaccgacttttgaggccagggttggccagatttagcaaaaccaaaacagagtgctgagttaaacgcaaatttcaggtaaacaaaagataattttctagcattaatatgccccacgcaatatttggaacacttatgtgaaaaatgatttgtttttctgaaattcacgtttctctctgagtcctgtaactgtccccgaggggattgagcagaagctcgggtatgagccctgaggttgactgccggttatttttctgtcctgggaacagcctgacccacctccctgtctccatgtagccagtgaggggagggggagacacagaaccaaccacagccaggggcgtccccatggcgactgtggcccggcccctcctctcttgcctgactctcctctcttgcctgactctagacactaacttagttccaggttcggtgccctgttggtgctcctgtttccaatagcttaggtcccatggtgggggaggaacctcaggggctatgcagcccccgccagctgccctcgaatcccgtccaggccaattccagattctaaactgatttttttcatgatattgtcaaaacagtgagtctgacaagggatccttagatcgacctcagaatgcagctgca

SEQ ID NO: 77950 - DNA, 1402 bp, Homo sapiens
tgcggagtccatcatggtccttccacatcgacctggggccctccatgctgggtgacgtcctcagcatcatggacaaggaggagtgggaccccgaggagggggagggtggttaccatggcgatgagggcgccgctggcaccatcacccaggctcccccgtacgccgtggcggccctcccctggcaaggcaggaaggcaaggctggcccagacttgccctccctcccctcccatgctctggaggatgaggggtgggcagcagcggcccccagccccggctcagcccgcagcatgggcagccacaccacacgggacagcagctccctctccagctgcacctcaggcatcctggaggagcgcagccctgccttccgggggccggacagggcccgggctgctgtctcaagacagccagacaaggagttctccttcatggatgaggaggaggaggatgaaatccgtgtgtgaggcggacagtgggtggccaccgggagctcttggctgcatcttctccctgcccccaccccactatgacctttgaccctacggcgcaggggcagccaggacccttgattcagaccatggaccctggaccttgtagatgagggacactggcctggccctcgggtcttcggaggacgtagggggctggcatgggtgccgactggctgcctgacttcatcatgctccctgcacttaggctgcgtgggacaagggctgtgttgtcacagcaggaataggttttcctctgttggcctccctttcctccaccctggcctcaaatggatgccagatgccaaccccagttctggccacgtacagccagcgggtcagcccagaggcagcctcagctccagggctaaggactctcggctcccattttctctgctggcgtttctgctgtgcccagcagtggctgctggggaagcagctgcagcaggagggagacggtcttgcctctcagcccctccctgccccaccccagctcctgccctggaaatctggagccccttggagctgagctggacggggggccagctgcgagcatgtgcactaaacgcagccctttccaggggaagagaacaggatggagaatggaaggaaagccccccaggcttcgtgaattgcaagaagggacccttccaggatgacactaggaacagggctagggcactcgctcagtccctaggggcttgtttgttctttattattgtgtttaaatccttatagagcaatatcaggatggtgttaataggtctgcctcagaatgagaatcaatccttttagaaaacctttatactaagcctcctcttcaaaattcacagtggcgattagcggactggagtctggtggcgattagcggactggagtctggcacatacctcccaccgtcctgttaccctc

SEQ ID NO: 77951 - DNA, 1406 bp, Homo sapiens
tgcggagtccatcatggtccttccacatcgacctggggccctccatgctgggtgacgtcctcagcatcatggacaaggaggagtgggaccccgaggagggggagggtggttaccatggcgatgagggcgccgctggcaccatcacccaggctcccccgtacgccgtggcggccctcccctggcaaggcaggaaggcaaggctggcccagacttgccctccctcccctcccatgctctggaggatgaggggtgggcagcagcggcccccagccccggctcagcccgcagcatgggcagccacaccacacgggacagcagctccctctccagctgcacctcaggcatcctggaggagcgcagccctgccttccgggggccggacagggcccgggctgctgtctcaagacagccagacaaggagttctccttcatggatgaggaggaggaggatgaaatccgtgtgtgaggcggacagtgggtggccaccgggagctcttggctgcatcttctccctgcccccaccccactatgacctttgaccctacggcgcaggggcagccaggacccttgattcagaccatggaccctggaccttgtagatgagggacactggcctggccctcgggtcttcggaggacgtagggggctggcatgggtgccgactggctgcctgacttcatcatgctccctgcacttaggctgcgtgggacaagggctgtgttgtcacagcaggaataggttttcctctgttggcctccctttcctccaccctggcctcaaatggatgccagatgccaaccccagttctggccacgtacagccagcgggtcagcccagaggcagcctcagctccagggctaaggactctcggctcccattttctctgctggcgtttctgctgtgcccagcagtggctgctggggaagcagctgcagcaggagggagacggtcttgcctctcagcccctccctgccccaccccagctcctgccctggaaatctggagccccttggagctgagctggacggggggccagctgcgagcatgtgcactaaacgcagccctttccaggggaagagaacaggatggagaatggaaggaaagccccccaggcttcgtgaattgcaagaagggacccttccaggatgacactaggaacagggctagggcactcgctcagtccctaggggcttgtttgttctttattattgtgtttaaatccttatagagcaatatcaggatggtgttaataggtctgcctcagaatgagaatcaatccttttagaaaacctttatactaagcctcctcttcaaaattcacagtggccaattccagattctaaactgatttttttcatgatattgtcaaaacagtgaggaaacattaaaaaaaaagccctaaagca

SEQ ID NO: 77952 - DNA, 211 bp, Homo sapiens
ccccatcaggcgaagaccgtgggttcggtgccctgttggtgctcctgtttccaatagcttaggtcccatggtgggggaggaacctcaggggctatgcagcccccgccagctgccctcgaatcccgtccaggccaattccagattctaaactgatttttttcatgatattgtcaaaacagtgaggaaacattaaaaaaaaagccctaaagca

SEQ ID NO: 77953 - DNA, 415 bp, Homo sapiens
caattccagattctaaactgatttttttcatgatattgtcaaaacagtgaggaaacattaaaaaaaaagccctaaagcacgcctggtgtctgtctctgctttttgggagggctatttcaggatgggggtggggtctggacccaggtcctagagctgtccaggggggcctgaggtggcttctgtctctctgtccgtgaggacccgcccttcctgcgatgctgtctgcctgggcaggccccttcagagtctggggactcaggtgtccctaactgccatctcttggaagcccttggcacttggtcgcttagctgttctgtgcctccctctcctgctctgtaaaatgggtatcctgccactcttagagggttgaggcacagaaacagtgacatgggctttttgtgggggagggggttgg

SEQ ID NO: 77954 - DNA, 2697 bp, Homo sapiens
tgcggagtccatcatggtccttccacatcgacctggggccctccatgctgggtgacgtcctcagcatcatggacaaggaggagtgggaccccgaggagggggagggtggttaccatggcgatgagggcgccgctggcaccatcacccaggctcccccgtacgccgtggcggccctcccctggcaaggcaggaaggcaaggctggcccagacttgccctccctcccctcccatgctctggaggatgaggggtgggcagcagcggcccccagccccggctcagcccgcagcatgggcagccacaccacacgggacagcagctccctctccagctgcacctcaggcatcctggaggagcgcagccctgccttccgggggccggacagggcccgggctgctgtctcaagacagccagacaaggagttctccttcatggatgaggaggaggaggatgaaatccgtgtgtgaggcggacagtgggtggccaccgggagctcttggctgcatcttctccctgcccccaccccactatgacctttgaccctacggcgcaggggcagccaggacccttgattcagaccatggaccctggaccttgtagatgagggacactggcctggccctcgggtcttcggaggacgtagggggctggcatgggtgccgactggctgcctgacttcatcatgctccctgcacttaggctgcgtgggacaagggctgtgttgtcacagcaggaataggttttcctctgttggcctccctttcctccaccctggcctcaaatggatgccagatgccaaccccagttctggccacgtacagccagcgggtcagcccagaggcagcctcagctccagggctaaggactctcggctcccattttctctgctggcgtttctgctgtgcccagcagtggctgctggggaagcagctgcagcaggagggagacggtcttgcctctcagcccctccctgccccaccccagctcctgccctggaaatctggagccccttggagctgagctggacggggggccagctgcgagcatgtgcactaaacgcagccctttccaggggaagagaacaggatggagaatggaaggaaagccccccaggcttcgtgaattgcaagaagggacccttccaggatgacactaggaacagggctagggcactcgctcagtccctaggggcttgtttgttctttattattgtgtttaaatccttatagagcaatatcaggatggtgttaataggtctgcctcagaatgagaatcaatccttttagaaaacctttatactaagcctcctcttcaaaattcacagtggcgattagcggactggagtctggtggcgattagcggactggagtctggggacatccgtggcaaagacaccagctcaactttagtgcttcccaactttatttagaatgacatggggtgggtgtctggtgtgtgtgttttccctacgcacctcccatagctattaacaactgaggaaggccagtgcagaatatttttggagaacgattttttttttaaataatatatcattcctatggggggaaagccttttttttctttttggctgagttattccctccctcccctcaataccctcagtactgactacttccctttcttttctcaggcctccccccaccgacttttgaggccagggttggccagatttagcaaaaccaaaacagagtgctgagttaaacgcaaatttcaggtaaacaaaagataattttctagcattaatatgccccacgcaatatttggaacacttatgtgaaaaatgatttgtttttctgaaattcacgtttctctctgagtcctgtaactgtccccgaggggattgagcagaagctcgggtatgagccctgaggttgactgccggttatttttctgtcctgggaacagcctgacccacctccctgtctccatgtagccagtgaggggagggggagacacagaaccaaccacagccaggggcgtccccatggcgactgtggcccggcccctcctctcttgcctgactctcctctcttgcctgactctagacactaacttagttccaggttcggtgccctgttggtgctcctgtttccaatagcttaggtcccatggtgggggaggaacctcaggggctatgcagcccccgccagctgccctcgaatcccgtccaggccaattccagattctaaactgatttttttcatgatattgtcaaaacagtgaggaaacattaaaaaaaaagccctaaagcaaaaaaaaaaaaaaaaaacaaaaaaaaaaaaaaacaaaacaaaaaaaacaaaaaaaaaaaaaaaaaagagggggggggcgccacaaaatttccccccggggggcgccccattcccgcccccgcgttttctgaggcgcacaaaagggggccccactaagaggggcccgagtcaactaaacccagacagcgacggcgcccgggcttaaaaaaacgcccgcgtgcgggggacaaccaggctcacgcggacactcggctgggacaagaccccaccacggggggggaaacatgcgcggccaccacccacccagagaaatgcacggccccgagcgacacatataccagcaccggtgatcgtgttgacagcccgggcaatgccgcgccgacaaatctgcgctcggtatcgacaaaaagtaggcgggcgaacaa

SEQ ID NO: 77955 - DNA, 2180 bp, Homo sapiens
tgcggagtccatcatggtccttccacatcgacctggggccctccatgctgggtgacgtcctcagcatcatggacaaggaggagtgggaccccgaggagggggagggtggttaccatggcgatgagggcgccgctggcaccatcacccaggctcccccgtacgccgtggcggccctcccctggcaaggcaggaaggcaaggctggcccagacttgccctccctcccctcccatgctctggaggatgaggggtgggcagcagcggcccccagccccggctcagcccgcagcatgggcagccacaccacacgggacagcagctccctctccagctgcacctcaggcatcctggaggagcgcagccctgccttccgggggccggacagggcccgggctgctgtctcaagacagccagacaaggagttctccttcatggatgaggaggaggaggatgaaatccgtgtgtgaggcggacagtgggtggccaccgggagctcttggctgcatcttctccctgcccccaccccactatgacctttgaccctacggcgcaggggcagccaggacccttgattcagaccatggaccctggaccttgtagatgagggacactggcctggccctcgggtcttcggaggacgtagggggctggcatgggtgccgactggctgcctgacttcatcatgctccctgcacttaggctgcgtgggacaagggctgtgttgtcacagcaggaataggttttcctctgttggcctccctttcctccaccctggcctcaaatggatgccagatgccaaccccagttctggccacgtacagccagcgggtcagcccagaggcagcctcagctccagggctaaggactctcggctcccattttctctgctggcgtttctgctgtgcccagcagtggctgctggggaagcagctgcagcaggagggagacggtcttgcctctcagcccctccctgccccaccccagctcctgccctggaaatctggagccccttggagctgagctggacggggggccagctgcgagcatgtgcactaaacgcagccctttccaggggaagagaacaggatggagaatggaaggaaagccccccaggcttcgtgaattgcaagaagggacccttccaggatgacactaggaacagggctagggcactcgctcagtccctaggggcttgtttgttctttattattgtgtttaaatccttatagagcaatatcaggatggtgttaataggtctgcctcagaatgagaatcaatccttttagaaaacctttatactaagcctcctcttcaaaattcacagtggcgattagcggactggagtctggtggcgattagcggactggagtctggggacatccgtggcaaagacaccagctcaactttagtgcttcccaactttatttagaatgacatggggtgggtgtctggtgtgtgtgttttccctacgcacctcccatagctattaacaactgaggaaggccagtgcagaatatttttggagaacgattttttttttaaataatatatcattcctatggggggaaagccttttttttctttttggctgagttattccctccctcccctcaataccctcagtactgactacttccctttcttttctcaggcctccccccaccgacttttgaggccagggttggccagatttagcaaaaccaaaacagagtgctgagttaaacgcaaatttcaggtaaacaaaagataattttctagcattaatatgccccacgcaatatttggaacacttatgtgaaaaatgatttgtttttctgaaattcacgtttctctctgagtcctgtaactgtccccgaggggattgagcagaagctcgggtatgagccctgaggttgactgccggttatttttctgtcctgggaacagcctgacccacctccctgtctccatgtagccagtgaggggagggggagacacagaaccaaccacagccaggggcgtccccatggcgactgtggcccggcccctcctctcttgcctgactctcctctcttgcctgactctagacactaacttagttccaggttcggtgccctgttggtgctcctgtttccaatagcttaggtcccatggtgggggaggaacctcaggggctatgctattggaaacaggagcaccaac

SEQ ID NO: 77956 - DNA, 760 bp, Homo sapiens
ttcctggcaattgcatgtatatttttttctgcatgttatttggatgtgaggagctgtcattattattttaggaacaaatatgaaacaatctctggaaaatggaatttgattttgattcaacaacaggagaattctactgtttttctccagcagctccacgataaaagggaaccctgagcagaacacatgcacaaactcatgccataccctaagggacaaggttccccacatctacttggaaatctttgggatgctcaatgattagctctttggaactgagagatgagatgaggcctggaaaacttcccccagtacagtcaagttcctgttgactaattctgtgaccaccagtgacagtctttgagtccgtgaggcagagttgcggcagcacaggctttgcttggagttggatggttcgcaccctgcttggcatggtttctaagagacatcctctgagtggatgaggggagaatccagcaggcctctagtcacactggtacgaataattttgatggtgggagatggtggtgtgagtggagggtctgtgggtgtgatgaacacctgaatgactcatggggagagggatgttaacaggacagatgccacttgctgtaattttcatatgatgtgtttggaaagccccctgcatggaggaaagatagatcgaggtccctttcaaaagtgctccagatgaagaggcatttccactttcagaaaccctgagaatccccgaaagaacctctaactagtcattgtactg

SEQ ID NO: 77957 - DNA, 937 bp, Homo sapiens
ttagaaatatcactttggaggccatgtgcagatcagatttggaagtgaccaagactggaggcagggacaccagagttttctgttaaaaactggtccatgcaagaaaagatgactcctgaaataagacagtgatcattaggatgaagaggaagagaagatttgaggaatacttagaacagaatttactgaatttactggttgaattgaatgtgaagaggagatgaataaagaagaaaacaccctcaaaggaacaaatatgaaacaatctctggaaaatggaatttgattttgattcaacaacaggagaattctactgtttttctccagcagctccacgataaaagggaaccctgagcagaacacatgcacaaactcatgccataccctaagggacaaggttccccacatctacttggaaatctttgggatgctcaatgattagctctttggaactgagagatgagatgaggcctggaaaacttcccccagtacagtcaagttcctgttgactaattctgtgaccaccagtgacagtctttgagtccgtgaggcagagttgcggcagcacaggctttgcttggagttggatggttcgcaccctgcttggcatggtttctaagagacatcctctgagtggatgaggggagaatccagcaggcctctagtcacactggtacgaataattttgatggtgggagatggtggtgtgagtggagggtctgtgggtgtgatgaacacctgaatgactcatggggagagggatgttaacaggacagatgccacttgctgtaattttcatatgatgtgtttggaaagccccctgcatggaggaaagatagatcgaggtccctttcaaaagtgctccagatgaagaggcatttccactttcagaaaccctgagaatccccgaaagaacctctaactagtcattgtactg

SEQ ID NO: 77958 - DNA, 444 bp, Homo sapiens
ccttctgttacgcaggctggagtgcagtggcaagatcatggctcactgaacccttgaacttgtaggctcaagcgatgctcccacctcagcctcccaagtagctacgactacaggcatgtgccaccaagccttggctaacgttttgttttttattttgtagagacaaggtctcattatgttgcccaggctcgtctcgaacttttgtcatgttctttgtcatgaaggatctcaagtgatccttctgcctaggcctctcaaaatgttgaaattagaggtgtgagccactgtgcccagcctaatcacagatttttagcattgaaacagatgactttagacatctatttcagtttcctcatattatatttcaggctcagtttctttgtaaaataataaacaagcaataaggtatatttggcaaatagaggaaagctgaaaaattaccca

SEQ ID NO: 77959 - DNA, 165 bp, Homo sapiens
ggcaagtctaatcccagcagggctaggattaattaggattcacttattaacacttatcaaacctctggcagaagtggcttgctaaacttagaaacttggagaggaaaaatatgagtatacaaagatgggtgagttttgcctataaagaaaaaataattatgatcc

SEQ ID NO: 77960 - DNA, 549 bp, Homo sapiens
agttttggctgtcgtgactggagggaagtggtgctcctacatctaatgcgaggaggacagaggtgctgctaaacatcattcccacacaggacagcctcccgcaacaaagaattgcctggtccaaaatgggtgggaaagcctgacttagaggcttagggagttttcccctcctgctaaatgacttgaagcgattgccacatgggttacacataaaatgtgtccatggcatacagttctgactgtaaaatgagcgtcactcaatggtgacaggaaactggaagcactgttaaaatgggaagatatgaaccaatccttatctacatgacacctacacatctagaactttacgaatttctctcatgggctcctggatctggacatttacatgatgccaggcatatagctgtgtggcttcttgcaggcaaaattcccaagtgattgactacatctcttatttttcttccaggtgtttgtgtacagtttaagcaatcacagtctctgcgtagaaagatcttctcaaatatactactgcaaaaagcaaaaaaaaaa

SEQ ID NO: 77961 - DNA, 187 bp, Homo sapiens
atacaatgtaaatatacattatataatgtacaatatacaatgtacattgtgtacagttatataatgtacattgtaaagtgtacattatttaattgcacattgtaaattgtacattatataattgtacattgtataatgtaaatatacattgtattaggtactataaacaaataactgtttagggaat

SEQ ID NO: 77962 - DNA, 258 bp, Homo sapiens
gtgagccgagatcgcgccattgcactcagcctggccgacagagtgagactccctctcaaaataacagtagtaataaataaataaagtcgttgcttgcaggctgtacaaaaaaaggcagcaactggacttggcccctaactcatagtttgccaaaactctgctctaaagtttgcttgcttcattcacttctcagagcctggccctgggagccgcctatcccagtcctcatcccacatggccagcgttctcctaccttca

SEQ ID NO: 77963 - DNA, 2581 bp, Homo sapiens
  misc_feature (922)..(922): n is a, c, g, or t
  misc_feature (924)..(924): n is a, c, g, or t
  misc_feature (932)..(932): n is a, c, g, or t
  misc_feature (937)..(937): n is a, c, g, or t
  misc_feature (958)..(959): n is a, c, g, or t
  misc_feature (962)..(962): n is a, c, g, or t
  misc_feature (968)..(968): n is a, c, g, or t
  misc_feature (1041)..(1041): n is a, c, g, or t
  misc_feature (1138)..(1138): n is a, c, g, or t
  misc_feature (1259)..(1259): n is a, c, g, or t
  misc_feature (1308)..(1308): n is a, c, g, or t
  misc_feature (1936)..(1936): n is a, c, g, or t
  misc_feature (2193)..(2193): n is a, c, g, or t
  misc_feature (2212)..(2212): n is a, c, g, or t
  misc_feature (2214)..(2214): n is a, c, g, or t
  misc_feature (2440)..(2440): n is a, c, g, or t
  misc_feature (2500)..(2500): n is a, c, g, or t
  misc_feature (2505)..(2505): n is a, c, g, or t
aaatgccttggctgagcatgacctgctcaccaattctctctaatgtggacatttatcatgctgcccagtattgggaagaatgtcttagaatttctcacgagctcctagtacaagtctggtctagtttctgcctccagcccctccactgaaattgctcttgccaaggcccccagcaacacttgcattgcttaactcagtgaacaggttttaatgcttatcattttggaactcagcaagtgtttctgagtttgtcccttcttcttcagttcctctggcttccttctgcacctttgctctcatctctttctggcttgattatcttttagcgtgcccccccaccccgcaccaactttatctgtggagacactcctctagtcttcttccaatgatgttcctcttttgcttgccccttaaaagaagttgtccttggtccccttatatattctatgtgctctccctgaatggtctcaactacattcatggcttcaagaactaccctgatgagtcgcaaatctgtattttcagtattgacttcactcctgaactcctaagccaaatctccttcatctccatctggatatcccacaggcatttcaaatttcacacgctcaagactgaactcatcttcctacccatacgcagacctcctccttcatcccatttgtccaggaatgactccaaagtctgtggtcacctcactctatccctgtggagtcatgctagagctttttcacttccccatcgccactcccctcccctgccaaccaatgccccgcttttccaattggctaacttgtactcgttcttcaagcttcatattggacaccatttctccaggaacatttccccaaccccaaacgtctgtgtaaagtactcctcttatgtgttcctacagcactttcttagtccatctgtgttgctntnaaggaatncctgnggctgggtaatttataaagannagnggtttntttggctcatgattctgcaggctgtacaggaaacatggtgctggcatctgcttggtttctggtgagggtctcnggctgcttccactcatggcataaggtgaaggggagccggcaagtgcagagatcacatgatgagagaggaatcaaggtggggtgggggggaggtgctncactcttttttaacaaccagctcttgtgggaatgaatcaagtgagaactcactcattactgcgaggctggcaccaagccattcatgaaggatccaccccatgactcaaacaccttccattngaccccaccttccaacactgggtatcaaatttccacatgagatttggangggtcaaacaaaccaaactataaccagcaccttgaacttcccctctcatagcacttatcacagtatagtgttgtcattgtctggctccttgtctgtatgttccgccagactgcatgcagggatctgatctatatttctcgttggtgttgtctcaatgcttaacacagtatacctggcactacccttcaatattttttgaagaatgagcacatgaattatcatgtctccagctaggttcgccagtatgagtaatatgtagtgagtgtctactgtgtgccattttactacctaaactttttatggactctgtcccctagtcttatctaccaatgccattgtcttagttgagatatctgtcatttcttgactggtataatacagcagctttctaattccaatctcagtcctctctgttctattctccacacacaatcctctctgttctattctccacacagcttccagggtgatatttctagaggcaaatcagaccacgtcactcccaagctgaaagaccacagtgggttcagtgtagcctacagggtattctaaaacctgagcatggcataatagaacctccatgtcttggctcctgcctacctctttcccagccacatcaaccactacngctccactggcatcgtactctccagccttaatgaattggttgcaactcccctcctcccaccggtgccttggcttctcatcatgctacagattctttaacacacacattgtcctccaagaagcttgccagatccactcctattctttcaacgaaatgtttattgaccactctttatacactatgaccaaataggatttatcccacaaatgtaaggttggttcaacatgtgaaaatcaatttatataatacaccatatnaacagaatgcatggcggancnggggcgggggagggggctcatggtcatcttaatcatgtacaaaaaggatcatttgacaaacgcagtaccctttcatgaaataaattcaacaaaccaggaacagaaagaaacttcttcaacctgatagagggcatccatgaaaaacccagagataatatcatacttaatggtgaaagactggttgatttccccctaagatcaggaatgccacttgtaactcaacatngtactcaaagttctagtcagggcaattagtcaagaaaaagaaataaaaggcatccagatnggaanggaacaagtaaaaccatctctattcatagatgcatagatggcatgttcttatatagaggacactaaagagtccaac

SEQ ID NO: 77964 - DNA, 340 bp, Homo sapiens
ctttctcctcacagggcaccagcctccaaatggctatggaccgggagcagaaccaggttttaatggtggcctcgagccacagaaaattggtgagtcctcctgcgcccccgacccatgttgagcggaagctggcatctccctcatgcctgagtcagtctgtctgtccgcatccccctgtctatgagctggtcacctggccctcctgatgctgtccctgttccactagcctgtccctagctcctctccaatctctgtcctgcaggtttaggttatgggaatggtgtcctgggagccagggtcttccccgaggcccacccacagccaggtgcctggggagcag

SEQ ID NO: 77965 - DNA, 532 bp, Homo sapiens
ttttgagacggggtcttgctctgatgcccaggctggagtgcagtggcatgatctcagcttactatagcctctgcctgcaagcaattctcctacctcagcctcccatctacttgggaggctgagatgggagggaggattacttgagcctgggaggtcaagactgcaacgagctatgactgtgccactgcactccagcctatgtgacagagcaagcctgtctcaaaaaaaaaaaaaaaaaaaacggttttagtctcaacttatacaaacattgtacttgatagggctcagaaatgagctgggtagctggagtatacaggcagggatttaaattttacagagataatgcggggttcatggtattaagagtttggcagcaatccccagaagttaagaaatttcaaacaaaggctgacaggagacagttggctggagaatgaaaaagtctggtagagttgaagtatatcatatattaggatcaacaccattgcaatgaatgttcattgccagatcactacagttagaaatgtaaaaa

SEQ ID NO: 77966 - DNA, 392 bp, Homo sapiens
aaacaacaagaattaaaaacttattatctttgaactgatagtatttaagataaatttatcagtttgtgtgattatagaaatttacttttctagttatgttttaggctgataatacaagtttctaggctgggcgtagtggctgacacctgtaatcccagcactttggggggccaaggtgaagtactacttgagcccaggagtttgagaacagcccaggcacctcgtttctactgaaaaaaaactagccaggtatggtggtgcatgcctgtagtcccatctacttgggaggctgagatgggagggaggattacttgagcctgggaggtcaagactgcaacgagctatgactgtgccactgcactccagcctatgtgacagagcaagcctgtctc

SEQ ID NO: 77967 - DNA, 509 bp, Homo sapiens
cgtggacggccacccagccttcccagtttacatgatcatggggagagcctgtcaaaagcaactgcacagagcctgtgcttaagatggcaggatcgcaagacagagcaactggagcaagtcctcattaagaagagccgcccgatgcatttggactgcgatgtgttacgcccatgagatttcagggttaatttgttacctggccgtggcctatcctcttccagcagatacagaggcttactgcagtttgcaactttgcagataccagcagaggaagaaaaacctgggagactgctgctaacctaatgtggagacttgacttaaacttcagccagacaaaggcggaatcttaatatggaggggcctggctctgcagggaggtcacctgggctggctggatttcaatccagttacacagcaaaaaagttacaacccaagctttggcgatgctgagccttctactctcagggattccaaagcatttgataaactctttctttgttccattgtta

SEQ ID NO: 77968 - DNA, 315 bp, Homo sapiens
agagatcaaatgtcttaaacattatggaataggagtgtatgactgactaacatccagtaatcattagggaaaacaaacatgagtgaggacaactgaaataattatgatacaattaagggtggtaggttacatttgtatagttctttaaaatatgcattattccacatgatcagaaatataaaaagaactagacagatactggtagagagacaattaatttaaatttgtaacatattgcttggagcaagcattcaagttgagtgcttaatgtgtatcggtgactgcactgtgcaaataaatttggggttagtaaga

SEQ ID NO: 77969 - DNA, 2045 bp, Homo sapiens
gctgcgcgcccagaggcccagagtcggagctcaccgactccggagtcgcgatcccaggagccactggacctggtcctggtgcctgatgactgccggcctggcacacccccgagtgacctcatcgagatccaggtggtgaaggtgacggacaccacgctggtccctgagcccccggagccaggttctttccactgtgccttgtgccctgctgccttccggctggtttccgagctgctgttccacgaacatggccacttggctggggccgagggaggcgggcagggtggggacccgagccggtgccacgtgtgcggccacagctgcccgggccccgccagcctgcgcgcgcactacagcttgcacacgggggagcggccctaccgctgcgcgctctgcccccgcgccttcaaggccttggcgcccctgctccggcaccagcaccggcacggggtggagccgggcacctctcggaggcctccggacacagcggccgttgcagaacagaggcccggggtggccccggagagggcggaggtggtgatggcggcggcggcggcgggcgcagcggtggggaagccttttgcctgcaggttctgcgccaagcccttccgccgctcctcagacatgcgagaccacgagcgcgtgcacactggcgagcggccataccattgcggcatctgcggcaagggcttcacccagtcctcggtgcttagcggccacgcccgcatccacactggcgagcgcccgttccgctgcacgctctgcgaccgcaccttcaacaactcctccaacttccgcaagcaccagcgcacccacttccacgggccggggccggggctgggagactctggaggccagctgggctcgtcggcggctgaggggtcggggagcgggtgtggggtaggggaccctgcggaggaggggcggggggagaccgcgaaggtgaaggtggaggccgaccagtaggctgcagaccagggacatgggttagttaaggcggaggtacgaggccgacccggggagggggacggggtggggaaacggaggcaggggacagaagaggggagattgggggagagatgacagctgcagggatggttgtgagccgctagtgatggagagcagagggagagggccaggctccagactcccacacgcccacacagcacctctgccaggcctaggagaggacaggtgcagctcttgcagctctgcgggtgtgcggccaaaggcaaggcccacgggctggatgtcacttccccgactgtctcttggttggcttgtccttgtgcaagacccagcctgtcacgacagagcctgggcacttcagaggaggagccaggatcgaatggaaggggggaattggggtccaccatagtcttctgctctggtcctccacgggtggaccaggatggagtctcctgcctacctcactgcattgcactggacctgggatgcctatccaccctctggcagaagacactcaccaggttatctgtgaagagactctgggatcccatcacctcaaagccagagggtccccaagtcaccgctgagagcacttgagcctcaaggatgtaagcctgaccataggatcttgactccaacagcggcaacccccacccccattgtggtccgtccttaacccatccactcttcttcggaggcaactgagaacacataaagcaagcagctacctagcatccccctcctaaagctttagactcagagcccagggtcccccacaagcctcaaggtagcctcaggtttctctaatttcctccactcccagttcgaagcaaacagcttactgcctagtccccgccaatcccaagggcgggctggctgatggcagcatggtgggctggcctgggtgtggagtgaaagagtcactgtggtgggggcgagaggaggacttgggagctggaggtgtgacaccttcagttctgttcctattaaaggaccttctgaagggcaacacttcggccccacctggcaacaattctgcatcctccctactgtcgccacctcttttggcactttcc

SEQ ID NO: 77970 - DNA, 2310 bp, Homo sapiens
gctgcgcgcccagaggcccagagtcggagctcaccgactccggagtcgcgatcccaggagccactggacctggtcctggtgcctgatgactgccggcctggcacacccccgagtgacctcatcgagatccaggtggtgaaggtgacggacaccacgctggtccctgagcccccggagccaggttctttccactgtgccttgtgccctgctgccttccggctggtttccgagctgctgttccacgaacatggccacttggctggggccgagggaggcgggcagggtggggacccgagccggtgccacgtgtgcggccacagctgcccgggccccgccagcctgcgcgcgcactacagcttgcacacgggggagcggccctaccgctgcgcgctctgcccccgcgccttcaaggccttggcgcccctgctccggcaccagcaccggcacggggtggagccgggcacctctcggaggcctccggacacagcggccgttgcagaacagaggcccggggtggccccggagagggcggaggtggtgatggcggcggcggcggcgggcgcagcggtggggaagccttttgcctgcaggttctgcgccaagcccttccgccgctcctcagacatgcgagaccacgagcgcgtgcacactggcgagcggccataccattgcggcatctgcggcaagggcttcacccagtcctcggtgcttagcggccacgcccgcatccacactggcgagcgcccgttccgctgcacgctctgcgaccgcaccttcaacaactcctccaacttccgcaagcaccagcgcacccacttccacgggccggggccggggctgggagactctggaggccagctgggctcgtcggcggctgaggggtcggggagcgggtgtggggtaggggaccctgcggaggaggggcggggggagaccgcgaaggtgaaggtggaggccgaccagtaggctgcagaccagggacatgggttagttaaggcggaggtacgaggccgacccggggagggggacggggtggggaaacggaggcaggggacagaagaggggagattgggggagagatgacagctgcagggatggttgtgagccgctagtgatggagagcagagggagagggccaggctccagactcccacacgcccacacagcacctctgccaggcctaggagaggacaggtgcagctcttgcagctctgcgggtgtgcggccaaaggcaaggcccacgggctggatgtcacttccccgactgtctcttggttggcttgtccttgtgcaagacccagcctgtcacgacagagcctgggcacttcagaggaggagccaggatcgaatggaaggggggaattggggtccaccatagtcttctgctctggtcctccacgggtggaccaggatggagtctcctgcctacctcactgcattgcactggacctgggatgcctatccaccctctggcagaagacactcaccaggttatctgtgaagagactctgggatcccatcacctcaaagccagagggtccccaagtcaccgctgagagcacttgagcctcaaggatgtaagcctgaccataggatcttgactccaacagcggcaacccccacccccattgtggtccgtccttaacccatccactcttcttcggaggcaactgagaacacataaagcaagcagctacctagcatccccctcctaaagctttagactcagagcccagggtcccccacaagcctcaaggtagcctcaggtttctctaatttcctccactcccagttcgaagcaaacagcttactgcctagtccccgccaatcccaagggcgggctggctgatggcagcatggtgggctggcctgggtgtggagtgaaagagtcactgtggtgggggcgagaggaggacttgggagctggaggtgtgacaccttcagttctgttcctattaaaggaccttctgaagggcaaaaaaacacaaaaaaaaaaaaaaaaaaaaaaaaaacaaaaaaaaaaaaaaaaaaggggggcggcggcgaaggaaaaagacccacggggggggcccacaacgataagcggcaccacacgtttttctgaaaaaggggccccatagaggcgacaccaaaaaaaagcacggcaccggccccacttaaccaccgctccgcggcggcaaacgacaacggcggatcatgggagagcacccaccctgggcgtggcgcatcgggcaccaaccccaggaataagccccaggaataaacttaggttgcgggcaccacggctctggggaacgcgccggacgaaga

SEQ ID NO: 77971 - DNA, 1929 bp, Homo sapiens
gctgcgcgcccagaggcccagagtcggagctcaccgactccggagtcgcgatcccaggagccactggacctggtcctggtgcctgatgactgccggcctggcacacccccgagtgacctcatcgagatccaggtggtgaaggtgacggacaccacgctggtccctgagcccccggagccaggttctttccactgtgccttgtgccctgctgccttccggctggtttccgagctgctgttccacgaacatggccacttggctggggccgagggaggcgggcagggtggggacccgagccggtgccacgtgtgcggccacagctgcccgggccccgccagcctgcgcgcgcactacagcttgcacacgggggagcggccctaccgctgcgcgctctgcccccgcgccttcaaggccttggcgcccctgctccggcaccagcaccggcacggggtggagccgggcacctctcggaggcctccggacacagcggccgttgcagaacagaggcccggggtggccccggagagggcggaggtggtgatggcggcggcggcggcgggcgcagcggtggggaagccttttgcctgcaggttctgcgccaagcccttccgccgctcctcagacatgcgagaccacgagcgcgtgcacactggcgagcggccataccattgcggcatctgcggcaagggcttcacccagtcctcggtgcttagcggccacgcccgcatccacactggcgagcgcccgttccgctgcacgctctgcgaccgcaccttcaacaactcctccaacttccgcaagcaccagcgcacccacttccacgggccggggccggggctgggagactctggaggccagctgggctcgtcggcggctgaggggtcggggagcgggtgtggggtaggggaccctgcggaggaggggcggggggagaccgcgaaggtgaaggtggaggccgaccagtaggctgcagaccagggacatgggttagttaaggcggaggtacgaggccgacccggggagggggacggggtggggaaacggaggcaggggacagaagaggggagattgggggagagatgacagctgcagggatggttgtgagccgctagtgatggagagcagagggagagggccaggctccagactcccacacgcccacacagcacctctgccaggcctaggagaggacaggtgcagctcttgcagctctgcgggtgtgcggccaaaggcaaggcccacgggctggatgtcacttccccgactgtctcttggttggcttgtccttgtgcaagacccagcctgtcacgacagagcctgggcacttcagaggaggagccaggatcgaatggaaggggggaattggggtccaccatagtcttctgctctggtcctccacgggtggaccaggatggagtctcctgcctacctcactgcattgcactggacctgggatgcctatccaccctctggcagaagacactcaccaggttatctgtgaagagactctgggattggtccgtccttaacccatccactcttcttcggaggcaactgagaacacataaagcaagcagctacctagcatccccctcctaaagctttagactcagagcccagggtcccccacaagcctcaaggtagcctcaggtttctctaatttcctccactcccagttcgaagcaaacagcttactgcctagtccccgccaatcccaagggcgggctggctgatggcagcatggtgggctggcctgggtgtggagtgaaagagtcactgtggtgggggcgagaggaggacttgggagctggaggtgtgacaccttcagttctgttcctattaaaggaccttctgaagggcaacacttcggccccacctggcaacaattctgcatcctccctactgtcgccacctcttttggcactttcc

SEQ ID NO: 77972 - DNA, 1997 bp, Homo sapiens
gctgcgcgcccagaggcccagagtcggagctcaccgactccggagtcgcgatcccaggagccactggacctggtcctggtgcctgatgactgccggcctggcacacccccgagtgacctcatcgagatccaggtggtgaaggtgacggacaccacgctggtccctgagcccccggagccaggttctttccactgtgccttgtgccctgctgccttccggctggtttccgagctgctgttccacgaacatggccacttggctggggccgagggaggcgggcagggtggggacccgagccggtgccacgtgtgcggccacagctgcccgggccccgccagcctgcgcgcgcactacagcttgcacacgggggagcggccctaccgctgcgcgctctgcccccgcgccttcaaggccttggcgcccctgctccggcaccagcaccggcacggggtggagccgggcacctctcggaggcctccggacacagcggccgttgcagaacagaggcccggggtggccccggagagggcggaggtggtgatggcggcggcggcggcgggcgcagcggtggggaagccttttgcctgcaggttctgcgccaagcccttccgccgctcctcagacatgcgagaccacgagcgcgtgcacactggcgagcggccataccattgcggcatctgcggcaagggcttcacccagtcctcggtgcttagcggccacgcccgcatccacactggcgagcgcccgttccgctgcacgctctgcgaccgcaccttcaacaactcctccaacttccgcaagcaccagcgcacccacttccacgggccggggccggggctgggagactctggaggccagctgggctcgtcggcggctgaggggtcggggagcgggtgtggggtaggggaccctgcggaggaggggcggggggagaccgcgaaggtgaaggtggaggccgaccagtaggctgcagaccagggacatgggttagttaaggcggaggtacgaggccgacccggggagggggacggggtggggaaacggaggcaggggacagaagaggggagattgggggagagatgacagctgcagggatggttgtgagccgctagtgatggagagcagagggagagggccaggctccagactcccacacgcccacacagcacctctgccaggcctaggagaggacaggtgcagctcttgcagctctgcgggtgtgcggccaaaggcaaggcccacgggctggatgtcacttccccgactgtctcttggttggcttgtccttgtgcaagacccagcctgtcacgacagagcctgggcacttcagaggaggagccaggatcgaatggaaggggggaattggggtccaccatagtcttctgctctggtcctccacgggtggaccaggatggagtctcctgcctacctcactgcattgcactggacctgggatgcctatccaccctctggcagaagacactcaccaggttatctgtgaagagactctgggatcccatcacctcaaagccagagggtccccaagtcaccgctgagagcacttgagcctcaaggatgtaagctggtccgtccttaacccatccactcttcttcggaggcaactgagaacacataaagcaagcagctacctagcatccccctcctaaagctttagactcagagcccagggtcccccacaagcctcaaggtagcctcaggtttctctaatttcctccactcccagttcgaagcaaacagcttactgcctagtccccgccaatcccaagggcgggctggctgatggcagcatggtgggctggcctgggtgtggagtgaaagagtcactgtggtgggggcgagaggaggacttgggagctggaggtgtgacaccttcagttctgttcctattaaaggaccttctgaagggcaacacttcggccccacctggcaacaattctgcatcctccctactgtcgccacctcttttggcactttcc

SEQ ID NO: 77973 - DNA, 738 bp, Homo sapiens
ttccagattagcttatgtaattacatttctttttgtctgtttgttttttaaattatactttattaggcaaagcatagaccatggttgtcaccctaattcacacttatgtagcattatgatctattatacatcatttttaatggctaaatatgattacattgtctagcttatgatagtgtatttaaccatgtccctatggatggcattttgattatttgcaaaaaactgtcattttcaaccacctttaggcttacggtaattttcttcaggattacttaaaaatcattagggtccctagcatctacccagaagatcacagtaaaaatacaaaacgaatctattggccagtgaaaacatccaaagaagagaaaagtgagacccacagaatcagaggcatgcagtcatacctcaacagctggtaactcaattactagacagtgtcaattatcaagtaaataccagtagccaacagctagacaaaccagagctgcaaacggtaactaagatgcatcaacttaaaaaaaaattaaaaaaagaatcaactttatttatagtacagatcttcagataacaacttggttatctgagtccttatgcctaggcagagaagaagtcacaaacttgcatgaaggacaaatggcttttataaggaggcatgttgatggcaggtgtgaaagttgagctactaacacccaacaagaaaagaaacccaacaagcaaaaactggtaatatggggg

SEQ ID NO: 77974 - DNA, 6577 bp, Homo sapiens
agagggcaaggagagagcagagaacacactttgccttctctttggtattgagtaatatcaaccaaattgcagacatctcaacactttggccaggcagcctgctgagcaaggtacctcagccagcatggcagcctctttcccacccaccttgggactcagttctgccccagatgaaattcagcacccacatattaaattttcagaatggaaatttaagctgttccgggtgagatcctttgaaaagacacctgaagaagctcaaaaggaaaagaaggattcctttgaggggaaaccctctctggagcaatctccagcagtcctggacaaggctgatggtcagaagccagtcccaactcagccattgttaaaagcccaccctaagttttcaaagaaatttcacgacaacgagaaagcaagaggcaaagcgatccatcaagccaaccttcgacatctctgccgcatctgtgggaattcttttagagctgatgagcacaacaggagatatccagtccatggtcctgtggatggtaaaaccctaggccttttacgaaagaaggaaaagagagctacttcctggccggacctcattgccaaggttttccggatcgatgtgaaggcagatgttgactcgatccaccccactgagttctgccataactgctggagcatcatgcacaggaagtttagcagtgccccatgtgaggtttacttcccgaggaacgtgaccatggagtggcacccccacacaccatcctgtgacatctgcaacactgcccgtcggggactcaagaggaagagtcttcagccaaacttgcagctcagcaaaaaactcaaaactgtgcttgaccaagcaagacaagcccgtcagcgcaagagaagagctcaggcaaggatcagcagcaaggatgtcatgaagaagatcgccaactgcagtaagatacatcttagtaccaagctccttgcagtggacttcccagagcactttgtgaaatccatctcctgccagatctgtgaacacattctggctgaccctgtggagaccaactgtaagcatgtcttttgccgggtctgcattctcagatgcctcaaagtcatgggcagctattgtccctcttgccgatatccatgcttccctactgacctggagagtccagtgaagtcctttctgagcgtcttgaattccctgatggtgaaatgtccagcaaaagagtgcaatgaggaggtcagtttggaaaaatataatcaccacatctcaagtcacaaggaatcaaaagagatttttgtgcacattaataaagggggccggccccgccaacatcttctgtcgctgactcggagagctcagaagcaccggctgagggagctcaagctgcaagtcaaagcctttgctgacaaagaagaaggtggagatgtgaagtccgtgtgcatgaccttgttcctgctggctctgagggcgaggaatgagcacaggcaagctgatgagctggaggccatcatgcagggaaagggctctggcctgcagccagctgtttgcttggccatccgtgtcaacaccttcctcagctgcagtcagtaccacaagatgtacaggactgtgaaagccatcacagggagacagatttttcagcctttgcatgcccttcggaatgctgagaaggtacttctgccaggctaccaccactttgagtggcagccacctctgaagaatgtgtcttccagcactgatgttggcattattgatgggctgtctggactatcatcctctgtggatgattacccagtggacaccattgcaaagaggttccgctatgattcagctttggtgtctgctttgatggacatggaagaagacatcttggaaggcatgagatcccaagaccttgatgattacctgaatggccccttcactgtggtggtgaaggagtcttgtgatggaatgggagacgtgagtgagaagcatgggagtgggcctgtagttccagaaaaggcagtccgtttttcattcacaatcatgaaaattactattgcccacagctctcagaatgtgaaagtatttgaagaagccaaacctaactctgaactgtgttgcaagccattgtgccttatgctggcagatgagtctgaccacgagacgctgactgccatcctgagtcctctcattgctgagagggaggccatgaagagcagtgaattaatgcttgagctgggaggcattctccggactttcaagttcatcttcaggggcaccggctatgatgaaaaacttgtgcgggaagtggaaggcctcgaggcttctggctcagtctacatttgtactctttgtgatgccacccgtctggaagcctctcaaaatcttgtcttccactctataaccagaagccatgctgagaacctggaacgttatgaggtctggcgttccaacccttaccatgagtctgtggaagaactgcgggatcgggtgaaaggggtctcagctaaacctttcattgagacagtcccttccatagatgcactccactgtgacattggcaatgcagctgagttctacaagatcttccagctagagataggggaagtgtataagaatcccaatgcttccaaagaggaaaggaaaaggtggcaggccacactggacaagcatctccggaagaagatgaacctcaaaccaatcatgaggatgaatggcaactttgccaggaagctcatgaccaaagagactgtggatgcagtttgtgagttaattccttccgaggagaggcacgaggctctgagggagctgatggatctttacctgaagatgaaaccagtatggcgatcatcatgccctgctaaagagtgcccagaatccctctgccagtacagtttcaattcacagcgttttgctgagctcctttctacgaagttcaagtataggtatgagggaaaaatcaccaattattttcacaaaaccctggcccatgttcctgaaattattgagagggatggctccattggggcatgggcaagtgagggaaatgagtctggtaacaaactgtttaggcgcttccggaaaatgaatgccaggcagtccaaatgctatgagatggaagatgtcctgaaacaccactggttgtacacctccaaatacctccagaagtttatgaatgctcataatgcattaaaaacctctgggtttaccatgaaccctcaggcaagcttaggggacccattaggcatagaggactctctggaaagccaagattcaatggaattttaagtagggcaaccacttatgagttggtttttgcaattgagtttccctctgggttgcattgagggcttctcctagcaccctttactgctgtgtatggggcttcaccatccaagaggtggtaggttggagtaagatgctacagatgctctcaagtcaggaatagaaactgatgagctgattgcttgaggcttttagtgagttccgaaaagcaacaggaaaaatcagttatctgaaagctcagtaactcagaacaggagtaactgcaggggaccagagatgagcaaagatctgtgtgtgttggggagctgtcatgtaaatcaaagccaaggttgtcaaagaacagccagtgaggccagaaattggtcttgtggttttcatttttttcccccttgattgattatattttgtattgagatatgataagtgccttctatttcatttttgaataattcttcatttttataattttacatatcttggcttgctatataagattcaaaagagctttttaaatttttctaataatatcttacatttgtacagcatgatgacctttacaaagtgctctcaatgcatttacccattcgttatataaatatgttacatcaggacaactttgagaaaatcagtccttttttatgtttaaattatgtatctattgtaaccttcagagtttaggaggtcatctgctgtcatggatttttcaataatgaatttagaatacacctgttagctacagttagttattaaatcttctgataatatatgtttacttagctatcagaagccaagtatgattctttatttttactttttcatttcaagaaatttagagtttccaaatttagagcttctgcatacagtcttaaagccacagaggcttgtaaaaatataggttagcttgatgtctaaaaatatatttcatgtcttactgaaacattttgccagactttctccaaatgaaacctgaatcaatttttctaaatctaggtttcatagagtcctctcctctgcaatgtgttattctttctataatgatcagtttactttcagtggattcagaattgtgtagcaggataaccttgtatttttccatccgctaagtttagatggagtccaaacgcagtacagcagaagagttaacatttacacagtgctttttaccactgtggaatgttttcacactcatttttccttacaacaattctgaggagtaggtgttgttattatctccatttgatgggggtttaatgatttgctcaaagtcatttaggggtaataaatacttggcttggaaatttaacacagtccttttgtctccaaagcccttcttctttccaccacaaattaatcactatgtttataaggtagtatcagaatttttttaggattcacaactaatcactatagcacatgaccttgggattacatttttatggggcaggggtaagcggcttttaaatcatttgtgtgctctggctcttttgatagaagaaagcaacacaaaagctccaaagggccccctaaccctcttgtggctccagttatttggaaactatgatctgcatccttaggaatctgggatttgccagttgctggcaatgtagagcaggcatggaattttatatgctagtgagtcataatgatatgttagtgttaattagtttttcttcctttgattttattggccataattgctactcttcatacacagtatatcaaagagcttgataatttagttgtcaaaagtgcatcggcgacattatctttaattgtatgtatttggtgcttcttcagggattgaactcagtatctttcattaaaaaacacagcagttttccttgctttttatatgcagaatatcaaagtcatttctaatttagttgtcaaaaacatatacatattttaacattagtttttttgaaaactcttggttttgtttttttggaaatgagtgggccactaagccacactttcccttcatcctgcttaatccttccagcatgtctctgcactaataaacagctaaattcacataatcatcctatttactgaagcatggtcatgctggtttatagattttttacccatttctactctttttctctattggtggcactgtaaatactttccagtattaaattatccttttctaacactgtaggaactattttgaatgcatgtgactaagagcatgatttatagcacaacctttccaataatcccttaatcagatcacattttgataaaccctgggaacatctggctgcaggaatttcaatatgtagaaacgctgcctatggttttttgcccttactgttgagactgcaatatcctagaccctagttttatactagagttttatttttagcaatgcctattgcaagtgcaattatatactccagggaaattcaccacactgaatcgagcatttgtgtgtgtatgtgtgaagtatatactgggacttcagaagtgcaatgtatttttctcctgtgaaacctgaatctacaagttttcctgccaagccactcaggtgcattgcagggaccagtgataatggctgatgaaaattgatgattggtcagtgaggtcaaaaggagccttgggattaataaacatgcactgagaagcaagaggaggagaaaaagatgtctttttcttccaggtgaactggaatttagttttgcctcagatttttttcccacaagatacagaagaagataaagatttttttggttgagagtgtgggtcttgcattacatcaaacagagttcaaattccacacagataagaggcaggatatataagcgccagtggtagttgggaggaataaaccattatttggatgcaggtggtttttgattgcaaatatgtgtgtgtcttcagtgattgtatgacagatgatgtattcttttgatgttaaaagattttaagtaagagtagatacattgtacccattttacattttcttattttaactacagtaatctacataaatatacctcagaaatcatttttggtgattattttttgttttgtagaattgcacttcagtttattttcttacaaataaccttacattttgtttaatggcttccaagagcctttttttttttgtatttcagagaaaattcaggtaccaggatgcaatggatttatttgattcaggggacctgtatttccatgtcaaatgttttcaaataaaatgaaatatgagtttcaatactttttatattttaatatttccattcattaatattatggttattgtcagcaattttatgtttgaatatttgaaataaaagtttaagatttgaaaaaagt

SEQ ID NO: 77975 - DNA, 696 bp, Homo sapiens
gagatttcgccattgtactccagcctgggcaacaagagtgaaactccatctcaaaaaacaaacaaacaaacacacaaacaaacaaacaaacacattccctcccaggccacccaagtgagggcatgaagcacagcgtgtgtgtgtgtgtgtgtgtgtgtgtgtgcacgcgtgtgtgcatatgtgtgtttgtgtgttgcaggggttacagtggacaggatgtgggagggcagctgcagctccaagctgcaagtctttctgatagaatgcttaaaactccttggaccacagcaagagagtgttttcatttgcacccatttttattagcgtttgaacctgtactttttgtagcatgtaaaccttaagctgcttaactattccttgaagcatttacaccagcggttcccaacctttttgctacctgagaccagttttcttgaagacaattcttccacggacccgggagaaggggaagggatgatgtggagatgattcaagcccattacatttattgtgtgcttcatttctattatttcactgtaatatataatgaaataattacacaactcaccataatgtggaatcagtgggagccctgagctagttttcctgcaactgcatggttccatctgggggtgatgggagacagtcacagatcatcaggcattaggttctcataaggagcacgcaatctagatc

SEQ ID NO: 77976 - DNA, 525 bp, Homo sapiens
gagtgaatagagggattatgagtgacaggagatgcagagaacagtaaagatgaggtcaacagaagctccaagctgcaagtctttctgatagaatgcttaaaactccttggaccacagcaagagagtgttttcatttgcacccatttttattagcgtttgaacctgtactttttgtagcatgtaaaccttaagctgcttaactattccttgaagcatttacaccagcggttcccaacctttttgctacctgagaccagttttcttgaagacaattcttccacggacccgggagaaggggaagggatgatgtggagatgattcaagcccattacatttattgtgtgcttcatttctattatttcactgtaatatataatgaaataattacacaactcaccataatgtggaatcagtgggagccctgagctagttttcctgcaactgcatggttccatctgggggtgatgggagacagtcacagatcatcaggcattaggttctcataaggagcacgcaatctagatc

SEQ ID NO: 77977 - DNA, 116 bp, Homo sapiens
atactctggtttctcttcagatcgcataaatctttcgccttttactaaagatttccgtggagaggaacaactctgagtcttaacccaattttttgagccttgccttggcaaggcta

SEQ ID NO: 77978 - DNA, 1826 bp, Homo sapiens
tatcaaatcatgagttgaaagattttgactattgaaaaccaaattctagaacttactatcagtattcttattttcaaaggaaataattttctaaatatttgattttcagaatcagttttttaatagtaaagttaacataccatatagatttttttttacttttatattctactctgaagttattttatgcttttcttatcaatttcaaatctcaaaaatcacagctcttatctagagtatcataatattgctatatttgttcatatgtggagtgacaaattttgaaaagtagagtgcttccttttttattgagatgtgacagtctttacatggttaggaataagtgacagttaagtgaatatcacaattactagtatgttggtttttctgcttcattcctaagtattacgtttctttattgcagatgtcagatcaaaaagtcacctgtaggttgaaaaagctaccgtattccattttgtaaaaataacaataataataataataataattagttttaagctcatttcccacttcaatgcaatactgaaaactggctaaaaataccaaatcaatatactgctaatggtactttgaagagtatgcaaaactggaaggccaggaggaggcaaataatatgtctttccgatggtgtctcccaagtgttggtgctttgggtttttataagttgtgaaaaggaagatgcacatttcttcattctccatggtgtgcatggaaatgtgtttgagtgtggatgtaaaagaaatcgagtaataaagaattagctggcttgtgaaatagtgcagtgttggatgcttcaagaggtataatcctattttattagcacaaacttgctagctaattagagtttatctttttagaaaggacaccgtataggttcgtaaaaaatatttacaggaagcaaaatagatctattactactttaccgactttaccccctttctttaatttgtataatttttgtactatatatcgatgtgtaaatgtttagagtcttcattatgaaaatatcaataaatatttcattagtttacatttaactctggtataaaatgaaacttttaaaaataagtgaaatggatgatttcccagtggaagtatgtcaacagtcttaagatcattgccagatttcataaaatatttaagtatttgaaaaagaaacaaaatgtcttcatactttagggaaacgaataccctgtataccttctgtacaaatgtttgtgttttcattgttacactttggggttttacttttgcaatgtgacccatgttgggcatttttatataatcaacaactaaatcttttgccaaatgcatgcttgccttttattttctaatatatgataataacgagcaaaactggttagattttgcatgaaatggttctgaaaggtaagaggaaaacagactttggaggttgtttagttttgaatttctgacagagataaagtagtttaaaatctctcgtacactgataactcaagcttttcattttctcatacagttgtacagatttaactgggaccatcagttttaaactgttgtcaagctaactaataatcatctgctttaagacgcaagattctgaattaaactttatataggtatagatacatctgttgtttctttgtatttcaggaaaggtgatagtagttttatttgatactgataaatattgaattgattttttagttattttttatcattttttcaatggagtagtataggactgtgctttgtcctttttatgaatgaaaaaattagtataaagtaataaatgtcttatgttacccaagaaaaaacaactg

SEQ ID NO: 77979 - DNA, 1328 bp, Homo sapiens
tatcaaatcatgagttgaaagattttgactattgaaaaccaaattctagaacttactatcagtattcttattttcaaaggaaataattttctaaatatttgattttcagaatcagttttttaatagtaaagttaacataccatatagatttttttttacttttatattctactctgaagttattttatgcttttcttatcaatttcaaatctcaaaaatcacagctcttatctagagtatcataatattgctatatttgttcatatgtggagtgacaaattttgaaaagtagagtgcttccttttttattgagatgtgacagtctttacatggttaggaataagtgacagttaagtgaatatcacaattactagtatgttggtttttctgcttcattcctaagtattacgtttctttattgcagatgtcagatcaaaaagtcacctgtaggttgaaaaagctaccgtattccattttgtaaaaataacaataataataataataataattagttttaagctcatttcccacttcaatgcaatactgaaaactggctaaaaataccaaatcaatatactgctaatggtactttgaagagtatgcaaaactggaaggccaggaggaggcaaataatatgtctttccgatggtgtctcccaagtgttggtgctttgggtttttataagttgtgaaaaggaagatgcacatttcttcattctccatggtgtgcatggaaatgtgtttgagtgtggatgtaaaagaaatcgagtaataaagaattagctggcttgtgaaatagtgcagtgttggatgcttcaagaggtataatcctattttattagcacaaacttgctagctaattagagtttatctttttagaaaggacaccgtataggttcgtaaaaaatatttacaggaagcaaaatagatctattactactttaccgactttaccccctttctttaatttgtataatttttgtactatatatcgatgtgtaaatgtttagagtcttcattatgaaaatatcaataaatatttcattagtttacatttaactctggtataaaatgaaacttttaaaaataagtgaaatggatgatttcccagtggaagtatgtcaacagtcttaagatcattgccagatttcataaaatatttaagtatttgaaaaagaaacaaaatgtcttcatactttagggaaacgaataccctgtataccttctgtacaaatgtttgtgttttcattgttacactttggggttttacttttgcaatgtgacccatgttgggcatttttatataatcaacaactaaatcttttgcca

SEQ ID NO: 77980 - DNA, 1093 bp, Homo sapiens
tatcaaatcatgagttgaaagattttgactattgaaaaccaaattctagaacttactatcagtattcttattttcaaaggaaataattttctaaatatttgattttcagaatcagttttttaatagtaaagttaacataccatatagatttttttttacttttatattctactctgaagttattttatgcttttcttatcaatttcaaatctcaaaaatcacagctcttatctagagtatcataatattgctatatttgttcatatgtggagtgacaaattttgaaaagtagagtgcttccttttttattgagatgtgacagtctttacatggttaggaataagtgacagttaagtgaatatcacaattactagtatgttggtttttctgcttcattcctaagtattacgtttctttattgcagatgtcagatcttgaaaaagaaacaaaatgtcttcatactttagggaaacgaataccctgtataccttctgtacaaatgtttgtgttttcattgttacactttggggttttacttttgcaatgtgacccatgttgggcatttttatataatcaacaactaaatcttttgccaaatgcatgcttgccttttattttctaatatatgataataacgagcaaaactggttagattttgcatgaaatggttctgaaaggtaagaggaaaacagactttggaggttgtttagttttgaatttctgacagagataaagtagtttaaaatctctcgtacactgataactcaagcttttcattttctcatacagttgtacagatttaactgggaccatcagttttaaactgttgtcaagctaactaataatcatctgctttaagacgcaagattctgaattaaactttatataggtatagatacatctgttgtttctttgtatttcaggaaaggtgatagtagttttatttgatactgataaatattgaattgattttttagttattttttatcattttttcaatggagtagtataggactgtgctttgtcctttttatgaatgaaaaaattagtataaagtaataaatgtcttatgttacccaagaaaaaacaactg

SEQ ID NO: 77981 - DNA, 509 bp, Homo sapiens
gtggtgttctcataaatcattttcctgtcaaaattatcagactttattattgctgaatgttttaaatattacaatggaattttggttgcataaatcataatcccttcaagttagaacatttgtgtacatacctcagcatttttcttatatctcgattttaaaaaatagccctcattctagaaataaatccatgcagactgtaaatgtcaaactgtactcttaaatttcagtaactcagcagtccaggctggccactgtgcttgcaaggtagttaggaattgtcacactgtgtttgtaagactcactgttcccaaaaatgcagccgtacacactggtgttttaatcttggtaattatttttatctgcaagcattttactacaagtgacatatactcacttgatttttccatttcctgcaaaaacaaacaaacaaacaaaaaaacccagaaataacaaatctgggaattgcttgttcctgacattagaaagtaatttattcttaataaaag

SEQ ID NO: 77982 - DNA, 1747 bp, Homo sapiens
ccctgggaccattcagaagactgtccacccgtcctcagccccctctcttcgtgggctatctactcagttgatccctccctcgctggcttggctctgactcctgctcagacccatcacctttgccgggaatgatgtctggagaacccctgcacgtgaagacccccatccgtgacagcatggccctgtccaaaatggccggcaccagcgtctacctcaagatggacagtgcccagccctccggctccttcaagatccggggcattgggcacttctgcaagaggtgggccaagcaaggctgtgcacattttgtctgctcctcggcgggcaacgcaggcatggcggctgcatatgcggccaggcaactcggcgtccccgccaccatcgtggtgcccagcaccacacctgctctcaccattgagcgcctcaagaatgaaggtgccacagtcaaggtggtgggtgagttattggatgaagccttcgagctggccaaggccctagcgaagaacaacccgggttgggtctacattcccccctttgatgaccccctcatctgggaaggccacgcttccatcgtgaaagagctgaaggagacactgtgggaaaagccgggggccatcgcgctgtcagtgggcggcgggggcctgctgtgtggagtggtccaggggctgcaggaggtgggctggggggacgtgcctgtcatcgccatggagacttttggtgcccacagcttccacgctgccaccaccgcaggcaaacttgtctccctgcccaagatcaccagtgttgccaaggccctgggcgtgaagactgtgggggctcaggccctgaagctgtttcaggaacaccccattttctctgaagttatctcggaccaggaggctgtggccgccattgagaagttcgtggatgatgagaagatcctggtggagcccgcctgcggggcagccctggccgctgtctatagccacgtgatccagaagctccaactggaggggaatctccgaaccccgctgccatccctcgtggtcatcgtctgcgggggcagcaacatcagcctggcccagctgcgggcgctcaaggaacagctgggcatgacaaataggttgcccaagtgaggacggaccccttaccgatctgtgctctcctagcccaagagacccctggaggggctggagttttatccagcgcctcgtcgtatgtttggctgagcacctgtggcctgggtgcaggttaacttcttgttatcaggagcccactatgcagaggccaaaggtcggcagccagcgaggctatgaattggacctttttggtatctgtgtgactgctctgtgcccatccttagccaacttgctggcgtgacaagtgcccacaagtaacacaccaggtacccagagcagggtggacaggagagacctgaatcacagcagtgaggaattcctcaaagctgtgacctcgcccctgaacttgttcccagtgaaggtcaacagggccaccaaccagggttgaggaaccatctcagccatcctcccaggaagcccacccctgacccttactaatttttctaatgtgcaaactttttcattgaaaaataaaatatattatgaaacaaaaaaaaaaaaaagattctgcttatggaagtagagaggaaacttaagatttatggcagacaaccctgttttttttaaatagcaaatcctaaagataacttttagcctttgtggaagattgagcctaagtagaaacctta

SEQ ID NO: 77983 - DNA, 1700 bp, Homo sapiens
aggtttcagggaaaggagtttatttgggaggtgattcagtgggggagtggggaagtaagccagggaaggaagggggctttgctgtttcttttttctttttctatcatccagtccaaaatgtcaggaagggggctttcaaaggcaggtggccgctgtgggtggctagagcttaatccctcggggaccctgggagccagtgcagaaggcgcacagcagtttcccgccccctgggagaaggagcaggggagtttgtacaccgactcgtagccattggttgagggctgccttaaggggctgccatctcctgactctgtttgcaggtagctcaggtggccagagaaggtcctcaggcagagacacagatgctggcagctagaagccaaggttgggggtggggagggaactagctccaggccccatcagctgggataaggccggtgcaaacctgagctggtgtctccaggaagcctagccctgacctgccaccccctctccccaccctccagggaaggccacgcttccatcgtgaaagagctgaaggagacactgtgggaaaagccgggggccatcgcgctgtcagtgggcggcgggggcctgctgtgtggagtggtccaggggctgcaggaggtgggctggggggacgtgcctgtcatcgccatggagacttttggtgcccacagcttccacgctgccaccaccgcaggcaaacttgtctccctgcccaagatcaccagtgttgccaaggccctgggcgtgaagactgtgggggctcaggccctgaagctgtttcaggaacaccccattttctctgaagttatctcggaccaggaggctgtggccgccattgagaagttcgtggatgatgagaagatcctggtggagcccgcctgcggggcagccctggccgctgtctatagccacgtgatccagaagctccaactggaggggaatctccgaaccccgctgccatccctcgtggtcatcgtctgcgggggcagcaacatcagcctggcccagctgcgggcgctcaaggaacagctgggcatgacaaataggttgcccaagtgaggacggaccccttaccgatctgtgctctcctagcccaagagacccctggaggggctggagttttatccagcgcctcgtcgtatgtttggctgagcacctgtggcctgggtgcaggttaacttcttgttatcaggagcccactatgcagaggccaaaggtcggcagccagcgaggctatgaattggacctttttggtatctgtgtgactgctctgtgcccatccttagccaacttgctggcgtgacaagtgcccacaagtaacacaccaggtacccagagcagggtggacaggagagacctgaatcacagcagtgaggaattcctcaaagctgtgacctcgcccctgaacttgttcccagtgaaggtcaacagggccaccaaccagggttgaggaaccatctcagccatcctcccaggaagcccacccctgacccttactaatttttctaatgtgcaaactttttcattgaaaaataaaatatattatgaaacaaaaaaaaaaaaaagattctgcttatggaagtagagaggaaacttaagatttatggcagacaaccctgttttttttaaatagcaaatcctaaagataacttttagcctttgtggaagattgagcctaagtagaaacctta

SEQ ID NO: 77984 - DNA, 1134 bp, Homo sapiens
ccctgggaccattcagaagactgtccacccgtcctcagccccctctcttcgtgggctatctactcagttgatccctccctcgctggcttggctctgactcctgctcagacccatcacctttgccgggaatgatgtctggagaacccctgcacgtgaagacccccatccgtgacagcatggccctgtccaaaatggccggcaccagcgtctacctcaagatggacagtgcccagccctccggctccttcaagatccggggcattgggcacttctgcaagaggtgggccaagcaaggctgtgcacattttgtctgctcctcggctgcggggcagccctggccgctgtctatagccacgtgatccagaagctccaactggaggggaatctccgaaccccgctgccatccctcgtggtcatcgtctgcgggggcagcaacatcagcctggcccagctgcgggcgctcaaggaacagctgggcatgacaaataggttgcccaagtgaggacggaccccttaccgatctgtgctctcctagcccaagagacccctggaggggctggagttttatccagcgcctcgtcgtatgtttggctgagcacctgtggcctgggtgcaggttaacttcttgttatcaggagcccactatgcagaggccaaaggtcggcagccagcgaggctatgaattggacctttttggtatctgtgtgactgctctgtgcccatccttagccaacttgctggcgtgacaagtgcccacaagtaacacaccaggtacccagagcagggtggacaggagagacctgaatcacagcagtgaggaattcctcaaagctgtgacctcgcccctgaacttgttcccagtgaaggtcaacagggccaccaaccagggttgaggaaccatctcagccatcctcccaggaagcccacccctgacccttactaatttttctaatgtgcaaactttttcattgaaaaataaaatatattatgaaacaaaaaaaaaaaaaagattctgcttatggaagtagagaggaaacttaagatttatggcagacaaccctgttttttttaaatagcaaatcctaaagataacttttagcctttgtggaagattgagcctaagtagaaacctta

SEQ ID NO: 77985 - DNA, 1069 bp, Homo sapiens
ccctgggaccattcagaagactgtccacccgtcctcagccccctctcttcgtgggctatctactcagttgatccctccctcgctggcttggctctgactcctgctcagacccatcacctttgccgggaatgatgtctggagaacccctgcacgtgaagacccccatccgtgacagcatggccctgtccaaaatggccggcaccagcgtctacctcaagatggacagtgcccagccctccggctccttcaagatccggggcattgggcacttctgcaagaggtgggccaagcaaggctgtgcacattttgtctgctcctcggcgggcaacgcaggcatggcggctgcatatgcggccaggcaactcggcgtccccgccaccatcgtggtgcccagcaccacacctgctctcaccattgagcgcctcaagaatgaaggtgccacagtcaaggtggtgggtgagttattggatgaagccttcgagctggccaaggccctagcgaagaacaacccgggttgggtctacattcccccctttgatgaccccctcatctgggaaggccacgcttccatcgtgaaagagctgaaggagacactgtgggaaaagccgggggccatcgcgctgtcagtgggcggcgggggcctgctgtgtggagtggtccaggggctgcaggaggtgggctggggggacgtgcctgtcatcgccatggagacttttggtgcccacagcttccacgctgccaccaccgcaggcaaacttgtctccctgcccaagatcaccagtgttgccaaggccctgggcgtgaagactgtgggggctcaggccctgaagctgtttcaggaacaccccattttctctgaagttatctcggaccaggaggctgtggccgccattgagaagttcgtgggtatgtgccaggtcctcccatgacctgacctgctgactcaggcgctaagtggctgtccacttggtatgccactggggatcccactcaccccaagtttccttcacagttctgtcttccacctctgcctagaattttccattaatagaagataatacaatgccgt

SEQ ID NO: 77986 - DNA, 929 bp, Homo sapiens
ccctgggaccattcagaagactgtccacccgtcctcagccccctctcttcgtgggctatctactcagttgatccctccctcgctggcttggctctgactcctgctcagacccatcacctttgccgggaatgatgtctggagaacccctgcacgtgaagacccccatccgtgacagcatggccctgtccaaaatggccggcaccagcgtctacctcaagatggacagtgcccagccctccggctccttcaagatccggggcattgggcacttctgcaagaggtgggccaagcaaggctgtgcacattttgtctgctcctcggcgggcaacgcaggcatggcggctgcatatgcggccaggcaactcggcgtccccgccaccatcgtggtgcccagcaccacacctgctctcaccattgagcgcctcaagaatgaaggtgccacagtcaaggtggtgggtgagttattggatgaagccttcgagctggccaaggccctagcgaagaacaacccgggttgggtctacattcccccctttgatgaccccctcatctgggaaggccacgcttccatcgtgaaagagctgaaggagacactgtgggaaaagccgggggccatcgcgctgtcagtgggcggcgggggcctgctgtgtggagtggtccaggggctgcaggaggtgggcagggttgaggaaccatctcagccatcctcccaggaagcccacccctgacccttactaatttttctaatgtgcaaactttttcattgaaaaataaaatatattatgaaacaaaaaaaaaaaaaagattctgcttatggaagtagagaggaaacttaagatttatggcagacaaccctgttttttttaaatagcaaatcctaaagataacttttagcctttgtggaagattgagcctaagtagaaacctta

SEQ ID NO: 77987 - DNA, 297 bp, Homo sapiens
gatcctgtgcattttcccatcatcagctgtctcctttcctgctttccttccaccccaagtctgctctcagccccagctctcaactggggccccagagtgaggccaggagcctgactccagctagtcttgcatgccaggacaggggcatccctgtaccacaggaagcaggtggctaaacaagagggacttggggtgggacaaaggctgcctccgctgaaggcagaagcagctggggaggccaacttcattctgatatgaagtccttcctactaagtcagaattatttcatcacagacc

SEQ ID NO: 77988 - DNA, 309 bp, Homo sapiens
ccctgcccccatctctctcctgtttcccccactcccatcctcttctgggttcccacttctctcagtgttgccaaggccctgggcgtgaagactgtgggggctcaggccctgaagctgtttcaggaacaccccattttctctgaagttatctcggaccaggaggctgtggccgccattgagaagttcgtgggtatgtgccaggtcctcccatgacctgacctgctgactcaggcgctaagtggctgtccacttggtatgccactggggatcccactcaccccaagtttccttcacagttctgtcttccac

SEQ ID NO: 77989 - DNA, 1930 bp, Homo sapiens
ctgtacgttcttgaaaggggaactttgaaatggatgacaggaagagagccaagaggaaaagttcctacagagaacagcagccaggaccacctcgagggagaaatgcactttggggtgccgcggatgcagacagaaggggtttggggcaggagagacggggtttcaccatgttggctggtctcaaactcctgagctcaagtgatctgcccacctcggcctcccgaagtgctgggactacatccgtgagccaccgcgctcagccctttgagaggtttgaagccgaggagctgtgtgtgaatggaccagtgggaatgatgtctggagaacccctgcacgtgaagacccccatccgtgacagcatggccctgtccaaaatggccggcaccagcgtctacctcaagatggacagtgcccagccctccggctccttcaagatccggggcattgggcacttctgcaagaggtgggccaagcaaggctgtgcacattttgtctgctcctcggcgggcaacgcaggcatggcggctgcatatgcggccaggcaactcggcgtccccgccaccatcgtggtgcccagcaccacacctgctctcaccattgagcgcctcaagaatgaaggtgccacagtcaaggtggtgggtgagttattggatgaagccttcgagctggccaaggccctagcgaagaacaacccgggttgggtctacattcccccctttgatgaccccctcatctgggaaggccacgcttccatcgtgaaagagctgaaggagacactgtgggaaaagccgggggccatcgcgctgtcagtgggcggcgggggcctgctgtgtggagtggtccaggggctgcaggaggtgggctggggggacgtgcctgtcatcgccatggagacttttggtgcccacagcttccacgctgccaccaccgcaggcaaacttgtctccctgcccaagatcaccagtgttgccaaggccctgggcgtgaagactgtgggggctcaggccctgaagctgtttcaggaacaccccattttctctgaagttatctcggaccaggaggctgtggccgccattgagaagttcgtggatgatgagaagatcctggtggagcccgcctgcggggcagccctggccgctgtctatagccacgtgatccagaagctccaactggaggggaatctccgaaccccgctgccatccctcgtggtcatcgtctgcgggggcagcaacatcagcctggcccagctgcgggcgctcaaggaacagctgggcatgacaaataggttgcccaagtgaggacggaccccttaccgatctgtgctctcctagcccaagagacccctggaggggctggagttttatccagcgcctcgtcgtatgtttggctgagcacctgtggcctgggtgcaggttaacttcttgttatcaggagcccactatgcagaggccaaaggtcggcagccagcgaggctatgaattggacctttttggtatctgtgtgactgctctgtgcccatccttagccaacttgctggcgtgacaagtgcccacaagtaacacaccaggtacccagagcagggtggacaggagagacctgaatcacagcagtgaggaattcctcaaagctgtgacctcgcccctgaacttgttcccagtgaaggtcaacagggccaccaaccagggttgaggaaccatctcagccatcctcccaggaagcccacccctgacccttactaatttttctaatgtgcaaactttttcattgaaaaataaaatatattatgaaacaaaaaaaaaaaaaagattctgcttatggaagtagagaggaaacttaagatttatggcagacaaccctgttttttttaaatagcaaatcctaaagataacttttagcctttgtggaagattgagcctaagtagaaacctta

SEQ ID NO: 77990 - DNA, 902 bp, Homo sapiens
ccctgggaccattcagaagactgtccacccgtcctcagccccctctcttcgtgggctatctactcagttgatccctccctcgctggcttggctctgactcctgctcagacccatcacctttgccgggaatgatgtctggagaacccctgcacgtgaagacccccatccgtgacagcatggccctgtccaaaatggccggcaccagcgtctacctcaagatggacagtgcccagccctccggctccttcaagatccggggcattgggcacttctgcaagaggtgggccaagcaaggctgtgcacattttgtctgctcctcgggtaagtgatctgcttccccatcctgtcctctgctgtgtgtcctgggatcagacactctgcttctctgagccctggtttccccagcaatgtgccactgccagggtggggaggtgaggggggaactccagagcccccagtagagggtacgcagtcctgcctgggctcccagatgctcccgcactgacacgctctccacccccgaccctggcagcgggcaacgcaggcatggcggctgcatatgcggccaggcaactcggcgtccccgccaccatcgtggtgcccagcaccacacctgctctcaccattgagcgcctcaagaatgaaggtgccacagtcaaggtggtgggtgaggtgagtgccgacccagggcaaggaagagagagggcgcctggtggctggacagggtgccccctgtgcctcaccccctcctatctcccctgtggctttgcagttattggatgaagccttcgagctggccaaggccctagcgaagaacaacccgggttgggtctacattcccccctttgatgaccccctcatctggtatgtggaggtcaaggtcacttggtgggggtggcagc

SEQ ID NO: 77991 - DNA, 258 bp, Homo sapiens
gagaaagatttaaaaacacatataaacatcttttctttgtggataaagaagtgtggtcaaactctataccttacctgtaactctggaatgttttgagaatgagccaaaatgtcagattcttccccctatccaaacagcctagctggcaaggtccccagggacccaaatcagacccaaggtgagcatgctggtcctcagtttgtagtgggcaagacctcagggtgagctgaagaacagggccttgggtgatgcaaaatt

SEQ ID NO: 77992 - DNA, 321 bp, Homo sapiens
ccttcagaattccaccacattcataaagatttgacagcaattctatacagtctctttgagaaaatagaagggggtattttctaattcattttaaggagctagtaaataccctgatactgaaatgtatactgcaaattgataaaattatagacccctgcatattaaatttcaaaataaaaatgataaaaatacttgggtaatgaataacagcataacaaaaaaccacagaccaatatctcatgaacatagacacaaaaaatgcttcacaatatgacatagaattcagtaatacatgagaattatataccacaacccagtaag

SEQ ID NO: 77993 - DNA, 437 bp, Homo sapiens
agatggggatggagggaagaaagagacagtatttgaagagacaatggctcagaattttctagaactgacaaataatactaatccaaagattcaagaagcccagtgaaacccacggaaaataaaagaaaaaaccagtcacacgtagatgcatcatagtgaaattgtggaacaccaaaatatacaagacattaaatgtcaccagaagagaaaagacaccttccaaagagtgacagaccaccttccaaagagcgacaccctaaagtctaacttcttcccagctgcagcagaagccagaagatgatggcaatcgtatctttaatgtgtgctggaaagaaaaagaagttctagtctagaactctacacttagcaaaaataacttccaagaataatggcaaaataaacacattttcagataaacaataattgtgtttttcacc

SEQ ID NO: 77994 - DNA, 723 bp, Homo sapiens
gacaacatgtacaagattcttgtgaaagactatctgtctaggaacatgactactgcctacattctaggagatgccttctatggagcagtgttctatgaagggtggtgtgccctacagggtgcaaaagatgaacacttggagagcaggaagcaggtactagaccttggagttcaagaccagcctgaccagcacggagaaaccccgtctctactaaaaatacaaaattagccgatactggtggcacatgccggtaatcacagctacttgggaggctgaggcaggacaatcgcttgaacccggtagtcggaggttgtggtgagccaacatagcgccatttcactccagtctgggcaacaagagtgaaactccatctcaaaaaacaacaacaaaaaaccagccctggcattcctaatatttttgtcctttttctagcatttttttccatctatgtgtcagatacatctatctatatggtatatgtatggaattctgaggagagaacagagactggacaatgcaagctcacttgtctgtttttgtgtccatggcattttaagcatggctggttaagtggactgagatgatgttattttagatagtggaattctggcaatacttggtaataagtgaccacaaacatcataagctatttaatggcacgatatttaaacaagttgtgagactaaagatactacatctttttctttacaaaagaaaaaaaaa

SEQ ID NO: 77995 - DNA, 293 bp, Homo sapiens
tattatgagaaagacatcaagcaaattataaatgagagacattctacaaaacacctgaccagtacttctcaaaagtactcaaaatagtcaagatcatcaagaatgagaaaagtttgagaaattttcacagcaaagagagcccaaagagatatgatgattagatgtaatgtgatattcttagttggtatcttggaagctactcgggaggctgaggcaggagaatcgcttgaacccaggaggtggaggttgcagtgagctgagattgcgccactgcactccagcctgggcaacag

SEQ ID NO: 77996 - DNA, 280 bp, Homo sapiens
acgtataaaatacttgccacataatagaaatgatagcttgttcctgctttctctacatgtactgactatccattaaaacattgaaacttctaagaatatgtacactgaaattgtatgtatatcaatatttgttttgaaaatactgtaaagttgtggtttgagtcacaaatattgtatcagtccatgaataactggaaaagaaaagtaaaataaatttggagggttgtcacattctatagcattggcttttataaagtgtcaacaagatatataattaagt

SEQ ID NO: 77997 - DNA, 708 bp, Homo sapiens
ggaaaaggatgttttcccctcttcttctcagtcaacctttaatgaacagctttcagtagtttcttcattttgtgtttgtcttaacttctggttattttctttggattgtgttagtcttagttctcaaatttagacaaattccttggagtggaagaatggagacaggcatatttcctggtgaagattaaatgactactgtaccccgcctgtgtttgggaattattacagatggttcacatgcagctaatccaaacccaaatttattgcttttatttattattctccgcattctgaacattttcctcctaacccttctcctgagtcaattaatggcatcactatttaccaagttagctaaaaaaccttggtttcattcttgatttctctttcatctcctatgctgcctacaacttgaccaagttctgtttcttccaactcagaaaattaaacctttataatatactcttacttcttgttcctgtctctagtttctctacccttcaagttgttcacacagctacctgcatgatctttctaaagtacatacaacgatctgacaacgataacttcttggatttacagtctttcttgcttccccaccacatgatgaaatccagaatagtgggctcagcaatcaagattccctaccctctggagccttcctgtgtatccagcatcacagttcatcacacgcccagtgctctggct

SEQ ID NO: 77998 - DNA, 698 bp, Homo sapiens
cgtcgactggggtcacgtgactgactgatcacaagcaaaagatgcccgctgccactccatggcccaagatacgaacatgtttatttcttatttttattttttgtaaagatggggtcttgctatgttgcctaaggtggtcttcaactcttggcctcccagtgtgctgggattacaggcgtgagctactgtaccccgcctgtgtttgggaattattacagatggttcacatgcagctaatccaaacccaaatttattgcttttatttattattctccgcattctgaacattttcctcctaacccttctcctgagtcaattaatggcatcactatttaccaagttagctaaaaaaccttggtttcattcttgatttctctttcatctcctatgctgcctacaacttgaccaagttctgtttcttccaactcagaaaattaaacctttataatatactcttacttcttgttcctgtctctagtttctctacccttcaagttgttcacacagctacctgcatgatctttctaaagtacatacaacgatctgacaacgataacttcttggatttacagtctttcttgcttccccaccacatgatgaaatccagaatagtgggctcagcaatcaagattccctaccctctggagccttcctgtgtatccagcatcacagttcatcacacgcccagtgctctggct

SEQ ID NO: 77999 - DNA, 479 bp, Homo sapiens
tgggacctggggctcacacggctaatccaaatgatctcatctcaagatccttaatataattatatcagcaaagctacaaagacctcttttccaaataaggccacattcacaggttttgggggttaggacagggacatctttttgaggccaccatccaactcaatacacatgccgctgttctcctcttcccccaacagccagtcagtttccaagtcttgaagattccatccgcttctcaagtcctacttgcaccattctgatctctttctgccataggaatctcttagaaatttctgacggtttcctactcttcgaaaagttcagaacatacttctaagcctgacatttagggctctctgcagtaatgttgccagcgtattttccatttctttctctttcttcttccctccatgtaccttgccctccagccacactgtgccacttgccgttgccctcactgctcctcccttctctctgaa

SEQ ID NO: 78000 - DNA, 619 bp, Homo sapiens
ccttgagtgcccacttccgaccccatcccaccccagccctggtctcctgctggtggcatgtgacatgatgggaaccgggctggctgggtgccaggtgtgtgtccacctgcatgccagcgtgcacaccggctcacacccacaggagcctgtgtagtgtgtctgcagtgtgtgcgcagcgtgtagccacagagactctgaggcagcccctggtttccctggtataaacagggcttcaaagactgttctgcctttgtcaccatgtcactgtttatcttgggcaatggctttgatctgactttgtcacccaggctagagtgcagtggcatgatcatagctcactgcagcctcaacctcctggactcaagccatcctcccacctcagcctcctgagtagctgggacctcaggcacatgccaccaagcctgggcaatgtagtgagacccccaactctacaaaagaaattttttaaaattagtcaggcatggtgtttcgaacctgtggtcccagctacttgtgaggctgaatcaggaggatcccttgagcccaggaggtcgtggctgaaatgagtgatggttgcaccaccatactccaacctgggtgacagagtgagaccctgtct

SEQ ID NO: 78001 - DNA, 726 bp, Homo sapiens
agcggctctcgctcctccagccatggccctgagtgacatccgagtggccttctccgactaccagcactttgccttgctgtacttggagatgcggaaagggggcctgcggaaccagtggctgcagctctacggtgggcgggctgcggggcggagacccagacacccccgcttcgggtctgggatgtcacccctgtgcctgcaccagccctttctgcacgcggaaggtggaaccgctggctcctggtgtctgtggccgcgggtcccggcccctccctgcccctctctccctctcttcgcccctccagccccttccctttagcttacccgccctccccaccttcagctcgagcgcccgagctgtttcccgaaggcgcccagaagatgcagctactggcgccccaagtgggcctgagccccagccagggcgtcctgctgccgaagtcgggtgagcggtgccggcagccctgctgggagggccaggccccgggtcacacccctgctggaagggccaggccctggtcactccactgatctcagattcgggacagaagtgcccggggcagacccagcctgtctgggtcgggggagggcgagacgttgcccaggccggtgttcccaggaggagatcgccttggggcaggtcgggggcctccgtcccagggaagggggcgcggggtggcgcctcaggctcgatctctctgcagaccagtgtgcgggcgcgctctc

SEQ ID NO: 78002 - DNA, 418 bp, Homo sapiens
tgtaattaagtatatgcttaactcatctgatttatattaggtgtgcaattacatgtttcttatctttcttccttttaaaggttaggtgaaagtaaaaaaagtggtgagagatttgagacattgagtgagaggtataggatcttggaaatgaatgatcattagagacaggttgtacagttaagtaacatgactacttgaaaaacattgtttcattggaccatgggaaggttgttgctaatcttcagtggagtaacttcaatagaattgatgagaaaggggaggcaaagtgtaatatgttattatgtaatatgtaatatgctttattgtctgatggtaataaagttcagaaagtagagaatagaattttcaagattgagatagagtaacttgaaatacctttatgtaaaagttgtgaagt

SEQ ID NO: 78003 - DNA, 844 bp, Homo sapiens
agagcaatgtataatctcaactttccttttcttcccccaaattaaggttagttcactgatcgacaataggtagaattatctagtgtattgattgtccagtgtgtgcccgggagtatgttaggtgcttgctgcaaaatgaagtaagccaaactggagtttataatcatcagacaatttagggtaaacactggtagtctccaaagatgtaaacagctgagggctttagtctactcctctgcaagcttttaacataaggagtatgttacaatgaaaagaaatttcaaactaaattctgctcatgtaaaaacattgcttaactggaaggtgcaaaaaacagactcataggcctatctcataaaactctaaaatcccagatttctgtccttaaaagtcattttgaaaagtagcctgtgtgaaaggtttacttaaagcagttgcaactacattctacagtaggatacatttaaccttctaagtggatcactcaccagaatcctacataccacaaaacaggatcaaatggagtactagttaggttattactccaaaagctgttaatctgcaagcctcgcctgacccaaagtctagttacataaaatatttctaaggctaacccctgtatcttcaacatcattcatttcaccaattatttgtagcatacttaacgttaatacattgtcttgtgtagatttaaagtaccaatatctgggtgcaggcttctaatcagtgtctttcaaataataacttactaatcctagtgtgtggattcatgattgaaatacctagaaaattaactaaagggtcctaaaacaaagttactcccataaatattatgttatatatg

SEQ ID NO: 78004 - DNA, 337 bp, Homo sapiens
gcacccaccatgcacagtgcaggtgccccctatctgtatgtcacctactcatgacccttaaggggccagcacacagatgaggcctgcgagcccctgacagggcaggacacttccccagggtcatgcattctgcatttctaagccaagattctaaagcggcttccaaaaccagccctccctctcacctccccatgtgccaagttgttcctgggcattgccccccactcccacccctaccctggggtcactgggttgtggacaaaccagaggagacaagctccccacagacagccctcacttgggggccccagggtactggtgcttggcccaggcgttg

SEQ ID NO: 78005 - DNA, 455 bp, Homo sapiens
aattagtgggttcctttatgaaaaaaacaaaaacctacaatagtaataatgctcttattttcagcaactttcagggtaacctcaatgataaggaatttttaagtttttaaattctatatataattgttaattatatattgttaaagttgagggcaaagtttatgtactttttggcatttaagctgtattagtgcttttttttatgcccagtcattgcaacttgactgtttccataactgaaggaaataattaagttttaagtttaaaaagttatctgaaattaaaatttaatgaagtttgattgactccaataataaatttggttagctggcttccatcagctcatgagagctattaatacacatctcttcccagctatcaagttaagtgtcttcatattggtaacttgaaatcagtcacagctggagtattcacaaacagaaatgcacaaatgc

SEQ ID NO: 78006 - DNA, 532 bp, Homo sapiens
atcaaaagagattaaaaacctaaatgtaaaactcaaaactaagaaaaccttgaaagacagctgaggcaataccattcgggacataggccatgagcaaagatttcatgagaaaaatgccaaaggcaactgcaagaaaacaaaaaattgacaaatgggacctaactaaactgaagaactctgcacagcaaaagaaactgtctgcagagtaaacagaccacctacagaatgggagaaaatgtttgcactgatttactttcacaaagtcagtttgtgaaagaaaaagagaacaagtggaatttgaaaggcaatggctaatttcttatgcatcagtgaagacattggaatccaatagagttgagtgcaaaggtgagcacactgctttcttgctgtgtaactttgaataattaacataaacgtttaagtagattttcttataccagtactcatcacttaggattgtgatcaggatggaagtattatggtctaaaagttccacatacaacaatacctggcatataatatttaacaagtg

SEQ ID NO: 78007 - DNA, 717 bp, Homo sapiens
tctggagaacagggaatcaggatgttatggggttttaatgtttttatttttatcaaaggaatacattttaatttgtgggactataatgcaggttaatatagcatctgtatggcatcttttgcatatgtagctcccatcccgttttcaaagtgtcctcatcacaacgacaggaggtaggtagatgctacaagcaccaaggtcctcatttttcaaaaaaacaaaatacacagttgagactaaataatttgccaaaatatacacagcaaatcactggcaaaaccagaaaccgaatccaggacagtctagacattttccactgtccacccatccagtggcttttcttcctttccctttagcctctcaaaactcaaaacataacacaagcttcatgtcagatccagtcctctagggaacgccagccaagtgaaattctccacttttccctctcctctgcctcgcttcaggagactgagaaggcactacaaatagtgctctgtggatttccttccttccatgagaacaagccatccctttaccttttgaaccatgtttatacacaggaaccactctcagctcctttctaagctaccctgaaaccagtcaatactaacattatgattttttcagtgggattatatgacaacataattgggatttcacaggtgtaattaaaagaattaattaaatttaaataaaaagaatttcctcttaagaaaa

SEQ ID NO: 78008 - DNA, 424 bp, Homo sapiens
ggatgccctggccgttggtgctctgggctgctccctggataccattctgcttaaggccctagaaatctgaggctgtgatggacatagaagggtagatctccaaaatgtgtttagagtcattctcccattgtcttgatgaatagcttctggcttccttctacacatcctaatttccttatcccatggttgcttggccccacttttgtttttctgtcctaaacacactttttattcttcatacgaccaggctgagaatttttcaaaatctttttattcttctttccttttgattgtaagtttcatctctatattatttctctcttctcttatttttataagcagtaaagagaagccatgtagcactctgaacattttgcttagagatttgttaacaacaaatattctaattcattgctgttaaatt

SEQ ID NO: 78009 - DNA, 891 bp, Homo sapiens
ctacaagttgctaggcttggacccgctggagtcgcagggacacttctgagagctcaccccgggctcttggcaccgcgtgtgggggctcagtctccctctcggaaggcgatcggagactgacatcggcccatccaggagttggagggatccatttgaaagtgattgtttcccctcccgctctccagccgaacagttgggttggcgtcgtcttgcaggtttaggaatcccagctctgccaggccggctggtcttaacctctgctcttcattcactgtggtgcacccacacccagccaaggaaagcacgcgcgagaaatccccgaggctcggccagcccccggggtgccctcttccgctaccgccgcgttccgactctgctgggggacctgccggaagacgcgaagagccaaacttttctttgaggttttcgaggcaagaccgcttcgaaagccggcgcagctgccgcttaaccagttccaggacaccgacaaggctgggttgcggctccggatccccacccttctcggcgcaccgcccggtaccgcagcacttacgactcctctgagatttctgggggtcgccccgctaaggcacagaggaggctgaggaaaggggttctcagactcccgggaccacaagcgcgaagccctctatcagcacgtcgcccttctcctgcagtttcccaccggccgccaaagtaacttggagcgaagcgtggcgcagtgcgagggccccgggcggtggcggagccgtgcgtagcctgctgcgccgacgctgagccgggcccggcgggccggtgtatgtctccccgcggctgcggcgcgcaactcccggtgactgtgcagcgcgcgccgccgcctgccccgacccgcgctgcagccgcccggcccgg

SEQ ID NO: 78010 - DNA, 484 bp, Homo sapiens
tgagacagagtctcgctctgtcgcccaggctggagtgcagtggcctgatctcggctcactgcaagctctgcctcccaggttcacgccattctcctgcctccgcctcccgagtagctgggactacaggcgcccgccaccaagcccagctaatttcttttgtatttttagtagagacggggttttaccatgttagctaggatggtctcgatcttctgaccttgtgatccgcccgcctcggcctcccaaagtgctgggattacaggtgtgaggcaacgcacctggccagcatgttaaaatttttctattctgttccatagtttgaaccttaacagaaagactatttattcaaccaataattaaatttcaaacataaattatactcagctaaaacaagtaaacccaggatttaccatttaagatactatttggaaataggttcaaatatgaaatgctttccaaagcaggatcatattgtagcacactc

SEQ ID NO: 78011 - DNA, 455 bp, Homo sapiens
agagaaatggaatgaaaaatcttcaaagctggaaggacaaagggagtttcctgttctaggatgtgatgtgaagggaaattagaagatggactgtcctgaagcatagacatgaccctctccaactcatcatctgagatcagctgtcctggtaggaacccctccagccaacccttcctcaagttatatacttctatctactggaaaattgacattaatgcattttcccaagtctcatggaagggtttcacagcttagagctcagcctcagagtggactagcacacagctgtttcggagactggaggatagcctgctgggatagaggtttccctggaagatacagagctgtgagccaatcccaggcaattctgcagagcatcccatctgatcccacacatttgagaatggatggactaacctgaagtattacagagcagcagtgcagaagtggggaca

SEQ ID NO: 78012 - DNA, 332 bp, Homo sapiens
tttacttacatcagtattctttaaacgtgagcaaatcccacatggctcccacattgctatttcatttgtgttgaccaatttataatgattactgttggcctagtattcatatgcctaatactgtgaactgtagaaatctttggtgatactggcaatttctatattagaaccacaaagtaggttctttgcaaacccattttctttttcattaagaggtataaattatttgcaagaaaaaataatttattcttcaagataagcataaactgaagcatatccaagccttttacttgaactctgagcccgaataccctagctaactcattcagttc

SEQ ID NO: 78013 - DNA, 860 bp, Homo sapiens
atggatgcattcatttactcattcatccaacatgcatttgatgttggtaaccagttaatatctgaaagctgggggatataaactgaacatagagtcccatctccatcctcaggaaactcatgccctccggtgatggggggcaggacaaatagcagagagaccgccttattttacaagatgtcattgttctctgagaggctgaaaagattttctatcaccactagcctcctcctctccacggccatttacagaatgggcaaaccagcctcccagcggaagaccaagcttgctagcggtcaacgttgccggcagctctgcaagcgcttccagcgggcgtcgctctcctttcgggggtggtactttcattcggtcatcctgtgagtgttccacttcccgacggaggccgagcactcacaccgcggcggaggtacccgtcaccgcagaaccgggtggctggctctcctccagggagaaagcctgtcacttattcctcaacactgttgggaagttacctagaaaagtacagacagaagacctaggcttgcgttttagaatcgtggagtgttagcgctggccaaatcgttggacacaatgtaagcttgatcaggaaaatgagctccagggtctcacaggcggggcctggaatcttggcgcaatctgcgaccctcactgcctcctacagtcggggctgagcgttctttcaaacagccaaagtaatcacttaagtccagcaatgatctccttggagaaatcaaaagatcctccctaagagacggccttggagggcatcgcccctggggctgggcacagcacgtcttcccggccccggcgcgggaggagggtttggggacagcggccgc

SEQ ID NO: 78014 - DNA, 534 bp, Homo sapiens
gaacttcagtatgcctggatttgggtggggttgccgtgggggagtagtcctggaactaatttcctgcagataatagagatgactgtattggctagggtttcttttcctgtgaattggctgttcaggtccttttccatttttaaattgttttctctactgctttctgtgagctagctgtctctttctgtgagctagctgtcatattgcagtatagcagttgctttatgaaaggtgggttcaaagtaacaagagcacaggaggaggtcagcactagacccgagtcttgaaaggttgggtgagaaggagtctttaaggttttatgagctatgctaacaacttttgactcctaggtcaaagagccactttaaaggagaggaattacaattgtgttttaaaaattatggtaagctgggcatggtggtgtgcacatgtagtctcagctactggaaatgttaaggcaggaggatcgcttgagcccagaagttcgaatccagcctcggccacatagcaagtctcccatctctaagagaaaaa

SEQ ID NO: 78015 - DNA, 506 bp, Homo sapiens
aagaaagaaggccagatctgatttatttaggaagaacagcagtcattgggaccacgattacagttgtacacacagcaaagggaaacgtgacagaaagaagagagtgtatgattatgagtcagaaagattggattgtttccaaagcaaacataaatcagcatcaaaacctcatcatgacgatatcaacttctattctgaaagaaaacaaaaccggccctttttttttgcctgtgtaccggcagactcactggaggttatacccaaaaccattcgctggactattccccctgaaaccttaaggaaaagaaacttcagaattcccctagtggcaaagatttcaagttcttggaatatatggagttcctccaaaaagttgttggggtcgctctcggggtcccttactaccgtttttcatagctgacattaccatagctaaactcctctgaagtggacagctggtcgctattgtgatattctgtgaaaaatacaatcatataacatccaat

SEQ ID NO: 78016 - DNA, 850 bp, Homo sapiens
tagtctacacatccacaagccaagaaaaaaagtagggtgtaattatttaatctagattccacagtttactataattaactgtatccttagtaggcaattcacagtctatactgcacaacagtgaaatcattaagaaatgaattctaagcattcgagaattatatatttggctaataaaaatatggggtgggtttctcaggtgaccagaaaagtactgtaacttcctgttaatgaaaaattcacacaaagtagaaaagtatcctcaggggattgcctccaggatacctccttctcccagaggaaaatcctcagatgctcaagtcccttataaaatgtggtgtcatatttgcatgtaacctacacacatcctcctacatagattacttacaatacctaatacaatgtaaaagttatgtaaatagtcgttatactgtattatttttgatcatattatttttgttgtatatactttttttcccccaaatattttccatctgaggttagttgaattcaaggatgcaaaaatccttggacaggaaggccaactgtgcttaacagaagagcaaaatgctcccaacttgtattcattacgttatggtagaacaaatgatccaaaatgtcttattcttagagaagcaagagacttaaaggtatagctgtcggctgcctcaaaacacttaaaccttgtatttagaaagggcctaagaaatcacctgattcggccaggaacccggtggctcacacctgtaatcttagcactttgggaggctgaggaagaaggatcacttgagctcaggagttggagaccagcctgggcaacatagtgagacgttgtttctattatttaaaa

SEQ ID NO: 78017 - DNA, 574 bp, Homo sapiens
tcctgcattccgccccaacccccggccccccgcggctatccagtcagttcgctgctattcccatgggtcacaggagacagatgaggagtttgatgctcgctgggtaacatacttcaacaagccagatatagatgcctgggaattgcgtaaagggataaacacacttgttacctatgatatggttccagagcccaaaatcattgatgctgctttgcgggcatgcagacggttaaatgattttgctagtacagttcgtatcctagaggttgttaaggacaaagcaggacctcataaggaaatctacccctatgtcatccaggaacttagaccaactttaaatgaactgggaatctccactccggaggaactgggccttgacaaagtgtaaaccgcatggatgggcttccccaaggatttattgacattgctacttgagtgtgaacagttacctggaaatactgatgataacatattaccttatttgaacaagttttcctttattgagtaccaagccatgtaatggtaacttggactttaataaaagggaaatgagtttgaactgaaaaaaaaaaaa

SEQ ID NO: 78018 - DNA, 1426 bp, Homo sapiens
ccaagtattttcagccccagccggccacacagctcggatctcctcctgtggatccccccagctctgcgatgatggcagaagagcacacagatctcgaggcccagatcgtcaaggatatccactgcaaggagattgacctggtgaaccgagaccccaagaacattaacgaggacatagtcaaggtggattttgaagacgtgatcgcagagcctgtgggcacctacagctttgacggcgtgtggaaggtgagctacaccaccttcactgtctccaagtactggtgctaccgtctgttgtccacgctgctgggcgtcccactggccctgctctggggcttcctgttcgcctgcatctccttctgccacatctgggcggtggtgccatgcattaagagctacctgatcgagatccagtgcatcagccacatctactcactctgcatccgcaccttctgcaacccactcttcgcggccctgggccaggtctgcagcagcatcaaggtggtgctgcggaaggaggtctaaagccaggtggggcaacagcggtggcagggcagggggtggtgggccagactggtccccgggggacttcttcacaggggctgctggcgagctctttctctttagggactgctccataccccatgatggagcacacggtgtagggaagccagaaagaaaagacggcccagccacagaagcacaatggcccttcgctctcccccagccccaccatgatgcccccatgcctgggcgtgggggaagatcatttgccaagaggcagctactgcaagtctttgcgttcacttgtactgtaacaacataaaccagcacgcggttcccacccggggccaacctctccacgcgcactcaggaaagtgaccagtgaccactggcgttaggaaggtggctccagtaaagggttttggctgcatttggggaatgctgcattttgttcgtgcctgtaagattggtttgtgtcctgaccagctccaaaaatatacttcactgccctgaaaaacagacacagggagagttggttgtctcttcacttggccaaatgtaagtgaagaacagagtctttttcttcttcggattctattgtttgctggaaccgtacacgttccttggaagatcatgtttaagtgactcctgttgcctgagcacaaaaatgggcaccaatggaggaaaatgacccttgggctggcaggggcagtgacccttccagggtaccactgagggaagggcctgggttcaagcctcccggaacctcccctttggctaaccgagcccctgaaatgcccagtactgccatttgacatgagggtaccttcgccctcaggagatgtgacgaaggaacaaggtctaatttgtgcgtgtgtggactcactatggaaataaaatgcagtagaaagagcatgtaaaaa

SEQ ID NO: 78019 - DNA, 1330 bp, Homo sapiens
ccaagtattttcagccccagccggccacacagctcggatctcctcctgtggatccccccagctctgcgatgatggcagaagagcacacagatctcgaggcccagatcgtcaaggatatccactgcaaggagattgacctggtgaaccgagaccccaagaacattaacgaggacatagtcaaggtggattttgaagacgtgatcgcagagcctgtgggcacctacagctttgacggcgtgtggaaggtgagctacaccaccttcactgtctccaagtactggtgctaccgtctgttgtccacgctgctgggcgtcccactggccctgctctggggcttcctgttcgcctgcatctccttctgccacatctgggcggtggtgccatgcattaagagctacctgatcgagatccagtgcatcagccacatctactcactctgcatccgcaccttctgcaacccactcttcgcggccctgggccaggtctgcagcagcatcaaggtggtgctgcggaaggaggtctaaagccagggactgctccataccccatgatggagcacacggtgtagggaagccagaaagaaaagacggcccagccacagaagcacaatggcccttcgctctcccccagccccaccatgatgcccccatgcctgggcgtgggggaagatcatttgccaagaggcagctactgcaagtctttgcgttcacttgtactgtaacaacataaaccagcacgcggttcccacccggggccaacctctccacgcgcactcaggaaagtgaccagtgaccactggcgttaggaaggtggctccagtaaagggttttggctgcatttggggaatgctgcattttgttcgtgcctgtaagattggtttgtgtcctgaccagctccaaaaatatacttcactgccctgaaaaacagacacagggagagttggttgtctcttcacttggccaaatgtaagtgaagaacagagtctttttcttcttcggattctattgtttgctggaaccgtacacgttccttggaagatcatgtttaagtgactcctgttgcctgagcacaaaaatgggcaccaatggaggaaaatgacccttgggctggcaggggcagtgacccttccagggtaccactgagggaagggcctgggttcaagcctcccggaacctcccctttggctaaccgagcccctgaaatgcccagtactgccatttgacatgagggtaccttcgccctcaggagatgtgacgaaggaacaaggtctaatttgtgcgtgtgtggactcactatggaaataaaatgcagtagaaagagcatgtaaaaa

SEQ ID NO: 78020 - DNA, 708 bp, Homo sapiens
ccaagtattttcagccccagccggccacacagctcggatctcctcctgtggatccccccagctctgcgatgatggcagaagagcacacagatctcgaggcccagatcgtcaaggatatccactgcaaggagattgacctggtgaaccgagaccccaagaacattaacgaggacatagtcaagactggagaaaatggaaaaagagaataccccggaggaatctgaagctctcaaacacttctgataacatcctgctggttactgatcatacctgttgatgaattccaaaagagcagttgctatctcaaaggcaagcaaggtcatggagggcaggaaaagcacaaccctgaatgcagaacgagcaccaccagggtcttgaaaccttacaaacaacttcataaatcctgcactgggcttccttattgaccacacaggcttcctatcaaacatgaatgaagaggaggtggactgtattacaaaattaataatgtaagatggtggctgccaaagccattcataatcgtaattgcttttgcatgtgttttcttgaaagcaacttcatatttgtcagcaactaggaatgaaggcgcttcctttgatacttatatgtacaggcacaaaatagagttgaactttgctgcacacaataaatgtgttgtgaaaatacgtgtttgaagtctaataaacagacttttattttgcccatgtt

SEQ ID NO: 78021 - DNA, 514 bp, Homo sapiens
ggcttttataattcttaactttgtattttagaaattttgtatctgatgtataagatcagatcataagcctaaagtagcctaaagtatcagctcaaaatccacatgcctgatggtttccttcaaatgctgcctctgtgggtaggaagcacactctgattccactgagcctgtctctgcacggaacgaacacaaagttcggtagtcacaggacacccttgccgtgctgcataatgatgtctcactctgtccccaggtggctttaccaagccacatcactgacgtattcattgtagttgactcagaaccactagggcacttctgtgatcacagcagtcccatgcaggaagctttaccttcaggaaagctgctggattgagactggagggaagtgtgactgcctgtgcatgaagtgctgagatgagttcttggcctgtggtctgtgcttgtatacattattattatcatttaatgtatgtattttcttatgaagttaattatttgccaatttttcttt

SEQ ID NO: 78022 - DNA, 672 bp, Homo sapiens
agcgggttccggctcttgtcacgtggagggggaccaagggaggtgattgtgggggttggggactagggcaaagtcgggggtcccgggtccggggttgcgccgggagggtactggccaggcccgacttcaagcagggaggtggcccgggactggctcccgcgctggtcacgcaccggggtccgtcatctcgaccgggagtcgctgtgccactctaggggcttaaaaatgccgccaacaactttacccctgctgaggaacttctcgcttcgtttcttagccagttttccaggccttctcccttgagagtctccttccgctcgcccaccctgagcgtaggaggtgggagcaggacggaactggagtggattccagtaactggacttctaaaccggctcggtgtcgtcgcgctctgtagcggacgcttgtgctgggaagcgtttgcagtttataaattacttaggagtactttaaacatctcacgcctgctgtaccacagccatgtgggggtattcagaacaggtattaaggccgttttgcagaccattcatcactcttggctaaaagaacttaacggagtcgcccaaggtcacacagctggctcgtggtaattggggaccattctttgattcataattttgtgcttttggcaccctgaaaaagtaaggtcagatc

SEQ ID NO: 78023 - DNA, 537 bp, Homo sapiens
gatcagatctatttgcaacaagttcctcctgtttctttagatatctccattttgaagtgcttgtctttgtggtgccctctgcaggcattcacatggtcacccattctgggatcagtcattttgtcctgggtacatagaagatctttggtgctaatgcaaggaaaaggtacttttagtagtcacgttggtgtttcatagaacatagtcagatttcactgggcctggttgccaggattatgtgagtaaatgccaaggctctgagaaattgtggcttgctgtactttgaactctggctccacttgctctcatctttgtctttgaactgtgctgccagtgttggtttctttgaccttggcctgaatataggaggcctaggacgggcttcagggtcatcagcactctgcctgatcatgttaacaggaaggcatccttccttgggactgcagagaccagagagtcggggtgaaggttcctccaaaggtggagatggtttctgaaatggagagcattttcaaaacttcgaaaatattttctttg

SEQ ID NO: 78024 - DNA, 393 bp, Homo sapiens
aaaaaactaaaaaagggatatttcatgacatatgaaaatttcataaaattcaaattttagtgtcgatgaataaagttttattggaacacagccatgtccacttgtttacatattttctgggactgctcctgtgcagagtggagtagctctgacaacaacctcatgggcttcaaagcctgaagtatttactctctggccctttatggcataagtatgccagccctgagtcaaatgacaatgtgctggtcattggtgaccagcaattccaaccttgggattcctcatgtattctgagcaggggactgggcaggggcagggatggactctctcacctcttgttcccacacgccttcctgcccttcaggcagtccctccccggtgatttctctgtat

SEQ ID NO: 78025 - DNA, 256 bp, Homo sapiens
catatataagcagtcacaattttatttaacaaacacaccaacaatatgtgatttgtgggaataagaaaaacaacatgaatataaaataatgaacaatttgtagcaaatatttttaaataattgcaattaaagagccctaagactttgtattgtttgggcttggtgttagtaaactttatattttatgttaataatgtttattagaatatcaaaattgcctagcaaaagaaaactgataatgtgaataatttccaaa

SEQ ID NO: 78026 - DNA, 444 bp, Homo sapiens
tgtgactagacccagcaagcatctactcccacccaccgaggccctgcatctgaagcagataggaataaagacctgaaacaaaagagaaactccaaaagatcagctaaacagcagcaggtaagaagagaaaatcagtgatcagaatagtgaaatgaccaaacatgcagtgtgaaggaaaggaaagccaagcggggtggctcctaatcccagcacttcagcaggccaaagcaggaggattgcttgagtccaggagttcaacaccagcataagcaacacgggaagaccctgtctctacaaaaaaatttaaaattagccacatggtggtgcatgcctgtagtcccagctactcaggagggtaagaaagataggatcactggagccgaagagcaagactccagtgagctatgatggtaccactgcactccagcctgggtaacagggtca

SEQ ID NO: 78027 - DNA, 783 bp, Homo sapiens
ctgtctctcagggcatccaggctgcttatagagtctctttacctacatgctccactctcctgctttttccagcagaatttcagcctgcacgtagctctggtatcaatgacacaggcctctactcaatctaaaatttctcaggaaaatacatggtgaaccccaagaccagtctggattcaaaccagttgtcacagtgggaatggggtcattcgatctgcatgcatccctcatacatctggagacttcgttaaggttccagagttactgactgagatttctgagcttttttccccttttctgtttggtttcagagtggagagcagcccaaaaatatgcaggtaactgaagccaggaaactgatttgtgttttggtttggccggatcttaaacagaagggaggtggagagatctgagattagaggacggggctttataggagccaagtatggggcctgcacacacaagacacacacgcacacttgcaaacacgccacacgacacatatgcctgcatgtgtatgcacacacatgcacacgtgagctcccaaacacatcgctccttggggttacactaggtttgtttccatctggcttgaggctatttgcaggcgagagtgcagagtctgtaatgaacctcccagattctctgacgaaggggtcccctaggttcccatctgtcagatggcatggggtgttgaaatgtggggcactggactagatgatctcaaaggtccttttaaaatccttttaaaaacttttctgaaggactgtatgtaaaaaaaaa

SEQ ID NO: 78028 - DNA, 501 bp, Homo sapiens
ctgtctctcagggcatccaggctgcttatagagtctctttacctacatgctccactctcctgctttttccagcagaatttcagcctgcacgtagctctggtatcaatgacacaggcctctactcaatctaaaatttctcaggaaaatacatggtgaaccccaagaccagtctggattcaaaccagttgtcacagtgggaatggggtcattcgatctgcatgcatccctcatacatctggagacttcgttaaggttccagagttactgactgagatttctgagcttttttccccttttctgtttggtttcagagtggagagcagcccaaaaatatgcaggtaactgaagccaggaaactgatttgtgttttggtttggccggatcttaaacagaagggaggtggagagatctgagattagaggacggggctttataggagccaagtatggggcctgcacacacaagacacacacgcatgcacccatgaggatcgtctagatc

SEQ ID NO: 78029 - DNA, 984 bp, Homo sapiens
aaaaaaaaaaaaaaaaaaaaagcgccacagatgattctgacgccctacccagtggagtgctgctactaaagcacagactatcctgctacatgattttcccatctgtacaatgactgaaatagcacctattctatgtggtagatatgagaattccatgaagtaatataggtaaacatttagttcagggcttggcatgtggtaagtgctcagtaagtgtataatgattggtaaacttgttattctgcattcaggcctcaccagggatgacatacggttctctgcctttgaatgtaagtgtccccagggcaatctcaggcaagcctgcaaacccatcctgactctcagtgtttttttgccaatctggatctctttcctgagctccaaatcaactcattcctagatagctcaccctccagatttagggacatcgaactcagtatgtctaaagctgagccttaccatctgcccctctccaaaccgcctctatgacattctgtcttagagaattagagctacctggtttcccaagtgcccaagtcagaaacccaggcatcatttatttttaataaatgttttattttggaataaatttggttttacagaaaagttgcaaagataatatggtgtccttataccccttattcagtttctgtaatgttaacatcttctatataccacagtatgtttgtcaaaactgagaaaccaacattggttggtgtattagtattactaagctccaggctttattcagattttaccagtttttccactaattttcttctgttctaggatataatccaagatacaacattgcatttagctgggcatcatttttatgccattctttatctcctgtctctacatggccaccaagttctggcatttctacatcctaaatcttttaattttattataattttttattgttgtttttcagagacagggtcttgctccagcctgggcgacagagtgagactccgcctc

SEQ ID NO: 78030 - DNA, 1542 bp, Homo sapiens
aaaaaaaaaaaaaaaaaaaaagcgccacagatgattctgacgccctacccagtggagtgctgctactaaagcacagactatcctgctacatgattttcccatctgtacaatgactgaaatagcacctattctatgtggtagatatgagaattccatgaagtaatataggtaaacatttagttcagggcttggcatgtggtaagtgctcagtaagtgtataatgattggtaaacttgttattctgcattcaggcctcaccagggatgacatacggttctctgcctttgaatgtaagtgtccccagggcaatctcaggcaagcctgcaaacccatcctgactctcagtgtttttttgccaatctggatctctttcctgagctccaaatcaactcattcctagatagctcaccctccagatttagggacatcgaactcagtatgtctaaagctgagccttaccatctgcccctctccaaaccgcctctatgacattctgtcttagagaattagagctacctggtttcccaagtgcccaagtcagaaacccaggcatcatttatttttaataaatgttttattttggaataaatttggttttacagaaaagttgcaaagataatatggtgtccttataccccttattcagtttctgtaatgttaacatcttctatataccacagtatgtttgtcaaaactgagaaaccaacattggttggtgtattagtattactaagctccaggctttattcagattttaccagtttttccactaattttcttctgttctaggatataatccaagatacaacattgcatttagctgggcatcatttttatgccattctttatctcctgtctctacatggccaccaagttctggcatttctacatcctaaatcttttaattttattataattttttattgttgtttttcagagacagggtcttgctccatcacctaggctggagtacagtggcacgatcgtagcttactgcagtaagttcacttgaactcctgggctcaagtgaacctcttaccccagcctcccaactagctgggactagaggggtgcaccactgcacccagctaattttgtcaaaattttttgtagagacagggtctcgccatgttgcctaggctggtctcgaactcttggcctcaagtgatcctcccaccttggtctgccaaagcactgggattacagatgtgagccactgcacccagcctaatctttataaatctccatccccattactctggttcaccccctatcgtttcttagactatttaacagcctcctaacttcactctacttttaatctcttccctctccaggtctttctccatattttaaaaaactagtttcaccatccattcctctctgcccttaaaactttctggtggttttccatggcttaagagaataaagcccaattctttgatttgacatgctaggcattccataatcctctccgaacctaactccccacttcctttccctcctttacacctcataaagcctgtgttccaactaaattta

SEQ ID NO: 78031 - DNA, 1267 bp, Homo sapiens
actagaggacgcctccataatgtgtgccaggcaatctcaggcaagcctgcaaacccatcctgactctcagtgtttttttgccaatctggatctctttcctgagctccaaatcaactcattcctagatagctcaccctccagatttagggacatcgaactcagtatgtctaaagctgagccttaccatctgcccctctccaaaccgcctctatgacattctgtcttagagaattagagctacctggtttcccaagtgcccaagtcagaaacccaggcatcatttatttttaataaatgttttattttggaataaatttggttttacagaaaagttgcaaagataatatggtgtccttataccccttattcagtttctgtaatgttaacatcttctatataccacagtatgtttgtcaaaactgagaaaccaacattggttggtgtattagtattactaagctccaggctttattcagattttaccagtttttccactaattttcttctgttctaggatataatccaagatacaacattgcatttagctgggcatcatttttatgccattctttatctcctgtctctacatggccaccaagttctggcatttctacatcctaaatcttttaattttattataattttttattgttgtttttcagagacagggtcttgctccatcacctaggctggagtacagtggcacgatcgtagcttactgcagtaagttcacttgaactcctgggctcaagtgaacctcttaccccagcctcccaactagctgggactagaggggtgcaccactgcacccagctaattttgtcaaaattttttgtagagacagggtctcgccatgttgcctaggctggtctcgaactcttggcctcaagtgatcctcccaccttggtctgccaaagcactgggattacagatgtgagccactgcacccagcctaatctttataaatctccatccccattactctggttcaccccctatcgtttcttagactatttaacagcctcctaacttcactctacttttaatctcttccctctccaggtctttctccatattttaaaaaactagtttcaccatccattcctctctgcccttaaaactttctggtggttttccatggcttaagagaataaagcccaattctttgatttgacatgctaggcattccataatcctctccgaacctaactccccacttcctttccctcctttacacctcataaagcctgtgttccaactaaattta

SEQ ID NO: 78032 - DNA, 468 bp, Homo sapiens
tcccgcttcagcctcccaaagtgctagtattacaagtatgagccactgcgcctggacgaaaattcttatttctaatctacatgctttacaactcttaaatcaaacgaaagttttaaataaggagaacaccaagggaaaaataacaaagactctaaggaatggcagctaatttttcttcactgatcaaatttctacagccacaaaggccaaatggcccttcaaatttcatttgaagaataaatgctgtgtcattgaatgttatatcacacactggactgttatctcttatgctggctaggtatcttttattctaaccatgatttatttaaaattaatgtgaacaaaaattggtgggtttttaaaaacaggaaattttaaaaaatgttttattccttttatttatatgaccgtatgttatggaattccacgtaagtatcttagatgtgaaaagacacttacataaataaa

SEQ ID NO: 78033 - DNA, 621 bp, Homo sapiens
  misc_feature (260)..(260): n is a, c, g, or t
cccaggttcaagtgattctcctgcttcagcctcccgaatagctgggattacaggcatgtgccaccaggcctggctatttttagtagagacggggtttcaccatgttggccaggctggtctcgaactcctgacctcaagtgatcagcccacctcggcctcccaaagtggtgggattacaggcgtgagcacctggcctgttaatactttaattagttgtactcgttttggagtctaagtgatagtcctcccaaatactcttnatcttttgctagaatagatgaaatgctgatcagctctcctgatgttagcactctcttccctaaaggcagtgatttccgcacctctatctcaagaattccaggtactgtgaggacttcagggattcttggaggctgaaggctggttccaggggttctggactggatacctcccacccctattcagtcaagtactctgctgattgataagtggattctgagattttattgctatatttaaaagagtttgaaaaccagtggtatagaagaaagtgttcattgtttagatctttactctgggagcaggaggaagtaaggagttcgagaccagcctggccgaacgtggtgcaaccacatctgtact

SEQ ID NO: 78034 - DNA, 368 bp, Homo sapiens
aggccagcattactttgataaaaaagccagggaaggaaaaaaagtataagccaatatacctgatactgtctcaacaaattaggtatggaaggtgtcttggtttgttttctcttgcttataacagaaactgaaactgggtaatttatgaagaaaagaaatttatttctcacagttatggaggctgagaagtccaaggtcagggtggtctatctggtgagtgccttcttgctgataggaactctgtagagtcattaaccaacatagaacatcgcatggtgaggagctgaagatgctagctcagatctctcttcctttttttatgaagccaccagtcttactcccatgaaaatccgttaacccattaattg

SEQ ID NO: 78035 - DNA, 1424 bp, Homo sapiens
atggatttccttcacaggaatggagtgctcataattcagcatttgcagaaggactaccgagcttactacacttttctaaattttatgtccaatgttggagaccccaggaatatctttttcatttattttccactttgttttcaatttaatcagacagttggaaccaagatgatatgggtagcagtcattggggattggttaaatcttatatttaaatggatattatttggtcatcgaccttactggtgggtccaagaaactcagatttacccaaatcactcaagtccatgccttgaacagttccctactacatgtgaaacaggtccaggaagtccatctggccatgcaatgggcgcatcctgtgtctggtatgtcatggtaaccgctgccctgagccacactgtctgtgggatggataagttctctatcactctgcacagactgacctggtcatttctttggagtgttttttggttgattcaaatcagtgtctgcatctccagagtattcatagcaacacattttcctcatcaagttattcttggagtaattggtggcatgctggtggcagaggcctttgaacacactccaggcatccaaacggccagtctgggcacatacctgaagaccaacctctttctcttcctgtttgcagttggcttttacctgcttcttagggtgctcaacattgacctgctgtggtccgtgcccatagccaaaaagtggtgtgctaaccccgactggatccacattgacaccacgccttttgctggactcgtgagaaaccttggggtcctctttggcttgggctttgcaatcaactcagagatgttcctcctgagctgccgagggggaaataactacacactgagcttccggttgctctgtgccttgacctcattgacaatactgcagctctaccatttcctccagatcccgactcacgaagagcatttattttatgtgctgtctttttgtaaaagtgcatccattcccctaactgtggttgctttcattccctactctgttcatatgttaatgaaacaaagcggaaagaagagtcagtagagtggtgcctagagttagtgctctgtgtcacagatcacccttctccatccaccagtagagccacagagtaggcacagaccagaggcttctaatccgacttcacagaatagcggcacaggccccattccccatagagatgtttagtttggccttcgcactggtctttttttttaatccttcagttaccaatatttagatacaagaatatttgacataaaaatcggaagttctgtatttcttgaaaaatctgatagtatgacaacacagagcctgcatccccagctggagacaactgaccagagctgcatactaacagtccccagtaggaggcaaggactccattttctcacagtctt

SEQ ID NO: 78036 - DNA, 538 bp, Homo sapiens
gtagcagagtattactgctgaccaaataattaaatgcagggatataggatcttagatatataactttggcaaacattctctcaatctgtggttgtcaatctgtgtgcttatgatcttagtctttggtttattaatccatagaagcttttataaaaaaagaactacagctaggtcttaagtatgctcagtagtaagaagtgggaagagctaagaaagagccctagattgaggtagtgaatgtagaatcaactcttggctctgataactttctaaaaaaccttaaatcttttaatttctgtgagatgtaggtgttttgtctgcaagatgggtgaattgctaaccctcatctcacagggtttttttgttgtgaatattaagtaaaataaagagtatgttggctgggcgccgtggcttatgcctgtaatcccaacactttgggaggctggggcaagtggaccacttgagcccaggagtttgagtccagccgtgatcgcaccactgcactccagcctgggtgacagagcaagactctgtctcc

SEQ ID NO: 78037 - DNA, 403 bp, Homo sapiens
catccacagaggcaggaagtggatttgtgtttaccaggagctggggatttggagagatggggagtgacagctaattgggtatgaggtttcttttggaggtgacgaaaatgttcaggaattaggggtgatggtcgcacaaccttgtggacacaggagaaaccactgaattgtacactctaaatgggtgaactgtaggatatgtaagttatgttttttgtttttttgagatggagtctcgctctgttgcccaggctggagtgcagtggctcaatcttggctcactgcaacctctgcctcccgagttcaggtgattctcctgcctcagcctcccgagtagctgggattacaggtgcccgccaccacgcctggctaatttttgtatttttagtagagacggggtttt

SEQ ID NO: 78038 - DNA, 590 bp, Homo sapiens
cactttaggcaaaaagttttaagtattttttaacaatgggcccttttatagatttattaatattaataatatagcatttattacagaaacattaccaagaactcctcagtgccatcaaggtattattatcatgttcatatatttttattgcctttctttctgtatttcatattttatgcaaatataagtcttagttatctagtaggtaaaactgataatatgcttctggagagtctgcctaatgaaaaagtaaaaatctacagccttttaaatggatatgaaaatggaggaaataggccaggtgcaggggcttacacttgtaatcccagcactttgggaggctcaggtgagagcatcgcttgagtccaggagtttgagaccagtccagacaacatagtgaggccccatctctacaaaaacttgaaaaaaaaaattagctagcatggtggcgtacatctgtagttccagctactctggcagctgaggtgggaggatcagttgagcctgggaggtggaagctgcaatgtgccatgatcacaccaccacactccaaactgggtgacagagtgagactttgtctcaaaaaaaaa

SEQ ID NO: 78039 - DNA, 176 bp, Homo sapiens
caaataagattgatgcaagcaaaatgtttattttagactctggcacatggtaagatttgttacattattccccaggtgttaaagatgaggctgaaggtaaggagcagagggaaaatgcattgattaatggcatactaacaccatttgctaactttctcataatgggaaaatgttga

SEQ ID NO: 78040 - DNA, 371 bp, Homo sapiens
actgtaacaaatgtaccactgtaatgtggattgttggtagttggggagggtgtgtatgtttggggacagagagtatacaggaaacctgtactttctgctaaattttcctgtaaacctaaaactgattttaaaaataaagtttgttaattaatagaaagttactccagaaactagtaaaatattgcaaaatatatatctagtatctaaactaataaaatattgcaaaatatatatatctgataaagaagttgattataagatatataaagaactcttacaaatcaagaagataaaatggataatatcaatgggaatttttgtgtccttgtatgagaaaaagagttcttcaatacaaaagcacaattcataaa

SEQ ID NO: 78041 - DNA, 187 bp, Homo sapiens
tttgtcagtttcaaatactcatgtatctgattgtcaatgctggagagctggggccagggcagtagttgatgaatatcacctgactgtctcctgcagaaaaagcattcccagaagcacggagaagtgaggagaaaaggcaatgcacctggagctggagaccaaggccctgttcttactgatggccctt

SEQ ID NO: 78042 - DNA, 1666 bp, Homo sapiens
cagtggctcatgtctgtaatcccagcactttgggaggttgaggtgggaggatcacttgagcccaggagttcaagtctagcctaggcaacatggtgaaaccccatctctacaaaaaatacaaaaaattagctgggtatggtgacacgcacctgtagttacagctactcgggaggctgaggtgggaggatcacttgagcccaggaggtcgaggctgcagtgagccgagatcacgctgctatgctccagcctgggcaacagagtagtctcaaaaacaacaacaacaacaaaaaacaaaattaaaatttattttattttattcttggacttgactctgattcctcttttccatgcatttttactctgcacacatgtgtgcatgaatgcatatatgtatttatatagaatataaagccttctgggcagggacctcattttaatacctctttatggcacccttagagtcctgtaacagcccttactttttatttgcttaaaatgaagtatgtgtgtgtgtgttcacgcatgtataaataataggttcgaaatacattgtaatcatgggtagataattaatggtcctaagactgttgacggatattttttccttttagtctgttagtgagtcatcatcatatgccattttattatcttgaaaacagtctgtggaattttttatcccgtgtctttgctgtatgagtgaaccaccacagagggtgtcgggagcaatattaagctggagactttcttcagtgatgcttcgcttatgtatttgcagctgctgccattgtcgcttgttcccatgtgcaggagttggatttttttgattgttgtttggcaagaaatattaatagtaacttttgtgtgtttgattattttcggggccggagcagcatctatccagcacctttgggatttggtggttattgacttaggcacagggcttctaagatcagaacttggttcttcttcccacaagtgctctgttttggaaatgtgctaatgacacacattgaattatgtcagaggtttgtggccttaagttgtcgagggaggtgttttcatttggcgagaatctgtaatttgtggaacaataggattaagttctaaaggaaataggcccgatgaatctgtatagatggctagtttcgcaaagtaaagcacagagccagtgaactgggggcaaactacacgttttggataatgtgagcctaaaaagaaaaaccctaaaacttttaaataaatttctaaaaaccaaaaccttttagtatatgtaatttactggcttaaaactataaatattatagttttaataattttgtagatcaggaatttaggtgggactcagctggccatttgtttccatgtcatgtatccaaagctcactctgtagtatcacctggtagatgggttgacctgaaaggtccaaggtggcttcccttatgtgtctgcccaccttacgggagatgggtgggaagctggctcatctggggctattaaccagaatactggcatttgtcctgtcctctggggtggatttgcccatcaaaacttgaagttctagcagggcagggtagatactcctactatagttccaactacctgggaggctgaggcaggaggatatctttagttcagcccgagcaagctagcaagaccccatctcttt

SEQ ID NO: 78043 - DNA, 359 bp, Homo sapiens
catatcatagtaaaaatgctaaaaaccaaaggcaagactgaattttttttttcaacttttaagttcaggggtacatgtgcaggattgttacataagtaaatgtgtgtcatgggagtctattgtacagatcatttcatcacccaggtattaagcctggtacctattagtcatttttcctggtcctctccctcctaccaccctccaccctcaattaggccccagtgtgtgttgttcccctctatgtgttcagatcattcagctcccacttataagtgagagcatgcagtatttgacttttctcttcctgcattagtttgctgaggataatggcttccaccttcatccatgtccccgcaaag

SEQ ID NO: 78044 - DNA, 395 bp, Homo sapiens
atccgattggagatgaaatttgacatgtgtgacctgactgagcaacagctttctttttaaaaatggccccgtttcccagattctgaagtacagtattttatacttgttatggaaaatcagagacatagaaaagtagaaagaaggccgagtgctgtggttcacacctgtaaggaggccgaggcaggtggatcactggaggtcaggagttcaagaccaacctggccaacatggtgaaaccccgtctctactaaaaatacaaaaattagccaggcacggtggcaggcacctgtagtccctgctactcaggaggctgaggcaggagaattgcttgaacccgggaggcggaggttgcagtgagctgagattgcgccactgcactccagcctgggtgacag

SEQ ID NO: 78045 - DNA, 763 bp, Homo sapiens
aactgtggactcaaactgggctcttgaccaaacagacctaatagatatctacagaatactccacccagaaaccacagaatgtacatttttctcatttgcacatggaacattctctaaaattgaccacatgctcagtcataaaataagcctcaataaatttttaaaaatcacaactatattaagtgtcttctcggaccactgtggaataaaattagaagtcaatatcaagaactctcagaaccacagaggtacatggaaactaaacaatctgctcctgaaagacttttgtgtaaataacagaattaaggcggaaatttaaagaaattcctgaaacaaatgaaaatagaaacataacataccaaaacgtctgggatacagaaaaaacaatgttaagaggagagtttataacactaaatgcctacataaaaagagagaaagatctcaaattaacaagctaaaatagccaaacacactagaaaagaacaaaccaaacccaaagctagtagaaggaaataacaaaggttagagaataagttaatgaaattgggaccaaaaaaaccatacaaggaatcagcaaaattaaaaagttggttctttgcaaggacacataaaaatgatagattgctagttagattatacaagaaaaaagaagattccaataagcacaataaaaaattacaaatgagacattgcaaaggataccactgacataaaaaaagatcctcagaatatgtttgtgtgcataaactagaaaacctagaga

SEQ ID NO: 78046 - DNA, 843 bp, Homo sapiens
accaaatctggtgaatcatctttatgttttgtttttcttttgctgcagactgcaggcagctggagcacaaaatctgctcaaatgtgattctttctgtgtggttactttaaataccaaaaggaaatgttgacttgagcgatgaggcgtaccctgaaaattaactctgtggtttgcagatgcctttaaggttccaatcataagactggtttgtatattagcgtctaggctctcagcagggacactggtaatcaagcttgtgttcccagtcagaaatccaaagaaactctttttcatcagggtgttcaacctgggaagcaaggagtgggtgcaggatccctctgtttctgtttgagcagtggcactccctctggcctctggaatggtaaatctgcaccattgctagcttggctgtttgcgtttgggggctgactagaatccactgtcatacactacttgttcagttcaatatttcttgtgctttaaacaacatttaaacctagatggtagggataagatgattcctgcacttaaagagcctgtgacgtttaggaaacaagggaatgcaaggctcaccatggagggtagaagaatgttacagataaggttgtttggtgttgtaacaaacacacaagatggaaaatctatgttgctgctattagctactattgattgaacaccttcttagtttctatgtatatatagatatatatatatagagagagagagacagggtctcgctatgttgcctagactggtctcaaactcctgacctcgagcagacttcccacctcagcatcccaaagtgttgggattacaggtgagccaccacactggtcctaaaga

SEQ ID NO: 78047 - DNA, 374 bp, Homo sapiens
ggacccttcaccagatggaagatataagactgaggtagagtgtggattggaagagagtggatttcaggggagaaggtatctttggagaaagctatgttatgagctatacaccttggaggcggggtgcctgctccctatcatcaaacctaatgatgaggcttccaaggatacttgggcaatttcatatgttgctcccgcattgaggcttttggtagtgtggctcccaacaggtctatttaaagggcaaaagatgctagctgctgctggtaatgaagccagtagaagagcaatgttgggatttgcctgtacttctaaaaattgttggggctaagggatgtttgtttgccatggaaccagtgctgtgctgaaaaact

SEQ ID NO: 78048 - DNA, 354 bp, Homo sapiens
ctgtattttgttgtccttataacatttatattatttcagttttaagtcaaaaggtattctgaatataataaaagcctcacaaattatttgtaaaatttagtggttcatatttagtatatcagtaatatagaagacatctttatagtcaactcttaattaatgcttattgtaccaaatctttgagatatttgtacataaatgaaatatgtactttcatgctaaaattatatatcatgactgtgctataatttggcatgtcattatctagatttatatgtatgtacgtatttcaggtccttgaaattttaataaatattacagttaaatcctgatatgacatagttaccggctaag

SEQ ID NO: 78049 - DNA, 452 bp, Homo sapiens
catccgtatatatagccgctaattacttaaagcacttgtcatcgtacattaaggaattgcgtaaaatgtttagctgtatctgtaggctccaggtaacttaattttttaattgtattactatgatgttcagtaaatgctgagtgaacttacattctttaaaatacatcaaaagaggctgggtgcagtggctcacacctataatcctagcactttgggaggccgaggcgggtggatcacgaggtcaggagctcgagaccatcctggctaacccggtgaaaccgcgtctctactaaaaatacaaaaattagctgagcgtggtggtgggcacctgtagtcccagctacttgggaggctgaggcaggagaatggcgtgaactcaggaggtggagcttgcagtgagccaagatcacaccactgcactccagccgggcaacagagcaagactccatctc

SEQ ID NO: 78050 - DNA, 371 bp, Homo sapiens
ggccaggacagcttgctctgctcccttcaacttccctaggaacagctgatcagttggggaaatggaatcctctgtagctttggtcacccacttgtttgatggttgatgctggccatcggctgtaaacttggttgggacaggcagcatgaacactgacacaggcactttcaggctctctttgtggcctgatggctctcacaataggggctgggttccaagggaaaacagtctgagatagggaagccacatggtatccctttcactacattctactcattagaaggaagtcagtaaggctggcccatattctgttttttaaataggatgaatgtagcttctcttatgtatatatgtgtcaatttaaaacaaaa

SEQ ID NO: 78051 - DNA, 755 bp, Homo sapiens
gccagcgggcggtggcgcctccagatcagagccctcgggaaggaggcctgggcgggcctggcccgttcacctgtgtgccctgcagttctgcccgaggctcaactctcaagggcctgggaggggtgctgccggccaagagggtccaggacctcactggactgtgccccacagggagatcccgaagagcctgtttctgtccctcggggagccaggagggaaccaggaccatgttccagtaaatgaggactgcagcaggagccgtgagccctgactcccggccagagacacgacgtcagaccagaaagaatgaggaggccgcgtggggcccgcgggtgtgcagggcagagagggaggacaacaggaagtgccccccctccatcctgaaacggagccggccggagcaccaccgcccagaggccaagccccagaggacctcgaggcgcgtgtggttccgagaacccccagcggtgaccgtccactacattgctgacaagaacgccacagccactgtcagggtgcccggccggcccaggccacacggcggctccctgctcctgcagctgtgtgtgtgcgtcctgctcgtgctggccctgggcctatactgcggccgggccaagcccgtggcaacggcactggaggacctgcgggcccggctcctcggccttgtcctgcacctgcggcacgtggccctcacctgctggcgcggcctcctgcggctctgacgggcaggacgggcaggacgggcagggcttcca

SEQ ID NO: 78052 - DNA, 574 bp, Homo sapiens
aaatggacacagcccaggcccatgtatcattagcagtaagagttggcggggcggggggcgctgttattcacaagaagaaacaaagggaacgccagactttcctcaggaaatcagagtttaagtcaagcagctcaccacaagatcttagcccttggtttctggtcttacctgtcatatttttggtggcattagaaaagataacttggggacttcacatcaatcaataattaattcaaagctcttagtactttccagagaatcacaattcaaatttacattagcccctcttgggtctccagagcagatactgcatcaaaaagtttccaagggtctggtttacaccactttcaaagtaaagcccattaataatggcagtacagaccctaatgcctacccactgataggcgagaagagctgagggatccggagcagggtgcctgatgggaagaggatggggttgaacagagacccactttgattcctgatggctctgccattagctgtggaaactcaggggtgtgtgtgcgtgtgtgtgtcttccttttctttctttcatataaaagaaagcatcata

SEQ ID NO: 78053 - DNA, 437 bp, Homo sapiens
agaaaatgagacttgcaaaaatgtaaaaacaatgctgcttttgtcaaacatttttttttttgccttggaaaagagcattgcttttcataaaaataagctatttgtgttaacgtgtaataaaattatttttattttttaagtaacaaacacatttttaaaaatttagtttcaaatatgataaatattaataagggtttaacagatttttaaaactcttgggaatgtatgaacacaaagaaggaaacaatagtcgctggggcctacctgagcaacggtaggagggagaggagcagaaaaggtaactactggggactgagcttaatacctgggtgatgaaataatatgtacaacaaaaccctatgacatgtgtttacctatgtaacaaaccttcacatgtacccccaaacctaaaataaaagttaaaaataaaaaaataa

SEQ ID NO: 78054 - DNA, 328 bp, Homo sapiens
ttctcagcttagggttatcaagaattgatgaattaatttatgccaatcaatttgcaagtaaatggtttgtaaattagaatcatagtttattaatttctcatgaatgttgcatttaagaatgggtctcctgcattaaatgcttttccccaggtggatagatgtagtgttcagactcaccaacatttaagaacatagtgtgtgcacttgcctctgccatatgatttttcttcatttaatccttccaacaccttttgctgtgtgggaattattgcctcttacaaatgaggaaatagagtcagagaagttaaataccagatcacaccagcgt

SEQ ID NO: 78055 - DNA, 227 bp, Homo sapiens
tggaatatttggacacagtttccggaaggatgagagacctaatcaatggtagtaagatgtttaaaatattattaatacgaatgaatgcttaggcaaggttgacggtaaagctcttctgtacaataggtagcgttaataaagaaatgacaagatttggaaaatcagtatttggaaataatcataattgtttcagccaggaatcatcaaatgatgctaaaacttggaga

SEQ ID NO: 78056 - DNA, 344 bp, Homo sapiens
gggggtggccctccctccctcctcttcccctctcccgtctcccctccccccaacctcctccagcaacccagggatcaagcacacacataatgtacccacgtgttgtacctacgtgtcggagagagacagagagggagacttggacacacacacacacacacacacacacacacacacacacagagcagcaagcagcgtagacccatcaggtttagaaatcgatagacagcgcctctcgtatctctagcgcgtcgtagtccctactatactctcccaagcacgtcctctcaaagtaggtacaggtagttacttttaataatagagagcgcccaatgaactcaacg

SEQ ID NO: 78057 - DNA, 520 bp, Homo sapiens
tcacacgactgcaaggctgaggtctagggtggtggcctggacccctctttcctggaagccatgcttttcctgaaaccccttgcaatactcctggcaagtatggcagttttacctcagttggtatgagtgtactcaaatgggaggcaaccattctcacacttgatgtttagactttgcagcttccaaaacccactctgcatatcacctgctccctcctcaaagtggctgggcttcccatgcagtttcccatcctgcagacggcccagggaggtcagatttcttggccaggcttgcagagttggtgggacatgatgtgggcactagaacccagttctgtaaatcttggtttcatgtcctttctgctgtgtttttctttctctgtttaggcggtggactttttggtgtgtaaagcttctagaatggattttacttctttgtggctctttggattgagggaggggctaggtgccatctccagagaagcttgttcagctcatgctcactcggggcccttgctctc

SEQ ID NO: 78058 - DNA, 460 bp, Homo sapiens
gtgtgccggatttggttagctgagcccaccgagaggcgcctgcaggatgaaagctctctgtctcctcctcctccctgtcctggggctgttggtgtctagcaagaccctgtgctccatggaagaagccatcaatgagaggatccaggaggtcgccggctccctaatatttagggcaataagcagcattggcctggagtgccagagcgtcacctccaggggggacctggctacttgcccccgaggcttcgccgtcaccggctgcacttgtggctccgcctgtggctcgtgggatgtgcgcgccgagaccacatgtcactgccagtgcgcgggcatggactggaccggagcgcgctgctgtcgtgtgcagccctgaggtcgcgcgcaggaactgagggcatatctaaatacctggaagcactttcttagaatgctaagacggagcaagcaagattttctagcc

SEQ ID NO: 78059 - DNA, 482 bp, Homo sapiens
gtgtgccggatttggttagctgagcccaccgagaggcgcctgcaggatgaaagctctctgtctcctcctcctccctgtcctggggctgttggtgtctagcaagaccctgtgctccatggaagaagccatcaatgagaggatccaggaggtcgccggctccctaatatttagggcaataagcagcattggcctggagtgccagagcgtcacctccaggggggacctggctacttgcccccgaggcttcgccgtcaccggctgcacttgtggctccgcctgtggctcgtgggatgtgcgcgccgagaccacatgtcactgccagtgcgcgggcatggactggaccggagcgcgctgctgtcgtgtgcagccctgaggtcgcgcgcagcgcgtgcacagcgcgggcggaggcggctccaggtccggaggggttgcgggggagctggaaataaacctggagatgatgatgatgatgatgatggagc

SEQ ID NO: 78060 - DNA, 211 bp, Homo sapiens
aagttcacctggctcctggatataggaaagacaaatcaatggtatgtaaatgactgagccttgagccacatttctcgaaaatagatagaaaatttgctttaatccacaatgaatacccaagggagggccttgcatgttagagggttacttttctaattccacaatggttcaggggaaaaacttaaatctcgaagagagagagaggtggcta

SEQ ID NO: 78061 - DNA, 899 bp, Homo sapiens
agcggggttaaggataaaagactatctatggggtgacaagtgcactaaaatctccgaaatcaccactaaagaatttatccatgtaacccaaaaccatctgtaccccaaaaactattgaaataaaaaaatagtagtataccagtgttgtgacaagtgccttattagtaatatatggtgttaacatcagggaaaactaagtgaggtatgcaggagctttctgtgctatctttgtaacttctctttccttttttttttttttaaagcagtctccaaaatgcagactcattgatcaattttagatatcccgattgtttttggtagaatgaaaagtaaaatcactgcagcactgagagttgcctgacctactttagtgaagagctgattgtgaagggctcttgcttttgcctcattctctggaagatctgctgagccacacgaggggtctctttgtagtttggatactacagttcttggaacgttagttttgtgaaatggcactccactgtgctttgtagagtacccgtggctgagctcgggctactcatgcacaccgagccacgccagcttgcttggggaatctacacctttgccaaggagactctggcgtggggccttcggaatctagatctggaaagtggaaggaggggtggtgtgtttgggttgcttgcccgtacctcttcggaaaagtccactgagctgttctaatctttatgttgcctgtgcccctccttcctagatacgtcatttctcattaaagaatatgcgtattttaatgtttccagtagacattgccaaattgccttctgattttacactcggttctagtccacattcccaccaactttttaggaaatttctatttttctaacctttctcaatgtctgacagttaaatgaaaa

SEQ ID NO: 78062 - DNA, 1631 bp, Homo sapiens
tcgtgaaagggccgcaaaaaggccgaggcgaggttgacggctgcgactccattttgtaggccgcttatttgtgtgcatccacggcgattcttcccgcagagttgtgaagcgaaaggcttacaattaaaaggaagaaaaaaaaataaagataattcgggagtacaattgacaaagcgtgtgggtcgctcagcctccagcagtaactgctgatctccagttcttggagggttccggtgagaagaacgcccctactgcggtactgaggaagcggcaggaggagatgcggcccctggacatagacgaggtggaagcgcctgaggaagtggaggtgctggagcccgaggaggatttcgagcagttcctgctcccggtcatcaacgagatgcgcgaggacatcgcgtctcttatacgcgagcacgggcgggcgtacctgcggaccaggagcaagctgtgggagatggacaatatgcttatccagatcaaaacgcaggtggaggcctcggaggagagcgccctcaatcacgtgcagcacccgagtggcgaagccgacgagagagtgtcggagttgtgcgagaaggctgaggagaaagccaaggagattgcgaagatggcagagatgctggtcgagctcgtctggcgaatagagagaagcgagtcttcttgaaggaggagatcggtggttcacagctgaggactgtagtcaactggtaaggatgaactgacaccttgaggaaactgaaacagcttgtcattttctctgttttgtttttgtatgttttttacccccatgtaacagtctcccttatggtcagtgattgatgacctcgatatggatttagattatcaaatgtgtttggttttggaaatataacttttgtcaaagaaatactctcagaagagaaatggggcttaattaagttgtttttgtggtcacgtttattcttgttacttcgctgtgtttttgaaatgttgggcatggcctcgtattttgctgttacctttgtgacctgattgttttttggaacacgtcaagacgtgggatcagaatcttccaactttagaggtgcaatggaagacactacgctacttggttgagcctggtgaagaatgtattaatgagactgctttgcataaaactgggaagaaagagaagacagttggagatggaagatggttttgtatatattttggaactttagttcctctgtgagacgaaagaggagagctatgttttgtgtcacattgtctgatatatattgtgtaacctgtcaggtgagttgatttagacaacatagctgaccttttatgacaaggcagtttgaatagggactattgtaataccctcacacattataggggcatcagagaatggcatggaagagacagtctacagagagctttaagaggccggagaaaggaaaagacattatcagggcctggaaagtctcttccagttcatcagggtagtagacctgtcagattggaggtcaaagtcaaaagtataataagtgttaatttgccttgaaaaacaaagacctaaaaagccttttttaagaaataaattttttgttcacatgaccaaagcccctcctgtgtgtgttaataaaagaatcataaacaaaaaaaaaaaa

SEQ ID NO: 78063 - DNA, 828 bp, Homo sapiens
tcgtgaaagggccgcaaaaaggccgaggcgaggttgacggctgcgactccattttgtaggccgcttatttgtgtgcatccacggcgattcttcccgcagagttgtgaagcgaaaggcttacaattaaaaggaagaaaaaaaaataaagataattcgggagtacaattgacaaagcgtgtgggtcgctcagcctccagcagtaactgctgatctccagttcttggagggttccggtgagaagaacgcccctactgcggtactgaggaagcggcaggaggagatgcggcccctggacatagacgaggtggaagcgcctgaggaagtggaggtgctggagcccgaggaggatttcgagcagttcctgctcccggtcatcaacgagatgcgcgaggacatcgcgtctcttatacgcgagcacgggcgggcgtacctgcggaccaggagcaagctgtgggagatggacaatatgcttatccagatcaaaacgcaggtggaggcctcggaggagagcgccctcaatcacgtgcagcacccgagtggcgaagccgacgagagagtgtcggagttgtgcgagaaggctgaggagaaagccaaggagattgcgaagatggcagagatgctggtcgagctcgtctggcgaatagagagaagcgagtcttcttgaaggaggagatcggtggtaaggtcggaaactagctggagcttggatgaaactcagtagtcgccctaagcatggttaaaccgcgccctgtaaaaagttatgttctaggcctgcatcccccattttattgcatcaaaaattgagcattgggaacaaagttggggtca

SEQ ID NO: 78064 - DNA, 1580 bp, Homo sapiens
ggctacccggtgtccgggatccgtgatccacggcgattcttcccgcagagttgtgaagcgaaaggcttacaattaaaaggaagaaaaaaaaataaagataattcgggagtacaattgacaaagcgtgtgggtcgctcagcctccagcagtaactgctgatctccagttcttggagggttccggtgagaagaacgcccctactgcggtactgaggaagcggcaggaggagatgcggcccctggacatagacgaggtggaagcgcctgaggaagtggaggtgctggagcccgaggaggatttcgagcagttcctgctcccggtcatcaacgagatgcgcgaggacatcgcgtctcttatacgcgagcacgggcgggcgtacctgcggaccaggagcaagctgtgggagatggacaatatgcttatccagatcaaaacgcaggtggaggcctcggaggagagcgccctcaatcacgtgcagcacccgagtggcgaagccgacgagagagtgtcggagttgtgcgagaaggctgaggagaaagccaaggagattgcgaagatggcagagatgctggtcgagctcgtctggcgaatagagagaagcgagtcttcttgaaggaggagatcggtggttcacagctgaggactgtagtcaactggtaaggatgaactgacaccttgaggaaactgaaacagcttgtcattttctctgttttgtttttgtatgttttttacccccatgtaacagtctcccttatggtcagtgattgatgacctcgatatggatttagattatcaaatgtgtttggttttggaaatataacttttgtcaaagaaatactctcagaagagaaatggggcttaattaagttgtttttgtggtcacgtttattcttgttacttcgctgtgtttttgaaatgttgggcatggcctcgtattttgctgttacctttgtgacctgattgttttttggaacacgtcaagacgtgggatcagaatcttccaactttagaggtgcaatggaagacactacgctacttggttgagcctggtgaagaatgtattaatgagactgctttgcataaaactgggaagaaagagaagacagttggagatggaagatggttttgtatatattttggaactttagttcctctgtgagacgaaagaggagagctatgttttgtgtcacattgtctgatatatattgtgtaacctgtcaggtgagttgatttagacaacatagctgaccttttatgacaaggcagtttgaatagggactattgtaataccctcacacattataggggcatcagagaatggcatggaagagacagtctacagagagctttaagaggccggagaaaggaaaagacattatcagggcctggaaagtctcttccagttcatcagggtagtagacctgtcagattggaggtcaaagtcaaaagtataataagtgttaatttgccttgaaaaacaaagacctaaaaagccttttttaagaaataaattttttgttcacatgaccaaagcccctcctgtgtgtgttaataaaagaatcataaacaaaaaaaaaaaa

SEQ ID NO: 78065 - DNA, 1576 bp, Homo sapiens
tcgtgaaagggccgcaaaaaggccgaggcgaggttgacggctgcgactccattttgtaggccgcttatttgtgtgcatccacggcgattcttcccgcagagttgtgaagcgaaaggcttacaattaaaaggaagaaaaaaaaataaagataattcgggagtacaattgacaaagcgtgtgggtcgctcagcctccagcagtaactgctgatctccagttcttggagggttccggtgagaagaacgcccctactgcggtactgaggaagcggcaggaggagatgcggcccctggacatagacgaggtggaagcgcctgaggaagtggaggtgctggagcccgaggaggatttcgagcagttcctgctcccggtcatcaacgagatgcgcgaggacatcgcgtctcttatacgcgagcacgggcgggcgtacctgcggaccaggagcaagctgtgggagatggacaatatgcttatccagatcatggcgaagccgacgagagagtgtcggagttgtgcgagaaggctgaggagaaagccaaggagattgcgaagatggcagagatgctggtcgagctcgtctggcgaatagagagaagcgagtcttcttgaaggaggagatcggtggttcacagctgaggactgtagtcaactggtaaggatgaactgacaccttgaggaaactgaaacagcttgtcattttctctgttttgtttttgtatgttttttacccccatgtaacagtctcccttatggtcagtgattgatgacctcgatatggatttagattatcaaatgtgtttggttttggaaatataacttttgtcaaagaaatactctcagaagagaaatggggcttaattaagttgtttttgtggtcacgtttattcttgttacttcgctgtgtttttgaaatgttgggcatggcctcgtattttgctgttacctttgtgacctgattgttttttggaacacgtcaagacgtgggatcagaatcttccaactttagaggtgcaatggaagacactacgctacttggttgagcctggtgaagaatgtattaatgagactgctttgcataaaactgggaagaaagagaagacagttggagatggaagatggttttgtatatattttggaactttagttcctctgtgagacgaaagaggagagctatgttttgtgtcacattgtctgatatatattgtgtaacctgtcaggtgagttgatttagacaacatagctgaccttttatgacaaggcagtttgaatagggactattgtaataccctcacacattataggggcatcagagaatggcatggaagagacagtctacagagagctttaagaggccggagaaaggaaaagacattatcagggcctggaaagtctcttccagttcatcagggtagtagacctgtcagattggaggtcaaagtcaaaagtataataagtgttaatttgccttgaaaaacaaagacctaaaaagccttttttaagaaataaattttttgttcacatgaccaaagcccctcctgtgtgtgttaataaaagaatcataaacaaaaaaaaaaaa

SEQ ID NO: 78066 - DNA, 1208 bp, Homo sapiens
  misc_feature (12)..(12): n is a, c, g, or t
  misc_feature (19)..(19): n is a, c, g, or t
ccagaaggacgncccagangacgaccagaaggggcgggaatggacatttgcccagatcaaaacgcaggtggaggcctcggaggagagcgccctcaatcacgtgcagcacccgagtggcgaagccgacgagagagtgtcggagttgtgcgagaaggctgaggagaaagccaaggagattgcgaagatggcagagatgctggtcgagctcgtctggcgaatagagagaagcgagtcttcttgaaggaggagatcggtggttcacagctgaggactgtagtcaactggtaaggatgaactgacaccttgaggaaactgaaacagcttgtcattttctctgttttgtttttgtatgttttttacccccatgtaacagtctcccttatggtcagtgattgatgacctcgatatggatttagattatcaaatgtgtttggttttggaaatataacttttgtcaaagaaatactctcagaagagaaatggggcttaattaagttgtttttgtggtcacgtttattcttgttacttcgctgtgtttttgaaatgttgggcatggcctcgtattttgctgttacctttgtgacctgattgttttttggaacacgtcaagacgtgggatcagaatcttccaactttagaggtgcaatggaagacactacgctacttggttgagcctggtgaagaatgtattaatgagactgctttgcataaaactgggaagaaagagaagacagttggagatggaagatggttttgtatatattttggaactttagttcctctgtgagacgaaagaggagagctatgttttgtgtcacattgtctgatatatattgtgtaacctgtcaggtgagttgatttagacaacatagctgaccttttatgacaaggcagtttgaatagggactattgtaataccctcacacattataggggcatcagagaatggcatggaagagacagtctacagagagctttaagaggccggagaaaggaaaagacattatcagggcctggaaagtctcttccagttcatcagggtagtagacctgtcagattggaggtcaaagtcaaaagtataataagtgttaatttgccttgaaaaacaaagacctaaaaagccttttttaagaaataaattttttgttcacatgaccaaagcccctcctgtgtgtgttaataaaagaatcataaacaaaaaaaaaaaa

SEQ ID NO: 78067 - DNA, 1332 bp, Homo sapiens
tctccctcccacgctgttaattagagaaagataacagtaacttcggtttagtttttgtgaaacataaaagtcaattctagtagggcagtcgccagaagtagacctgtctaggcactaagggagtttggggaaagccaaagaagacctaggccatagagcacagtggaacgcaggtgagaacgcagggaaagagaagtaaagagtaaagccagaggccattacctgaaatttccagattgttctatgagacaggtatgtcagaggaccgtgtctcaaagaagtggcattcttctgggtggttcacatttatttttaacatcaggatatggaactttgagagtcaatgtcttcatggtaaatttctcccaattgtgctttaggttcacagctgaggactgtagtcaactggtaaggatgaactgacaccttgaggaaactgaaacagcttgtcattttctctgttttgtttttgtatgttttttacccccatgtaacagtctcccttatggtcagtgattgatgacctcgatatggatttagattatcaaatgtgtttggttttggaaatataacttttgtcaaagaaatactctcagaagagaaatggggcttaattaagttgtttttgtggtcacgtttattcttgttacttcgctgtgtttttgaaatgttgggcatggcctcgtattttgctgttacctttgtgacctgattgttttttggaacacgtcaagacgtgggatcagaatcttccaactttagaggtgcaatggaagacactacgctacttggttgagcctggtgaagaatgtattaatgagactgctttgcataaaactgggaagaaagagaagacagttggagatggaagatggttttgtatatattttggaactttagttcctctgtgagacgaaagaggagagctatgttttgtgtcacattgtctgatatatattgtgtaacctgtcaggtgagttgatttagacaacatagctgaccttttatgacaaggcagtttgaatagggactattgtaataccctcacacattataggggcatcagagaatggcatggaagagacagtctacagagagctttaagaggccggagaaaggaaaagacattatcagggcctggaaagtctcttccagttcatcagggtagtagacctgtcagattggaggtcaaagtcaaaagtataataagtgttaatttgccttgaaaaacaaagacctaaaaagccttttttaagaaataaattttttgttcacatgaccaaagcccctcctgtgtgtgttaataaaagaatcataaacaaaaaaaaaaaa

SEQ ID NO: 78068 - DNA, 882 bp, Homo sapiens
caaatggttctttttttccggagtagtaagttccaatatgggagattactccgaagcctggtaggataagaatataaacttcagggtgaccgaaaaatcagagtaggtgttggtcggaagtatgtagtcacttcaaatactctcagaagagaaatggggcttaattaagttgtttttgtggtcacgtttattcttgttacttcgctgtgtttttgaaatgttgggcatggcctcgtattttgctgttacctttgtgacctgattgttttttggaacacgtcaagacgtgggatcagaatcttccaactttagaggtgcaatggaagacactacgctacttggttgagcctggtgaagaatgtattaatgagactgctttgcataaaactgggaagaaagagaagacagttggagatggaagatggttttgtatatattttggaactttagttcctctgtgagacgaaagaggagagctatgttttgtgtcacattgtctgatatatattgtgtaacctgtcaggtgagttgatttagacaacatagctgaccttttatgacaaggcagtttgaatagggactattgtaataccctcacacattataggggcatcagagaatggcatggaagagacagtctacagagagctttaagaggccggagaaaggaaaagacattatcagggcctggaaagtctcttccagttcatcagggtagtagacctgtcagattggaggtcaaagtcaaaagtataataagtgttaatttgccttgaaaaacaaagacctaaaaagccttttttaagaaataaattttttgttcacatgaccaaagcccctcctgtgtgtgttaataaaagaatcataaacaaaaaaaaaaaa

SEQ ID NO: 78069 - DNA, 200 bp, Homo sapiens
ccattttttgtgtcctgttcaattttttcatccctatttttacagttttcattatagcgatttttttacttctttggttaaatttattcctaggtattttatatttttatagctattataaatgggattgctctcttttttattttattcttgcattgctataagttttttagattgctcgctgttagcatatagaaata

SEQ ID NO: 78070 - DNA, 567 bp, Homo sapiens
agaaaacggtataaaaatatgtatatgtctgtggggtgatgttccttaaacaagacatagatccatgttctttaaagaaaaaaaatctctacagatttaattatataaaattaatctattggaagaaaatatttgcatacatctgatagaagaaagtcttgatgttactaatataaaaatactcctacaaattcataagagaaaagaactacctaatagataaatgaacaaaggatttggataggcaatttaaaggagaaattacaaatttgttgaaacattcatttggaatattattaggttggtgcaaaaataatcgtgcttttgccatttgacagagggagtaaattaacatatatgataaacccactgtatgctaggtactatgaaaagtggaatatatcttctcatttaagcctcaaaactcattttacaggcagttaatgctaatttagccattttacacataaggaaattgaggcttaatgagtttgactaactcttccaaagtcatgcagtccaaaagtggcaaagctagcatattttctggagatgtattgtacagca

SEQ ID NO: 78071 - DNA, 918 bp, Homo sapiens
agcggggtttcatatccagtgataccgactttcaagtagtcatgcttcaccttattgtgtttcacagatactgtgtttttcacaaatggaaggtttgtggcaaccctgcctctagcaagtctgtcggagccattttcccgacaacgtgtactcatttcatatctctgtgtatttggtaattgtcacaatatttcaaactttttcattatttattacatctattatggtgatctctgatcagtgatctttggtcctgttgaaattgtcctggggatccacaaactgcactcatgtaatacagcaaacttaaaaaaattttaaatggtaagttcaggggtacaagttcaggtttgttacataggtaaacttgtgtcatggtggtttgttatacagattatttcatcacccaggtattaagcctagtacccattagttatttttcatgatcctctccctcctcccaccctctactctcagaaaggccccagcacgtgttgtttccctttatgtatccatgtgttctcatcatttagctcccacttagaagtgagaacatgcggtaatacagcaaacttaattgataaagtgtacattcagactgctccagtcactggctgttctcttgtctctctccctttcctcacgccaccccaatctctgagacaaaacaatattgaaattaagccaattaataaccttacagtgacctctaagtgttcaagtgaaagcaagaattgcatgttcttactttaaatcaaaagctagaaataattaagcttagtgaggaaaacatgtcgaaagccaagatagactgaaagctaggcctcttgcgccaaacagccaagttgtaaacacaaaggaaaaattcttgaaggaaattaaaagtgctacttcagtgaacacacgaatggtaagaaa

SEQ ID NO: 78072 - DNA, 277 bp, Homo sapiens
gcctctaactccacggctcaagtaatcctcctgcctcagcctcctaagtagctaggactacaggtgcacaccaccacacccagctaattttttttctttttgatttttggtagagataaggtcctactatgttgcccaggctggtctgaaactcctggcctcaagtgatctgtcttagccttctgagtagctagaactagttttaatgaccaaaagaattatgtgttcacctgtgattttatgtgttttgttaagacattcagaatttagagaaatg

SEQ ID NO: 78073 - DNA, 1236 bp, Homo sapiens
gggaccagcgccccggggggcctgcagcacagcagggcctgccctcctgggtgagactggccggtgcctgtggggatctggggggctacagtcagggctctgtgctcccgagggccacgccagcccacctgccctggaacagaacccgaggcttctgcctaggggagtacctgggcacctgcctcctgtgctgccctggacacatcccagcggctgcacataggggaggcacagcctgggctcagggccagggtccactctgtggggatactagacccgggggtgacaatgccagctcagaacttccccccacacctgggctcctccagcctggcctttcctggggaagggagggcctgtccttcctcagcactgtgggagggaggcaaggcctgcggttgaagcgtccccaacacggggctccaggagagaaagcaccacatctcagggaatgaaaacagagacggggccgcccagtgcactcggtggctcggaaatcattaaagaatgttctgagcccccgattttggctgtaaaagggactggccggcttgtgaccgctcccctgtctgtgccttgagacgggagtgttcagcgttgggggcagctttccctccaagaggagcttcacaaacatccgctctctgcggggccgcctctccgtggcctggggccgctgtcggaggaaggctctccagctgccgtcatctgggaaacgtggggggcgagcaggggtcatggatggggctcactggggactgtgagaatctgtcccgcaggactttctgggatggaaacgctggcagaggtgaagcctgcgtcatgtgcttcactgaacccggctgcttatttatgttcggagggctggtttcaaggactccacgtctccctctccagtgatagcgtcagcggaaatgcagacggggacggggctgctgggtttcctccctggaatgaagcacagccggaggttttgctgattcaccagcaggccctgaccgctgagttcagggtaacaaatccacatggatcctgagcccgcatagctccctgggcctcagcataaacatcgtaaacctccgggccctggcagtgtctgtttcatcccctccagagcaagtgcaagtgtgagatttagagattctaagaggggaagggccagaggtcttgaaaacgaccttcattcgttcattcattcgagaagtttgcgagggcctccgtgtcctgcgtttagtg

SEQ ID NO: 78074 - DNA, 703 bp, Homo sapiens
aggtagagagagtgggctccacagcatcccttctgcactgcaggttgtgggagaaggtggtagaagcattttgagaacaggttggcatcatcacataagcccttatattcaagaactctgcaagccaacgattgccctccctgctgaacactctagggacccttttgccagtatccatcatcagactgttctagaacgcttgtctgcaacagccccaaactggaaacaacccatatccatcaagtttatccagcagggtggacaaataagcaacggtatattcatctgtggaatattacgtagcagtgaaaatgcatgaactatggctacgtggaacaatgtggttatatcttggaagcatcctgatgtgtagcaattaatggcacctcagtggggtcctccacagtgtggctcacacatttattgacagcctaaaacgtgccaagctctgtagacagagagtgaaagctcagtagaaggcagtggttagaggcacacaccctagactcagatgcgggatgaaatcctgggtcagcccttaacaggttacgtggcctgcatccatacaatctgtacagtggcctccagagagcatcccctcactgtggagtgaggatgaaaggggagtgtgccgattaaatgccccacatggctccggttcatgaggagcagttcaaacatcagagatttttatcaacaagga

SEQ ID NO: 78075 - DNA, 368 bp, Homo sapiens
aacaaaatactttcctcatccaactcactgattaaacccttaccctgttaactcaccctatgactgtgtaaacctccagtaagattattgaaggcacagctccaagtaacttgcttaattgcattcctgggacaaaagagggaagcgcttcaaagctgacagacagatggtagagtgtccagtcacagcaaagcaggccccgaggctcatgacagacaactccagggctgagatctcatttgtagctctgggataaagtccagggtttgatggcagcaggctgaagtgtaaagatgctcaacaatgcgcaccccagagacactgaatctgaaaaagcttagagtgaataaaaatctggaaatgaactc

SEQ ID NO: 78076 - DNA, 352 bp, Homo sapiens
aagacaattggcagtactcagttggaagtgcttaattgttaatatatatcagccgtggttcttcagcgtcgtcagtgttgctcagtcttgctctttgtggcgactactgaatgcttgaaaaattctctcctatactcccactctgcactgtagaagagaaagagaggagagtggaagaaaaaagagagggagaggagaaagaaagagaggagagagaaacatgggcatggatgatacataaggtagttgtaaactgtgatcagctttgataataactagataaattcttttaatacaaaaatatataaggcattttgcctttttttcaaatttcaaataaatggatttgtat

SEQ ID NO: 78077 - DNA, 373 bp, Homo sapiens
ttctaaggatgtaaggaagccttcgccttttatgttcctctaattttactgcatgatctcacagggaaatgagtggagcaagtggctcatcagccaccttggcctctgaaaagaattgtcccagaagccatctctctatcaaacctggctaatttcttctctcctccttcagctctggcctcttcctgctcacctctgccaatctcctttccttccactcaaagtctggccacaacaaaaaagaaagcaggtttggagagaggtcagtatgctgggttattgtcaaaggagttatgtgtgtttgtgtgtttctgcaaaagtgcattctgctgctgctaaattgtcattccatacactatctacattggaaaga

SEQ ID NO: 78078 - DNA, 508 bp, Homo sapiens
gaaactgcaggttaaagggtgaaaagcagttgcgaagtccccacagcttggaaatggtggagccgagactgaaacccaggtgtgctagcatctaaagttcatgctctttccaccacattagactgtattctgagggcaccaaggaagctccatttttcttaagaaaccaaattgcagtcctccaggaccacagccaggggagcatcttcgtgggagagtggctgctgctcagagttgtgactcccatccttaagagtcctctgtcctctctggcctcctttctactgatcattgctgtccccttcacaggggagaggggccatggcctatcccctaaagagtctgccaaggtagactcataacctccccgtggcacagctcagacaagctgggctatttacataagacttgacccagggcttgaggacagcgcgaggaatgaggtgcagaggagactgctgcttctgggtgacagtctgcctggctgaccacagctggggtactcatt

SEQ ID NO: 78079 - DNA, 294 bp, Homo sapiens
atcaaatacatcctttaggaattcctttaatttggtctcttgttggcgtatgttcagttttcatttgtctattaaatgtttatcacttttttcgtgataggttgttctgctgggttcacaattttaggttgccagttctgtttttttgtttgtttgtttgtttgacacttggaagatattattctagtgtcttcaatattctgtctttggtctttggtcattctaattaccttttctttgtatatgatctgtcccttctccatggcttcttttaaaatcttctctttatctttg

SEQ ID NO: 78080 - DNA, 480 bp, Homo sapiens
taggacgatagttctcaatcctggcagtgcactatatagaactttgaaaaaaaatattaatacagatatccaaacacagacccactggatttaatactaatctaacacagagccactaaattaggacctctacggtcaggactaagcatgtgtattttttccttcacgtttaaataaccttttttatttcaagatagtttaagactcacaagttgcaaaatagatcagagttcccctgtacccttcatccagcttccattgatatcttacataatcctggcactttgtcaaagctggaacactggcattgaaacaatactattaactcaggtacagaccttatgtacacttttttcccccggcatagagttttatgaaatttatcatgtgtgtatattaatgtgccatcaccacaatcacaacatggagctgttccatcaccacaaaggaactccctcgtgttaccccttagctgtcact

SEQ ID NO: 78081 - DNA, 264 bp, Homo sapiens
gctgggcgaggagatcaagatcaagatcaccaacatgaccttccagtacaggaaattaaaatgcatgacagatagcgagtccgccccgcccgactggccctattacctagccattgatgggattctggccaaggtccccgagtcctgtgatggcaaactgccggacagccagccgccggggccctccacgtcccagaccgaggcgtccctgtcgccgcccgctaagtccacccctctgtacttcccgtataaccagtgctccta

SEQ ID NO: 78082 - DNA, 383 bp, Homo sapiens
gagagacctgcactgaatacagtggtttgataatgatcaccttatggctggcagatgagccaaggatgtagaagagcatgcccaaggagggtctgcagaatgagaggaggcaacaaccaagaccagagcacaagtgaacaccagcattaaaacatttacaaagaaaactaaaatgaacctgaggcagagaagaacatctgggatactggtgttgaagtcaagagaggacagtatcaagtcaggtaaataaagattgatttgtcaaggaccttagttacttaaaaagctaagaaaaacataggttaaacacttcaaatgaatcatggatttgttctctaacaatgttttcatattatacaatgttgatgcaatctttctttttc

SEQ ID NO: 78083 - DNA, 811 bp, Homo sapiens
ttgaattcagcagaactttataggaatgcaagctccatggatgcaggaacttttgcatcttttgttcacctagtacaatgcctggtacatagtaagcacttaatacgaattgtcaaactgatgattgaacatcaacaatgtaattattgatgcttatttcaaacgctctttctaaattcataattatcttgttctaacaaattctttttctataagagatgtctatcactgtaagaaaactaaaatagaaaatttaaatttgaagagtgatcatttatattagaaaaggattcaattttaaaattttctaatccttccaaaaacactttctggtgcctttaagtggttgcttacaaatcattactatccaatcagaccaacagattagaaacaagaatccatgggtggttccattagggaacaacttttttggatagttgattagtatattgaagtaatctattgattagtttattagtatatctgagtaatgcacaagacagaaaaatctcaattttgaggaagtattatcttacaaatcataatcattgatatcctaatggataaaatactgatattttatccataatttgcttatggataaggataatattctcctctgatatccttatgaataaaatattttttaagtgttcaggagagtagccgggcatggtggcatgtacctgtaatcccaggtacttgggaggctgacgcaggaggatcacttaaacccagaaggcggaggttgcagtgagccaagatcacgccactgcactccagcctgggcgacaaagcgaaactctgtctc

SEQ ID NO: 78084 - DNA, 842 bp, Homo sapiens
ggaggctgaagcaggagaatcgcttgaacccgggaaagggagattgcagtaaaccaagatcgtaccaccacactccagcttggatgacagagcgagactctgtctcaaaaaaaaaaaaaaaattcatgtgacaattgtatgattccacttatatgaggtacttagaatagttaaattcacagagacagaaagtagaacagtggttatcagaggccaaggggatggaggagctgctcacggcgagttattgcttcaagggtacagagtttcagtttgggatgataaaaaattctggagctggttgggagtgatgattgcacaacagtgtgaatgtacttaatgccactgaactgtacacctaaaatggttaaacagtaaattttatgtcaaatatattttaccataataacatttttaaaaattgatgggaaatattattttgcaatggaatagttgcaagttgtttgttaattgttcaaaccaccttggtacttgctcatttggttgagggagattagagggaagaaattgcaaaagatgttttgctagtgtgtactacaagatttcagatgacttgttgcctggtatagtagctgcacttctttaaactttgctatactgtatatacagccaggaatgtttttctcaaggacatggcagctacctctttgaaataaaatcttcaagggagatagttttcctaactcttacttttgtgggagggtaggagtctaacttcagtgggtatcttgctccaagctgcaaaactgcctcctgtcttagagatatgaaacatctgtttcttctttggataaagccaactagcaaacaaagaccacccc

SEQ ID NO: 78085 - DNA, 685 bp, Homo sapiens
agacaggaatggatgaaaagtgaaaagacaaagatttagccatttggaactcagttttatcttggaaataatagcatgtttacggccagatccgtccagctaatgtttatctacctagttaagtaagaaatgtgtttacttacacttaagaaagctgaacactagtagaaataatagtcaaacttcagaaagtaattgagtaagagttgagaaattggagacacctagaatggactataacaaccttggagataatgggaaggaagtaacgtacttttcaagattaagtctgataaggcagagaacccagcatggagcattaagaggaagaaaaatagtagaggaaagaagggctaagattaaaaacagagataataagcttttgaaatgaaaacactttattctttaagacagactgaggaaaaagggtataaaatatgaaatgaaaaaggaataagagaactagggataggactgttcatttgagcacagtagaatggttccaaataactaacatgcagaatgaaacagatcaaaaagataaaaattaccaggaaggaacctgcataaactaggaagggaaaatgttaatttgtactagaaacctctcaaggcaggaaactgatgaaactctagcaacgctaggcagcacatgaagaggaaacaaaagcagaagaaatgaaca

SEQ ID NO: 78086 - DNA, 195 bp, Homo sapiens
tttttaattgaaaatacaaaatataaaataagctatgtatttgtttttaagcaaccataaataatttgaacataaactatgggataaaatggttatggctctcaaatacttagtgagatttcagtgctttacttatgaattaggtttgatggtatagctcggcctgcattgctcatgtctttttttccttttatt

SEQ ID NO: 78087 - DNA, 318 bp, Homo sapiens
tagatttcacatataagtgagattacatagtatttatctttctgtgtatgacacttcagttagcataatgttctccaggttcatcctagttgttgcaaatgacaggatttccttccttttaaaaattgagctggaatagtggctcatgcctataatttcagacctttgggaggctaagactgcaggattgcttgagggcaagagtttgaaaccagctaggcaacatagtaagacctcatatctaccaaatataaataaataaataaagtagctaggcatggtggtacatgactgctgaggcaggaagatcacttgacc

SEQ ID NO: 78088 - DNA, 387 bp, Homo sapiens
gactgaggcagaagaatcacttgaacccgggaggcggaggtcgcagtgagctgagatagtgccactgcactccagcctgggcaacagagtgagactccacctcaaaaaaataaaatacaacaaaataaagaactctgattaaataagcttgttgtgcttttcttttgttaacctgtcttttgttacaggagtgttggctgtgctccttataatgagtgaggaaaggtgtgatgcctttctgcccctccacggctcacttcttaacaaagttcattctgtttgggggtaggttgaacttttacaaaagtttttccttatctgagtcacaatgctgtttctccatatatcctactcattgactcttgttctattttctggagcacgaag

SEQ ID NO: 78089 - DNA, 311 bp, Homo sapiens
accagccacatgtcaaaagctcagtagccatgagtggctactggctaccttactggacagcacagctatagaacatcattgcagaaagctgtgttggacagtgccagtctagaaacattctacccaagctgtgataaattattagcgttatgatgaaattaataataaagaatttcaaagccaccagtcagtgagtctcccctaggtgcccagcccacagtgtcctatctgagcctgcaggggcacctgaatagtcttcaacttcaaagtctattgtaaaaagagggctttttttgggaaaaaaaaaatcc

SEQ ID NO: 78090 - DNA, 241 bp, Homo sapiens
aactaaaggtgaagggaaaactaaaaagttgggtttgatgaaattgtggatatctttggggatgtgacttttcactcaagttgtgagaaaaaaggaaacacccttaacaaaagcttcttctggagagaaaaagccacagtccatagagacatttgacctcaatgtctttcacaaacaaacaagatgccacagtggttacttagtgaacataggtatagtaataattatataattaatgatc

SEQ ID NO: 78091 - DNA, 476 bp, Homo sapiens
ttggatggatttccagtacagtggtgagtagaagtaatgatagtatcattaccttgttgctgatctcaagaggaaggctttaaatatttcaccatcaggtatgatggctactctaggatttttgtttgtttatttgtttgttttttatagattttctttagcagactaatgaagttccctttccttcctaagaggttttttatttaaaaaaaaaattatgagtgaatgttgaattatatcaaatgctttcatagtttgttgtggtggtggttgtttttgagacagggtctcactttgtctccaagctggatcatggcgcattgcagcctcaacctcctgggctcaagtgatcctcccacctcagcctcttccagtagctgggaccacagcacatcaccacacccagctaatttttaaaaaattgttatagagacagggtctcactgtgttgtctaggctggtcttgaactcttagg

SEQ ID NO: 78092 - DNA, 471 bp, Homo sapiens
ttagagaaagtggatattagatgtgggaggagtgggggtcatgatctgttgtccagtgtgtccttatggacagatgccccagcccagccacatttacttactccggcctctgccttcctgtaggactcagcttatagctacatcaccgctctgcctaatgggagcactgatgtaaccagtgctccttattttctctgtaaaatattccagcccctgccttcaggaagctcacagactctctctctagcatgcgcacacacacttctcacacctgggttgtaggcttcaccagcatccgctgtgtgcgcttataaacctgtaaatgccagttgcacatactgttgttaaataatttaattataagctatgtaaatgtttgcagtgtgaatgtgaaaaccaagatttgtcatttctacaaaagaagtagaatgtttagaaagatatgatattaataaaagttacttttgcaaa

SEQ ID NO: 78093 - DNA, 301 bp, Homo sapiens
tttatttagtcttccagctcttttatttagcatccaggtgctggatgatacttatttacaattcctaaagaaagtgtttttggtaatgctgatatagcagtacttaccttgttatatatatgtagttggcatttggttcctaaaaagtaggatgtaggtatttactgtgtttgagaaattctgattcttttcactagatatatgctatttattcttgctggcttatacctatgttcatttatatgctgtaaaaaagtggtaatttacaatgtaaaaataaaagtatgcatatacaaaaaaa

SEQ ID NO: 78094 - DNA, 7625 bp, Homo sapiens
agccaagcggcgggctggcggcgggctccgacgtctgcgccaggacctggctggctgagcccggcgcagcagcagcagccagggcagcgcggcccctactccctgtcaggtcgtagaggcgagcagggaccagctggtcgccggcccctcgggcaagatggggaaccgggagatggaggagctgatcccgctggtgaaccgtctgcaggacgcgttttcggcgctgggacagagctgcctgctggagctgccgcagatcgccgtggtgggcggccagagcgccggcaagagctcggtgctcgagaacttcgtgggcagggactttctccctcgagggtcgggcattgtaacaagacgacctcttgtgctgcagcttgttacttctaaagcagaatatgccgagtttctacattgcaaaggaaagaaatttacagattttgatgaagttcgccttgagattgaagcagaaacagatcgcgtgactggaatgaataaaggcatttcctccatacccattaatttacgagtctattccccacacgtgttaaatctaacccttattgatctacctggaataactaaagtgcctgtgggagatcagccaccagatatcgagtatcagatcagagaaatgattatgcagttcatcacgagggagaactgtctgattttagctgttactccagccaacactgatcttgcaaactcagatgcgctgaagctagctaaagaagttgatcctcaaggtctgagaaccattggagttatcaccaaactggaccttatggatgaaggaacggatgccagggatgttctagagaacaaactgttgcctcttcgcaggggttacgtgggggtggtaaacagaagccagaaggacatagatgggaagaaggacataaaggcagccatgctggcagagaggaagtttttcctttcccacccggcttacagacatatcgctgaccgaatgggaaccccacacctgcagaaggtccttaatcagcaacttaccaaccacattcgggataccctaccaaacttcaggaacaaactacagggacagttgctctccatagaacatgaagtagaagcctacaaaaatttcaaaccagaagacccaacaaggaagaccaaagcattgctgcagatggttcagcaatttgctgtggactttgagaagagaattgaagggtcaggggatcaagtagataccctggaactctcaggtggtgctaaaatcaatcgtatttttcatgaacgctttccttttgagatagtaaagatggagttcaatgagaaagaattgcgaagagaaataagctatgcaatcaaaaacatacatggtatcaggacagggttgtttactccagacatggcatttgaagcgatagtcaagaaacagattgtaaagttgaaagggccttccttgaagagtgtggatctggtaatacaagaattaatcaacactgtgaagaagtgtaccaaaaaactggcaaacttccccagactctgcgaggaaacggaaaggattgttgctaaccacattcgtgagcgagaagggaagacaaaggaccaggtattgctattgattgacattcaagtctcttacatcaacaccaaccatgaagacttcattggcttcgcaaatgctcagcagaggagcagtcaggttcacaagaaaaccacagttggaaatcaggtgattcgcaaggggtggctcaccatcagcaacattggcatcatgaaaggcggctcgaagggatactggttcgtccttactgcggaaagcttgtcctggtataaagatgatgaggaaaaagaaaagaagtacatgcttcccttggacaacctgaaagttcgggatgtggaaaagagctttatgtctagcaagcacatctttgcactctttaatacagagcaaaggaatgtatacaaagactatcgcttccttgagctggcatgtgattcccaggaggatgtcgacagctggaaggcatctctactaagagctggggtctatcctgacaaatctgtagggaacaacaaagctgaaaatgatgagaatggacaagcagaaaacttttccatggacccacaattggagaggcaagtggagaccattcgcaacctcgtagactcctacatgtccattatcaacaaatgtatccgagatctaattccaaaaacaataatgcaccttatgatcaataacgttaaagatttcataaattccgagctcctagcacagttgtattcttcagaggaccaaaataccctgatggaggaatctgctgagcaggctcagcgccgggatgagatgcttcgaatgtatcaagcactgaaagaagcccttgggataattggggacatcagcacggccaccgtgtccactccggcaccccctccagtggatgactcctggatacagcactctcgcaggtcacctcctccaagccccacaacccaaaggaggccaacactaagtgctcccctcgcaaggcccacatccggccgaggaccagctcctgccattccctctcctggcccccactctggggctcctccagtcccattccgtccaggcccattacctcctttccccagcagcagtgactccttcggagcccctccacaagttccatctaggcctacgagggccccgcccagtgtcccaagccggagaccacccccatcaccaactcgtcccactataatccgcccactagaatcctccctgttagactaaacgaagtgtctggcatggcaattaatcactaatgaattatgcgaaagcaacatatttgataaccgttgcagtaaatcatgagtagtcgcatgtgtggacatcagtaggcaagtaaccagttttactaatgcattcatcgctcatcttcattgctcatggtatgtcaaacctttggggtttgactcagaaactgctaaccttttagaggctttatatgttgtactgaccaaggtaggtttgtatagcagccctatactttggggatcatttgcctaccatgacatatatttgaaattgctttggacaagttttctaggctatctaccaggtagctcattaaacgtaattcttcagatatgagatagtgggcttagacctaagccatacatatttcttttcccacattctgtttaggatgacagtaattctgttgtctaccattaatgctactacctactccataattgcctatttagctcctcttttcttcctttttatttcataagactgctaggaagtgattttttaaaattaggactccttaagaataaacttttccagaagcacgaggtagtttgcaaaggaaaagtctgcactgtttgctctaaagagcttctcctcattccaatgtgttttgcttcatgctagaagcatatgcaacagtgaataaaagcttctttttttgttaatcagtcaataaatttggctaattagtttcagagttcaaggaagaagcaaaatatcacatctctagaagtgttggaaaaaatataatttctttctttacttatattcacctcatggtaggttatattgaaggctgacatggagaatgtttacttttctatttggcatagctaactacactttgatactaactccagttttactattattattttggttggaaaaaaaattcactctttacgtgctaatttgtaatcttgttttgtaagaatttatcctacccttgaaacaggctcagtgtaactgtatatccattctaggctttcttaataaatcttgaggctatgggataatcacatttaaagaatggttcctgaaatgaagtcagtagaaatggcatgggataagagcagagctcacacttttacagttgcagtatttcaaagtccctatccaggtcactccagaaaagggtattgaaacgttgaaatctaaagcaaatttgcaatttcttaagatttctaaaatttaccagaacagtttagcctgggggttaatagttaagtcttgaggctaagttttggactaccaaggaccagatgattcacatgtaggaaacagccagaagccaactggaattttgtgtgctaactgttcccagacagcagagcaagtattcactgagtaggggtgtcccatgacactatttcatattctacagaagtaaatcaggtttcaccaactgaaatgtctccctttgaaagtagcaaacatgatttgtatgttaacttaactttaatttcctgtgtagtttacacccagagcagatactcataaagtataaagtaaaaacttttaaccattattaaacagagaacttgccatgttgagtgccattgtattgaacttattctaaaggcttatgctaacccatttataattggtaaaaatcagaaaatacaagatttacataaaggtcatttcaacttttaaggttaccagtgattgtataaaaacatcacaatcctaaatcctctcgtatctcaccccaaaccccaaactgggggaaaaaaagttaactctttgtgaatggaaccaatgtgcaagatacatactgcatttttaaaatagtgtctcagctaaatggaaaactgttaagcaaacatccatagtaaaacaaataatcttcagtgagatctttttataaaacttcttgtttttaggattccctttgcttcttcctttgaattctctaaaataggcagctaacggattatatacttcagggtttggctttgtgctaaatgtggttttgtgttttgctgtatttcaaaattttccttctgttaaaggaaaatattgtgaataaccactggtgtgttcttagatcagcacaaaccatgtcaaaaaaaattggagatttttttccaattttccttccactgatcttaggcagtaataaacaatggcatttgtcatctttggcacttgcttttagattatagtcccacagttgcactgccccaattgtctacctttgtgggtacatttttgttctttactcctaagttatttctcatagaacccagcctactctagaatttcagcagtgacattggagaatatttttaatttgctgcagtactatgtcatattattagtatgaatctcatttcccaaagggtttgtattctgctaaaaggagatgccaatgttgaatgaagtctgaaactctagtatgtgcatagtttgacgtgcagcatgcacaccaggccttaagatgggaatgtagcttaatgattttctgtttcccataccatttctaatcttttgtgtaattttctcttaactgattgctctgatattgtaaacacaatagatgtagctctatcatgtctagcataatttaaaaaatcagtgtttttaggatttgggaaaataaactgtaaatgtttatttgataggtaaatatagttttattgtcacatgctaaatattgcatgcatattgactaattggaataaccatttactcaattatggacagcttattgaaatagtattgatttagaaaaagtatattgcatttctaaaaaacatctaccaaggttactcgtctgaatattgcttttagccgtgttttataacatagacgagcagtagggtctgtttattagcaaatttcctatttgttccaatacaaactcactttattctaaagtatattaatgaaaccagttcctgtgatgtaactgtaagccttctcgacttagacttaaaaagtggtcacatagattaattttgtgactttttagtatagactgtagccataattctcaaatatgaaatgggacctaataccagtatgtgataaatgttgatgttttctgtgtacaaacacattttctatgcatgtgtctctgtgtatatggcatatacctagtaagtatgtttctgtaagtatgtgtattttatgtccatttgagtaggtaggtaggttttaaaaatactagttaaaatgccacaagcatgagtgtgattgtatgtgcactgtgtgtatatatataaatatatgtatatgtatggttgtaaatatctatgtatacatgtacttagtatgtgtggtatcaggatattttttaaactgtgataatacaacagatagctttgaatgatctgccataacatgtggtaacaatagttcatttctcataacatatatgaggtatacaaaattttctaactccagattgtagtcattttgagaggtacaaagctcataattaccatgacaacatggtaatgtccatagacatttgtatctgaatccacaagaagatctgaatctaagaaggaattacctttgacaatatttttcggtaagaagtaaaacctctggagacctatctttaagatctctaattggaattataaattatttttggattgctgagctgaatcttaaaaagccaagttgatatacatagtcatttttcctctatggtagaagtaaaaaaaaaaaaaaaggacatagcaacattaaagtagtggatttttctgagtaaatttgctgaaaatataagagagaagctatctaataccttggaggtaggtcatccactttttcaggtaaacatttttcatttggcaaatggcataattatttgaaagtgacaggaatctcctcagaatgaagaataaagcctaataggtctctaactgttgaactcatgaaagaagatagtgtatgagacttaagccatgagttttgtatcatttcaattagaagactactagctgtgagctcagagtttaatgtaaatgaatctagatgattttgaagaaatgattattcgttcaccagatcactcattgtacattctaaaaagctcaaatgagtcttctagatactcttactcatcctgtctggttgctatgtttaaaattatgtggtgctgtgtaggtgaaactttaagaatatttttgaagcatatgtaatatatgcactgctatttgtgtgtgtgtgtgtgtctttgtatatatgtaagaatgtgtgtatgtgtgagagcaagagagaggaaactcaaagaggagtgtttgtcttaagacctgttcatactggtatattggtgagacttctcacttctggttggaggtttcacatatggctcaactcaagtcattaatctctttttaatttttactcttgaattccttaaacttcgctcattatgaaatgttttaaaattatgacaaaaattactctgtctaaccacttgccttgtctgctaccagtttgttaaaaattattccccccaaccagtaattccaccagtactacttgatttgtgttatatttcctatgtacatgtacagcctttgttttgcttgcttgtctatttttactttcccttttttgggtcaaatttttcttttgctttgtttgaagaaggaatatacagaagtaaaatcttgtcttctctgctgattctttaattaatatgagccggatactttccactgtcttcttggcactttcaggatttcttaatgctgatatatggactcttagaatggaatttttgaagaaaaatctcaaagcctgtatcgttcttgaaggtcacatgtacctattgtgaaaatgtgaagctgtatttctgaagctgaaataaattataacatttgaagga

SEQ ID NO: 78095 - DNA, 7358 bp, Homo sapiens
gctgcatcctactgctattttcattttatagatggaatactttgaagcacgaaaaatcattatatcttgaaataatttttaaaataatccaataacaaactcagaactactgaagaataataaagaatatgccgagtttctacattgcaaaggaaagaaatttacagattttgatgaagttcgccttgagattgaagcagaaacagatcgcgtgactggaatgaataaaggcatttcctccatacccattaatttacgagtctattccccacacgtgttaaatctaacccttattgatctacctggaataactaaagtgcctgtgggagatcagccaccagatatcgagtatcagatcagagaaatgattatgcagttcatcacgagggagaactgtctgattttagctgttactccagccaacactgatcttgcaaactcagatgcgctgaagctagctaaagaagttgatcctcaaggtctgagaaccattggagttatcaccaaactggaccttatggatgaaggaacggatgccagggatgttctagagaacaaactgttgcctcttcgcaggggttacgtgggggtggtaaacagaagccagaaggacatagatgggaagaaggacataaaggcagccatgctggcagagaggaagtttttcctttcccacccggcttacagacatatcgctgaccgaatgggaaccccacacctgcagaaggtccttaatcagcaacttaccaaccacattcgggataccctaccaaacttcaggaacaaactacagggacagttgctctccatagaacatgaagtagaagcctacaaaaatttcaaaccagaagacccaacaaggaagaccaaagcattgctgcagatggttcagcaatttgctgtggactttgagaagagaattgaagggtcaggggatcaagtagataccctggaactctcaggtggtgctaaaatcaatcgtatttttcatgaacgctttccttttgagatagtaaagatggagttcaatgagaaagaattgcgaagagaaataagctatgcaatcaaaaacatacatggtatcaggacagggttgtttactccagacatggcatttgaagcgatagtcaagaaacagattgtaaagttgaaagggccttccttgaagagtgtggatctggtaatacaagaattaatcaacactgtgaagaagtgtaccaaaaaactggcaaacttccccagactctgcgaggaaacggaaaggattgttgctaaccacattcgtgagcgagaagggaagacaaaggaccaggtattgctattgattgacattcaagtctcttacatcaacaccaaccatgaagacttcattggcttcgcaaatgctcagcagaggagcagtcaggttcacaagaaaaccacagttggaaatcaggtgattcgcaaggggtggctcaccatcagcaacattggcatcatgaaaggcggctcgaagggatactggttcgtccttactgcggaaagcttgtcctggtataaagatgatgaggaaaaagaaaagaagtacatgcttcccttggacaacctgaaagttcgggatgtggaaaagagctttatgtctagcaagcacatctttgcactctttaatacagagcaaaggaatgtatacaaagactatcgcttccttgagctggcatgtgattcccaggaggatgtcgacagctggaaggcatctctactaagagctggggtctatcctgacaaatctgtagggaacaacaaagctgaaaatgatgagaatggacaagcagaaaacttttccatggacccacaattggagaggcaagtggagaccattcgcaacctcgtagactcctacatgtccattatcaacaaatgtatccgagatctaattccaaaaacaataatgcaccttatgatcaataacgttaaagatttcataaattccgagctcctagcacagttgtattcttcagaggaccaaaataccctgatggaggaatctgctgagcaggctcagcgccgggatgagatgcttcgaatgtatcaagcactgaaagaagcccttgggataattggggacatcagcacggccaccgtgtccactccggcaccccctccagtggatgactcctggatacagcactctcgcaggtcacctcctccaagccccacaacccaaaggaggccaacactaagtgctcccctcgcaaggcccacatccggccgaggaccagctcctgccattccctctcctggcccccactctggggctcctccagtcccattccgtccaggcccattacctcctttccccagcagcagtgactccttcggagcccctccacaagttccatctaggcctacgagggccccgcccagtgtcccaagccggagaccacccccatcaccaactcgtcccactataatccgcccactagaatcctccctgttagactaaacgaagtgtctggcatggcaattaatcactaatgaattatgcgaaagcaacatatttgataaccgttgcagtaaatcatgagtagtcgcatgtgtggacatcagtaggcaagtaaccagttttactaatgcattcatcgctcatcttcattgctcatggtatgtcaaacctttggggtttgactcagaaactgctaaccttttagaggctttatatgttgtactgaccaaggtaggtttgtatagcagccctatactttggggatcatttgcctaccatgacatatatttgaaattgctttggacaagttttctaggctatctaccaggtagctcattaaacgtaattcttcagatatgagatagtgggcttagacctaagccatacatatttcttttcccacattctgtttaggatgacagtaattctgttgtctaccattaatgctactacctactccataattgcctatttagctcctcttttcttcctttttatttcataagactgctaggaagtgattttttaaaattaggactccttaagaataaacttttccagaagcacgaggtagtttgcaaaggaaaagtctgcactgtttgctctaaagagcttctcctcattccaatgtgttttgcttcatgctagaagcatatgcaacagtgaataaaagcttctttttttgttaatcagtcaataaatttggctaattagtttcagagttcaaggaagaagcaaaatatcacatctctagaagtgttggaaaaaatataatttctttctttacttatattcacctcatggtaggttatattgaaggctgacatggagaatgtttacttttctatttggcatagctaactacactttgatactaactccagttttactattattattttggttggaaaaaaaattcactctttacgtgctaatttgtaatcttgttttgtaagaatttatcctacccttgaaacaggctcagtgtaactgtatatccattctaggctttcttaataaatcttgaggctatgggataatcacatttaaagaatggttcctgaaatgaagtcagtagaaatggcatgggataagagcagagctcacacttttacagttgcagtatttcaaagtccctatccaggtcactccagaaaagggtattgaaacgttgaaatctaaagcaaatttgcaatttcttaagatttctaaaatttaccagaacagtttagcctgggggttaatagttaagtcttgaggctaagttttggactaccaaggaccagatgattcacatgtaggaaacagccagaagccaactggaattttgtgtgctaactgttcccagacagcagagcaagtattcactgagtaggggtgtcccatgacactatttcatattctacagaagtaaatcaggtttcaccaactgaaatgtctccctttgaaagtagcaaacatgatttgtatgttaacttaactttaatttcctgtgtagtttacacccagagcagatactcataaagtataaagtaaaaacttttaaccattattaaacagagaacttgccatgttgagtgccattgtattgaacttattctaaaggcttatgctaacccatttataattggtaaaaatcagaaaatacaagatttacataaaggtcatttcaacttttaaggttaccagtgattgtataaaaacatcacaatcctaaatcctctcgtatctcaccccaaaccccaaactgggggaaaaaaagttaactctttgtgaatggaaccaatgtgcaagatacatactgcatttttaaaatagtgtctcagctaaatggaaaactgttaagcaaacatccatagtaaaacaaataatcttcagtgagatctttttataaaacttcttgtttttaggattccctttgcttcttcctttgaattctctaaaataggcagctaacggattatatacttcagggtttggctttgtgctaaatgtggttttgtgttttgctgtatttcaaaattttccttctgttaaaggaaaatattgtgaataaccactggtgtgttcttagatcagcacaaaccatgtcaaaaaaaattggagatttttttccaattttccttccactgatcttaggcagtaataaacaatggcatttgtcatctttggcacttgcttttagattatagtcccacagttgcactgccccaattgtctacctttgtgggtacatttttgttctttactcctaagttatttctcatagaacccagcctactctagaatttcagcagtgacattggagaatatttttaatttgctgcagtactatgtcatattattagtatgaatctcatttcccaaagggtttgtattctgctaaaaggagatgccaatgttgaatgaagtctgaaactctagtatgtgcatagtttgacgtgcagcatgcacaccaggccttaagatgggaatgtagcttaatgattttctgtttcccataccatttctaatcttttgtgtaattttctcttaactgattgctctgatattgtaaacacaatagatgtagctctatcatgtctagcataatttaaaaaatcagtgtttttaggatttgggaaaataaactgtaaatgtttatttgataggtaaatatagttttattgtcacatgctaaatattgcatgcatattgactaattggaataaccatttactcaattatggacagcttattgaaatagtattgatttagaaaaagtatattgcatttctaaaaaacatctaccaaggttactcgtctgaatattgcttttagccgtgttttataacatagacgagcagtagggtctgtttattagcaaatttcctatttgttccaatacaaactcactttattctaaagtatattaatgaaaccagttcctgtgatgtaactgtaagccttctcgacttagacttaaaaagtggtcacatagattaattttgtgactttttagtatagactgtagccataattctcaaatatgaaatgggacctaataccagtatgtgataaatgttgatgttttctgtgtacaaacacattttctatgcatgtgtctctgtgtatatggcatatacctagtaagtatgtttctgtaagtatgtgtattttatgtccatttgagtaggtaggtaggttttaaaaatactagttaaaatgccacaagcatgagtgtgattgtatgtgcactgtgtgtatatatataaatatatgtatatgtatggttgtaaatatctatgtatacatgtacttagtatgtgtggtatcaggatattttttaaactgtgataatacaacagatagctttgaatgatctgccataacatgtggtaacaatagttcatttctcataacatatatgaggtatacaaaattttctaactccagattgtagtcattttgagaggtacaaagctcataattaccatgacaacatggtaatgtccatagacatttgtatctgaatccacaagaagatctgaatctaagaaggaattacctttgacaatatttttcggtaagaagtaaaacctctggagacctatctttaagatctctaattggaattataaattatttttggattgctgagctgaatcttaaaaagccaagttgatatacatagtcatttttcctctatggtagaagtaaaaaaaaaaaaaaaggacatagcaacattaaagtagtggatttttctgagtaaatttgctgaaaatataagagagaagctatctaataccttggaggtaggtcatccactttttcaggtaaacatttttcatttggcaaatggcataattatttgaaagtgacaggaatctcctcagaatgaagaataaagcctaataggtctctaactgttgaactcatgaaagaagatagtgtatgagacttaagccatgagttttgtatcatttcaattagaagactactagctgtgagctcagagtttaatgtaaatgaatctagatgattttgaagaaatgattattcgttcaccagatcactcattgtacattctaaaaagctcaaatgagtcttctagatactcttactcatcctgtctggttgctatgtttaaaattatgtggtgctgtgtaggtgaaactttaagaatatttttgaagcatatgtaatatatgcactgctatttgtgtgtgtgtgtgtgtctttgtatatatgtaagaatgtgtgtatgtgtgagagcaagagagaggaaactcaaagaggagtgtttgtcttaagacctgttcatactggtatattggtgagacttctcacttctggttggaggtttcacatatggctcaactcaagtcattaatctctttttaatttttactcttgaattccttaaacttcgctcattatgaaatgttttaaaattatgacaaaaattactctgtctaaccacttgccttgtctgctaccagtttgttaaaaattattccccccaaccagtaattccaccagtactacttgatttgtgttatatttcctatgtacatgtacagcctttgttttgcttgcttgtctatttttactttcccttttttgggtcaaatttttcttttgctttgtttgaagaaggaatatacagaagtaaaatcttgtcttctctgctgattctttaattaatatgagccggatactttccactgtcttcttggcactttcaggatttcttaatgctgatatatggactcttagaatggaatttttgaagaaaaatctcaaagcctgtatcgttcttgaaggtcacatgtacctattgtgaaaatgtgaagctgtatttctgaagctgaaataaattataacatttgaagga

SEQ ID NO: 78096 - DNA, 5974 bp, Homo sapiens
ttcagggaaccaatcttccgccttcaaggcaaattgtacgagctaagttctgtgattcgcaaggggtggctcaccatcagcaacattggcatcatgaaaggcggctcgaagggatactggttcgtccttactgcggaaagcttgtcctggtataaagatgatgaggaaaaagaaaagaagtacatgcttcccttggacaacctgaaagttcgggatgtggaaaagagctttatgtctagcaagcacatctttgcactctttaatacagagcaaaggaatgtatacaaagactatcgcttccttgagctggcatgtgattcccaggaggatgtcgacagctggaaggcatctctactaagagctggggtctatcctgacaaatctgtagggaacaacaaagctgaaaatgatgagaatggacaagcagaaaacttttccatggacccacaattggagaggcaagtggagaccattcgcaacctcgtagactcctacatgtccattatcaacaaatgtatccgagatctaattccaaaaacaataatgcaccttatgatcaataacgttaaagatttcataaattccgagctcctagcacagttgtattcttcagaggaccaaaataccctgatggaggaatctgctgagcaggctcagcgccgggatgagatgcttcgaatgtatcaagcactgaaagaagcccttgggataattggggacatcagcacggccaccgtgtccactccggcaccccctccagtggatgactcctggatacagcactctcgcaggtcacctcctccaagccccacaacccaaaggaggccaacactaagtgctcccctcgcaaggcccacatccggccgaggaccagctcctgccattccctctcctggcccccactctggggctcctccagtcccattccgtccaggcccattacctcctttccccagcagcagtgactccttcggagcccctccacaagttccatctaggcctacgagggccccgcccagtgtcccaagccggagaccacccccatcaccaactcgtcccactataatccgcccactagaatcctccctgttagactaaacgaagtgtctggcatggcaattaatcactaatgaattatgcgaaagcaacatatttgataaccgttgcagtaaatcatgagtagtcgcatgtgtggacatcagtaggcaagtaaccagttttactaatgcattcatcgctcatcttcattgctcatggtatgtcaaacctttggggtttgactcagaaactgctaaccttttagaggctttatatgttgtactgaccaaggtaggtttgtatagcagccctatactttggggatcatttgcctaccatgacatatatttgaaattgctttggacaagttttctaggctatctaccaggtagctcattaaacgtaattcttcagatatgagatagtgggcttagacctaagccatacatatttcttttcccacattctgtttaggatgacagtaattctgttgtctaccattaatgctactacctactccataattgcctatttagctcctcttttcttcctttttatttcataagactgctaggaagtgattttttaaaattaggactccttaagaataaacttttccagaagcacgaggtagtttgcaaaggaaaagtctgcactgtttgctctaaagagcttctcctcattccaatgtgttttgcttcatgctagaagcatatgcaacagtgaataaaagcttctttttttgttaatcagtcaataaatttggctaattagtttcagagttcaaggaagaagcaaaatatcacatctctagaagtgttggaaaaaatataatttctttctttacttatattcacctcatggtaggttatattgaaggctgacatggagaatgtttacttttctatttggcatagctaactacactttgatactaactccagttttactattattattttggttggaaaaaaaattcactctttacgtgctaatttgtaatcttgttttgtaagaatttatcctacccttgaaacaggctcagtgtaactgtatatccattctaggctttcttaataaatcttgaggctatgggataatcacatttaaagaatggttcctgaaatgaagtcagtagaaatggcatgggataagagcagagctcacacttttacagttgcagtatttcaaagtccctatccaggtcactccagaaaagggtattgaaacgttgaaatctaaagcaaatttgcaatttcttaagatttctaaaatttaccagaacagtttagcctgggggttaatagttaagtcttgaggctaagttttggactaccaaggaccagatgattcacatgtaggaaacagccagaagccaactggaattttgtgtgctaactgttcccagacagcagagcaagtattcactgagtaggggtgtcccatgacactatttcatattctacagaagtaaatcaggtttcaccaactgaaatgtctccctttgaaagtagcaaacatgatttgtatgttaacttaactttaatttcctgtgtagtttacacccagagcagatactcataaagtataaagtaaaaacttttaaccattattaaacagagaacttgccatgttgagtgccattgtattgaacttattctaaaggcttatgctaacccatttataattggtaaaaatcagaaaatacaagatttacataaaggtcatttcaacttttaaggttaccagtgattgtataaaaacatcacaatcctaaatcctctcgtatctcaccccaaaccccaaactgggggaaaaaaagttaactctttgtgaatggaaccaatgtgcaagatacatactgcatttttaaaatagtgtctcagctaaatggaaaactgttaagcaaacatccatagtaaaacaaataatcttcagtgagatctttttataaaacttcttgtttttaggattccctttgcttcttcctttgaattctctaaaataggcagctaacggattatatacttcagggtttggctttgtgctaaatgtggttttgtgttttgctgtatttcaaaattttccttctgttaaaggaaaatattgtgaataaccactggtgtgttcttagatcagcacaaaccatgtcaaaaaaaattggagatttttttccaattttccttccactgatcttaggcagtaataaacaatggcatttgtcatctttggcacttgcttttagattatagtcccacagttgcactgccccaattgtctacctttgtgggtacatttttgttctttactcctaagttatttctcatagaacccagcctactctagaatttcagcagtgacattggagaatatttttaatttgctgcagtactatgtcatattattagtatgaatctcatttcccaaagggtttgtattctgctaaaaggagatgccaatgttgaatgaagtctgaaactctagtatgtgcatagtttgacgtgcagcatgcacaccaggccttaagatgggaatgtagcttaatgattttctgtttcccataccatttctaatcttttgtgtaattttctcttaactgattgctctgatattgtaaacacaatagatgtagctctatcatgtctagcataatttaaaaaatcagtgtttttaggatttgggaaaataaactgtaaatgtttatttgataggtaaatatagttttattgtcacatgctaaatattgcatgcatattgactaattggaataaccatttactcaattatggacagcttattgaaatagtattgatttagaaaaagtatattgcatttctaaaaaacatctaccaaggttactcgtctgaatattgcttttagccgtgttttataacatagacgagcagtagggtctgtttattagcaaatttcctatttgttccaatacaaactcactttattctaaagtatattaatgaaaccagttcctgtgatgtaactgtaagccttctcgacttagacttaaaaagtggtcacatagattaattttgtgactttttagtatagactgtagccataattctcaaatatgaaatgggacctaataccagtatgtgataaatgttgatgttttctgtgtacaaacacattttctatgcatgtgtctctgtgtatatggcatatacctagtaagtatgtttctgtaagtatgtgtattttatgtccatttgagtaggtaggtaggttttaaaaatactagttaaaatgccacaagcatgagtgtgattgtatgtgcactgtgtgtatatatataaatatatgtatatgtatggttgtaaatatctatgtatacatgtacttagtatgtgtggtatcaggatattttttaaactgtgataatacaacagatagctttgaatgatctgccataacatgtggtaacaatagttcatttctcataacatatatgaggtatacaaaattttctaactccagattgtagtcattttgagaggtacaaagctcataattaccatgacaacatggtaatgtccatagacatttgtatctgaatccacaagaagatctgaatctaagaaggaattacctttgacaatatttttcggtaagaagtaaaacctctggagacctatctttaagatctctaattggaattataaattatttttggattgctgagctgaatcttaaaaagccaagttgatatacatagtcatttttcctctatggtagaagtaaaaaaaaaaaaaaaggacatagcaacattaaagtagtggatttttctgagtaaatttgctgaaaatataagagagaagctatctaataccttggaggtaggtcatccactttttcaggtaaacatttttcatttggcaaatggcataattatttgaaagtgacaggaatctcctcagaatgaagaataaagcctaataggtctctaactgttgaactcatgaaagaagatagtgtatgagacttaagccatgagttttgtatcatttcaattagaagactactagctgtgagctcagagtttaatgtaaatgaatctagatgattttgaagaaatgattattcgttcaccagatcactcattgtacattctaaaaagctcaaatgagtcttctagatactcttactcatcctgtctggttgctatgtttaaaattatgtggtgctgtgtaggtgaaactttaagaatatttttgaagcatatgtaatatatgcactgctatttgtgtgtgtgtgtgtgtctttgtatatatgtaagaatgtgtgtatgtgtgagagcaagagagaggaaactcaaagaggagtgtttgtcttaagacctgttcatactggtatattggtgagacttctcacttctggttggaggtttcacatatggctcaactcaagtcattaatctctttttaatttttactcttgaattccttaaacttcgctcattatgaaatgttttaaaattatgacaaaaattactctgtctaaccacttgccttgtctgctaccagtttgttaaaaattattccccccaaccagtaattccaccagtactacttgatttgtgttatatttcctatgtacatgtacagcctttgttttgcttgcttgtctatttttactttcccttttttgggtcaaatttttcttttgctttgtttgaagaaggaatatacagaagtaaaatcttgtcttctctgctgattctttaattaatatgagccggatactttccactgtcttcttggcactttcaggatttcttaatgctgatatatggactcttagaatggaatttttgaagaaaaatctcaaagcctgtatcgttcttgaaggtcacatgtacctattgtgaaaatgtgaagctgtatttctgaagctgaaataaattataacatttgaagga

SEQ ID NO: 78097 - DNA, 2622 bp, Homo sapiens
gctgcatcctactgctattttcattttatagatggaatactttgaagcacgaaaaatcattatatcttgaaataatttttaaaataatccaataacaaactcagaactactgaagaataataaagaatatgccgagtttctacattgcaaaggaaagaaatttacagattttgatgaagttcgccttgagattgaagcagaaacagatcgcgtgactggaatgaataaaggcatttcctccatacccattaatttacgagtctattccccacacgtgttaaatctaacccttattgatctacctggaataactaaagtgcctgtgggagatcagccaccagatatcgagtatcagatcagagaaatgattatgcagttcatcacgagggagaactgtctgattttagctgttactccagccaacactgatcttgcaaactcagatgcgctgaagctagctaaagaagttgatcctcaaggtctgagaaccattggagttatcaccaaactggaccttatggatgaaggaacggatgccagggatgttctagagaacaaactgttgcctcttcgcaggggttacgtgggggtggtaaacagaagccagaaggacatagatgggaagaaggacataaaggcagccatgctggcagagaggaagtttttcctttcccacccggcttacagacatatcgctgaccgaatgggaaccccacacctgcagaaggtccttaatcagcaacttaccaaccacattcgggataccctaccaaacttcaggaacaaactacagggacagttgctctccatagaacatgaagtagaagcctacaaaaatttcaaaccagaagacccaacaaggaagaccaaagcattgctgcagatggttcagcaatttgctgtggactttgagaagagaattgaagggtcaggggatcaagtagataccctggaactctcaggtggtgctaaaatcaatcgtatttttcatgaacgctttccttttgagatagtaaagatggagttcaatgagaaagaattgcgaagagaaataagctatgcaatcaaaaacatacatggtatcaggacagggttgtttactccagacatggcatttgaagcgatagtcaagaaacagattgtaaagttgaaagggccttccttgaagagtgtggatctggtaatacaagaattaatcaacactgtgaagaagtgtaccaaaaaactggcaaacttccccagactctgcgaggaaacggaaaggattgttgctaaccacattcgtgagcgagaagggaagacaaaggaccaggtattgctattgattgacattcaagtctcttacatcaacaccaaccatgaagacttcattggcttcgcaaatgctcagcagaggagcagtcaggttcacaagaaaaccacagttggaaatcaggtgattcgcaaggggtggctcaccatcagcaacattggcatcatgaaaggcggctcgaagggatactggttcgtccttactgcggaaagcttgtcctggtataaagatgatgaggaaaaagaaaagaagtacatgcttcccttggacaacctgaaagttcgggatgtggaaaagagctttatgtctagcaagcacatctttgcactctttaatacagagcaaaggaatgtatacaaagactatcgcttccttgagctggcatgtgattcccaggaggatgtcgacagctggaaggcatctctactaagagctggggtctatcctgacaaatctgtagggaacaacaaagctgaaaatgatgagaatggacaagcagaaaacttttccatggacccacaattggagaggcaagtggagaccattcgcaacctcgtagactcctacatgtccattatcaacaaatgtatccgagatctaattccaaaaacaataatgcaccttatgatcaataacgttaaagatttcataaattccgagctcctagcacagttgtattcttcagaggaccaaaataccctgatggaggaatctgctgagcaggctcagcgccgggatgagatgcttcgaatgtatcaagcactgaaagaagcccttgggataattggggacatcagcacggccaccgtgtccactccggcaccccctccagtggatgactcctggatacagcactctcgcaggtcacctcctccaagccccacaacccaaaggaggccaacactaagtgctcccctcgcaaggcccacatccggccgaggaccagctcctgccattccctctcctggcccccactctggggctcctccagtcccattccgtccaggcccattacctcctttccccagcagcagtgactccttcggagcccctccacaagttccatctaggcctacgagggccccgcccagtgtcccaaggcgaccccctcctgcagttccaggacgaccatcctaacccccatcattcatctccttttgtttccaacaacatgtctatccatggtatttaaaagcttttcatttgcactatatgtcgtatgtacataaaaacttttatttttcatccatgtgtataataaaaacaaagtttattctatataaaaatgaagtgtgttctgtttctttttt

SEQ ID NO: 78098 - DNA, 2936 bp, Homo sapiens
gctgcatcctactgctattttcattttatagatggaatactttgaagcacgaaaaatcattatatcttgaaataatttttaaaataatccaataacaaactcagaactactgaagaataataaagaatatgccgagtttctacattgcaaaggaaagaaatttacagattttgatgaagttcgccttgagattgaagcagaaacagatcgcgtgactggaatgaataaaggcatttcctccatacccattaatttacgagtctattccccacacgtgttaaatctaacccttattgatctacctggaataactaaagtgcctgtgggagatcagccaccagatatcgagtatcagatcagagaaatgattatgcagttcatcacgagggagaactgtctgattttagctgttactccagccaacactgatcttgcaaactcagatgcgctgaagctagctaaagaagttgatcctcaaggtctgagaaccattggagttatcaccaaactggaccttatggatgaaggaacggatgccagggatgttctagagaacaaactgttgcctcttcgcaggggttacgtgggggtggtaaacagaagccagaaggacatagatgggaagaaggacataaaggcagccatgctggcagagaggaagtttttcctttcccacccggcttacagacatatcgctgaccgaatgggaaccccacacctgcagaaggtccttaatcagcaacttaccaaccacattcgggataccctaccaaacttcaggaacaaactacagggacagttgctctccatagaacatgaagtagaagcctacaaaaatttcaaaccagaagacccaacaaggaagaccaaagcattgctgcagatggttcagcaatttgctgtggactttgagaagagaattgaagggtcaggggatcaagtagataccctggaactctcaggtggtgctaaaatcaatcgtatttttcatgaacgctttccttttgagatagtaaagatggagttcaatgagaaagaattgcgaagagaaataagctatgcaatcaaaaacatacatggtatcaggacagggttgtttactccagacatggcatttgaagcgatagtcaagaaacagattgtaaagttgaaagggccttccttgaagagtgtggatctggtaatacaagaattaatcaacactgtgaagaagtgtaccaaaaaactggcaaacttccccagactctgcgaggaaacggaaaggattgttgctaaccacattcgtgagcgagaagggaagacaaaggaccaggtattgctattgattgacattcaagtctcttacatcaacaccaaccatgaagacttcattggcttcgcaaatgctcagcagaggagcagtcaggttcacaagaaaaccacagttggaaatcaggtgattcgcaaggggtggctcaccatcagcaacattggcatcatgaaaggcggctcgaagggatactggttcgtccttactgcggaaagcttgtcctggtataaagatgatgaggaaaaagaaaagaagtacatgcttcccttggacaacctgaaagttcgggatgtggaaaagagctttatgtctagcaagcacatctttgcactctttaatacagagcaaaggaatgtatacaaagactatcgcttccttgagctggcatgtgattcccaggaggatgtcgacagctggaaggcatctctactaagagctggggtctatcctgacaaatctgtagggaacaacaaagctgaaaatgatgagaatggacaagcagaaaacttttccatggacccacaattggagaggcaagtggagaccattcgcaacctcgtagactcctacatgtccattatcaacaaatgtatccgagatctaattccaaaaacaataatgcaccttatgatcaataacgttaaagatttcataaattccgagctcctagcacagttgtattcttcagaggaccaaaataccctgatggaggaatctgctgagcaggctcagcgccgggatgagatgcttcgaatgtatcaagcactgaaagaagcccttgggataattggggacatcagcacggccaccgtgtccactccggcaccccctccagtggatgactcctggatacagcactctcgcaggtcacctcctccaagccccacaacccaaaggaggccaacactaagtgctcccctcgcaaggcccacatccggccgaggaccagctcctgccattccctctcctggcccccactctggggctcctccagtcccattccgtccaggcccattacctcctttccccagcagcagtgactccttcggagcccctccacaagttccatctaggcctacgagggccccgcccagtgtcccaaggtaaggcatggagcagaaattgggggggtagtgcgccttggttctcttctcatagaatgacagacaaaatttatttgaaagagaaaattgcaaagatcttatcgtacgtgtttgcagttttcacaatgaacagagactataggaaaattgccaaccctgttatgccatttaaaaatcacttgtgatcattgaaatttctcatttatcaattggcacagactaaataggactaaagaacactccgtcccaatgaatgacattttggcagctattgggagaatttgagggctttgaaacaaaagagctatggaggattgtagcaagctgtgtgttctataggtcatgagagttccatggactaaagtctgctctccttataaagattctgaaccctgtttagattttccctgcctcgactggtcttctcattcacttcttgcgtaacgggtgtaaacaaaaaaaggggctaatccggcccccccttaagcagtaaaagcggcaagaagcttgcctgtccacgtttg

SEQ ID NO: 78099 - DNA, 537 bp, Homo sapiens
ttcagggaaccaatcttccgccttcaaggcaaattgtacgagctaagttctgtaagctttactgttgctttttcatttagcttcccaagggcacagtttgtctttaactgattaactcaactagcgcttgctactaattttttttaaacttaggttgtcttgtccgtaacaccctatcattgaaataaaaatcctcttaagagggttcatcccttcactgctaataacttgctgtgattgaaaggtatgaactagtaaactctaaaatgctgtaataataaacccttaacactgtgggtgctttgatatttctctaattttaatggtccttaaaataattaaaatcattaatgatcttcatctctgtccttttatgctatgttgttatgaggtgtaagcctttctcttccccttgtatggtaatatttccaataaatgtagatgatgcttctaaaaggtgggtaaatattgagtatctgattttgctgtgtttgttgataagcctacccaataccaattatttgcatttatttaaaa

SEQ ID NO: 78100 - DNA, 602 bp, Homo sapiens
cgcccttgagtcatcacaccaccagaaccctcacaaatataacttacaacccactctggctttggcaagcacaggagactgatgggcccccaggaagttgtgaggcccctggagatctaaccaccagcatgggctaccaacaagggagtgcagcctaccaaagtccccttaggacaaagggaatgtggatgcagcactgattgctgaaggaggcagtgccaacaccaggaaatgaacatggagagagggacatctcccacccatccaatgccatacactattgcagacacagcagaggttcttcccactgggggctggggaatgcattcggagaaagcattttttaagcttttcacagcagctccatccctactcaaagtaagcccatgctgcatggggtttactcgaatggcggggcctaactcgccctccctacacagaatggcagcatcccagcaacagagaacagagaaatcacagagttgcctgccctgaactggggtaagatactctgtccaagccttcaagagggtgtttcggtggcccacagctgctctgcaaccaggaaccaaaagtatttatgaactaaggtcgtgagcttt

SEQ ID NO: 78101 - DNA, 396 bp, Homo sapiens
aaatgctgttatgaaaatgggtatacaaatatcccttcaagaccctgctttcaactcttttgggtttatagttagaaatggtcttgctggatcatgtggtaattttatttttaacttttcgataaaccaccagctttccataacagctgctccatttacattcccaccagcagggcacaagggttctgtctatttctccatatcctcaccaacatgtattttctgctctttcgatagtagtaagagtgtgaattgatatctcattgtgacttgcatttctctaatgactaatgatgttgagcatcttttcatgtgcttgttggccgtttgtatgctttctttggagaaatgtaaattcaagtcgtttgcccatttaaaaattttgggttgtcttct

SEQ ID NO: 78102 - DNA, 362 bp, Homo sapiens
tgtatatatctcattaaagaactgtaagatgtcatacaaatataaagtcgattggataagaaagattgaattatctatttataccaattggtttttctttgtatgtacaattagccctctgtatccgtgagctccacacctgtggactcaaccaactatagatcaaaaatatctgggaaaaaaaatatctgaagtttcacaaagcaaaacttaaatttgctgcccactaatttgtatgctgaatccaagggaatgaaattatgtgtaggcattgtgttaggttttataagtaatctggatatgatttaaagtttatagaagaaaaaaatgtataggggaagaggtgagtaggttatatgcaa

SEQ ID NO: 78103 - DNA, 3207 bp, Homo sapiens
gtcgaggtgctcatagtggagccctggctcccgggcggacggagccgcacggtagtagatgggggtgtggccgtggcccccgactctgctcggcggggccgttcctgctttgccatccgtgtgggacttccacgacagtggaggcacgagagctgggccccatatgctgcttgcccagcttgggaaagaggaggctgctgcaaaggaccgatcggcgggtaccgtacagagtggatttgcagggcagtggcatggagcccctcttccccgcgccgttctgggaggttatctacggcagccaccttcagggcaacctgtccctcctgagccccaaccacagtctgctgcccccgcatctgctgctcaatgccagccacggcgccttcctgcccctcgggctcaaggtcaccatcgtggggctctacctggccgtgtgtgtcggagggctcctggggaactgccttgtcatgtacgtcatcctcaggcacaccaaaatgaagacagccaccaatatttacatctttaacctggccctggccgacactctggtcctgctgacgctgcccttccagggcacggacatcctcctgggcttctggccgtttgggaatgcgctgtgcaagacagtcattgccattgactactacaacatgttcaccagcaccttcaccctaactgccatgagtgtggatcgctatgtagccatctgccaccccatccgtgccctcgacgtccgcacgtccagcaaagcccaggctgtcaatgtggccatctgggccctggcctctgttgtcggtgttcccgttgccatcatgggctcggcacaggtcgaggatgaagagatcgagtgcctggtggagatccctacccctcaggattactggggcccggtgtttgccatctgcatcttcctcttctccttcatcgtccccgtgctcgtcatctctgtctgctacagcctcatgatccggcggctccgtggagtccgcctgctctcgggctcccgagagaaggaccggaacctgcggcgcatcactcggctggtgctggtggtagtggctgtgttcgtgggctgctggacgcctgtccaggtcttcgtgctggcccaagggctgggggttcagccgagcagcgagactgccgtggccattctgcgcttctgcacggccctgggctacgtcaacagctgcctcaaccccatcctctacgccttcctggatgagaacttcaaggcctgcttccgcaagttctgctgtgcatctgccctgcgccgggacgtgcaggtgtctgaccgcgtgcgcagcattgccaaggacgtggccctggcctgcaagacctctgagacggtaccgcggcccgcatgactaggcgtggacctgcccatggtgcctgtcagcccgcagagcccatctacgcccaacacagagctcacacaggtcactgctctctaggcggacacaccctgggccctgagcatccagagcctgggatgggcttttccctgtgggccagggatgctcggtcccagaggaggacctagtgacatcatgggacaggtcaaagcattagggccacctccatggccccagacagactaaagctgccctcctggtgcagggccgaggggacacaaggacctacctggaagcagctgacatgctggtggacggccgtgactggagcccgtgcccctccctccccgtgcttcatgtgactcttggcctctctgctgctgcgttggcagaaccctgggtgggcaggcacccggaggaggagcagcagctgtgtcatcctgtgccccccatgtgctgtgtgctgtttgcatggcagggctccagctgccttcagccctgtgacgtctcctcagggcagctggacaggcttggcacggcccgggaagtgcagcaggcagcttttctttggggtgggacttgccctgagcttggagctgccacctggaggacttgcctgttccgactccacctgtgcagccggggccaccccaggagaaagtgtccaggtgggggctggcagtccctggctgcagaccccgagctggccctgggcaccgcacctctgaaggttttctgtgtgctgcacggtgcaggcctcatccctgactgcagcttgactctgggcccaacccccatttcccttcaggagaccagcgagaggccctggcccattccctccagcggtgcaatgaactatcatgctgtggaccgtcaacccagccctgcttctcagtgtggggcaggtgtctcaggacgaaggcgccgcgtgaccacatgggcagctctgttcacaaagtggaggcctcgttttcctggtcttgactgctctgtttgggtgggagaagattctctgggggtccccacatcctcccaaggctcccctcacagcctctcctttgcttgaagccagaggtcagtggccgtgctgtgttgcgggggaagctgtgtggaaggagaagctggtggccacagcagagtcctgctctggggacgcctgcttcatttacaagcctcaagatggctctgtgtagggcctgagcttgctgcccaacgggaggatggcttcacagcagagccagcatgaggggtggggcctggcagggcttgcttgagccaaactgcaaaggctgtggtggctgtgaggacactgcgggggttggggggggggcgtctgtacctcaggggatgccccgctgtggtcacccagagaatcacccttcctggtctacagatggaagctgcaggttggtgactttgcaaatgcacttcctacagatgaactattaaaagacctgcaacattgaaaaaactcattttttccaccaaaaccttggccaggtaacctaccttaggcacctgcaaagaacaggaagtgatggctgtctcgcaacagagcctgggctgctcctcctgctctggggagtctaggccgtggggactgttctggggaggctcatgctgtctccatgacgtctgtggcaggagtccctgaggacgggagctgcctagctacagttttcttgccaaggcgaggtgttttgtgaatctgtgctgatgtaatgtgcaccttcacgtatttatgcatgtggcaagcgttacttcctgtgcacgtagccagccctgggtctgtctctggggtaatgaaaaaggaccctaataaacacctgctcactggctgggtattcttcgtaac

SEQ ID NO: 78104 - DNA, 3133 bp, Homo sapiens
ctgccggctcactcggctgctgcgtctggtctggcgtctgctgagaagatcctcttctaccctgctctgcacctgtgctcgactgccagccggctgagggcgggggtctccacggtggtcccagctcccaaggaggttgcagaagtaccgtacagagtggatttgcagggcagtggcatggagcccctcttccccgcgccgttctgggaggttatctacggcagccaccttcagggcaacctgtccctcctgagccccaaccacagtctgctgcccccgcatctgctgctcaatgccagccacggcgccttcctgcccctcgggctcaaggtcaccatcgtggggctctacctggccgtgtgtgtcggagggctcctggggaactgccttgtcatgtacgtcatcctcaggcacaccaaaatgaagacagccaccaatatttacatctttaacctggccctggccgacactctggtcctgctgacgctgcccttccagggcacggacatcctcctgggcttctggccgtttgggaatgcgctgtgcaagacagtcattgccattgactactacaacatgttcaccagcaccttcaccctaactgccatgagtgtggatcgctatgtagccatctgccaccccatccgtgccctcgacgtccgcacgtccagcaaagcccaggctgtcaatgtggccatctgggccctggcctctgttgtcggtgttcccgttgccatcatgggctcggcacaggtcgaggatgaagagatcgagtgcctggtggagatccctacccctcaggattactggggcccggtgtttgccatctgcatcttcctcttctccttcatcgtccccgtgctcgtcatctctgtctgctacagcctcatgatccggcggctccgtggagtccgcctgctctcgggctcccgagagaaggaccggaacctgcggcgcatcactcggctggtgctggtggtagtggctgtgttcgtgggctgctggacgcctgtccaggtcttcgtgctggcccaagggctgggggttcagccgagcagcgagactgccgtggccattctgcgcttctgcacggccctgggctacgtcaacagctgcctcaaccccatcctctacgccttcctggatgagaacttcaaggcctgcttccgcaagttctgctgtgcatctgccctgcgccgggacgtgcaggtgtctgaccgcgtgcgcagcattgccaaggacgtggccctggcctgcaagacctctgagacggtaccgcggcccgcatgactaggcgtggacctgcccatggtgcctgtcagcccgcagagcccatctacgcccaacacagagctcacacaggtcactgctctctaggcggacacaccctgggccctgagcatccagagcctgggatgggcttttccctgtgggccagggatgctcggtcccagaggaggacctagtgacatcatgggacaggtcaaagcattagggccacctccatggccccagacagactaaagctgccctcctggtgcagggccgaggggacacaaggacctacctggaagcagctgacatgctggtggacggccgtgactggagcccgtgcccctccctccccgtgcttcatgtgactcttggcctctctgctgctgcgttggcagaaccctgggtgggcaggcacccggaggaggagcagcagctgtgtcatcctgtgccccccatgtgctgtgtgctgtttgcatggcagggctccagctgccttcagccctgtgacgtctcctcagggcagctggacaggcttggcacggcccgggaagtgcagcaggcagcttttctttggggtgggacttgccctgagcttggagctgccacctggaggacttgcctgttccgactccacctgtgcagccggggccaccccaggagaaagtgtccaggtgggggctggcagtccctggctgcagaccccgagctggccctgggcaccgcacctctgaaggttttctgtgtgctgcacggtgcaggcctcatccctgactgcagcttgactctgggcccaacccccatttcccttcaggagaccagcgagaggccctggcccattccctccagcggtgcaatgaactatcatgctgtggaccgtcaacccagccctgcttctcagtgtggggcaggtgtctcaggacgaaggcgccgcgtgaccacatgggcagctctgttcacaaagtggaggcctcgttttcctggtcttgactgctctgtttgggtgggagaagattctctgggggtccccacatcctcccaaggctcccctcacagcctctcctttgcttgaagccagaggtcagtggccgtgctgtgttgcgggggaagctgtgtggaaggagaagctggtggccacagcagagtcctgctctggggacgcctgcttcatttacaagcctcaagatggctctgtgtagggcctgagcttgctgcccaacgggaggatggcttcacagcagagccagcatgaggggtggggcctggcagggcttgcttgagccaaactgcaaaggctgtggtggctgtgaggacactgcgggggttggggggggggcgtctgtacctcaggggatgccccgctgtggtcacccagagaatcacccttcctggtctacagatggaagctgcaggttggtgactttgcaaatgcacttcctacagatgaactattaaaagacctgcaacattgaaaaaactcattttttccaccaaaaccttggccaggtaacctaccttaggcacctgcaaagaacaggaagtgatggctgtctcgcaacagagcctgggctgctcctcctgctctggggagtctaggccgtggggactgttctggggaggctcatgctgtctccatgacgtctgtggcaggagtccctgaggacgggagctgcctagctacagttttcttgccaaggcgaggtgttttgtgaatctgtgctgatgtaatgtgcaccttcacgtatttatgcatgtggcaagcgttacttcctgtgcacgtagccagccctgggtctgtctctggggtaatgaaaaaggaccctaataaacacctgctcactggctgggtattcttcgtaac

SEQ ID NO: 78105 - DNA, 502 bp, Homo sapiens
tagaagaacagactcttaagcgatgacactgttgtcttgaaacttgactctgttcagcaaaccattgcagtgtaccctcagtgctatgcatctctgcagtgtatagctgctgtgtgttatcaggagtcatttggaagtaactggtctggttgaacaccacacagaaatctttactaattagctagctatctctaactttggtttgtgacttcggtctgtgaaatctatgtctctctcttttttttttccctgatagcatgtggagagggccaaatgtgaactgtgttgacagcactggctacacacccctgcaccatgctgctttgaatggccataagtaagtatcaatgtactacattcctgccttcacccttcagaacccaggccttcacgttgccttttcatttcctagaaaagtttgctggctgagcttagtggctcatgcctgtaatcccagcactttgggaggccgaggtgggaggatcacatgaagctgagtttg

SEQ ID NO: 78106 - DNA, 857 bp, Homo sapiens
aatttgtttatctgtgctgtgtagatggagatgaattgtttctaatttttagctaatacagataaagatactatgaatattcatgtataagtttttatatggacatatgcattcttttcttttgagtgaattcctgggaatggaatggtaggtagattttttttactttttgttttttattttattttttgttttttatttttttttaagacagagtctcactctgttgtccaggctggagtgcagtggtgcaatcttggctcactgcaacctccacctcccaggttcaagcaattctcctgccacagcctcataagtagctgggattacaggagtgtgccaccaagcccaggtaattttttaatttttagtagcaatggggtttcaccatggtggccaggctggtctggaactcctgacctcaagtgatccacccgccttgacctcccaaagtgctgggattacagacgtgagccaccacgcccagcctttttttattttttaagaagctgctaaaaccgttttccaaagtagttattaacaggtaattgaataacaaaattgtggtatatctatacaatggaatactcctcagcaatatttgtgacaaagtggatgaaccccagaacaattacgctatgtgaaagaagccagacaaaaaagaatatattacacttattaaaagttctgaaaaatataagtgctgtattgcaatggaagcatatcaaatgcagaggagacaacaaggaaagggaggaaaggaattcaaagggacaggaaagatttaggaggttcactatcttgatgtgatgatggtttcacaggtaaatacacatatgtccaaactttttgagttg

SEQ ID NO: 78107 - DNA, 423 bp, Homo sapiens
ctcgcaggccgaggtgggaatttgaccttgtttcttgagggtctctgggaggcaagtcaggtctgagctttccaaaacacccttcaggctgctatatggagaatggatcggaggctcgggggaggcccaggtggggggctggggcaaagccgacagggaaggaagaggggaggggtgattctggagccttggggtggctgagcaggcaggaccagtgaccacctggccctgacgaggagcaggggcttcctcggtttctggcaggtcctcacctccactgtctgctctgcccattcagcctcctccccacctgtctacgcccccccccttagagaccccacccctgttctccattagcctctcaaggatttggggggttggggtgctcttctggctcaataaagacttcctggttgacactca

SEQ ID NO: 78108 - DNA, 1728 bp, Homo sapiens
ggccccacaatccccttctggctccggggacgggcggggcggggcgagcgggcggaaataattttctgtttggtcgtctctgccccagtcccttcgccgcgggacgcgcgagacgggagaaggtgcgggaagcgggaagcaggagcgggagcgcgcggccctggcacgcatagggcggcggagagggcacgagcagggattgagcacctactgtgtgccttcacgctttacaaaaggattttcgttcgatgttcactacagcccctgcccgggggtactgatgccccatttacagagggacaagccggatttcggagaggtgaagtcactcgccgaaagtcgcaccgccagggtctgcgtgacaccctaaagcagtgttcagttaccccggggagagcgcgatgaacttgaaccacttgttggctggttcctgctcttgctcgttttttgcggatcgacacatagtgggcgctcaggaaaataaatgttggaagcttgagattgaacttgacagctcgaccctaggtacccgccacgaatccagcccagcccgcggggcaccgggtttctccagacctcgcagggaacatttgcggatgggctggtagaggaggctcggacatcccagttccgcacccgcactcgaccaacgcgtggtagcggaacccctgtcgtagcgaggcacagactgggttcaagtcccgactctgccgatttcagcctgagtgactttgagcgagtcactttttcccgtcgaaacctcagttgctccatccacaaaatgggaaatatgaacagccaccctaaaacggtgtggggaggattaaacgaaacaacgttcccaaaactctaaacttacaaatgttgtctcccgtccatcccataaacttaggcgacaaacctggcgcagggtgacctgagacaaaggcttcccggcccctgtctccaagtcgtccatccctggggcgtaggcacgttttagtgagccctgtccggcgaaacccgaaactgcggccaccttggcagcggtgggccccaaaaggaaatattcaaatattctgaaactcgtgcatgatttaggactgacatttttacgtttaattttcttgcagttttattcttgctagtaaaggtaattcgttagaaacccttaagtgcagtttctcctctgtgtcttgtttaacttttcgtgttagcgaaattcacaaatttgaccaaggaaccggagcgcggccgtcctcgccgggattccggtcatcgcaataatctggctctcggcccctactcccaggcacggaggtcgaagagacgggcttcccctacaccgccctgtgtagatgtagcctcttcgtcccggcagccctccgagattccctgtgtccaccggagcgaggagaggtgtggggctgcagcccagaactcagcttcctggacctccccaaactcccgcctctccgggattaagggagtaaatccctgacgccaaagaccaggtcaaggacaagttctcccccgccctactcccccctcctgggcggggattcatctcccttccggatgaaaggtactaaagagccgacggggggccgcggcgggccccaggcccttgatgttccggttgaacaggtgctggtgaaaaggaggcggacccggcggaagagtctgccagggggcagtgcgccgaaggggaggcggcctcctccacccccagtcccccggcccgtcttc

SEQ ID NO: 78109 - DNA, 326 bp, Homo sapiens
aaaatatttccttatttctcttgtgacttctttgatctgttgattcttaaaacgtttgtgtatttccaagtatttggagcttttctaacattcttactgttattgatttctaatttaattttttttaatagatagggatcatcctctgtgtgatttcagtccttttaaatttgaaacttgtcttttggctatgcgtagtctgggccaaatgaactacatgctcttgaaaagaatatgttttgttattattgaatgtaatgttctataaatatttcgttcaagatgattaatagcattgttcatatcttctgcatttttactgattt

SEQ ID NO: 78110 - DNA, 4474 bp, Homo sapiens
gcgccgtcccggccatgggcgcccgcggcggcctgcggagctggaggcgcggcgccggccgccaggcgcctttgtgagcggcgcggacgacaaaggcgcgggcccgggcagccgaggtgtgtagctgggacggtgctggtctgagctggaccttgtctgatggcttcctccaaccctcctccacagcctgccataggagatcagctggttccaggagtcccaggcccctcctctgaggcagaggacgacccaggagaggcgtttgagtttgatgacagtgatgatgaagaggacaccagcgcagccctgggcgtccccagccttgctcctgagagggacacagaccccccactgatccacttggactccatccctgtcactgacccagacccagcagctgctccacccggcacaggggtgccagcctgggtgagcaatggggatgcagcggacgcagccttctccggggcccggcactccagctggaagcggaagagttcccgtcgcattgaccggttcactttccccgccctggaagaggatgtgatttatgacgacgtcccctgcgagagcccagatgcgcatcagcccggggcagagaggaacctgctctacgaggatgcgcaccgggctggggcccctcggcaggcggaggacctaggctggagctccagtgagttcgagagctacagcgaggactcgggggaggaggccaagccggaggtcgaggtcgagcccgccaagcaccgagtgtccttccagcccaagctttctccagacctgactaggctaaaggagagatacgccaggactaagagagacatcttggctttgagagttggggggagagacatgcaggagctgaagcacaagtacgattgtaagatgacccagctcatgaaggccgccaagagcgggaccaaggatgggctggagaagacacggatggccgtgatgcgcaaagtctccttcctgcacaggaaggacgtcctcggtgactcggaggaggaggacatggggctcctggaggtcagcgtttcggacatcaagcccccagccccagagctgggccccatgccagagggcctgagccctcagcaggtggtccggaggcatatcctgggctccatcgtgcagagcgaaggcagctacgtggagtctctgaagcggatactccaggactaccgcaaccccctgatggagatggagcccaaggcgctgagcgcccgcaagtgccaggtggtgttcttccgcgtgaaggagatcctgcactgccactccatgttccagatcgccctgtcctcccgcgtggctgagtgggattccaccgagaagatcggggacctcttcgtggcctcgttttccaagtccatggtgctagatgtgtacagtgactacgtgaacaacttcaccagtgccatgtccatcatcaagaaggcctgcctcaccaagcctgccttcctcgagttcctcaagcgacggcaggtgtgcagcccagaccgtgtcaccctctacgggctgatggtcaagcccatccagaggttcccacagttcatactcctgcttcaggacatgctgaagaacacccccaggggccatccggacaggctgtcgctgcagctggccctcacagagctggagacgctggctgagaagctgaacgagcagaagcggctggctgaccaggtggctgagatccagcagctgaccaagagcgtcagtgaccgcagcagcctcaacaagctgttgacctcaggccagcggcagctgctcctgtgtgagacgttgacggagaccgtgtacggtgaccgcgggcagctaattaagtccaaggagcgtcgggtcttcctgctcaacgacatgcttgtctgtgccaacatcaacttcaagggccagctggagatcagcagcctggtgcccctggggcccaagtatgtggtgaagtggaacacggcgctgccccaggtgcaggtggtggaggtgggccaggacggtggcacctatgacaaggacaatgtgctcatccagcactcaggcgccaagaaggcctctgcctcagggcaggctcagaataaggtgtacctcggccccccacgcctcttccaggagctgcaggacctgcagaaggacctggccgtggtggagcagatcacgcttctcatcagcacgctgcacggcacctaccagaacctgaacatgactgtggctcaagactggtgcctggccctgcagaggctgatgcgggtgaaggaggaagagatccactcggccaacaagtgccgtctcaggctcctgcttcctgggaaacccgacaagtccggccgccccattagcttcatggtggttttcatcacccccaaccccctgagcaagatttcctgggtcaacaggttacatttggccaaaatcggactccgggaggagaaccagccaggctggctatgcccggatgaggacaagaagagcaaagccccattctggtgcccgatcctggcctgctgcatccctgccttctcctcccgggcactcagcctgcagcttggggccctggtccacagtcctgtcaactgtcccctgctgggtttctcagcagtcagcacctcccttccacagggctacctctgggtcgggggcggacaggaaggcgcagggggccaggtggaaatcttttccttgaaccggccctcgccccgcaccgtcaagtccttcccactggcagcccctgtgctctgcatggagtatatcccggagctggaggaggaggcggagagcagagacgagagcccgacagttgctgacccctcggccacggtgcatccaaccatctgcctcgggctccaggatggcagcatcctcctctacagcagtgtggacactggcacccagtgcctggtgagctgcaggagcccaggtctgcagcctgtgctctgcctgcgacacagccccttccacctgctcgctggcctgcaggatgggacccttgctgcttaccctcggaccagcggaggtgtcctgtgggacctggagagccctcccgtgtgcctgactgtggggcccgggcctgtccgcaccctgttgagcctggaggatgccgtgtgggccagctgtgggccccgggtcactgtcctggaagccaccaccctgcagcctcagcaaagcttcgaggcgcaccaggacgaggcagtgagcgtgacacacatggtgaaggcgggcagcggcgtctggatggccttctcctccggcacctccatccgcctcttccacactgagaccctggagcatctgcaagagatcaacatcgccaccaggaccaccttcctcctgccaggccagaagcacttgtgtgtcaccagcctcctgatctgccagggtctgctctgggtgggcactgaccagggtgtcatcgtcctgctgcccgtgcctcggctggaaggcatccccaagatcacagggaaaggcatggtctcactcaatgggcactgtgggcctgtggccttcctggctgtggctaccagcatcctggcccctgacatcctgcggagtgaccaggaggaggctgaggggccccgggctgaggaggacaagccagacgggcaggcacacgagcccatgcccgacagccacgtgggccgagagctgacccgcaagaagggcatcctcttgcagtaccgcctgcgctccaccgcacacctcccgggcccgctgctctccatgcgggagccggcgcctgctgatggcgcagctttggagcacagcgaggaggacggctccatttacgagatggccgacgaccccgacgtctgggtgcgcagccggccctgcgcccgcgacgcccaccgcaaggagatttgctctgtggccatcatctccggcgggcagggctaccgcaactttggcagcgctctgggcagcagtgggaggcaggccccgtgtggggagacggacagcaccctcctcatctggcaggtgcccttgatgctatagcgcctcccctctcccctcagagggcacagctgcaggcctgaccaaggccacgcccggctctcgtgctctaggacctgcacgggacttgtggatgggcctggactctccagaaactacttgggccagagcaaaggaaaacctcttgttttaaaaaaatttttttcagagtgttttggggaggagttttagggcttggggagagggaggacacatctggaggaaatggccttctttttaaaagcaaaaaacacaaaacctcacaactgcctggcaagcccagtatcacttgtttgggccctagcgggactccaaggcagccacacgcccctcctggaagggtgtgtgcgtgtgagtgtgtgcgagtgtgtgggctggtgtgtgaatatctataaataagtatatatggtgtatattatatgtgtataaataaagtctgtacatattggagctctgggagatgctggaataaaagacaagagttacatctgga

SEQ ID NO: 78111 - DNA, 4547 bp, Homo sapiens
gcgccgtcccggccatgggcgcccgcggcggcctgcggagctggaggcgcggcgccggccgccaggcgcctttgtgagcggcgcggacgacaaaggcgcgggcccgggcagccgaggtgtgtagctgggacggtgctggtctgagctggaccttgtctgatggcttcctccaaccctcctccacagcctgccataggagatcagctggttccaggagtcccaggcccctcctctgaggcagaggacgacccaggagaggcgtttgagtttgatgacagtgatgatgaagaggacaccagcgcagccctgggcgtccccagccttgctcctgagagggacacagaccccccactgatccacttggactccatccctgtcactgacccagacccagcagctgctccacccggcacaggggtgccagcctgggtgagcaatggggatgcagcggacgcagccttctccggggcccggcactccagctggaagcggaagagttcccgtcgcattgaccggttcactttccccgccctggaagaggatgtgatttatgacgacgtcccctgcgagagcccagatgcgcatcagcccggggcagagaggaacctgctctacgaggatgcgcaccgggctggggcccctcggcaggcggaggacctaggctggagctccagtgagttcgagagctacagcgaggactcgggggaggaggccaagccggaggtcgaggtcgagcccgccaagcaccgagtgtccttccagcccaagctttctccagacctgactaggctaaaggagagatacgccaggactaagagagacatcttggctttgagagttggggggagagacatgcaggagctgaagcacaagtacgattgtaagatgacccagctcatgaaggccgccaagagcgggaccaaggatgggctggagaagacacggatggccgtgatgcgcaaagtctccttcctgcacaggaaggacgtcctcggtgactcggaggaggaggacatggggctcctggaggtcagcgtttcggacatcaagcccccagccccagagctgggccccatgccagagggcctgagccctcagcaggtggtccggaggcatatcctgggctccatcgtgcagagcgaaggcagctacgtggagtctctgaagcggatactccaggactaccgcaaccccctgatggagatggagcccaaggcgctgagcgcccgcaagtgccaggtggtgttcttccgcgtgaaggagatcctgcactgccactccatgttccagatcgccctgtcctcccgcgtggctgagtgggattccaccgagaagatcggggacctcttcgtggcctcgttttccaagtccatggtgctagatgtgtacagtgactacgtgaacaacttcaccagtgccatgtccatcatcaagaaggcctgcctcaccaagcctgccttcctcgagttcctcaagcgacggcaggtgtgcagcccagaccgtgtcaccctctacgggctgatggtcaagcccatccagaggttcccacagttcatactcctgcttcaggacatgctgaagaacacccccaggggccatccggacaggctgtcgctgcagctggccctcacagagctggagacgctggctgagaagctgaacgagcagaagcggctggctgaccaggtggctgagatccagcagctgaccaagagcgtcagtgaccgcagcagcctcaacaagctgttgacctcaggccagcggcagctgctcctgtgtgagacgttgacggagaccgtgtacggtgaccgcgggcagctaattaagtccaaggagcgtcgggtcttcctgctcaacgacatgcttgtctgtgccaacatcaacttcaagggccagctggagatcagcagcctggtgcccctggggcccaagtatgtggtgaagtggaacacggcgctgccccaggtgcaggtggtggaggtgggccaggacggtggcacctatgacaaggacaatgtgctcatccagcactcaggcgccaagaaggcctctgcctcagggcaggctcagaataaggtgtacctcggccccccacgcctcttccaggagctgcaggacctgcagaaggacctggccgtggtggagcagatcacgcttctcatcagcacgctgcacggcacctaccagaacctgaacatgactgtggctcaagactggtgcctggccctgcagaggctgatgcgggtgaaggaggaagagatccactcggccaacaagtgccgtctcaggctcctgcttcctgggaaacccgacaagtccggccgccccattagcttcatggtggttttcatcacccccaaccccctgagcaagatttcctgggtcaacaggttacatttggccaaaatcggactccgggaggagaaccagccaggctggctatgcccggatgaggacaagaagagcaaagccccattctggtgcccgatcctggcctgctgcatccctgccttctcctcccgggcactcagcctgcagcttggggccctggtccacagtcctgtcaactgtcccctgctgggtttctcagcagtcagcacctcccttccacagggctacctctgggtcgggggcggacaggaaggcgcagggggccaggtggaaatcttttccttgaaccggccctcgccccgcaccgtcaagtccttcccactggcagcccctgtgctctgcatggagtatatcccggagctggaggaggaggcggagagcagagacgagagcccgacagttgctgacccctcggccacggtgcatccaaccatctgcctcgggctccaggatggcagcatcctcctctacagcagtgtggacactggcacccagtgcctggtgagctgcaggagcccaggtctgcagcctgtgctctgcctgcgacacagccccttccacctgctcgctggcctgcaggatgggacccttgctgcttaccctcggaccagcggaggtgtcctgtgggacctggagagccctcccgtgtgcctgactgtggggcccgggcctgtccgcaccctgttgagcctggaggatgccgtgtgggccagctgtgggccccgggtcactgtcctggaagccaccaccctgcagcctcagcaaagcttcgaggcgcaccaggacgaggcagtgagcgtgacacacatggtgaaggcgggcagcggcgtctggatggccttctcctccggcacctccatccgcctcttccacactgagaccctggagcatctgcaagagatcaacatcgccaccaggaccaccttcctcctgccagacaggtcattaataaaatgttctccaagagcctgagctttttaaagttgtatatctccagatagatggcttgggccagaagcacttgtgtgtcaccagcctcctgatctgccagggtctgctctgggtgggcactgaccagggtgtcatcgtcctgctgcccgtgcctcggctggaaggcatccccaagatcacagggaaaggcatggtctcactcaatgggcactgtgggcctgtggccttcctggctgtggctaccagcatcctggcccctgacatcctgcggagtgaccaggaggaggctgaggggccccgggctgaggaggacaagccagacgggcaggcacacgagcccatgcccgacagccacgtgggccgagagctgacccgcaagaagggcatcctcttgcagtaccgcctgcgctccaccgcacacctcccgggcccgctgctctccatgcgggagccggcgcctgctgatggcgcagctttggagcacagcgaggaggacggctccatttacgagatggccgacgaccccgacgtctgggtgcgcagccggccctgcgcccgcgacgcccaccgcaaggagatttgctctgtggccatcatctccggcgggcagggctaccgcaactttggcagcgctctgggcagcagtgggaggcaggccccgtgtggggagacggacagcaccctcctcatctggcaggtgcccttgatgctatagcgcctcccctctcccctcagagggcacagctgcaggcctgaccaaggccacgcccggctctcgtgctctaggacctgcacgggacttgtggatgggcctggactctccagaaactacttgggccagagcaaaggaaaacctcttgttttaaaaaaatttttttcagagtgttttggggaggagttttagggcttggggagagggaggacacatctggaggaaatggccttctttttaaaagcaaaaaacacaaaacctcacaactgcctggcaagcccagtatcacttgtttgggccctagcgggactccaaggcagccacacgcccctcctggaagggtgtgtgcgtgtgagtgtgtgcgagtgtgtgggctggtgtgtgaatatctataaataagtatatatggtgtatattatatgtgtataaataaagtctgtacatattggagctctgggagatgctggaataaaagacaagagttacatctgga

SEQ ID NO: 78112 - DNA, 4430 bp, Homo sapiens
gcgccgtcccggccatgggcgcccgcggcggcctgcggagctggaggcgcggcgccggccgccaggcgcctttgtgagcggcgcggacgacaaaggcgcgggcccgggcagccgaggtgtgtagctgggacggtgctggtctgagctggaccttgtctgatggcttcctccaaccctcctccacagcctgccataggagatcagctggttccaggagtcccaggcccctcctctgaggcagaggacgacccaggagaggcgtttgagtttgatgacagtgatgatgaagaggacaccagcgcagccctgggcgtccccagccttgctcctgagagggacacagaccccccactgatccacttggactccatccctgtcactgacccagacccagcagctgctccacccggcacaggggtgccagcctgggtgagcaatggggatgcagcggacgcagccttctccggggcccggcactccagctggaagcggaagagttcccgtcgcattgaccggttcactttccccgccctggaagaggatgtgatttatgacgacgtcccctgcgagagcccagatgcgcatcagcccggggcagagaggaacctgctctacgaggatgcgcaccgggctggggcccctcggcaggcggaggacctaggctggagctccagtgagttcgagagctacagcgaggactcgggggaggaggccaagccggaggtcgaggtcgagcccgccaagcaccgagtgtccttccagcccaagatgacccagctcatgaaggccgccaagagcgggaccaaggatgggctggagaagacacggatggccgtgatgcgcaaagtctccttcctgcacaggaaggacgtcctcggtgactcggaggaggaggacatggggctcctggaggtcagcgtttcggacatcaagcccccagccccagagctgggccccatgccagagggcctgagccctcagcaggtggtccggaggcatatcctgggctccatcgtgcagagcgaaggcagctacgtggagtctctgaagcggatactccaggactaccgcaaccccctgatggagatggagcccaaggcgctgagcgcccgcaagtgccaggtggtgttcttccgcgtgaaggagatcctgcactgccactccatgttccagatcgccctgtcctcccgcgtggctgagtgggattccaccgagaagatcggggacctcttcgtggcctcgttttccaagtccatggtgctagatgtgtacagtgactacgtgaacaacttcaccagtgccatgtccatcatcaagaaggcctgcctcaccaagcctgccttcctcgagttcctcaagcgacggcaggtgtgcagcccagaccgtgtcaccctctacgggctgatggtcaagcccatccagaggttcccacagttcatactcctgcttcaggacatgctgaagaacacccccaggggccatccggacaggctgtcgctgcagctggccctcacagagctggagacgctggctgagaagctgaacgagcagaagcggctggctgaccaggtggctgagatccagcagctgaccaagagcgtcagtgaccgcagcagcctcaacaagctgttgacctcaggccagcggcagctgctcctgtgtgagacgttgacggagaccgtgtacggtgaccgcgggcagctaattaagtccaaggagcgtcgggtcttcctgctcaacgacatgcttgtctgtgccaacatcaacttcaagggccagctggagatcagcagcctggtgcccctggggcccaagtatgtggtgaagtggaacacggcgctgccccaggtgcaggtggtggaggtgggccaggacggtggcacctatgacaaggacaatgtgctcatccagcactcaggcgccaagaaggcctctgcctcagggcaggctcagaataaggtgtacctcggccccccacgcctcttccaggagctgcaggacctgcagaaggacctggccgtggtggagcagatcacgcttctcatcagcacgctgcacggcacctaccagaacctgaacatgactgtggctcaagactggtgcctggccctgcagaggctgatgcgggtgaaggaggaagagatccactcggccaacaagtgccgtctcaggctcctgcttcctgggaaacccgacaagtccggccgccccattagcttcatggtggttttcatcacccccaaccccctgagcaagatttcctgggtcaacaggttacatttggccaaaatcggactccgggaggagaaccagccaggctggctatgcccggatgaggacaagaagagcaaagccccattctggtgcccgatcctggcctgctgcatccctgccttctcctcccgggcactcagcctgcagcttggggccctggtccacagtcctgtcaactgtcccctgctgggtttctcagcagtcagcacctcccttccacagggctacctctgggtcgggggcggacaggaaggcgcagggggccaggtggaaatcttttccttgaaccggccctcgccccgcaccgtcaagtccttcccactggcagcccctgtgctctgcatggagtatatcccggagctggaggaggaggcggagagcagagacgagagcccgacagttgctgacccctcggccacggtgcatccaaccatctgcctcgggctccaggatggcagcatcctcctctacagcagtgtggacactggcacccagtgcctggtgagctgcaggagcccaggtctgcagcctgtgctctgcctgcgacacagccccttccacctgctcgctggcctgcaggatgggacccttgctgcttaccctcggaccagcggaggtgtcctgtgggacctggagagccctcccgtgtgcctgactgtggggcccgggcctgtccgcaccctgttgagcctggaggatgccgtgtgggccagctgtgggccccgggtcactgtcctggaagccaccaccctgcagcctcagcaaagcttcgaggcgcaccaggacgaggcagtgagcgtgacacacatggtgaaggcgggcagcggcgtctggatggccttctcctccggcacctccatccgcctcttccacactgagaccctggagcatctgcaagagatcaacatcgccaccaggaccaccttcctcctgccagacaggtcattaataaaatgttctccaagagcctgagctttttaaagttgtatatctccagatagatggcttgggccagaagcacttgtgtgtcaccagcctcctgatctgccagggtctgctctgggtgggcactgaccagggtgtcatcgtcctgctgcccgtgcctcggctggaaggcatccccaagatcacagggaaaggcatggtctcactcaatgggcactgtgggcctgtggccttcctggctgtggctaccagcatcctggcccctgacatcctgcggagtgaccaggaggaggctgaggggccccgggctgaggaggacaagccagacgggcaggcacacgagcccatgcccgacagccacgtgggccgagagctgacccgcaagaagggcatcctcttgcagtaccgcctgcgctccaccgcacacctcccgggcccgctgctctccatgcgggagccggcgcctgctgatggcgcagctttggagcacagcgaggaggacggctccatttacgagatggccgacgaccccgacgtctgggtgcgcagccggccctgcgcccgcgacgcccaccgcaaggagatttgctctgtggccatcatctccggcgggcagggctaccgcaactttggcagcgctctgggcagcagtgggaggcaggccccgtgtggggagacggacagcaccctcctcatctggcaggtgcccttgatgctatagcgcctcccctctcccctcagagggcacagctgcaggcctgaccaaggccacgcccggctctcgtgctctaggacctgcacgggacttgtggatgggcctggactctccagaaactacttgggccagagcaaaggaaaacctcttgttttaaaaaaatttttttcagagtgttttggggaggagttttagggcttggggagagggaggacacatctggaggaaatggccttctttttaaaagcaaaaaacacaaaacctcacaactgcctggcaagcccagtatcacttgtttgggccctagcgggactccaaggcagccacacgcccctcctggaagggtgtgtgcgtgtgagtgtgtgcgagtgtgtgggctggtgtgtgaatatctataaataagtatatatggtgtatattatatgtgtataaataaagtctgtacatattggagctctgggagatgctggaataaaagacaagagttacatctgga

SEQ ID NO: 78113 - DNA, 4456 bp, Homo sapiens
gcgccgtcccggccatgggcgcccgcggcggcctgcggagctggaggcgcggcgccggccgccaggcgcctttgtgagcggcgcggacgacaaaggcgcgggcccgggcagccgaggtgtgtagctgggacggtgctggtctgagctggaccttgtctgatggcttcctccaaccctcctccacagcctgccataggagatcagctggttccaggagtcccaggcccctcctctgaggcagaggacgacccaggagaggcgtttgagtttgatgacagtgatgatgaagaggacaccagcgcagccctgggcgtccccagccttgctcctgagagggacacagaccccccactgatccacttggactccatccctgtcactgacccagacccagcagctgctccacccggcacaggggtgccagcctgggtgagcaatggggatgcagcggacgcagccttctccggggcccggcactccagctggaagcggaagagttcccgtcgcattgaccggttcactttccccgccctggaagaggatgtgatttatgacgacgtcccctgcgagagcccagatgcgcatcagcccggggcagagaggaacctgctctacgaggatgcgcaccgggctggggcccctcggcaggcggaggacctaggctggagctccagtgagttcgagagctacagcgaggactcgggggaggaggccaagccggaggtcgaggtcgagcccgccaagcaccgagtgtccttccagcccaagctttctccagacctgactaggctaaaggagagatacgccaggactaagagagacatcttggctttgagagttggggggagagacatgcaggagctgaagcacaagtacgattgtaagatgacccagctcatgaaggccgccaagagcgggaccaaggatgggctggagaagacacggatggccgtgatgcgcaaagtctccttcctgcacaggaaggacgtcctcggtgactcggaggaggaggacatggggctcctggaggtcagcgtttcggacatcaagcccccagccccagagctgggccccatgccagagggcctgagccctcagcaggtggtccggaggcatatcctgggctccatcgtgcagagcgaaggcagctacgtggagtctctgaagcggatactccaggactaccgcaaccccctgatggagatggagcccaaggcgctgagcgcccgcaagtgccaggtggtgttcttccgcgtgaaggagatcctgcactgccactccatgttccagatcgccctgtcctcccgcgtggctgagtgggattccaccgagaagatcggggacctcttcgtggcctcgttttccaagtccatggtgctagatgtgtacagtgactacgtgaacaacttcaccagtgccatgtccatcatcaagaaggcctgcctcaccaagcctgccttcctcgagttcctcaagcgacggcaggtgtgcagcccagaccgtgtcaccctctacgggctgatggtcaagcccatccagaggttcccacagttcatactcctgcttcaggacatgctgaagaacacccccaggggccatccggacaggctgtcgctgcagctggccctcacagagctggagacgctggctgagaagctgaacgagcagaagcggctggctgaccaggtggctgagatccagcagctgaccaagagcgtcagtgaccgcagcagcctcaacaagctgttgacctcaggccagcggcagctgctcctgtgtgagacgttgacggagaccgtgtacggtgaccgcgggcagctaattaagtccaaggagcgtcgggtcttcctgctcaacgacatgcttgtctgtgccaacatcaacttcaagggccagctggagatcagcagcctggtgcccctggggcccaagtatgtggtgaagtggaacacggcgctgccccaggtgcaggtggtggaggtgggccaggacggtggcacctatgacaaggacaatgtgctcatccagcactcaggcgccaagaaggcctctgcctcagggcaggctcagaataaggtgtacctcggccccccacgcctcttccaggagctgcaggacctgcagaaggacctggccgtggtggagcagatcacgcttctcatcagcacgctgcacggcacctaccagaacctgaacatgactgtggctcaagactggtgcctggccctgcagaggctgatgcgggtgaaggaggaagagatccactcggccaacaagtgccgtctcaggctcctgcttcctgggaaacccgacaagtccggccgccccattagcttcatggtggttttcatcacccccaaccccctgagcaagatttcctgggtcaacaggttacatttggccaaaatcggactccgggaggagaaccagccaggctggctatgcccggatgaggacaagaagagcaaagccccattctggtgcccgatcctggcctgctgcatccctgccttctcctcccgggcactcagcctgcagcttggggccctggtccacagtcctgtcaactgtcccctgctgggtttctcagcagtcagcacctcccttccacagggctacctctgggtcgggggcggacaggaaggcgcagggggccaggtggaaatcttttccttgaaccggccctcgccccgcaccgtcaagtccttcccactggcagcccctgtgctctgcatggagtatatcccggagctggaggaggaggcggagagcagagacgagagcccgacagttgctgacccctcggccacggtgcatccaaccatctgcctcgggctccaggatggcagcatcctcctctacagcagtgtggacactggcacccagtgcctggtgagctgcaggagcccaggtctgcagcctgtgctctgcctgcgacacagccccttccacctgctcgctggcctgcaggatgggacccttgctgcttaccctcggaccagcggaggtgtcctgtgggacctggagagccctcccgtgtgcctgactgtggggcccgggcctgtccgcaccctgttgagcctggaggatgccgtgtgggccagctgtgggccccgggtcactgtcctggaagccaccaccctgcagcctcagcaaagcttcgaggcgcaccaggacgaggcagtgagcgtgacacacatggtgaaggcgggcagcggcgtctggatggccttctcctccggcacctccatccgcctcttccacactgagaccctggagcatctgcaagagatcaacatcgccaccaggaccaccttcctcctgccaggccagaagcacttgtgtgtcaccagcctcctgatctgccagggtctgctctgggtgggcactgaccagggtgtcatcgtcctgctgcccgtgcctcggctggaaggcatccccaagatcacagtcaatgggcactgtgggcctgtggccttcctggctgtggctaccagcatcctggcccctgacatcctgcggagtgaccaggaggaggctgaggggccccgggctgaggaggacaagccagacgggcaggcacacgagcccatgcccgacagccacgtgggccgagagctgacccgcaagaagggcatcctcttgcagtaccgcctgcgctccaccgcacacctcccgggcccgctgctctccatgcgggagccggcgcctgctgatggcgcagctttggagcacagcgaggaggacggctccatttacgagatggccgacgaccccgacgtctgggtgcgcagccggccctgcgcccgcgacgcccaccgcaaggagatttgctctgtggccatcatctccggcgggcagggctaccgcaactttggcagcgctctgggcagcagtgggaggcaggccccgtgtggggagacggacagcaccctcctcatctggcaggtgcccttgatgctatagcgcctcccctctcccctcagagggcacagctgcaggcctgaccaaggccacgcccggctctcgtgctctaggacctgcacgggacttgtggatgggcctggactctccagaaactacttgggccagagcaaaggaaaacctcttgttttaaaaaaatttttttcagagtgttttggggaggagttttagggcttggggagagggaggacacatctggaggaaatggccttctttttaaaagcaaaaaacacaaaacctcacaactgcctggcaagcccagtatcacttgtttgggccctagcgggactccaaggcagccacacgcccctcctggaagggtgtgtgcgtgtgagtgtgtgcgagtgtgtgggctggtgtgtgaatatctataaataagtatatatggtgtatattatatgtgtataaataaagtctgtacatattggagctctgggagatgctggaataaaagacaagagttacatctgga

SEQ ID NO: 78114 - DNA, 4669 bp, Homo sapiens
gcgccgtcccggccatgggcgcccgcggcggcctgcggagctggaggcgcggcgccggccgccaggcgcctttgtgagcggcgcggacgacaaaggcgcgggcccgggcagccgaggtgtgtagctgggacggtgctggtctgagctggaccttgtctgatggcttcctccaaccctcctccacagcctgccataggagatcagctggttccaggagtcccaggcccctcctctgaggcagaggacgacccaggagaggcgtttgagtttgatgacagtgatgatgaagaggacaccagcgcagccctgggcgtccccagccttgctcctgagagggacacagaccccccactgatccacttggactccatccctgtcactgacccagacccagcagctgctccacccggcacaggggtgccagcctgggtgagcaatggggatgcagcggacgcagccttctccggggcccggcactccagctggaagcggaagagttcccgtcgcattgaccggttcactttccccgccctggaagaggatgtgatttatgacgacgtcccctgcgagagcccagatgcgcatcagcccggggcagagaggaacctgctctacgaggatgcgcaccgggctggggcccctcggcaggcggaggacctaggctggagctccagtgagttcgagagctacagcgaggactcgggggaggaggccaagccggaggtcgaggtcgagcccgccaagcaccgagtgtccttccagcccaagctttctccagacctgactaggctaaaggagagatacgccaggactaagagagacatcttggctttgagagttggggggagagacatgcaggagctgaagcacaagtacgattgtaagatgacccagctcatgaaggccgccaagagcgggaccaaggatgggctggagaagacacggatggccgtgatgcgcaaagtctccttcctgcacaggaaggacgtcctcggtgactcggaggaggaggacatggggctcctggaggtcagcgtttcggacatcaagcccccagccccagagctgggccccatgccagagggcctgagccctcagcaggtggtccggaggcatatcctgggctccatcgtgcagagcgaaggcagctacgtggagtctctgaagcggatactccaggactaccgcaaccccctgatggagatggagcccaaggcgctgagcgcccgcaagtgccaggtggtgttcttccgcgtgaaggagatcctgcactgccactccatgttccagatcgccctgtcctcccgcgtggctgagtgggattccaccgagaagatcggggacctcttcgtggcctcgttttccaagtccatggtgctagatgtgtacagtgactacgtgaacaacttcaccagtgccatgtccatcatcaagaaggcctgcctcaccaagcctgccttcctcgagttcctcaagcgacggcaggtgtgcagcccagaccgtgtcaccctctacgggctgatggtcaagcccatccagaggttcccacagttcatactcctgcttcaggacatgctgaagaacacccccaggggccatccggacaggctgtcgctgcagctggccctcacagagctggagacgctggctgagaagctgaacgagcagaagcggctggctgaccaggtggctgagatccagcagctgaccaagagcgtcagtgaccgcagcagcctcaacaagctgttgacctcaggccagcggcagctgctcctgtgtgagacgttgacggagaccgtgtacggtgaccgcgggcagctaattaagtccaaggagcgtcgggtcttcctgctcaacgacatgcttgtctgtgccaacatcaacttcaagggccagctggagatcagcagcctggtgcccctggggcccaagtatgtggtgaagtggaacacggcgctgccccaggtgcaggtggtggaggtgggccaggacggtggcacctatgacaaggacaatgtgctcatccagcactcaggcgccaagaaggcctctgcctcagggcaggctcagaataaggtgtacctcggccccccacgcctcttccaggagctgcaggacctgcagaaggacctggccgtggtggagcagatcacgcttctcatcagcacgctgcacggcacctaccagaacctgaacatgactgtggctcaagactggtgcctggccctgcagaggctgatgcgggtgaaggaggaagagatccactcggccaacaagtgccgtctcaggctcctgcttcctgggaaacccgacaagtccggccgccccattagcttcatggtggttttcatcacccccaaccccctgagcaagatttcctgggtcaacaggttacatttggccaaaatcggactccgggaggagaaccagccaggctggctatgcccggatgaggacaagaagagcaaagccccattctggtgcccgatcctggcctgctgcatccctgccttctcctcccgggcactcagcctgcagcttggggccctggtccacagtcctgtcaactgtcccctgctgggtttctcagcagtcagcacctcccttccacagggctacctctgggtcgggggcggacaggaaggcgcagggggccaggtggaaatcttttccttgaaccggccctcgccccgcaccgtcaagtccttcccactggcagcccctgtgctctgcatggagtatatcccggagctggaggaggaggcggagagcagagacgagagcccgacagttgctgacccctcggccacggtgcatccaaccatctgcctcgggctccaggatggcagcatcctcctctacagcagtgtggacactggcacccagtgcctggtgagctgcaggagcccaggtctgcagcctgtgctctgcctgcgacacagccccttccacctgctcgctggcctgcaggatgggacccttgctgcttaccctcggaccagcggaggtgtcctgtgggacctggagagccctcccgtgtgcctgactgtggggcccgggcctgtccgcaccctgttgagcctggaggatgccgtgtgggccagctgtgggccccgggtcactgtcctggaagccaccaccctgcagcctcagcaaagcttcgaggcgcaccaggacgaggcagtgagcgtgacacacatggtgaaggcgggcagcggcgtctggatggccttctcctccggcacctccatccgcctcttccacactgagaccctggagcatctgcaagagatcaacatcgccaccaggaccaccttcctcctgccaggccagaagcacttgtgtgtcaccagcctcctgatctgccagggtctgctctgggtgggcactgaccagggtgtcatcgtcctgctgcccgtgcctcggctggaaggcatccccaagatcacagggaaaggcatggtctcactcaatgggcactgtgggcctgtggccttcctggctgtggctaccagcatcctggcccctgacatcctgcggagtgaccaggaggaggctgaggggccccgggctgaggaggacaagccagacgggcaggcacacgagcccatgcccgacagccacgtgggccgagagctgacccgcaagaagggcatcctcttgcagtaccgcctgcgctccaccgcacacctcccgggcccgctgctctccatgcgggagccggcgcctgctgatggcgcagctttggagcacagcgaggaggacggctccatttacgagatggccgacgaccccgacgtctgggtgcgcagccggccctgcgcccgcgacgcccaccgcaaggagatttgctctgtggccatcatctccggcgggcagggctaccgcaactttggcagcgctctgggcagcagtgggaggcaggccccgtgtggggagacggacagcaccctcctcatctggcaggtgcccttgatgctatagcgcctcccctctcccctcagagggcacagctgcaggcctgaccaaggccacgcccggctctcgtgctctaggacctgcacgggacttgtggatgggcctggactctccagaaactacttgggccagagcaaaggaaaacctcttgttttaaaaaaatttttttcagagtgttttggggaggagttttagggcttggggagagggaggacacatctggaggaaatggccttctttttaaaagcaaaaaacacaaaacctcacaactgcctggcaagcccagtatcacttgtttgggccctagcgggactccaaggcagccacacgcccctcctggaagggtgtgtgcgtgtgagtgtgtgcgagtgtgtgggctggtgtgtgaatatctataaataagtatatatggtgtatattatatgtgtataaataaagtctgtacatattggagctctgggagatgctggaataaaagacaagagttacatctggaaaaaaaacaatgagggggacgctaaaaatatgcactggaaggggacaaagttaacggcgtaccaggtttggttacaaggggctcgaatgtggagtgagttatacgactaggacgggccgaggaaaaaagagggacggaacaagcggaggcgatggagagaccagctgtggggacactggacagcacagagataag

SEQ ID NO: 78115 - DNA, 1305 bp, Homo sapiens
ggtcaagttggcgtctggctcaaagaagggcgctcggggcgggcagcggcgtctggatggccttctcctccggcacctccatccgcctcttccacactgagaccctggagcatctgcaagagatcaacatcgccaccaggaccaccttcctcctgccaggccagaagcacttgtgtgtcaccagcctcctgatctgccagggtctgctctgggtgggcactgaccagggtgtcatcgtcctgctgcccgtgcctcggctggaaggcatccccaagatcacagggaaaggcatggtctcactcaatgggcactgtgggcctgtggccttcctggctgtggctaccagcatcctggcccctgacatcctgcggagtgaccaggaggaggctgaggggccccgggctgaggaggacaagccagacgggcaggcacacgagcccatgcccgacagccacgtgggccgagagctgacccgcaagaagggcatcctcttgcagtaccgcctgcgctccaccgcacacctcccgggcccgctgctctccatgcgggagccggcgcctgctgatggcgcagctttggagcacagcgaggaggacggctccatttacgagatggccgacgaccccgacgtctgggtgcgcagccggccctgcgcccgcgacgcccaccgcaaggagatttgctctgtggccatcatctccggcgggcagggctaccgcaactttggcagcgctctgggcagcagtgggaggcaggccccgtgtggggagacggacagcaccctcctcatctggcaggtgcccttgatgctatagcgcctcccctctcccctcagagggcacagctgcaggcctgaccaaggccacgcccggctctcgtgctctaggacctgcacgggacttgtggatgggcctggactctccagaaactacttgggccagagcaaaggaaaacctcttgttttaaaaaaatttttttcagagtgttttggggaggagttttagggcttggggagagggaggacacatctggaggaaatggccttctttttaaaagcaaaaaacacaaaacctcacaactgcctggcaagcccagtatcacttgtttgggccctagcgggactccaaggcagccacacgcccctcctggaagggtgtgtgcgtgtgagtgtgtgcgagtgtgtgggctggtgtgtgaatatctataaataagtatatatggtgtatattatatgtgtataaataaagtctgtacatattggagctctgggagatgctggaataaaagacaagagttacatctgga

SEQ ID NO: 78116 - DNA, 3679 bp, Homo sapiens
gcgccgtcccggccatgggcgcccgcggcggcctgcggagctggaggcgcggcgccggccgccaggcgcctttgtgagcggcgcggacgacaaaggcgcgggcccgggcagccgaggtgtgtagctgggacggtgctggtctgagctggaccttgtctgatggcttcctccaaccctcctccacagcctgccataggagatcagctggttccaggagtcccaggcccctcctctgaggcagaggacgacccaggagaggcgtttgagtttgatgacagtgatgatgaagaggacaccagcgcagccctgggcgtccccagccttgctcctgagagggacacagaccccccactgatccacttggactccatccctgtcactgacccagacccagcagctgctccacccggcacaggggtgccagcctgggtgagcaatggggatgcagcggacgcagccttctccggggcccggcactccagctggaagcggaagagttcccgtcgcattgaccggttcactttccccgccctggaagaggatgtgatttatgacgacgtcccctgcgagagcccagatgcgcatcagcccggggcagagaggaacctgctctacgaggatgcgcaccgggctggggcccctcggcaggcggaggacctaggctggagctccagtgagttcgagagctacagcgaggactcgggggaggaggccaagccggaggtcgaggtcgagcccgccaagcaccgagtgtccttccagcccaagctttctccagacctgactaggctaaaggagagatacgccaggactaagagagacatcttggctttgagagttggggggagagacatgcaggagctgaagcacaagtacgattgtaagatgacccagctcatgaaggccgccaagagcgggaccaaggatgggctggagaagacacggatggccgtgatgcgcaaagtctccttcctgcacaggaaggacgtcctcggtgactcggaggaggaggacatggggctcctggaggtcagcgtttcggacatcaagcccccagccccagagctgggccccatgccagagggcctgagccctcagcaggtggtccggaggcatatcctgggctccatcgtgcagagcgaaggcagctacgtggagtctctgaagcggatactccaggactaccgcaaccccctgatggagatggagcccaaggcgctgagcgcccgcaagtgccaggtggtgttcttccgcgtgaaggagatcctgcactgccactccatgttccagatcgccctgtcctcccgcgtggctgagtgggattccaccgagaagatcggggacctcttcgtggcctcgttttccaagtccatggtgctagatgtgtacagtgactacgtgaacaacttcaccagtgccatgtccatcatcaagaaggcctgcctcaccaagcctgccttcctcgagttcctcaagcgacggcaggtgtgcagcccagaccgtgtcaccctctacgggctgatggtcaagcccatccagaggttcccacagttcatactcctgcttcaggacatgctgaagaacacccccaggggccatccggacaggctgtcgctgcagctggccctcacagagctggagacgctggctgagaagctgaacgagcagaagcggctggctgaccaggtggctgagatccagcagctgaccaagagcgtcagtgaccgcagcagcctcaacaagctgttgacctcaggccagcggcagctgctcctgtgtgagacgttgacggagaccgtgtacggtgaccgcgggcagctaattaagtccaaggagcgtcgggtcttcctgctcaacgacatgcttgtctgtgccaacatcaacttcaagggccagctggagatcagcagcctggtgcccctggggcccaagtatgtggtgaagtggaacacggcgctgccccaggtgcaggtggtggaggtgggccaggacggtggcacctatgacaaggacaatgtgctcatccagcactcaggcgccaagaaggcctctgcctcagggcaggctcagaataaggtgtacctcggccccccacgcctcttccaggagctgcaggacctgcagaaggacctggccgtggtggagcagatcacgcttctcatcagcacgctgcacggcacctaccagaacctgaacatgactgtggctcaagactggtgcctggccctgcagaggctgatgcgggtgaaggaggaagagatccactcggccaacaagtgccgtctcaggctcctgcttcctgggaaacccgacaagtccggccgccccattagcttcatggtggttttcatcacccccaaccccctgagcaagatttcctgggtcaacaggttacatttggccaaaatcggactccgggaggagaaccagccaggctggctatgcccggatgaggacaagaagagcaaagccccattctggtgcccgatcctggcctgctgcatccctgccttctcctcccgggcactcagcctgcagcttggggccctggtccacagtcctgtcaactgtcccctgctgggtttctcagcagtcagcacctcccttccacagggctacctctgggtcgggggcggacaggaaggcgcagggggccaggtggaaatcttttccttgaaccggccctcgccccgcaccgtcaagtccttcccactggcagcccctgtgctctgcatggagtatatcccggagctggaggaggaggcggagagcagagacgagagcccgacagttgctgacccctcggccacggtgcatccaaccatctgcctcgggctccaggatggcagcatcctcctctacagcagtgtggacactggcacccagtgcctggtgagctgcaggagcccaggtctgcagcctgtgctctgcctgcgacacagccccttccacctgctcgctggcctgcaggatgggacccttgctgcttaccctcggaccagcggaggtgtcctgtgggacctggagagccctcccgtgtgcctgactgtggggcccgggcctgtccgcaccctgttgagcctggaggatgccgtgtgggccagctgtgggccccgggtcactgtcctggaagccaccaccctgcagcctcagcaaagcttcgaggcgcaccaggacgaggcagtgagcgtgacacacatggtgaaggcgggcagcggcgtctggatggccttctcctccggcacctccatccgcctcttccacactgagaccctggagcatctgcaagagatcaacatcgccaccaggaccaccttcctcctgccagctcttgttttaaaaaaatttttttcagagtgttttggggaggagttttagggcttggggagagggaggacacatctggaggaaatggccttctttttaaaagcaaaaaacacaaaacctcacaactgcctggcaagcccagtatcacttgtttgggccctagcgggactccaaggcagccacacgcccctcctggaagggtgtgtgcgtgtgagtgtgtgcgagtgtgtgggctggtgtgtgaatatctataaataagtatatatggtgtatattatatgtgtataaataaagtctgtacatattggagctctgggagatgctggaataaaagacaagagttacatctgga

SEQ ID NO: 78117 - DNA, 736 bp, Homo sapiens
ttgaggatccccaaccctgccaccgacggctccatttacgagatggccgacgaccccgacgtctgggtgcgcagccggccctgcgcccgcgacgcccaccgcaaggagatttgctctgtggccatcatctccggcgggcagggctaccgcaactttggcagcgctctgggcagcagtgggaggcaggccccgtgtggggagacggacagcaccctcctcatctggcaggtgcccttgatgctatagcgcctcccctctcccctcagagggcacagctgcaggcctgaccaaggccacgcccggctctcgtgctctaggacctgcacgggacttgtggatgggcctggactctccagaaactacttgggccagagcaaaggaaaacctcttgttttaaaaaaatttttttcagagtgttttggggaggagttttagggcttggggagagggaggacacatctggaggaaatggccttctttttaaaagcaaaaaacacaaaacctcacaactgcctggcaagcccagtatcacttgtttgggccctagcgggactccaaggcagccacacgcccctcctggaagggtgtgtgcgtgtgagtgtgtgcgagtgtgtgggctggtgtgtgaatatctataaataagtatatatggtgtatattatatgtgtataaataaagtctgtacatattggagctctgggagatgctggaataaaagacaagagttacatctgga

SEQ ID NO: 78118 - DNA, 2849 bp, Homo sapiens
gcgccgtcccggccatgggcgcccgcggcggcctgcggagctggaggcgcggcgccggccgccaggcgcctttgtgagcggcgcggacgacaaaggcgcgggcccgggcagccgaggtgtgtagctgggacggtgctggtctgagctggaccttgtctgatggcttcctccaaccctcctccacagcctgccataggagatcagctggttccaggagtcccaggcccctcctctgaggcagaggacgacccaggagaggcgtttgagtttgatgacagtgatgatgaagaggacaccagcgcagccctgggcgtccccagccttgctcctgagagggacacagaccccccactgatccacttggactccatccctgtcactgacccagacccagcagctgctccacccggcacaggggtgccagcctgggtgagcaatggggatgcagcggacgcagccttctccggggcccggcactccagctggaagcggaagagttcccgtcgcattgaccggttcactttccccgccctggaagaggatgtgatttatgacgacgtcccctgcgagagcccagatgcgcatcagcccggggcagagaggaacctgctctacgaggatgcgcaccgggctggggcccctcggcaggcggaggacctaggctggagctccagtgagttcgagagctacagcgaggactcgggggaggaggccaagccggaggtcgaggtcgagcccgccaagcaccgagtgtccttccagcccaagctttctccagacctgactaggctaaaggagagatacgccaggactaagagagacatcttggctttgagagttggggggagagacatgcaggagctgaagcacaagtacgattgtaagatgacccagctcatgaaggccgccaagagcgggaccaaggatgggctggagaagacacggatggccgtgatgcgcaaagtctccttcctgcacaggaaggacgtcctcggtgactcggaggaggaggacatggggctcctggaggtcagcgtttcggacatcaagcccccagccccagagctgggccccatgccagagggcctgagccctcagcaggtggtccggaggcatatcctgggctccatcgtgcagagcgaaggcagctacgtggagtctctgaagcggatactccaggactaccgcaaccccctgatggagatggagcccaaggcgctgagcgcccgcaagtgccaggtggtgttcttccgcgtgaaggagatcctgcactgccactccatgttccagatcgccctgtcctcccgcgtggctgagtgggattccaccgagaagatcggggacctcttcgtggcctcgttttccaagtccatggtgctagatgtgtacagtgactacgtgaacaacttcaccagtgccatgtccatcatcaagaaggcctgcctcaccaagcctgccttcctcgagttcctcaagcgacggcaggtgtgcagcccagaccgtgtcaccctctacgggctgatggtcaagcccatccagaggttcccacagttcatactcctgcttcaggacatgctgaagaacacccccaggggccatccggacaggctgtcgctgcagctggccctcacagagctggagacgctggctgagaagctgaacgagcagaagcggctggctgaccaggtggctgagatccagcagctgaccaagagcgtcagtgaccgcagcagcctcaacaagctgttgacctcaggccagcggcagctgctcctgtgtgagacgttgacggagaccgtgtacggtgaccgcgggcagctaattaagtccaaggagcgtcgggtcttcctgctcaacgacatgcttgtctgtgccaacatcaacttcaagggccagctggagatcagcagcctggtgcccctggggcccaagtatgtggtgaagtggaacacggcgctgccccaggtgcaggtggtggaggtgggccaggacggtggcacctatgacaaggacaatgtgctcatccagcactcaggcgccaagaaggcctctgcctcagggcaggctcagaataaggtgtacctcggccccccacgcctcttccaggagctgcaggacctgcagaaggacctggccgtggtggagcagatcacgcttctcatcagcacgctgcacggcacctaccagaacctgaacatgactgtggctcaagactggtgcctggccctgcagaggctgatgcgggtgaaggaggaagagatccactcggccaacaagtgccgtctcaggctcctgcttcctgggaaacccgacaagtccggccgccccattagcttcatggtggttttcatcacccccaaccccctgagcaagatttcctgggtcaacaggttacatttggccaaaatcggactccgggaggagaaccagccaggctggctatgcccggatgaggacaagaagagcaaagccccattctggtgcccgatcctggcctgctgcatccctgccttctcctcccgggcactcagcctgcagcttggggccctggtccacagtcctgtcaactgtcccctgctgggtttctcagcagtcagcacctcccttccacagggctacctctgggtcgggggcggacaggaaggcgcagggggccaggtggaaatcttttccttgaaccggccctcgccccgcaccgtcaagtccttcccactggcagcccctgtgctctgcatggagtatatcccggagctggaggaggaggcggagagcagagacgagagcccgacagttgctgacccctcgactaacgatgcggccaactatggggggatctctagagtaaccca

SEQ ID NO: 78119 - DNA, 1863 bp, Homo sapiens
gcgccgtcccggccatgggcgcccgcggcggcctgcggagctggaggcgcggcgccggccgccaggcgcctttgtgagcggcgcggacgacaaaggcgcgggcccgggcagccgaggtgtgtagctgggacggtgctggtctgagctggaccttgtctgatggcttcctccaaccctcctccacagcctgccataggagatcagctggttccaggagtcccaggcccctcctctgaggcagaggacgacccaggagaggcgtttgagtttgatgacagtgatgatgaagaggacaccagcgcagccctgggcgtccccagccttgctcctgagagggacacagaccccccactgatccacttggactccatccctgtcactgacccagacccagcagctgctccacccggcacaggggtgccagcctgggtgagcaatggggatgcagcggacgcagccttctccggggcccggcactccagctggaagcggaagagttcccgtcgcattgaccggttcactttccccgccctggaagaggatgtgatttatgacgacgtcccctgcgagagcccagatgcgcatcagcccggggcagagaggaacctgctctacgaggatgcgcaccgggctggggcccctcggcaggcggaggacctaggctggagctccagtgagttcgagagctacagcgaggactcgggggaggaggccaagccggaggtcgaggtcgagcccgccaagcaccgagtgtccttccagcccaagctttctccagacctgactaggctaaaggagagatacgccaggactaagagagacatcttggctttgagagttggggggagagacatgcaggagctgaagcacaagtacgattgtaagatgacccagctcatgaaggccgccaagagcgggaccaaggatgggctggagaagacacggatggccgtgatgcgcaaagtctccttcctgcacaggaaggacgtcctcggtgactcggaggaggaggacatggggctcctggaggtcagcgtttcggacatcaagcccccagccccagagctgggccccatgccagagggcctgagccctcagcaggtggtccggaggcatatcctgggctccatcgtgcagagcgaaggcagctacgtggagtctctgaagcggatactccaggactaccgcaaccccctgatggagatggagcccaaggcgctgagcgcccgcaagtgccaggtggtgttcttccgcgtgaaggagatcctgcactgccactccatgttccagatcgccctgtcctcccgcgtggctgagtgggattccaccgagaagatcggggacctcttcgtggcctcgttttccaagtccatggtgctagatgtgtacagtgactacgtgaacaacttcaccagtgccatgtccatcatcaagaaggcctgcctcaccaagcctgccttcctcgagttcctcaagcgacggcaggtgtgcagcccagaccgtgtcaccctctacgggctgatggtcaagcccatccagaggttcccacagttcatactcctgcttcaggacatgctgaagaacacccccaggggccatccggacaggctgtcgctgcagctggccctcacagagctggagacgctggctgagaagctgaacgagcagaagcggctggctgaccaggtggctgagatccagcagctgaccaagagcgtcagtgaccgcagcagcctcaacaaggtgagctgggcctcccacctgcctgccctcacctgcctgccctcacctgtgctcctgcccgtgcccctgccccacgccacccacactaggtggcagtgttctctgagggaggggaggcct

SEQ ID NO: 78120 - DNA, 1003 bp, Homo sapiens
gcgccgtcccggccatgggcgcccgcggcggcctgcggagctggaggcgcggcgccggccgccaggcgcctttgtgagcggcgcggacgacaaaggcgcgggcccgggcagccgaggtgtgtagctgggacggtgctggtctgagctggaccttgtctgatggcttcctccaaccctcctccacagcctgccataggagatcagctggttccaggagtcccaggcccctcctctgaggcagaggacgacccaggagaggcgtttgagtttgatgacagtgatgatgaagaggacaccagcgcagccctgggcgtccccagccttgctcctgagagggacacagaccccccactgatccacttggactccatccctgtcactgacccagacccagcagctgctccacccggcacaggggtgccagcctgggtgagcaatggggatgcagcggacgcagccttctccggggcccggcactccagctggaagcggaagagttcccgtcgcattgaccggttcactttccccgccctggaagaggatgtgatttatgacgacgtcccctgcgagagcccagatgcgcatcagcccggggctctccgtccaatggggaagcacagcccctgcttttgaggagctccgagtctgatggggcagctctaaccatccttgagcagcacagagcgcaatgggagagacacacagacaacacggcaaggcccgagggccccagagccacactcctgactcctgtctcaggaacggggacacctgggccaaggatatgcttatccctttagcaagcctgggatgtgcttggagcacattttcctgtttgtagctcacttgagtccagggagcaatggattcccactgtattaggaggcaaaggagtctcagaaaagtcccagagctgggaggtctgagcggctgaggggcctcagttgttgtttaacccatttggcctatttcccacctgaattcaatcaagtcactaagtccc

SEQ ID NO: 78121 - DNA, 290 bp, Homo sapiens
cgagttggcctcctgcgtggggctaaatgtgcagcctcagtgaggctccaggacttcttcagtttctcttcctctggggtgctgtgattcctataggatctggtgtggcttttggggagccagtgtgctgtgtggtgacctcattggcctcctgaaccctagaacctgaacatgactgtggctcaagactggtgcctggccctgcagaggctgatgcgggtgaaggaggaagagatccactcggccaacaagtgccgtctcaggctcctgcttcctgggaaacccgacaa

SEQ ID NO: 78122 - DNA, 953 bp, Homo sapiens
cgccattgtatggagagaccacattttgtttacgcgttagtctgtcgacggacatttttgcctccacattttggcgactgtggctaatgctgctatgaacatggctggacaaatatctgtttgagaccccgctttcagttcatgtgggtctattcctagaaagatccatgcttttgttttctttttcatgcattagctgtttcttgaggtcttgttctgcatctggtgccatctgtcctggcctcaggccgggccctttgcagacccagtgtgtgtagggggttgcgcagggtgaggctttgccccaggctggggtagagttggtcatgggtgggctgctcagtctctgctctgacctggcaggacatgctgaagaacacccccaggggccatccggacaggctgtcgctgcagctggccctcacagagctggagacgctggctgagaagctgaacgagcagaagcggctggctgaccaggtggctgagatccagcagctgaccaagagcgtcagtgaccgcagcagcctcaacaaggtgagctgggcctcccacctgcctgccctcacctgcctgccctcacctgtgctcctgcccgtgcccctgccccacgccacccacactaggtggcagtgttctctgagggaggggaggccttgctcttccaaggatgtgaccttggggattggatcctcagcgggacccccacgttcattcctgttcatgttattttaagataaaagttcattttgtgcatcagtgtgatttccagtaaagtctccagaaatcaaagcctagttaaatgaacaggctctggagagtcagaatctgggtttagatccagattttgccataggtgcttgctgtgtgccctcaagggaatcacccaccctctctgaacctcacttgctccctttgaaatgaggagcatttaatagcaccggagccctagg

SEQ ID NO: 78123 - DNA, 436 bp, Homo sapiens
gaatgcatcatagtcattaagctgtagcaatgggcaaatgatagcatgtggcgtttggcttagcttggagcaagaggaagaaaggaaaccaacttagtggtggcaatatcccaagaacttgccacatttgcatgatcatctctgccatagcagcttataccttgaaggcttccaaagttgtcctgtggagcaaaaggaaggaagagagatattggtacattctttaagggatggaaaaagtcatgaagaagcccagaggtcgtttgaaaatgcagtcatgatcacgagttgcatgcctggccttgttattgggttgtatgagctcttttgcaaggcaccagaatggtgcaccctgcagctgcagcttatctactgattgagaccctaggacacaaggctgcctgcctcatgttccccatgcctagggattaggtac

SEQ ID NO: 78124 - DNA, 428 bp, Homo sapiens
ggcacccaaccatcgcggttttgctgttggccatcatatgcatggtggatctgccgcccagatcactgggcgtcgtatcacaagtgctgacaaggaaacatatataccgttgagaagcttaagcttcccaacgcgccttgcgacaggggctgcggtattgcatccacatgactgataaactagtaaacacacatgaattcattttaaaagtgtattcaatcagttaggtaaactaaaaaccttaagtcttcgttcgatttggaatgcagccagagaacaaatggaaaatttttcaaggtagagaagatgaaaactcagaacgccctcttgtggcatctctacccaccctaggaacactatggctcttcccctacacatggtgattgctaaccttgctacaagacgttgagaagcttgggccgagtcgg

SEQ ID NO: 78125 - DNA, 681 bp, Homo sapiens
tattgctacactaataggtgtaccgattagggcacccattgtgtgttcaactataaatagtggcaattacttagtaagtaatgcagcagactgctaaactgttaatccgatttaactgactaggcacctgaactatcaggaccaggatcaattgcctgctaattaactattattttcatttaaaaaaaagcatgtccatgattgattgtctcatatataactattttattccattaaaagataaataagccaagcagagaatattccttttgggaataactggctgctgctgatgctttatttccccaatttaataaaatgtatctgccatcctttcttactgataaaaaggaaaataagtgatttccagagcatccttctcttcccagtattcctgccttaattatctctcaggactctgcatacaagcatccaatcaactgagttttgcagcctgtaaattaccttcacacattcctacctttacttatttctcctgacctgcttggcttatcgtctacccttttttcacagtgtaactcacatatttcagagacacatgaattcattttaaaagtgtattcaatcagttaggtaaactaaaaaccttaagtcttcgttcgatttggaatgcagccagagaaccgtcgattcgaggggatactctaggtcgcctcgctc

SEQ ID NO: 78126 - DNA, 3184 bp, Homo sapiens
aatcctcaacaatgagccctggaaagccactagtactgattcacagctgaaactcattcatcatttgtggatcaaacaattcctaaaaaccctttcagccctgaagataaaaattctggcctttgagtcagggtcttcactctgtacttctaaccttggctccggggtattgccgaaaccagtccaggcacgtcacaaatgtctgacttctcccagaggcttcagaagcacaatgagcagcagaggagagccatggagccaagcacagtctcatttaacctccccaaaagcttgggaagtgggtggtgttatagccccattttacagatgagaaaaactgaggcttatttaagcagctcacctaaagtcacatattgattgtgctgagctgagattgtaccctaatctgccttcaaatccatgtttttacccattgcatgtgattatggaacctgggaccgaggagcaggaggagaacattctaaattctgctcccatcttgtctttacatctcaggtcacttttagcaaagacagacccggacacttgccattaatactacaggcttccttcctcctacccccttcccccaatcttattcatctcacctctccagtaggtcgtggactcatgcattttataattaaagaaggccaaggctcaggggttaagtgacttactggaggttatcagagaggaagttgccaaacccaggctaggaactgaatggttggtttaaatccacccctctggcaggagactggggaatacacatgagccgtgcagacagcagagggcagtcctgggggtgggggcgccagagggtttccggtacttttcagggcaattgaagttccggtcactactcccccccagagcaataagccacatccggcgacgtgtggcaccccaccctggctgctacagatggggctggatgcagaagagaactccagctggtccttagggacacggcggccttggcgctgaaggccactcgctcccaccttgtcctcacggtccagttttcccaggaatcccttagatgctaagatggggattcctggaaatactgttcttgaggtcatggtttcacagctggatttgcctccttcccaccccacagttgccccccaatggggcctcggctggctcacaggatgagggttcaagaagaaggctgtccctggaggtaagagggcttatgaaccatgttccaaacctttgcgttgcttttctttccatcgtgtctatttcataacatccctgtgaggctggatgtgggaacttcagcactgccgtactcttgggaaatttgtccaaggccacccggctgagcagcggttgaaccaggacaccatcaggcatgcgtttcttgtctccaccacaccctcaacccacttcccaacgcgccttgcgacaggggctgcggtattgcatccacatgactgataaactagtaaacacacatgaattcattttaaaagtgtattcaatcagttaggtaaactaaaaaccttaagtcttcgttcgatttggaatgcagccagagaacaaatggaaaatttttcaaggtagagaagatgaaaactcagaacgccctcttgtggcatctctacccaccctaggaacactatggctcttcccctacacatggtgattgctaaccttgctacaagacgttggacacacacacacacacacacacacacactgaggttccttttgccccctcactttgagccagtgactactgaaaccctctccattgttgcaccaccagcaatgcccccatcacttcctctcatttacttccacaggctggttcatcctcaaagccctccttacgtagatctgtgggatcagtgaggctcagagaggtaaagtggccagcccaaggtcgcccagacagcaaaaggcagggccagcgctgatttcaagtccaatggcctatggcaatttcttagccaaaagcaaaatctacaaaaataaaaagtcaggcacagtggtgagtgcctacagtcccagctactgaggaggccgacgggggaggaccacttgagcttgggagttcctggctgcagagagctatgattgtgcctgtgaatagccaatgcactccagcctgagcaagatagggagaccctgtctctaaaaaatacctaaataattttaaaagtcagcctctctgactgcctatagagaatgctaactaactgaatgacagaagacctaatgtaatccaggtgcaaaatcagaactttccggccgggcgcggtggctcacacctgtaatcccaacactttgggaggcccaggcgggtggatcacgaggtcaggagttcaagaccggcctgcccaacatggcaaaaccccgtctctactaaaaatacaaaaaattagctgggcatggtggtggccacctataatctcagctactcaggaggctgaggcaggagaattgcttggacccgggaggcagaggttgcagtgagctgagatcgcgccactgcactccagcgtgggggacaaaagcgaaactctgtctcaaaaaaaaaaaaattagaactttccccgtactcttgctagggcttttcatggagatgtagaaatggtagtaagtgccaaggccccagaaccctcatgtttgggtccgactcccacattgccagagactaggcagctcacacaggtgtcccaagctgtctttctcacaggccgcattgaaggcatttatgaaatgagaccccctcttcctcatccgtagtgacagggctggcctgaccgtggagaaatcagatttgatcatgatagcttccactccgtgactggtcacgatctgccaggcgctgtgctaaacactttcataggccttgtccccctccatcctgataacaccccagtgaagcaggccctgctcttcactccactccacaaagccaaggctgagagaggttaacagacttacctaaggtcacacagctaagaagtcgtgaagctgggatcgaatcaagtctgtgtttatgggtttaactatcatgttgtggccccaaccccatttgacctagcctggctggtgggccttcttgcagtagcttcccctggagaagaggaaaagcaaaccttcattgagacccaagcggtctctcctgtgctctgtgacaataataaagttccagcccttg

SEQ ID NO: 78127 - DNA, 1907 bp, Homo sapiens
ggcacccaaccatcgcggttttgctgttggccatcatatgcatggtggatctgccgcccagatcactgggcgtcgtatcacaagtgctgacaaggaaacatatataccgttgagaagcttaagcttcccaacgcgccttgcgacaggggctgcggtattgcatccacatgactgataaactagtaaacacacatgaattcattttaaaagtgtattcaatcagttaggtaaactaaaaaccttaagtcttcgttcgatttggaatgcagccagagaacaaatggaaaatttttcaaggtagagaagatgaaaactcagaacgccctcttgtggcatctctacccaccctaggaacactatggctcttcccctacacatggtgattgctaaccttgctacaagacgttggacacacacacacacacacacacacacactgaggttccttttgccccctcactttgagccagtgactactgaaaccctctccattgttgcaccaccagcaatgcccccatcacttcctctcatttacttccacaggctggttcatcctcaaagccctccttacgtagatctgtgggatcagtgaggctcagagaggtaaagtggccagcccaaggtcgcccagacagcaaaaggcagggccagcgctgatttcaagtccaatggcctatggcaatttcttagccaaaagcaaaatctacaaaaataaaaagtcaggcacagtggtgagtgcctacagtcccagctactgaggaggccgacgggggaggaccacttgagcttgggagttcctggctgcagagagctatgattgtgcctgtgaatagccaatgcactccagcctgagcaagatagggagaccctgtctctaaaaaatacctaaataattttaaaagtcagcctctctgactgcctatagagaatgctaactaactgaatgacagaagacctaatgtaatccaggtgcaaaatcagaactttccggccgggcgcggtggctcacacctgtaatcccaacactttgggaggcccaggcgggtggatcacgaggtcaggagttcaagaccggcctgcccaacatggcaaaaccccgtctctactaaaaatacaaaaaattagctgggcatggtggtggccacctataatctcagctactcaggaggctgaggcaggagaattgcttggacccgggaggcagaggttgcagtgagctgagatcgcgccactgcactccagcgtgggggacaaaagcgaaactctgtctcaaaaaaaaaaaaattagaactttccccgtactcttgctagggcttttcatggagatgtagaaatggtagtaagtgccaaggccccagaaccctcatgtttgggtccgactcccacattgccagagactaggcagctcacacaggtgtcccaagctgtctttctcacaggccgcattgaaggcatttatgaaatgagaccccctcttcctcatccgtagtgacagggctggcctgaccgtggagaaatcagatttgatcatgatagcttccactccgtgactggtcacgatctgccaggcgctgtgctaaacactttcataggccttgtccccctccatcctgataacaccccagtgaagcaggccctgctcttcactccactccacaaagccaaggctgagagaggttaacagacttacctaaggtcacacagctaagaagtcgtgaagctgggatcgaatcaagtctgtgtttatgggtttaactatcatgttgtggccccaaccccatttgacctagcctggctggtgggccttcttgcagtagcttcccctggagaagaggaaaagcaaaccttcattgagacccaagcggtctctcctgtgctctgtgacaataataaagttccagcccttg

SEQ ID NO: 78128 - DNA, 1564 bp, Homo sapiens
gggaatcagaaaccacacacacacacacacacgcacatatatacacacacacgcacacacacacacacacacacacaagtaagagactcagcctgcagttaattagcattctggcagtttgagccagtgactactgaaaccctctccattgttgcaccaccagcaatgcccccatcacttcctctcatttacttccacaggctggttcatcctcaaagccctccttacgtagatctgtgggatcagtgaggctcagagaggtaaagtggccagcccaaggtcgcccagacagcaaaaggcagggccagcgctgatttcaagtccaatggcctatggcaatttcttagccaaaagcaaaatctacaaaaataaaaagtcaggcacagtggtgagtgcctacagtcccagctactgaggaggccgacgggggaggaccacttgagcttgggagttcctggctgcagagagctatgattgtgcctgtgaatagccaatgcactccagcctgagcaagatagggagaccctgtctctaaaaaatacctaaataattttaaaagtcagcctctctgactgcctatagagaatgctaactaactgaatgacagaagacctaatgtaatccaggtgcaaaatcagaactttccggccgggcgcggtggctcacacctgtaatcccaacactttgggaggcccaggcgggtggatcacgaggtcaggagttcaagaccggcctgcccaacatggcaaaaccccgtctctactaaaaatacaaaaaattagctgggcatggtggtggccacctataatctcagctactcaggaggctgaggcaggagaattgcttggacccgggaggcagaggttgcagtgagctgagatcgcgccactgcactccagcgtgggggacaaaagcgaaactctgtctcaaaaaaaaaaaaattagaactttccccgtactcttgctagggcttttcatggagatgtagaaatggtagtaagtgccaaggccccagaaccctcatgtttgggtccgactcccacattgccagagactaggcagctcacacaggtgtcccaagctgtctttctcacaggccgcattgaaggcatttatgaaatgagaccccctcttcctcatccgtagtgacagggctggcctgaccgtggagaaatcagatttgatcatgatagcttccactccgtgactggtcacgatctgccaggcgctgtgctaaacactttcataggccttgtccccctccatcctgataacaccccagtgaagcaggccctgctcttcactccactccacaaagccaaggctgagagaggttaacagacttacctaaggtcacacagctaagaagtcgtgaagctgggatcgaatcaagtctgtgtttatgggtttaactatcatgttgtggccccaaccccatttgacctagcctggctggtgggccttcttgcagtagcttcccctggagaagaggaaaagcaaaccttcattgagacccaagcggtctctcctgtgctctgtgacaataataaagttccagcccttg

SEQ ID NO: 78129 - DNA, 3288 bp, Homo sapiens
aatcctcaacaatgagccctggaaagccactagtactgattcacagctgaaactcattcatcatttgtggatcaaacaattcctaaaaaccctttcagccctgaagataaaaattctggcctttgagtcagggtcttcactctgtacttctaaccttggctccggggtattgccgaaaccagtccaggcacgtcacaaatgtctgacttctcccagaggcttcagaagcacaatgagcagcagaggagagccatggagccaagcacagtctcatttaacctccccaaaagcttgggaagtgggtggtgttatagccccattttacagatgagaaaaactgaggcttatttaagcagctcacctaaagtcacatattgattgtgctgagctgagattgtaccctaatctgccttcaaatccatgtttttacccattgcatgtgattatggaacctgggaccgaggagcaggaggagaacattctaaattctgctcccatcttgtctttacatctcaggtcacttttagcaaagacagacccggacacttgccattaatactacaggcttccttcctcctacccccttcccccaatcttattcatctcacctctccagtaggtcgtggactcatgcattttataattaaagaaggccaaggctcaggggttaagtgacttactggaggttatcagagaggaagttgccaaacccaggctaggaactgaatggttggtttaaatccacccctctggcaggagactggggaatacacatgagccgtgcagacagcagagggcagtcctgggggtgggggcgccagagggtttccggtacttttcagggcaattgaagttccggtcactactcccccccagagcaataagccacatccggcgacgtgtggcaccccaccctggctgctacagatggggctggatgcagaagagaactccagctggtccttagggacacggcggccttggcgctgaaggccactcgctcccaccttgtcctcacggtccagttttcccaggaatcccttagatgctaagatggggattcctggaaatactgttcttgaggtcatggtttcacagctggatttgcctccttcccaccccacagttgccccccaatggggcctcggctggctcacaggatgagggttcaagaagaaggctgtccctggaggtaagagggcttatgaaccatgttccaaacctttgcgttgcttttctttccatcgtgtctatttcataacatccctgtgaggctggatgtgggaacttcagcactgccgtactcttgggaaatttgtccaaggccacccggctgagcagcggttgaaccaggacaccatcaggcatgcgtttcttgtctccaccacaccctcaacccacttcccaacgcgccttgcgacaggggctgcggtattgcatccacatgactgataaactagtaaacacacatgaattcattttaaaagtgtattcaatcagttaggtaaactaaaaaccttaagtcttcgttcgatttggaatgcagccagagaacaaatggaaaatttttcaaggtagagaagatgaaaactcagaacgccctcttgtggcatctctacccaccctaggaacactatggctcttcccctacacatggtgattgctaaccttgctacaagacgttggacacacacacacacacacacacacacactgaggttccttttgccccctcactttgagccagtgactactgaaaccctctccattgttgcaccaccagcaatgcccccatcacttcctctcatttacttccacaggctggttcatcctcaaagccctccttacgtagatctgtgggatcagtgaggctcagagaggtaaagtggccagcccaaggtcgcccagacagcaaaaggcagggccagcgctgatttcaagtccaatggcctatggcaatttcttagccaaaagcaaaatctacaaaaataaaaagtcaggcacagtggtgagtgcctacagtcccagctactgaggaggccgacgggggaggaccacttgagcttgggagttcctggctgcagagagctatgattgtgcctgtgaatagccaatgcactccagcctgagcaagatagggagaccctgtctctaaaaaatacctaaataattttaaaagtcagcctctctgactgcctatagagaatgctaactaactgaatgacagaagacctaatgtaatccaggtgcaaaatcagaactttccggccgggcgcggtggctcacacctgtaatcccaacactttgggaggcccaggcgggtggatcacgaggtcaggagttcaagaccggcctgcccaacatggcaaaaccccgtctctactaaaaatacaaaaaattagctgggcatggtggtggccacctataatctcagctactcaggaggctgaggcaggagaattgcttggacccgggaggcagaggttgcagtgagctgagatcgcgccactgcactccagcgtgggggacaaaagcgaaactctgtctcaaaaaaaaaaaaattagaactttccccgtactcttgctagggcttttcatggagatgtagaaatggtagtaagtgccaaggccccagaaccctcatgtttgggtccgactcccacattgccagagactaggcagctcacacaggtgtcccaagctgtctttctcacaggccgcattgaaggcatttatgaaatgagaccccctcttcctcatccgtagtgacagggctggcctgaccgtggagaaatcagatttgatcatgatagcttccactccgtgactggtcacgatctgccaggcgctgtgctaaacactttcataggccttgtccccctccatcctgataacaccccagtgaagcaggccctgctcttcactccactccacaaagccaaggctgagagaggttaacagacttacctaaggtcacacagctaagaagtcgtgaagctgggatcgaatcaagtctgtgtttatgggtttaactatcatgttgtggccccaaccccatttgacctagcctggctggtgggccttcttgcagtagcttcccctggagaagaggaaaagcaaaccttcattgagacccaagcggtctctcctgtgctctgtgacaataataaagttccagcccttggctcctgtcctgtttctttctgggaatttggggaaggggggaggtggcgaaggcagagaaagaacctgacaggcccagctgaacacccccaagtggctccacac

SEQ ID NO: 78130 - DNA, 1705 bp, Homo sapiens
aatcctcaacaatgagccctggaaagccactagtactgattcacagctgaaactcattcatcatttgtggatcaaacaattcctaaaaaccctttcagccctgaagataaaaattctggcctttgagtcagggtcttcactctgtacttctaaccttggctccggggtattgccgaaaccagtccaggcacgtcacaaatgtctgacttctcccagaggcttcagaagcacaatgagcagcagaggagagccatggagccaagcacagtctcatttaacctccccaaaagcttgggaagtgggtggtgttatagccccattttacagatgagaaaaactgaggcttatttaagcagctcacctaaagtcacatattgattgtgctgagctgagattgtaccctaatctgccttcaaatccatgtttttacccattgcatgtgattatggaacctgggaccgaggagcaggaggagaacattctaaattctgctcccatcttgtctttacatctcaggtcacttttagcaaagacagacccggacacttgccattaatactacaggcttccttcctcctacccccttcccccaatcttattcatctcacctctccagtaggtcgtggactcatgcattttataattaaagaaggccaaggctcaggggttaagtgacttactggaggttatcagagaggaagttgccaaacccaggctaggaactgaatggttggtttaaatccacccctctggcaggagactggggaatacacatgagccgtgcagacagcagagggcagtcctgggggtgggggcgccagagggtttccggtacttttcagggcaattgaagttccggtcactactcccccccagagcaataagccacatccggcgacgtgtggcaccccaccctggctgctacagatggggctggatgcagaagagaactccagctggtccttagggacacggcggccttggcgctgaaggccactcgctcccaccttgtcctcacggtccagttttcccaggaatcccttagatgctaagatggggattcctggaaatactgttcttgaggtcatggtttcacagctggatttgcctccttcccaccccacagttgccccccaatggggcctcggctggctcacaggatgagggttcaagaagaaggctgtccctggaggtaagagggcttatgaaccatgttccaaacctttgcgttgcttttctttccatcgtgtctatttcataacatccctgtgaggctggatgtgggaacttcagcactgccgtactcttgggaaatttgtccaaggccacccggctgagcagcggttgaaccaggacaccatcaggcatgcgtttcttgtctccaccacaccctcaacccacttcccaacgcgccttgcgacaggggctgcggtattgcatccacatgactgataaactagtaaacacacatgaattcattttaaaagtgtattcaatcagttaggtaaactaaaaaccttaagtcttcgttcgatttggaatgcagccagagaacaaatggaaaatttttcaaggtagagaagatgaaaactcagaacgccctcttgtggcatctctacccaccctaggaacactatggctcttcccctacacatggtgattgctaaccttgctacaagacgttgagaagcttgggccgagtcgg

SEQ ID NO: 78131 - DNA, 2207 bp, Homo sapiens
ccactgcactccagcatgggcgacagagcgagactccgtctcaaacagcaacaacaactgaatggctgtaatacattaatgtatacagatgaattgagaagtcttctagtgaaatggctcagatctttgttcttggtccagtcctgttcagtttttgatcagtgccttgaatatcattgatgactcattaaatttataaagagtgcagaggcctcctcagagaatggatgatagaaatgcattgatgagagaagttttatctatctatctgtctatctatctatctatctgtctctatctaagaagtcataaaggctgagtctaataagataaaattttcagtccattcttttggtccaaaaaggcttacattctcaggtatagcttcaacatcatatatgaatattactaagaatcttagtagataagctaaagtcagtatgagtaaccagtctgatatagtttgcaagaacactcttcatggactgcaccaaaaaaacctatggtagcaagagacagtttttattagaagtactgtctgttataccacatatggagtcttaaattagttttgggtgtcattttgaggcctagagtcatagaagagtgattaggagcttgtggggtataaaaataacttgagaattggctgaaagcaactagggaagatgggggtagtagtatgtgtaaacatttgaggcagtagagatgtgggacccaaatactgttccccttttactcaaattctgagatgagttgacatgttctgtgtagggctagagagtagaaaaatggccagtaggtggtagccacagagaagcagtgcgtacaaacaagtaagtatgcaaaatttgtacatacggtttcaggaataactagaatacccataaaatatccacctgccttaaaaactagaacatcattgataacttggaagcccttgcatacctctccatgatctcatttgtcttcacagctatataaatctcattgtatgattataccataatttattcatcctgttgttaaaggatatttgggtttccagtttttctttttttactaccaaagcactacattattaatattcttgtatatgtcctgatatgtaagtgcaaaagtttcttttacagcaatggctcttgaagagtggttcccagaccagcagcatcagcatcccttggaacttctttgaaatgcaaattctcaagccccctacccagacttactgaattcaaaactatgtgggaggagcccagcaatctgtgtttcgcaaaccctccaggtgattctgatgcacagtaaaatttgagaaccactgtttaagagtattgacatagaatggaattgctggatcatagagtatatacatgttcaacttttttgagaagcactaaacatttccaaagtgcttatattagtttatgtctctactatcaatagatgagtcaccccaatgctccccatcctcttctgtgcttggtattatcttttaggtattgcaaatacaggagatttgagtattatttccttgtggccttaatttgcatttctgattattaatgagcttgagcatcttttcatatatttagaagccactaatattttctctcggtaaaatgcctattcgagtctttgcacactgctgtattggatgtcaaattgatttatatattccctgtactaatcgtttgtctacatacagttttatcctgtttttttttttattctattgggtcttttgctgaacagaagttcttaatttcaatgtcattgaatttatccatcttttatgataatgctttttgtgttttaagaggttcttagctctcctaaagtcataaggacattttccctctactgctttatgaagttattttgtccttttcttacagtatgactttattttatgttatgtacggatataatttttttcataatgagtaaatagcccagcaccttttattaaagaatcaatcctttccctactgatctttaaaaccaacagcaagagcccacgacgcgaaacaacacgctcgcgccccccgcgcccgcgagaacgggtgccaaaaccacagtctggggcgcgggggcaatagcgcgagcaaccgccaacgggcaccaaaaaacacggacacaacagggggggcgttgccacaaaaaaaccgcgcggaacggcgcttggaaaaccaagaggcgcggccacg

SEQ ID NO: 78132 - DNA, 1608 bp, Homo sapiens
ccactgcactccagcatgggcgacagagcgagactccgtctcaaacagcaacaacaactgaatggctgtaatacattaatgtatacagatgaattgagaagtcttctagtgaaatggctcagatctttgttcttggtccagtcctgttcagtttttgatcagtgccttgaatatcattgatgactcattaaatttataaagagtgcagaggcctcctcagagaatggatgatagaaatgcattgatgagagaagttttatctatctatctgtctatctatctatctatctgtctctatctaagaagtcataaaggctgagtctaataagataaaattttcagtccattcttttggtccaaaaaggcttacattctcaggtatagcttcaacatcatatatgaatattactaagaatcttagtagataagctaaagtcagtatgagtaaccagtctgatatagtttgcaagaacactcttcatggactgcaccaaaaaaacctatggtagcaagagacagtttttattagaagtactgtctgttataccacatatggagtcttaaattagttttgggtgtcattttgaggcctagagtcatagaagagtgattaggagcttgtggggtataaaaataacttgagaattggctgaaagcaactagggaagatgggggtagtagtatgtgtaaacatttgaggcagtagagatgtgggacccaaatactgttccccttttactcaaattctgagatgagttgacatgttctgtgtagggctagagagtagaaaaatggccagtaggtggtagccacagagaagcagtgcgtacaaacaagtaagtatgcaaaatttgtacatacggtttcaggaataactagaatacccataaaatatccacctgccttaaaaactagaacatcattgataacttggaagcccttgcatacctctccatgatctcatttgtcttcacagctatataaatctcattgtatgattataccataatttattcatcctgttgttaaaggatatttgggtttccagtttttctttttttactaccaaagcactacattattaatattcttgtatatgtcctgatatgtaagtgcaaaagtttcttttacagcaatggctcttgaagagtggttcccagaccagcagcatcagcatcccttggaacttctttgaaatgcaaattctcaagccccctacccagacttactgaattcaaaactatgtgggaggagcccagcaatctgtgtttcgcaaaccctccagaatgtcataaaattggaatcagagtatgtaccttttcaggttgactccttactccatggattacctttcaaaatggacatttaaaaataattttagaatgatactaaagctacaatagagggtaagtgtatttctagataatcaccagtgatgagaagttttctttgcaatgtacatggtagcaagtggtagaaggatctgatccagtgtacaacatttcatttagatgtcatgtctctccatccgagtctgtgaaagtttctgtcttttcttgttttttttatgaccttgacagtccagaggagtattgtgtagaatgatcc

SEQ ID NO: 78133 - DNA, 2249 bp, Homo sapiens
ccactgcactccagcatgggcgacagagcgagactccgtctcaaacagcaacaacaactgaatggctgtaatacattaatgtatacagatgaattgagaagtcttctagtgaaatggctcagatctttgttcttggtccagtcctgttcagtttttgatcagtgccttgaatatcattgatgactcattaaatttataaagagtgcagaggcctcctcagagaatggatgatagaaatgcattgatgagagaagttttatctatctatctgtctatctatctatctatctgtctctatctaagaagtcataaaggctgagtctaataagataaaattttcagtccattcttttggtccaaaaaggcttacattctcaggtatagcttcaacatcatatatgaatattactaagaatcttagtagataagctaaagtcagtatgagtaaccagtctgatatagtttgcaagaacactcttcatggactgcaccaaaaaaacctatggtagcaagagacagtttttattagaagtactgtctgttataccacatatggagtcttaaattagttttgggtgtcattttgaggcctagagtcatagaagagtgattaggagcttgtggggtataaaaataacttgagaattggctgaaagcaactagggaagatgggggtagtagtatgtgtaaacatttgaggcagtagagatgtgggacccaaatactgttccccttttactcaaattctgagatgagttgacatgttctgtgtagggctagagagtagaaaaatggccagtaggtggtagccacagagaagcagtgcgtacaaacaagtaagtatgcaaaatttgtacatacggtttcaggaataactagaatacccataaaatatccacctgccttaaaaactagaacatcattgataacttggaagcccttgcatacctctccatgatctcatttgtcttcacagctatataaatctcattgtatgattataccataatttattcatcctgttgttaaaggatatttgggtttccagtttttctttttttactaccaaagcactacattattaatattcttgtatatgtcctgatatgtaagtgcaaaagtttcttttacagcaatggctcttgaagagtggttcccagaccagcagcatcagcatcccttggaacttctttgaaatgcaaattctcaagccccctacccagacttactgaattcaaaactatgtgggaggagcccagcaatctgtgtttcgcaaaccctccaggtgattctgatgcacagtaaaatttgagaaccactgtttaagagtattgacatagaatggaattgctggatcatagagtatatacatgttcaacttttttgagaagcactaaacatttccaaagtgcttatattagtttatgtctctactatcaatagatgagtcaccccaatgctccccatcctcttctgtgcttggtattatcttttaggtattgcaaatacaggagatttgagtattatttccttgtggccttaatttgcatttctgattattaatgagcttgagcatcttttcatatatttagaagccactaatattttctctcggtaaaatgcctattcgagtctttgcacactgctgtattggatgtcaaattgatttatatattccctgtactaatcgtttgtctacatacagttttatcctgtttttttttttattctattgggtcttttgctgaacagaagttcttaatttcaatgtcattgaatttatccatcttttatgataatgctttttgtgttttaagaggttcttagctctcctaaagtcataaggacattttccctctactgctttatgaagttattttgtccttttcttacagtatgactttattttatgttatgtacggatataatttttttcataatgagtaaatagcccagcaccttttattaaagaatcaatcctttccctactgatctttaaagcccagtctgtctttttctttttttgaaattgtctagctttttaatttttaccaaccagatgattataaaatatcacatagtaggcataaattacatttctttgtccattcctgtttctttttctatgaaatctctgttttcttttgtccaatttttattgggttgtcttcttattgattccttacatgttctggatactaatccattataaattatgtttttcaaatatatttatccaaatcgcaaat

SEQ ID NO: 78134 - DNA, 2191 bp, Homo sapiens
ccactgcactccagcatgggcgacagagcgagactccgtctcaaacagcaacaacaactgaatggctgtaatacattaatgtatacagatgaattgagaagtcttctagtgaaatggctcagatctttgttcttggtccagtcctgttcagtttttgatcagtgccttgaatatcattgatgactcattaaatttataaagagtgcagaggcctcctcagagaatggatgatagaaatgcattgatgagagaagttttatctatctatctgtctatctatctatctatctgtctctatctaagaagtcataaaggctgagtctaataagataaaattttcagtccattcttttggtccaaaaaggcttacattctcaggtatagcttcaacatcatatatgaatattactaagaatcttagtagataagctaaagtcagtatgagtaaccagtctgatatagtttgcaagaacactcttcatggactgcaccaaaaaaacctatggtagcaagagacagtttttattagaagtactgtctgttataccacatatggagtcttaaattagttttgggtgtcattttgaggcctagagtcatagaagagtgattaggagcttgtggggtataaaaataacttgagaattggctgaaagcaactagggaagatgggggtagtagtatgtgtaaacatttgaggcagtagagatgtgggacccaaatactgttccccttttactcaaattctgagatgagttgacatgttctgtgtagggctagagagtagaaaaatggccagtaggtggtagccacagagaagcagtgcgtacaaacaagtaagtatgcaaaatttgtacatacggtttcaggaataactagaatacccataaaatatccacctgccttaaaaactagaacatcattgataacttggaagcccttgcatacctctccatgatctcatttgtcttcacagctatataaatctcattgtatgattataccataatttattcatcctgttgttaaaggatatttgggtttccagtttttctttttttactaccaaagcactacattattaatattcttgtatatgtcctgatatgtaagtgcaaaagtttcttttacagcaatggctcttgaagagtggttcccagaccagcagcatcagcatcccttggaacttctttgaaatgcaaattctcaagccccctacccagacttactgaattcaaaactatgtgggaggagcccagcaatctgtgtttcgcaaaccctccaggtgattctgatgcacagtaaaatttgagaaccactgtttaagagtattgacatagaatggaattgctggatcatagagtatatacatgttcaacttttttgagaagcactaaacatttccaaagtgcttatattagtttatgtctctactatcaatagatgagtcaccccaatgctccccatcctcttctgtgcttggtattatcttttaggtattgcaaatacaggagatttgagtattatttccttgtggccttaatttgcatttctgattattaatgagcttgagcatcttttcatatatttagaagccactaatattttctctcggtaaaatgcctattcgagtctttgcacactgctgtattggatgtcaaattgtttattctattgggtcttttgctgaacagaagttcttaatttcaatgtcattgaatttatccatcttttatgataatgctttttgtgttttaagaggttcttagctctcctaaagtcataaggacattttccctctactgctttatgaagttattttgtccttttcttacagtatgactttattttatgttatgtacggatataatttttttcataatgagtaaatagcccagcaccttttattaaagaatcaatcctttccctactgatctttaaagcccagtctgtctttttctttttttgaaattgtctagctttttaatttttaccaaccagatgattataaaatatcacatagtaggcataaattacatttctttgtccattcctgtttctttttctatgaaatctctgttttcttttgtccaatttttattgggttgtcttcttattgattccttacatgttctggatactaatccattataaattatgtttttcaaatatatttatccaaatcgcaaat

SEQ ID NO: 78135 - DNA, 233 bp, Homo sapiens
gaaattgggaaagaaaaatattggggctgtctggggttgcctaccattcacttaccctgcagaggacagaaaccaaccactaactgcttttatatccaaatgtgtattatcttggagtacattatttggggtttactgaatatatgccaaattcctttctgtaattttagaataatcatccattcaattatggctattgtaataaaactccttaacatttaataaatgcaaag

SEQ ID NO: 78136 - DNA, 327 bp, Homo sapiens
tgataaccatttttctactctctatgtccatcatacattctgattttaaaacggttttcctacatttcatacataagtcactcaagtacacagaattatttttatgggataataaaatgcttaaaataatttaatttttgtctttgacaatgaacgtacctgaaaattgtggctttcactgttatcattgacgacaccagtgaagttacaaagctgctcattagtaactgaaattagattttctcttgttgaaggaattttcagtttttcagagaatgagagttgtaatctctaatgcaaaaataaaattgaactttgaaaagatct

SEQ ID NO: 78137 - DNA, 920 bp, Homo sapiens
aaactgcaccgccatcttagatcttgcagccaaattcctctgaacttttctctaaagacgtgctctggaaaaatgttgatcattttcctacatcatggaggtcttttcatgaccacctttgtctagacaatgtcctgtttttaggtgcacgtttgagggctggagtctctgacccacagtgctgcagcctgcacgtggtttgtcctgacttctttgctacttcacttttcgtaaggctctgagagtgcaggcccttgtgggtggacactgcagggtgagaggaagaagtaaactacttttttccgtttctgatgggggtgtgggtcagcagctataagcaacagggaccatggggggcctcagacttcagcacctgagaggcagtttcagtcgtattggggagatgcaggcatctgggttgctgcacatcaccagggcagggttctctcagcagccctggagtgcagagttcccatcagctcagcagtgaggggcacatggggctccagtggtgaggactcttggtccttggatgacaacactcccctgcccacttctccagccttccctgtaaccctttgccacctctaaccaatcttctgtgttacatctcttcggtttgcaatatgtagtgttcgtatatgactggacagtatctactggagttaatatctatcagagtaattatatcacaattgcaatcttctcctaagagtgaatagtgacattaaaaatttcaacattataaattatgcagaaataaaactaattatacaaaaaatacactctgaatgtcagtttttccctgagacaatctaccatttgatatacggtgattcacacttcttaatatacaacattgaattacttttccaaaagcctcttcaaattttgctgcagaattaaacttcacttgcacc

SEQ ID NO: 78138 - DNA, 687 bp, Homo sapiens
actccaaagcccccacatgttccacagcccctgtgatttctacgcaccaagtgttatagaaaggtactccttcaactgtgatgggattagagttaaaaatgaaaatttactccagccttggcaacagagcaagatcctgtctctgaaataaataaataaattgaagattttaaaatgtaaatttttttctttcttttttttttttttttttgagacggagtctcgctttgtcgcccaggctggaatgcagtggtgcgatcttggctcactgcaacctccacctcccaggttcaagcgattctcctgcctcagtctctcaagtagctgggattacaggtgcctgccaccacgcccagctaatttttttgtattcttagtagagacggggtttcaccgtattagccaggatggtctcaatctcctgacctcttgatccacccgcctcgggctcccaaagtgctgggattacaggggtgagccacggcgcccggccatgttttgttttgttttgttttgagacagagtttcgctcttgttgcccagactggagtgcaatggcacgatcttggctcaccacaacctccacctcctaagttcaagagagtctcctgcctcaccctcccgagtagctgggattacaggcatgcgccaccacgcctggctaattttgtatttttagtagagatg

SEQ ID NO: 78139 - DNA, 1085 bp, Homo sapiens
agaaaatgagtttggtgttggtataccagctgaaacaaaggaaggagtaaaaataacagaaaaaccaagcccacctgaaaaacttggagtaacaagtatatccaaagacagtgtttccctgacctggctgaagcctgaacatgatggcggaagagaattgtacactatgtcgttgaagcactagaaaaaggacagaaaaactgggttaaatgtgcagtggcaaagtcaacccatcacgttgtttccggtctgagagagaattctgaatactttttccgagtgtttgctgaaaatcaagctggcctgagtgacccgagagagcttctgcttcctgttcttattaaggagcaactagaaccacctgaaattgatatgaagaatttcccaagtcacactgtatatgttagagctggttcaaaccttaaagttgacattccaatctctggaaaaccacttcccaaagtgaccttatcaagagatggtgtcccccttaaggcaaccatgagatttaataccgaaattactgctgagaacctgaccatcaatctcaaagaaagtgttacagctgacgctgggagatatgaaatcactgctgccaactccagtggtacaaccaaagctttcattaacattgttgtgctagacaggcctggtcctccaactggccctgttgttattagtgatataactgaagaaagtgtgactctcaaatgggagccacctaagtatgacggtggaagtcaagttaccaactacattctactcaaaagagaaacaagtactgcagtgtggactgaagtgtctgcaacagttgcaagaaccatgatgaaagtcatgaaactgaccacaggagaagaataccaattccgcatcaaggcagaaaaccgctttggcatcagtgatcatatagattcagcttgtgtgactgtcaaactaccatacacaacacctggaccaccatctacaccatgggtcactaatgttactcgagaaagcatcactgtgggctggcatgaaccagtgtcaaatggaggcagtgcagtcgtaggctatcacctggaaatgaaagacagaaacagtatttt

SEQ ID NO: 78140 - DNA, 781 bp, Homo sapiens
atctccacaggcttggcgacgccatgtttcaagggcagcgcggttggttttgcggcagcgttagccaggatctgaggcaattctgggtggctgaagggggaacgatcagtgacccgcgagccgccgacttcttgttcagctgtgatgcctcgcacccagacacgctgagaatatatcagagccttgattacatagaagataatgctacagtttttcatgcctactatctctctgcggtagctaatgccaaaataaaaaactcggtggctttgggtcatttcattcttcctcctgcgtgcctgcaaaaagaaataagaagaaaaattggtagttttatttgggaacaagaccaacattttctgatagaaaagcatgatgaagtaacaccaaatgaaataaagacccttagggaaaacagtgaactagcaacagagcacaaaaaagaattatccaaaagcccagaaaagcattttataagaactccagttgtagaaaagcagatgtacttccctctacagaattacccagttaacaacatggtaacaggttatatatcaattgatgccatgaagaaattccttggggagctacatgacttcattcctggaacctcaggatatttggcatatcatgttcaaaatgaaattaatatgtctgctataaaaaacaaattgaagaggaaatagtaaattaaattgtaaataccttggcatttattttctataaaatattatacagatgtgcatatcataaaatgctcccttttggtactgggggatag

SEQ ID NO: 78141 - DNA, 967 bp, Homo sapiens
aagactggtatcaacgcagagtgcccattacggccgggagggcatgaatatcagacgctagggggacagccactgtgttgtctgctaccctcatcctggtcactgcttctgctataacagccctaggccaggaatatgaacaagccgctgctttggatctctgtcctcaccagcctcctggaagcctttgctcacacagacctcagtgggaaggtgtttgtatttcctagagaatctgttactgatcatgtaaacttgatcacaccgctggagaagcctctacagaactttaccttgtgttttcgagcctatagtgatctctctcgtgcctacagcctcttctcctacaatacccaaggcagggataatgagctactagtttataaagaaagagttggagagtatagtctatacattggaagacacaaagttacatccaaagttatcgaaaagttcccggctccagtgcacatctgtgtgagctgggagtcctcatcaggtattgctgaattttggatcaatgggacacctttggtgaaaaagggtctgcgacagggttactttgtggaagctcagcccaagattgtcctggggcaggaacaggattcctatgggggcaagtttgataggagccagtcctttgtgggagagattggggatttgtacatgtgggactctgtgctgcccccagaaaatatcctgtctgcctatcagggtacccctctccctgccaatatcctggactggcaggctctgaactatgaaatcagaggatatgtcatcatcaaacccttggtgtgggtctgaggtcttgactcaacgagagcacttgaaaatgaaatgactgtctaagagatctggtcaaagcaactggatactagatcttacatctgcagctctttcttctttgaatttcctatctgtatgtctgcctaattaaaaaaatatatattgtattatgctacct

SEQ ID NO: 78142 - DNA, 1002 bp, Homo sapiens
  misc_feature (112)..(112): n is a, c, g, or t
  misc_feature (186)..(186): n is a, c, g, or t
  misc_feature (216)..(216): n is a, c, g, or t
agcattggttaggagagcggaccgcagaaagtaagtgaatatggtcgatagctgtatcctgaggtagacatgcctgtgcgtcgatgaatctagatgccttgaggatccatcnacactatgtaacaaagaccgccctggtgtgtggaactcgtagtggttccttgaaacagaaatcccatgataggnaccgttctggagcgatcaatagaactgtcnatctgagtcaagcgatggtagtgccaatatgtcgcagagtagaatactgataattagcagtccactcgtcacagttgatcacaccgctggagaagcctctacagaactttaccttgtgttttcgagcctatagtgatctctctcgtgcctacagcctcttctcctacaatacccaaggcagggataatgagctactagtttataaagaaagagttggagagtatagtctatacattggaagacacaaagttacatccaaagttatcgaaaagttcccggctccagtgcacatctgtgtgagctgggagtcctcatcaggtattgctgaattttggatcaatgggacacctttggtgaaaaagggtctgcgacagggttactttgtggaagctcagcccaagattgtcctggggcaggaacaggattcctatgggggcaagtttgataggagccagtcctttgtgggagagattggggatttgtacatgtgggactctgtgctgcccccagaaaatatcctgtctgcctatcagggtacccctctccctgccaatatcctggactggcaggctctgaactatgaaatcagaggatatgtcatcatcaaacccttggtgtgggtctgaggtcttgactcaacgagagcacttgaaaatgaaatgactgtctaagagatctggtcaaagcaactggatactagatcttacatctgcagctctttcttctttgaatttcctatctgtatgtctgcctaattaaaaaaatatatattgtattatgctacct

SEQ ID NO: 78143 - DNA, 755 bp, Homo sapiens
aagactggtatcaacgcagagtgcccattacggccgggagggcatgaatatcagacgctagggggacagccactgtgttgtctgctaccctcatcctggtcactgcttctgctataacagccctaggccaggaatatgaacaagccgctgctttggatctctgtcctcaccagcctcctggaagcctttgctcacacagacctcagtgggaaggtgtttgtatttcctagagaatctgttactgatcatgtaaacttgatcacaccgctggagaagctcctcatcaggtattgctgaattttggatcaatgggacacctttggtgaaaaagggtctgcgacagggttactttgtggaagctcagcccaagattgtcctggggcaggaacaggattcctatgggggcaagtttgataggagccagtcctttgtgggagagattggggatttgtacatgtgggactctgtgctgcccccagaaaatatcctgtctgcctatcagggtacccctctccctgccaatatcctggactggcaggctctgaactatgaaatcagaggatatgtcatcatcaaacccttggtgtgggtctgaggtcttgactcaacgagagcacttgaaaatgaaatgactgtctaagagatctggtcaaagcaactggatactagatcttacatctgcagctctttcttctttgaatttcctatctgtatgtctgcctaattaaaaaaatatatattgtattatgctacct

SEQ ID NO: 78144 - DNA, 1477 bp, Homo sapiens
aagactggtatcaacgcagagtgcccattacggccgggagggcatgaatatcagacgctagggggacagccactgtgttgtctgctaccctcatcctggtcactgcttctgctataacagccctaggccaggaatatgaacaagccgctgctttggatctctgtcctcaccagcctcctggaagcctttgctcacacagacctcagtgggaaggtgtttgtatttcctagagaatctgttactgatcatgtaaacttgatcacaccgctggagaagcctctacagaactttaccttgtgttttcgagcctatagtgatctctctcgtgcctacagcctcttctcctacaatacccaaggcagggataatgagctactagtttataaagaaagagttggagagtatagtctatacattggaagacacaaagttacatccaaagttatcgaaaagttcccggctccagtgcacatctgtgtgagctgggagtcctcatcaggtattgctgaattttggatcaatgggacacctttggcaggaacaggattcctatgggggcaagtttgataggagccagtcctttgtgggagagattggggatttgtacatgtgggactctgtgctgcccccagaaaatatcctgtctgcctatcagggtacccctctccctgccaatatcctggactggcaggctctgaactatgaaatcagaggatatgtcatcatcaaacccttggtgtgggtctgaggtcttgactcaacgagagcacttgaaaatgaaatgactgtctaagagatctggtcaaagcaactggatactagatcttacatctgcagctctttcttctttgaatttcctatctgtatgtctgcctaattaaaaaaatatatattgtattatgctacctgcatttgtttagtgcttgtcatagtcccatatctttatcttatgtctactacttatctatctactaattggtgtttcattggtaattggtgtttcattatcctgaaaactccaattgccaagtacggggaggaaaacctgtaagtaactagaaagatatatcgcaaagccagagcactcaatgagcacaacagtggcaatacttaaaagctactaacaatcattttaatgacgattcaaaatatgtgtggaattgtaatcacaattctcctatttgtttttccagctacaaatcgatcaaaaaggggtctgaggttgcatcagggagacaactgtaatgatataagtaagcaatagttgagaacctgacagcaagtaataagacaggaagaataaaactagaagaagtcagaatgaaaaccaaaaaagtatgagactgggatcattttgtatgaagacaaacataactttatgtctcaaaaacctcagtaggactgtacaatgcttgattttcataatgttctcttgatgtcatcaaaaaatattatactctgaatattgctcacatga

SEQ ID NO: 78145 - DNA, 640 bp, Homo sapiens
aagactggtatcaacgcagagtgcccattacggccgggagggcatgaatatcagacgctagggggacagccactgtgttgtctgctaccctcatcctggtcactgcttctgctataacagccctaggccaggaatatgaacaagccgctgctttggatctcttcctcatcaggtattgctgaattttggatcaatgggacacctttggtgaaaaagggtctgcgacagggttactttgtggaagctcagcccaagattgtcctggggcaggaacaggattcctatgggggcaagtttgataggagccagtcctttgtgggagagattggggatttgtacatgtgggactctgtgctgcccccagaaaatatcctgtctgcctatcagggtacccctctccctgccaatatcctggactggcaggctctgaactatgaaatcagaggatatgtcatcatcaaacccttggtgtgggtctgaggtcttgactcaacgagagcacttgaaaatgaaatgactgtctaagagatctggtcaaagcaactggatactagatcttacatctgcagctctttcttctttgaatttcctatctgtatgtctgcctaattaaaaaaatatatattgtattatgctacct

SEQ ID NO: 78146 - DNA, 1536 bp, Homo sapiens
aagactggtatcaacgcagagtgcccattacggccgggagggcatgaatatcagacgctagggggacagccactgtgttgtctgctaccctcatcctggtcactgcttctgctataacagccctaggccaggaatatgaacaagccgctgctttggatctctgtcctcaccagcctcctggaagcctttgctcacacagacctcagtgggaaggtgtttgtatttcctagagaatctgttactgatcatgtaaacttgatcacaccgctggagaagcctctacagaactttaccttgtgttttcgagcctatagtgatctctctcgtgcctacagcctcttctcctacaatacccaaggcagggataatgagctactagtttataaagaaagagttggagagtatagtctatacattggaagacacaaagttacatccaaagttatcgaaaagttcccggctccagtgcacatctgtgtgagctgggagtcctcatcaggtattgctgaattttggatcaatgggacacctttggtgaaaaagggtctgcgacagggttactttgtggaagctcagcccaagattgtcctggggcaggaacaggattcctatgggggcaagtttgataggagccagtcctttgtgggagagattggggatttgtacatgtgggactctgtgctgcccccagaaaatatcctgtctgcctatcagggtacccctctccctgccaatatcctggactggcaggctctgaactatgaaatcagaggatatgtcatcatcaaacccttggtgtgggtctgaggtcttgactcaacgagagcacttgaaaatgaaatgactgtctaagagatctggtcaaagcaactggatactagatcttacatctgcagctctttcttctttgaatttcctatctgtatgtctgcctaattaaaaaaatatatattgtattatgctacctgcatttgtttagtgcttgtcatagtcccatatctttatcttatgtctactacttatctatctactaattggtgtttcattggtaattggtgtttcattatcctgaaaactccaattgccaagtacggggaggaaaacctgtaagtaactagaaagatatatcgcaaagccagagcactcaatgagcacaacagtggcaatacttaaaagctactaacaatcattttaatgacgattcaaaatatgtgtggaattgtaatcacaattctcctatttgtttttccagctacaaatcgatcaaaaaggggtctgaggttgcatcagggagacaactgtaatgatataagtaagcaatagttgagaacctgacagcaagtaataagacaggaagaataaaactagaagaagtcagaatgaaaaccaaaaaagtatgagactgggatcattttgtatgaagacaaacataactttatgtctcaaaaacctcagtaggactgtacaatgcttgattttcataatgttctcttgatgtcatcaaaaaatattatactctgaatattgctcacatga

SEQ ID NO: 78147 - DNA, 1418 bp, Homo sapiens
aagactggtatcaacgcagagtgcccattacggccgggagggcatgaatatcagacgctagggggacagccactgtgttgtctgctaccctcatcctggtcactgcttctgctataacagccctaggccaggaatatgaacaagccgctgctttggatctctgtcctcaccagcctcctggaagcctttgctcacacagacctcagtgggaaggtgtttgtatttcctagagaatctgttactgatcatgtaaacttgatcacaccgctggagaagcctctacagaactttaccttgtgttttcgagcctatagtgatctctctcgtgcctacagcctcttctcctacaatacccaaggcagggataatgagctactagtttataaagaaagagttggagagtatagtctatacattggaagacacaaagttacatccaaagttatcgaaaagttcccggctccagtgcacatctgtgtgagctgggagtcctcatcaggtattgctgaattttggatcaatgggacacctttattggggatttgtacatgtgggactctgtgctgcccccagaaaatatcctgtctgcctatcagggtacccctctccctgccaatatcctggactggcaggctctgaactatgaaatcagaggatatgtcatcatcaaacccttggtgtgggtctgaggtcttgactcaacgagagcacttgaaaatgaaatgactgtctaagagatctggtcaaagcaactggatactagatcttacatctgcagctctttcttctttgaatttcctatctgtatgtctgcctaattaaaaaaatatatattgtattatgctacctgcatttgtttagtgcttgtcatagtcccatatctttatcttatgtctactacttatctatctactaattggtgtttcattggtaattggtgtttcattatcctgaaaactccaattgccaagtacggggaggaaaacctgtaagtaactagaaagatatatcgcaaagccagagcactcaatgagcacaacagtggcaatacttaaaagctactaacaatcattttaatgacgattcaaaatatgtgtggaattgtaatcacaattctcctatttgtttttccagctacaaatcgatcaaaaaggggtctgaggttgcatcagggagacaactgtaatgatataagtaagcaatagttgagaacctgacagcaagtaataagacaggaagaataaaactagaagaagtcagaatgaaaaccaaaaaagtatgagactgggatcattttgtatgaagacaaacataactttatgtctcaaaaacctcagtaggactgtacaatgcttgattttcataatgttctcttgatgtcatcaaaaaatattatactctgaatattgctcacatga

SEQ ID NO: 78148 - DNA, 706 bp, Homo sapiens
aggcaattggtcaaccttattgtcctgctgccagcacagtgggagtaggtggtagcgctggagatgaggggagatggaaaaggtgagacttggaaggacaatcctggggtacggagggaaaacaaactgctctgattcctgaagcccaaacaaacataactttccatcttctaacaactagaaagcagaagtctcctgagagttcaactctgatttgatatcagtctctcttatgcctaatcagctgtcctgattatgtgactcaggactctgagaaatatcctcaggaaaacctaaatatgttcatgagaaataacatttaagcatgacagtgtgcagaagaactagacaggtcacaatggaatgtgatgaggcaaaagagaaaaagaagtagatagacctgcctatgcctttcttagaagatgccaggaaggtggtcagattctttcctctgtcagaaaagtagctgtatgtgtcaaagtttacagattatccatccactctctctttactagggatttaacttttactatctgtaccattcctgtactctgacattacctggttatgtctgatatacatattttacttttcacgtgcttctggtcttacctagctaaactgtaaactctttgagagatgcaggacaatgtgatttgtctttggttttaaactccggccagacttgctttttttaaaaaaaaaa

SEQ ID NO: 78149 - DNA, 109 bp, Homo sapiens
gtggttggctctttcccgtagtctcaacatttcatttactttatatttacccttattcttactttatactatttcttaagactttactcggcaccacctattagccaac

SEQ ID NO: 78150 - DNA, 435 bp, Homo sapiens
ccaccccacctgatattggcattcactgaatgttgttggcaaacacagaataccatgctttaggtactaggaatacgaagaataagacaagaactttgcccaggagagttcagtctaaataggggaataatcaatcatgtctacacactaagaaacgattctacagttgaactctgactgcctgtatgcctcatgcatgcttcctagagaagccatttctgctgggtccccaagtatgaataaagaatttaggaggtaggggatggggtgagaagagattctctgtataagcaaaggcactgaacaaagaccggagaacatgattctaggaaggaccaactacaagcgttacaactacagcagcattccccaggagatactaattactaatatgtattatagtaataaagacagtaatatttttcttctaaattt

SEQ ID NO: 78151 - DNA, 378 bp, Homo sapiens
cccttacttttttttggtagctcatagcacaaggttaaatcccttaaattctggttattagattaaatctttatatgatcatacaagccctgagaggtagacctctactagctttgaatgggccaagtaagattctacccccaattatttgtactttattgacattcatagcaatcctgtgagataggcaagtcaggttatttgacagacgagaaaaagtgagccaaaaaaagaattaagtgggtcaggcatggtggcttatgcctgtaatcatagcactttgggaggctgaagtggaaggattgcttgaggctaggagttcaagaccaacctggccaacatagtgagctcccatctctattgtaaatatttaatact

SEQ ID NO: 78152 - DNA, 869 bp, Homo sapiens
gggcagatcacaaggtcaagagattgagaccatcctggccaatatgacgaaaccctgtctctactaaaaatacaaaaattagctgggtgtggtggtgtgcacctgtaatcccagctactcgggaggctgaggcaagagaatcacttgaacccggaaggcggagcttgcagtgagctgaggtcgcgccactggactgcagcctgggtgacagtgagactccgtcttaaaaaaaaaaaattacagttttcataagccatttctcccaagttacatgttgtgtggcatttcatgtaggtttgtgctctgtgtgtgttattagattgtcttccagtcagaattcctggctgttaaactatttcatcagcaggagttacatccctatgttgtaagggtgatgtccaaaagatacagtaatttttaaaaataatgattaaaggactttgttagaaacaaagagctattttgtatttagtatttgctgtgaagtaggtgataagtcgaattttttagcttctctctgagaaaaatgaagtgtaagtgaggcgttacttttcgacattttctacatgtagtttccttttgtctattttttaactttttttcctctattacactgaaatacatatttaatctgataaattctagtcaagtgcaaatacaaaataacaaaaagaattaaaatcatccatggctctaaccacttaggatacctcctattatagtctatgtacttccagtcagctctcattttctctcactttttcttgctccatatctctgtcattttatttttaagcaacatattataaaatgctattttctaaaactttttaaaaatttaaacataaataaaattttatttaacttgt

SEQ ID NO: 78153 - DNA, 848 bp, Homo sapiens
  misc_feature (741)..(741): n is a, c, g, or t
  misc_feature (743)..(743): n is a, c, g, or t
gggcagatcacaaggtcaagagattgagaccatcctggccaatatgacgaaaccctgtctctactaaaaatacaaaaattagctgggtgtggtggtgtgcacctgtaatcccagctactcgggaggctgaggcaagagaatcacttgaacccggaaggcggagcttgcagtgagctgaggtcgcgccactggactgcagcctgggtgacagtgagactccgtcttaaaaaaaaaaaattacagttttcataagccatttctcccaagttacatgttgtgtggcatttcatgtaggtttgtgctctgtgtgtgttattagattgtcttccagtcagaattcctggctgttaaactatttcatcagcaggagttacatccctatgttgtaagggtgatgtccaaaagatacagtaatttttaaaaataatgattaaaggactttgttagaaacaaagagctattttgtatttagtatttgctgtgaagtaggtgataagtcgaattttttagcttctctctgagaaaaatgaagtgtaagtgaggcgttacttttcgacattttctacatgtagtttccttttgtctattttttaactttttttcctctattacactgaaatacatatttaatctgataaattctagtcaagtgcaaatacaaaataacaaaaagaattaaaatcatccatggctctaaccacttaggatacctccttataggctttgcccttcaaaacgttngnctcaatttttttaacttttttttgtccttttttgggattttttttaaacaccttttttaaaagggttttttaaaatttttaaaattaaaccggcaatttcgtttt

SEQ ID NO: 78154 - DNA, 532 bp, Homo sapiens
gtctacctcagccttcccaaatgctgggattacaggcatgagccactgcacctggcaagaaatcccctcttattattaaaattaatgaggagaaattaaaatccaaaaattgattactcttgccaattaaagttcaaaatcaaataacttaccaatgtgagttaaaggttaaggaatctaaagtccagaaatcatccaaatttatttttcttgtctatctcagcaggagaattttttaaacagctgtgtcctaggccaatgctgctcagactttagtgggcataaaaatcacctggagggcagtcggccagctctcggggtgctgagccaggcgggctaggcgaggcgcgggctggccccgcccctctggccggccccgcccctcaaggccggctagtccccttcccagagacttggctaggcgccggcgctgcggcgccagcagccctgtggtggcgacgacgatggaccaggacccagtgggccctgtggaacgaggagaagccgtcgcagcctcgggagctgcggccgc

SEQ ID NO: 78155 - DNA, 454 bp, Homo sapiens
atgagaacagacaatacaatatatttgtactgtttttaagctactgaaactttggcaatttgttacagcagcaatgggaagctaatacagatcccttttagcaataacttctgttgaagctatgaacatataatgtttgaagggtcactagaaaattctaaaatcagatagtgatatgcaaaaaaagatgactactaaccatgatttgagtgtgaaatgtagggcttactgaagataaagtttgtaaaagcagaaaccagtaagaagggaaaataagacaccagaatccatgaaggaaaaaaggatagaaaaaacactgtgaaggaagaagcatactttagcattttcttatgcttgaagtatgtgaaacagctgtatacatttttttctctttccttgattggcagaatggagaatgttaacagatacttgtttagaaggaacagaagcttag

SEQ ID NO: 78156 - DNA, 792 bp, Homo sapiens
aggaaattattacaagattgttaactagaatatagacctaatttccaccattttacatgcatttttatgtgtgtgtgtttttctgtgtggtcttatcccatgtatagatttgtttaacaaccaccacagtcatgatataaaactgttcaataggacctcccttgtgcttccccttcataatcatacccaccctgccccatccttgctccctggcaatgattaatctgttctgtatctctaaaattttctaatttcgagaatgttacataaatagagtcctatacaatgtagtcttttgggattgacgttcttcaccaaatgtaatccttttgagtcatatctgggttgttgtgtgtatcagtaatttgttccaactgagtagtattcccttgggtggatagaccagaatttctttatccaattactagttgaaggacatttgggttgtttcctcgttttgcaattacagataaagttgctgtgaacatcagcatgcaggtttttgtgtgactataagttttcatttctctgggataaatgcccaggaatgcacttgcagggtcatatgataagtacatgtttagtctcataggaaattgccagaatgatttccagagccttaccattttatattcctaacatcattgtatgagagatccattttttctacatccttgtgaacatttggtattactgttttttattttagccattcttataggtgtacaatgatagcttagcttattgtggttttaatttgcatttccttagtgactaatgatgttgaacatg

SEQ ID NO: 78157 - DNA, 577 bp, Homo sapiens
aaggggtggaaaaatatttcatgtgcaaatggagactaaaagcgagcaggaatagccattcttttatcagacaaaacagactttagagcaacagcacttaaaaaagacaaagagggacattatataatgatgaaaaagccttgtccaacgggaaaatatcataatcctaaatgtatatgcacctaacactgaagctctgaaatttataaaacaattactactagacctaagaaatgatatagacggcaacacagtaatagcgggggactttgatactccactgacagcactagacaggtcctcaagacagaaagtcaacaaagaaggaatgaacttaaactataccctacaacaaatggacttaacaggtatttacagagcattctacccaacaactgcagaatatacattctattcatcagcacatggaacattctctaagatggaccatatgataggccacaaaacaagtctcaggaaatttaaaaaaatctaaatttggagcttgcagtgagccgagatccggccactgcactccagcctgggcgacagagccgaactccgtctcaaaaaaaaa

SEQ ID NO: 78158 - DNA, 428 bp, Homo sapiens
ctcagtccctttcagtgctgctgggccttaaccaaagtattctcctgaaatatttttccctttaatgtctggaaaataacatgtattttttttttaaaggctgcctcctctgagaagccttccagggtcaccttaggtaaaactgattgtcagtctctctttttgccagccttacctatgccctgtatgtgctactgacatcacaagtcacttcatatttcatctattttaaaatgcacttttattcacattttttaaaaatccctgaaatcagccagatgtggtggtacaggtttgtagttgcagctactgaggaggctgaggcaggaggatcacttgagcccagggctcgaggctgtagtgttatgatcgcacctgtgaatggctaccacactgcagccttggcaacacaggcagaccttgtctca

SEQ ID NO: 78159 - DNA, 424 bp, Homo sapiens
gttcctattaaatttgaaaaatgttacatgtatacatatggctatacatttcttaaatattgattaatttgtattgccattatacttttaagattgcaggctatgtaaaaatgccagtttatttcacataaatgtgtggtcaaggtaaaattggatagaatcacagaaaaattgatttcatgaactatttttaaaaaactaaagacatgcaagtttctcaataaggttttgggaaaatacacgctttccaggattttctttaatcttttgggaagtaaatgctagctaataggtagatcttaggtgattccaaaaacattccaagttaaaatgttggaaaaaagtctttctgggtccattctctgctcaaactaaataatctcagagcacatgaattgttttgaaaatgtgaataaagggcaaa

SEQ ID NO: 78160 - DNA, 765 bp, Homo sapiens
acactggttagttaacagagctagtgctgaagtgaaatctgccttaccctggtatattattttcattacaccataattctctattttaagacttattacattcaaaaatcaacatgaaaataaatattacaataaaccactgacagtttccaaatagctagatgtttggcatttagtcattaaaattgatatttttctgcttttcagttgtagtataactatttgatattttatatgttgctttagcagtcatttggctaacaatggaagaaaatacggcctgtaagcatgttttacaagtgaaataaagtgccctgaaaaattgaattagaaatttagaacatttcttgttctaaaggtgttcaccactgtttctccttggactgactagactggccatttgaataagcatagaaagaatgatgaagatttaaaaattaccattttgcaatctccagagtaaaaagtgactcaaataagaatgatcaatggatgttaaatctgaggaggaaggcagtatgggaataaggtatttacatagcatcaaaatgtcatccataaattacaaaagaaaaaaaggaacttttcaatggctaaattggataacaccttaactaagtcatcaaaatcaacatcaccaataatggacagatggagcatgtgcctctggacatgatgctctgaaaaagagacagcgtcactcaggtaataatcatgccaaaaatgcacaacctgagtctaattatgagaaaacagacaaaccca

SEQ ID NO: 78161 - DNA, 460 bp, Homo sapiens
cagcctacaactccagggctcaagcatttctcctgtcttagcctcctaagtagctatacttaggactacaggcttgtgcagccacgcccagctatttttttttttgtaaaggaggggtctcactatgttgcccaggctggacttggcccaaagttttgggattactggtacctggccttcaataatttttcagagtgaaaaagaggggtcctgcaatcgaaaagtttgtgaactactcttctagataggtcattggccctcaaccctagaattagaattacttcaaacactagaattacctggagaatttaaatactgatgccaggcctcacttctagacgttctgatttaatgtgcagggcctaatcccaagcatcaatttgaaaaacaaaacaaaacacccctcatccccttgaatgtgcagtctggattgagaaccactgctctggatattatcaat

SEQ ID NO: 78162 - DNA, 346 bp, Homo sapiens
gggcaccactttcggccggcacctggtgaagaacatccggctggagcagccttgtagctgcaaagcgggtcagaagaagtgcacctgccaccggcctggcaagaaggagacgtggctcttctcccgcttctccaccggctggagctgcgggctgcacgccgactggacggagctcaccaactgcgtgccggccatcatggagaagaaggactgtccccgcaaccacagccacaccaggtaagaaagggcaattttgctatttatattttctcctgtgttccagttatagctggccagaaacattcctaatctgttccattgctgcactttaataggctgagaatat

SEQ ID NO: 78163 - DNA, 948 bp, Homo sapiens
gaacaaaatggttgttcttattgaaaattccattcatcccttatggattccaattaatcaaggttttactatgtgtcaaaaagcagtaactttctttcccaccaatgtgaactgatgacactgacaatttagccaagcttttggctcatttcatatttacaatggccaacttgatggccaaagtatttagcacctgtctttttctcatgttatttgcacggagaacctaattgtatcattgaagtgagttgcagaatgaaaattgagctggattggatgcattgctctcacgaattcatcattcatactcatcatggttaaaaaggagccatggactgtaacaagatgactctaaaacatccacatgatgccaagtgcccagaagttttcagataaccagacgtttgatgttatataaacaaacaaaaaaatctgcacatatttggctgactttttacttttcacccagatgttttggtacatgaagaccccaaaactttagaccagctattttttcattacaaccagcaatcaagctttttttccctcagctagtactgctgcaaagttttttatcaagtaactttattgacagctcacgatttccagattatctgaattttgatatgcaaatagaaaaatatttcagtagatcctaaatgttttcaacttctctaaccatagtgctacctgccaggcatctttcaaatcgctttccttggtcattcctacagccagtcttttgaaataagtcaacccttttctcaactatggataatagtatgatcgatcagtgctgcatacccaacgattgcttattccatttctggattaccaagaagcttgcctttgtcttcttccttcttgctacctgctgttttctgagagtgagcaagagaaggggcaagagatgaacgtgaatctggttaccactacgtattagtgatg

SEQ ID NO: 78164 - DNA, 181 bp, Homo sapiens
tagtataaatggaacaggagcaaattcttcacctccacagtaacacaaagtacagaggacgggccacgagctagctgacgagaggaagtgggtctgaagacctgagcttccaccaaagggcaaacaattcagaacaactcaggaaacccaggccctgtgttgcctgaacttccccattctg

SEQ ID NO: 78165 - DNA, 534 bp, Homo sapiens
cctgcttgttcctacagggagcaggattgttgggccccaggcatgcgtgcacggggttggcccaacactgagtggcttccagctgtcatcttaagcgttctttttcctcctcagtcctcctggcaggagtcggtgcttcttgctgcgttctttgtgaggatttactgggacctttttaaagtcccgtgggggcccaggaggctctgaacaagctccggggtgtgcttggggtgggtggagggtgtttctggtttctagtttgggaagcgccttcccctagcataagctgcacatgtgagggagatggtgttggccccaaggagtcagatgactccagtgggagaggaggggagggcagagtggagtcaggattggcatgaatcgtgcctcaggcccagccatggcccttctgcaacagagtccacgaatgccagcaccgtgagcacatgcgacaggcaccctggtgcatttaaatcataaattagcccatcataatcgcagagcatgcacctcacaccagcaaggacttcctct

SEQ ID NO: 78166 - DNA, 851 bp, Homo sapiens
ccttgggggataacaggagaggatacatttcagcttccttaggacaattgtaacaggcagtgggtctgttcagtcaggctgcaggggaacagggtaacctttgaaatgtaagtggccttcagaatggggctcaagcagtggttcacggttggggcctatgtgttccaattcagtggacatgtatgtagtcttttcatttatctctgatgtcagcaggcatgagcaggtgataaaatgaaaaattatttgaataaatgttgacaagagttctgtggtggtttgggccatgacaattaccaacacttgggtgggcatggttaaaaggctaaagaggatctgtattgaagtaaatggttgggtttatttttgccctagcctttcactttttaaaacctgcccattttacaaaacaaagcttaaaacccaggtatctgctatctaatagaaatgtgtaaatgaccaacctaggcaatgtggtgaaaccctgtccctacaaataaaatttaaaaattaactgggcatggtggtacgcatctctgtagtcccagctgccaggaggctgaggtgggaggattgcttgagccccggaggaggaggttgtagtgagctgagattgtgccactgcgttccagcctaggagacagaccctgtctcaaaaaaagtataaatgagtttagtctgcctggtgggtggtgtggggaaggaagttggcctagtctgttaatgttcctgaaaggagtgaagggtgggctgaactaaaccaaaaggtgaaagaaagatgttttaacaatttatattaaatgaaaactatggtatagtttttatttactttgctaggataaaaggaaaaa

SEQ ID NO: 78167 - DNA, 644 bp, Homo sapiens
agtgataagaaaatggagaatactgtatttgctttagaaagtttttacatatagataaacacgcagtttaagataacagtaaaagcgccctacagggagtgagagatacctctgaagctgctaagaaatactggaaatagcttttgcataagaatactacaatctcactctccgcttttgctagcgacagggtccctcttcctaacccaggccaccatgcctctccttgactgccaagtcgacaccaggagcaccgagtgggaggagaaccccaaaaagaaaagagacagttgagcggggagaaagacagagagagggagaggagagaaagagaaagggagaggagaaaaagcaatatcatatacaggcaatttctacacatatattacaaactgggaaaatgaccgatcattaagatatacataattcatataaaattttgaaataaaaataaaaatctgttacagtcataactattctttttccacatttataaccagtacccacacaggcagtgacagagtggagagaaaaaggtgcttacgaagaaaatgattgtctgctgaacaaaaaacagaagattgcatttttttgaccaatacttgacttaaaaacagagagaagaagagaaagaaagagagcga

SEQ ID NO: 78168 - DNA, 311 bp, Homo sapiens
tgggaattaataggccactgtctgaaggggtttgattcttgaagaatcacagggcatcattcaagagctttggtactatttgctatgacttattcaaaaatcctactaaggaggaaggtggtttgctctattataatttccaagtgaatcatgcctcagtactgtgttgcctttgtgaccaggcaagctttgagttttacattctgagtggcttgctccaggctctaagcagcccccttctataagacgtttttttgtttttgttttttgtttgtttgtttttgtctaaaggagacaccaaaggctgggag

SEQ ID NO: 78169 - DNA, 647 bp, Homo sapiens
gaactccagctttgaacttactactcactatttgtgtaaacttaggcttaaggtaactcctggaagcctcagtttccttttcttaaataatgtcctcctcttagttttattgagagaattaaatgatacatatagggcccttttcatgatgcctggcacataataaatggtagttactattattatgaattaattagtattactgttagatacggagaaatcaaagcccttccagggcaactgacccacgcaaacctgaactttttgaatggggaaaattcttgcattcattccccttcaacaaaaccccatttcagacctgaccaaatatcagggccatgccataaaactcaaagcaagtctactacggctcctacttacaagcacttgtgtttttgaccacattggctggtggcatatcggctcccaggagcaatcccttttatggcctgctgcaccctaggatgagcggggggccaggctggtgggaggggcaggaaactcatcatatgagcaaagtttaaacaagaaggcttcaagaaagcctcatagttcctgtcttcaggtgcctacaggcttaggggaaagctgagctagtgtcaaggtaagggtcagagggagctgattcttgctcaccaaaaccagca

SEQ ID NO: 78170 - DNA, 811 bp, Homo sapiens
ttttcagaaaattactactactaatatagtctttataatacataaatacaaactgattttgacttcgctgcttctaagggacattgtcccaaatcatatttcctcaaggaatccagtttctatttccaaatacaatgtataagtgtgtgtattccctctattcactgtgactgtggatcttgatctaaataaaattcaactctaaaaagaaatacagtgctctagtttattaaaacatggtttttaaaaatgttctctggggttgggtatttttgccgtagttctttgctttgattcttgggtagatgctgaatctcccaaatttggtttctctaactgtaaaataaagccagtatcacttgtcttgtggcatcgtaaggattcaatgagctagtgtatgcatactgctcagtaaataggaactattattagggctacttttgtattttttatgtttatggtgaagtctgatgtttttccatatttaaatttaggaagagaaaatcttgcatcagttgaaatgtttgaattaaataatctatgctagttcttagggtaaaaatagttacttaactgggctcttgtgaggtaaccattacaatttaagtaaaaatttacaaatgttaatcattaatagtttaatattacttttcatttcaggagtggacgcttctcttgtgagccagctggaggtcttacctctttgactgaaccacccaagggacctggatttggtgtacaagcaggcctttaatttatattgaactgtaaatatgtcactagagaaataaaatatggacttccaatctac

SEQ ID NO: 78171 - DNA, 968 bp, Homo sapiens
gcgtgccgtccgggtcgcctaggcctggggtcgggagcgcgcacgctgtgcgccctgggcgcgctcgggattctcgcctggcgcggctggggaaggtgaacagtgtggcccgccatgttcttctccgcggcgctccgggcccgggcggctggcctcaccgcccactggggaagacatgtaaggaatttgcataagacagctatgcaaaatggagctggaggagctttatttgtgcacagagatactcctgagaataaccctgatactccatttgatttcacaccagaaaactataagaggatagaggcaattgtaaaaaactatccagaaggccataaagcagcagctgttcttccagtcctggatttagcccaaaggcagaatgggtggttgcccatctctgctatgaacaaggttgcagaagttttacaagtacctccaatgagagtatatgaagtagcaactttttatacaatgtataatcgaaagccagttggaaagtatcacattcaggtctgcactactacaccctgcatgcttcgaaactctgacagcatactggaggccattcagaaaaagcttggaataaaggttggggagactacacctgacaaacttttcactcttatagaagtggaatgtttaggggcctgtgtgaacgcaccaatggttcaaataaatgacaattactatgaggatttgacagctaaggatattgaagaaattattgatgagctcaaggctggcaaaatcccaaaaccagggccaaggagtggacgcttctcttgtgagccagctggaggtcttacctctttgactgaaccacccaagggacctggatttggtgtacaagcaggcctttaatttatattgaactgtaaatatgtcactagagaaataaaatatggacttccaatctacaaaagaagacaaaacaaaaaaaaaagggggggcggcaagaagttcca

SEQ ID NO: 78172 - DNA, 726 bp, Homo sapiens
gcgtgccgtccgggtcgcctaggcctggggtcgggagcgcgcacgctgtgcgccctgggcgcgctcgggattctcgcctggcgcggctggggaaggtgaacagtgtggcccgccatgttcttctccgcggcgctccgggcccgggcggctggcctcaccgcccactggggaagacatgtaaggaatttgcataagacagctatgcaaaatggagctggaggagctttatttgtgcacagagatactcctgagaataaccctgatactccatttgatttcacaccagaaaactataagaggatagaggcaattgtaaaaaactatccagaaggccataaagcagcagctgttcttccagtcctggatttagcccaaaggcagaatgggtggttgcccatctctgctatgaacaaggttgcagaagttttacaagtacctccaatgagagtatatgaagtagcaactttttatacaatgtataatcgaaagccagttggaaagtatcacattcaggtctgcactactacaccctgcatgcttcgaaactctgacagcatactggaggccattcagaaaaagcttggaataaaggttggggagactacacctgacaaacttttcactcttatagaagtggaatgtttaggggcctgtgtgaacgcaccaatggttcaaataaatgacaattactataatgcattcatgggttgcacaaggtttgagatt

SEQ ID NO: 78173 - DNA, 305 bp, Homo sapiens
gatttcagccgtagaaagtaattttgtgccatgcgtggtggttcatacctgtaatcccagcactttgggaggctgaggaggatttgacagctaaggatattgaagaaattattgatgagctcaaggctggcaaaatcccaaaaccagggccaaggagtggacgcttctcttgtgagccagctggaggtcttacctctttgactgaaccacccaagggacctggatttggtgtacaagcaggcctttaatttatattgaactgtaaatatgtcactagagaaataaaatatggacttccaatctac

SEQ ID NO: 78174 - DNA, 278 bp, Homo sapiens
  misc_feature (19)..(19): n is a, c, g, or t
  misc_feature (28)..(28): n is a, c, g, or t
  misc_feature (39)..(39): n is a, c, g, or t
  misc_feature (50)..(50): n is a, c, g, or t
tgcgggccccgcccggctngaatagacngtatttggaanggtttttcggngaggatttgacagctaaggatattgaagaaattattgatgagctcaaggctggcaaaatcccaaaaccagggccaaggagtggacgcttctcttgtgagccagctggaggtcttacctctttgactgaaccacccaagggacctggatttggtgtacaagcaggcctttaatttatattgaactgtaaatatgtcactagagaaataaaatatggacttccaatctac

SEQ ID NO: 78175 - DNA, 266 bp, Homo sapiens
gtttaagttactgggactctctttagaagcacaaccaggaggatttgacagctaaggatattgaagaaattattgatgagctcaaggctggcaaaatcccaaaaccagggccaaggagtggacgcttctcttgtgagccagctggaggtcttacctctttgactgaaccacccaagggacctggatttggtgtacaagcaggcctttaatttatattgaactgtaaatatgtcactagagaaataaaatatggacttccaatctac

SEQ ID NO: 78176 - DNA, 436 bp, Homo sapiens
gcgtgccgtccgggtcgcctaggcctggggtcgggagcgcgcacgctgtgcgccctgggcgcgctcgggattctcgcctggcgcggctggggaaggtgaacagtgtggcccgccatgttcttctccgcggcgctccgggcccgggcggctggcctcaccgcccactggggaagacatgtaaggaatttgcataagacagctatgcaaaatggagctggaggagctttatttgtgcacagagatactcctgagaataaccctgatactccatttgatttcacaccagaaaactataagaggatagaggcaattgtaaaaaactatccagaaggccataaagcagcagctgttcttccagtcctggatttagcccaaaggcagaatgggtggttgcccatctctgctatgaacaaggtactggattcatttttgcctt

SEQ ID NO: 78177 - DNA, 503 bp, Homo sapiens
  misc_feature (499)..(499): n is a, c, g, or t
ccttccaacatctcatttctgaggctggtattactttttcctcatattacagataaggaaaagatttagacagttcccgttcttttggaattgatagtctcatgtaagaggaactttaaggttgagacaatgtaaaagtacagtgttagagagatgaatagggtcatccaatgtggtttcaaggtgcataagatttttcctgaaggtaatactaacagattgggcatggggtccgagggtattctaggtggaaaggacaacttaaagtcttgttggcaagaaaaagatcggtatgtatgagaagccaccctctgctgttggaggtaaggtgtgttcccaaatgaaataagggagagacaggggccagatattggagctcctgacgtgccatactaaagaatttgattttagaggccgtcaggagtcagtgaaaggttttaaagtagaggaataagatgttggaaggggggatcctctagatcgaccgcaggcagcgagntgca

SEQ ID NO: 78178 - DNA, 358 bp, Homo sapiens
taaacccggttttttttttgggacaaaagggggcctaaaaaagtaaatttgaaagaaaggggagggttttaaccaaaaaagtggaaaaataaagggggaggggttttttaaaattaaccccccgaaaagggaggttttcccccgtaagggttttaaaaaattttttgtggggggaaggggggaaaatcccaaaacccagggacaagggagtggacgcttctcttgtgagccagctggaggtcttacctctttgactgaaccacccaagggacctggatttggtgtacaagcaggcctttaatttatattgaactgtaaatatgtcactagagaaataaaatatggacttccaatctac

SEQ ID NO: 78179 - DNA, 269 bp, Homo sapiens
cggccggtaccccctgatatttctggacagaatgaaaacatgtttatgaaggttcacactaagtgaaagctggcatccaagttgattcagacaaaagtgaaagtcaagaagttaatagtacattaattctccaaatgcatgccagcagagtgtggcaggaaggtacacaagtcagcagatctgggttgtcctggttctcctattgactcgtgtgtgtgatgttaggtgggtgaatcttggctttgaatctccatttgtaaaataactct

SEQ ID NO: 78180 - DNA, 142 bp, Homo sapiens
gtccctgggtggttcagtcaaagaggtaagacctccagctggctcacccaagggacctggatttggtgtacaagcaggcctttaatttatattgaactgtaaatatgtcactagagaaataaaatatggacttccaatctac

SEQ ID NO: 78181 - DNA, 1112 bp, Homo sapiens
ccttccaacatctcatttctgaggctggtattactttttcctcatattacagataaggaaaagatttagacagttcccgttcttttggaattgatagtctcatgtaagaggaactttaaggttgagacaatgtaaaagtacagtgttagagagatgaatagggtcatccaatgtggtttcaaggtgcataagatttttcctgaaggtaatactaacagattgggcatggggtccgagggtattctaggtggaaaggacaacttaaagtcttgttggcaagaaaaagatcggtatgtatgagaagccaccctctgctgttggagaccttacagacaatttgtttctacaaaaatggaaagggaagacatgtaaggaatttgcataagacagctatgcaaaatggagctggaggagctttatttgtgcacagagatactcctgagaataaccctgatactccatttgatttcacaccagaaaactataagaggatagaggcaattgtaaaaaactatccagaaggccataaagcagcagctgttcttccagtcctggatttagcccaaaggcagaatgggtggttgcccatctctgctatgaacaaggttgcagaagttttacaagtacctccaatgagagtatatgaagtagcaactttttatacaatgtataatcgaaagccagttggaaagtatcacattcaggtctgcactactacaccctgcatgcttcgaaactctgacagcatactggaggccattcagaaaaagcttggaataaaggttggggagactacacctgacaaacttttcactcttatagaagtggaatgtttaggggcctgtgtgaacgcaccaatggttcaaataaatgacaattactatgaggatttgacagctaaggatattgaagaaattattgatgagctcaaggctggcaaaatcccaaaaccagggccaaggagtggacgcttctcttgtgagccagctggaggtcttacctctttgactgaaccacccaagggacctggatttggtgtacaagcaggcctttaatttatattgaactgtaaatatgtcactagagaaataaaatatggacttccaatctac

SEQ ID NO: 78182 - DNA, 978 bp, Homo sapiens
cggccggtaccccctgatatttctggacagaatgaaaacatgtttatgaaggttcacactaagtgaaagctggcatccaagttgattcagacaaaagtgaaagtcaagaagttaatagtacattaattctccaaatgcatgccagcagagtgtggcaggaaggtacacaagtcagcagatctgggttgtcctggttctcctattgactcgtgtgtgtgatgttagggaagacatgtaaggaatttgcataagacagctatgcaaaatggagctggaggagctttatttgtgcacagagatactcctgagaataaccctgatactccatttgatttcacaccagaaaactataagaggatagaggcaattgtaaaaaactatccagaaggccataaagcagcagctgttcttccagtcctggatttagcccaaaggcagaatgggtggttgcccatctctgctatgaacaaggttgcagaagttttacaagtacctccaatgagagtatatgaagtagcaactttttatacaatgtataatcgaaagccagttggaaagtatcacattcaggtctgcactactacaccctgcatgcttcgaaactctgacagcatactggaggccattcagaaaaagcttggaataaaggttggggagactacacctgacaaacttttcactcttatagaagtggaatgtttaggggcctgtgtgaacgcaccaatggttcaaataaatgacaattactatgaggatttgacagctaaggatattgaagaaattattgatgagctcaaggctggcaaaatcccaaaaccagggccaaggagtggacgcttctcttgtgagccagctggaggtcttacctctttgactgaaccacccaagggacctggatttggtgtacaagcaggcctttaatttatattgaactgtaaatatgtcactagagaaataaaatatggacttccaatctac

SEQ ID NO: 78183 - DNA, 1263 bp, Homo sapiens
gcgtgccgtccgggtcgcctaggcctggggtcgggagcgcgcacgctgtgcgccctgggcgcgctcgggattctcgcctggcgcggctggggaaggtgaacagtgtggcccgccatgttcttctccgcggcgctccgggcccgggcggctggcctcaccgcccactggcgcagaatctaggcctgctctggccagatcagtttcgaagaccgtcgctccgaaggaggcacctctcgtttcaagcctagtgacctcgatgcttttaggttgcagcatactggagagctctggcttgcttcgtgaaggcttagggagaacttcattagggctggaaaagggtggccaatgtttgatttactgcagttgtgctttgcatatcggaaatgctggctaaataaacggtatcaaactaactctgaaagaacggcgccgcaaataacagcacccaattaaagaaccacaggattttagagattaaatgatctttttgagatccaagtacatctcatgggaagacatgtaaggaatttgcataagacagctatgcaaaatggagctggaggagctttatttgtgcacagagatactcctgagaataaccctgatactccatttgatttcacaccagaaaactataagaggatagaggcaattgtaaaaaactatccagaaggccataaagcagcagctgttcttccagtcctggatttagcccaaaggcagaatgggtggttgcccatctctgctatgaacaaggttgcagaagttttacaagtacctccaatgagagtatatgaagtagcaactttttatacaatgtataatcgaaagccagttggaaagtatcacattcaggtctgcactactacaccctgcatgcttcgaaactctgacagcatactggaggccattcagaaaaagcttggaataaaggttggggagactacacctgacaaacttttcactcttatagaagtggaatgtttaggggcctgtgtgaacgcaccaatggttcaaataaatgacaattactatgaggatttgacagctaaggatattgaagaaattattgatgagctcaaggctggcaaaatcccaaaaccagggccaaggagtggacgcttctcttgtgagccagctggaggtcttacctctttgactgaaccacccaagggacctggatttggtgtacaagcaggcctttaatttatattgaactgtaaatatgtcactagagaaataaaatatggacttccaatctac

SEQ ID NO: 78184 - DNA, 944 bp, Homo sapiens
gcgtgccgtccgggtcgcctaggcctggggtcgggagcgcgcacgctgtgcgccctgggcgcgctcgggattctcgcctggcgcggctggggaaggtgaacagtgtggcccgccatgttcttctccgcggcgctccgggcccgggcggctggcctcaccgcccactggggaagacatgtaaggaatttgcataagacagctatgcaaaatggagctggaggagctttatttgtgcacagagatactcctgagaataaccctgatactccatttgatttcacaccagaaaactataagaggatagaggcaattgtaaaaaactatccagaaggccataaagcagcagctgttcttccagtcctggatttagcccaaaggcagaatgggtggttgcccatctctgctatgaacaaggttgcagaagttttacaagtacctccaatgagagtatatgaagtagcaactttttatacaatgtataatcgaaagccagttggaaagtatcacattcaggtctgcactactacaccctgcatgcttcgaaactctgacagcatactggaggccattcagaaaaagcttggaataaaggttggggagactacacctgacaaacttttcactcttatagaagtggaatgtttaggggcctgtgtgaacgcaccaatggttcaaataaatgacaattactatgaggatttgacagctaaggatattgaagaaattattgatgagctcaaggctggcaaaatcccaaaaccagggccaaggagtggacgcttctcttgtgagccagctggaggtcttacctctttgactgaaccacccaagggacctggatttggtgtacaagcaggcctttaatttatattgaactgtaaatatgtcactagagaaataaaatatggacttccaatctacaaaaaaagaaaaacaaaacaaag

SEQ ID NO: 78185 - DNA, 978 bp, Homo sapiens
gcgtgccgtccgggtcgcctaggcctggggtcgggagcgcgcacgctgtgcgccctgggcgcgctcgggattctcgcctggcgcggctggggaaggtgaacagtgtggcccgccatgttcttctccgcggcgctccgggcccgggcggctggcctcaccgcccactggggaagacatgtaaggaatttgcataagacagctatgcaaaatggagctggaggagctttatttgtgcacagagatactcctgagaataaccctgatactccatttgatttcacaccagaaaactataagaggatagaggcaattgtaaaaaactatccagaaggccataaagcagcagctgttcttccagtcctggatttagcccaaaggcagaatgggtggttgcccatctctgctatgaacaaggttgcagaagttttacaagtacctccaatgagagtatatgaagtagcaactttttatacaatgtataatcgaaagccagttggaaagtatcacattcaggtctgcactactacaccctgcatgcttcgaaactctgacagcatactggaggccattcagaaaaagcttggaataaaggttggggagactacacctgacaaacttttcactcttatagaagtggaatgtttaggggcctgtgtgaacgcaccaatggttcaaataaatgacaattactatgaggatttgacagctaaggatattgaagaaattattgatgagctcaaggctggcaaaatcccaaaaccagggccaaggagtggacgcttctcttgtgagccagctggaggtcttacctctttgactgaaccacccaagggacctggatttggtgtacaagcaggcctttaatttatattgaactgtaaatatgtcactagagaaataaaatatggacttccaatctacctgatcggcaagactacataaactaaattacctcgaagcgaagtctcgaatacaaaa

SEQ ID NO: 78186 - DNA, 976 bp, Homo sapiens
gcgtgccgtccgggtcgcctaggcctggggtcgggagcgcgcacgctgtgcgccctgggcgcgctcgggattctcgcctggcgcggctggggaaggtgaacagtgtggcccgccatgttcttctccgcggcgctccgggcccgggcggctggcctcaccgcccactggggaagacatgtaaggaatttgcataagacagctatgcaaaatggagctggaggagctttatttgtgcacagagatactcctgagaataaccctgatactccatttgatttcacaccagaaaactataagaggatagaggcaattgtaaaaaactatccagaaggccataaagcagcagctgttcttccagtcctggatttagcccaaaggcagaatgggtggttgcccatctctgctatgaacaaggttgcagaagttttacaagtacctccaatgagagtatatgaagtagcaactttttatacaatgtataatcgaaagccagttggaaagtatcacattcaggtctgcactactacaccctgcatgcttcgaaactctgacagcatactggaggccattcagaaaaagcttggaataaaggttggggagactacacctgacaaacttttcactcttatagaagtggaatgtttaggggcctgtgtgaacgcaccaatggttcaaataaatgacaattactatgaggatttgacagctaaggatattgaagaaattattgatgagctcaaggctggcaaaatcccaaaaccagggccaaggagtggacgcttctcttgtgagccagctggaggtcttacctctttgactgaaccacccaagggacctggatttggtgtacaagcaggcctttaatttatattgaactgtaaatatgtcactagagaaataaaatatggacttccaatctacatgcgtcaggcttcctcttctcctgtgtcgagtcgcccaacctcgttcgtgcgaa

SEQ ID NO: 78187 - DNA, 873 bp, Homo sapiens
gcgtgccgtccgggtcgcctaggcctggggtcgggagcgcgcacgctgtgcgccctgggcgcgctcgggattctcgcctggcgcggctggggaaggtgaacagtgtggcccgccatgttcttctccgcggcgctccgggcccgggcggctggcctcaccgcccactggggaagacatgtaaggaatttgcataagacagctatgcaaaatggagctggaggagctttatttgtgcacagagatactcctgagaataaccctgatactccatttgatttcacaccagaaaactataagaggatagaggcaattgtaaaaaactatccagaaggccataaagcagcagctgttcttccagtcctggatttagcccaaaggcagaatgggtggttgcccatctctgctatgaacaaggttgcagaagttttacaagtacctccaatgagagtatatgaagtagcaactttttatacaatgtataatcgaaagccagttggaaagtatcacattcaggtctgcactactacaccctgcatgcttcgaaactctgacagcatactggaggccattcagaaaaagcttgaagtggaatgtttaggggcctgtgtgaacgcaccaatggttcaaataaatgacaattactatgaggatttgacagctaaggatattgaagaaattattgatgagctcaaggctggcaaaatcccaaaaccagggccaaggagtggacgcttctcttgtgagccagctggaggtcttacctctttgactgaaccacccaagggacctggatttggtgtacaagcaggcctttaatttatattgaactgtaaatatgtcactagagaaataaaatatggacttccaatctac

SEQ ID NO: 78188 - DNA, 659 bp, Homo sapiens
gcgtgccgtccgggtcgcctaggcctggggtcgggagcgcgcacgctgtgcgccctgggcgcgctcgggattctcgcctggcgcggctggggaaggtgaacagtgtggcccgccatgttcttctccgcggcgctccgggcccgggcggctggcctcaccgcccactggggaagacatgtaaggaatttgcataagacagctatgcaaaatggagctggaggagctttatttgtgcacagagatactcctgagaataaccctgatactccatttgatttcacaccagaaaactataagaggatagaggcaattgtaaaaaactatccagaaggccataaagcagcagctgttcttccagtcctggatttaaagtggaatgtttaggggcctgtgtgaacgcaccaatggttcaaataaatgacaattactatgaggatttgacagctaaggatattgaagaaattattgatgagctcaaggctggcaaaatcccaaaaccagggccaaggagtggacgcttctcttgtgagccagctggaggtcttacctctttgactgaaccacccaagggacctggatttggtgtacaagcaggcctttaatttatattgaactgtaaatatgtcactagagaaataaaatatggacttccaatctac

SEQ ID NO: 78189 - DNA, 454 bp, Homo sapiens
acgtaaacttatttgtttattctgctctgtgtacatcctcatgctaaccgtagcaacttgcagctctaagtattatgtcataatgacagaggaccattttaaagtcttctatctatggctgtgaagacatcattatataatctagttaacagttactctagtgtcacccattttcaatttccagatcgcttttatcaagatcaggttactgtgaagtaaaaatttggttaaattacaaatgttttgctttcccatctttagccacagccaagttttaagttaacatgatctttctataaactttgtcagtgctccctttaaacattatttaaaacacataattgttactgtatttccaactggtaagacctcaagcacactgtaggtttaaggaggatatggtagttgtctctagaagcctttttttttttttttttttttgtggaaagggatt

SEQ ID NO: 78190 - DNA, 357 bp, Homo sapiens
gtaggaggattgcttaagcccaggagttggagaccagcctgggcaacatagtgagaccttgtctctataaatatatcgatataaaagaaagtaatttaaatatgactattgttaattttttttccaggaggatttgacagctaaggatattgaagaaattattgatgagctcaaggctggcaaaatcccaaaaccagggccaaggtatgctttatttatatataggaagttttagtggctcacctaaattaatctttcagataaacttgatttaaaaaattttataccttaagttcataggaattggtaggagctttggatagtattatctatatgaatctcatctagagcaagaat

SEQ ID NO: 78191 - DNA, 465 bp, Homo sapiens
agggagagacaggggccagatattggagctcctgacgtgccatactaaagaatttgattttagaggccgtcaggagtcagtgaaaggttttaaagtagaggaataagatgtggtttctgttttggataggtcactggataggactgagggtggaatgggtttgatttggacccagaaacagggagactaagtagataagaggctcttgcagaatgctaggtgaaagatgatgaggatcagacatggtagaaagaaaagaaattagagtgcttgtagattttgtttcttttgtttttgaggcaaaggggctagaagtataaattgaaaagcagttttaatgaaaaagaacaacttgaggtagtggaggaccattgtaatccaggtttaatgtttctggaactctctttctctccctccctccttccttccttctctctctccatccgtctccccttctccctcccc

SEQ ID NO: 78192 - DNA, 733 bp, Homo sapiens
tggagtttcagaactaatttagtaaaggattgaaaaggaaggaggatacagttgactcatttgtacagagtatatgactcatttgtacagaatgaaaacatgtttatgaaggttcacactaagtgaaagctggcatccaagttgattcagacaaaagtgaaagtcaagaagttaatagtacattaattctccaaatgcatgccagcagagtgtggcaggaaggtacacaagtcagcagatctgggttgtcctggttctcctattgactcgtgtgtgtgatgttaggtgggtgaatcttggctttgaatctccatttgtaaaataactctcctgaaatagagatggatagggtagaataccatatttcttaagatcttttataagttgattccattgttgtaaattatgaatcctaaagtatttctttatgaaaaattttttaaggctatgatttactaaactttcttaaaattttaaattttagggaagacatgtaaggaatttgcataagacagctatgcaaaatggagctggaggagctttatttgtggtaagtaattacttagatttctttggaaagaaaagacttggaaattggggtaaatccattgtaaaaatccaaaatatcttaaataccattgtctttgatatatgatggtcatcgtgagaatttacatacagctaattgaatttactacatttcaaaagatgttggttccagttgaacctcatg

SEQ ID NO: 78193 - DNA, 921 bp, Homo sapiens
gcgtgccgtccgggtcgcctaggcctggggtcgggagcgcgcacgctgtgcgccctgggcgcgctcgggattctcgcctggcgcggctggggaaggtgaacagtgtggcccgccatgttcttctccgcggcgctccgggcccgggcggctggcctcaccgcccactggggaagacatgtaaggaatttgcataagacagctatgcaaaatggagctggaggagctttatttgtgcacagagatactcctgagaataaccctgatactccatttgatttcacaccagaaaactataagaggatagaggcaattgtaaaaaactatccagaaggccataaagcagcagctgttcttccagtcctggatttagcccaaaggcagaatgggtggttgcccatctctgctatgaacaaggttgcagaagttttacaagtacctccaatgagagtatatgaagtagcaactttttatacaatgtataatcgaaagccagttggaaagtatcacattcaggtctgcactactacaccctgcatgcttcgaaactctgacagcatactggaggccattcagaaaaagcttggaataaaggttggggagactacacctgacaaacttttcactcttatagaagtggaatgtttaggggcctgtgtgaacgcaccaatggttcaaataaatgacaattactatgaggatttgacagctaaggatattgaagaaattattgatgagctcaaggctggcaaaatcccaaaaccagggccaaggagtggacgcttctcttgtgagccagctggaggtcttacctctttgactgaaccacccaagggacctggatttggtgtacaagcaggcctttaatttatattgaactgtaaatatgtcactagagaaataaaatatggacttccaatctac

SEQ ID NO: 78194 - DNA, 645 bp, Homo sapiens
gacccacgcgtcgcggacgcgaggatagaggcaattgtaaaaaactatccagaaggccataaagcagcagctgttcttccagtcctggatttagcccaaaggcagaatgggtggttgcccatctctgctatgaacaaggttgcagaagttttacaagtacctccaatgagagtatatgaagtagcaactttttatacaatgtataatcgaaagccagttggaaagtatcacattcaggtctgcactactacaccctgcatgcttcgaaactctgacagcatactggaggccattcagaaaaagcttggaataaaggttggggagactacacctgacaaacttttcactcttatagaagtggaatgtttaggggcctgtgtgaacgcaccaatggttcaaataaatgacaattactatgaggatttgacagctaaggatattgaagaaattattgatgagctcaaggctggcaaaatcccaaaaccagggccaaggagtggacgcttctcttgtgagccagctggaggtcttacctctttgactgaaccacccaagggacctggatttggtgtacaagcaggcctttaatttatattgaactgtaaatatgtcactagagaaataaaatatggacttccaatctac

SEQ ID NO: 78195 - DNA, 887 bp, Homo sapiens
gcgtgccgtccgggtcgcctaggcctggggtcgggagcgcgcacgctgtgcgccctgggcgcgctcgggattctcgcctggcgcggctggggaaggtgaacagtgtggcccgccatgttcttctccgcggcgctccgggcccgggcggctggcctcaccgcccactggcgcagaatctaggcctgctctggccagatcagtttcgaagaccgtcgctccgaaggaggcacctctcgtttcaagcctagtgacctcgatgcttttaggttgcagcatactggagagctctggcttgcttcgtgaaggcttagggagaacttcattagggctggaaaagggtggccaatgtttgatttactgcagttgtgctttgcatatcggaaatgctggctaaataaacggtatcaaactaactctgaaagaacggcgccgcaaataacagcacccaattaaagaaccacaggattttagagattaaatgatctttttgagatccaagtacatctcatggtaggcaaggaaattgaattgcagagaagttgaaacactccttcacgttaatctaaaaatgcagatttccagaaatgtcgattataacaacagggcctgttacacaagtaatactggaaagaagccttagttttgtttgttttctaagagtgaaataggttaagtcagttctcagcaagagggagctagtgtatattcattgagaatgaattcagggctttagagttagactcgagtttggatgttagcttaactgccttttgtggctctatgactttgtgctgttaatcttcctcagtttcttcagttgtaaaatgggaatattcctttttgcagagttcagtctttcaataaacatttgaagtcttactgtacgt

SEQ ID NO: 78196 - DNA, 1557 bp, Homo sapiens
gcgtgccgtccgggtcgcctaggcctggggtcgggagcgcgcacgctgtgcgccctgggcgcgctcgggattctcgcctggcgcggctggggaaggtgaacagtgtggcccgccatgttcttctccgcggcgctccgggcccgggcggctggcctcaccgcccactgggtaaggaggctcaagctgagcccggcgctgccgccgcccttctcttgctctccgtgtctcccttagttttgggcgcaggagagccctgggctctgcacgggcctgcaggcggcggcaaggacactgcggccttagccctcttagggaggccgctgcagccccaccgtgagaagccccgagggagggttgccatactgggaagtgtactcctagtttggtcgaggaggacagaaaagaggggctgcttggtgatatatatatatatgtttgtttgtttttgctgttttgctgtagcgcagaatctaggcctgctctggccagatcagtttcgaagaccgtcgctccgaaggaggcacctctcgtttcaagcctagtgacctcgatgcttttaggttgcagcatactggagagctctggcttgcttcgtgaaggcttagggagaacttcattagggctggaaaagggtggccaatgtttgatttactgcagttgtgctttgcatatcggaaatgctggctaaataaacggtatcaaactaactctgaaagaacggcgccgcaaataacagcacccaattaaagaaccacaggattttagagattaaatgatctttttgagatccaagtacatctcatgggaagacatgtaaggaatttgcataagacagctatgcaaaatggagctggaggagctttatttgtgcacagagatactcctgagaataaccctgatactccatttgatttcacaccagaaaactataagaggatagaggcaattgtaaaaaactatccagaaggccataaagcagcagctgttcttccagtcctggatttagcccaaaggcagaatgggtggttgcccatctctgctatgaacaaggttgcagaagttttacaagtacctccaatgagagtatatgaagtagcaactttttatacaatgtataatcgaaagccagttggaaagtatcacattcaggtctgcactactacaccctgcatgcttcgaaactctgacagcatactggaggccattcagaaaaagcttggaataaaggttggggagactacacctgacaaacttttcactcttatagaagtggaatgtttaggggcctgtgtgaacgcaccaatggttcaaataaatgacaattactatgaggatttgacagctaaggatattgaagaaattattgatgagctcaaggctggcaaaatcccaaaaccagggccaaggagtggacgcttctcttgtgagccagctggaggtcttacctctttgactgaaccacccaagggacctggatttggtgtacaagcaggcctttaatttatattgaactgtaaatatgtcactagagaaataaaatatggacttccaatctac

SEQ ID NO: 78197 - DNA, 1175 bp, Homo sapiens
gcgtgccgtccgggtcgcctaggcctggggtcgggagcgcgcacgctgtgcgccctgggcgcgctcgggattctcgcctggcgcggctggggaaggtgaacagtgtggcccgccatgttcttctccgcggcgctccgggcccgggcggctggcctcaccgcccactggggaagacatgtaaggaatttgcataagacagctatgcaaaatggagctggaggagctttatttgtgcacagagatactcctgagaataaccctgatactccatttgatttcacaccagaaaactataagaggatagaggcaattgtaaaaaactatccagaaggccataaagcagcagctgttcttccagtcctggatttagcccaaaggcagaatgggtggttgcccatctctgctatgaacaaggttgcagaagttttacaagtacctccaatgagagtatatgaagtagcaactttttatacaatgtataatcgaaagccagttggaaagtatcacattcaggtctgcactactacaccctgcatgcttcgaaactctgacagcatactggaggccattcagaaaaagcttggaataaaggttggggagactacacctgacaaacttttcactcttatagaagtggaatgtttaggggcctgtgtgaacgcaccaatggttcaaataaatgacaattactatgaggatttgacagctaaggatattgaagaaattattgatgagctcaaggctggcaaaatcccaaaaccagggccaaggagtggacgcttctcttgtgagccagctggaggtcttacctctttgactgaaccacccaagggacctggatttggtgtacaagcaggcctttaatttatattgaactgtaaatatgtcactagagaaataaaatatggacttccaatctacaaacacgatgacacccacaccacaaaccaaacaacctttgcgccggcagagccccgggaaaccctccccacaccatccgtcggggggcgcggcccccaggtacgtcacctcgccacacgctccaagcaaccggcccaaacgtggggactcccaaaaaaagcccggggacgcgggtaaaccgcagggtcggcacggcacccaggccgggtcgttacgcccgggagcgggagaacaaggccaggagaaccggaact

SEQ ID NO: 78198 - DNA, 760 bp, Homo sapiens
gtaacattgctttgttgtacttttgaacaagagctcctcctgatcactattacatatttttctagaaaatctaaagttcagaagagaatgtatcactgctgatactccatttgatttcacaccagaaaactataagaggatagaggcaattgtaaaaaactatccagaaggccataaagcagcagctgttcttccagtcctggatttagcccaaaggcagaatgggtggttgcccatctctgctatgaacaaggttgcagaagttttacaagtacctccaatgagagtatatgaagtagcaactttttatacaatgtataatcgaaagccagttggaaagtatcacattcaggtctgcactactacaccctgcatgcttcgaaactctgacagcatactggaggccattcagaaaaagcttggaataaaggttggggagactacacctgacaaacttttcactcttatagaagtggaatgtttaggggcctgtgtgaacgcaccaatggttcaaataaatgacaattactatgaggatttgacagctaaggatattgaagaaattattgatgagctcaaggctggcaaaatcccaaaaccagggccaaggagtggacgcttctcttgtgagccagctggaggtcttacctctttgactgaaccacccaagggacctggatttggtgtacaagcaggcctttaatttatattgaactgtaaatatgtcactagagaaataaaatatggacttccaatctac

SEQ ID NO: 78199 - DNA, 973 bp, Homo sapiens
gcgtgccgtccgggtcgcctaggcctggggtcgggagcgcgcacgctgtgcgccctgggcgcgctcgggattctcgcctggcgcggctggggaaggtgaacagtgtggcccgccatgttcttctccgcggcgctccgggcccgggcggctggcctcaccgcccactggggaagacatgtaaggaatttgcataagacagctatgcaaaatggagctggaggagctttatttgtgcacagagatactcctgagaataaccctgatactccatttgatttcacaccagaaaactataagaggatagaggcaattgtaaaaaactatccagaaggccataaagcagcagctgttcttccagtcctggatttagcccaaaggcagaatgggtggttgcccatctctgctatgaacaaggttgcagaagttttacaagtacctccaatgagagtatatgaagtagcaactttttatacaatgtataatcgaaagccagttggaaagtatcacattcaggtctgcactactacaccctgcatgcttcgaaactctgacagcatactggaggccattcagaaaaagcttggaataaaggttggggagactacacctgacaaacttttcactcttatagaagtggaatgtttaggggcctgtgtgaacgcaccaatggttcaaataaatgacaattactatgaggatttgacagctaaggatattgaagaaattattgatgagctcaaggctggcaaaatcccaaaaccagggccaaggagtggacgcttctcttgtgagccagctggaggtcttacctctttgactgaaccacccaagggacctggatttggtgtacaagcaggcctttaatttatattgaactgtaaatatgtcactagagaaataaaatatggacttccaatctaccaggatgcggccgccccctccttaatttaaaatcatatcacagaggggcggg

SEQ ID NO: 78200 - DNA, 811 bp, Homo sapiens
gcgtgccgtccgggtcgcctaggcctggggtcgggagcgcgcacgctgtgcgccctgggcgcgctcgggattctcgcctggcgcggctggggaaggtgaacagtgtggcccgccatgttcttctccgcggcgctccgggcccgggcggctggcctcaccgcccactggggaagacatgtaaggaatttgcataagacagctatgcaaaatggagctggaggagctttatttgtgcacagagatactcctgagaataaccctgatactccatttgatttcacaccagaaaactataagaggatagaggcaattgtaaaaaactatccagaaggccataaagcagcagctgttcttccagtcctggatttagcccaaaggcagaatgggtggttgcccatctctgctatgaacaaggttgcagaagttttacaagtacctccaatgagagtatatgaagtagcaactttttatacaatgtataatcgaaagccagttggaaagtatcacattcaggtctgcactactacaccctgcatgcttcgaaactctgacagcatactggaggccattcagaaaaagcttgggtagggaatacatgatatttgtaacactgataaaaagtagaattgtctctctagatttggtacatttctatctaaaatttccaacttctgccatcttattggatctgtacttacctagtaatattttgtgttactgtgtttccacatctttatttcttcctatttggtattcttcctcagttcttagtgttaaagctgagtttttaattttttcttttttaatcagt

SEQ ID NO: 78201 - DNA, 325 bp, Homo sapiens
ctttaaagaaaagaattgtagaattgactgtcaggcgataccatttcttcctgtctattcctcggactctacctgaaatatcaaaatagcagaaatagataagaataaggtatttggcagggttttcatattgacatttcagtctcagtttttttttgtttttttttttttttttttactaatagtcgtatatctctaaaagattttcagaggagttgataacaggaatgtcagaaaacagtatattactgtcaagtgtaggaaaatagctttttgtcaattccttgatgaatttaacacagaatgcttttacatttaaaaaaaa

SEQ ID NO: 78202 - DNA, 604 bp, Homo sapiens
gacctcttgacgccacttgggtatagggcacatttataaccttctaaccccacccataaagtgtaggttaacaagtgaagtgggaatggtaaacattttgaaatatctgccacaggaacaattcccattttcttcattaatataatggtggaagaatattgagttcagaatcagatgtggctaacattagatcttttgcttattgattatttagatcctgggcgacaaagagacacctccatctccgaacaaacattagaaaccaacaacattcaaacagcaccaattgttgtaaaaatgatcttaaacattttttttggtattaaaactagtgttcacaatagaaatttgtttaaattgctgccttatagagtctttgcatttggtctgtgtatgtactattgtcttagtgataagttttctcttcaaattaattggaaagcttgctgggtgcagtggctcatgcctgtaatcccagcatttttggagcacaggatgggggtatcacttggggccaggagctctcatagggagacccttgtctctacaaaaataataaataaaaaaattaactgcgcgtagcttgtgtatggagtcataacaa

SEQ ID NO: 78203 - DNA, 803 bp, Homo sapiens
aaaacttaaagtataatttttaaaaaaaagtaaaagagaaaaaaaaaaagacagaatcttcgctcatgcacttacctgctttttcttctgtttactcaggaataactgtgtttatcaatatttgggctcttcaccacaacccctatttctgggaagaccctcaggtctttaaccccttgagattctccagggaaaattctgaaaaaatacatccctatgccttcataccattctcagctggattaaggaactgcattgggcagcattttgccataattgagtgtaaagtggcagtggcattaactctgctccgcttcaagctggctccagaccactcaaggcctccccagcctgttcgtcaagttgtcctcaagtccaagaatggaatccatgtgtttgcaaaaaaagtttgctaattttaagtcctttcgtataagaattaatgagacaattttcctaccaaaggaagaacaaaaggataaatataatacaaaatatatgtatatggttgtttgacaaattatataacttaggatacttctgactggttttgacatccattaacagtaattttaatttctttgctgtatctggtgaaacccacaaaaacacctgaaaaaactcaagctgacttccactgcgaagggaaattattggtttgtgtaactagtggtagagtggctttcaagcatagtttgatcaaaactccactcagtatctgcattacttttatctctgcaaatatctgcatgatagctttattctcagttatctttccccataataaaaaacgatcggcacgt

SEQ ID NO: 78204 - DNA, 1034 bp, Homo sapiens
ttttagagcgaaacaccaaagatttctctgaagcagatctccaggctgaagtgaaaacgttcatgtttgcaggacatgacaccacatccagtgctatctcctggatcctttactgcttggcaaagtaccctgagcatcagcagagatgccgagatgaaatcagggaactcctaggggatgggtcttctattacctgggaacacctgagccagatgccttacaccacgatgtgcatcaaggaatgcctccgcctctacgcaccggtagtaaacatatcccggttactcgacaaacccatcacctttccagatggacgctccttacctgcaggaataactgtgtttatcaatatttgggctcttcaccacaacccctatttctgggaagaccctcaggtctttaaccccttgagattctccagggaaaattctgaaaaaatacatccctatgccttcataccattctcagctggattaaggaactgcattgggcagcattttgccataattgagtgtaaagtggcagtggcattaactctgctccgcttcaagctggctccagaccactcaaggcctccccagcctgttcgtcaagttgtcctcaagtccaagaatggaatccatgtgtttgcaaaaaaagtttgctaattttaagtcctttcgtataagaattaatgagacaattttcctaccaaaggaagaacaaaaggataaatataatacaaaatatatgtatatggttgtttgacaaattatataacttaggatacttctgactggttttgacatccattaacagtaattttaatttctttgctgtatctggtgaaacccacaaaaacacctgaaaaaactcaagctgacttccactgcgaagggaaattattggtttgtgtaactagtggtagagtggctttcaagcatagtttgatcaaaactccactcagtatctgcattacttttatctctgcaaatatctgcatgatagctttattctcagttatctttccccataataaaaaacgatcggcacgt

SEQ ID NO: 78205 - DNA, 925 bp, Homo sapiens
  misc_feature (26)..(26): n is a, c, g, or t
  misc_feature (30)..(30): n is a, c, g, or t
cacagcgtctcatcactctccaccanatcnaccgccccccccccctccatagcctgcaacgaccctcttaattttccaccgctacagggaacacctgagccagatgccttacaccacgatgtgcatcaaggaatgcctccgcctctacgcaccggtagtaaacatatcccggttactcgacaaacccatcacctttccagatggacgctccttacctgcaggaataactgtgtttatcaatatttgggctcttcaccacaacccctatttctgggaagaccctcaggtctttaaccccttgagattctccagggaaaattctgaaaaaatacatccctatgccttcataccattctcagctggattaaggaactgcattgggcagcattttgccataattgagtgtaaagtggcagtggcattaactctgctccgcttcaagctggctccagaccactcaaggcctccccagcctgttcgtcaagttgtcctcaagtccaagaatggaatccatgtgtttgcaaaaaaagtttgctaattttaagtcctttcgtataagaattaatgagacaattttcctaccaaaggaagaacaaaaggataaatataatacaaaatatatgtatatggttgtttgacaaattatataacttaggatacttctgactggttttgacatccattaacagtaattttaatttctttgctgtatctggtgaaacccacaaaaacacctgaaaaaactcaagctgacttccactgcgaagggaaattattggtttgtgtaactagtggtagagtggctttcaagcatagtttgatcaaaactccactcagtatctgcattacttttatctctgcaaatatctgcatgatagctttattctcagttatctttccccataataaaaaacgatcggcacgt

SEQ ID NO: 78206 - DNA, 405 bp, Homo sapiens
gatagggggcacagcctgaaagatatgccggtgctgcatatttggctgtctgcttcctacatgactacctggtgtctgctgccagctgttttgtcccatgggttgggtgacctctcagtcctgcagttggcctggagagtgggcatgtccactaaattaacagctgacagtagttggaggcgtcacctctgattgactgcatgttgacaggggatgctaacaggatgacagggaggggacaaagtgtaggggctttgggagtagggagtttgccctgggctgttccagttgcactttacactacagcctatgtctgcactctgatacatctatccacttccagctgccctacatccttccctctccttcagctggtcttgccaagcttctccgcggcttccacag

SEQ ID NO: 78207 - DNA, 322 bp, Homo sapiens
gaagatgtactctgtaaaataacaattaaaaaacatagtaaatacataagccagtaacacagccatttattatcaatatatgtactacatataaatgtatgtacatgctatacttttatacaactggtagtgcgggtttgttgacaccagcatcatcacaaacacagtgagtaacgcgttgcactactatagtgtgggatggctacaactcactagggaagaggaattttctagcttcattataatcttaggggaccaccaccctatgtgtggtttattattgaccaaaacattcctaaggggctcatgattgcattctact

SEQ ID NO: 78208 - DNA, 438 bp, Homo sapiens
gcctcccaaagtgctgggattacagtagttcatcagcccagcctccatagactattttttaaacaattttactcaggtataagtcacaccctatacaattcacccatttaaagtatatattcagtgagtcttttagtatattcacacagctttgcaaccatcacaaaaaaaaaaaaaaaagttatttctgtcccctatggcttgaagggcactcatactcatagttagcagaatcttcaataatactagagcttaaatgggagagagtcatacagtagatgcttgaaaatgttcaaataaatgaaggccaggaggctggatgcagtgactcacacctgtaatcctagcactttgggaggccaaagtgggaggatctcttgagcccaagagtttgagaccagccctggcaatatagtgagaccaagtctctataagaaa

SEQ ID NO: 78209 - DNA, 352 bp, Homo sapiens
agacgtaagacttaaaagtggaggggtcgttattttagggtgatggtcttctctgtttatcactgactcattcattcagcaaatattaatgacggtcaacttaagaaaggctgatataaaacagttaaagacatgaggcttgaaaataaaataacttttcggatgttggtcttctctattcatttgttcactgaatcactcgttcagcaaatatttatgaagggttactgtatgtccattagaagctggagatagcagtgagcaaaactgaacagtttctgccttctcagattttacaggctaattaatgctggggaaaaaccctaattcagttgactcaacaaatatttac

SEQ ID NO: 78210 - DNA, 422 bp, Homo sapiens
tgagacagagtctcgcgctgtcgcccaggctggagtgcagtggcgcgatcttggctcactgcaagctccgcctcccgggttcacgccattctccagcctcagcctcctgagtagctgggactacagatgcacgccaccatgcccggctactttttgtatttttaatagagatggggtttcaccaggttagccaggatggtcttgatctcctgacctcgtgatccgcctgcctcggcctcccaaagtgctgggattacagaattactatgtgtccagctctgtctgtataaataaaacagctaagcagaggatactgcaaagacttcggttgctaccatttccttactcagcatcaccaattcatgaaatctgctcttcagataaaagcttttgccatttagagaggaaatgattagcttgaa

SEQ ID NO: 78211 - DNA, 194 bp, Homo sapiens
ggaaaaattaaaccactgaacaaaaatcattctaaaaattttagttcagcagcaaaaaattagagcttgccattttgtcttgagatgtgtattttgttgagttaaaatttctaaagtctgcctatacgttttccatctccttgctgtgtaaattactgaataacttggggtaaaaaaagaaaatttatgtaaag

SEQ ID NO: 78212 - DNA, 581 bp, Homo sapiens
caagtacctggatgtttcaattgaaggtactgtatttactcacccttttcatacctctctgtgagagcaatgcattctagctgcttctagtcagccatcttggccactccctccaaattcttaaaaattatttaaatctctttgttaaatttctaaatttagtcatttattattttctatatgttgttgagttgttcctgtgtaatcttatgaagtttgctaagcttccttaaaataattatttttaacctgggtgtggtggtgtttacctgtagtcccagctactcgggaggctgaggcaggagaattgtgtgaacccgggaggtggaggttgcggtgagccgagattgcaccactgcactccaacctggtgatagagcaagactccatctcaaaaaaagaaagaagataaaaatccttggtaacttcaacacagctttacgttggtgaagattcaagtgctattcgaatgagttcagagacaatagactaaaaggagttagagttggtgcatataggaaaccctcaaccagttttgttgtaaagtggaatagataaatgaggcagtatcttgagagata

SEQ ID NO: 78213 - DNA, 932 bp, Homo sapiens
tgtttgtcattgtaccaggattgatgtgctcggtgcccagaaggcagtaagctctgctccctagcagccttggatacggtttgccctggcttgaggatgtgctctgtgttgtttgctcatggcactgtagaggactgttcctccaagcacttccttctcttccacaacccatcttgaaaccagagaaccagcaggactaaggatggaattgaaaaaagttgatgaatttatgtttcatcttccatctctacttcttctcctggaggtgtgaacgaataatgaaactgctaaggagaaaggcagcatgaaagaaggaggctgcacaattggaccttgcaaattcaagatctagatcattagctgcaaatctgagttggaggtgctgaatactcattcacacggtcgtgctcatagcagcagcgagattttttttcttgtcacgatgaacagagtgtcctgacaccttgagacattaggtgcttgcagaacatagtgtgaggtgacaagggaagggacttgcccttcacctccacaccactccaaaaagccctaccatcgtgcaaaattacatacacaatctcatgccacaaaatataaaccaaccactacatttaagaaattcgatttctcccccttaactgtcccctgtgctttctgagcacatagcatatttttccctaatcttaaaatttagctttaaagttcactgttaaggaactaagcagttttttagtcaagagatatatgctggtttaagatacacaaaaacttgaacagtacttgagatcttttgagaggaatgagcaagaaatcagatatttgccttttcatcttctgtagactcatacagcatcttctacatagctagggactcaagaatgttgaatctccaagctaaagcatctatcaaatgttatttacataaatagagc

SEQ ID NO: 78214 - DNA, 363 bp, Homo sapiens
tagcctggctttaaaaaactagatgaatggcatatgtaggatgatattaaaatattatcctggctgttaagtagaggagattgaaggaaagacttggtcagagtgaatgtgtagagaccaagtagcaaataatttttgtcgtctgtatgagggatgatggtgcttagatctagggtggtgacagagggtttagagagacactaagttttttgttttttttttttgagacagagttttgctcttgttgcccttgctggagtacaatggcgcaatctcggctcattgcaacctccgcctcccaggttcaagcagttctcctgcctcagcctccctattgtctgggattacaggtgcccgccacca

SEQ ID NO: 78215 - DNA, 799 bp, Homo sapiens
caggcctgcagaggggacagcagagagtggacagccagggttgggggttttgccaaactggcttaacaccggcagagagggaaaggaagttgaagggagtgaaaatacaacatggacaacggaacctaaactggaccaggaggggaggggagagaagcggggggcactgggggacaccaaggcaaaggtgggctcggcatgagaggtctccttgacatcaaaggcttggagcagtgacagcagttggacaatgtgttggaagacaggatacagtggacagagagagggacatttgaaataggctgtggaggagacacctgccatccctggtgaggacaaattctcagatgtgaacatggaagacagcggcagaaacccattctggggcagggcctggacgagtccacgtagacagtgaagtttaccagagagctgtgaagggtggtgggtggtgagtcagagctcaggtttctaattaatgatgagtgggagagtgacaggcacaagatgactggtatagtcaggtggctcgagctgcccaggagctgggtgagaataatagtcccaaacaccttccatccaaaggtttcctgcctctgggttatttattcactaaagctattgagcagtacctgcttggcacagagcatactacttttactactagtaaaaatggccaggccaagccctgtggttcatgcctacaatcccagcacttagggaggcagaggcaggaggatcgcttgagcccaggagttcaagaccagcctggcaacagagcaagatgccattttccaca

SEQ ID NO: 78216 - DNA, 853 bp, Homo sapiens
agtagtgaaaagctgaaagctctttaggaaaacaagtgtgcccactctcaccatttcttttcaacaaagtgatggaaatcctagccagaacaattagacaagtaaaagaaaaagcatccacattggaaaggaagaaattattttttttctgtttgtagataacatgatcttatattttaaaaagactttaccaataaactgtttgaaataataaattaattcagtaatgttgcatgaccccaaatcactatttttaaaacattccatgtacttttgaacaaagttatattatctgatatttgggtgcagaattttatgaatgcctattaaattaaattgcttacatggtttaaatcttctatatttttactgctaagtatgaagcagaacaataattgaaataactgtatcaaaaccacccaaaatgatgtttgtctactggtcactatacttctatgaattttgtaaatacattcgagaatttatttcatgaaatttcatagttgttattttgacctagtaaattgtactttttaatcatatattttgtatgtataattcaaaatcaattcaagaaaagagagaaaaaacataaaactcaatattatatatacttaaaaatacatatttaaaaatcttggttaatagatatgtaagatatgaaagggagatggaaaacaagaagtctattttaacaatgaagacagtttaactaaaaaataaaacaggaatggtacctcattcaaactagtaaattgccataaattgaaggataagactcactccttgaactatgtacctaaggcccaagagaaaaaaagaggctgggcgctgtggctcacacctgtaatcc

SEQ ID NO: 78217 - DNA, 349 bp, Homo sapiens
gggtgtagaaataaatgaagactatccaaaagagagcaagcagaggtcattgattcagagcttgccctagcaaagagtcttgcatttggcagaaactcacaggctggcagaacagtgaaaaaggttcacactggaaaagagagaaggcttcaggggtgcctgattggaggtagttggcgtaggaaagctggaagtgggctcattagaagtggggcatccggctgggtgcagcagctcacacctataatcccagcactttgggaggctaaggctggcagatcccttgagcctaggagtgcgagaccagcctgggcaacatggcaaaaccctgtctctatgaaaaaaaaac

SEQ ID NO: 78218 - DNA, 1534 bp, Homo sapiens
  misc_feature (1370)..(1370): n is a, c, g, or t
  misc_feature (1384)..(1384): n is a, c, g, or t
  misc_feature (1419)..(1419): n is a, c, g, or t
  misc_feature (1431)..(1431): n is a, c, g, or t
  misc_feature (1433)..(1433): n is a, c, g, or t
  misc_feature (1441)..(1441): n is a, c, g, or t
  misc_feature (1445)..(1445): n is a, c, g, or t
  misc_feature (1489)..(1489): n is a, c, g, or t
agacgatgcgtgcgctccgcgaccgagccgggctcctcctctgcgtgctgctgctggcggcgctgctggaggcggcgctagggctccccgtgaagaagccgcggctccgcggaccacggcctgggagcctcacgaggctcgcagaggtctcagcctccccagatcctaggcctctgaaggaagaggaggaggcaccactgctccccagaacccacctgcaggcagagccacaccaacatggatgctggactgtcactgagccagcagccatgaccccaggcaacaccacccctcccaggaccccagaggttactccgttgcggctggagctgcagaagctgccgggattggccaacacaaccttgagtacccctaaccctgatacccaggcttcagcctccccagatcctaggcctctgagggaagaggaggaggcacgactgctccccagaacccacctgcaggcagagctacaccaacatggatgttggactgtcactgagccagcagccctgaccccagggaatgccacgcctcccaggacccaggaggttactcccttgctgctggagctgcagaagctgccagaattggtccacgcaaccttgagtacccctaaccctgataaccaggtgaccatcaaggtggtggaggacccccaggccgaggtgtcgatagacctgttggctgagcccagcaatcccccgccccaggatacccttagctggctgcccgccctctggtccttcctctggggagactacaaaggagaggaaaaagacagggccccaggggagaagggggaggaaaaggaggaagacgaggactatccttcagaggatatcgagggtgaggatcaagaggacaaagaggaagatgaggaagagcaggcgctctggttcaatggaactacagacaactgggaccagggctggctggccccggggattgggtcttcaaggattctgtcagctacgactatgagcctcagaaggagtggagtccctggtctccctgcagtgggaactgcagcactggcaagcagcagaggactcggccctgtggctatggctgcactgccaccgagacccgtacctgtgacctgccctcctgtcctggcactgaggacaaggacaccttgggcctccccagtgaggagtggaagctcctggcccgcaatgctacggacatgcatgatcaagatgtggacagctgtgagaagtggctgaactgcaagagcgacttcctaattcaagtatctgagccagatgctgcgggaccttgcccagctgcccgtgtgcctaaccccactggaggccatgggacagccctgtggagccttacaggacgagcaccaggggcgcagtttnggtggaggggatgncagtggcccttcggcgaagcggctggacatctaancaggccaggggngntttgctgngttncatgctgttggggagaagcaagaaaatgggcggccagaatgtgnatggacgaggaagcggtggttgaccgtggaaaggggcgggatgcc

SEQ ID NO: 78219 - DNA, 1202 bp, Homo sapiens
  misc_feature (1038)..(1038): n is a, c, g, or t
  misc_feature (1052)..(1052): n is a, c, g, or t
  misc_feature (1087)..(1087): n is a, c, g, or t
  misc_feature (1099)..(1099): n is a, c, g, or t
  misc_feature (1101)..(1101): n is a, c, g, or t
  misc_feature (1109)..(1109): n is a, c, g, or t
  misc_feature (1113)..(1113): n is a, c, g, or t
  misc_feature (1157)..(1157): n is a, c, g, or t
atctatcagcatacctccagccgttacgtgcgtgagctggagctgcggatgcaacactataccttactataccggtcactcccgatctagctctaggaggaggcacgactgctccccagaacccacctgcaggcagagctacaccaacatggatgttggactgtcactgagccagcagccctgaccccagggaatgccacgcctcccaggacccaggaggttactcccttgctgctggagctgcagaagctgccagaattggtccacgcaaccttgagtacccctaaccctgataaccaggtgaccatcaaggtggtggaggacccccaggccgaggtgtcgatagacctgttggctgagcccagcaatcccccgccccaggatacccttagctggctgcccgccctctggtccttcctctggggagactacaaaggagaggaaaaagacagggccccaggggagaagggggaggaaaaggaggaagacgaggactatccttcagaggatatcgagggtgaggatcaagaggacaaagaggaagatgaggaagagcaggcgctctggttcaatggaactacagacaactgggaccagggctggctggccccggggattgggtcttcaaggattctgtcagctacgactatgagcctcagaaggagtggagtccctggtctccctgcagtgggaactgcagcactggcaagcagcagaggactcggccctgtggctatggctgcactgccaccgagacccgtacctgtgacctgccctcctgtcctggcactgaggacaaggacaccttgggcctccccagtgaggagtggaagctcctggcccgcaatgctacggacatgcatgatcaagatgtggacagctgtgagaagtggctgaactgcaagagcgacttcctaattcaagtatctgagccagatgctgcgggaccttgcccagctgcccgtgtgcctaaccccactggaggccatgggacagccctgtggagccttacaggacgagcaccaggggcgcagtttnggtggaggggatgncagtggcccttcggcgaagcggctggacatctaancaggccaggggngntttgctgngttncatgctgttggggagaagcaagaaaatgggcggccagaatgtgnatggacgaggaagcggtggttgaccgtggaaaggggcgggatgcc

SEQ ID NO: 78220 - DNA, 424 bp, Homo sapiens
cattttttccctctagtgttagaataaaccagagttccctggattgggcaccagatgaaatgacagatctggggtaaaatctgtcttgcagggaacatacgttatctttagattctaaaatcaaaccaaattcagtaaaatgttcacaatataaaacaggaaaatcaagactgaggatcaataaatcatctcttaatttagaatcaccaggtgaaatggaaggtaatcaaacatattctctcttgcatatccagtcactcactcctctattaacctctagccctgtgtttccttatgtgtataatggcaataatatctaatttaaggggtgctggattaaatgagataatatatatacaagtcagagacacagcaggtgttaaatagtagccatgtcgagggtggtaaaattgatgctgctccc

SEQ ID NO: 78221 - DNA, 391 bp, Homo sapiens
gcacaactgaatatatattaaaaactggtaaaagaatatcgttttaaagtaattgataattatgtaaaattttactataaatcaaagtgattttttaatgttagtagctatttatactttatagagcaaatctgatttgagaattaaataattttttcctaatttgaagataaatgttatttaaagattataaaatatctaaatatttttgagtatacatacatgcacatatatatgtacaattaagaatatgtatatatgttactttcatgaaacatgatggctaaatgaaagtagagttaattcacgagcagggaaatacccagtcttccagccttgtcgtctcggccattcattcccttgagaaggcaaattttgttcagacacaaaa

SEQ ID NO: 78222 - DNA, 802 bp, Homo sapiens
ccctcgatttgtcctcttgctccttcctgctaggacagcagggcttctcgtacacatgctgtagcgggcactgccttggcaggaggatttggggcttccacatatcctgttctcaagattgtagcatctcagtactctagagcccagtacctgacatcaaggatgtctggagcttccttttaaggaaagaaaagatcagcaaacttgcctgttcccgtttacacttccaccaccagttcgtgagagttcctgttctgcatcctcaacactagtattaagtgagagttcctgttctgcatcctcaacgctagtattaagtgcactggcctttagtctgttaaaaagcatacaatggctacagatgttcaattggctgattatccactgatgagtccaaaggctgagctgaaactggagaagaagtcagggcgcaagccaaggagccccagggacagtgggccacagaaagaactggtgatcccagggattgtggatttcgagcggatccgccgggcattgaggaccccaaagccccaaacccctggcacctactgctttggacgcctcagtcaccactccttcttctcccggcaccacccacacccccagcacgtgacccacatccaagcctctaaccctttgcagatctcaccgggaagcctgtctgtgtcgtcagggattttccagcccccttgcctgagtcaactgtcttttccggctgtcaaatggggatacccaccatctctgtccccattggagacccacagtctaatcggaacccccagctttcttctggtgggta

SEQ ID NO: 78223 - DNA, 743 bp, Homo sapiens
gaagtaagcaaccgtgcattaaaaagctatgaaaagatgaagagaatatgccttcaaatgggaaggaatacttaactgtgaataagacctagttcaacatggaacttcctggtggccaagtcagaagagaagcacagtgagttttctaactttcataatgagaaaagagaaagcacactgtttttcaaaaaagaaagttattacccagtcactgaattctaaaagaacttcatgcttgccttgttcatggacttcaaataatttaattatttaaaataattattttgtctaaaattctcatgtgtctctgttaattataacatgaataatagcatttacattatgcataaatgaagacaatagtatatcttctaatagctgtataaaccatctactaagctgtcaagattaattgacattaataaaaccactgtctcacagagttccaaaaatatggattctctgtaagaaagtttcttctttcagtgtcagaagaaaaaattaaagattcctggatctgcttgtttggcattatttgataaaagtgaaagaaaagaagaggctctacaggtttctgaaatatcaaatgctgtggaaatatttaaggctaaatgtcttttccactagactacaaataacagctatattttctcaacacttttattgaaatatttttattagatgtgtgcacatttttgcccttatctgattattttaaaattggcaggtgactttctggggaa

SEQ ID NO: 78224 - DNA, 531 bp, Homo sapiens
ggctaagtgcgagcaggcgcgtgtgacgtcgggaggcgccgcggctcctcggccgccccactcggtggtcccctgtctggatccaaactgctgactggctgacccgagtggtcacatttgccctctggggcttttgaaaaccttaaatcaaaattgcttttgaatctgacaactcctgaggctactttcgcggcctcggggctgtttcatataaggacgcgagttttcctgatcaggtctgtcggccacgttacgatttccaatttgcgatccatcagttacttccattgggtcttcagcccccagggactgtggatcctagaccccgcggagaagcccgtggactggagctgtgtcagctctgatggaacaaaaacggaggcacagagaggtcaattgattggtctaatgacacagatctagcaagtggtggaaccaggactgaatccaggtaacttgctcctgatgtttgtccattggtgctctcatacttttttccctctctcttcctgttagaatgtgcttccagga

SEQ ID NO: 78225 - DNA, 719 bp, Homo sapiens
  misc_feature (596)..(596): n is a, c, g, or t
  misc_feature (635)..(635): n is a, c, g, or t
ggctaagtgcgagcaggcgcgtgtgacgtcgggaggcgccgcggctcctcggccgccccactcggtggtcccctgtctggatccaaactgctgactggctgacccgagtggtcacatttgccctctggggcttttgaaaaccttaaatcaaaattgcttttgaatctgacaactcctgaggctactttcgcggcctcggggctgtttcatataaggacgcgagttttcctgatcaggtctgtcggccacgttacgatttccaatttgcgatccatcagttacttccattgggtcttcagcccccagggactgtggatcctagaccccgcggagaagcccgtggactggagctgtgtcagctctgatggaacaaaaacggaggcacagagaggtcaattgattggtctaatgacacagatctagcaagtggtggaaccaggactgaatccagagaatctggaagactactctgccaagacatctcaaaaagtgtgtgtccggaattggtgggttcttggtctcactgacttcaagaatgaagccgcggacccttgcggaactgtgaagactagagtgaccttggagatctcatctgnaagatggtagaactgctatcagcctggcttcccaaatgncctcctggatcacagctaccccatggcctgaaatgtttgccctgggagttgtgccattagaaaagaaataactttctttgttct

SEQ ID NO: 78226 - DNA, 488 bp, Homo sapiens
  misc_feature (365)..(365): n is a, c, g, or t
  misc_feature (404)..(404): n is a, c, g, or t
gaagtaagcaaccgtgcattaaaaagctatgaaaagatgaagagaatatgccttcaaatgggaaggaatacttaactgtgaataagacctagttcaacatggaacttcctggtggccaagtcagaagagaagcacagaacaaaaacggaggcacagagaggtcaattgattggtctaatgacacagatctagcaagtggtggaaccaggactgaatccagagaatctggaagactactctgccaagacatctcaaaaagtgtgtgtccggaattggtgggttcttggtctcactgacttcaagaatgaagccgcggacccttgcggaactgtgaagactagagtgaccttggagatctcatctgnaagatggtagaactgctatcagcctggcttcccaaatgncctcctggatcacagctaccccatggcctgaaatgtttgccctgggagttgtgccattagaaaagaaataactttctttgttct

SEQ ID NO: 78227 - DNA, 577 bp, Homo sapiens
ggcacgagaaaatacacattgggtttcaaagacagtatgaaaagatgtctgtaaaataaatcattaaccatttctaatattgattacatgttcaaatggtagcattttgaatgcactgggtttacaaaatacattagaattaatttcactggtttctttttacttcttttcaatgtggcttctagaaaattttaaatttcacacatggcttacattgcatttctattggattgcactgcaccagagtggtcactgacttctcagacctgatttctactgaacagacgactcaaagtagtgagggccgtgggcttctgaggacctcgggaggatggggtagttctctaagaggctggtgaggacaaggcaaatccttactgacttcctcattcatgttgaggtcttgctgtccttacccaccccagccctgatattactttgctttagcaaagctttgcccagaaaaatcagggaagggctggtctttggaaagaaggtgaaggtaaagccacttgtacagggagaaactgaggcagagtgggtcaatatctcccaacattatattcatgcctgagca

SEQ ID NO: 78228 - DNA, 698 bp, Homo sapiens
gctacagatgttgaacaggtatgcagggaccagtttctatgcaccccacctttaggacttgcaactctagttcacgggtctcagagaagttgtaagttaccagtttccaacattccaaattactgcaaatgccagaaactacaaatgtttggaaatgccaagagtctgaggatctactgacacagcatatagctgaaacctcacccacatagtgttaagaaagcgtttcctgcctgtctggggctgacaaaccacaacaacccttttcttcttcctcaggcaccaagcaggactcatcaggacacctgggctcaggctcaaaccctatcaaagcagggctgtactgaggacgcaccttcattctcttcccagaacaagtgaaggaaataggagaggatctttgctctaggaaagcaggcttcagacaggaagtggcaacaattcatacaaggtgccattctttcctctaacccacaccttaacctgtgttgaccatctccctctctcatcacaatatctctagattcttccacatacttattgaaaactatgttcatgacacgacagaggaggtaactgtctcagatagcataagaagttcaatagtaaccaaacatttttttttaagttatttccagtgggcctgtgtgctttagctcacttaaatcttcacaacaccactgaggcacagagatgtt

SEQ ID NO: 78229 - DNA, 615 bp, Homo sapiens
gaaactttgaaaggcctcaaagctgtccaaatagttattacaaaagcagtatactaacgtatttgttctattcattgaacagctctgaagccatcacttagatctttttttcctcagattctttttattcttaccttattcataattctatcaaaaataggttatctagattcttagattggaacaaatgagaaagtagtacaactctataatcaggaaaatatcttaacaaatacttaaatttagggaaagaagcactttataagcaaagaataataagcatactagtatagaactatttagcgtaggtaatcagatatatctcacaacgctagggactgtacaatatttagtatttataatgaatattgaataatcaaggaatatttctgtatagtatatccttttaagaatataaggagtgtaaactatatgaagatttctaatgtaagtttgtgtgtgtgttttaatgtctggcacttaaactgtcaaatattgcttatttagaaattcacttattttatttggtatatctgattccctaatcatgctacactaataaagctgtgaaatacaataaagtattaccctttaccaataccaaactatttaata

SEQ ID NO: 78230 - DNA, 577 bp, Homo sapiens
gattttgaaagattttcgtaactacaggtaggtcagagaatatattctttgaagataaaaagcacaacgtgcattactcaaatctcaacgtcagagctactgttgaatttaggtttatgtgaaaatgtgcatctaaagtctacttgaaaccctggtaatatacttttttttttaaagactgttaatatggacatgtttttagtaaggtctttaaagataactttaaagataaattaagagttgacacatcagtttctgaatgtggaagtcatttatcatgtaactttactgaaattaaagagagaatgcttctgagtgtcacaaggataactaaaagccacacaaggaggactgctggcccatttctctagttcacaggttgtgctcagctttagaagcccacacacgggcatccaaactgagtctctggaatagaaaaattaatgatggacttcctcccctatgtaaccttggaaggttttaagttacaccttggggaattggcaaatcattttcaacatgtattataaattatatgatgttaaaattatttttaattttttaaagtaaaagaaat

SEQ ID NO: 78231 - DNA, 899 bp, Homo sapiens
atcagaataggccgcacttggcgcttccctgtagacacaggatctgtgagtttggacagatttctggtcagtttggaaggaagctggcctctgttaacagagcaccccttatgggtcagtgttgtgcaggcagtccacatacactgtgtgtatgcgatgacagtgcgtctgcttgtagaaggggctgggtcccctctgcagagcctccgcatggggctgcatgactggttccggccgacttgctggggagcgcacagcctgtccacaaagggaatcttcatccttcctgatctgtagagccatttgcaatgcgtgatggcaactgcttaacttcagttttcgtccctgggccagagatttctgtgccctgggataataaacgtattatctaaagagcttttatttctttctagagaataaggaaaatgatactctgcagaatttctatttcttttgtaattatctcaggggaaggtagttattaagtgttcactgattaggattaatgtttccaatttttgtcaagaacagaatgtatgtattactaatttaaccataatttcaatcaaaactgtgtcattaaaaatgttggcagtcatgcatttcctgcatggttatgaattttttcatgtatctatagtatttttctaacagtctaattttaattcattcactttctcacgaaaatgtattttttttccatttcagcatgtagtacttgtgttaccttttcacgaggcccacactcctccaaggaggctgctgattgtctctaaactgattacctccatttgttctttccttgatcttacagtgtccatcagcttcctatgattgaagaaaagcttccacttgtaataaaccaacttctctcatccagttatcaacatagaccaaaa

SEQ ID NO: 78232 - DNA, 470 bp, Homo sapiens
ccataaattagaaaaaaatacaggctgaaaagtcaatgaattaaactttagcttaagaaaataacaaaacgaacaagaagatctaacctacagtaagtagaaggaaagaaataataaaatgagaacagatataaagtaaattaacaataattgtgtgaacaagaaatcaacaaagcctctaagttggttctttgtaaagaataataaaattgattaatgtctagcaaaactcattaagaataagggagtaaaagcacaagtatcagaaaagaaaatggggcagtactacaggctctattttagacatcgcaaagagcaaaggaagattttgtgaatgactttatagcaacgtatttgactatttagacaaatgggcaaattcctagaaaatacaactttccaaaactgagcaaggaagatataattaatctggttctgatatctagtaaagaaatttaatctattattta

SEQ ID NO: 78233 - DNA, 396 bp, Homo sapiens
atttatttggagaaagggtctcactctgtcacccagcctggagtgcagtggcatcatcttggctcactgcagcctctgccttatgggctgaagcaatcctcccacctcagcctcccaagaagctgggactacaaatgtgtaccaccatgcccagctatggtgtatcttttgtagagatgggttttcaccatgttgcctaggctggtcactagctcctgggctcaagggttctgctacttcagccccctaaagtgctaggattacaaatgtgagctgcctcatccagcctaatttaaattttaaatgcaacatctgggtagaggttactgtattggacggtgtcttcaaaggcgaacagaaggaaaagaaaacaagtggtagaactgtttgtgtgct

SEQ ID NO: 78234 - DNA, 236 bp, Homo sapiens
gcagtggcagcaccttcctgtcacttgtcttgtcactccccgagtccactgtgagctagaaccacaggctcccatgaagaaggagccagaaccacaggccccatgagcccaggtcccacagcccgcaccttcgtcttccagccagcctctccggagctcagtgtgggtggaggggctgtctggcctcagaaatgggcaaaagacagctctcgttgtcagcgaggtaaatctagcgc

SEQ ID NO: 78235 - DNA, 362 bp, Homo sapiens
agtcctcccaccttggcctcccaaagtgttgagattacaggtgtgagccaccttgccagacctgtttttaatttttatgttttatttttgcagagatgaggttttgagttgttgcccaggttggtcttgaactcctggccttaagtgaagatcctcattctttcaagattgatctatagattcatgcaatcctaattaaaatttcagcaggcttaaaaaaagaaatcaatagctgattctaaaatttatatgaaaacacaaagaatctagactttggaaagtagaagttagagagcttacactacttcacttcaagtcttactgtggtaatcaggacaatacagtattggtgaaagatcagt

SEQ ID NO: 78236 - DNA, 299 bp, Homo sapiens
ggtgatgaggagagggcggcctgagcgtgagggggtgggcgtcagctgccggagaagcttctgccaggcaggagggacgagcgggcccccagctctgacctctcggcttctgttcatgtttgaaaatgaaatcggtggtttgggtggtcgtcagtttcctgtggccgacagaagaaagcaccacagctgggccttcaaacaacgagaattcacccactgagtcctgggagttaagagctctgcagtcgaggggcccgtagggccacgctccctccaggcttcccagaggggctccttcc

SEQ ID NO: 78237 - DNA, 558 bp, Homo sapiens
ttgcaatgggaattcagtatgttttcaattctatcataattaaaagtctttgcagttgtaaatgccacctttaggttaaatataaaccaagcatctgtcagcatcaatgtaagagagcaaataatgccttaaatgctaagagagtaaaactcaaactgcattgaaatgagcttgtcatctcaatgaacattcataaacacatccctgtttagttctgtgaaagagtagaattaataagtacatatattttcacatagtgattttatatatatatatatacatatatatatatgcctttctttagagttgtgctaaacagtgtgatttttctaatgcacactgctctgtccccttctcctctggttcctgttgcccagaatgtccttcctgtggaatagatcccgggagtcatctctcctaggaagctttctgtgaccacccctcctctgagaggctagacctcagtgcttttagagcacatgagtatctccctgtcatagcattttcaccttctctattgacttgtgtgcctcatccatgagacttaagtgttcctta

SEQ ID NO: 78238 - DNA, 222 bp, Homo sapiens
ctaatatgtaaaaatgaaccccaaagatcctgatataatttatctaaaatataattgtctaaaatataatttggacaaattattttaccatataaatgacttcatcaattttcagatatcctgcccacattggccaaattctacattttgtggggaaagggaaaagaagaaatagacatagagatggccaagtgctatggtttggatatggttgttttcacc

SEQ ID NO: 78239 - DNA, 379 bp, Homo sapiens
ctgcaggctagcaaaattatggagatgaaacagaataattctgaagaaaacacgaatgtttgaaagctgttatgttgtatgggttgatcatagttctattttattaacaagggaatctttgaaaaactgtaagcaaatatggtagttttaaagttgaatttttttttttttggattattgttgcttctgtcttaatgaggaatgattttgctcctctttaagtctcttggttccttagctcagatatcctagaattttgctgtggttgtatggctgggaaacttgggaaagagaaagcagtcaatttggagctatgcctaaccagagtaaaattcctgacagagaagggaaattattgagaccacaagagtccccctcc

SEQ ID NO: 78240 - DNA, 410 bp, Homo sapiens
taggctccgtctggtctcctgctcagggaaagccatttctactctccccagaagccggggccacgttctgtactcctggcctctgttctgcagcatgttcccaagcctggttgttactgcctcttccctagggtgaagaggggctgctatgggtggaatctgaggcctctgctggcagaagaaggggcctccttacactctattgctgaagcatagggaccccttctccaaatcaggccagctccttctgtaacccatggggtctcctccatctgggccctagtactactgtgtcctaagtctgaagggttggcctagagccagtccaggctggagatccctttcaattatttctgggatgcagacattgttttgtgttattgtttttacaatttttatatagtttttta

SEQ ID NO: 78241 - DNA, 203 bp, Homo sapiens
tgcctttctttgtcccttttgatcgtttttggtttaacgtttgttttgtcagcaattagaatagcaacccctgttttgttttgtttggtttttttttctatttgcttggtagatttttctccattcctttactttgagcctatgggtgtcactgtatgtgagatgggtctgtggaagatagcagacagttgggtcttgcttct

SEQ ID NO: 78242 - DNA, 582 bp, Homo sapiens
caggcatgcaccaacacaattggttcacttttgtatttttagtagagatagggttttgccatgttggccagctggtctcaaactcctggtctcaagcaatccacccaccttggcctcaagcaatccacccactttggcttcccaaagtgctgggattacaggcatgaaccaccatgcccaggtagcataatgttttgaggttcattcatattgctgcatggatcagtcttcaattcctttttatagctagataatattccatttcatggatctaccacatttcgcttctctgctggtgctgttttgtacctcatctacccaaatacaaaacttgcatttccatttccacaacaatccctgctcacagtttcctcatggggataatgatacttcatcacatcctgtaagggttaaataatacacaacatgtaaagcgaccaaaagcacctagcaactagtgctcaataatatattattaattattatatcatcattatagtcattatgcaatcattatgatcatataaattcctccaacctcttgttttctgttgtatctattcatttgtttcacaaattatc

SEQ ID NO: 78243 - DNA, 295 bp, Homo sapiens
tgggtgtaatatgatctaaaaagtattaataaaagtataactattttcattatattaagcaaagcatgcttattgacccatctatgaagagttgaggattcttagaaagccacttaaatgagatccctggatcttagacagatgacctctgctcagatttcagctcatctctctttagctctatggctttgagaaatcctttgatcttctcaatcctttgacttaatttacaaattatgtaaattatcaatgttgttcaagatatagtctgtggaacaccaaccccatgagatat

SEQ ID NO: 78244 - DNA, 905 bp, Homo sapiens
aacagtcaactgaggtaactcactaccttcagactagcctctgtcagttacatttgtaacttgaataacatgcttaaatttctatttcttgttctatcaagtttagacattttgtattgactccatatgtataagatacagaaattcttagctctgtattgctttttgcctcttttctaccatctattttcccacttctgttaactctagcattacttttactataatttaattttaattcactatgttctgcttatccagaagaaattcaagagggcttatacatatataaaacaggttctgagttgattaatatcatagtttaaaaaacttttaaggatgaattcttaagataaatgtgtggagaaggaataaaaagagtttattttcttagtgtacactcttatcctcctctgcgcaacttgacccttctaaattgtatcttgaagatacctctgatgtccttgggaacttttattttccaacctgtatacccagccatacctgaatttcattaaggtgtactgttttgcatatattcttgattctaggatgccttcaactgtaagacccattattgctttaaaataatgttattggttgggaggggattgcattaaatgattagtccaattaattaataaagtgagaaaacatttatagtttcttatatagaggggaaaataggcaaaaataaaaattaagtcactgttaattctgttgtccgcctttattttctttatccaaataaaactttttttttctttaaaaaaaaaaaaaagagctgggtacagtggcccacatctgtagtcccagctgctttggaggctgaggtcagaggatcccttgagcccaggagttacaagccaccctgggcaacatactgagaccctctctctttcttt

SEQ ID NO: 78245 - DNA, 992 bp, Homo sapiens
taacttcttggggaggggtaaggcaggtatcatctcttcttcttcatgacctcctactcaactgtggggaaggcatccatctggagccagaaccatgcacttcagtcctggttctgacacagttggctgtgcagtttcgggctcatcatttcatttctgtctgcctctgctccattttctgtgatctaacaattctgcttttgggctttgggtgaggattagatttaatttgtataaagtacctgatatataatataatagatgtttaataaatagcagcatttaaaattgttaccatcagcaaagggggagtacaggactaggagatccccaatgtcccatccactacaatacgcaaatacagtgtcatgctggaaaatacagaggcttggcctgcacggaaatatggggaaaggtctttgtgtttatgtgagagagaagatatccatgtctgtgtatgttccagatgatttttaggtcccatcgaattcccccttgctgcaaggaacagcaggagccagagcgtaaggtaaacgtgtctgttgcctgcctgagaaatgaagtcagagccgtgcctgagcccaccattcagggagcaaactgtgcacccaactttggttccgggtctttggtggtagagccagcatagggtagttgccagagctggcatgtgtacttttcctgttgcccaccaccgcctggagtacctggaccggatgcccacgttcctccccctgctgagcaggatgtgttaattgtcttttgcccggccacttccacctctcctctgcctcccctccatgcacaccacacagacaaagtaggaatatgctttttgatgttggctggttttagaagtttgcctcccacctttttttctctttccaaaggagaacaacctgaatacccacacacagtgttatctagctctgactttgaagaggaatttctccccttagggctctattcctggtatagcataatctaggaga

SEQ ID NO: 78246 - DNA, 434 bp, Homo sapiens
aaaggctggtgctgggcacggcagaccccaggaaggacagggcgagcctggctggaacccaagtgtcgaggatggccaagggcatcccgaagtagaatcacaggtgtaaaggggacctggggctcatctggcccctgtctagggcagtgtgtaagaaatgctcctgggtgccctgagggtctgactcaggaggcctgaggtcaggcagggaatctcagttttaacacccactccagggattcctgactggtctgcctgcatgcctcctgtgatgggagtctcactccctcccgaggggctctgtgccggcttctggctctcggctatgacgtgttcttagtcaggctgagctgtgacgtactggtctgtcccctcacccactcactggccccagcttattcaccccactcattcacatagtcatcaacccctgc

SEQ ID NO: 78247 - DNA, 341 bp, Homo sapiens
tggatgtggtgctgggtcttgtcaatgaccagctgggcctcgtggattctctgattcctctggggatattgggaagtgtccagtacaccttctccagcctcccgcttgtgaccggggaattcctggagctggacctcaacacgctggttggggaggctggaggaggactcatcgactacccattggggtggccagctgtgtctcccaagccgatgccagagctgcctcccatgggtgacaacaccaagtcccagctggccatgtctgccaacttcctgggctcagtgctgactctactgcagaagcagcatgctctagacctggatatcaccaatggcatg

SEQ ID NO: 78248 - DNA, 335 bp, Homo sapiens
ggtttgtttatttatttatttatttatttattttgacttaatggagcatgtccttgtagcttcctgaaaaaggtgagtttttttagtcttgcaagtttgaaaatggcattattctactttcacacattattgatactgtgaatgcatactaaattctagattgtcctcagaaaatttttcctttttttttttgagagggaatctcgctctatcccccaggctggagtgcaatggcgcattcttggctctctgcaaccctcgcctcccaggatcaagcgattctcctgcctcagcttccagtgtagctgggattacaggcgcatgccaccatgccc

SEQ ID NO: 78249 - DNA, 839 bp, Homo sapiens
ggatactgcattggttcttctccatcagctggcttagacatcaaacatcttaaatgatacactgttttaatatctaaaaatctgtcattctacttaattaacttagtcataaggacaaagccttagtatatttttgccacatacatgttatgtataaattttactgttgaataatacaagtattcattgctgactgaattcttaaaactttgggaatagaaaaaacacatttattaatggatgctaaagtgattcctgagaaaaataatgtgtatggttaatatggaaaacctttggtaatgtgatttgggtataagaatactaaaaccagagtacagggtgtgaatcatgtaccaggagggattttatttttaaatatctttattgaggtataattgaaatacaataaactgtacatatttaaagtacccaatctgataagttttgtcatatgcatacagccatgaaatcatcaccataagcaaggtaatgaacatattcatcactctcaaagtttcatagtacctctttgtgatcccttcttacttaatcctccttgccaccccaccatcaccagaccactgatctgctttctttatgatcagtttgctacaaatgaaatcacataatatgaaccttttttggtctagcttttgtcacttagcatagtaattttgtgatttgtctatattgttgcatttatgaataaatcatttatctgctgctgagtagaactgcattttatgaatatatcaatttgtttattcttttgatgatggacattaatagttctaggctattatgaataaagtttccatgaacatctatgtacaagtctt

SEQ ID NO: 78250 - DNA, 696 bp, Homo sapiens
gtcttcatagttgctaccatgtttcattcctcaccatcagaaccactctgcttttgttcccccaccatacagtcattgctatgttcctacatagcatttaattccttcttgttttttagaacattgtatatataaattatatctatgtatataaatgtgtaggtgtgtgtgtttatatacctatatatacatatatacatatatatacatttatatgtatacttacatacacacaattactaaagattactaaaggaatattttattaatttctacacttacacagagcctggcacagtaccttctttgcatgtaagaagtgccttataaatgtctaaattgaatgtgtcctcctgtgacctctttcccttgttgcccccagctcagtgtcctctacctcagtgttccccttccttctaggctgcccaacatacatggatgttgtcattgtcttggatggctccaacagcatctacccctggtctgaagttcagaccttcctacgaagactggtagggaaactgtttattgacccagaacagatacaggtaagagaaggcaatatgagctgggcacagttgcttgtggcacctacttaagaggtggaggtgggaggatcccctgaggccaggagttcaagactagcctgggcaatacagtgagacctcatctctaaaaatatgaaagaaaaaaaaa

SEQ ID NO: 78251 - DNA, 479 bp, Homo sapiens
agggccacccgtgggctttttcagaacgaaggcatctccatcaggcagcaggatcctagtgttccactgccgccattcctgcctcagtttctttcctttaagtagcaggaggttatttattctatttgggggctggctttgatataatgtggggtgaggctagctgggttataggatgcatgtagaaaactactcttctgtccacgcagagcctcttggaggtggttcagacccggcctatcctcatctccctgtggatcctcataggcagtgtcctgggagggttgctcctgcttgctctccttgtcttctgcctgtggaagctcagataagtctgagagctactggcaaggttcccagtctaggcatttggcagtgacgcttatcttttcttctacagcttcttgcgccagagggcgtggccgagagggagcgggacgtcgctaggggtggtggcgccgttccttgctccgtctccg

SEQ ID NO: 78252 - DNA, 5015 bp, Homo sapiens
  misc_feature (1934)..(1934): n is a, c, g, or t
gtcttcatagttgctaccatgtttcattcctcaccatcagaaccactctgcttttgttcccccaccatacagtcattgctatgttcctacatagcatttaattccttcttgttttttagaacattgtatatataaattatatctatgtatataaatgtgtaggtgtgtgtgtttatatacctatatatacatatatacatatatatacatttatatgtatacttacatacacacaattactaaagattactaaaggaatattttattaatttctacacttacacagagcctggcacagtaccttctttgcatgtaagaagtgccttataaatgtctaaattgaatgtgtcctcctgtgacctctttcccttgttgcccccagctcagtgtcctctacctcagtgttccccttccttctaggctgcccaacatacatggatgttgtcattgtcttggatggctccaacagcatctacccctggtctgaagttcagaccttcctacgaagactggtagggaaactgtttattgacccagaacagatacaggtgggactggtacagtatggggagagccctgtacatgagtggtccctgggagatttccgaacgaaggaagaagtggtgagagcagcaaagaacctcagtcggcgggagggacgagaaacaaagactgcccaagcaataatggtggcctgcacagaagggttcagtcagtcccatgggggccgacccgaggctgccaggctactggtggttgtcactgatggagagtcccatgatggagaggagcttcctgcagcactaaaggcctgtgaggctggaagagtgacacgctatgggattgcagtccttggtcactacctccggcggcagcgagatcccagctctttcctgagagaaattagaactattgccagtgatccagatgagcgattcttcttcaatgtcacagatgaggctgctctgactgacattgtggatgcactaggagatcggatttttggccttgaagggtcccatgcagaaaacgaaagctcctttgggctggaaatgtctcagattggtttctccactcatcggctaaaggatgggattctttttgggatggtgggtgtgctatggcttgaaggaggccaccgccttttccccccacgaatggcactggaagacgagttcccccctgcactgcagaaccatgcagcctacctgggttactctgtttcttccatgcttttgcggggtggacgccgcctgtttctctctggggctcctcgatttagacatcgaggaaaagtcatcgccttccagcttaagaaagatggggctgtgagggttgcccagagcctccagggggagcagattggttcatactttggcagtgagctctgcccattggatacagatagggatggaacaactgatgtcttacttgtggctgcccccatgttcctgggaccccagaacaaggaaacaggacgtgtttatgtgtatctggtaggccagcagtccttgctgaccctccaaggaacacttcagccagaacccccccaggatgctcggtttggctttgccatgggagctcttcctgatctgaaccaagatggttttgctgatgtggctgtgggggcgcctctggaagatgggcaccagggagcactgtacctgtaccatggaacccagagtggagtcaggccccatcctgcccagaggattgctgctgcctccatgccacatgccctcagctactttggccgaagtgtggatggtcggctagatctggatggagatgatctggtcgatgtggctgtgggtgcccagggggcagccatcctgctcagctcccggcccattgtccatctgaccccatcactggaggtgaccccacaggccatcagtgtggttcagagggactgtaggcggcgaggccaagangcagtctgtctgactgcagccctttgcttccaagtgacctcccgtactcctggtcgctgggatcaccaattctacatgaggttcaccgcatcactggatgaatggactgctggggcacgtgcagcatttgatggctctggccagaggttgtcccctcggaggctccggctcagtgtggggaatgtcacttgtgagcagctacacttccatgtgctggatacatcagattacctccggccagtggccttgactgtgacctttgccttggacaatactacaaagccagggcctgtgctgaatgagggctcacccacctctatacaaaagctggtccccttctcaaaggattgtggccctgacaatgaatgtgtcacagacctggtgcttcaagtgaatatggacatcagaggctccaggaaggccccatttgtggttcgaggtggccggcggaaagtgctggtatctacaactctggagaacagaaaggaaaatgcttacaatacgagcctgagtctcatcttctctagaaacctccacctggccagtctcactcctcagagagagagcccaataaaggtggaatgtgccgccccttctgctcatgcccggctctgcagtgtggggcatcctgtcttccagactggagccaaggtgacctttctgctagagtttgagtttagctgctcctctctcctgagccaggtcttcgtgaagctgactgccagcagtgacagcctggagagaaatgggacccttcaagataacacagcccagacctcagcctacatccaatatgagccccacctcctgttctctagtgagtctaccctgcaccgctatgaggttcacccatatgggaccctcccagtgggtcctggcccagaattcaaaaccactctcagggttcagaacctaggctgctatgtggtcagtggcctcatcatctcagccctccttccagctgtggcccatgggggcaattacttcctatcactgtctcaagtcatcactaacaatgcaagctgcatagtgcagaacctgactgaacccccaggcccacctgtgcatccagaggagcttcaacacacaaacagactgaatgggagcaatactcagtgtcaggtggtgaggtgccaccttgggcagctggcaaaggggactgaggtctctgttggactattgaggctggttcacaatgaatttttccgaagagccaagttcaagtccctgacggtggtcagcacctttgagctgggaaccgaagagggcagtgtcctacagctgactgaagcctcccgttggagtgagagcctcttggaggtggttcagacccggcctatcctcatctccctgtggatcctcataggcagtgtcctgggagggttgctcctgcttgctctccttgtcttctgcctgtggaagcttggcttctttgcccataagaaaatccctgaggaagaaaaaagagaagagaagttggagcaatgaatgtagaataagggtctagaaagtcctccctggcagcttcttcaagagacttgcataaaagcagaggtttgggggctcagatgggacaagaagccgcctctggactatctccccagaccagcagcctgacttgacttttgagtcctagggatgctgctggctagagatgaggctttacctcagacaagaagagctggcaccaaaactagccatgctcccaccctctgcttccctcctcctcgtgatcctggttccatagccaacactggggcttttgtttggggtccttttatccccaggaatcaataatttttttgcctaggtgcctgactcctttcagattccctctttatcttccctcacagtttggaaaggatgagggttatcttcctcgattcttccaccctctcactttcctgcctgttccccactccacaggagggagctgacgttggcttgaaaggagtaaagtcaacatctgctgctttcctgtggactctggtgattcatagagccggatggggagagtcaacaggaaaaaaggagggaggaggaaaagccacaagagacattctgtacaattccaaggaacagagaagcctttagacaggcaactgccatcccccctgaaacctgagacctgtagtgcactcgaccgccctcaggtgttggtgaaacagagctgcccccaggctcgctgggcataggcttcctgattccaagccttttctgggagcaaagccagggcctggtgcctgattttctgaagccaggagccctcaggtggctggagctggaatagcagggaggactgggtgtacctaggcagtattttctctacttctctcaagtcttatactcactcttgagccctccttggggcctgcttagaaagcagacaggagagagagtactgctacttgatgatgggaaatgctttcactttaccagctttgggaagcagcagccccatgggatctaaaagtgtggagtctgcattaagaaacctacatgggtggcatggggctctggggagcaagcccttacttgctcagcactggttatgtagcacaaatagctcctaggaaaatgtttctggggcaaccctagaaccctggtcatattttgcagggtttctctggtggaatcagtttgccagcccttgcttgatgcttactggaaatctccaggttaatttctatctctgatccctccccaacccactccatatttgggtcatggacagtaaaggcagttggattctcatagacaactgggtaacttatatttctttgtaatcaagacttgagatatcgaagtcagttattggtctccagagtgcagctctgggagccttttgaagaatcagcactcattaagagctgagaagagagaagacctgattgggtggttgactagcagtcacagaacctgtcctcccaggctgttcctgaggcctgaccacagtatttattttggcatgtctctggccttctgcagaggcccaccctcatgggcattgtctctgtttcccagtggggtggacagtatatcagatggtcagaacaaataaagttcagtgtcaaatgaaat

SEQ ID NO: 78253 - DNA, 1279 bp, Homo sapiens
agggccacccgtgggctttttcagaacgaaggcatctccatcaggcagcaggatcctagtgttccactgccgccattcctgcctcagtttctttcctttaagtagcaggaggttatttattctatttgggggctggctttgatataatgtggggtgaggctagctgggttataggatgcatgtagaaaactactcttctgtccacgcagagcctcttggaggtggttcagacccggcctatcctcatctccctgtggatcctcataggcagtgtcctgggagggttgctcctgcttgctctccttgtcttctgcctgtggaagctcagataagtctgagagctactggcaaggttcccagtctaggcatttggcagtgacgcttatcttttcttctacagcttcttggcttctttgcccataagaaaatccctgaggaagaaaaaagagaagagaagttggaccctcaggtggctggagctggaatagcagggaggactgggtgtacctaggcagtattttctctacttctctcaagtcttatactcactcttgagccctccttggggcctgcttagaaagcagacaggagagagagtactgctacttgatgatgggaaatgctttcactttaccagctttgggaagcagcagccccatgggatctaaaagtgtggagtctgcattaagaaacctacatgggtggcatggggctctggggagcaagcccttacttgctcagcactggttatgtagcacaaatagctcctaggaaaatgtttctggggcaaccctagaaccctggtcatattttgcagggtttctctggtggaatcagtttgccagcccttgcttgatgcttactggaaatctccaggttaatttctatctctgatccctccccaacccactccatatttgggtcatggacagtaaaggcagttggattctcatagacaactgggtaacttatatttctttgtaatcaagacttgagatatcgaagtcagttattggtctccagagtgcagctctgggagccttttgaagaatcagcactcattaagagctgagaagagagaagacctgattgggtggttgactagcagtcacagaacctgtcctcccaggctgttcctgaggcctgaccacagtatttattttggcatgtctctggccttctgcagaggcccaccctcatgggcattgtctctgtttcccagtggggtggacagtatatcagatggtcagaacaaataaagttcagtgtcaaatgaaat

SEQ ID NO: 78254 - DNA, 461 bp, Homo sapiens
gagcatgttctgagggtgccctcccaagcctgggagtaactatttcccccatccccaggcctgtgcccctctctggtctcgtgcttgtggcagctctgtcttcagttctgggatatgtgcccgtgtggatgcttcattccagcctcagggaagcctggcacccactgcccaacgtgagccagaggaaggctgagtacttggttcccagaaggagatactgggtgggaaaaagatggggcaaagcggtatgatgcctggcaaagggcctgcatggctatcctcattgctacctaatgtgcttgcaaaagctccatgtttcctaacagattcagactcctggccaggtgtggtggcccacacctgtaattctagcactttgggaggccaaggtgggcagatcacttgaggtcaggagttcaagaccagcctggccaacatggtgaaactccatctctactaaa

SEQ ID NO: 78255 - DNA, 388 bp, Homo sapiens
ccctggatctggaagagttggggagtggcaggggggcagtgtcttgtgaactgtccaaggactgggaacttgaggaatacaagggcattaactacttcccagacttcagccacagcatgttagttggctgtgttctgtaccaactctaatgcctcattccttgatcttatgacctcttaggtccttggtcactacctccggcggcagcgagatcccagctctttcctgagagaaattagaactattgccagtgatccagatgagcgattcttcttcaatgtcacagatgaggctgctctgactgacattgtggatgcactaggagatcggatttttggccttgaaggtgaggattactctggagaaatgactagaggcgggagaagtt

SEQ ID NO: 78256 - DNA, 5173 bp, Homo sapiens
  misc_feature (2092)..(2092): n is a, c, g, or t
gggaaagtgaagaaaacagaaaaggagagggacagaggccagaggacttctcatactggacagaaaccgatcaggcatggaactccccttcgtcactcacctgttcttgcccctggtgttcctgacaggtctctgctccccctttaacctggatgaacatcacccacgcctattcccagggccaccagaagctgaatttggatacagtgtcttacaacatgttgggggtggacagcgatggatgctggtgggcgccccctgggatgggccttcaggcgaccggaggggggacgtttatcgctgccctgtagggggggcccacaatgccccatgtgccaagggccacttaggtgactaccaactgggaaattcatctcatcctgctgtgaatatgcacctggggatgtctctgttagagacagatggtgatgggggattcatggcctgtgcccctctctggtctcgtgcttgtggcagctctgtcttcagttctgggatatgtgcccgtgtggatgcttcattccagcctcagggaagcctggcacccactgcccaacgctgcccaacatacatggatgttgtcattgtcttggatggctccaacagcatctacccctggtctgaagttcagaccttcctacgaagactggtagggaaactgtttattgacccagaacagatacaggtgggactggtacagtatggggagagccctgtacatgagtggtccctgggagatttccgaacgaaggaagaagtggtgagagcagcaaagaacctcagtcggcgggagggacgagaaacaaagactgcccaagcaataatggtggcctgcacagaagggttcagtcagtcccatgggggccgacccgaggctgccaggctactggtggttgtcactgatggagagtcccatgatggagaggagcttcctgcagcactaaaggcctgtgaggctggaagagtgacacgctatgggattgcagtccttggtcactacctccggcggcagcgagatcccagctctttcctgagagaaattagaactattgccagtgatccagatgagcgattcttcttcaatgtcacagatgaggctgctctgactgacattgtggatgcactaggagatcggatttttggccttgaagggtcccatgcagaaaacgaaagctcctttgggctggaaatgtctcagattggtttctccactcatcggctaaaggatgggattctttttgggatggtgggggcctatgactggggaggctctgtgctatggcttgaaggaggccaccgccttttccccccacgaatggcactggaagacgagttcccccctgcactgcagaaccatgcagcctacctgggttactctgtttcttccatgcttttgcggggtggacgccgcctgtttctctctggggctcctcgatttagacatcgaggaaaagtcatcgccttccagcttaagaaagatggggctgtgagggttgcccagagcctccagggggagcagattggttcatactttggcagtgagctctgcccattggatacagatagggatggaacaactgatgtcttacttgtggctgcccccatgttcctgggaccccagaacaaggaaacaggacgtgtttatgtgtatctggtaggccagcagtccttgctgaccctccaaggaacacttcagccagaacccccccaggatgctcggtttggctttgccatgggagctcttcctgatctgaaccaagatggttttgctgatgtggctgtgggggcgcctctggaagatgggcaccagggagcactgtacctgtaccatggaacccagagtggagtcaggccccatcctgcccagaggattgctgctgcctccatgccacatgccctcagctactttggccgaagtgtggatggtcggctagatctggatggagatgatctggtcgatgtggctgtgggtgcccagggggcagccatcctgctcagctcccggcccattgtccatctgaccccatcactggaggtgaccccacaggccatcagtgtggttcagagggactgtaggcggcgaggccaagangcagtctgtctgactgcagccctttgcttccaagtgacctcccgtactcctggtcgctgggatcaccaattctacatgaggttcaccgcatcactggatgaatggactgctggggcacgtgcagcatttgatggctctggccagaggttgtcccctcggaggctccggctcagtgtggggaatgtcacttgtgagcagctacacttccatgtgctggatacatcagattacctccggccagtggccttgactgtgacctttgccttggacaatactacaaagccagggcctgtgctgaatgagggctcacccacctctatacaaaagctggtccccttctcaaaggattgtggccctgacaatgaatgtgtcacagacctggtgcttcaagtgaatatggacatcagaggctccaggaaggccccatttgtggttcgaggtggccggcggaaagtgctggtatctacaactctggagaacagaaaggaaaatgcttacaatacgagcctgagtctcatcttctctagaaacctccacctggccagtctcactcctcagagagagagcccaataaaggtggaatgtgccgccccttctgctcatgcccggctctgcagtgtggggcatcctgtcttccagactggagccaaggtgacctttctgctagagtttgagtttagctgctcctctctcctgagccaggtcttcgtgaagctgactgccagcagtgacagcctggagagaaatgggacccttcaagataacacagcccagacctcagcctacatccaatatgagccccacctcctgttctctagtgagtctaccctgcaccgctatgaggttcacccatatgggaccctcccagtgggtcctggcccagaattcaaaaccactctcagggttcagaacctaggctgctatgtggtcagtggcctcatcatctcagccctccttccagctgtggcccatgggggcaattacttcctatcactgtctcaagtcatcactaacaatgcaagctgcatagtgcagaacctgactgaacccccaggcccacctgtgcatccagaggagcttcaacacacaaacagactgaatgggagcaatactcagtgtcaggtggtgaggtgccaccttgggcagctggcaaaggggactgaggtctctgttggactattgaggctggttcacaatgaatttttccgaagagccaagttcaagtccctgacggtggtcagcacctttgagctgggaaccgaagagggcagtgtcctacagctgactgaagcctcccgttggagtgagagcctcttggaggtggttcagacccggcctatcctcatctccctgtggatcctcataggcagtgtcctgggagggttgctcctgcttgctctccttgtcttctgcctgtggaagcttggcttctttgcccataagaaaatccctgaggaagaaaaaagagaagagaagttggagcaatgaatgtagaataagggtctagaaagtcctccctggcagcttcttcaagagacttgcataaaagcagaggtttgggggctcagatgggacaagaagccgcctctggactatctccccagaccagcagcctgacttgacttttgagtcctagggatgctgctggctagagatgaggctttacctcagacaagaagagctggcaccaaaactagccatgctcccaccctctgcttccctcctcctcgtgatcctggttccatagccaacactggggcttttgtttggggtccttttatccccaggaatcaataatttttttgcctaggtgcctgactcctttcagattccctctttatcttccctcacagtttggaaaggatgagggttatcttcctcgattcttccaccctctcactttcctgcctgttccccactccacaggagggagctgacgttggcttgaaaggagtaaagtcaacatctgctgctttcctgtggactctggtgattcatagagccggatggggagagtcaacaggaaaaaaggagggaggaggaaaagccacaagagacattctgtacaattccaaggaacagagaagcctttagacaggcaactgccatcccccctgaaacctgagacctgtagtgcactcgaccgccctcaggtgttggtgaaacagagctgcccccaggctcgctgggcataggcttcctgattccaagccttttctgggagcaaagccagggcctggtgcctgattttctgaagccaggagccctcaggtggctggagctggaatagcagggaggactgggtgtacctaggcagtattttctctacttctctcaagtcttatactcactcttgagccctccttggggcctgcttagaaagcagacaggagagagagtactgctacttgatgatgggaaatgctttcactttaccagctttgggaagcagcagccccatgggatctaaaagtgtggagtctgcattaagaaacctacatgggtggcatggggctctggggagcaagcccttacttgctcagcactggttatgtagcacaaatagctcctaggaaaatgtttctggggcaaccctagaaccctggtcatattttgcagggtttctctggtggaatcagtttgccagcccttgcttgatgcttactggaaatctccaggttaatttctatctctgatccctccccaacccactccatatttgggtcatggacagtaaaggcagttggattctcatagacaactgggtaacttatatttctttgtaatcaagacttgagatatcgaagtcagttattggtctccagagtgcagctctgggagccttttgaagaatcagcactcattaagagctgagaagagagaagacctgattgggtggttgactagcagtcacagaacctgtcctcccaggctgttcctgaggcctgaccacagtatttattttggcatgtctctggccttctgcagaggcccaccctcatgggcattgtctctgtttcccagtggggtggacagtatatcagatggtcagaacaaataaagttcagtgtcaaatgaaat

SEQ ID NO: 78257 - DNA, 4232 bp, Homo sapiens
  misc_feature (1934)..(1934): n is a, c, g, or t
gtcttcatagttgctaccatgtttcattcctcaccatcagaaccactctgcttttgttcccccaccatacagtcattgctatgttcctacatagcatttaattccttcttgttttttagaacattgtatatataaattatatctatgtatataaatgtgtaggtgtgtgtgtttatatacctatatatacatatatacatatatatacatttatatgtatacttacatacacacaattactaaagattactaaaggaatattttattaatttctacacttacacagagcctggcacagtaccttctttgcatgtaagaagtgccttataaatgtctaaattgaatgtgtcctcctgtgacctctttcccttgttgcccccagctcagtgtcctctacctcagtgttccccttccttctaggctgcccaacatacatggatgttgtcattgtcttggatggctccaacagcatctacccctggtctgaagttcagaccttcctacgaagactggtagggaaactgtttattgacccagaacagatacaggtgggactggtacagtatggggagagccctgtacatgagtggtccctgggagatttccgaacgaaggaagaagtggtgagagcagcaaagaacctcagtcggcgggagggacgagaaacaaagactgcccaagcaataatggtggcctgcacagaagggttcagtcagtcccatgggggccgacccgaggctgccaggctactggtggttgtcactgatggagagtcccatgatggagaggagcttcctgcagcactaaaggcctgtgaggctggaagagtgacacgctatgggattgcagtccttggtcactacctccggcggcagcgagatcccagctctttcctgagagaaattagaactattgccagtgatccagatgagcgattcttcttcaatgtcacagatgaggctgctctgactgacattgtggatgcactaggagatcggatttttggccttgaagggtcccatgcagaaaacgaaagctcctttgggctggaaatgtctcagattggtttctccactcatcggctaaaggatgggattctttttgggatggtgggtgtgctatggcttgaaggaggccaccgccttttccccccacgaatggcactggaagacgagttcccccctgcactgcagaaccatgcagcctacctgggttactctgtttcttccatgcttttgcggggtggacgccgcctgtttctctctggggctcctcgatttagacatcgaggaaaagtcatcgccttccagcttaagaaagatggggctgtgagggttgcccagagcctccagggggagcagattggttcatactttggcagtgagctctgcccattggatacagatagggatggaacaactgatgtcttacttgtggctgcccccatgttcctgggaccccagaacaaggaaacaggacgtgtttatgtgtatctggtaggccagcagtccttgctgaccctccaaggaacacttcagccagaacccccccaggatgctcggtttggctttgccatgggagctcttcctgatctgaaccaagatggttttgctgatgtggctgtgggggcgcctctggaagatgggcaccagggagcactgtacctgtaccatggaacccagagtggagtcaggccccatcctgcccagaggattgctgctgcctccatgccacatgccctcagctactttggccgaagtgtggatggtcggctagatctggatggagatgatctggtcgatgtggctgtgggtgcccagggggcagccatcctgctcagctcccggcccattgtccatctgaccccatcactggaggtgaccccacaggccatcagtgtggttcagagggactgtaggcggcgaggccaagangcagtctgtctgactgcagccctttgcttccaagtgacctcccgtactcctggtcgctgggatcaccaattctacatgaggttcaccgcatcactggatgaatggactgctggggcacgtgcagcatttgatggctctggccagaggttgtcccctcggaggctccggctcagtgtggggaatgtcacttgtgagcagctacacttccatgtgctggatacatcagattacctccggccagtggccttgactgtgacctttgccttggacaatactacaaagccagggcctgtgctgaatgagggctcacccacctctatacaaaagctggtccccttctcaaaggattgtggccctgacaatgaatgtgtcacagacctggtgcttcaagtgaatatggacatcagaggctccaggaaggccccatttgtggttcgaggtggccggcggaaagtgctggtatctacaactctggagaacagaaaggaaaatgcttacaatacgagcctgagtctcatcttctctagaaacctccacctggccagtctcactcctcagagagagagcccaataaaggtggaatgtgccgccccttctgctcatgcccggctctgcagtgtggggcatcctgtcttccagactggagccaaggtgacctttctgctagagtttgagtttagctgctcctctctcctgagccaggtcttcgtgaagctgactgccagcagtgacagcctggagagaaatgggacccttcaagataacacagcccagacctcagcctacatccaatatgagccccacctcctgttctctagtgagtctaccctgcaccgctatgaggttcacccatatgggaccctcccagtgggtcctggcccagaattcaaaaccactctcagggttcagaacctaggctgctatgtggtcagtggcctcatcatctcagccctccttccagctgtggcccatgggggcaattacttcctatcactgtctcaagtcatcactaacaatgcaagctgcatagtgcagaacctgactgaacccccaggcccacctgtgcatccagaggagcttcaacacacaaacagactgaatgggagcaatactcagtgtcaggtggtgaggtgccaccttgggcagctggcaaaggggactgaggtctctgttggactattgaggctggttcacaatgaatttttccgaagagccaagttcaagtccctgacggtggtcagcacctttgagctgggaaccgaagagggcagtgtcctacagctgactgaagcctcccgttggagtgagagcctcttggaggtggttcagacccggcctatcctcatctccctgtggatcctcataggcagtgtcctgggagggttgctcctgcttgctctccttgtcttctgcctgtggaagcttggcttctttgcccataagaaaatccctgaggaagaaaaaagagaagagaagttggaccctcaggtggctggagctggaatagcagggaggactgggtgtacctaggcagtattttctctacttctctcaagtcttatactcactcttgagccctccttggggcctgcttagaaagcagacaggagagagagtactgctacttgatgatgggaaatgctttcactttaccagctttgggaagcagcagccccatgggatctaaaagtgtggagtctgcattaagaaacctacatgggtggcatggggctctggggagcaagcccttacttgctcagcactggttatgtagcacaaatagctcctaggaaaatgtttctggggcaaccctagaaccctggtcatattttgcagggtttctctggtggaatcagtttgccagcccttgcttgatgcttactggaaatctccaggttaatttctatctctgatccctccccaacccactccatatttgggtcatggacagtaaaggcagttggattctcatagacaactgggtaacttatatttctttgtaatcaagacttgagatatcgaagtcagttattggtctccagagtgcagctctgggagccttttgaagaatcagcactcattaagagctgagaagagagaagacctgattgggtggttgactagcagtcacagaacctgtcctcccaggctgttcctgaggcctgaccacagtatttattttggcatgtctctggccttctgcagaggcccaccctcatgggcattgtctctgtttcccagtggggtggacagtatatcagatggtcagaacaaataaagttcagtgtcaaatgaaat

SEQ ID NO: 78258 - DNA, 378 bp, Homo sapiens
ggaggaaatacatccctagtgggggcgggtatgaaatactccctcttaactcatgcggtttctcactgacctctggttacttcccttgggacctcctgctatgcctttagggaacccccctactctggaccccatcttcttttcctttacctctgttactttgcccacttctaggttactctgtttcttccatgcttttgcggggtggacgccgcctgtttctctctggggctcctcgatttagacatcgaggaaaagtcatcgccttccagcttaagaaagatggggctgtgagggttgcccagagcctccagggggagcaggtagggcatccaaggaagggtgggacctttggattcccagggacctctgggctgt

SEQ ID NO: 78259 - DNA, 331 bp, Homo sapiens
tctcagttctgctaacagattggctttcagatgcttagtgacaccattgcttgaattaagaagccagagggagaatgttggggagagtgtgttattcctgagagttttaaatttagttctgcagccgggcacagtggttcacacctgcaatcccagcaccttgggaggctgaggcgggtggatcgcctgaggtcaggagtttgagaccagccttaacatggtgaaacgtcgtctctactaaaaataaaaaaattagctgggtgtggtggcaggcgcctgtaatcccagctactcgggaggctgaggcaggagaattgcttgaacctgggag

SEQ ID NO: 78260 - DNA, 343 bp, Homo sapiens
gttcaagcaattctcctgcctcagcctcccaagtagctgagactacaggcacctgccaccacgcccagctatgcttatgttttttaatgttcagattaatcatcataaaggcatttcatttttctctttaatgtacagagatatttttatttttaaagaaatgtatttcaaaaattatttttgaataggactattttaacaatataatacaccaggctgggcgcggtggctaacacctgtaatcccaacactttgggaggccaaggtgggtggatcgtttgagttcaggagttggagaccagcctgaccaaaatgatgaaaccccgtctctacttaaaaaaaa

SEQ ID NO: 78261 - DNA, 1035 bp, Homo sapiens
gttgttaattgtttttttttaagagactgggtcttgctctgttgtccaggctggagtgcgatggtgcagtcacggctcactgcagcctcaacctcctgggctcaagccatcctcccacctcggccttctgagtggctgggactacaggttcttgccaccacaccttcctgattttttatttttttgtagagacagcctgggcagcatagtgagactttgtctctaccagacataaaaagtaaataaaaataaaatgattaaacatgcacaactccacctcgagctggatctctccttaggtctaaagacacttgctgagaacctgatgtgtgcctggccttccaaggcacacctgtcactggcttggaactcagaccaatcaaaatgcctgtgctgctgacagctgagctctcttcctctggttctcctcctgtgtcctgggggtgtttttccagacctgctgtggggagaacctttgggctcagatgataaagatcctgaattagcagagtcctgtgccagctccagcccctgcctttgggtggaccggactaggctggggaaagaaagatgtctggctatgaaagggtggctggccaaggttgaggctcagcctgcccctgctcaggctccgagcagcaggctcagcagccacagttaggcacgtttgcacttccaaccatcacaggcaggcgggccaaccggcccatggtgtggtgactaacacctcattaatggtcataccccttctgtacctggcatgtgccctccattgtgtgcctccggcaaagagcccactatcaagttccccagtcagcagctacttggtagtcactgtggcatgtcggtcaccattaatatttgaaagatgcctgtgctctgcttcaggctgaggcaggcaccccttaccttcctgttatgtgaagatgcctgcaggaaaggtcacacctagggtgggtggactagtaatgctccctgttgttatttggccttcaaaattaaatttgtcttgggcccaagtggtttgcgatttct

SEQ ID NO: 78262 - DNA, 981 bp, Homo sapiens
gttgttaattgtttttttttaagagactgggtcttgctctgttgtccaggctggagtgcgatggtgcagtcacggctcactgcagcctcaacctcctgggctcaagccatcctcccacctcggccttctgagtggctgggactacaggttcttgccaccacaccttcctgattttttatttttttgtagagacagcctgggcagcatagtgagactttgtctctaccagacataaaaagtaaataaaaataaaatgattaaacatgcacaactccacctcgagctggatctctccttaggtctaaagacacttgctgagaacctgatgtgtgcctggccttccaaggcacacctgtcactggcttggaactcagaccaatctcctgggggtgtttttccagacctgctgtggggagaacctttgggctcagatgataaagatcctgaattagcagagtcctgtgccagctccagcccctgcctttgggtggaccggactaggctggggaaagaaagatgtctggctatgaaagggtggctggccaaggttgaggctcagcctgcccctgctcaggctccgagcagcaggctcagcagccacagttaggcacgtttgcacttccaaccatcacaggcaggcgggccaaccggcccatggtgtggtgactaacacctcattaatggtcataccccttctgtacctggcatgtgccctccattgtgtgcctccggcaaagagcccactatcaagttccccagtcagcagctacttggtagtcactgtggcatgtcggtcaccattaatatttgaaagatgcctgtgctctgcttcaggctgaggcaggcaccccttaccttcctgttatgtgaagatgcctgcaggaaaggtcacacctagggtgggtggactagtaatgctccctgttgttatttggccttcaaaattaaatttgtcttgggcccaagtggtttgcgatttct

SEQ ID NO: 78263 - DNA, 208 bp, Homo sapiens
tattattattactcctgttaccattttatggatgaagaaacggagacccagtggaagtaaataattttgctcaagatggccaaacaaaaagtggtagagcttttgcacttcttcctagctcccctgactcctggaacattgctggacagcacagtcagccctccatatctgtgggttctgtattcattaatttaaccaaccacagatc

SEQ ID NO: 78264 - DNA, 1771 bp, Homo sapiens
tccagtgctgaatgtttaatttcctatgaaaggctgcgagctagaggaggaagcaggaacacccagcgccgttcccgcccatcctcccgctccgccccgctccgcccgtgctgggctgtggcctccacaccaagcagccgccctgggccgccttccttcgtctgtgcgtgcagcgccgcctccttcagcttaggcccgacactccatgaactctcattttccaccttctccgtctccagcttccaagctgcacagggccaggccgaggtacgtgatggcgggcactgaattacagatcccgtctgtggccgccagcctctgtgtcctgccacctcctccgagaggacatcaccgccaccaggtggagcgagtctcctcctcggcgctccaaccacgtgctgtttattactctgtggggattcccataccgaggcctcttcagttcctggaacagtagcactaaaaggctcctgagtgcctctgttaatttgattgttctggttcgcactacaatgaccgggctggagagggggcgctcgtaatgaaacaggaactgctcctcgcgcccgctccagagtcctttacatctttggggagagggcatacggggagctacatttcattttcctgaagattttccacgcgaaagtgctggggagagagttgggcctgggaggctgcgccttcttcccgcgaatcccgaaaactgcgcggcaaaggcgggttccgcagaagtcgcgcgtgacccggggcgccgccctcctcggggcccattcggatctgccgcccgtcctctccagagcgccccctggcgccctctaggccatcttgattccaccgccgcagttgaaagaattaataaataaatcctagtctcgcgtctagaccggtccgtgagggtcccctgctcaccggacaccctgccgcaatctctgctgtcccattctggcctccctacggggacgggggccaccgtttgcacatcagcggcgtttgggacagcactgtgcaagatctgtgactcggctttcagaagcttctgccacaaggcttcaaaggaaaccttcaattttcacatttcctagggggaaaaaaaatctgagatttcttcttgtggcttgatgaacttagctttcgtcgctggaacaaaacccgaggaacagcgtcttcgccacccttgccaccttactgatgtttctcagggggcacatgcccatcgcaaccttatgaccaatcccatttttcagatgcagaaagaggctcagagaggttaagtgctacttgctcaaggccacagcagggagtggagctggattcgctcccaggcaactgaccccagcgtgcagtcgatgccttctcctagtcccactcaccgtgtaagacctggtatttacaaattagattctcgttgtgcttctccattggaagggcactaggggagctcattgtctaagactgccatccctaactgccttttaaaaagaaatctgggccgggcgcagtggttcatgcctgtaatcccagcactttgggaggccgaggcaggcagatcacgaggtcaagagatcgagaccgtcctggctaacacggtgaaaccccgtctctactaaaaatacaaaaaattagccgggcgtggtggcgggcgcctgtagtcccagctacttgggaggctgaggcaggagaatggcttgaacccaggaggctgaacttgcagtgagccgagatcgccccactgcactccagcctgggcgacagagcgagactctgtctc

SEQ ID NO: 78265 - DNA, 753 bp, Homo sapiens
gctcaggcacccgctgtggcccgtgaggggattgccctccctgcggggtggacagacacagggctcaaaggtgccccctccccaccctcggggagtggaccggaggggccgcctgggagggcagctgctccaggccattgtgtttgcgggagggggcggggtgggggccagagcccagaggggacctggaagtttggaactgagaaagtggcacaggagtagggcacgagggctttcgaaggatttgttttgggccttgggagtgctcgccgtcacggtgggcttagggggctcccgcctccagcccctcccccagtttaggaccctggcgggaggcttgaggctaacctcagagaaggggcaggaaggggtcaacccgcagccccacagggggagggaggatttctccaggagccctcctctaggcagggggccccttgcagcagtccctgagggcaggaaacgctgtgtgactgtaggcagagtgctcaacctctctgagcccaagtggctgtagttcatgccacaaacacctgagtgtccctgtgtgctggcttgggccgaccccagagagagcccatcaccttctttttggggtttggggcttggcctggaccatacagacaggggccaggagagaagttctcccctccctgtccccagacgtgttcctctgccctcatagactgggcctcccttcccacctcacatccccctcccaccttccccctgccagaccctgtaggccccata

SEQ ID NO: 78266 - DNA, 546 bp, Homo sapiens
ggatgcttaaactataatttgtagaagctgaaatggaaaatgggcctgaggtgtttcctggtaattagctgtcctgcctttccatggctggttgcttagaaatgacagtttgtgccactctgcgaaattccctgactgcaaagcacccactcactgcaggagaccacacgttgctttgtgaatcagtgggggttggggcagcagcatgttcttttttctcagctttgatttgttgttaattgagcaagctgtaattgtagacgtgaactgaaactgattatttaatcgtgggggattgaaataattgcctatgttgcaaataaggaattttatccttcctactttgtaaaagaaatgacatgcctaccacatgggaatagtctgtgctgagagaaaacatgcttgagcattttaattgggaatcagtttcattactttttttttgagatggagtttgtctcttgcccaggctatagtgcagtgagccgagattgcaccactgtactccagcccgggcaacagggcaagattccatctcaaaaaaat

SEQ ID NO: 78267 - DNA, 453 bp, Homo sapiens
cattcccacaaagtgaaggaacagtttccaaaacccctgcgaggcagagttaagacctgtgacgtggggagcctggaaacacccggcccacgcgtgctgcagatgtggggagcctggaaacacccggcccacgcgtgctgcagatgtggggagcctggaaacacccggcccacgcgtgctgcagatgtggggagtctggaaacacccggcccacgcgtgctgcagatgtggggagcccggaaacacctggcccatgcctgttcagtccgtcatggcgtttggtttatggtggccgatactaagagccactgaggtctgggttgtgtaagggttagctaccaccctataacctccctaccaggtaataaggagaccaagtctttgatcaaattctgattttttaactaaattttcattagaaagcaagcacaaaataaaatcaaaacaaccttt

SEQ ID NO: 78268 - DNA, 310 bp, Homo sapiens
  misc_feature (269)..(269): n is a, c, g, or t
  misc_feature (271)..(271): n is a, c, g, or t
cattcccacaaagtgaaggaacagtttccaaaacccctgcgaggcagagttaagacctgtgacgtggggagcctggaaacacccggcccacgcgtgctgcagatgtggggagcctggaaacacccggcccacgcgtgctgcagatgtggggagcctggaaacacccggcccacgcgtgctgcagatgtggggagtctggaaacacccggcccacgcgtgctgcagatgtggggagcccggaaacacctggcccacgcgtgctgcagatntngggagcccggaaacacctgggcccatgcctgtttcagtc

SEQ ID NO: 78269 - DNA, 655 bp, Homo sapiens
actgtgtgagggggttacagagatgagaggacacagttcttgtctttggctcactttaactgatgtaagtaggaccacaacataaggcaattgctgcacaatggaagggcgcaccatttattacaggtgaacaggaggctctgcaatagtggcctggaagggagtaacacagtgtctgagaagggcatgttgtttcctcataaataacctggaacatgattcatattgttggaattaagagttggataaagaagcatttatttaaaacgttgtcagggacatggagctcttcccaaggagccaaaataccatttagagttctagagatcctgcattcttgttttgactgcatgctctggacagtttgcagctcaggtaagaacaattccaacttccagatgagattagagcctagaaggggtttaatcttcaaatcatctgctaacttaaaaacaaaatttggaaacagtaatgattaacctgattaaagctgctctcaaggatcaaccagtaaaagaagtgatagcggtgtcaacaataccacataaagtagcaggatttgtatgtcagcagtcccatttttcaagatgccaagtctaaatctatttcctacccatatttaaatgaggagccagttttggaggaattttacttg

SEQ ID NO: 78270 - DNA, 836 bp, Homo sapiens
ccggcttgtgaggattacagctcccatgtccatagtctggcagatctctactatgtgttcagattatcttaaacgtgtagaggatgtataaagtagttccttgggccttttcagagatctcttttggttcaaaggggacacctaaagtattttaccaagttggataattattgaggttttcccaaactgatcagagccactgaggtgggtaatgttctagcactaaccccttacaggcctggagttgctgctagattgctactagccctattgggggaccccggtggtttctggacacgttggagtcatacgtggtgtccagcaacaacaccatatatgggaacacagagttggcaccaaacttgagatgtttgtaaagtaacttaagagagtaattcatgctcaatacagaaagtttgggaaacatgggaagtaccaaaagaaaaaacaaaaatcacctgtagtctcattatccaaaaataaacactactatattttggagtattcttttttaataaaacgatagcccaatgtacatacttatatgtggcttttttcttcccatttgttaatgtaagtattcttttatggtattttttttttgtttttacataactgcacagttagtctagcccttaaagtgccaagggcttatcacattcctagaactcactaacatatgttttcagattttgaccatgcttctacagtacacatttgaacaatgaggaacactaagggtaagagaccttattccttggattttccatgacccattgtttgagaaacctggctttgtttctacagtgagtatcagtggtcctattagagtgtct

SEQ ID NO: 78271 - DNA, 2361 bp, Homo sapiens
  misc_feature (821)..(821): n is a, c, g, or t
  misc_feature (888)..(888): n is a, c, g, or t
  misc_feature (924)..(924): n is a, c, g, or t
  misc_feature (978)..(978): n is a, c, g, or t
  misc_feature (1410)..(1410): n is a, c, g, or t
  misc_feature (1724)..(1724): n is a, c, g, or t
  misc_feature (1726)..(1726): n is a, c, g, or t
  misc_feature (1731)..(1731): n is a, c, g, or t
  misc_feature (1793)..(1793): n is a, c, g, or t
  misc_feature (1869)..(1869): n is a, c, g, or t
  misc_feature (2012)..(2012): n is a, c, g, or t
  misc_feature (2053)..(2053): n is a, c, g, or t
tttgggctggaaccggaggtgtcgctcttcggacctcaaggttccccttaacacagagcgccccgcagtcttcgcggaaagcgttcggggtaggcgatggctgcgacgcgtgcagggccccgcgcccgcgagatcttcacctcgctggagtacggaccggtgccggagagccacgcatgcgcactggtgagagtctgcccggccggcgctgctcgctgcgttccccaggcctgggcgcccggtttttcgcggggagtcccgtcatccactgcggtagctcagccgctccgcctctcttagtccccgtgattcccgccgcccaataggatcgcgccctgtaggacgctcccttgagccttggcggtggcagccttttagtctgttccggtcttccccactggttctcttgccccttgatcctgaactcctcgtagtgtttccgcggttttcctgaactcctctagacgctctcgtgattcctcagggtcccctcagaacctgacgccacccaccagaccccttaggattcctgtgaggctccagtgacccacaacccccattgtctttccacgactcttcaaaacatcctatggcttccatgggcctccagagcaccccagacctcctgagggactcccttcatccctttgattacccagagaccttcagaacttccatggagcccccgtgatcccataggacccctcaatactcgtggggttcatgtgacctcatcggaactctcaggagcctagaatacatcaggacttccggtttgggttgggttttttttttgtttttttttttgagccagggtctcnctctgtcgcccaaactgaagtgcactggcgctatcacaccactgcagcctcaacctcctgggctcangccatcctctcacctcagccccccaagtaactgggnccagagacgcgcgccaccactctcagctaatatttgtactttttctagagacanggtttcacatgttggccaggctggtctcgaactcctggcctcaagtgatccacccacctcgacttcccaaagtgctgggattacaggcgtgagctactgcacccagccacatcaggacttcctgtaattacttatggcccctcacaataccctcacggggctcctatgatctctctagctctcagaatgtcccatagggttcccatgattgttcaggaacccctgaagtcctcgtgagggtcccatgatcccctgggggtcctcagaacctccctaggactcccatgacccctcagaggcccccagaaccctcgtggggttcctgcaaatgagtagggcacctcaaactttctgtcgtttccccaggcactctcagaattccttcacggggctctcatgatcccccagggtcccccagcacccaggcgaaangagcttaggcttctttgagggggagggcaggaggccagagcaatgatccaagtggaaggaactggatcagaaccctggcacagcctagaacttggggaggccaagacgggcagatcgcctgagctcaggaattcgagaccagcctgggcaacatagtgaaacctcgtctctactaaaatacaaaacattgggccaggcgtggtggctcagacttgtaatcccagcactttgggagtcctaggtgggcggatcacctgaggtcaggagttcgagaccagcctggccaacatggtgaaaccccatctctactaaantncaaanattacctgagcgtggtggtgtttgcctgtaatcctagctacttgggaggctgaggtgggagnattgcttgaatccaggaggcagaggttgcagtaagctgagattgcaccactgcactccagcctgggcaacggagcnagacgctgtctccaaaaaaaatacaaaaatggctgggcgcagtggttcacacctgtaatcccagcgctttgggaggccgaggcgggcggatcatgaggtcaggagatcgagaccagcctggccaagatggtgaaacccatctntactaaaaatacaaaaaattagctgggcgtggtggcaggcncctgtaatcccagctacttgggaggctggggcaggagaatcgcttgaacccaggaggtggagattgcagtgagccgagaccacgccactgcactccagcctgggcaacaagagcaaaactccatctcaaaaaaaaaaaaaaaaaaaaaaggaaacagaaaacaaaagattagccgaggatggcagcacacacctgtagtcccagctacccgggaggctgaggtgggaggatcacctgagcctgggaggtgcagtgatcataccactgaactccagcctgggtgacagaataagaccctgtcccccctg

SEQ ID NO: 78272 - DNA, 472 bp, Homo sapiens
aaaacccaaaagggggggggggttttccaacccaggctggagcgcagtggcacaatctcggcccactgcagcctcgacctctggggctcaagggatcctcatgcctcagcctcatatgtagctggggccacagacatgcaccaccacacctggctcgaggccattttagttctgaggttgagcagctcaggagccggctccagcacggtgctgtgtttgtgaaacagagaaaggggacccccgaggaccccagacagggccttaggactctcatatcttcttgtcttctccatctggtggctcttgctctctggttttctctaccttttcatggccccagaatccatatgcagtaaaggaactctctggaataaaattaaagtcctcctatatgacttttgtcaatttccatgatgtaaatgctcccaccgtgccggatttcaaggtacaggtgattaaacaactgcctgcg

SEQ ID NO: 78273 - DNA, 3086 bp, Homo sapiens
tttgggctggaaccggaggtgtcgctcttcggacctcaaggttccccttaacacagagcgccccgcagtcttcgcggaaagcgttcggggtaggcgatggctgcgacgcgtgcagggccccgcgcccgcgagatcttcacctcgctggagtacggaccggtgccggagagccacgcatgcgcactggcctggctggacacccaggaccggtgcttgggccactatgtgaatgggaagtggttaaagcctgaacacagaaattcagtgccttgccaggatcccatcacaggagagaacttggccagttgcctgcaggcacaggccgaggatgtggctgcagccgtggaggcagccaggatggcatttaagggctggagtgcgcaccccggcgtcgtccgggcccagcacctgaccaggctggccgaggtgatccagaagcaccagcggctgctgtggaccctggaatccctggtgactgggcgggctgttcgagaggttcgagacggggacgtccagctggcccagcagctgctccactaccatgcaatccaggcatccacccaggaggaggcactggcaggctgggagcccatgggagtaattggcctcatcctgccacccacattctccttccttgagatgatgtggaggatttgccctgccctggctgtgggctgcaccgtggtggccctcgtgcccccggcctccccggcgcccctcctcctggcccagctggcgggggagctgggccccttcccgggaatcctgaatgtcgtcagtggccctgcgtccctggtgcccatcctggcctcccagcctggaatccggaaggtggccttctgcggagccccggaggaagggcgtgcccttcgacggagcctggcgggagagtgtgcggagctgggcctggcgctggggacggagtcgctgctgctgctgacggacacggcggacgtagactcggccgtggagggtgtcgtggacgccgcctggtccgaccgcggcccgggtggcctcaggctcctcatccaggagtctgtgtgggatgaagccatgagacggctgcaggagcggatggggcggcttcggagtggccgagggctggatggggccgtggacatgggggcccggggggctgccgcatgtgacctggtccagcgctttgtgcgtgaggcccagagccagggtgcacaggtgttccaggctggtgatgtgccttcggaacgcccattctatcccccaaccttggtctccaacctgcccccagcctccccatgtgcccaggtggaggtgccgtggcctgtggtcgtggcctcccccttccgcacagccaaggaggcactgttggtggccaacgggacgccccgcgggggcagcgccagtgtgtggagcgagaggctggggcaggcgctggagctgggctatgggctccaggtgggcactgtctggatcaacgcccacggcctcagagacccttcggtgcccacaggcggctgcaaggagagtgggtgttcctggcacgggggcccagacgggctgtatgagtatctgcggccctcagggacccctgcccggctgtcctgcctctccaagaacctgaactatgacacctttggcctcgctgtgccctcaaccctgccggctgggcctgaaatagggcccagcccagcacccccctatgggctcttcgttgggggccgtttccaggctcctggggcccgaagctccaggcccatccgggattcgtctggcaatctccatggctacgtggctgagggtggagccaaggacatccgaggtgctgtggaggccgctcaccaggctttccctggctgggcgggccagtccccaggagcccgggcagccctgctgtgggccctggcggctgcactggagcgccggaagtctaccctggcctcgaggctggagaggcagggagcggagctcaaggctgcggaggcggaggtggagctgagcgcaagacgacttcgggcgtggggggcccgggtgcaggcccaaggccacaccctgcaggtagccgggctgagaggccctgtgctgcgcctgcgggagccgctgggtgtgctggctgtggtgtgtccggacgagtggcccctgcttgccttcgtgtccctgctggctcccgccctggcctacggcaacactgtggtcatggtgcccagtgcggcctgtcctctgctggccctggaggtctgccaggacatggccaccgtgttcccagcaggcctggccaacgtggtgacaggagaccgggaccatctgacccgctgcctggccttgcaccaagacgtccaggccatgtggtatttcggatcagcccagggttcccagtttgtcgagtgggcctcggcaggaaacctcaaaccggtgtgggcgagcaggggctgcccgcgggcctgggaccaggaggccgagggggcaggcccagagctggggctgcgagtggcgcggaccaaggccctgtggctgcctatgggggactgatgcctgagcgccacctactgcattttggacacctcacaccaaggggagatgcaccccacagacacctgggactttccccttctggttcctgtgtctcccaataaactctctgaccaaccctagctgtgcttctgcgagaagaaagggtgtagcaacttctggcagatatgaggcttttttcttttttttttttttttttgagacaacgtctggctctgtcacccaggctggagcgcagtggcacaatctcggcccactgcagcctcgacctctggggctcaagggatcctcatgcctcagcctcatatgtagctggggccacagacatgcaccaccacacctggctcgaggccattttagttctgaggttgagcagctcaggagccggctccagcacggtgctgtgtttgtgaaacagagaaaggggacccccgaggaccccagacagggccttaggactctcatatcttcttgtcttctccatctggtggctcttgctctctggttttctctaccttttcatggccccagaatccatatgcagtaaaggaactctctggaataaaattaaagtcctccta

SEQ ID NO: 78274 - DNA, 2933 bp, Homo sapiens
tttgggctggaaccggaggtgtcgctcttcggacctcaaggttccccttaacacagagcgccccgcagtcttcgcggaaagcgttcggggtaggcgatggctgcgacgcgtgcagggccccgcgcccgcgagatcttcacctcgctggagtacggaccggtgccggagagccacgcatgcgcactggcctggctggacacccaggaccggtgcttgggccactatgtgaatgggaagtggttaaagcctgaacacagaaattcagtgccttgccaggatcccatcacaggagagaacttggccagttgcctgcaggcacaggccgaggatgtggctgcagccgtggaggcagccaggatggcatttaagggctggagtgcgcaccccggcgtcgtccgggcccagcacctgaccaggctggccgaggtgatccagaagcaccagcggctgctgtggaccctggaatccctggtgactgggcgggctgttcgagaggttcgagacggggacgtccagctggcccagcagctgctccactaccatgcaatccaggcatccacccaggaggaggcactggcaggctgggagcccatgggagtaattggcctcatcctgccacccacattctccttccttgagatgatgtggaggatttgccctgccctggctgtgggctgcaccgtggtggccctcgtgcccccggcctccccggcgcccctcctcctggcccagctggcgggggagctgggccccttcccgggaatcctgaatgtcgtcagtggccctgcgtccctggtgcccatcctggcctcccagcctggaatccggaaggtggccttctgcggagccccggagggtggcctcaggctcctcatccaggagtctgtgtgggatgaagccatgagacggctgcaggagcggatggggcggcttcggagtggccgagggctggatggggccgtggacatgggggcccggggggctgccgcatgtgacctggtccagcgctttgtgcgtgaggcccagagccagggtgcacaggtgttccaggctggtgatgtgccttcggaacgcccattctatcccccaaccttggtctccaacctgcccccagcctccccatgtgcccaggtggaggtgccgtggcctgtggtcgtggcctcccccttccgcacagccaaggaggcactgttggtggccaacgggacgccccgcgggggcagcgccagtgtgtggagcgagaggctggggcaggcgctggagctgggctatgggctccaggtgggcactgtctggatcaacgcccacggcctcagagacccttcggtgcccacaggcggctgcaaggagagtgggtgttcctggcacgggggcccagacgggctgtatgagtatctgcggccctcagggacccctgcccggctgtcctgcctctccaagaacctgaactatgacacctttggcctcgctgtgccctcaaccctgccggctgggcctgaaatagggcccagcccagcacccccctatgggctcttcgttgggggccgtttccaggctcctggggcccgaagctccaggcccatccgggattcgtctggcaatctccatggctacgtggctgagggtggagccaaggacatccgaggtgctgtggaggccgctcaccaggctttccctggctgggcgggccagtccccaggagcccgggcagccctgctgtgggccctggcggctgcactggagcgccggaagtctaccctggcctcgaggctggagaggcagggagcggagctcaaggctgcggaggcggaggtggagctgagcgcaagacgacttcgggcgtggggggcccgggtgcaggcccaaggccacaccctgcaggtagccgggctgagaggccctgtgctgcgcctgcgggagccgctgggtgtgctggctgtggtgtgtccggacgagtggcccctgcttgccttcgtgtccctgctggctcccgccctggcctacggcaacactgtggtcatggtgcccagtgcggcctgtcctctgctggccctggaggtctgccaggacatggccaccgtgttcccagcaggcctggccaacgtggtgacaggagaccgggaccatctgacccgctgcctggccttgcaccaagacgtccaggccatgtggtatttcggatcagcccagggttcccagtttgtcgagtgggcctcggcaggaaacctcaaaccggtgtgggcgagcaggggctgcccgcgggcctgggaccaggaggccgagggggcaggcccagagctggggctgcgagtggcgcggaccaaggccctgtggctgcctatgggggactgatgcctgagcgccacctactgcattttggacacctcacaccaaggggagatgcaccccacagacacctgggactttccccttctggttcctgtgtctcccaataaactctctgaccaaccctagctgtgcttctgcgagaagaaagggtgtagcaacttctggcagatatgaggcttttttcttttttttttttttttttgagacaacgtctggctctgtcacccaggctggagcgcagtggcacaatctcggcccactgcagcctcgacctctggggctcaagggatcctcatgcctcagcctcatatgtagctggggccacagacatgcaccaccacacctggctcgaggccattttagttctgaggttgagcagctcaggagccggctccagcacggtgctgtgtttgtgaaacagagaaaggggacccccgaggaccccagacagggccttaggactctcatatcttcttgtcttctccatctggtggctcttgctctctggttttctctaccttttcatggccccagaatccatatgcagtaaaggaactctctggaataaaattaaagtcctccta

SEQ ID NO: 78275 - DNA, 3164 bp, Homo sapiens
aaaaaaaaatgaaaaaatgttctagaactagagtggtgatggttacacaacactgtaaatgcacagaatgccactaaactgctgaactatacactttgaaatgctctattttaccacaaactttttttttaaagcaataggaggaaaagaattagctgatggggcagagggagacagacgtcccctcctagaggattctgggtaggggttgaactgccccagctcctcccgaacccctttccaaactgtctctacctcccccaggcctggctggacacccaggaccggtgcttgggccactatgtgaatgggaagtggttaaagcctgaacacagaaattcagtgccttgccaggatcccatcacaggagagaacttggccagttgcctgcaggcacaggccgaggatgtggctgcagccgtggaggcagccaggatggcatttaagggctggagtgcgcaccccggcgtcgtccgggcccagcacctgaccaggctggccgaggtgatccagaagcaccagcggctgctgtggaccctggaatccctggtgactgggcgggctgttcgagaggttcgagacggggacgtccagctggcccagcagctgctccactaccatgcaatccaggcatccacccaggaggaggcactggcaggctgggagcccatgggagtaattggcctcatcctgccacccacattctccttccttgagatgatgtggaggatttgccctgccctggctgtgggctgcaccgtggtggccctcgtgcccccggcctccccggcgcccctcctcctggcccagctggcgggggagctgggccccttcccgggaatcctgaatgtcgtcagtggccctgcgtccctggtgcccatcctggcctcccagcctggaatccggaaggtggccttctgcggagccccggaggaagggcgtgcccttcgacggagcctggcgggagagtgtgcggagctgggcctggcgctggggacggagtcgctgctgctgctgacggacacggcggacgtagactcggccgtggagggtgtcgtggacgccgcctggtccgaccgcggcccgggtggcctcaggctcctcatccaggagtctgtgtgggatgaagccatgagacggctgcaggagcggatggggcggcttcggagtggccgagggctggatggggccgtggacatgggggcccggggggctgccgcatgtgacctggtccagcgctttgtgcgtgaggcccagagccagggtgcacaggtgttccaggctggtgatgtgccttcggaacgcccattctatcccccaaccttggtctccaacctgcccccagcctccccatgtgcccaggtggaggtgccgtggcctgtggtcgtggcctcccccttccgcacagccaaggaggcactgttggtggccaacgggacgccccgcgggggcagcgccagtgtgtggagcgagaggctggggcaggcgctggagctgggctatgggctccaggtgggcactgtctggatcaacgcccacggcctcagagacccttcggtgcccacaggcggctgcaaggagagtgggtgttcctggcacgggggcccagacgggctgtatgagtatctgcggccctcagggacccctgcccggctgtcctgcctctccaagaacctgaactatgacacctttggcctcgctgtgccctcaaccctgccggctgggcctgaaatagggcccagcccagcacccccctatgggctcttcgttgggggccgtttccaggctcctggggcccgaagctccaggcccatccgggattcgtctggcaatctccatggctacgtggctgagggtggagccaaggacatccgaggtgctgtggaggccgctcaccaggctttccctggctgggcgggccagtccccaggagcccgggcagccctgctgtgggccctggcggctgcactggagcgccggaagtctaccctggcctcgaggctggagaggcagggagcggagctcaaggctgcggaggcggaggtggagctgagcgcaagacgacttcgggcgtggggggcccgggtgcaggcccaaggccacaccctgcaggtagccgggctgagaggccctgtgctgcgcctgcgggagccgctgggtgtgctggctgtggtgtgtccggacgagtggcccctgcttgccttcgtgtccctgctggctcccgccctggcctacggcaacactgtggtcatggtgcccagtgcggcctgtcctctgctggccctggaggtctgccaggacatggccaccgtgttcccagcaggcctggccaacgtggtgacaggagaccgggaccatctgacccgctgcctggccttgcaccaagacgtccaggccatgtggtatttcggatcagcccagggttcccagtttgtcgagtgggcctcggcaggaaacctcaaaccggtgtgggcgagcaggggctgcccgcgggcctgggaccaggaggccgagggggcaggcccagagctggggctgcgagtggcgcggaccaaggccctgtggctgcctatgggggactgatgcctgagcgccacctactgcattttggacacctcacaccaaggggagatgcaccccacagacacctgggactttccccttctggttcctgtgtctcccaataaactctctgaccaaccctagctgtgcttctgcgagaagaaagggtgtagcaacttctggcagatatgaggcttttttcttttttttttttttttttgagacaacgtctggctctgtcacccaggctggagcgcagtggcacaatctcggcccactgcagcctcgacctctggggctcaagggatcctcatgcctcagcctcatatgtagctggggccacagacatgcaccaccacacctggctcgaggccattttagttctgaggttgagcagctcaggagccggctccagcacggtgctgtgtttgtgaaacagagaaaggggacccccgaggaccccagacagggccttaggactctcatatcttcttgtcttctccatctggtggctcttgctctctggttttctctaccttttcatggccccagaatccatatgcagtaaaggaactctctggaataaaattaaagtcctccta

SEQ ID NO: 78276 - DNA, 2959 bp, Homo sapiens
tttgggctggaaccggaggtgtcgctcttcggacctcaaggttccccttaacacagagcgccccgcagtcttcgcggaaagcgttcggggtaggcgatggctgcgacgcgtgcagggccccgcgcccgcgagatcttcacctcgctggagtacggaccggtgccggagagccacgcatgcgcactggcctggctggacacccaggaccggtgcttgggccactatgtgaatgggaagtggttaaagcctgaacacagaaattcagtgccttgccaggatcccatcacaggctggccgaggtgatccagaagcaccagcggctgctgtggaccctggaatccctggtgactgggcgggctgttcgagaggttcgagacggggacgtccagctggcccagcagctgctccactaccatgcaatccaggcatccacccaggaggaggcactggcaggctgggagcccatgggagtaattggcctcatcctgccacccacattctccttccttgagatgatgtggaggatttgccctgccctggctgtgggctgcaccgtggtggccctcgtgcccccggcctccccggcgcccctcctcctggcccagctggcgggggagctgggccccttcccgggaatcctgaatgtcgtcagtggccctgcgtccctggtgcccatcctggcctcccagcctggaatccggaaggtggccttctgcggagccccggaggaagggcgtgcccttcgacggagcctggcgggagagtgtgcggagctgggcctggcgctggggacggagtcgctgctgctgctgacggacacggcggacgtagactcggccgtggagggtgtcgtggacgccgcctggtccgaccgcggcccgggtggcctcaggctcctcatccaggagtctgtgtgggatgaagccatgagacggctgcaggagcggatggggcggcttcggagtggccgagggctggatggggccgtggacatgggggcccggggggctgccgcatgtgacctggtccagcgctttgtgcgtgaggcccagagccagggtgcacaggtgttccaggctggtgatgtgccttcggaacgcccattctatcccccaaccttggtctccaacctgcccccagcctccccatgtgcccaggtggaggtgccgtggcctgtggtcgtggcctcccccttccgcacagccaaggaggcactgttggtggccaacgggacgccccgcgggggcagcgccagtgtgtggagcgagaggctggggcaggcgctggagctgggctatgggctccaggtgggcactgtctggatcaacgcccacggcctcagagacccttcggtgcccacaggcggctgcaaggagagtgggtgttcctggcacgggggcccagacgggctgtatgagtatctgcggccctcagggacccctgcccggctgtcctgcctctccaagaacctgaactatgacacctttggcctcgctgtgccctcaaccctgccggctgggcctgaaatagggcccagcccagcacccccctatgggctcttcgttgggggccgtttccaggctcctggggcccgaagctccaggcccatccgggattcgtctggcaatctccatggctacgtggctgagggtggagccaaggacatccgaggtgctgtggaggccgctcaccaggctttccctggctgggcgggccagtccccaggagcccgggcagccctgctgtgggccctggcggctgcactggagcgccggaagtctaccctggcctcgaggctggagaggcagggagcggagctcaaggctgcggaggcggaggtggagctgagcgcaagacgacttcgggcgtggggggcccgggtgcaggcccaaggccacaccctgcaggtagccgggctgagaggccctgtgctgcgcctgcgggagccgctgggtgtgctggctgtggtgtgtccggacgagtggcccctgcttgccttcgtgtccctgctggctcccgccctggcctacggcaacactgtggtcatggtgcccagtgcggcctgtcctctgctggccctggaggtctgccaggacatggccaccgtgttcccagcaggcctggccaacgtggtgacaggagaccgggaccatctgacccgctgcctggccttgcaccaagacgtccaggccatgtggtatttcggatcagcccagggttcccagtttgtcgagtgggcctcggcaggaaacctcaaaccggtgtgggcgagcaggggctgcccgcgggcctgggaccaggaggccgagggggcaggcccagagctggggctgcgagtggcgcggaccaaggccctgtggctgcctatgggggactgatgcctgagcgccacctactgcattttggacacctcacaccaaggggagatgcaccccacagacacctgggactttccccttctggttcctgtgtctcccaataaactctctgaccaaccctagctgtgcttctgcgagaagaaagggtgtagcaacttctggcagatatgaggcttttttcttttttttttttttttttgagacaacgtctggctctgtcacccaggctggagcgcagtggcacaatctcggcccactgcagcctcgacctctggggctcaagggatcctcatgcctcagcctcatatgtagctggggccacagacatgcaccaccacacctggctcgaggccattttagttctgaggttgagcagctcaggagccggctccagcacggtgctgtgtttgtgaaacagagaaaggggacccccgaggaccccagacagggccttaggactctcatatcttcttgtcttctccatctggtggctcttgctctctggttttctctaccttttcatggccccagaatccatatgcagtaaaggaactctctggaataaaattaaagtcctccta

SEQ ID NO: 78277 - DNA, 2630 bp, Homo sapiens
aattggctagagaggccgggggtaatcggcagaggagaggttcgagacggggacgtccagctggcccagcagctgctccactaccatgcaatccaggcatccacccaggaggaggcactggcaggctgggagcccatgggagtaattggcctcatcctgccacccacattctccttccttgagatgatgtggaggatttgccctgccctggctgtgggctgcaccgtggtggccctcgtgcccccggcctccccggcgcccctcctcctggcccagctggcgggggagctgggccccttcccgggaatcctgaatgtcgtcagtggccctgcgtccctggtgcccatcctggcctcccagcctggaatccggaaggtggccttctgcggagccccggaggaagggcgtgcccttcgacggagcctggcgggagagtgtgcggagctgggcctggcgctggggacggagtcgctgctgctgctgacggacacggcggacgtagactcggccgtggagggtgtcgtggacgccgcctggtccgaccgcggcccgggtggcctcaggctcctcatccaggagtctgtgtgggatgaagccatgagacggctgcaggagcggatggggcggcttcggagtggccgagggctggatggggccgtggacatgggggcccggggggctgccgcatgtgacctggtccagcgctttgtgcgtgaggcccagagccagggtgcacaggtgttccaggctggtgatgtgccttcggaacgcccattctatcccccaaccttggtctccaacctgcccccagcctccccatgtgcccaggtggaggtgccgtggcctgtggtcgtggcctcccccttccgcacagccaaggaggcactgttggtggccaacgggacgccccgcgggggcagcgccagtgtgtggagcgagaggctggggcaggcgctggagctgggctatgggctccaggtgggcactgtctggatcaacgcccacggcctcagagacccttcggtgcccacaggcggctgcaaggagagtgggtgttcctggcacgggggcccagacgggctgtatgagtatctgcggccctcagggacccctgcccggctgtcctgcctctccaagaacctgaactatgacacctttggcctcgctgtgccctcaaccctgccggctgggcctgaaatagggcccagcccagcacccccctatgggctcttcgttgggggccgtttccaggctcctggggcccgaagctccaggcccatccgggattcgtctggcaatctccatggctacgtggctgagggtggagccaaggacatccgaggtgctgtggaggccgctcaccaggctttccctggctgggcgggccagtccccaggagcccgggcagccctgctgtgggccctggcggctgcactggagcgccggaagtctaccctggcctcgaggctggagaggcagggagcggagctcaaggctgcggaggcggaggtggagctgagcgcaagacgacttcgggcgtggggggcccgggtgcaggcccaaggccacaccctgcaggtagccgggctgagaggccctgtgctgcgcctgcgggagccgctgggtgtgctggctgtggtgtgtccggacgagtggcccctgcttgccttcgtgtccctgctggctcccgccctggcctacggcaacactgtggtcatggtgcccagtgcggcctgtcctctgctggccctggaggtctgccaggacatggccaccgtgttcccagcaggcctggccaacgtggtgacaggagaccgggaccatctgacccgctgcctggccttgcaccaagacgtccaggccatgtggtatttcggatcagcccagggttcccagtttgtcgagtgggcctcggcaggaaacctcaaaccggtgtgggcgagcaggggctgcccgcgggcctgggaccaggaggccgagggggcaggcccagagctggggctgcgagtggcgcggaccaaggccctgtggctgcctatgggggactgatgcctgagcgccacctactgcattttggacacctcacaccaaggggagatgcaccccacagacacctgggactttccccttctggttcctgtgtctcccaataaactctctgaccaaccctagctgtgcttctgcgagaagaaagggtgtagcaacttctggcagatatgaggcttttttcttttttttttttttttttgagacaacgtctggctctgtcacccaggctggagcgcagtggcacaatctcggcccactgcagcctcgacctctggggctcaagggatcctcatgcctcagcctcatatgtagctggggccacagacatgcaccaccacacctggctcgaggccattttagttctgaggttgagcagctcaggagccggctccagcacggtgctgtgtttgtgaaacagagaaaggggacccccgaggaccccagacagggccttaggactctcatatcttcttgtcttctccatctggtggctcttgctctctggttttctctaccttttcatggccccagaatccatatgcagtaaaggaactctctggaataaaattaaagtcctccta

SEQ ID NO: 78278 - DNA, 2627 bp, Homo sapiens
tttgggctggaaccggaggtgtcgctcttcggacctcaaggttccccttaacacagagcgccccgcagtcttcgcggaaagcgttcggggtaggcgatggctgcgacgcgtgcagggccccgcgcccgcgagatcttcacctcgctggagtacggaccggtgccggagagccacgcatgcgcactggcctggctggacacccaggaccggtgcttgggccactatgtgaatgggaagtggttaaagcctgaacacagaaattcagtgccttgccaggatcccatcacaggagagaacttggccagttgcctgcaggcacaggccgaggatgtggctgcagccgtggaggcagccaggatggcatttaagggctggagtgcgcaccccggcgtcgtccgggcccagcacctgaccaggctggccgaggtgatccagaagcaccagcggctgctgtggaccctggaatccctggtgactgggcgggctgttcgagaggttcgagacggggacgtccagctggcccagcagctgctccactaccatgcaatccaggcatccacccaggaggaggcactggcaggctgggagcccatgggagtaattggcctcatcctgccacccacattctccttccttgagatgatgtggaggatttgccctgccctggctgtgggctgcaccgtggtggccctcgtgcccccggcctccccggcgcccctcctcctggcccagctggcgggggagctgggccccttcccgggaatcctgaatgtcgtcagtggccctgcgtccctggtgcccatcctggcctcccagcctggaatccggaaggtggccttctgcggagccccggaggaagggcgtgcccttcgacggagcctggcgggagagtgtgcggagctgggcctggcgctggggacggagtcgctgctgctgctgacggacacggcggacgtagactcggccgtggagggtgtcgtggacgccgcctggtccgaccgcggcccgggtggcctcaggctcctcatccaggagtctgtgtgggatgaagccatgagacggctgcaggagcggatggggcggcttcggagtggccgagggctggatggggccgtggacatgggggcccggggggctgccgcatgtgacctggtccagcgctttgtgcgtgaggcccagagccagggtgcacaggtgttccaggctggtgatgtgccttcggaacgcccattctatcccccaaccttggtctccaacctgcccccagcctccccatgtgcccaggtggaggtgccgtggcctgtggtcgtggcctcccccttccgcacagccaaggaggcactgttggtggccaacgggacgccccgcgggggcagcgccagtgtgtggagcgagaggctggggcaggcgctggagctgggctatgggctccaggtgggcactgtctggatcaacgcccacggcctcagagacccttcggtgcccacaggcggctgcaaggagagtgggtgttcctggcacgggggcccagacgggctgtatgagtatctgcggccctcagggacccctgcccggctgtcctgcctctccaagaacctgaactatgacacctttggcctcgctgtgccctcaaccctgccggctgggcctgaaatagggcccagcccagcacccccctatgggctcttcgttgggggccgtttccaggctcctggggcccgaagctccaggcccatccgggattcgtctggcaatctccatggctacgtggctgagggtggagccaaggacatccgaggtgctgtggaggccgctcaccaggctttccctggctgggcgggccagtccccaggagcccgggcagccctgctgtgggccctggcggctgcactggagcgccggaagtctaccctggcctcgaggctggagaggcagggagcggagctcaaggctgcggaggcggaggtggagctgagcgcaagacgacttcgggcgtggggggcccgggtgcaggcccaaggccacaccctgcaggtagccgggctgagaggccctgtgctgcgcctgcgggagccgctgggtgtgctggctgtggtgtgtccggacgagtggcccctgcttgccttcgtgtccctgctggctcccgccctggcctacggcaacactgtggtcatggtgcccagtgcggcctgtcctctgctggccctggaggtctgccaggacatggccaccgtgttcccagcaggcctggccaacgtggtgacaggagaccgggaccatctgacccgctgcctggccttgcaccaagacgtccaggccatgtggtatttcggatcagcccagggttcccagtttgtcgagtgggcctcggcaggaaacctcaaaccggtgtgggcgagcaggggctgcccgcgggcctgggaccaggaggccgagggggcaggcccagagctggggctgcgagtggcgcggaccaaggccctgtggctgcctatgggggactgatgcctgagcgccacctactgcattttggacacctcacaccaaggggagatgcaccccacagacacctgggactttccccttctggttcctgtgtctcccaataaactctctgaccaacccta

SEQ ID NO: 78279 - DNA, 2638 bp, Homo sapiens
gagaggcttcagagaccggtcgtactgtccaggctgcgtgccagacagactgtcatctcgaatatgcgactgccatgtctcagtgcactgcacccatggacgcgcaggctactgtcgatgctagaggtaggcccaatggtgacgctaatcgcgcctcttcctggtagcctcattctccgttccttgagagtgatgttggcgtgatttgacctggcatggctgtgggctgcaccgtggtggccctcgtgcccccggcctccccggcgcccctcctcctggcccagctggcgggggagctgggccccttcccgggaatcctgaatgtcgtcagtggccctgcgtccctggtgcccatcctggcctcccagcctggaatccggaaggtggccttctgcggagccccggaggaagggcgtgcccttcgacggagcctggcgggagagtgtgcggagctgggcctggcgctggggacggagtcgctgctgctgctgacggacacggcggacgtagactcggccgtggagggtgtcgtggacgccgcctggtccgaccgcggcccgggtggcctcaggctcctcatccaggagtctgtgtgggatgaagccatgagacggctgcaggagcggatggggcggcttcggagtggccgagggctggatggggccgtggacatgggggcccggggggctgccgcatgtgacctggtccagcgctttgtgcgtgaggcccagagccagggtgcacaggtgttccaggctggtgatgtgccttcggaacgcccattctatcccccaaccttggtctccaacctgcccccagcctccccatgtgcccaggtggaggtgccgtggcctgtggtcgtggcctcccccttccgcacagccaaggaggcactgttggtggccaacgggacgccccgcgggggcagcgccagtgtgtggagcgagaggctggggcaggcgctggagctgggctatgggctccaggtgggcactgtctggatcaacgcccacggcctcagagacccttcggtgcccacaggcggctgcaaggagagtgggtgttcctggcacgggggcccagacgggctgtatgagtatctgcggccctcagggacccctgcccggctgtcctgcctctccaagaacctgaactatgacacctttggcctcgctgtgccctcaaccctgccggctgggcctgaaatagggcccagcccagcacccccctatgggctcttcgttgggggccgtttccaggctcctggggcccgaagctccaggcccatccgggattcgtctggcaatctccatggctacgtggctgagggtggagccaaggacatccgaggtgctgtggaggccgctcaccaggctttccctggctgggcgggccagtccccaggagcccgggcagccctgctgtgggccctggcggctgcactggagcgccggaagtctaccctggcctcgaggctggagaggcagggagcggagctcaaggctgcggaggcggaggtggagctgagcgcaagacgacttcgggcgtggggggcccgggtgcaggcccaaggccacaccctgcaggtagccgggctgagaggccctgtgctgcgcctgcgggagccgctgggtgtgctggctgtggtgtgtccggacgagtggcccctgcttgccttcgtgtccctgctggctcccgccctggcctacggcaacactgtggtcatggtgcccagtgcggcctgtcctctgctggccctggaggtctgccaggacatggccaccgtgttcccagcaggcctggccaacgtggtgacaggagaccgggaccatctgacccgctgcctggccttgcaccaagacgtccaggccatgtggtatttcggatcagcccagggttcccagtttgtcgagtgggcctcggcaggaaacctcaaaccggtgtgggcgagcaggggctgcccgcgggcctgggaccaggaggccgagggggcaggcccagagctggggctgcgagtggcgcggaccaaggccctgtggctgcctatgggggactgatgcctgagcgccacctactgcattttggacacctcacaccaaggggagatgcaccccacagacacctgggactttccccttctggttcctgtgtctcccaataaactctctgaccaaccctagctgtgcttctgcgagaagaaagggtgtagcaacttctggcagatatgaggcttttttcttttttttttttttttttgagacaacgtctggctctgtcacccaggctggagcgcagtggcacaatctcggcccactgcagcctcgacctctggggctcaagggatcctcatgcctcagcctcatatgtagctggggccacagacatgcaccaccacacctggctcgaggccattttagttctgaggttgagcagctcaggagccggctccagcacggtgctgtgtttgtgaaacagagaaaggggacccccgaggaccccagacagggccttaggactctcatatcttcttgtcttctccatctggtggctcttgctctctggttttctctaccttttcatggccccagaatccatatgcagtaaaggaactctctggaataaaattaaagtcctccta

SEQ ID NO: 78280 - DNA, 3168 bp, Homo sapiens
tttgggctggaaccggaggtgtcgctcttcggacctcaaggttccccttaacacagagcgccccgcagtcttcgcggaaagcgttcggggtaggcgatggctgcgacgcgtgcagggccccgcgcccgcgagatcttcacctcgctggagtacggaccggtgccggagagccacgcatgcgcactggcctggctggacacccaggaccggtgcttgggccactatgtgaatgggaagtggttaaagcctgaacacagaaattcagtgccttgccaggatcccatcacaggagagaacttggccagttgcctgcaggcacaggccgaggatgtggctgcagccgtggaggcagccaggatggcatttaagggctggagtgcgcaccccggcgtcgtccgggcccagcacctgaccaggctggccgaggtgatccagaagcaccagcggctgctgtggaccctggaatccctggtgactgggcgggctgttcgagaggttcgagacggggacgtccagctggcccagcagctgctccactaccatgcaatccaggcatccacccaggaggaggcactggcaggctgggagcccatgggagtaattggcctcatcctgccacccacattctccttccttgagatgatgtggaggatttgccctgccctggctgtgggctgcaccgtggtggccctcgtgcccccggcctccccggcgcccctcctcctggcccagctggcgggggagctgggccccttcccgggaatcctgaatgtcgtcagtggccctgcgtccctggtgcccatcctggcctcccagcctggaatccggaaggtggccttctgcggagccccggaggaagggcgtgcccttcgacggagcctggcgggagagtgtgcggagctgggcctggcgctggggacggagtcgctgctgctgctgacggacacggcggacgtagactcggccgtggagggtgtcgtggacgccgcctggtccgaccgcggcccgggtggcctcaggctcctcatccaggagtctgtgtgggatgaagccatgagacggctgcaggagcggatggggcggcttcggagtggccgagggctggatggggccgtggacatgggggcccggggggctgccgcatgtgacctggtccagcgctttgtgcgtgaggcccagagccagggtgcacaggtgttccaggctggtgatgtgccttcggaacgcccattctatcccccaaccttggtctccaacctgcccccagcctccccatgtgcccaggtggaggtgccgtggcctgtggtcgtggcctcccccttccgcacagccaaggaggcactgttggtggccaacgggacgccccgcgggggcagcgccagtgtgtggagcgagaggctggggcaggcgctggagctgggctatgggctccaggtgggcactgtctggatcaacgcccacggcctcagagacccttcggtgcccacaggcggctgcaaggagagtgggtgttcctggcacgggggcccagacgggctgtatgagtatctgcggccctcagggacccctgcccggctgtcctgcctctccaagaacctgaactatgacacctttggcctcgctgtgccctcaaccctgccggctgggcctgaaatagggcccagcccagcacccccctatgggctcttcgttgggggccgtttccaggctcctggggcccgaagctccaggcccatccgggattcgtctggcaatctccatggctacgtggctgagggtggagccaaggacatccgaggtgctgtggaggccgctcaccaggctttccctggctgggcgggccagtccccaggagcccgggcagccctgctgtgggccctggcggctgcactggagcgccggaagtctaccctggcctcgaggctggagaggcagggagcggagctcaaggctgcggaggcggaggtggagctgagcgcaagacgacttcgggcgtggggggcccgggtgcaggcccaaggccacaccctgcaggtagccgggctgagaggccctgtgctgcgcctgcgggagccgctgggtgtgctggctgtggtgtgtccggacgagtggcccctgcttgccttcgtgtccctgctggctcccgccctggcctacggcaacactgtggtcatggtgcccagtgcggcctgtcctctgctggccctggaggtctgccaggacatggccaccgtgttcccagcaggcctggccaacgtggtgacaggagaccgggaccatctgacccgctgcctggccttgcaccaagacgtccaggccatgtggtatttcggatcagcccagggttcccagtttgtcgagtgggcctcggcaggaaacctcaaaccggtgtgggcgagcaggggctgcccgcgggcctgggaccaggaggccgagggggcaggcccagagctggggctgcgagtggcgcggaccaaggccctgtggctgcctatgggggactgatgcctgagcgccacctactgcattttggacacctcacaccaaggggagatgcaccccacagacacctgggactttccccttctggttcctgtgtctcccaataaactctctgaccaaccctagctgtgcttctgcgagaagaaagggtgtagcaacttctggcagatatgaggcttttttcttttttttttttttttttgagacaacgtctggctctgtcacccaggctggagcgcagtggcacaatctcggcccactgcagcctcgacctctggggctcaagggatcctcatgcctcagcctcatatgtagctggggccacagacatgcaccaccacacctggctcgaggccattttagttctgaggttgagcagctcaggagccggctccagcacggtgctgtgtttgtgaaacagagaaaggggacccccgaggaccccagacagggccttaggactctcatatcttcttgtcttctccatctggtggctcttgctctctggttttctctaccttttcatggccccagaatccatatgcagtaaaggaactctctggaataaaattaaagtcctcctatatgacttttgtcaatttccatgatgtaaatgctcccaccgtgccggatttcaaggtacaggtgattaaacaactgcctgcg

SEQ ID NO: 78281 - DNA, 2221 bp, Homo sapiens
tttgggctggaaccggaggtgtcgctcttcggacctcaaggttccccttaacacagagcgccccgcagtcttcgcggaaagcgttcggggtaggcgatggctgcgacgcgtgcagggccccgcgcccgcgagatcttcacctcgctggagtacggaccggtgccggagagccacgcatgcgcactggcctggctggacacccaggaccggtgcttgggccactatgtgaatgggaagtggttaaagcctgaacacagaaattcagtgccttgccaggatcccatcacaggagagaacttggccagttgcctgcaggcacaggccgaggatgtggctgcagccgtggaggcagccaggatggcatttaagggctggagtgcgcaccccggcgtcgtccgggcccagcacctgaccaggctggccgaggtgatccagaagcaccagcggctgctgtggaccctggaatccctggtgactgggcgggctgttcgagaggttcgagacggggacgtccagctggcccagcagctgctccactaccatgcaatccaggcatccacccaggaggaggcactggcaggctgggagcccatgggagtaattggcctcatcctgccacccacattctccttccttgagatgatgtggaggatttgccctgccctggctgtgggcggcttcggagtggccgagggctggatggggccgtggacatgggggcccggggggctgccgcatgtgacctggtccagcgctttgtgcgtgaggcccagagccagggtgcacaggtgttccaggctggtgatgtgccttcggaacgcccattctatcccccaaccttggtctccaacctgcccccagcctccccatgtgcccaggtggaggtgccgtggcctgtggtcgtggcctcccccttccgcacagccaaggaggcactgttggtggccaacgggacgccccgcgggggcagcgccagtgtgtggagcgagaggctggggcaggcgctggagctgggctatgggctccaggtgggcactgtctggatcaacgcccacggcctcagagacccttcggtgcccacaggcggctgcaaggagagtgggtgttcctggcacgggggcccagacgggctgtatgagtatctgcggccctcagggacccctgcccggctgtcctgcctctccaagaacctgaactatgacacctttggcctcgctgtgccctcaaccctgccggctgggcctgaaatagggcccagcccagcacccccctatgggctcttcgttgggggccgtttccaggctcctggggcccgaagctccaggcccatccgggattcgtctggcaatctccatggctacgtggctgagggtggagccaaggacatccgaggtgctgtggaggccgctcaccaggctttccctggctgggcgggccagtccccaggagcccgggcagccctgctgtgggccctggcggctgcactggagcgccggaagtctaccctggcctcgaggctggagaggcagggagcggagctcaaggctgcggaggcggaggtggagctgagcgcaagacgacttcgggcgtggggggcccgggtgcaggcccaaggccacaccctgcaggtagccgggctgagaggccctgtgctgcgcctgcgggagccgctgggtgtgctggctgtggtgtgtccggacgagtggcccctgcttgccttcgtgtccctgctggctcccgccctggcctacggcaacactgtggtcatggtgcccagtgcggcctgtcctctgctggccctggaggtctgccaggacatggccaccgtgttcccagcaggcctggccaacgtggtgacaggagaccgggaccatctgacccgctgcctggccttgcaccaagacgtccaggccatgtggtatttcggatcagcccagggttcccagtttgtcgagtgggcctcggcaggaaacctcaaaccggtgtgggcgagcaggggctgcccgcgggcctgggaccaggaggccgagggggcaggcccagagctggggctgcgagtggcgcggaccaaggccctgtggctgcctatgggggactgatgcctgagcgccacctactgcattttggacacctcacaccaaggggagatgcaccccacagacacctgggactttccccttctggttcctgtgtctcccaataaactctctgaccaacccta

SEQ ID NO: 78282 - DNA, 1617 bp, Homo sapiens
gccctgatttccaggccctcccagtccctgggcgcacgtcccggattcctcccacgagggggcgggctgcggccaaatctcccgccaggtcagcggccgggcgctgattggccccatggcggcggggccggctcgtgattggccagcacgccgtggtttaaagcggtcggcgcgggaaccaggggcttactgcgggacggccttggagagtactcgggttcgtgaacttcccggaggcgcaatgagctgcattaacctgcccactgtgctgcccggctcccccagcaagacccgggggcagatccaggtgattctcgggccgatgttctcaggaaaaagcacagagttgatgagacgcgtccgtcgcttccagattgctcagtacaagtgcctggtgatcaagtatgccaaagacactcgctacagcagcagcttctgcacacatgaccggaacaccatggaggcgctgcccgcctgcctgctccgagacgtggcccaggaggccctgggcgtggctgtcataggcatcgacgaggggcagtttttccctgacatcgtggagttctgcgaggccatggccaacgccgggaagaccgtaattgtggctgcactggatgggaccttccagaggaagccatttggggccatcctgaacctggtgccgctggccgagagcgtggtgaagctgacggcggtgtgcatggagtgcttccgggaagccgcctataccaagaggctcggcacagagaaggaggtcgaggtgattgggggagcagacaagtaccactccgtgtgtcggctctgctacttcaagaaggcctcaggccagcctgccgggccggacaacaaagagaactgcccagtgccaggaaagccaggggaagccgtggctgccaggaagctctttgccccacagcagattctgcaatgcagccctgccaactgagggacctgcgagggccgcccgctcccttcctgccactgccgcctactggacgctgccctgcatgctgcccagccactccaggaggaagtcgggaggcgtggagggtgaccacaccttggccttctgggaactctcctttgtgtggctgccccacctgccgcatgctccctcctctcctacccactggtctgcttaaagcttccctctcagctgctgggacgatcgcccaggctggagctggccccgcttggtggcctgggatctggcacactccctctccttggggtgagggacagagccccacgctgttgacatcagcctgcttcttcccctctgcggctttcactgctgagtttctgttctccctgggaagcctgtgccagcacctttgagccttggcccacactgaggcttaggcctctctgcctgggatgggctcccaccctcccctgaggatggcctggattcacgccctcttgtttccttttgggctcaaagcccttcctacctctggtgatggtttccacaggaacaacagcatctttcaccaagatgggtggcaccaaccttgctgggacttggatcccaggggcttatctcttcaagtgtggagagggcagggtccacgcctctgctgtagcttatgaaattaactaattgaaaattcactg

SEQ ID NO: 78283 - DNA, 1178 bp, Homo sapiens
  misc_feature (1091)..(1091): n is a, c, g, or t
  misc_feature (1123)..(1123): n is a, c, g, or t
  misc_feature (1127)..(1128): n is a, c, g, or t
  misc_feature (1131)..(1131): n is a, c, g, or t
gccctgatttccaggccctcccagtccctgggcgcacgtcccggattcctcccacgagggggcgggctgcggccaaatctcccgccaggtcagcggccgggcgctgattggccccatggcggcggggccggctcgtgattggccagcacgccgtggtttaaagcggtcggcgcgggaaccaggggcttactgcgggacggccttggagagtactcgggttcgtgaacttcccggaggcgcaatgagctgcattaacctgcccactgtgctgcccggctcccccagcaagacccgggggcagatccaggtgattctcgggccgatgttctcaggaaaaagcacagagttgatgagacgcgtccgtcgcttccagattgctcagtacaagtgcctggtgatcaagtatgccaaagacactcgctacagcagcagcttctgcacacatgaccggaacaccatggaggcgctgcccgcctgcctgctccgagacgtggcccaggaggccctgggcgtggctgtcataggcatcgacgaggggcagtttttccctgacatcgtggagttctgcgaggccatggccaacgccgggaagaccgtaattgtggctgcactggatgggaccttccagaggaagccatttggggccatcctgaacctggtgccgctggccgagagcgtggtgaagctgacggcggtgtgcatggagtgcttccgggaagccgcctataccaagaggctcggcacagagaaggaggtcgaggtgattgggggagcagacaagtaccactccgtgtgtcggctctgctacttcaagaaggcctcaggccagcctgccgggccggacaacaaagagaactgcccagtgccaggaaagccaggggaagccgtggctgccaggaagctctttgccccacagcagattctgcaatgcagccctgccaactgagggacctgcgagggccgcccgctcccttcctgccactgccgcctactggacgctgccctgcatgctgcccagccactccaggaggaagtcgggaggcgtggaggtgccccttggcttgggactccttggtggggcccactgcggnggcccctctaacaggtggtaatccccaggganaccnnggngccgggggttgaaccctcgggggacaccgaaactccgcgagttccac

SEQ ID NO: 78284 - DNA, 1250 bp, Homo sapiens
gccctgatttccaggccctcccagtccctgggcgcacgtcccggattcctcccacgagggggcgggctgcggccaaatctcccgccaggtcagcggccgggcgctgattggccccatggcggcggggccggctcgtgattggccagcacgccgtggtttaaagcggtcggcgcgggaaccaggggcttactgcgggacggccttggagagtactcgggttcgtgaacttcccggaggcgcaatgagctgcattaacctgcccactgtgctgcccggctcccccagcaagacccgggggcagatccaggtgattctcgggccgatgttctcaggaaaaagcacagagttgatgagacgcgtccgtcgcttccagattgctcagtacaagtgcctggtgatcaagtatgccaaagacactcgctacagcagcagcttctgcacacatgaccggaacaccatggaggcgctgcccgcctgcctgctccgagacgtggcccaggaggccctgggcgtggctgtcataggcatcgacgaggggcagtttttccctgacatcgtggagttctgcgaggccatggccaacgccgggaagaccgtaattgtggctgcactggatgggaccttccagaggaagccatttggggccatcctgaacctggtgccgctggccgagagcgtggtgaagctgacggcggtgtgcatggagtgcttccgggaagccgcctataccaagaggctcggcacagagaaggaggtcgaggtgattgggggagcagacaagtaccactccgtgtgtcggctctgctacttcaagaaggcctcaggccagcctgccgggccggacaacaaagagaactgcccagtgccaggaaagccaggggaagccgtggctgccaggaagctctttgccccacagcagattctgcaatgcagccctgccaactgagggacctgcgagggccgcccgctcccttcctgccactgccgcctactggacgctgccctgcatgctgcccagccaccctcccctgaggatggcctggattcacgccctcttgtttccttttgggctcaaagcccttcctacctctggtgatggtttccacaggaacaacagcatctttcaccaagatgggtggcaccaaccttgctgggacttggatcccaggggcttatctcttcaagtgtggagagggcagggtccacgcctctgctgtagcttatgaaattaactaattgaaaattcactg

SEQ ID NO: 78285 - DNA, 670 bp, Homo sapiens
actccaggaggaagtcgggagtggctgggcagcatgcaggcagcgtccagtaggcggcagtggcaggaaggccactccaggaggaagtcgggaggcgtggagggtgaccacaccttggccttctgggaactctcctttgtgtggctgccccacctgccgcatgctccctcctctcctacccactggtctgcttaaagcttccctctcagctgctgggacgatcgcccaggctggagctggccccgcttggtggcctgggatctggcacactccctctccttggggtgagggacagagccccacgctgttgacatcagcctgcttcttcccctctgcggctttcactgctgagtttctgttctccctgggaagcctgtgccagcacctttgagccttggcccacactgaggcttaggcctctctgcctgggatgggctcccaccctcccctgaggatggcctggattcacgccctcttgtttccttttgggctcaaagcccttcctacctctggtgatggtttccacaggaacaacagcatctttcaccaagatgggtggcaccaaccttgctgggacttggatcccaggggcttatctcttcaagtgtggagagggcagggtccacgcctctgctgtagcttatgaaattaactaattgaaaattcactg

SEQ ID NO: 78286 - DNA, 975 bp, Homo sapiens
agcagagaggcggggttagtggacgagggaacttcccggaggcgcaatgagctgcattaacctgcccactgtgctgcccggctcccccagcaagacccgggggcagatccaggtgattctcgggccgatgttctcaggaaaaagcacagagttgatgagacgcgtccgtcgcttccagattgctcagtacaagtgcctggtgatcaagtatgccaaagacactcgctacagcagcagcttctgcacacatgaccggaacaccatggaggcgctgcccgcctgcctgctccgagacgtggcccaggaggccctgggcgtggctgtcataggcatcgacgaggggcagtttttccctgacatcgtggagttctgcgaggccatggccaacgccgggaagaccgtaattgtggctgcactggatgggaccttccagaggaagccatttggggccatcctgaacctggtgccgctggccgagagcgtggtgaagctgacggcggtgtgcatggagtgcttccgggaagccgcctataccaagaggctcggcacagagaaggaggtcgaggtgattgggggagcagacaagtaccactccgtgtgtcggctctgctacttcaagaaggcctcaggccagcctgccgggccggacaacaaagagaactgcccagtgccaggaaagccaggggaagccgtggctgccaggaagctctttgccccacagcagattctgcaatgcagccctgccaactgaggactggagggcgcgtccttctgcatgcgctatgaagtgcctgatgtgctgaggatgctggtagcctttgttcctttggtcaagcctctacttggggggtccggacaccgttttccaggggggcactgtgggtgggccgggtatctcatgggggggggccccggggtaatttggtcaaaaaaacgggttgggggggggggggtcccctaaggagctgttaggaa

SEQ ID NO: 78287 - DNA, 594 bp, Homo sapiens
atcagcctgcttcttcccctctgcggctgatgtcaacagcgtggggctctgtccctcaccccaaggagagggagtgtgccagatcccaggccaccaagcggggcagctccagcctgggcgatcgtcccagcagctgagagggaagctttaagcagaccagtgggtaggagaggagggagcatgcggcaggtggggcagcacacaaaggagagttcccagaaggccaaggtgtggtcatcagcctgcttcttcccctctgcggctttcactgctgagtttctgttctccctgggaagcctgtgccagcacctttgagccttggcccacactgaggcttaggcctctctgcctgggatgggctcccaccctcccctgaggatggcctggattcacgccctcttgtttccttttgggctcaaagcccttcctacctctggtgatggtttccacaggaacaacagcatctttcaccaagatgggtggcaccaaccttgctgggacttggatcccaggggcttatctcttcaagtgtggagagggcagggtccacgcctctgctgtagcttatgaaattaactaattgaaaattcactg

SEQ ID NO: 78288 - DNA, 1335 bp, Homo sapiens
ttttttttccccccccccttttttttttttggggttggggcggggggtggtttttgtaggacagagccccacgctgttgacatcagcctgcttcttcccctctgcggctttcactgctgagtttctgttctccctgggaagcctgtgccagcacctttgagccttggcccacactgaggcttaggcctctctgcctgggatgggctcccaccctcccctgaggatggcctggattcacgccctcttgtttccttttgggctcaaagcccttcctacctctggtgatggtttccacaggaacaacagcatctttcaccaagatgggtggcaccaaccttgctgggacttggatcccaggggcttatctcttcaagtgtggagagggcagggtccacgcctctgctgtagcttatgaaattaactaattgaaaattcactgaaaaaaaaaaaaaaaaaaaaaaaaaaaaaaaaaagaaaaaaaaaaaaaaaaaaaaaaaaaaaaaaaaaaggggggggggcggcgccaaaaaccctccccgtgggggccccaagagagccgcgcccccgcgatgtatgagagagagggggcccccaagaggggggttataaaataacagcagcagcgcggcggcggccggctttttataacaccacgaacgtcgagtagtgcgggagagaaaaacgcgctgcggtccggcggggtcactcttgttggaggaaggaagccgcccccttctgtatcgccgggggggggcggacgaaaaagtgttgcgggcgaccacaccaccctcctcgagcggagtaatatattataagagatctgctggagggactaaataataaaacagttttagagagggagatgatagagggtggtagacaaaaaaaggaggggagtaatagattgggggcgagctggtggcgaggatgaatagatatgtctgtggtcgactcggcagaggagaagtatatatagtatatgtgagagagaaaaataattttatctacacgcggagggggctgctttatattagatataaaaaaaacacgggggggacgagcacagcgccgcgcgagggaccaaggcgcacgagacggcggcgcgagcgggacagcagcagcaacagatgagaagagacgcgggaggaatagcgcagacggagtgggggccgaggaggcgagcgagccaggaggagcagagggagggacggcgaggcaggagcgcggggggcggcatggagcggtgagacgccgaggagacgtatagaggcggcgagcagaggaaaggacaccgacagcagcagaacacgacgtacagatcgcgcagagacgcgc

SEQ ID NO: 78289 - DNA, 2704 bp, Homo sapiens
  misc_feature (1690)..(1690): n is a, c, g, or t
  misc_feature (1847)..(1847): n is a, c, g, or t
  misc_feature (1850)..(1850): n is a, c, g, or t
gccctgatttccaggccctcccagtccctgggcgcacgtcccggattcctcccacgagggggcgggctgcggccaaatctcccgccaggtcagcggccgggcgctgattggccccatggcggcggggccggctcgtgattggccagcacgccgtggtttaaagcggtcggcgcgggaaccaggggcttactgcgggacggccttggagagtactcgggttcgtgaacttcccggaggcgcaatgagctgcattaacctgcccactgtgctgcccggctcccccagcaagacccgggggcagatccaggtgattctcgggccgatgttctcaggaaaaagcacagagttgatgagacgcgtccgtcgcttccagattgctcagtacaagtgcctggtgatcaagtatgccaaagacactcgctacagcagcagcttctgcacacatgaccggaacaccatggaggcgctgcccgcctgcctgctccgagacgtggcccaggaggccctgggcgtggctgtcataggcatcgacgaggggcagtttttccctgacatcgtggagttctgcgaggccatggccaacgccgggaagaccgtaattgtggctgcactggatgggaccttccagaggaagccatttggggccatcctgaacctggtgccgctggccgagagcgtggtgaagctgacggcggtgtgcatggagtgcttccgggaagccgcctataccaagaggctcggcacagagaaggaggtcgaggtgattgggggagcagacaagtaccactccgtgtgtcggctctgctacttcaagaaggcctcaggccagcctgccgggccggacaacaaagagaactgcccagtgccaggaaagccaggggaagccgtggctgccaggaagctctttgccccacagcagattctgcaatgcagccctgccaactgagggacctgcgagggccgcccgctcccttcctgccactgccgcctactggacgctgccctgcatgctgcccagccactccaggaggaagtcgggaggcgtggagggtgaccacaccttggccttctgggaactctcctttgtgtggctgccccacctgccgcatgctccctcctctcctacccactggtctgcttaaagcttccctctcagctgctgggacgatcgcccaggctggagctggccccgcttggtggcctgggatctggcacactccctctccttggggtgagggacagagccccacgctgttgacatcagcctgcttcttcccctctgcggctttcactgctgagtttctgttctccctgggaagcctgtgccagcacctttgagccttggcccacactgaggcttaggcctctctgcctgggatgggctcccaccctcccctgaggatggcctggattcacgccctcttgtttccttttgggctcaaagcccttcctacctctggtgatggtttccacaggaacaacagcatctttcaccaagatgggtggcaccaaccttgctgggacttggatcccaggggcttatctcttcaagtgtggagagggcagggtccacgcctctgctgtagcttatgaaattaactaattgaaaattcactggttggtggacgcacatttctctttcacctgggtttccctgggtctcatggacagctccaacttgatttgggtnggggattttcttccagatctttttttcttttgttttgagacagggtctctgtcgcccaggctggagtgcagtgacgcaatccctgctcactgcagcctctgcttccccagttgaagtgattctcccccgtcagcctcccaagtagccgatattacanggncgtgtaccaccacacctggctaatttttgtatttttagtagagacgagttttcaccatgttggccaggctggtctcgaactcctggcctcaagtgatccacctgcctcggcctcccaaagtgctgggattacaggcgtgaggcactgcacctggcccccagatctttctgtagtaatactgatctcttaaccacaacccttgaactgagaaatgatcatggggtgtgtcctaagcagaacatcatctgccttcctgtctgggccagtgtcaggacaaaaatgggtgtacagaggagcccggggcccagttggaaggaagaggcactgtcctgcccgctgggcctgtgaggtcaggttttgtttgtgaaacaaactcttggtaattcaggagtcaagacatctctcagctgtgcctcagagatgggctgttggcagctcacttgggggcaagcatcgctggggtaaggtgtgtcctgtgcaggcagggtcaccactcccagggcctccccagcctccctctccccttcgctagtgatgtgtcccaagccaaagccatcgggtgaggctgggagcagtgccctgttagttcgtactggggatttttaaacaatcgggacttgccgatgacagctccctctgtcattgctcaaaagaagaagccagaagttgctttagggccttgacctcttccagagatgggccttatctctcgaggggtgggctggacggccaaggccgtgtcccaggaaggctccagaggtgctgaccctggaggaaggtagaaacctggtcttacctatggtacccctattcagtgcaagaaaggggcattcaccgacaactcccaggtaccc

SEQ ID NO: 78290 - DNA, 2401 bp, Homo sapiens
  misc_feature (1690)..(1690): n is a, c, g, or t
  misc_feature (1847)..(1847): n is a, c, g, or t
  misc_feature (1850)..(1850): n is a, c, g, or t
gccctgatttccaggccctcccagtccctgggcgcacgtcccggattcctcccacgagggggcgggctgcggccaaatctcccgccaggtcagcggccgggcgctgattggccccatggcggcggggccggctcgtgattggccagcacgccgtggtttaaagcggtcggcgcgggaaccaggggcttactgcgggacggccttggagagtactcgggttcgtgaacttcccggaggcgcaatgagctgcattaacctgcccactgtgctgcccggctcccccagcaagacccgggggcagatccaggtgattctcgggccgatgttctcaggaaaaagcacagagttgatgagacgcgtccgtcgcttccagattgctcagtacaagtgcctggtgatcaagtatgccaaagacactcgctacagcagcagcttctgcacacatgaccggaacaccatggaggcgctgcccgcctgcctgctccgagacgtggcccaggaggccctgggcgtggctgtcataggcatcgacgaggggcagtttttccctgacatcgtggagttctgcgaggccatggccaacgccgggaagaccgtaattgtggctgcactggatgggaccttccagaggaagccatttggggccatcctgaacctggtgccgctggccgagagcgtggtgaagctgacggcggtgtgcatggagtgcttccgggaagccgcctataccaagaggctcggcacagagaaggaggtcgaggtgattgggggagcagacaagtaccactccgtgtgtcggctctgctacttcaagaaggcctcaggccagcctgccgggccggacaacaaagagaactgcccagtgccaggaaagccaggggaagccgtggctgccaggaagctctttgccccacagcagattctgcaatgcagccctgccaactgagggacctgcgagggccgcccgctcccttcctgccactgccgcctactggacgctgccctgcatgctgcccagccactccaggaggaagtcgggaggcgtggagggtgaccacaccttggccttctgggaactctcctttgtgtggctgccccacctgccgcatgctccctcctctcctacccactggtctgcttaaagcttccctctcagctgctgggacgatcgcccaggctggagctggccccgcttggtggcctgggatctggcacactccctctccttggggtgagggacagagccccacgctgttgacatcagcctgcttcttcccctctgcggctttcactgctgagtttctgttctccctgggaagcctgtgccagcacctttgagccttggcccacactgaggcttaggcctctctgcctgggatgggctcccaccctcccctgaggatggcctggattcacgccctcttgtttccttttgggctcaaagcccttcctacctctggtgatggtttccacaggaacaacagcatctttcaccaagatgggtggcaccaaccttgctgggacttggatcccaggggcttatctcttcaagtgtggagagggcagggtccacgcctctgctgtagcttatgaaattaactaattgaaaattcactggttggtggacgcacatttctctttcacctgggtttccctgggtctcatggacagctccaacttgatttgggtnggggattttcttccagatctttttttcttttgttttgagacagggtctctgtcgcccaggctggagtgcagtgacgcaatccctgctcactgcagcctctgcttccccagttgaagtgattctcccccgtcagcctcccaagtagccgatattacanggncgtgtaccaccacacctggctaatttttgtatttttagtagagacgagttttcaccatgttggccaggctggtctcgaactcctggcctcaagtgatccacctgcctcggcctcccaaagtgctgggattacaggcgtgaggcactgcacctggcccccagatctttctgtagtaatactgatctcttaaccacaacccttgaactgagaaatgatcatggggtgtgtcctaagcagaacatcatctgccttcctgtctgggccagtgtcaggacaaaaatgggtgtacagaggagcccggggcccagttggaaggaagaggcactgtcctgcccgctgggcctgtgaggtcaggttttgtttgtgaaacaaactcttggtaattcaggagtcaagacatctctcagctgtgcctcagagatgggctgttggcagctcacttgggggcaagcatcgctggggtaaggtgtgtcctgtgcaggcagggtcaccactcccagggcctccccagggtttcctctacatcaacgtataacggttttcgatgaaag

SEQ ID NO: 78291 - DNA, 2513 bp, Homo sapiens
gccctgatttccaggccctcccagtccctgggcgcacgtcccggattcctcccacgagggggcgggctgcggccaaatctcccgccaggtcagcggccgggcgctgattggccccatggcggcggggccggctcgtgattggccagcacgccgtggtttaaagcggtcggcgcgggaaccaggggcttactgcgggacggccttggagagtactcgggttcgtgaacttcccggaggcgcaatgagctgcattaacctgcccactgtgctgcccggctcccccagcaagacccgggggcagatccaggtgattctcgggccgatgttctcaggaaaaagcacagagttgatgagacgcgtccgtcgcttccagattgctcagtacaagtgcctggtgatcaagtatgccaaagacactcgctacagcagcagcttctgcacacatgaccggaacaccatggaggcgctgcccgcctgcctgctccgagacgtggcccaggaggccctgggcgtggctgtcataggcatcgacgaggggcagtttttccctgacatcgtggagttctgcgaggccatggccaacgccgggaagaccgtaattgtggctgcactggatgggaccttccagaggaagccatttggggccatcctgaacctggtgccgctggccgagagcgtggtgaagctgacggcggtgtgcatggagtgcttccgggaagccgcctataccaagaggctcggcacagagaaggaggtcgaggtgattgggggagcagacaagtaccactccgtgtgtcggctctgctacttcaagaaggcctcaggccagcctgccgggccggacaacaaagagaactgcccagtgccaggaaagccaggggaagccgtggctgccaggaagctctttgccccacagcagattctgcaatgcagccctgccaactgagggacctgcgagggccgcccgctcccttcctgccactgccgcctactggacgctgccctgcatgctgcccagccactccaggaggaagtcgggaggcgtggagggtgaccacaccttggccttctgggaactctcctttgtgtggctgccccacctgccgcatgctccctcctctcctacccactggtctgcttaaagcttccctctcagctgctgggacgatcgcccaggctggagctggccccgcttggtggcctgggatctggcacactccctctccttggggtgagggacagagccccacgctgttgacatcagcctgcttcttcccctctgcggctttcactgctgagtttctgttctccctgggaagcctgtgccagcacctttgagccttggcccacactgaggcttaggcctctctgcctgggatgggctcccaccctcccctgaggatggcctggattcacgccctcttgtttccttttgggctcaaagcccttcctacctctggtgatggtttccacaggaacaacagcatctttcaccaagatgggtggcaccaaccttgctgggacttggatcccaggggcttatctcttcaagtgtggagagggcagggtccacgcctctgctgtagcttatgaaattaactaattgaaaattcactgaaaaaaaaaaaaaaaaaaaaaaaaaaaaaaaaaagaaaaaaaaaaaaaaaaaaaaaaaaaaaaaaaaaaggggggggggcggcgccaaaaaccctccccgtgggggccccaagagagccgcgcccccgcgatgtatgagagagagggggcccccaagaggggggttataaaataacagcagcagcgcggcggcggccggctttttataacaccacgaacgtcgagtagtgcgggagagaaaaacgcgctgcggtccggcggggtcactcttgttggaggaaggaagccgcccccttctgtatcgccgggggggggcggacgaaaaagtgttgcgggcgaccacaccaccctcctcgagcggagtaatatattataagagatctgctggagggactaaataataaaacagttttagagagggagatgatagagggtggtagacaaaaaaaggaggggagtaatagattgggggcgagctggtggcgaggatgaatagatatgtctgtggtcgactcggcagaggagaagtatatatagtatatgtgagagagaaaaataattttatctacacgcggagggggctgctttatattagatataaaaaaaacacgggggggacgagcacagcgccgcgcgagggaccaaggcgcacgagacggcggcgcgagcgggacagcagcagcaacagatgagaagagacgcgggaggaatagcgcagacggagtgggggccgaggaggcgagcgagccaggaggagcagagggagggacggcgaggcaggagcgcggggggcggcatggagcggtgagacgccgaggagacgtatagaggcggcgagcagaggaaaggacaccgacagcagcagaacacgacgtacagatcgcgcagagacgcgc

SEQ ID NO: 78292 - DNA, 1908 bp, Homo sapiens
gccctgatttccaggccctcccagtccctgggcgcacgtcccggattcctcccacgagggggcgggctgcggccaaatctcccgccaggtcagcggccgggcgctgattggccccatggcggcggggccggctcgtgattggccagcacgccgtggtttaaagcggtcggcgcgggaaccaggggcttactgcgggacggccttggagagtactcgggttcgtgaacttcccggaggcgcaatgagctgcattaacctgcccactgtgctgcccggctcccccagcaagacccgggggcagatccaggtgattctcgggccgatgttctcaggaaaaagcacagagttgatgagacgcgtccgtcgcttccagattgctcagtacaagtgcctggtgatcaagtatgccaaagacactcgctacagcagcagcttctgcacacatgaccggaacaccatggaggcgctgcccgcctgcctgctccgagacgtggcccaggaggccctgggcgtggctgtcataggcatcgacgaggggcagtttttccctgacatcgtggagttctgcgaggccatggccaacgccgggaagaccgtaattgtggctgcactggatgggaccttccagaggaagccatttggggccatcctgaacctggtgccgctggccgagagcgtggtgaagctgacggcggtgtgcatggagtgcttccgggaagccgcctataccaagaggctcggcacagagaaggaggtcgaggtgattgggggagcagacaagtaccactccgtgtgtcggctctgctacttcaagaaggcctcaggccagcctgccgggccggacaacaaagagaactgcccagtgccaggaaagccaggggaagccgtggctgccaggaagctctttgccccacagcagattctgcaatgcagccctgccaactgagggacctgcgagggccgcccgctcccttcctgccactgccgcctactggacgctgccctgcatgctgcccagccactccaggaggaagtcgggaggcgtggagggtgaccacaccttggccttctgggaactctcctttgtgtggctgccccacctgccgcatgctccctcctctcctacccactggtctgcttaaagcttccctctcagctgctgggacgatcgcccaggctggagctggccccgcttggtggcctgggatctggcacactccctctccttggggtgagggacagagccccacgctgttgacatcagcctgcttcttcccctctgcggctttcactgctgagtttctgttctccctgggaagcctgtgccagcacctttgagccttggcccacactgaggcttaggcctctctgcctgggatgggctcccaccctcccctgaggatggcctggattcacgccctcttgtttccttttgggctcaaagcccttcctacctctggtgatggtttccacaggaacaacagcatctttcaccaagatgggtggcaccaaccttgctgggacttggatcccaggggcttatctcttcaagtgtggagagggcagggtccacgcctctgctgtagcttatgaaattaactaattgaaaattcactgaaaggaaaacacagacaaaaagaaaaaacaagaaaaaacaaagaagagaacaaacaaaacacgacgcgggaggagccctactagccgggcggggcgggcgaaaaaaacgacggcgtactgaaaaaagggcggcgaccgcgggggtgccacaagcgagggggtccgtccagacccccaacttgttgggcgacccacaacagggggcggaaaacacggtgcaggggccacacccattcaaaggcaggcggcgtcaacagcggaaaaagcccccgtggaaccccgcctaataga

SEQ ID NO: 78293 - DNA, 1600 bp, Homo sapiens
gccctgatttccaggccctcccagtccctgggcgcacgtcccggattcctcccacgagggggcgggctgcggccaaatctcccgccaggtcagcggccgggcgctgattggccccatggcggcggggccggctcgtgattggccagcacgccgtggtttaaagcggtcggcgcgggaaccaggggcttactgcgggacggccttggagagtactcgggttcgtgaacttcccggaggcgcaatgagctgcattaacctgcccactgtgctgcccggctcccccagcaagacccgggggcagatccaggtgattctcgggccgatgttctcaggaaaaagcacagagttgatgagacgcgtccgtcgcttccagattgctcagtacaagtgcctggtgatcaagtatgccaaagacactcgctacagcagcagcttctgcacacatgaccggaacaccatggaggcgctgcccgcctgcctgctccgagacgtggcccaggaggccctgggcgtggctgtcataggcatcgacgaggggcagtttttccctgacatcgtggagttctgcgaggccatggccaacgccgggaagaccgtaattgtggctgcactggatgggaccttccagaggaagccatttggggccatcctgaacctggtgccgctggccgagagcgtggtgaagctgacggcggtgtgcatggagtgcttccgggaagccgcctataccaagaggctcggcacagagaaggaggtcgaggtgattgggggagcagacaagtaccactccgtgtgtcggctctgctacttcaagaaggcctcaggccagcctgccgggccggacaacaaagagaactgcccagtgccaggaaagccaggggaagccgtggctgccaggaagctctttgccccacagcagattctgcaatgcagccctgccaactgagggacctgcgagggccgcccgctcccttcctgccactgccgcctactggacgctgccctgcatgctgcccagccactccaggaggaagtcgggaggcgtggagggtgaccacaccttggccttctgggaactctcctttgtgtggctgccccacctgccgcatgctccctcctctcctacccactggtctgcttaaagcttccctctcagctgctgggacgatcgcccaggctggagctggccccgcttggtggcctgggatctggcacactccctctccttggggtgagggacagagccccacgctgttgacatcagcctgcttcttcccctctgcggctttcactgctgagtttctgttctccctgggaagcctgtgccagcacctttgagccttggcccacactgaggcttaggcctctctgcctgggatgggctcccaccctcccctgaggatggcctggattcacgccctcttgtttccttttgggctcaaagcccttcctacctctggtgatggtttccacaggaacaacagcatctttcaccaagatgggtggcaccaaccttgctgggacttggatcccaggggcttatctcttcaagtgtggacacgggttccaattaaaccccggggggtagctttattaatac

SEQ ID NO: 78294 - DNA, 1561 bp, Homo sapiens
gccctgatttccaggccctcccagtccctgggcgcacgtcccggattcctcccacgagggggcgggctgcggccaaatctcccgccaggtcagcggccgggcgctgattggccccatggcggcggggccggctcgtgattggccagcacgccgtggtttaaagcggtcggcgcgggaaccaggggcttactgcgggacggccttggagagtactcgggttcgtgaacttcccggaggcgcaatgagctgcattaacctgcccactgtgctgcccggctcccccagcaagacccgggggcagatccaggtgattctcgggccgatgttctcaggaaaaagcacagagttgatgagacgcgtccgtcgcttccagattgctcagtacaagtgcctggtgatcaagtatgccaaagacactcgctacagcagcagcttctgcacacatgaccggaacaccatggaggcgctgcccgcctgcctgctccgagacgtggcccaggaggccctgggcgtggctgtcataggcatcgacgaggggcagtttttccctgacatcgtggagttctgcgaggccatggccaacgccgggaagaccgtaattgtggctgcactggatgggaccttccagaggaagccatttggggccatcctgaacctggtgccgctggccgagagcgtggtgaagctgacggcggtgtgcatggagtgcttccgggaagccgcctataccaagaggctcggcacagagaaggaggtcgaggtgattgggggagcagacaagtaccactccgtgtgtcggctctgctacttcaagaaggcctcaggccagcctgccgggccggacaacaaagagaactgcccagtgccaggaaagccaggggaagccgtggctgccaggaagctctttgccccacagcagattctgcaatgcagccctgccaactgagggacctgcgagggccgcccgctcccttcctgccactgccgcctactggacgctgccctgcatgctgcccagccactccaggaggaagtcgggaggcgtggagggtgaccacaccttggccttctgggaactctcctttgtgtggctgccccacctgccgcatgctccctcctctcctacccactggtctgcttaaagcttccctctcagctgctgggacgatcgcccaggctggagctggccccgcttggtggcctgggatctggcacactccctctccttggggtgagggacagagccccacgctgttgacatcagcctgcttcttcccctctgcggctttcactgctgagtttctgttctccctgggaagcctgtgccagcacctttgagccttggcccacactgaggcttaggcctctctgcctgggatgggctcccaccctcccctgaggatggcctggattcacgccctcgaggggatggagttgcccacaagggggcctgggtgcatcaaataggcagccggtgagtcaagcagcctcggggccagtggggctggagagatgccagacccaggggtctatgtgtggaccctaggtatttggaactccc

SEQ ID NO: 78295 - DNA, 1539 bp, Homo sapiens
gccctgatttccaggccctcccagtccctgggcgcacgtcccggattcctcccacgagggggcgggctgcggccaaatctcccgccaggtcagcggccgggcgctgattggccccatggcggcggggccggctcgtgattggccagcacgccgtggtttaaagcggtcggcgcgggaaccaggggcttactgcgggacggccttggagagtactcgggttcgtgaacttcccggaggcgcaatgagctgcattaacctgcccactgtgctgcccggctcccccagcaagacccgggggcagatccaggtgattctcgggccgatgttctcaggaaaaagcacagagttgatgagacgcgtccgtcgcttccagattgctcagtacaagtgcctggtgatcaagtatgccaaagacactcgctacagcagcagcttctgcacacatgaccggaacaccatggaggcgctgcccgcctgcctgctccgagacgtggcccaggaggccctgggcgtggctgtcataggcatcgacgaggggcagtttttccctgacatcgtggagttctgcgaggccatggccaacgccgggaagaccgtaattgtggctgcactggatgggaccttccagaggaagccatttggggccatcctgaacctggtgccgctggccgagagcgtggtgaagctgacggcggtgtgcatggagtgcttccgggaagccgcctataccaagaggctcggcacagagaaggaggtcgaggtgattgggggagcagacaagtaccactccgtgtgtcggctctgctacttcaagaaggcctcaggccagcctgccgggccggacaacaaagagaactgcccagtgccaggaaagccaggggaagccgtggctgccaggaagctctttgccccacagcagattctgcaatgcagccctgccaactgagggacctgcgagggccgcccgctcccttcctgccactgccgcctactggacgctgccctgcatgctgcccagccactccaggaggaagtcgggaggcgtggagggtgaccacaccttggccttctgggaactctcctttgtgtggctgccccacctgccgcatgctccctcctctcctacccactggtctgcttaaagcttccctctcagctgctgggacgatcgcccaggctggagctggccccgcttggtggcctgggatctggcacactccctctccttggggtgagggacagagccccacgctgttgacatcagcctgcttcttcccctctgcggctttcactgctgagtttctgttccaccctcccctgaggatggcctggattcacgccctcttgtttccttttgggctcaaagcccttcctacctctggtgatggtttccacaggaacaacagcatctttcaccaagatgggtggcaccaaccttgctgggacttggatcccaggggcttatctcttcaagtgtggagagggcagggtccacgcctctgctgtagcttatgaaattaactaattgaaaattcactg

SEQ ID NO: 78296 - DNA, 1422 bp, Homo sapiens
agcagagaggcggggttagtggacgagggaacttcccggaggcgcaatgagctgcattaacctgcccactgtgctgcccggctcccccagcaagacccgggggcagatccaggtgattctcgggccgatgttctcaggaaaaagcacagagttgatgagacgcgtccgtcgcttccagattgctcagtacaagtgcctggtgatcaagtatgccaaagacactcgctacagcagcagcttctgcacacatgaccggaacaccatggaggcgctgcccgcctgcctgctccgagacgtggcccaggaggccctgggcgtggctgtcataggcatcgacgaggggcagtttttccctgacatcgtggagttctgcgaggccatggccaacgccgggaagaccgtaattgtggctgcactggatgggaccttccagaggaagccatttggggccatcctgaacctggtgccgctggccgagagcgtggtgaagctgacggcggtgtgcatggagtgcttccgggaagccgcctataccaagaggctcggcacagagaaggaggtcgaggtgattgggggagcagacaagtaccactccgtgtgtcggctctgctacttcaagaaggcctcaggccagcctgccgggccggacaacaaagagaactgcccagtgccaggaaagccaggggaagccgtggctgccaggaagctctttgccccacagcagattctgcaatgcagccctgccaactgagggacctgcgagggccgcccgctcccttcctgccactgccgcctactggacgctgccctgcatgctgcccagccactccaggaggaagtcgggaggcgtggagggtgaccacaccttggccttctgggaactctcctttgtgtggctgccccacctgccgcatgctccctcctctcctacccactggtctgcttaaagcttccctctcagctgctgggacgatcgcccaggctggagctggccccgcttggtggcctgggatctggcacactccctctccttggggtgagggacagagccccacgctgttgacatcagcctgcttcttcccctctgcggctttcactgctgagtttctgttctccctgggaagcctgtgccagcacctttgagccttggcccacactgaggcttaggcctctctgcctgggatgggctcccaccctcccctgaggatggcctggattcacgccctcttgtttccttttgggctcaaagcccttcctacctctggtgatggtttccacaggaacaacagcatctttcaccaagatgggtggcaccaaccttgctgggacttggatcccaggggcttatctcttcaagtgtggagagggcagggtccacgcctctgctgtagcttatgaaattaactaattgaaaattcactg

SEQ ID NO: 78297 - DNA, 1641 bp, Homo sapiens
gccctgatttccaggccctcccagtccctgggcgcacgtcccggattcctcccacgagggggcgggctgcggccaaatctcccgccaggtcagcggccgggcgctgattggccccatggcggcggggccggctcgtgattggccagcacgccgtggtttaaagcggtcggcgcgggaaccaggggcttactgcgggacggccttggagagtactcgggttcgtgaacttcccggaggcgcaatgagctgcattaacctgcccactgtgctgcccggctcccccagcaagacccgggggcagatccaggtgattctcgggccgatgttctcaggaaaaagcacagagttgatgagacgcgtccgtcgcttccagattgctcagtacaagtgcctggtgatcaagtatgccaaagacactcgctacagcagcagcttctgcacacatgaccgaactcgaagtaggattatagcaaggaacaccatggaggcgctgcccgcctgcctgctccgagacgtggcccaggaggccctgggcgtggctgtcataggcatcgacgaggggcagtttttccctgacatcgtggagttctgcgaggccatggccaacgccgggaagaccgtaattgtggctgcactggatgggaccttccagaggaagccatttggggccatcctgaacctggtgccgctggccgagagcgtggtgaagctgacggcggtgtgcatggagtgcttccgggaagccgcctataccaagaggctcggcacagagaaggaggtcgaggtgattgggggagcagacaagtaccactccgtgtgtcggctctgctacttcaagaaggcctcaggccagcctgccgggccggacaacaaagagaactgcccagtgccaggaaagccaggggaagccgtggctgccaggaagctctttgccccacagcagattctgcaatgcagccctgccaactgagggacctgcgagggccgcccgctcccttcctgccactgccgcctactggacgctgccctgcatgctgcccagccactccaggaggaagtcgggaggcgtggagggtgaccacaccttggccttctgggaactctcctttgtgtggctgccccacctgccgcatgctccctcctctcctacccactggtctgcttaaagcttccctctcagctgctgggacgatcgcccaggctggagctggccccgcttggtggcctgggatctggcacactccctctccttggggtgagggacagagccccacgctgttgacatcagcctgcttcttcccctctgcggctttcactgctgagtttctgttctccctgggaagcctgtgccagcacctttgagccttggcccacactgaggcttaggcctctctgcctgggatgggctcccaccctcccctgaggatggcctggattcacgccctcttgtttccttttgggctcaaagcccttcctacctctggtgatggtttccacaggaacaacagcatctttcaccaagatgggtggcaccaaccttgctgggacttggatcccaggggcttatctcttcaagtgtggagagggcagggtccacgcctctgctgtagcttatgaaattaactaattgaaaattcactg

SEQ ID NO: 78298 - DNA, 1716 bp, Homo sapiens
gccctgatttccaggccctcccagtccctgggcgcacgtcccggattcctcccacgagggggcgggctgcggccaaatctcccgccaggtcagcggccgggcgctgattggccccatggcggcggggccggctcgtgattggccagcacgccgtggtttaaagcggtcggcgcgggaaccaggggcttactgcgggacggccttggagagtactcgggttcgtgaacttcccggaggcgcaatgagctgcattaacctgcccactgtgctgcccggctcccccagcaagacccgggggcagatccaggtgattctcgggccgatgttctcaggaaaaagcacagagttgatgagacgcgtccgtcgcttccagattgctcagtacaagtgcctggtgatcaagtatgccaaagacactcgctacagcagcagcttctgcacacatgaccggaacaccatggaggcgctgcccgcctgcctgctccgagacgtggcccaggaggccctgggcgtggctgtcataggcatcgacgaggggcagtttttccctgacatcgtggagttctgcgaggccatggccaacgccgggaagaccgtaattgtggctgcactggatgggaccttccagaggaagccatttggggccatcctgaacctggtgccgctggccgagagcgtggtgaagctgacggcggtgtgcatggagtgcttccgggaagccgcctataccaagaggctcggcacagagaaggaggtagctccacctgccttccctgcaggccggcggggtgggggtatggctctgcctccttcctgtcctggcccttcacccatcccctgtccctgcggccaggtcgaggtgattgggggagcagacaagtaccactccgtgtgtcggctctgctacttcaagaaggcctcaggccagcctgccgggccggacaacaaagagaactgcccagtgccaggaaagccaggggaagccgtggctgccaggaagctctttgccccacagcagattctgcaatgcagccctgccaactgagggacctgcgagggccgcccgctcccttcctgccactgccgcctactggacgctgccctgcatgctgcccagccactccaggaggaagtcgggaggcgtggagggtgaccacaccttggccttctgggaactctcctttgtgtggctgccccacctgccgcatgctccctcctctcctacccactggtctgcttaaagcttccctctcagctgctgggacgatcgcccaggctggagctggccccgcttggtggcctgggatctggcacactccctctccttggggtgagggacagagccccacgctgttgacatcagcctgcttcttcccctctgcggctttcactgctgagtttctgttctccctgggaagcctgtgccagcacctttgagccttggcccacactgaggcttaggcctctctgcctgggatgggctcccaccctcccctgaggatggcctggattcacgccctcttgtttccttttgggctcaaagcccttcctacctctggtgatggtttccacaggaacaacagcatctttcaccaagatgggtggcaccaaccttgctgggacttggatcccaggggcttatctcttcaagtgtggagagggcagggtccacgcctctgctgtagcttatgaaattaactaattgaaaattcactg

SEQ ID NO: 78299 - DNA, 1622 bp, Homo sapiens
gccctgatttccaggccctcccagtccctgggcgcacgtcccggattcctcccacgagggggcgggctgcggccaaatctcccgccaggtcagcggccgggcgctgattggccccatggcggcggggccggctcgtgattggccagcacgccgtggtttaaagcggtcggcgcgggaaccaggggcttactgcgggacggccttggagagtactcgggttcgtgaacttcccggaggcgcaatgagctgcattaacctgcccactgtgctgcccggctcccccagcaagacccgggggcagatccaggtgattctcgggccgatgttctcaggaaaaagcacagagttgatgagacgcgtccgtcgcttccagattgctcagtacaagtgcctggtgatcaagtatgccaaagacactcgctacagcagcagcttctgcacacatgaccgttccctgacatcgtggagttctgcgaggccatggccaacgccgggaagaccgtaattgtggctgcactggatgggaccttccagaggaagccatttggggccatcctgaacctggtgccgctggccgagagcgtggtgaagctgacggcggtgtgcatggagtgcttccgggaagccgcctataccaagaggctcggcacagagaaggaggtagctccacctgccttccctgcaggccggcggggtgggggtatggctctgcctccttcctgtcctggcccttcacccatcccctgtccctgcggccaggtcgaggtgattgggggagcagacaagtaccactccgtgtgtcggctctgctacttcaagaaggcctcaggccagcctgccgggccggacaacaaagagaactgcccagtgccaggaaagccaggggaagccgtggctgccaggaagctctttgccccacagcagattctgcaatgcagccctgccaactgagggacctgcgagggccgcccgctcccttcctgccactgccgcctactggacgctgccctgcatgctgcccagccactccaggaggaagtcgggaggcgtggagggtgaccacaccttggccttctgggaactctcctttgtgtggctgccccacctgccgcatgctccctcctctcctacccactggtctgcttaaagcttccctctcagctgctgggacgatcgcccaggctggagctggccccgcttggtggcctgggatctggcacactccctctccttggggtgagggacagagccccacgctgttgacatcagcctgcttcttcccctctgcggctttcactgctgagtttctgttctccctgggaagcctgtgccagcacctttgagccttggcccacactgaggcttaggcctctctgcctgggatgggctcccaccctcccctgaggatggcctggattcacgccctcttgtttccttttgggctcaaagcccttcctacctctggtgatggtttccacaggaacaacagcatctttcaccaagatgggtggcaccaaccttgctgggacttggatcccaggggcttatctcttcaagtgtggagagggcagggtccacgcctctgctgtagcttatgaaattaactaattgaaaattcactg

SEQ ID NO: 78300 - DNA, 1455 bp, Homo sapiens
gccctgatttccaggccctcccagtccctgggcgcacgtcccggattcctcccacgagggggcgggctgcggccaaatctcccgccaggtcagcggccgggcgctgattggccccatggcggcggggccggctcgtgattggccagcacgccgtggtttaaagcggtcggcgcgggaaccaggggcttactgcgggacggccttggagagtactcgggttcgtgaacttcccggaggcgcaatgagctgcattaacctgcccactgtgctgcccggctcccccagcaagacccgggggcagatccaggtgattctcgggccgatgttctcaggaaaaagcacagagttgatgagacgcgtccgtcgcttccagattgctcagtacaagtgcctggtgatcaagtatgccaaagacactcgctacagcagcagcttctgcacacatgaccggaacaccatggaggcgctgcccgcctgcctgctccgagacgtggcccaggaggccctgggcgtggctgtcataggcatcgacgaggggcagtttttccctgacatcgtggagttctgcgaggccatggccaacgccgggaagaccgtaattgtggctgcactggatgggaccttccagaggaagccatttggggccatcctgaacctggtgccgctggccgagagcgtggtgaagctgacggcggtgtgcatggagtgcttccgggaagccgcctataccaagaggctcggcacagagaaggagcagattctgcaatgcagccctgccaactgagggacctgcgagggccgcccgctcccttcctgccactgccgcctactggacgctgccctgcatgctgcccagccactccaggaggaagtcgggaggcgtggagggtgaccacaccttggccttctgggaactctcctttgtgtggctgccccacctgccgcatgctccctcctctcctacccactggtctgcttaaagcttccctctcagctgctgggacgatcgcccaggctggagctggccccgcttggtggcctgggatctggcacactccctctccttggggtgagggacagagccccacgctgttgacatcagcctgcttcttcccctctgcggctttcactgctgagtttctgttctccctgggaagcctgtgccagcacctttgagccttggcccacactgaggcttaggcctctctgcctgggatgggctcccaccctcccctgaggatggcctggattcacgccctcttgtttccttttgggctcaaagcccttcctacctctggtgatggtttccacaggaacaacagcatctttcaccaagatgggtggcaccaaccttgctgggacttggatcccaggggcttatctcttcaagtgtggagagggcagggtccacgcctctgctgtagcttatgaaattaactaattgaaaattcactg

SEQ ID NO: 78301 - DNA, 715 bp, Homo sapiens
tcaagccggcctgccactaacctctctgtacactacgcactcacactctactcacgcaagctccactcacggctccgcaccgcgatacccagagcaccactagtagcccctgtgcgcacacttctgtgacccatatcactggacgggggtgaccacaccttggccttctgggaactctcctttgtgtggctgccccacctgccgcatgctccctcctctcctacccactggtctgcttaaagcttccctctcagctgctgggacgatcgcccaggctggagctggccccgcttggtggcctgggatctggcacactccctctccttggggtgagggacagagccccacgctgttgacatcagcctgcttcttcccctctgcggctttcactgctgagtttctgttctccctgggaagcctgtgccagcacctttgagccttggcccacactgaggcttaggcctctctgcctgggatgggctcccaccctcccctgaggatggcctggattcacgccctcttgtttccttttgggctcaaagcccttcctacctctggtgatggtttccacaggaacaacagcatctttcaccaagatgggtggcaccaaccttgctgggacttggatcccaggggcttatctcttcaagtgtggagagggcagggtccacgcctctgctgtagcttatgaaattaactaattgaaaattcactg

SEQ ID NO: 78302 - DNA, 427 bp, Homo sapiens
tttctctgtttagggagggaagagggaatttaaaatgcccaaaatactgtttcacacattctttccagaactcgaagtaggattatagcaaggtaataacgaaacaatagttgtaaagtatgtttttttgtttgtttgttgtttgtttttgggacagggtctctctctgtcacccaggctggagtgcagtggctcaatcatagcttactgttacgtgaccccaaacccttgggctcaagtgatcgtcccacctcagccccctgagcaggtgggactacaggcgcacaccaccacacccagttaatttttacatttttttcacacagtgtctcgctgtgttacccaggctggtctcgaactcctgagttcaagtgatcctcccgtcttggcctccccaaagattacgggcatgagctgctgtgtctgg

SEQ ID NO: 78303 - DNA, 1379 bp, Homo sapiens
agataaccagaaccgcaaatgcaggcgggggtgtcccagagtcggctccgcctgcaccccagggcgctggggccgggcatggggcggggggtgatataagaggacggcccagcagagggctgaagattttggagcccagctgtgtgccagcccaagtcggaacttggatcacatcagatcctctcgagctccagcaggagaggcccttcctcgcctggcagcccctgagcggctcagcagggcaccatggcaagatcccttctcctgcccctgcagatcctactgctatccttagccttggaaactgcaggagaagaagcccagggtgacaagattattgatggcgccccatgtgcaagaggctcccacccatggcaggtggccctgctcagtggcaatcagctccactgcggaggcgtcctggtcaatgagcgctgggtgctcactgccgcccactgcaagatgaatgagtacaccgtgcacctgggcagtgatacgctgggcgacaggagagctcagaggatcaaggcctcgaagtcattccgccaccccggctactccacacagacccatgttaatgacctcatgctcgtgaagctcaatagccaggccaggctgtcatccatggtgaagaaagtcaggctgccctcccgctgcgaaccccctggaaccacctgtactgtctccggctggggcactaccacgagcccagatgtgacctttccctctgacctcatgtgcgtggatgtcaagctcatctccccccaggactgcacgaaggtttacaaggacttactggaaaattccatgctgtgcgctggcatccccgactccaagaaaaacgcctgcaatggtgactcagggggaccgttggtgtgcagaggtaccctgcaaggtctggtgtcctggggaactttcccttgcggccaacccaatgacccaggagtctacactcaagtgtgcaagttcaccaagtggataaatgacaccatgaaaaagcatcgctaacgccacactgagttaattaactgtgtgcttccaacagaaaatgcacaggagtgaggacgccgatgacctatgaagtcaaatttgactttacctttcctcaaagatatatttaaacctcatgccctgttgataaaccaatcaaattggtaaagacctaaaaccaaaacaaataaagaaacacaaaaccctcagtgctggagaagagtcagtgagaccagcactctcaaacactggaactggacgttcgtacagtctttacggaagacacttggtcaatgtacaccgagacccttattcaccacctttgacccagtaactctaatcttaggaagaacctactggaacaaaaaaaatccaaaatgtagaacaag

SEQ ID NO: 78304 - DNA, 1235 bp, Homo sapiens
ggagagggtgatgctggctccaagcctgactctgctctcgagagctccagcaggagaggcccttcctcgcctggcagcccctgagcggctcagcagggcaccatggcaagatcccttctcctgcccctgcagatcctactgctatccttagccttggaaactgcaggagaagaagcccagggtgacaagattattgatggcgccccatgtgcaagaggctcccacccatggcaggtggccctgctcagtggcaatcagctccactgcggaggcgtcctggtcaatgagcgctgggtgctcactgccgcccactgcaagatgaatgagtacaccgtgcacctgggcagtgatacgctgggcgacaggagagctcagaggatcaaggcctcgaagtcattccgccaccccggctactccacacagacccatgttaatgacctcatgctcgtgaagctcaatagccaggccaggctgtcatccatggtgaagaaagtcaggctgccctcccgctgcgaaccccctggaaccacctgtactgtctccggctggggcactaccacgagcccagatgtgacctttccctctgacctcatgtgcgtggatgtcaagctcatctccccccaggactgcacgaaggtttacaaggacttactggaaaattccatgctgtgcgctggcatccccgactccaagaaaaacgcctgcaatggtgactcagggggaccgttggtgtgcagaggtaccctgcaaggtctggtgtcctggggaactttcccttgcggccaacccaatgacccaggagtctacactcaagtgtgcaagttcaccaagtggataaatgacaccatgaaaaagcatcgctaacgccacactgagttaattaactgtgtgcttccaacagaaaatgcacaggagtgaggacgccgatgacctatgaagtcaaatttgactttacctttcctcaaagatatatttaaacctcatgccctgttgataaaccaatcaaattggtaaagacctaaaaccaaaacaaataaagaaacacaaaaccctcagtgctggagaagagtcagtgagaccagcactctcaaacactggaactggacgttcgtacagtctttacggaagacacttggtcaatgtacaccgagacccttattcaccacctttgacccagtaactctaatcttaggaagaacctactggaacaaaaaaaatccaaaatgtagaacaag

SEQ ID NO: 78305 - DNA, 525 bp, Homo sapiens
gacctagtgtgtccctagcactagctctcccattagtccccagagacaatgagtctcttctcattggctatggtggaagtccataatctgcaagacaaagaccgataactgaggaatgtatgagaatgagttgggctttgatctgaagccaaagttaatctccggctctattccctctagggtgactcagggggaccgttggtgtgcagaggtaccctgcaaggtctggtgtcctggggaactttcccttgcggccaacccaatgacccaggagtctacactcaagtgtgcaagttcaccaagtggataaatgacaccatgaaaaagcatcgctaacgccacactgagttaattaactgtgtgcttccaacagaaaatgcacaggagtgaggacgccgatgacctatgaagtcaaatttgactttacctttcctcaaagatatatttaaacctcatgccctgttgataaaccaatcaaattggtaaagacctaaaaccaaaacaaataaagaaacacaaaaccct

SEQ ID NO: 78306 - DNA, 581 bp, Homo sapiens
ctcgctctagaggctcccccgatcggtctgttaaccaagaaaaacgcctgcaatggtgactcagggggaccgttggtgtgcagaggtaccctgcaaggtctggtgtcctggggaactttcccttgcggccaacccaatgacccaggagtctacactcaagtgtgcaagttcaccaagtggataaatgacaccatgaaaaagcatcgctaacgccacactgagttaattaactgtgtgcttccaacagaaaatgcacaggagtgaggacgccgatgacctatgaagtcaaatttgactttacctttcctcaaagatatatttaaacctcatgccctgttgataaaccaatcaaattggtaaagacctaaaaccaaaacaaataaagaaacacaaaaccctcagtgctggagaagagtcagtgagaccagcactctcaaacactggaactggacgttcgtacagtctttacggaagacacttggtcaatgtacaccgagacccttattcaccacctttgacccagtaactctaatcttaggaagaacctactggaacaaaaaaaatccaaaatgtagaacaag

SEQ ID NO: 78307 - DNA, 205 bp, Homo sapiens
gcaacaaacttccaaagtatgccacaaacccctcaaacacaaccaaccttactgctgagaagttcagagtcaaacctgaatctcacctctgcaaagagcacaggactccatggcaaacgttgtatatacgcaagtcatccctggcaccaccttgatttactgcaccaggctttcttcattgtgatgatgttctctctcttttcta

SEQ ID NO: 78308 - DNA, 205 bp, Homo sapiens
tcacaaaaatcacaacaacctccccttagaccataaaaaccaaaagtctgactgctgagaagttcagagtcaaacctgaatctcacctctgcaaagagcacaggactccatggcaaacgttgtatatacgcaagtcatccctggcaccaccttgatttactgcaccaggctttcttcattgtgatgatgttctctctcttttcta

SEQ ID NO: 78309 - DNA, 669 bp, Homo sapiens
taaggtcttgtaagctgtctctggctttttcttgggctgtgtggaggaatccactctgtatggagaatgaagctgacgggcagagagaaatagagatccaagaaccttcttgtagggtctggattgggacccttttctggtaacatcttcctggtgaccatgaagggacaatactgaagagacccctgaccctaaggaaatagactgcagcaccaatgggccaactttggggcgatcatcttgcccagaaacatcatgttgaaactcttggtcagaggttggatgaaagctgacagggtccatccaggagcaagtttgagccttgccagttccattttgggtgctgagtggagtggcgactatagcaaacctgtgatctctggctgctgctcagaagaaacaagagggagggatgaataatgtaaaactctggatcaatattctaattctgagcctctattggaatcagctagcaaccacatatcagcttggtttcaacagtttcccagttcatgctgctgagaagttcagagtcaaacctgaatctcacctctgcaaagagcacaggactccatggcaaacgttgtatatacgcaagtcatccctggcaccaccttgatttactgcaccaggctttcttcattgtgatgatgttctctctcttttcta

SEQ ID NO: 78310 - DNA, 642 bp, Homo sapiens
attcccttactttcttaataaactcgctttcactttatggattcaactgtaattctttcttgtgtgagatccaagaaccttcttgtagggtctggattgggacccttttctggtaacatcttcctggtgaccatgaagggacaatactgaagagacccctgaccctaaggaaatagactgcagcaccaatgggccaactttggggcgatcatcttgcccagaaacatcatgttgaaactcttggtcagaggttggatgaaagctgacagggtccatccaggagcaagtttgagccttgccagttccattttgggtgctgagtggagtggcgactatagcaaacctgtgatctctggctgctgctcagaagaaacaagagggagggatgaataatgtaaaactctggatcaatattctaattctgagcctctattggaatcagctagcaaccacatatcagcttggtttcaacagtttcccagttcatgctgctgagaagttcagagtcaaacctgaatctcacctctgcaaagagcacaggactccatggcaaacgttgtatatacgcaagtcatccctggcaccaccttgatttactgcaccaggctttcttcattgtgatgatgttctctctcttttcta

SEQ ID NO: 78311 - DNA, 499 bp, Homo sapiens
attcccttactttcttaataaactcgctttcactttatggattcaactgtaattctttcttgtgtgagatccaagaaccttcttgtagggtctggattgggacccttttctggtaacatcttcctggtgaccatgaagggacaatactgaagagacccctgaccctaaggaaatagactgcagcaccaatgggccaactttggtgatctctggctgctgctcagaagaaacaagagggagggatgaataatgtaaaactctggatcaatattctaattctgagcctctattggaatcagctagcaaccacatatcagcttggtttcaacagtttcccagttcatgctgctgagaagttcagagtcaaacctgaatctcacctctgcaaagagcacaggactccatggcaaacgttgtatatacgcaagtcatccctggcaccaccttgatttactgcaccaggctttcttcattgtgatgatgttctctctcttttcta

SEQ ID NO: 78312 - DNA, 551 bp, Homo sapiens
cagtgaagtaaaggcttctcttgcaaaatctgagtgccgatctgtgatgggaaaaataacttccagataaagcaaaagttgatgtggacaccagtacccagtaaattactgtgaaaaaaaggcaacttctcttggtccagtttacctttagataaatgttttaagggtaaaaatatgtgtatttcaagatatgtcttatgtaaacttttttaagttatgaaaatcatccatattgaaaaatagaatgttttctattttgaaactgttttgcattgtcagttacttaagcagccattttacattttggtttttgagaacataatagggacctgtatactccttgtggggccgcattttaagactcctgacagctcatcctgcaaaattaaaatccaaaatctaagtcgcaaaattctcttttctccttcctcagttatttacttagagtgtagaacagacatcctcttagagttttttgtaactatcagttatcgttaacatcatatttttattctaaatccttccatagaaacactgcttgttggaaaaaa

SEQ ID NO: 78313 - DNA, 1376 bp, Homo sapiens
gcaaacaataaaacatatagacatgaaatgttaagtcttaaaaaaaaaaggcaacaattatggagctctatttttaaatttgtgattttcaaaatatggcttactcatcattgtgtagaagagcatgaatgcgatttcttgttttgctctgcatatatttctctgctgtttttctgatcattggcgagattgtaaagtattttgcaagcagaagtggaattggatatgttgaacacacatcattggtgtacatactgtatttagcctgaagactttcctaaagtgttttgttctaaaaataacctgccattttctatagattttaattttttatatcttcaagggttctattttggtcacaaggaaagaatgtggcttctaatagtgctaagaattaaaagatgcttttatagagacttagagctattttgaaaagctttggggcttcccagccactgatcacaattagactaagcccatggaatttctgggagtgttgtgcagtggattcggttctagatccatcttacatttgtttagtgtttcccaatttttgggagaaggggtgcacagcaaatttgagagacttttttgaatctcacacatgtattttcctcaagattcttttaagcctcttctgaatgacttgtctgagatagtgaagacccacattaactagaatcagctggggaactttaaaaaatacagtgcctgggtcccagtccctagcttttgatctaattcatgtaggggtgggatccaggaattaccatgtattttaaaagcttctgggtgtttctaatttgcagacagattgagaaccactatgatacgtcatccctttactgagaattatggcgagaatcactgccatttgaattactcaggagtgactgattcctcagttgtgtaggagaagcagaaaaaataagaataaaaagaattgagagatactgatatcaaactcccatttgaaatacaagggcccttctgattcaaggcccagttggggagcttggaccatgttgtgaatggcctagcactcgccagtctggtggaaattggtggtcttagttgctggagcaggctgagtgtccccgcggggtttgcatctgtccccagaaccttttccccaggcccgtgggggaatagggaagtcactctgagctagaaattgtcgaagaagaaaagaaacaaccttcctagccttggaaagcctgtccctgcttttgatagaattattgcctttttgtaggaattacagtagcaaaccccaggctgccgctgaattcctgaaaccacattctggataagaactatcctatgagaatgagcaaaagtaggaaattcagtcgagcggccgcgaatttagtagt

SEQ ID NO: 78314 - DNA, 2896 bp, Homo sapiens
gcaaacaataaaacatatagacatgaaatgttaagtcttaaaaaaaaaaggcaacaattatggagctctatttttaaatttgtgattttcaaaatatggcttactcatcattgtgtagaagagcatgaatgcgatttcttgttttgctctgcatatatttctctgctgtttttctgatcattggcgagattgtaaagtattttgcaagcagaagtggaattggatatgttgaacacacatcattggtgtacatactgtatttagcctgaagactttcctaaagtgttttgttctaaaaataacctgccattttctatagattttaattttttatatcttcaagggttctattttggtcacaaggaaagaatgtggcttctaatagtgctaagaattaaaagatgcttttatagagacttagagctattttgaaaagctttggggcttcccagccactgatcacaattagactaagcccatggaatttctgggagtgttgtgcagtggattcggttctagatccatcttacatttgtttagtgtttcccaatttttgggagaaggggtgcacagcaaatttgagagacttttttgaatctcacacatgtattttcctcaagattcttttaagcctcttctgaatgacttgtctgagatagtgaagacccacattaactagaatcagctggggaactttaaaaaatacagtgcctgggtcccagtccctagcttttgatctaattcatgtaggggtgggatccaggaattaccatgtattttaaaagcttctgggtgtttctaatttgcagacagattgagaaccactatgatacgtcatccctttactgagaattatggcgagaatcactgccatttgaattactcaggagtgactgattcctcagttgtgtaggagaagcagaaaaaataagaataaaaagaattgagagatactgatatcaaactcccatttgaaatacaagggcccttctgattcaaggcccagttggggagcttggaccatgttgtgaatggcctagcactcgccagtctggtggaaattggtggtcttagttgctggagcaggctgagtgtccccgcggggtttgcatctgtccccagaaccttttccccaggcccgtgggggaatagggaagtcactctgagctagaaattgtcgaagaagaaaagaaacaaccttcctagccttggaaagcctgtccctgcttttgatagaattattgcctttttgtaggaattacagtagcaaaccccaggctgccgctgaatttcctacttttgctcattctctaggatagttcttatccagaatgtggtttcaggaattcttttttttagtttgaaaatgaatgtgaaacattttctttggtgtctttttttaaaaaaaaaaaaacccttattgctattttttcgtgtttttgttttgttttgttttttgtttgttttaccattaagtaatacacatcccagaatttggcactctgtgttaactgtggaggcaaataaaatttagttttaatctgtggtgagctgaatgcactacaacaccttcgaagtaatctgatggtttcattctgtcgagcctcatgctgcctacaaaacaccacaatttacctggtgttttcaacattttaaggaatgaagatacaagtagacatgcaagttggaaatgtttctttagaaaggccatccagaataatgatatctgttgcagtcgtccaaatgcaatatgaaatttcctaggtgctattataaacggtgtggtgtcataccaaatgcaaaagcagttacagtatttccgaagttggagttctctttgtaggcctttcaaatacgtgtttgcattccatagaggtctgctcaccaactgtgcctctcaccactggttaaaattgaatttaagcctcattgacataagtcgtttcttgattgaactcttcagtttttacactggaatttctgtagttgtcttgaaagctgcatgtcacatcactgtacacaaagtgctttggtattactcatgcaccgtggatagtgatttctgtgtcgttttcattttcagttgtacagtaatatggaaggcaggatgtctttcctagaggctggaagaaaagtgtatcgtacattttaaatttattttagaacaagtgcatgagatgtgtcactgatttctgttatttatttgtatgttttattattcaaagtgtatgcacttttaagaagcagaatttatatttttacgtttgaaacgttttatttctgaaacagcgttgattatatagtatacagttggaattaagagaaaagtggaaaatgtaacaaaatacaataaatttattacaagatgtccaaaaaaaaaaaaaaaaaagagaaaaagaacgaaaaaaaacaaaaacaaaagagacagaacacaagaaaaacaaacaaaaaaaagaggggggcgcgactgaaagaataccccccaggaggggagccgttgtacgatcagacacaggtttgtaaagagaggggcacaatagagagatggaaaaaaaaacacacgggggcggggtaataacactgtcggagagagacaactagcggggagcactgaagaagagcccaacatatggggcgaggaagagtagggagaccccaacaacaggatatagggacacgagggaaaaaacaagaggtggtatatgataacaaggaaatttgtgtgggagaaaaatgtgcaggtatttgttagaatttaggccgacagtaaatatgggataaagacacaagtagataataagaacaaagagaaaatgagagagaacaaaagtaggagaagaaagagcaaaagagaagaaaaaaagaaaagataatgatgatgatgaataaagacgtc

SEQ ID NO: 78315 - DNA, 1928 bp, Homo sapiens
  misc_feature (521)..(521): n is a, c, g, or t
  misc_feature (1923)..(1923): n is a, c, g, or t
ttcttagaagtggaaatgtgtgtagcaataggaacggttcctaaggccaagaataaatggattgcggttgtgggtcttttggtagcactaagctttctgttgcagtgtgtgagaggacccggggagagcccaatcttcgaagggacagatgaggggtatgacctggggagcccacaaccgcctttgcttttcgcagatgctgggaacgcagctctgctgccggcggggtggacagaccctcccccagccattgctgcccacctgctgcgtcagggcctcccctgcccagctcagtcttggccaagcccagtctggaggagcatgcaccgcctgtgagcggtctgggcagcgcttcccaggttgcccatcagatgagcccgtcccaggtgtcgaggaggagatctcctgagcggcagtctcggaaatccttccccgtggaaggacacgttaacctctcgtgcttcccatttcaaaattctgtttccaacacgatttgatgaaagattgaaatatctgaaaantcatttcgagcacagggtctggcattgtgattctcaggtgaactgggcgtatggttgaggtaggacttcaaaaaagtgttcgaacgtcatttgcagcatttaaactgagctccaaatgacgttcaaacacccctctcgggtagagttttcatggtggaacggttgcgcccaccaaacagaagcttatgtttttggcacagaaggcctgggccattttcatggacacctggctggacctcggtggaagtgaactccgtaggttgttgcgttcactgcagcacctcacatgataccgtcccctctcatggaacggagcctcccccatgcagcccccactcaaatggagttttaaaggctgggttcaggttacgggggcgtttctcaccgtctgaatgcggaggacagagacgagctccagggagcgtgggcgggtgacggcgctgagatgcgtgatgtctcggaaacgtcctcgcatccctcagcgcgggcgctgactgccgcggcccttgcctgtcttccaggagcgctccagcttcgcccacacaccccgggctgatgtcccctcgctccggcggcctgcagaccccagagtgcctgtctcgggagggctcccccattccacacgaccctgagtttgggtccaagttagcttctgtcccagagtaccggtattcccaaagcgcacccggctcccccgtcagcgcccagccagtgatcatggccgtgcctccccgaccgtccagcctcgtggccaagcccgtggcctacatgcccgcctccatcgtaacctcacagcagcccgcgggccacgccatccacgtcgtgcagcaggcccccaccgtcaccatggtcagggtggtcaccacatctgccaactcggccaacggatacatcctcaccagccagggcgcggcggggggctcccatgatgcggcgggcgcagccgtgctggacctgggcagcgaggccagaggtaatgcagccgcggctggcagccttcgcaggaccctttgtggtggtcccggccggcaagtccccaaggcagcgccattggcctgggcctggggcttgaggaggatgattctctgcttctgcctctcgctgccttgtccctttaaatcagcatgagctgggcaggtggctcatgcttataatcccagtgctttgggaggccaaagcgggtggattacttgaggtccggagttcgaggtcagcctggccaacatactgaaaccccgtctctactgaaaatacaaaaattagccaggcatgatgatgcgctcctgtagtcccagctactcaggaggctgagggaggagaatcgcttgaagcctggaggcagaggttgcagtgagctagactgcgccactgcactccagcctgggcgacagagcaaaacccngtctc

SEQ ID NO: 78316 - DNA, 2929 bp, Homo sapiens
cggccgcctcggtacggcagagcccggggccggcgctggcgcggctggagggccgcgagttcgagttcctcatgcgccagcccagcgtcaccatcggccgcaactcgtcgcagggctcggtggacttgagcatgggcctgtccagcttcatctcgcggcgccacctgcagctcagcttccaggagccgcacttctacctgcgctgcctcggcaagaacggcgtcttcgtggacggggccttccagagacgcggcgcgcccgccctgcagctgcccaagcagtgtaccttccggtttcccagcacggccatcaagatccagttcacgtcgctctatcacaaagaagaggccccagcctccccgctgcggccactgtacccccagatctcccctctgaagatccacatcccggagccggacctccggagcatggtcagccccgtcccctccccgacgggcaccatcagtgtccccaactcctgcccagccagtccacgcggtgccggctcctccagttaccgctttgtgcagaacgtgacctcggacctgcagctggcagcagagtttgcagcaaaggccgcgtcggagcagcaggcagacacgtctggaggagacagccccaaggatgagtcaaagccgccgttctcctacgcgcagctgatcgtgcaggccatctcctccgcccaggaccggcagctgaccctgagcgggatctacgcccacatcaccaagcattacccctactaccggacggccgacaaaggctggcagaattctatccggcacaacctctctttgaaccgttactttatcaaagtcccacgttcccaggaggagcctgggaaggggtccttttggcgaatagaccctgcctctgaagccaagctcgtggaacaggcattccggaaacggaggcagaggggtgtctcctgcttccgcacccccttcgggcctctgtcctcaaggagcgctccagcttcgcccacacaccccgggctgatgtcccctcgctccggcggcctgcagaccccagagtgcctgtctcgggagggctcccccattccacacgaccctgagtttgggtccaagttagcttctgtcccagagtaccggtattcccaaagcgcacccggctcccccgtcagcgcccagccagtgatcatggccgtgcctccccgaccgtccagcctcgtggccaagcccgtggcctacatgcccgcctccatcgtaacctcacagcagcccgcgggccacgccatccacgtcgtgcagcaggcccccaccgtcaccatggtcagggtggtcaccacatctgccaactcggccaacggatacatcctcaccagccagggcgcggcggggggctcccatgatgcggcgggcgcagccgtgctggacctgggcagcgaggccagaggcctggaggagaaacccaccattgcgtttgccacaatccccgcggctggtggagtcatccagacggtggccagccagatggcccccggggtccccggacacacggtcaccatcctgcagcccgccacacccgtgaccctcgggcagcaccaccttccagtccgggccgtgacccagaacggaaagcatgcggttcccacgaacagtttagccggcaacgcttacgccctcaccagccctttgcagctccttgcgacccaagcgagttcatccgcgccggtggtggtcacccgggtgtgcgaggtggggcccaaggagccagcagcagccgtcgcggccacggccaccaccaccccagccactgccaccaccgcctctgcctccgcctcttccactggagagcccgaggtcaaaaggtcccgggtggaggagcccagtggggctgtaaccacaccggctggagtgatcgcagctgccggcccccaggggccaggcaccggggagtgaggtcacctgcaacgcgggggagtgggactcacccagcggcgaccccgaagctggacccggcagctcaggcggccgcacccacagacggaggagaacagcccgcggcggcctgtgggcatcggcggcacctggacacacccagccctttccatttgatcgcctgccttcccgtggtttaagacaaaaacacataaacaagttcagacaactgattgtatgattctgggaattctttgctttcctttccttctccctcggcaccacctcctctccccaggcctccctgtcgggcatggggaggaggttggagctcagcatcttgaggaatgtgtcaagacagcccctccgctccgcgctgcacggccagccgcctttgtccgggaggacagacagaaacgcagcaaggcacacaccaaggctgccggggaggcccgggcaccggacagatgcctgttgggaagccaggagctgccgagccacggaccacctaacagcctctccgcccggaacgtgacatagagagtgttggcattaactcggggggtgtccgatttcacttcagaccccaagtttttctttgtttgtttaaacatggaattcagacttcattgtacacctgagacagacacaaaagggatcatgtatttttgaggattttacctgttgacgtctgatgaccggccgtaggtccagggttcccgctgggtttaatcccctcgaagagtaaacctgccgctctgtctgataacttcaagtaagagcagcggcttcctgggttggcgttcgcggtggaaggttcctaggatgaaaggtgagcctggatccgccggccgcagacatcgcgctgctggggacgattggggccgctgctctgcagaccagaccttcccgaattatccgtggctccgatgtcccggtgctgacggccacatggggacctaacagtgccaaacgccatctgctccagctgctttttcacccagttgcagagtcctcaccactcccac

SEQ ID NO: 78317 - DNA, 1892 bp, Homo sapiens
  misc_feature (1883)..(1883): n is a, c, g, or t
cggccgcctcggtacggcagagcccggggccggcgctggcgcggctggagggccgcgagttcgagttcctcatgcgccagcccagcgtcaccatcggccgcaactcgtcgcagggctcggtggacttgagcatgggcctgtccagcttcatctcgcggcgccacctgcagctcagcttccaggagccgcacttctacctgcgctgcctcggcaagaacggcgtcttcgtggacggggccttccagagacgcggcgcgcccgccctgcagctgcccaagcagtgtaccttccggtttcccagcacggccatcaagatccagttcacgtcgctctatcacaaagaagaggccccagcctccccgctgcggccactgtacccccagatctcccctctgaagatccacatcccggagccggacctccggagcatggtcagccccgtcccctccccgacgggcaccatcagtgtccccaactcctgcccagccagtccacgcggtgccggctcctccagttaccgctttgtgcagaacgtgacctcggacctgcagctggcagcagagtttgcagcaaaggccgcgtcggagcagcaggcagacacgtctggaggagacagccccaaggatgagtcaaagccgccgttctcctacgcgcagctgatcgtgcaggccatctcctccgcccaggaccggcagctgaccctgagcgggatctacgcccacatcaccaagcattacccctactaccggacggccgacaaaggctggcagaattctatccggcacaacctctctttgaaccgttactttatcaaagtcccacgttcccaggaggagcctgggaaggggtccttttggcgaatagaccctgcctctgaagccaagctcgtggaacaggcattccggaaacggaggcagaggggtgtctcctgcttccgcacccccttcgggcctctgtcctcaaggagcgctccagcttcgcccacacaccccgggctgatgtcccctcgctccggcggcctgcagaccccagagtgcctgtctcgggagggctcccccattccacacgaccctgagtttgggtccaagttagcttctgtcccagagtaccggtattcccaaagcgcacccggctcccccgtcagcgcccagccagtgatcatggccgtgcctccccgaccgtccagcctcgtggccaagcccgtggcctacatgcccgcctccatcgtaacctcacagcagcccgcgggccacgccatccacgtcgtgcagcaggcccccaccgtcaccatggtcagggtggtcaccacatctgccaactcggccaacggatacatcctcaccagccagggcgcggcggggggctcccatgatgcggcgggcgcagccgtgctggacctgggcagcgaggccagaggcctggaggagaaacccaccattgcgtttgccacaatccccgcggctggtggagtcatccagacggtggccagccagatggcccccggggtccccggacacacggtcaccatcctgcagcccgccacacccgtgaccctcgggcagcaccaccttccagtccgggccgtgacccagaacggaaagcatgcggtccacgacaggtagcgggaagctaagcctacaggccttgaggtcctgggactcagcgagtcatccggccgcgggggtcccccgcggtgccaggtgggcccaggagccacacaacgctgtgatgagcgacacacccccacattgtcaacggatgctcccttcaagaagaccgaaaagcccggggtgaacaccggggtacacccgggagtcagcagccgcgaggcaggacacttacggaggacagacgacacgcgaacactcacacgatgtcactanacgatatga

SEQ ID NO: 78318 - DNA, 1141 bp, Homo sapiens
cggccgcctcggtacggcagagcccggggccggcgctggcgcggctggagggccgcgagttcgagttcctcatgcgccagcccagcgtcaccatcggccgcaactcgtcgcagggctcggtggacttgagcatgggcctgtccagcttcatctcgcggcgccacctgcagctcagcttccaggagccgcacttctacctgcgctgcctcggcaagaacggcgtcttcgtggacggggccttccagagacgcggcgcgcccgccctgcagctgcccaagcagtgtaccttccggtttcccagcacggccatcaagatccagttcacgtcgctctatcacaaagaagaggccccagcctccccgctgcggccactgtacccccagatctcccctctgaagatccacatcccggagccggacctccggagcatggtcagccccgtcccctccccgacgggcaccatcagtgtccccaactcctgcccagccagtccacgcggtgccggctcctccagttaccgctttgtgcagaacgtgacctcggacctgcagctggcagcagagtttgcagcaaaggccgcgtcggagcagcaggcagacacgtctggaggagacagccccaaggatgagtcaaagccgccgttctcctacgcgcagctgatcgtgcaggccatctcctccgcccaggaccggcagctgaccctgagcgggatctacgcccacatcaccaagcattacccctactaccggacggccgacaaaggctggcagaattctatccggcacaacctctctttgaaccgttactttatcaaagtcccacgttcccaggaggagcctgggaaggggtccttttggcgaatagaccctgcctctgaagccaagctcgtggaacaggcattccggaaacggaggcagaggggtgtctcctgcttccgcacccccttcgggcctctgtcctcaaggtaaagttctctgagcgcccgtcctccagctgttaggaaagctgagctgccctggagtttagagatacgtggcgcagtcagccctccggatctgtgggctcaggctcagtgtacgggcatgcaactgatcacaggtcaaaaatattccaaaaaaaagaaggccggcgcggtggctca

SEQ ID NO: 78319 - DNA, 1743 bp, Homo sapiens
gagcaacaaaattctgtctcaaaaaataaataagtaagtaaaatattgttctaaaaccctagtaattttcttcccaaacctatttcacccatgggattttcctctagcaaacctattttttcccagtgccgacctcactttccccacttgtccgacctgctgcccaggcgtcgaggaaatcgattgtctcgttggccgagtgtggtgctgacttggttcctgtcccgcaggcctggaggagaaacccaccattgcgtttgccacaatccccgcggctggtggagtcatccagacggtggccagccagatggcccccggggtccccggacacacggtcaccatcctgcagcccgccacacccgtgaccctcgggcagcaccaccttccagtccgggccgtgacccagaacggaaagcatgcggttcccacgaacagtttagccggcaacgcttacgccctcaccagccctttgcagctccttgcgacccaagcgagttcatccgcgccggtggtggtcacccgggtgtgcgaggtggggcccaaggagccagcagcagccgtcgcggccacggccaccaccaccccagccactgccaccaccgcctctgcctccgcctcttccactggagagcccgaggtcaaaaggtcccgggtggaggagcccagtggggctgtaaccacaccggctggagtgatcgcagctgccggcccccaggggccaggcaccggggagtgaggtcacctgcaacgcgggggagtgggactcacccagcggcgaccccgaagctggacccggcagctcaggcggccgcacccacagacggaggagaacagcccgcggcggcctgtgggcatcggcggcacctggacacacccagccctttccatttgatcgcctgccttcccgtggtttaagacaaaaacacataaacaagttcagacaactgattgtatgattctgggaattctttgctttcctttccttctccctcggcaccacctcctctccccaggcctccctgtcgggcatggggaggaggttggagctcagcatcttgaggaatgtgtcaagacagcccctccgctccgcgctgcacggccagccgcctttgtccgggaggacagacagaaacgcagcaaggcacacaccaaggctgccggggaggcccgggcaccggacagatgcctgttgggaagccaggagctgccgagccacggaccacctaacagcctctccgcccggaacgtgacatagagagtgttggcattaactcggggggtgtccgatttcacttcagaccccaagtttttctttgtttgtttaaacatggaattcagacttcattgtacacctgagacagacacaaaagggatcatgtatttttgaggattttacctgttgacgtctgatgaccggccgtaggtccagggttcccgctgggtttaatcccctcgaagagtaaacctgccgctctgtctgataacttcaagtaagagcagcggcttcctgggttggcgttcgcggtggaaggttcctaggatgaaaggtgagcctggatccgccggccgcagacatcgcgctgctggggacgattggggccgctgctctgcagaccagaccttcccgaattatccgtggctccgatgtcccggtgctgacggccacatggggacctaacagtgccaaacgccatctgctccagctgctttttcacccagttgcagagtcctcaccactcccac

SEQ ID NO: 78320 - DNA, 1057 bp, Homo sapiens
cggccgcctcggtacggcagagcccggggccggcgctggcgcggctggagggccgcgagttcgagttcctcatgcgccagcccagcgtcaccatcggccgcaactcgtcgcagggctcggtggacttgagcatgggcctgtccagcttcatctcgcggcgccacctgcagctcagcttccaggagccgcacttctacctgcgctgcctcggcaagaacggcgtcttcgtggacggggccttccagagacgcggcgcgcccgccctgcagctgcccaagcagtgtaccttccggtttcccagcacggccatcaagatccagttcacgtcgctctatcacaaagaagaggccccagcctccccgctgcggccactgtacccccagatctcccctctgaagatccacatcccggagccggacctccggagcatggtcagccccgtcccctccccgacgggcaccatcagtgtccccaactcctgcccagccagtccacgcggtgccggctcctccagttaccgctttgtgcagaacgtgacctcggacctgcagctggcagcagagtttgcagcaaaggccgcgtcggagcagcaggcagacacgtctggaggagacagccccaaggtctgagcccacctggcgccgtggtgcacctggtgacccaggatcgggccatagtgacccggcgcgggcggcacagacagcccagggcctgcgggcgtgtgctcgaggtggtctcagcccacagggaatggagccgcagctggcggtagagccgtcggccctttctcgttttcgtgcccaaatcatccccgttggtcatttgctggtgacaggggtggcgccgtcaccgagggtaccctcccgccacgctccttgttcatctgccgctggcagcccggcgtcaaagccttcatacagcccttgagcaggatggcgttctccttataactttgtcttagttcatttttgtccaatagctgttttcaaattgatttctggaagaggtgagaaatttcagaattaaattataataaaaccgaagttttccttcccat

SEQ ID NO: 78321 - DNA, 436 bp, Homo sapiens
ctggcacaacctgcaatgctggtggtgagggtgcctgtggtcatcatcttcatagtttgggtacttactgtgtgtcaggtactgtgctaagtgctagtatttttcaacaggacggaagccttcccagtcctgcagccacctgcagactctcacaagcacggtgctcccgggagaagaccttgctaccccaggcccaaggcagtcgagagaaaacgggaagccctgaaggtttttcaccccgggggtgagagtgtatgatcgaagatatatttgagggtaattgtacagatagtcccaacttagcattgttcaactttatgatggtatgaaagtgatgacattcagtagaaattgtacttcaagtgccaatacaatcagtttttcacttttggtgcagtattcaataaattacatgagatattcaacactttacttt

SEQ ID NO: 78322 - DNA, 755 bp, Homo sapiens
ggggtcggtggagccgggatgtcaagttcaccttccagccgccgcgggctccctcggcctggggcgcctctaatggaccccggggtcggcctgagccctcccggagcgcccggcggctggtttccattagggcagttccggcgccgacttcgctggggacggggaaggtgacccccctactcggatcccccaggtcctaaagccaacacaagccatcagccccatgctcagctcccagcaggcagagcgttcagaagcgccagcgccatcatcttgggagcctgcagtccacacaccgctgaccttacctacttcctctttccaggtcgtagattacagactctcctctgggaaattgcccccagatctaacaggagtacaagaagctgggtagattggaaaacagcaccgaattcccctggaactgaggacggaagccttcccagtcctgcagccacctgcagactctcacaagcacggtgctcccgggagaagaccttgctaccccaggcccaaggcagtcgagagaaaacgggaagccctgaaggtttttcaccccgggggtgagagtgtatgatcgaagatatatttgagggtaattgtacagatagtcccaacttagcattgttcaactttatgatggtatgaaagtgatgacattcagtagaaattgtacttcaagtgccaatacaatcagtttttcacttttggtgcagtattcaataaattacatgagatattcaacactttacttt

SEQ ID NO: 78323 - DNA, 651 bp, Homo sapiens
gacaagcgctcttccgctagtgtgccgggatgagcgggggctggacttctagaaaggggtctgcgggcgcaggagctggggtccgcggtctggggccgccaacacaagccatcagccccatgctcagctcccagcaggcagagcgttcagaagcgccagcgccatcatcttgggagcctgcagtccacacaccgctgaccttacctacttcctctttccaggtcgtagattacagactctcctctgggaaattgcccccagatctaacaggagtacaagaagctgggtagattggaaaacagcaccgaattcccctggaactgaggacggaagccttcccagtcctgcagccacctgcagactctcacaagcacggtgctcccgggagaagaccttgctaccccaggcccaaggcagtcgagagaaaacgggaagccctgaaggtttttcaccccgggggtgagagtgtatgatcgaagatatatttgagggtaattgtacagatagtcccaacttagcattgttcaactttatgatggtatgaaagtgatgacattcagtagaaattgtacttcaagtgccaatacaatcagtttttcacttttggtgcagtattcaataaattacatgagatattcaacactttacttt

SEQ ID NO: 78324 - DNA, 331 bp, Homo sapiens
aaaaaaccagtcttcataagtatttgctgctacctttccctgtcataagaaaaaggatagccagacatggtgggacgccactatgatcccagctccttggaaggctaaggcacaagaatcgcttgaacctgggaggtggaggttgcagtgagctgagatcatgccactgcactccagcctggtgacagagcaagagcctgtctcaaaaaaaaaaaagaaaagaaaagaaaaagggatatcttttcctcctcccagaagtttgttttaaatttgagcatttatcatgcacctgatgtaaacctaatagtactcttgatactctagtggcttg

SEQ ID NO: 78325 - DNA, 206 bp, Homo sapiens
ggaaatactttttctggaatttctaagacttttttttttctttctctctggagaaatatgggaaatcagcctctcctcttcctgatgctgtgtgaggaaatgtgtaatccgattattactggcagccattccacaaccaaaagggagcccaacttaaaatgaaaccaatcctgtggttgactgaacagaatgtcacgtaaattaaa

SEQ ID NO: 78326 - DNA, 418 bp, Homo sapiens
gacatagcctactgtttattgggcaggagtttattaaactgtttattaaactaagaaaaattgaaaactcaggaaaagtcctgaaaatgaccaaatggcatcaaacttagagcattctggccatctaagctcccaatcattccaaaaaactgtacaacactggaaatgacaattttttttgtttgggaaccagtatggattccagaatagataaatccttctgacacaatttgcataccacatcctctcctggacacttcacctgccacttagagttgatgtcttaatgggtgggattcctcataatggaaccatacctggattttcctgggtcaagtagctatcacatcactgagcagcataaacaagtatcaattcctgtggaaagaggctggtttgggccaggcactgtagctca

SEQ ID NO: 78327 - DNA, 177 bp, Homo sapiens
catatttcatagaagtgtttctaaatatatctattaggactcacaggacaagaagataatgaagtgcttggctcaggaaagtggccaagtacatgatgggtagagaattcaaaggagttgggggagatgagttaacagcatgtgcacatcaagtgcttaattcatcctgaacaagga

SEQ ID NO: 78328 - DNA, 177 bp, Homo sapiens
cactcttgatctgagcagctgttggatgctgctgttttcaacctgagaagtttttaaaactattttcctagtcttaactctattgttatatctctcttaaatatcttcttaattcatgaaggccagactatagtccaggacccataaaagtttcccatgtatttcagtctggaacag

SEQ ID NO: 78329 - DNA, 498 bp, Homo sapiens
tcaaagagatatgttctgagtcactactcctcatcccaactattccattcccattccccttttctttctactgtgttcccacttacctccaaagataaccaaactcattcgtttttagtttatccttcctgtatttttatgtgatggatcatcagatacatgtatattttcttatatccccttctttcttactacagataatttttttgatactctgctttatttcacttaataatatagttgtggccgggtgtagtggctcacacctgtaatcccagcactttgggaggccgaggcaggcagatcatgaggtcaagagattaagaccatcctggccaacatggtgaaaccctgtctctactaaaaatacaaaaattagctgggcatggtggcgcacacctgtagtcctagctacttgggaggctgagacaggagaatagcttgaacctggaaggcggaggttgcattgagccaagatagcaccactggactccagcc

SEQ ID NO: 78330 - DNA, 483 bp, Homo sapiens
acggctaatcagaactagaattctcatacttttccccaccccgcccaacaaacagcagagcacagataaagaacggccggatttccatggccctgcattatcggtgacatcttctctttgttaccatccagaagagaactgctgcactgacaggaggcaggcagacacccccagagcgccacaacacctgcagccagagacctaatgcaaaacaaaaccaaacctcaggctgaatgtgattttctgtgtgatagggaagaaaatgagatagagaaatgtgaccgagcgcgtgtgcagatacgttcaggggcacaagtctgaatggtcaactcaaaaatgtcattcacactctcagacgagttcagaggctacctcattggtggggaggaggactttaagcaaatcatataaattagactaatctgtgaatatctgactgaatctgcacccttagaaaataaaaattttgcatattttttaaca

SEQ ID NO: 78331 - DNA, 463 bp, Homo sapiens
atattatgaataatgctcctgttgacattcatgtacaagttttcgtgtcaacatatgttctcatttctcttggatatatacctaagagtggaattgcggggtcatatggtaactctatgtttaaccccttgtggaactaccacactgttttccaaagtggctgtaccattttactttctcaccagcaatgtatgagggctctaatttctctattgtgccttttcttgtctctctagaacatgtgcctctcttacttttcagaatactttttccatgagccatcttcaattattattctttgttgtacatgtatctgcaagcccattttcctaatagtttgtgaccttctgagatgaaaaacatggtgcctgcccttaagagaatcacatctagaaaaatatacaatcaaatcagatattacagtgataataaacactgaaataaaggttattgctaaaaggtg

SEQ ID NO: 78332 - DNA, 118 bp, Homo sapiens
aggatggtaccactgcactgcaacctgggtgacaaagtgagacaccatttaaaaaaaaaaaaagaataaaacaaaaggcatatttaataacattccccttaaatgcattagcttttct

SEQ ID NO: 78333 - DNA, 320 bp, Homo sapiens
ctcctgggttcaagtgattctcctgcctcagcctcctgagtagctgggattacagcacccgccaccatgccgagctaatttttgtatttataatagagatggggtttcgccatgttggccaggctggtctcgaactcctgacctcaagcgatctgcccgcctcggcctcctgaagtgctgggattacaggcgtggccactgcgcccaggcacattcctcccttctgcccctctcagggccccttcccaggtccctgatctccaggcttggcctccagagcagcccacaccaaccccaaaataaaaaaatgtatatattcc

SEQ ID NO: 78334 - DNA, 417 bp, Homo sapiens
ggccagggactgtgagtaaattctagaatatgcccttttggatatccaggaactcctgttaccttcttttggtaggttttcagtttctggaagcatagcattgttttagtcactggatttattctgttagatgaactgcatacacaaacttcagattttaatgttttcatttcattgaatatatgtatctcctgataatttatggaagtacttgacattagctctaatgttttgcagaaacacctagtttatacatttctagtaaggctttatttgtagaaataactctcatttataagtgttttttgaagcttcatgctctctgcctctttaaagagaagattatactctttcgtgaagattttttatgcttgtaataggagtggttaacatttatggaacatctactatgtgtca

SEQ ID NO: 78335 - DNA, 773 bp, Homo sapiens
gggaggtctctcagttaaacaaagttattgacttgtctttagacaggcaagacagagtatctcctcataaggttttcttttaacctttttgttctgaagttaatatgtcttttaagtgaataatcttgtttataacaacattttcttttctgttttgtttgtttgtttgtttgagacagagtctcgccactgcactcccagcctgggcgacggagtgagactccatctcaaaataaataaataaataaaaataaaaactgaattgatgacagcccaacctgtcacttttttcagatccctttttatgaaagaatttgcttaagttgtgtctgaagacaaaccaatttctttggaccctgggtattctttttctaagggaataccatgttattttgtgttacagattgtttgcgatctttcataggctgatctttctagagttggttaatatccatgtaggttagattgaaaaacttgaattcagaaatgtacggtgttggagcagacatggatctggaagccaagaatagcgttggtgttgttgttgatggtgaatctgaaagagtgggcagatggcaactttttgccagaatcattcagggtcaaagggctagtcatatttacaagggaaaagaggaaaccatgttattaaatatttcatgcaccatatgttcctttcaaatttcagtggcttgactaagaaaattcacttttgggagagttggtacaacaattgaaagcacttagtagtcaactttttccttagtgtttcc

SEQ ID NO: 78336 - DNA, 1077 bp, Homo sapiens
aatgacctggatttgaagaccagtttatccatttcctggtctcatgatcttcagcaatttgcttaacctctctgagactgagttgcctcacctgtaaaatgggggtcataattacacctacctcatagcatttttatgaggattaaatgagataatgtgtgcaaagggcttagtacagtacagagtataagtacagtaactattaacatttattcagcttattaacatacatactttatgtaaatattaattcacttgttcttgcagtaatttggtgacttctcaggcatctgaaacacacagattgaaaaacactgctggattcagtaggaactgggacaaagggtatcttcagaaagaataatggagacctgtgttgttgctgaaggagatggagcttgggacttggaagactggcagagctgcttctccttaggagctctggctgctactggagcagccccaggaaggctctgtcactaggaacaagagctaccactaactgagttagtccctgggagctggacactgctgctgacaagtactgccaagatggtccgtggtggtctgcctctgggaccctgctgactacacacaacaatggaggcttacaaaagaggaactaagaaaatccaaagatttggaagtgtctgaccctttcttccctttatggcttctcacttgcacagaagaatttcagcccaactctccatgcaacatccaataggggacaaaatactatgctctatcattacaccctcattgaggagggtcaataatcatttctcaccaagaaagtaggaggtcagaaagtggatgaggaatcaacctagtttagaggattgatctagaatcttgtcctcaggcttctagggaattatctgagtcttttatctaagacaaatgcaacagttttctttccaaatgctcagaaaaatagtgatgatgatgatgatgatgatgttcatttgtatacatttacatgcaaccacagcattgtttttattataataccttagcaataactaatgagaacatgttaggtgatgttaaataaaataattttttcccaaagac

SEQ ID NO: 78337 - DNA, 814 bp, Homo sapiens
catctggggcaatcttaagtgaaactggctttttctgtgagtgcatgatgaagaatacagtgactactgggacagtttgataacactgcctagattcatactaagacaccagctcttttacccatcatcagttttgtaccattaatgcaaatgtcaatcaattgagaacaatttgtagtattattataaaaatagctttaacctttcagacccttgaaagggccttggggaacatactctgagaagtgctgccctaaatagtaatagagaggatctgtccaatggtgtgctaagaatctcttcacattccccaggaagagagacatagctgcagacatttagagtagacataaagttaagtgtgttgctttaaaatcaagagtaactactaaaaaaaacccagacacatctatagttttcaaattagcacggctaaaaaaagggaatacagaaatcaattcaatagaagaaaggaagagactcagaaaaagggataacatcttgtgtgtgatggctcatgcctataatcccagctgaggtaggaggacctgggcaacacatagtgagaccctgtctctacaaaaaatataaaaaattaaccagatgtgctggtgtacacctaaagtcccagctgcttgggaggctgagatgggaggtttgcttgagcccaggagattgaagctgcagtgagctgcgattgtgccagtacattccagcctggatgacagagaccttgtctctttttaatgaaacaatgggcaaaagaagttcaagaaaggaaattagaaaccaatctcatgagtataaaaaaaaa

SEQ ID NO: 78338 - DNA, 770 bp, Homo sapiens
gtgattttcatgaaccctcttttgtgtggaatttaattgcatattctgatgcttcccctaacattttatatgtacttttattatatattgtagctcctgccttgtattgcaattggctattttccatgccggtctcattttagatgagcttccttaaggacacaatgtgttctgtggcataactttatgtgttcttgtggggactaaatattgtactatgtaattattcaaaaaatttttttgaataaattattctcatttttcttaacttcagagcattttgctttgccattgggagattcacatttgggtcaagaagaatttgatgcaatgtacagccaaaataaaaaaattgtttttatagatatatctaaatttccatcactctatcatatttttacattccattaccaatgagaattacaaattatgtatttctcttcttctgtgttcttatcttttaatttttacctgtggtatgttttgaaatttatataacctggctagccctcttagatagtcttagtgcttttctttggcctaaagagaggcagcatcagatctacaaccttttttcacctagacagaatagttgctggtggtctttctgtgtttcgtaatgttctatttatttaaaaatgaaatgaattggaatggcgagatgtaaaagtttttgaagatcactgattaataaatctgctaacctgaacatgatatgaacaaaatactctgcaatgtatttccttgaggagattaggaaatatatccat

SEQ ID NO: 78339 - DNA, 376 bp, Homo sapiens
caatcaaactaagtgcacccttctgcattcatatggaaccattctgaggttacagtcctccgtctttttctctcaaatggaagttctgcgaccgacttgaggctgcgacactgaacacgatgaaaagccatgttcaagtgcgaaagccagggtgacgcttaggcctggtcacagttccgggacgtgggtccatacctccccatcctcgcaccagcctggaagctgtaagacaggctaagacttcccagataggcccggcacagggctataagagaagaatcacaagctgacctctaagtgagccctcaaacagaggctctatttacacccctccatgagtagctttttttttttttttttttttttttaaggcaga

SEQ ID NO: 78340 - DNA, 563 bp, Homo sapiens
gtctcagtggcttcaggagtgaagccgcagaccttcgtggcgagtgttacagctcatgaaggtagtgccaacccccaggtgtgcagcagcagaattttctgtgaggagccaaggaacaaagcttccacaccgtcggaggggacccaagctggttgccggtgcgggctcgggtggcctgcttttattcccttatttggccccacccacatcctgctgattggtccattttacagaatgctgattggtccgtttacagagtgctgattggtcacttttgacagagcgctgattggtgtgtttacaaacctttagctagacacagagtgctgactggtgcatttacaatcctttagctagacagaaaagttctccaagtccccacctgacccagaagcccagccagcttcacctctcactatctttggaagccatagataattttggagatgtttgttacctcagcataacctggactaagctgactgatacactctcactttacaaacaagggaaccaaagttcagaaagtcaacagacttggtaaacatagagtggcatgaagg

SEQ ID NO: 78341 - DNA, 1412 bp, Homo sapiens
gcgagcgccgggaacgagcaccaccagggcttggcagcggacggctttagaagagcctagctgctgcgcgcgtcggagaggctcctgggaaactcccacggcccagggactttcgaaagcagagcgaggagccctcgcacgcgctagtctgcgagtgagcgctcagcccggcacctgttcctccagcgccgccgccttcccacccctcggacccgcgccgctcgcggcgcccgcccgttcctgcgatgaatccggccctaggcaaccagacggacgtggcgggcctgttcctggccaacagcagcgaggcgctggagcgagccgtgcgctgctgcacccaggcgtccgtggtgaccgacgacggcttcgcggagggaggcccggacgagcgtagcctgtacataatgcgcgtggtgcagatcgcggtcatgtgcgtgctctcactcaccgtggtcttcggcatcttcttcctcggctgcaatctgctcatcaagtccgagggcatgatcaacttcctcgtgaaggaccggaggccgtctaaggaggtggaggcggtggtcgtggggccctactgacccgccctctgcccccgcggcaaccgctcccacgcctgcccactttgctagcccggctgtgcccctcactatcagagactgggcgaagcaaacctgtcggagtcaattatttctctcgacttcggcctttcggaaagaagcgaccggtttctccctcgccctctgaaagtcctcatgcctggcagtcggaggagagcgcccagactctgaactcagcagaaagtggcaagaagagggcgattagggcgcagaactttggaagctgctacttacttggaatgcggggagaccgacggtgcgaaggcccttctccacccgcaggtgggccaagctctgggggcaggtggagagggcgggcaggggagagacccagcggcactgatcgccttgtgtccgggtgcgctcccactcttctcctgctccccccctgccctggaggggaggggcgataaatacctttgattgtaacgtgccgttttaagaggttttgtgtttgtttgcttgaatacaaatgtttgataagtctttttctgccccagtggcctgtttgcctgcctgaggagttacagttttgtcattgtgggagaaggggtggggggagggggagcctgcgaatttgaacggggtgagttgtttcttttagtgcatttcccactgggtcttttgggaggcgtctagcgttcctgctggccctgggacaaagacccagaatagaactcgtagctcgtgactgcacggtttacgccacaaaagtgctcttgacatccgtgacaccgttttgactttttgtttttttcttatttaacatttccttaataaatgcaacatttaagcgtt

SEQ ID NO: 78342 - DNA, 1472 bp, Homo sapiens
gcgagcgccgggaacgagcaccaccagggcttggcagcggacggctttagaagagcctagctgctgcgcgcgtcggagaggctcctgggaaactcccacggcccagggactttcgaaagcagagcgaggagccctcgcacgcgctagtctgcgagtgagcgctcagcccggcacctgttcctccagcgccgccgccttcccacccctcggacccgcgccgctcgcggcgcccgcccgttcctgcgatgaatccggccctaggcaaccagacggacgtggcgggcctgttcctggccaacagcagcgaggcgctggagcgagccgtgcgctgctgcacccaggcgtccgtggtgaccgacgacggcttcgcggagggaggcccggacgagcgtagcctgtacataatgcgcgtggtgcagatcgcggtcatgtgcgtgctctcactcaccgtggtcttcggcatcttcttcctcggctgcaatctgctcatcaagtccgagggcatgatcaacttcctcgtgaaggaccggaggccgtctaaggaggtggaggcggtggtcgtggggccctactgacccgccctctgcccccgcggcaaccgctcccacgcctgcccactttgctagcccggctgtgcccctcactatcagagactgggcgaagcaaacctgtcggagtcaattatttctctcgacttcggcctttcggaaagaagcgaccggtttctccctcgccctctgaaagtcctcatgcctggcagtcggaggagagcgcccagactctgaactcagcagaaagtggcaagaagagggcgattagggcgcagaactttggaagctgctacttacttggaatgcggggagaccgacggtgcgaaggcccttctccacccgcaggtgggccaagctctgggggcaggtggagagggcgggcaggggagagacccagcggcactgatcgccttgtgaccggaagagtgacctgttaaaagccacgcagcagactcatggggtctcacaaatccgtgtccgggtgcgctcccactcttctcctgctccccccctgccctggaggggaggggcgataaatacctttgattgtaacgtgccgttttaagaggttttgtgtttgtttgcttgaatacaaatgtttgataagtctttttctgccccagtggcctgtttgcctgcctgaggagttacagttttgtcattgtgggagaaggggtggggggagggggagcctgcgaatttgaacggggtgagttgtttcttttagtgcatttcccactgggtcttttgggaggcgtctagcgttcctgctggccctgggacaaagacccagaatagaactcgtagctcgtgactgcacggtttacgccacaaaagtgctcttgacatccgtgacaccgttttgactttttgtttttttcttatttaacatttccttaataaatgcaacatttaagcgtt

SEQ ID NO: 78343 - DNA, 1734 bp, Homo sapiens
gcgagcgccgggaacgagcaccaccagggcttggcagcggacggctttagaagagcctagctgctgcgcgcgtcggagaggctcctgggaaactcccacggcccagggactttcgaaagcagagcgaggagccctcgcacgcgctagtctgcgagtgagcgctcagcccggcacctgttcctccagcgccgccgccttcccacccctcggacccgcgccgctcgcggcgcccgcccgttcctgcgatgaatccggccctaggcaaccagacggacgtggcgggcctgttcctggccaacagcagcgaggcgctggagcgagccgtgcgctgctgcacccaggcgtccgtggtgaccgacgacggcttcgcggagggaggcccggacgagcgtagcctgtacataatgcgcgtggtgcagatcgcggtcatgtgcgtgctctcactcaccgtggtcttcggcatcttcttcctcggctgcaatctgctcatcaagtccgagggcatgatcaacttcctcgtgaaggaccggaggccgtctaaggaggtggaggcggtggtcgtggggccctactgacccgccctctgcccccgcggcaaccgctcccacgcctgcccactttgctagcccggctgtgcccctcactatcagagactgggcgaagcaaacctgtcggagtcaattatttctctcgacttcggcctttcggaaagaagcgaccggtttctccctcgccctctgaaagtcctcatgcctggcagtcggaggagagcgcccagactctgaactcagcagaaagtggcaagaagagggcgattagggcgcagaactttggaagctgctacttacttggaatgcggggagaccgacggtgcgaaggcccttctccacccgcaggtgggccaagctctgggggcaggtggagagggcgggcaggggagagacccagcggcactgatcgccttgtgaccggaagagtgacctgttaaaagccacgcagcagactcatggggtctcacaaatccgtgtccgggtgcgctcccactcttctcctgctccccccctgccctggaggggaggggcgataaatacctttgattgtaacgtgccgttttaagaggttttgtgtttgtttgcttgaatacaaatgtttgataagtctttttctgccccagtggcctgtttgcctgcctgaggagttacagttttgtcattgtgggagaaggggtggggggagggggagcctgcgaatttgaacggggtgagttgtttcttttagtgcatttcccactgggtcttttgggaggcgtctagcgttcctgctggccctgggacaaagacccagaatagaactcgtagctcgtgactgcacggtttacgccacaaaagtgctcttgacatccgtgacaccgttttgactttttgtttttttcttatttaacatttccttaataaatgcaacatttaagcgttttgttcctggcctcctggtggtcattctgcgctccccagcaggggggaacggggcggcggtgaggagtctggctcccggccagggcaattaaccctggagagctgcgattcaacttgtggatcccctggaggggcgagggtggggccagacggagaggccctgggatgactgagaaggagcccagcctcaggcacagtagccgtcctggaggcagcatcctttgtttcctcttatcgtgaatattttatatttcatttagtc

SEQ ID NO: 78344 - DNA, 2915 bp, Homo sapiens
gaggtctcctagagcccattgaggaagaggaactttctcagtaggacactttataagcctgagaaagctttgaaaaggcggaatgagttgattcatttccacctcaaaaggaacctttccaggtccccctggaaattgtgccctggagatgtttaacaaggagaactggtgaggaaagagtccttttttactgtagggaaaagccccaaactggcctcctgggggatgagggctgaaatgatcccgaaggccttttaattagtgtgaaatcctgctgtactcagaaatccttccccgaatttacagcacaggcaggatgacctaagaggcagtttacttccctgagacccacagttgggctgttctggaaacacatctgtgaatcatagccaattgccacagagaaaacagaaccaagcctccggtgaggccactccaccccagagaagtctgcagaattccaaggactcggattggatgttcagaattcagcaactggaaagtccttaaaaacaaacaggccaaaccaaatcaatattgctgtttctagatgtcccttctgtggttgagctagttttacagagataaatatattaagacaaggaggtgggggtgttatatgatcaatgatagccatttgaaagagagggaggagtacagaaggaaggcacttctgggtacttaattcagaaatttctttatatttcagcactggattatcatataatgcaagtgactatggactaagagttagttatggtgtcttatgactagatttattatggtatattaaagtaacaataatattaatattaccttccttttttttttgtttcaaaagagatctttctccagatgcttcagcctgtctggccttcttatcatatgtgcagcacatcatgtctcagcaacagtgtggtgaggtccttaggtgtcccaagaacaactcagggagcacgggagggtctgcagttgggaccccacaactatacagctatagggtaggaggcttccttttcattggtcctgaatgaatacaaatcgctcagaaagcattttggtggcacagaaaggggatgtatttgtgttgagatcttattttattttgtatttatttatcttctttgacttgcacagcactattgggggtgggggaagcagggtagtgggagacgaaggcagaagcaagagtcaaactcagaatgactgagttgaattcactgtctagtcagcaatgcctgcttctgagtttggcccagagagaaggtattgagtaagattttaataactgtaaaaagtaagctggataagtaaaatcatgatggatccaaagcacagtttcttcatctcctgataaagaaagtcaaatgcttgataaattcagagtcacagatgtgagcatagctatattcttttaaacgagaggtagagtgacctagcactaagcaaatgagctgaaatgtcggaaacagagtccatcagcttatttggccacacgatcccaaactagttttatcttgggaaatggccctgtcctcagcattcccttcttgtgctggtggggccagtgaagtcttgatcttatcagaaaaaggccacaccaagtgcgagttttcccaggctgactttccaggcccttatcaaatgaaacaacagaagctcttcacagttctgtgccccatggccactccacagacagacaataccaagcatcttagaactgtcataagataggtcatgcctgaaatagatcttgaccatatgagagtcccagaaatcagcaaggcctggacaaatagaactaagagagaggcagaggcaggaagctgcgggtctatcttgtaaagagtttagcatcactgtgagagtgtgtgtctaaaattaaattaaactagaagcagcaggtgagtatttggtaagtacttctgtgactcgcctcaattcccactggccaggggccatctcaactgcacggtgaatcaagatgctggtgtcatcctccttggaaaaaggaaatgttaactcatggttaaaactaagtacaatgattcccaagggatcactttcttatttttttaaatgacattaaggagaatcttaagaaagcatcagagaaagacatgtgcatgtgaagcaccctgattctgatgttaggaaaacttaagcgaacaggacctgctgcacacagccccattgtcttctatccatttctctttatcattcaaatcaagcaacatgtgccctcctcatcaacacacattcttcccctttgtcagtatgcatctcccagcttagtgtcaggatactttcgattcataattatgtatgatccaaagtgtgcataatttcatttaacgttaaagaaatagatccaattcctttcttgcaaccaaaaataaataaaatacgttgcctcaatataaggtttgggctattctgtgtttctatagaagcaatctgtttttggtaaaatgtacttttaaggatccagtcatctgaagtattttatgtagagttagagatttcacaatattgactatacatatatttaaaatataaattatccagctgatgtttgaatttgtcttactttcctggccacctcgttgtcctattttataagctggggagttaactagcttaacaaaagatgcttagcttttgtaaaagaacaagtgtttcattttacaaagacactccaaatgatagttacttgattttctcgagacctttaactatggtgatgaataacaggacttgctttcaagccttaataaatgtaaaatgccttttaatgaagatacagctgagtgttttcctcatgaatctgaaccaattaccaatttgtgttccagtcttgattggtattgactgattcaaataaagttggtttattttcaaatattaaaaaaaag

SEQ ID NO: 78345 - DNA, 2396 bp, Homo sapiens
tgacagtcgcggatcctgtgacacctccgggcagcccggcacttgttgctcccacgacctgttgtcattcccttaacccggctttccccgtggccccccgcctcctcccggcttcgctccttttcatgtgagcatctgggacactgatctctcagaccccgctgctcgggctggagaatagatggttttgtgaaaaattaaacaccgccctgaagaggagccccgctgggcagcggcaggagcgcagagtgctggcccaggtgctgcagaggtggcgcctccccggcccgggacggtagccccgggcgccaacggcatgacagactcggcgacagctaacggggacgacagggaccccgagatcgagctctttgtgaaggctggaatcgatggagaaagcatcggcaactgtcctttctctcagcgcctcttcatgatcctctggctgaaaggagtcgtgttcaatgtcaccactgtggatctgaaaagaaagccagctgacctgcacaacctagcccccggcacgcacccgcccttcctgaccttcaacggggacgtgaagacagacgtcaataagatcgaggagttcctggaggagaccttgacccctgaaaagtaccccaaactggctgcaaaacaccgggaatccaacacagcgggcatcgacatcttttccaagttttctgcctacatcaaaaataccaagcagcagaacaatgctgctcttgaaagaggcctaaccaaggctctaaagaaattggatgactacctgaacacccctctaccagaggagattgacgccaacacttgtggggaagacaaggggtcccggcgcaagttcctggatggggatgagctgaccctggctgactgcaatctgttgcccaagctccatgtggtcaagattgtggccaagaaataccgcaactatgatatcccggctgagatgacaggcctgtggcggtacctcaagaacgcctatgcccgtgatgagttcaccaacacctgtgcagctgacagtgagatcgagttggcctacgctgatgtcgccaaacgcctcagccgatcctgagcacagccattttgccccatccccgctgcagaaggactcaaccactcccctaagactccagcttcatagactcctctgtatcactgccttgaggcgcactttttataatcaagcctcatcttgctggtatcatgggaactccagcctgctatctttcatgaaggtcagcaccatccctggcctcctcacataggaatctagcagaaatgatagacacagtccacctttcggccggccagcctgatctgggctcagcatgtttggggtcagtcagtgttggagagcccacatatgggattgccactagcttcttctgccaatatcaaaataccttctcagatgctttagaaacatgcaacaccaactccttttctaccctcctctctgtccatacctacaaggccaaggacaaacgccatcttcatccttcttagaaagagatctattaccccattaggggagacagagagagtgaatggaggagtaccgagctggctatggacttgggtgtctggcaaacacagcttcagtctcactacttctgacactctggttattgggcactaagggccagactggaaagtcacttgagacacattctcagtttgttgcagtgccaggaatgctgcgctgctgctgctgcgcacctggcccatgctgtccctggcttccatgccgtccaggccctgccagaaaaggaaattggcatgcaattctaaactgcagtgactgggatgggaggggaggggagcagtgttgatgccaaaatacccacggggtctaccagccatggggtttgcttgcttaggagtagttgtttcagaggtgattacaggcctgggtttgactgtgcttaccaatgagtggtttttgagctatgagaaagtggatgggagtgggaggaggagagatgggtgaagacaaaagagttctttatgagcctcgatgttccctggtaaacttttaaaaaggccttctctcatgatctaagtcttggactggtggcatcatgtaactgctaaccttacagtaaaaacccaagaatgggtcaaaaatgtcttcccagtttctccaagctgcttctggaatgcaggtctgtcggctgggtgctctccagcagctgctcctgcctgattcaactgtagcctgtaatgggtaaaagccacatttaggaggtggtctgatcatagaacaccttaggaagaaagtccatgagactttctgactaggaaaccatgtggtttgaacttgaagaaaaatgtagacccatctgggttaattttcctacaatctgactcaactgccaggtgaaaaaaaaaaggaa

SEQ ID NO: 78346 - DNA, 811 bp, Homo sapiens
tgacagtcgcggatcctgtgacacctccgggcagcccggcacttgttgctcccacgacctgttgtcattcccttaacccggctttccccgtggccccccgcctcctcccggcttcgctccttttcatgtgagcatctgggacactgatctctcagaccccgctgctcgggctggagaatagatggttttgtgaaaaattaaacaccgccctgaagaggagccccgctgggcagcggcaggagcgcagagtgctggcccaggtgctgcagaggtggcgcctccccggcccgggacggtagccccgggcgccaacggcatgacagactcggcgacagctaacggggacgacagggaccccgagatcgagctctttgtgaaggaggaaggatggaggcgaggctgcggcggcgtttcccggtccgccggtgtaaggagaaagaaacatttgatcagcccttggtgccgacgctgcagaagtagggaaacctgaggctgcgggagagtagcctccagggctgagcagaaacagtcgccaggacttgggggaggggaagtcggggactgcctgggcgccaagacctttcacaaagggggaaaactctctcagtgcaaagtttccctagaaatatgcagatcgctgagaagggaagagtcactggtgcctgtcaggggcctcctggcagaatttaaaaggcataaatattccctggaattgggaaaatgttattttgcccaaaagatccttctctacaagctaattaaatagatgtttgcaaaaagtatgagatctacataaaccttgataacaatc

SEQ ID NO: 78347 - DNA, 418 bp, Homo sapiens
aacgagacaaagtcattgccctccatgaactaacaatctacagggagctgtaaaacaagtacatgtgcaattcccggcctgggtttgaatcccagcacttctagctgcacaactttacccaagaggcttattctttctgagcctctggctctgcatctgtaaaatggactttacattcagtttctttatctggcaataagaaaggctttatagctactcccagggatgcataaagcacggcaaaccaacaaaggccaagaggaggtgagaaagaaaaacaaggagacaaccatcaaatggagccctgggcccgaatcttcaaattgctcctgtcttctccttctaagaggtgccacctgcagtgggtcatgctcctggctgatgctgctagaaaaagaactcatctgtatcactggcg

SEQ ID NO: 78348 - DNA, 3409 bp, Homo sapiens
tgacagtcgcggatcctgtgacacctccgggcagcccggcacttgttgctcccacgacctgttgtcattcccttaacccggctttccccgtggccccccgcctcctcccggcttcgctccttttcatgtgagcatctgggacactgatctctcagaccccgctgctcgggctggagaatagatggttttgtgaaaaattaaacaccgccctgaagaggagccccgctgggcagcggcaggagcgcagagtgctggcccaggtgctgcagaggtggcgcctccccggcccgggacggtagccccgggcgccaacggcatgacagactcggcgacagctaacggggacgacagggaccccgagatcgagctctttgtgaaggctggaatcgatggagaaagcatcggcaactgtcctttctctcagcgcctcttcatgatcctctggctgaaaggagtcgtgttcaatgtcaccactgtggatctgaaaagaaagccagctgacctgcacaacctagcccccggcacgcacccgcccttcctgaccttcaacggggacgtgaagacagacgtcaataagatcgaggagttcctggaggagaccttgacccctgaaaagtaccccaaactggctgcaaaacaccgggaatccaacacagcgggcatcgacatcttttccaagttttctgcctacatcaaaaataccaagcagcagaacaatgctgctcttgaaagaggcctaaccaaggctctaaagaaattggatgactacctgaacacccctctaccagaggagattgacgccaacacttgtggggaagacaaggggtcccggcgcaagttcctggatggggatgagctgaccctggctgactgcaatctgttgcccaagctccatgtggtcaagattgtggccaagaaataccgcaactatgatatcccggctgagatgacaggcctgtggcggtacctcaagaacgcctatgcccgtgatgagttcaccaacacctgtgcagctgacagtgagatcgagttggcctacgctgatgtcgccaaacgcctcagccgatcctgagcacagccattttgccccatccccgctgcagaaggactcaaccactcccctaagactccagcttcatagactcctctgtatcactgccttgaggcgcactttttataatcaagcctcatcttgctggtatcatgggaactccagcctgctatctttcatgaagtttcatctcctaaaaagcttacccagcctgagcttggggacctgtgcagaggaaactaagaaaaatgcactcatcaactccttctcccagtgaacgcccgagatctttctccagatgcttcagcctgtctggccttcttatcatatgtgcagcacatcatgtctcagcaacagtgtggtgaggtccttaggtgtcccaagaacaactcagggagcacgggagggtctgcagttgggaccccacaactatacagctatagggtaggaggcttccttttcattggtcctgaatgaatacaaatcgctcagaaagcattttggtggcacagaaaggggatgtatttgtgttgagatcttattttattttgtatttatttatcttctttgacttgcacagcactattgggggtgggggaagcagggtagtgggagacgaaggcagaagcaagagtcaaactcagaatgactgagttgaattcactgtctagtcagcaatgcctgcttctgagtttggcccagagagaaggtattgagtaagattttaataactgtaaaaagtaagctggataagtaaaatcatgatggatccaaagcacagtttcttcatctcctgataaagaaagtcaaatgcttgataaattcagagtcacagatgtgagcatagctatattcttttaaacgagaggtagagtgacctagcactaagcaaatgagctgaaatgtcggaaacagagtccatcagcttatttggccacacgatcccaaactagttttatcttgggaaatggccctgtcctcagcattcccttcttgtgctggtggggccagtgaagtcttgatcttatcagaaaaaggccacaccaagtgcgagttttcccaggctgactttccaggcccttatcaaatgaaacaacagaagctcttcacagttctgtgccccatggccactccacagacagacaataccaagcatcttagaactgtcataagataggtcatgcctgaaatagatcttgaccatatgagagtcccagaaatcagcaaggcctggacaaatagaactaagagagaggcagaggcaggaagctgcgggtctatcttgtaaagagtttagcatcactgtgagagtgtgtgtctaaaattaaattaaactagaagcagcaggtgagtatttggtaagtacttctgtgactcgcctcaattcccactggccaggggccatctcaactgcacggtgaatcaagatgctggtgtcatcctccttggaaaaaggaaatgttaactcatggttaaaactaagtacaatgattcccaagggatcactttcttatttttttaaatgacattaaggagaatcttaagaaagcatcagagaaagacatgtgcatgtgaagcaccctgattctgatgttaggaaaacttaagcgaacaggacctgctgcacacagccccattgtcttctatccatttctctttatcattcaaatcaagcaacatgtgccctcctcatcaacacacattcttcccctttgtcagtatgcatctcccagcttagtgtcaggatactttcgattcataattatgtatgatccaaagtgtgcataatttcatttaacgttaaagaaatagatccaattcctttcttgcaaccaaaaataaataaaatacgttgcctcaatataaggtttgggctattctgtgtttctatagaagcaatctgtttttggtaaaatgtacttttaaggatccagtcatctgaagtattttatgtagagttagagatttcacaatattgactatacatatatttaaaatataaattatccagctgatgtttgaatttgtcttactttcctggccacctcgttgtcctattttataagctggggagttaactagcttaacaaaagatgcttagcttttgtaaaagaacaagtgtttcattttacaaagacactccaaatgatagttacttgattttctcgagacctttaactatggtgatgaataacaggacttgctttcaagccttaataaatgtaaaatgccttttaatgaagatacagctgagtgttttcctcatgaatctgaaccaattaccaatttgtgttccagtcttgattggtattgactgattcaaataaagttggtttattttcaaatattaaaaaaaag

SEQ ID NO: 78349 - DNA, 3398 bp, Homo sapiens
aacgagacaaagtcattgccctccatgaactaacaatctacagggagctgtaaaacaagtacatgtgcaattcccggcctgggtttgaatcccagcacttctagctgcacaactttacccaagaggcttattctttctgagcctctggctctgcatctgtaaaatggactttacattcagtttctttatctggcaataaggaaaaatccaaatggatttctcactttttgaccagatgtttcattgtcacacagcccgtgtgacagcactggcccctagtacaggcagagttgaaaagtgatgtgatgggtcatggttgcccctctactcagagaaaactccttcttgacctcatcacggtcgctgaaagtactaagaattatatctgaaatcaagcactggtagcagaacacaaatatgttaccaaattagttggaagaggttaggagcttgtaaggaagaccatagcagttgaaaacaaagcaaggcacatttccattgtacgtcccaggagtagtttgaatggtttaaggaccagctatgtgtgtgcttgcataagcgtatgtgccctgggtattctgcagtgtgtggggagctggcagtgtgatgaaggggacaggattctagatgagctactccactctgaagaccctatgactgtatccactggcaagaagtttgaataaaggcccttttactctttcatgccagctcttgaaagaggcctaaccaaggctctaaagaaattggatgactacctgaacacccctctaccagaggagattgacgccaacacttgtggggaagacaaggggtcccggcgcaagttcctggatggggatgagctgaccctggctgactgcaatctgttgcccaagctccatgtggtcaagattgtggccaagaaataccgcaactatgatatcccggctgagatgacaggcctgtggcggtacctcaagaacgcctatgcccgtgatgagttcaccaacacctgtgcagctgacagtgagatcgagttggcctacgctgatgtcgccaaacgcctcagccgatcctgagcacagccattttgccccatccccgctgcagaaggactcaaccactcccctaagactccagcttcatagactcctctgtatcactgccttgaggcgcactttttataatcaagcctcatcttgctggtatcatgggaactccagcctgctatctttcatgaagtttcatctcctaaaaagcttacccagcctgagcttggggacctgtgcagaggaaactaagaaaaatgcactcatcaactccttctcccagtgaacgcccgagatctttctccagatgcttcagcctgtctggccttcttatcatatgtgcagcacatcatgtctcagcaacagtgtggtgaggtccttaggtgtcccaagaacaactcagggagcacgggagggtctgcagttgggaccccacaactatacagctatagggtaggaggcttccttttcattggtcctgaatgaatacaaatcgctcagaaagcattttggtggcacagaaaggggatgtatttgtgttgagatcttattttattttgtatttatttatcttctttgacttgcacagcactattgggggtgggggaagcagggtagtgggagacgaaggcagaagcaagagtcaaactcagaatgactgagttgaattcactgtctagtcagcaatgcctgcttctgagtttggcccagagagaaggtattgagtaagattttaataactgtaaaaagtaagctggataagtaaaatcatgatggatccaaagcacagtttcttcatctcctgataaagaaagtcaaatgcttgataaattcagagtcacagatgtgagcatagctatattcttttaaacgagaggtagagtgacctagcactaagcaaatgagctgaaatgtcggaaacagagtccatcagcttatttggccacacgatcccaaactagttttatcttgggaaatggccctgtcctcagcattcccttcttgtgctggtggggccagtgaagtcttgatcttatcagaaaaaggccacaccaagtgcgagttttcccaggctgactttccaggcccttatcaaatgaaacaacagaagctcttcacagttctgtgccccatggccactccacagacagacaataccaagcatcttagaactgtcataagataggtcatgcctgaaatagatcttgaccatatgagagtcccagaaatcagcaaggcctggacaaatagaactaagagagaggcagaggcaggaagctgcgggtctatcttgtaaagagtttagcatcactgtgagagtgtgtgtctaaaattaaattaaactagaagcagcaggtgagtatttggtaagtacttctgtgactcgcctcaattcccactggccaggggccatctcaactgcacggtgaatcaagatgctggtgtcatcctccttggaaaaaggaaatgttaactcatggttaaaactaagtacaatgattcccaagggatcactttcttatttttttaaatgacattaaggagaatcttaagaaagcatcagagaaagacatgtgcatgtgaagcaccctgattctgatgttaggaaaacttaagcgaacaggacctgctgcacacagccccattgtcttctatccatttctctttatcattcaaatcaagcaacatgtgccctcctcatcaacacacattcttcccctttgtcagtatgcatctcccagcttagtgtcaggatactttcgattcataattatgtatgatccaaagtgtgcataatttcatttaacgttaaagaaatagatccaattcctttcttgcaaccaaaaataaataaaatacgttgcctcaatataaggtttgggctattctgtgtttctatagaagcaatctgtttttggtaaaatgtacttttaaggatccagtcatctgaagtattttatgtagagttagagatttcacaatattgactatacatatatttaaaatataaattatccagctgatgtttgaatttgtcttactttcctggccacctcgttgtcctattttataagctggggagttaactagcttaacaaaagatgcttagcttttgtaaaagaacaagtgtttcattttacaaagacactccaaatgatagttacttgattttctcgagacctttaactatggtgatgaataacaggacttgctttcaagccttaataaatgtaaaatgccttttaatgaagatacagctgagtgttttcctcatgaatctgaaccaattaccaatttgtgttccagtcttgattggtattgactgattcaaataaagttggtttattttcaaatattaaaaaaaag

SEQ ID NO: 78350 - DNA, 3099 bp, Homo sapiens
aacgagacaaagtcattgccctccatgaactaacaatctacagggagctgtaaaacaagtacatgtgcaattcccggcctgggtttgaatcccagcacttctagctgcacaactttacccaagaggcttattctttctgagcctctggctctgcatctgtaaaatggactttacattcagtttctttatctggcaataagctgcctgtggaaagaaaggcttcttcttccaacagatgagtattctgcagtgtgtggggagctggcagtgtgatgaaggggacaggattctagatgagctactccactctgaagaccctatgactgtatccactggcaagaagtttgaataaaggcccttttactctttcatgccagctcttgaaagaggcctaaccaaggctctaaagaaattggatgactacctgaacacccctctaccagaggagattgacgccaacacttgtggggaagacaaggggtcccggcgcaagttcctggatggggatgagctgaccctggctgactgcaatctgttgcccaagctccatgtggtcaagacccaccttctcacttcctccagcaacttcctaagattgtggccaagaaataccgcaactatgatatcccggctgagatgacaggcctgtggcggtacctcaagaacgcctatgcccgtgatgagttcaccaacacctgtgcagctgacagtgagatcgagttggcctacgctgatgtcgccaaacgcctcagccgatcctgagcacagccattttgccccatccccgctgcagaaggactcaaccactcccctaagactccagcttcatagactcctctgtatcactgccttgaggcgcactttttataatcaagcctcatcttgctggtatcatgggaactccagcctgctatctttcatgaagtttcatctcctaaaaagcttacccagcctgagcttggggacctgtgcagaggaaactaagaaaaatgcactcatcaactccttctcccagtgaacgcccgagatctttctccagatgcttcagcctgtctggccttcttatcatatgtgcagcacatcatgtctcagcaacagtgtggtgaggtccttaggtgtcccaagaacaactcagggagcacgggagggtctgcagttgggaccccacaactatacagctatagggtaggaggcttccttttcattggtcctgaatgaatacaaatcgctcagaaagcattttggtggcacagaaaggggatgtatttgtgttgagatcttattttattttgtatttatttatcttctttgacttgcacagcactattgggggtgggggaagcagggtagtgggagacgaaggcagaagcaagagtcaaactcagaatgactgagttgaattcactgtctagtcagcaatgcctgcttctgagtttggcccagagagaaggtattgagtaagattttaataactgtaaaaagtaagctggataagtaaaatcatgatggatccaaagcacagtttcttcatctcctgataaagaaagtcaaatgcttgataaattcagagtcacagatgtgagcatagctatattcttttaaacgagaggtagagtgacctagcactaagcaaatgagctgaaatgtcggaaacagagtccatcagcttatttggccacacgatcccaaactagttttatcttgggaaatggccctgtcctcagcattcccttcttgtgctggtggggccagtgaagtcttgatcttatcagaaaaaggccacaccaagtgcgagttttcccaggctgactttccaggcccttatcaaatgaaacaacagaagctcttcacagttctgtgccccatggccactccacagacagacaataccaagcatcttagaactgtcataagataggtcatgcctgaaatagatcttgaccatatgagagtcccagaaatcagcaaggcctggacaaatagaactaagagagaggcagaggcaggaagctgcgggtctatcttgtaaagagtttagcatcactgtgagagtgtgtgtctaaaattaaattaaactagaagcagcaggtgagtatttggtaagtacttctgtgactcgcctcaattcccactggccaggggccatctcaactgcacggtgaatcaagatgctggtgtcatcctccttggaaaaaggaaatgttaactcatggttaaaactaagtacaatgattcccaagggatcactttcttatttttttaaatgacattaaggagaatcttaagaaagcatcagagaaagacatgtgcatgtgaagcaccctgattctgatgttaggaaaacttaagcgaacaggacctgctgcacacagccccattgtcttctatccatttctctttatcattcaaatcaagcaacatgtgccctcctcatcaacacacattcttcccctttgtcagtatgcatctcccagcttagtgtcaggatactttcgattcataattatgtatgatccaaagtgtgcataatttcatttaacgttaaagaaatagatccaattcctttcttgcaaccaaaaataaataaaatacgttgcctcaatataaggtttgggctattctgtgtttctatagaagcaatctgtttttggtaaaatgtacttttaaggatccagtcatctgaagtattttatgtagagttagagatttcacaatattgactatacatatatttaaaatataaattatccagctgatgtttgaatttgtcttactttcctggccacctcgttgtcctattttataagctggggagttaactagcttaacaaaagatgcttagcttttgtaaaagaacaagtgtttcattttacaaagacactccaaatgatagttacttgattttctcgagacctttaactatggtgatgaataacaggacttgctttcaagccttaataaatgtaaaatgccttttaatgaagatacagctgagtgttttcctcatgaatctgaaccaattaccaatttgtgttccagtcttgattggtattgactgattcaaataaagttggtttattttcaaatattaaaaaaaag

SEQ ID NO: 78351 - DNA, 1839 bp, Homo sapiens
atgaatgacgaagactacagcaccatctatgacacaatccaaaatgagaggacgtatgaggttccagaccagccagaagaaaatgaaagtccccattatgatgatgtccatgagtacttaaggccagaaaatgatttatatgccactcagctgaatacccatgagtatgattttgtgtcagtctataccattaagggtgaagagaccagcttggcctctgtccagtcagaagacagaggctacctcctgcctgatgagatatactctgaactccaggaggctcatccaggtgagccccaggaggacaggggcatctcaatggaagggttatattcatcaacccaggaccagcaactctgcgcagcagaactccaggagaatgggagtgtgatgaaggaagatctgccttctccttcaagcttcaccattcagcacagtaaggccttctctaccaccaagtattcctgctattctgatgctgaaggtttggaagaaaaggagggagctcacatgaaccctgagatttacctctttgtgaaggctggaatcgatggagaaagcatcggcaactgtcctttctctcagcgcctcttcatgatcctctggctgaaaggagtcgtgttcaatgtcaccactgtggatctgaaaagaaagccagctgacctgcacaacctagcccccggcacgcacccgcccttcctgaccttcaacggggacgtgaagacagacgtcaataagatcgaggagttcctggaggagaccttgacccctgaaaagtaccccaaactggctgcaaaacaccgggaatccaacacagcgggcatcgacatcttttccaagttttctgcctacatcaaaaataccaagcagcagaacaatgctgctcttgaaagaggcctaaccaaggctctaaagaaattggatgactacctgaacacccctctaccagaggagattgacgccaacacttgtggggaagacaaggggtcccggcgcaagttcctggatggggatgagctgaccctggctgactgcaatctgttgcccaagctccatgtggtcaagattgtggccaagaaataccgcaactatgatatcccggctgagatgacaggcctgtggcggtacctcaagaacgcctatgcccgtgatgagttcaccaacacctgtgcagctgacagtgagatcgagttggcctacgctgatgtcgccaaacgcctcagccgatcctgagcacagccattttgccccatccccgctgcagaaggactcaaccactcccctaagactccagcttcatagactcctctgtatcactgccttgaggcgcactttttataatcaagcctcatcttgctggtatcatgggaactccagcctgctatctttcatgaagtttcatctcctaaaaagcttacccagcctgagcttggggacctgtgcagaggaaactaagaaaaatgcactcatcaactccttctcccagtgaacgcccgagatctttctccagatgcttcagcctgtctggccttcttatcatatgtgcagcacatcatgtctcagcaacagtgtgatatagtatgaggcccacaacagttgcttatgttcataagcaataagagctaggatttcaacccaaagactgccatcaagtctcacagctttctttttgttgaaaaaaagggggcatggagtagaggaagaagcaagcagaagaaatggggagaagctagagaaagaagaaaaaaatgggattctttctactgaaatttctaaatgtggaactcattgtctgtactggctttgaggcagaaaaaaaaacctaagagtttaaatatt

SEQ ID NO: 78352 - DNA, 1191 bp, Homo sapiens
aacgagacaaagtcattgccctccatgaactaacaatctacagggagctgtaaaacaagtacatgtgcaattcccggcctgggtttgaatcccagcacttctagctgcacaactttacccaagaggcttattctttctgagcctctggctctgcatctgtaaaatggactttacattcagtttctttatctggcaataaggaaaaatccaaatggatttctcactttttgaccagatgtttcattgtcacacagcccgtgtgacagcactggcccctagtacaggcagagttgaaaagtgatgtgatgggtcatggttgcccctctactcagagaaaactccttcttgacctcatcacggtcgctgaaagtactaagaattatatctgaaatcaagcactggtagcagaacacaaatatgttaccaaattagttggaagaggttaggagcttgtaaggaagaccatagcagttgaaaacaaagcaaggcacatttccattgtacgtcccaggagtagtttgaatggtttaaggaccagctatgtgtgtgcttgcataagcgtatgtgccctgggtattctgcagtgtgtggggagctggcagtgtgatgaaggggacaggattctagatgagctactccactctgaagaccctatgactgtatccactggcaagaagtttgaataaaggcccttttactctttcatgccagctcttgaaagaggcctaaccaaggctctaaagaaattggatgactacctgaacacccctctaccagaggagattgacgccaacacttgtggggaagacaaggggtcccggcgcaagttcctggatggggatgagctgaccctggctgactgcaatctgttgcccaagctccatgtggtcaaggtaagagagctctacccacaggggcctgcaagatccagctccatcttaggcccaggtcacctgtgtggatgagtcaaggacagtaccacctgttggtcaagaacctggaccctgaagtcaggtaataaggacccaaggtcaccctctgctgcttgttggctgtgtggcctccttgagcttcagttttcatttataaaataggcatatattgcttacttcaagtgttggtggaagagtaaatacagcgtgaaagtgcttggcatattgtgggggcttaatatgtgtcatagtcgcaatt

SEQ ID NO: 78353 - DNA, 3570 bp, Homo sapiens
atgaatgacgaagactacagcaccatctatgacacaatccaaaatgagaggacgtatgaggttccagaccagccagaagaaaatgaaagtccccattatgatgatgtccatgagtacttaaggccagaaaatgatttatatgccactcagctgaatacccatgagtatgattttgtgtcagtctataccattaagggtgaagagaccagcttggcctctgtccagtcagaagacagaggctacctcctgcctgatgagatatactctgaactccaggaggctcatccaggtgagccccaggaggacaggggcatctcaatggaagggttatattcatcaacccaggaccagcaactctgcgcagcagaactccaggagaatgggagtgtgatgaaggaagatctgccttctccttcaagcttcaccattcagcacagtaaggccttctctaccaccaagtattcctgctattctgatgctgaaggtttggaagaaaaggagggagctcacatgaaccctgagatttacctctttgtgaaggctggaatcgatggagaaagcatcggcaactgtcctttctctcagcgcctcttcatgatcctctggctgaaaggagtcgtgttcaatgtcaccactgtggatctgaaaagaaagccagctgacctgcacaacctagcccccggcacgcacccgcccttcctgaccttcaacggggacgtgaagacagacgtcaataagatcgaggagttcctggaggagaccttgacccctgaaaagtaccccaaactggctgcaaaacaccgggaatccaacacagcgggcatcgacatcttttccaagttttctgcctacatcaaaaataccaagcagcagaacaatgctgctcttgaaagaggcctaaccaaggctctaaagaaattggatgactacctgaacacccctctaccagaggagattgacgccaacacttgtggggaagacaaggggtcccggcgcaagttcctggatggggatgagctgaccctggctgactgcaatctgttgcccaagctccatgtggtcaagattgtggccaagaaataccgcaactatgatatcccggctgagatgacaggcctgtggcggtacctcaagaacgcctatgcccgtgatgagttcaccaacacctgtgcagctgacagtgagatcgagttggcctacgctgatgtcgccaaacgcctcagccgatcctgagcacagccattttgccccatccccgctgcagaaggactcaaccactcccctaagactccagcttcatagactcctctgtatcactgccttgaggcgcactttttataatcaagcctcatcttgctggtatcatgggaactccagcctgctatctttcatgaagtttcatctcctaaaaagcttacccagcctgagcttggggacctgtgcagaggaaactaagaaaaatgcactcatcaactccttctcccagtgaacgcccgagatctttctccagatgcttcagcctgtctggccttcttatcatatgtgcagcacatcatgtctcagcaacagtgtggtgaggtccttaggtgtcccaagaacaactcagggagcacgggagggtctgcagttgggaccccacaactatacagctatagggtaggaggcttccttttcattggtcctgaatgaatacaaatcgctcagaaagcattttggtggcacagaaaggggatgtatttgtgttgagatcttattttattttgtatttatttatcttctttgacttgcacagcactattgggggtgggggaagcagggtagtgggagacgaaggcagaagcaagagtcaaactcagaatgactgagttgaattcactgtctagtcagcaatgcctgcttctgagtttggcccagagagaaggtattgagtaagattttaataactgtaaaaagtaagctggataagtaaaatcatgatggatccaaagcacagtttcttcatctcctgataaagaaagtcaaatgcttgataaattcagagtcacagatgtgagcatagctatattcttttaaacgagaggtagagtgacctagcactaagcaaatgagctgaaatgtcggaaacagagtccatcagcttatttggccacacgatcccaaactagttttatcttgggaaatggccctgtcctcagcattcccttcttgtgctggtggggccagtgaagtcttgatcttatcagaaaaaggccacaccaagtgcgagttttcccaggctgactttccaggcccttatcaaatgaaacaacagaagctcttcacagttctgtgccccatggccactccacagacagacaataccaagcatcttagaactgtcataagataggtcatgcctgaaatagatcttgaccatatgagagtcccagaaatcagcaaggcctggacaaatagaactaagagagaggcagaggcaggaagctgcgggtctatcttgtaaagagtttagcatcactgtgagagtgtgtgtctaaaattaaattaaactagaagcagcaggtgagtatttggtaagtacttctgtgactcgcctcaattcccactggccaggggccatctcaactgcacggtgaatcaagatgctggtgtcatcctccttggaaaaaggaaatgttaactcatggttaaaactaagtacaatgattcccaagggatcactttcttatttttttaaatgacattaaggagaatcttaagaaagcatcagagaaagacatgtgcatgtgaagcaccctgattctgatgttaggaaaacttaagcgaacaggacctgctgcacacagccccattgtcttctatccatttctctttatcattcaaatcaagcaacatgtgccctcctcatcaacacacattcttcccctttgtcagtatgcatctcccagcttagtgtcaggatactttcgattcataattatgtatgatccaaagtgtgcataatttcatttaacgttaaagaaatagatccaattcctttcttgcaaccaaaaataaataaaatacgttgcctcaatataaggtttgggctattctgtgtttctatagaagcaatctgtttttggtaaaatgtacttttaaggatccagtcatctgaagtattttatgtagagttagagatttcacaatattgactatacatatatttaaaatataaattatccagctgatgtttgaatttgtcttactttcctggccacctcgttgtcctattttataagctggggagttaactagcttaacaaaagatgcttagcttttgtaaaagaacaagtgtttcattttacaaagacactccaaatgatagttacttgattttctcgagacctttaactatggtgatgaataacaggacttgctttcaagccttaataaatgtaaaatgccttttaatgaagatacagctgagtgttttcctcatgaatctgaaccaattaccaatttgtgttccagtcttgattggtattgactgattcaaataaagttggtttattttcaaatattaaaaaaaag

SEQ ID NO: 78354 - DNA, 3254 bp, Homo sapiens
tcaagttcaattcagcaagtatttattgagcccttacatgctgccaggcattgccctgcgtggacattaaggcaaaaactaataatatcaggctaccgccctttgaagttgctgggacatggttttagtaaggtctcctcagacctgcatttgggtgttacaatcttatgttccccttgctaattgcacctgcccactcaggacactggttctcttctttccaggctggaatcgatggagaaagcatcggcaactgtcctttctctcagcgcctcttcatgatcctctggctgaaaggagtcgtgttcaatgtcaccactgtggatctgaaaagaaagccagctgacctgcacaacctagcccccggcacgcacccgcccttcctgaccttcaacggggacgtgaagacagacgtcaataagatcgaggagttcctggaggagaccttgacccctgaaaagtaccccaaactggctgcaaaacaccgggaatccaacacagcgggcatcgacatcttttccaagttttctgcctacatcaaaaataccaagcagcagaacaatgctgctcttgaaagaggcctaaccaaggctctaaagaaattggatgactacctgaacacccctctaccagaggagattgacgccaacacttgtggggaagacaaggggtcccggcgcaagttcctggatggggatgagctgaccctggctgactgcaatctgttgcccaagctccatgtggtcaagattgtggccaagaaataccgcaactatgatatcccggctgagatgacaggcctgtggcggtacctcaagaacgcctatgcccgtgatgagttcaccaacacctgtgcagctgacagtgagatcgagttggcctacgctgatgtcgccaaacgcctcagccgatcctgagcacagccattttgccccatccccgctgcagaaggactcaaccactcccctaagactccagcttcatagactcctctgtatcactgccttgaggcgcactttttataatcaagcctcatcttgctggtatcatgggaactccagcctgctatctttcatgaagtttcatctcctaaaaagcttacccagcctgagcttggggacctgtgcagaggaaactaagaaaaatgcactcatcaactccttctcccagtgaacgcccgagatctttctccagatgcttcagcctgtctggccttcttatcatatgtgcagcacatcatgtctcagcaacagtgtggtgaggtccttaggtgtcccaagaacaactcagggagcacgggagggtctgcagttgggaccccacaactatacagctatagggtaggaggcttccttttcattggtcctgaatgaatacaaatcgctcagaaagcattttggtggcacagaaaggggatgtatttgtgttgagatcttattttattttgtatttatttatcttctttgacttgcacagcactattgggggtgggggaagcagggtagtgggagacgaaggcagaagcaagagtcaaactcagaatgactgagttgaattcactgtctagtcagcaatgcctgcttctgagtttggcccagagagaaggtattgagtaagattttaataactgtaaaaagtaagctggataagtaaaatcatgatggatccaaagcacagtttcttcatctcctgataaagaaagtcaaatgcttgataaattcagagtcacagatgtgagcatagctatattcttttaaacgagaggtagagtgacctagcactaagcaaatgagctgaaatgtcggaaacagagtccatcagcttatttggccacacgatcccaaactagttttatcttgggaaatggccctgtcctcagcattcccttcttgtgctggtggggccagtgaagtcttgatcttatcagaaaaaggccacaccaagtgcgagttttcccaggctgactttccaggcccttatcaaatgaaacaacagaagctcttcacagttctgtgccccatggccactccacagacagacaataccaagcatcttagaactgtcataagataggtcatgcctgaaatagatcttgaccatatgagagtcccagaaatcagcaaggcctggacaaatagaactaagagagaggcagaggcaggaagctgcgggtctatcttgtaaagagtttagcatcactgtgagagtgtgtgtctaaaattaaattaaactagaagcagcaggtgagtatttggtaagtacttctgtgactcgcctcaattcccactggccaggggccatctcaactgcacggtgaatcaagatgctggtgtcatcctccttggaaaaaggaaatgttaactcatggttaaaactaagtacaatgattcccaagggatcactttcttatttttttaaatgacattaaggagaatcttaagaaagcatcagagaaagacatgtgcatgtgaagcaccctgattctgatgttaggaaaacttaagcgaacaggacctgctgcacacagccccattgtcttctatccatttctctttatcattcaaatcaagcaacatgtgccctcctcatcaacacacattcttcccctttgtcagtatgcatctcccagcttagtgtcaggatactttcgattcataattatgtatgatccaaagtgtgcataatttcatttaacgttaaagaaatagatccaattcctttcttgcaaccaaaaataaataaaatacgttgcctcaatataaggtttgggctattctgtgtttctatagaagcaatctgtttttggtaaaatgtacttttaaggatccagtcatctgaagtattttatgtagagttagagatttcacaatattgactatacatatatttaaaatataaattatccagctgatgtttgaatttgtcttactttcctggccacctcgttgtcctattttataagctggggagttaactagcttaacaaaagatgcttagcttttgtaaaagaacaagtgtttcattttacaaagacactccaaatgatagttacttgattttctcgagacctttaactatggtgatgaataacaggacttgctttcaagccttaataaatgtaaaatgccttttaatgaagatacagctgagtgttttcctcatgaatctgaaccaattaccaatttgtgttccagtcttgattggtattgactgattcaaataaagttggtttattttcaaatattaaaaaaaag

SEQ ID NO: 78355 - DNA, 3165 bp, Homo sapiens
atgaatgacgaagactacagcaccatctatgacacaatccaaaatgagaggacgtatgaggttccagaccagccagaagaaaatgaaagtccccattatgatgatgtccatgagtacttaaggccagaaaatgatttatatgccactcagctgaatacccatgagtatgattttgtgtcagtctataccattaagggtgaagagaccagcttggcctctgtccagtcagaagacagaggctacctcctgcctgatgagatatactctgaactccaggaggctcatccaggtgagccccaggaggacaggggcatctcaatggaagggttatattcatcaacccaggaccagcaactctgcgcagcagaactccaggagaatgggagtgtgatgaaggaagatctgccttctccttcaagcttcaccattcagcacagtaaggccttctctaccaccaagtattcctgctattctgatgctgaaggtttggaagaaaaggagggagctcacatgaaccctgagatttacctctttgtgaaggctggaatcgatggagaaagcatcggcaactgtcctttctctcagcgcctcttcatgatcctctggctgaaaggagtcgtgttcaatgtcaccactgtggatctgaaaagaaagccagctgacctgcacaacctagcccccggcacgcacccgcccttcctgaccttcaacggggacgtgaagacagacgtcaataagatcgaggagttcctggaggagaccttgacccctgaaaagtaccccaaactggctgcaaaacaccgggaatccaacacagcgggcatcgacatcttttccaagttttctgcctacatcaaaaataccaagcagcagaacaatgctgctcttgaaagaggcctaaccaaggctctaaagaaattggatgactacctgaacacccctctaccagaggagattgacgccaacacttgtggggaagacaaggggtcccggcgcaagttcctggatggggatgagctgaccctggctgactgcaatctgttgcccaagctccatgtggtcaagattgtggccaagaaataccgcaactatgatatcccggctgagatgacaggcctgtggcggtacctcaagaacgcctatgcccgtgatgagttcaccaacacctgtgcagctgacagtgagatcgagttggcctacgctgatgtcgccaaacgcctcagccgatcctgagcacagccattttgccccatccccgctgcagaaggactcaaccactcccctaagactccagcttcatagactcctctgtatcactgccttgaggcgcactttttataatcaagcctcatcttgctggtatcatgggaactccagcctgctatctttcatgaagtttcatctcctaaaaagcttacccagcctgagcttggggacctgtgcagaggaaactaagaaaaatgcactcatcaactccttctcccagtgaacgcccgagatctttctccagatgcttcagcctgtctggccttcttatcatatgtgcagcacatcatgtctcagcaacagtgtggtgaggtccttaggtgtcccaagaacaactcagggagcacgggagggtctgcagttgggaccccacaactatacagctatagggtaggaggcttccttttcattggtcctgaatgaatacaaatcgctcagaaagcattttggtggcacagaaaggggatgtatttgtgttgagatcttattttattttgtatttatttatcttctttgacttgcacagcactattgggggtgggggaagcagggtagtgggagacgaaggcagaagcaagagtcaaactcagaatgactgagttgaattcactgtctagtcagcaatgcctgcttctgagtttggcccagagagaaggtattgagtaagattttaataactgtaaaaagtaagctggataagtaaaatcatgatggatccaaagcacagtttcttcatctcctgataaagaaagtcaaatgcttgataaattcagagtcacagatgtgagcatagctatattcttttaaacgagaggtagagtgacctagcactaagcaaatgagctgaaatgtcggaaacagagtccatcagcttatttggccacacgatcccaaactagttttatcttgggaaatggccctgtcctcagcattcccttcttgtgctggtggggccagtgaagtcttgatcttatcagaaaaaggccacaccaagtgcgagttttcccaggctgactttccaggcccttatcaaatgaaacaacagaagctcttcacagttctgtgccccatggccactccacagacagacaataccaagcatcttagaactgtcataagataggtcatgcctgaaatagatcttgaccatatgagagtcccagaaatcagcaaggcctggacaaatagaactaagagagaggcagaggcaggaagctgcgggtctatcttgtaaagagtttagcatcactgtgagagtgtgtgtctaaaattaaattaaactagaagcagcaggtgagtatttggtaagtacttctgtgactcgcctcaattcccactggccaggggccatctcaactgcacggtgaatcaagatgctggtgtcatcctccttggaaaaaggaaatgttaactcatggttaaaactaagtacaatgattcccaagggatcactttcttatttttttaaatgacattaaggagaatcttaagaaagcatcagagaaagacatgtgcatgtgaagcaccctgattctgatgttaggtctacctggccaggtagacctaacaggaaacgttcaccttgtctaccatcaagacacttgaagaggctgtgggtaatattgtgaagttcttgggaatgcacccttgtgagaggtcagacaaagtgccggataacaagaacacccacacgttgctcctggctggtgtgttccggggtggtcatgacatcctggtgcgctcccggctgctgcttttggacacagtgacaatgcaggtgacagccagaagtttggaggagctgccagtagacatcatcttggcatctgtgggataagaggccagcctgcataggacctcatacccttccccaacactacctgggttaggtctacctgg

SEQ ID NO: 78356 - DNA, 2342 bp, Homo sapiens
tgacagtcgcggatcctgtgacacctccgggcagcccggcacttgttgctcccacgacctgttgtcattcccttaacccggctttccccgtggccccccgcctcctcccggcttcgctccttttcatgtgagcatctgggacactgatctctcagaccccgctgctcgggctggagaatagatggttttgtgaaaaattaaacaccgccctgaagaggagccccgctgggcagcggcaggagcgcagagtgctggcccaggtgctgcagaggtggcgcctccccggcccgggacggtagccccgggcgccaacggcatgacagactcggcgacagctaacggggacgacagggaccccgagatcgagctctttgtgaaggctggaatcgatggagaaagcatcggcaactgtcctttctctcagcgcctcttcatgatcctctggctgaaaggagtcgtgttcaatgtcaccactgtggatctgaaaagaaagccagctgacctgcacaacctagcccccggcacgcacccgcccttcctgaccttcaacggggacgtgaagacagacgtcaataagatcgaggagttcctggaggagaccttgacccctgaaaagtaccccaaactggctgcaaaacaccgggaatccaacacagcgggcatcgacatcttttccaagttttctgcctacatcataaagaaattggatgactacctgaacacccctctaccagaggagattgacgccaacacttgtggggaagacaaggggtcccggcgcaagttcctggatggggatgagctgaccctggctgactgcaatctgttgcccaagctccatgtggtcaagattgtggccaagaaataccgcaactatgatatcccggctgagatgacaggcctgtggcggtacctcaagaacgcctatgcccgtgatgagttcaccaacacctgtgcagctgacagtgagatcgagttggcctacgctgatgtcgccaaacgcctcagccgatcctgagcacagccattttgccccatccccgctgcagaaggactcaaccactcccctaagactccagcttcatagactcctctgtatcactgccttgaggcgcactttttataatcaagcctcatcttgctggtatcatgggaactccagcctgctatctttcatgaaggtcagcaccatccctggcctcctcacataggaatctagcagaaatgatagacacagtccacctttcggccggccagcctgatctgggctcagcatgtttggggtcagtcagtgttggagagcccacatatgggattgccactagcttcttctgccaatatcaaaataccttctcagatgctttagaaacatgcaacaccaactccttttctaccctcctctctgtccatacctacaaggccaaggacaaacgccatcttcatccttcttagaaagagatctattaccccattaggggagacagagagagtgaatggaggagtaccgagctggctatggacttgggtgtctggcaaacacagcttcagtctcactacttctgacactctggttattgggcactaagggccagactggaaagtcacttgagacacattctcagtttgttgcagtgccaggaatgctgcgctgctgctgctgcgcacctggcccatgctgtccctggcttccatgccgtccaggccctgccagaaaaggaaattggcatgcaattctaaactgcagtgactgggatgggaggggaggggagcagtgttgatgccaaaatacccacggggtctaccagccatggggtttgcttgcttaggagtagttgtttcagaggtgattacaggcctgggtttgactgtgcttaccaatgagtggtttttgagctatgagaaagtggatgggagtgggaggaggagagatgggtgaagacaaaagagttctttatgagcctcgatgttccctggtaaacttttaaaaaggccttctctcatgatctaagtcttggactggtggcatcatgtaactgctaaccttacagtaaaaacccaagaatgggtcaaaaatgtcttcccagtttctccaagctgcttctggaatgcaggtctgtcggctgggtgctctccagcagctgctcctgcctgattcaactgtagcctgtaatgggtaaaagccacatttaggaggtggtctgatcatagaacaccttaggaagaaagtccatgagactttctgactaggaaaccatgtggtttgaacttgaagaaaaatgtagacccatctgggttaattttcctacaatctgactcaactgccaggtgaaaaaaaaaaggaa

SEQ ID NO: 78357 - DNA, 340 bp, Homo sapiens
gatgggagcccaacaatgtgattgcaactggctggcatgaagaaaagggctaaccctcttacctgggtgtttcaaaaacacaaatgctagctgtgagtgaggtgtgagcacttgatcactacagtgatctgggctttagctatggttccaggaagctggttttctgcacaggctgatcagtttcttccttggaagggacacctctctctagcaccagccaggtgaaatctggctggcttacctgccagggtaatgaaatgatcaggcttattttgcctgatcagacacaattcattagggcgggacaggcttcagagccaccttcaggagtgaggctctt

SEQ ID NO: 78358 - DNA, 422 bp, Homo sapiens
gaattctttacaaaaaaattagcaaataaaattcatcaatgtatggaaaattatacaccctgaccaaatagggtttgtttcagggatataaactggctcaatattcaaaaatcaattaacataattaattattttaacaggctaaagaaatcacatactcatatcaatcaatacagaaaaatcacttaacaaaattcaacatccattcaagttaaaaaaaaaaaaacctcagagaaacagaaatagatggcaacttttcaacttgacaaagggcgtctgcacaaatcctccagctaacattgtatttagtagtgaaacactgaatgctttttccctaagattggaaaaaaagcaaagatgtctgttctcattactcttattcgacattgtgctggaaatttgagccagtgtaataaggcaag

SEQ ID NO: 78359 - DNA, 407 bp, Homo sapiens
cctgttactaagacatctacaactgaattggtaaaatccacataggaaaattggacaatgacacaaggcaatacgggatctggtctaagtaaacagctattatgggttcagaaggacaacccattgagatggcaacgttgtgcttccaaacagggctggaaatctgcttcaacgcaccgtgaaaagggtgtgcttaactacacctgctcacttagaaaaaaacacaaacatttccctctgggaacccagcctgaatttgtttgctgacttgcatgcctctatgtgtgtcttcacctgttggggttggaggctccccggcctgcctccctccgtgtttctgccacttcccttatcttgaaatagccatgaccatcggagaactaggtttcccttctccccttttctac

SEQ ID NO: 78360 - DNA, 393 bp, Homo sapiens
aaaaacaaaccagaaaagaaaatcaagaacagagcttaattaaacatgtggaatatgtcatgaatatttatgtccccaagtcttgccttgtgatggtatttgtacttaaagtgctttttctcctctttcctgtgaaataattcagaatgtgtttcattaatacaagaatgtgtcatgttaactttcatcaggaaaaaatttcacttctgacaacactgacacctttctgattgaaagtatgcaaaatagctcttacgttaattggtcccaaagaaaattatgttatccattttcctgtctatacatctgacactttccctcatctgtcacctcctgaattatcaatgctttcccttgcctgattttgacagccagtattctgcctatgacttt

SEQ ID NO: 78361 - DNA, 309 bp, Homo sapiens
cctctggtgctgctgcctattggtggtgggggccgcctggaagctggggtagggactctaggctgtgtctgactcagggtaaggagtgcccattaggtgctacagttgcccctgctgtaggaaggaagagctccttgttggccattcctgctctggttcaacccctttattcagatgatgacactgacactggcagccacaccgggagctatgctcaggagcgagagtaatcagccagccctataagaggggacccttcccctctcccagccctttcttacgccatgaggaagcgggctccagcctcgc

SEQ ID NO: 78362 - DNA, 551 bp, Homo sapiens
gggaaagggaaaatcgggactgactcagatttctgaattgggcaaccgacggataatgctgccatttattggcataggacagatagaggaggaattgattcatgcaggggaaatgagaagttctatcttggacacgtttaatttgagatgtttgtaagacatccaggttgaactgtcaagtaagcagagctggatatggtgctcagaaaaaatgggttgaagacacaaactttggagtcttgagtcataatgagatttttaaagctgtgaattaatggaaccacccagtgaaaaatgataacaggagaagagaagaggacccaatactgtcaacacttaaaaggagaaatagcagctgggagaaaccagtgagtttggaaagcagagaaccaatggcctgatgataaccaagagaagagtattttgagaaacaaatggcccactccacccaatgctgctgaaagggtaagatgaagacagagaagtgtacattcgcatgtggctatgtggatttccagtgaccctgaggcaagaaattttagtacagtgac

SEQ ID NO: 78363 - DNA, 382 bp, Homo sapiens
ccacagtactatgaaaatctatgttttttaaatgaataaaaatagtaataatcattatcatcattattccatcagaagagtattattaagtgcacatctcttcatttttgcccacccagtgaaaaatgataacaggagaagagaagaggacccaatactgtcaacacttaaaaggagaaatagcagctgggagaaaccagtgagtttggaaagcagagaaccaatggcctgatgataaccaagagaagagtattttgagaaacaaatggcccactccacccaatgctgctgaaagggtaagatgaagacagagaagtgtacattcgcatgtggctatgtggatttccagtgaccctgaggcaagaaattttagtacagtgac

SEQ ID NO: 78364 - DNA, 379 bp, Homo sapiens
aaggcccataatgcccatttgtccctttattggtgatgttaggcttgatcacttggttaagctggagtccaccggatctctccactttacaatttaaagaaagctgtggaatgatattctgagaacttttagctattttcttcaagcaacatattaccccattgttttatcccccacattgatgatctatacttaaatttgctattacactggggattgcaaaatagtgactctctaattctgtaattctatgaactcaaaatatctgagacaggtctcaagtaatttagaaagtttattttgccaaggctaaggatgcacacatgacagcctcaggaggtcctgaggacaggtgcccaaggtggtcacggcccaatca

SEQ ID NO: 78365 - DNA, 420 bp, Homo sapiens
ccaggacggaatgcacagcacccttgggcagcaggtgggctgcagaaaggggacaggcgggaggagcaaggctgcagccccaagctttccagggagagtctaaaaattttgtgattttctgcagcagaagtgtaaggtctgtaatctcctctgctagaatatctgggaagattcccttagccaatattagggcaaaataaactgtcttcttggtcgggagtggtggctcactcctgtaatcccaacactttgggaggccgaggcaggtggatcacttgaggtcaggagttcgagaccagcctggccaacatggtgaaaccccgtctctactaaaaatacaaaaattagccaggcacggtggcaggcgcctgtcatcccagctactctggaggctgaggcagaagaatcacttgaacccgg

SEQ ID NO: 78366 - DNA, 365 bp, Homo sapiens
ggctagtggggacagggtgggcggggggaagaaatcacctcctagcaaacatgcctaatatgaaataatgctgtttgcctaataagaaattaagaaaaataaaattgtattcattagaactgtacattgagtatctgactcaatacagtttaacttagtctacaaaagaaatttgttcctaaaaagttacatgtgggttgagtttacataaatgaattaatcttaaagtcaagaggaaaacaataacattctatagtgagttcttctacaaagcaaaatacgtattcataaagtgaatcgctccctaatgtatttgcctaatttagacttaaatatataatgttgacttaaaacaggatgataca

SEQ ID NO: 78367 - DNA, 464 bp, Homo sapiens
gtaacctgactgagtcctgggcagatgataacccccgacaccatggcctggctgcccactcctcaggggaggaaagagagatccagtatgcacccctcagctttcataagggggagcctcaggacctatcaggtcaagaagccaccaacaatgagtactcagagatcaagatccccaagtaagaaaatgcagaggctcgggcttgtttgagggttcacgacccctccagcaaaggagtctgaggctgattccagtagaattagcagccctcaatgctgtgcaacaagacatcagaacttattcctcttgtctaactgaaaatgcatgcctgatgaccaaactctccctttccccatccaatcggtccacactccccgccctggcctctggtacccaccattctcctctgtacttctctaaggatgactactttagattccgaatatagtgagattgtaacgtgt

SEQ ID NO: 78368 - DNA, 416 bp, Homo sapiens
gcctggctcatcgctgtcctttcctccttgtcagagtcagtgacactgacattaaggtcatcgaatatcaaccaggtcctgaggaccttggtgtgtttcctcctctcctagtctccagaccccagcctgttcattcctgagcttcctctggcaccccttccttggggccaagccaagtaagaaatcagcaggcccaaggtggtgcttgggaggccggggcagtgccaggggcagtcctcataccatcctcccactggcttccctcctgcctgctcttagccgccacacatatctcagctgtcgaatccgattagggctcctgcccagtgagccagacaaggaggccactgggcaggggagagagagacaaggacgccaagcagggatggcagaaggaaggtggagacatggctcag

SEQ ID NO: 78369 - DNA, 431 bp, Homo sapiens
acaaaacaccctaaaagaaaaatggaagagaaatgagtaacatgtgattagagaataaaaactcaatggctaatagatgcccaagaaaatagtaaaccctgccaatactgcaaaatatttgaaatacggtaatgaaactggctgggcactggctcttgcctctatttctagtgctttgggaggcagtggcaggagtgttgcttgaggccaggagtttgagaccagtctgggtaacatagcgagacccccctctctacaaaaaataatttttttaaatgagccaggtgtggtggtgcacgcctgtagtctgtttcttggaagcctgaggcaggaggatcacttgagcctaggaatttgaggctgcagtgagctctgattgtgccactgcattccagcctgggcgacagagcgagatcctatctcaaaaaaaa

SEQ ID NO: 78370 - DNA, 764 bp, Homo sapiens
cattgctggtcaccccctttggagcaccatctgtacatgcccacagtgaacccgatgcccaggagtctgtggacattcttacaggctgtgtcacagcacaaatgccagcccagttggaagaagaccataggcctgtcattctaaatctaagtttaagaatatttttaaagaattgctaccaagtgtagagttgggggtgggggtaggattgctttaatgaacaggaaaggatcattgataatcaatttatcagtttctcagagcggctgaatggctgctagccttgaactcctctgggattttgagggttgtggctaatggtctaagtgcagatagcaagggggctcagttatgtagtgcttgctaataccatacagtcctacacttgaaagaatccttgatcctaaattacattcaactcagatatctggttagcaaaatagatagaaaaaaaaaaggagattcctgagttattcctaatagcagtaccataatgtgcataataaaatgactttagttgcaatatcttgaaagatcataagatgggggtgttgctccgctagagaaagagaaattcatgtttatgtgattatccatgcagacttgatctgcccaaggcaagaatgcatgtatttaataatcataaatttgttcattttcactgtacagggtaagtacaggccaccctgtaactgctactggtaatgactttatgtcattttttgtaagttatgtgatattttaaatctctctttcttttgccc

SEQ ID NO: 78371 - DNA, 554 bp, Homo sapiens
gcacgaggttgtcagaccagctctgagctgcttcactagccctgcctctgacgggagtgcattctgcctctcccctcagccagcaaccccacacctggggtcccgcccatgtccgtgatgactcaccacgcagccctgcttcaggaggctctggctctggggagacagactcaagaagccgttgagtggtgagggcagccagcagcaggggagcaggggtggtgcccttggagatgcttcccacattgggttctaaaaggtgagggcggcagctcgatgctcaggaacaaatcctgggcagaggctggaggaagttggaggtggtgaaggtgaacagttcagggctggggtgtggcttagtggctgctgtgggcagaggcaggaggggcagccctagagcagcaccaggcctgacttcacctaatactgacttactcattcagtaaacgctgagcacacagtgtgcctgtgctgggctaggtgctggggatgcatcgatgatgcatctatgaaccacaccaacaaagacccccgtccttgtgggagtgacaaaa

SEQ ID NO: 78372 - DNA, 521 bp, Homo sapiens
tttctgttttcatggtcagggctgcctccgttgtcttgaatagtgccatcaccgttaaaatttttggatttagagtataatgagcctctttttgcttacaggcaaaggggagcctataactaaacaaaatgaggagaggcccctcacctagacactatgattctttcccttgcatcctttgagagaaatgctagggagagacattggagagagtggttaagagcacacactctactcccagggactatccagtaaggtggggaagttctataaattctaataaagtcaaagaaaaaaatgaacccattatagaatctaaaaattaccattccaaagattttcagtagctcactgtctcccagacatctgagaatcagactcaattaaaaatttcaataatagagtaaccatgggaatgttattttgttcaggcaaaataacaggaataccttaggcagcttttttctaaatattctgctaaaaaatgtctgcatgcttttatggcagtttgctttaatgaa

SEQ ID NO: 78373 - DNA, 159 bp, Homo sapiens
gacacccatatcaccaagccccaggcagcatgtgcctctgagtcctgtctgaggtcttctgcctcccccggagattagagcctccattgggccagggatggggtccctttaccactgtgtccccagttgctggcctgtggcacttcctgaatgcctatg

SEQ ID NO: 78374 - DNA, 169 bp, Homo sapiens
gttttttaagtagaacaagaatttaggctcttcagatgaattcttagcttaaaatccttatagatctttacaatattttttccatttctttgaactattttcttggcctctacctaattcagcagcagaagtatttcacttttattgagtatttcagagtcattcaact

SEQ ID NO: 78375 - DNA, 255 bp, Homo sapiens
atgggagacttaaaagatacaccaaaagtttaaaaatttataaaatggcaagacgacttattagttctagggatggatgcatgaatttttatctataaagaaatgcaaggtattaattactataaaaatttggatagtggttaattttgggtggagggagggagttgtaattgggatgtgggacatgtgaggggcttctgggatggcagagttctatttcttgacctaggtggtagttacagggatattggcctt

SEQ ID NO: 78376 - DNA, 396 bp, Homo sapiens
gttgtctactaaacaaattaaaaaataaaagactgtatccaaccagataaggactcaaacaagcacactcttccatgatcagttctcatgggaggactctgtaaccgtaaaagagcaggccttcagcagctcgaaatagccatgttaactgatgccatcttgcagtcactggtgatgaaaacttggcatctgctgctgaagtctctgccacctcagagactctttcttgcaagaccagtggaccacccggcctggaccaggaccgcttttctcttcttctctccccttggactggtttgtgatcctttctcctatcccttttccttcttgtgttaaatgttagtttgtttgttgtgaaatgttaaacctataacatttacatattgattaagtata

SEQ ID NO: 78377 - DNA, 467 bp, Homo sapiens
  misc_feature (199)..(199): n is a, c, g, or t
cccagtagtcaggggtgagggggaatgcccttccaatatggctagagccagactgtctgggacccaatccccagactttgtatgtattacctaacctctctgtgcctcagtttaccaagctataaaatgggcataatgacagcacctgcctggtgatgctcttggagggatgaaaggaggcaacgtgtgggcatctggnacggcaccaggcattgccctgagagctggccatgcggggaatgctccatccttacggccagccaggtgttgccacccctctcttgctgatggagaccagggagggtcggggacagaaggccttgcccaaggtctcacagccaggagcctgcctccactggtccctgtgtggccagtgctgccctggggctgctgctgtgcactggagggtcagctgcatggaggagccagaggagatggtgccgaggacagagcttgcggccctgtac

SEQ ID NO: 78378 - DNA, 443 bp, Homo sapiens
gaactcctggtcaggtgcggtggctcacgtctgtaatcccagcactttgggaggccaaggtgggtggatcatgaggtcaagagatcaagaccatcctggccaacatggtgaaaccccgcctctactaaatatacacaaattagctgggtgtggtggcacgcgcctgtagttctagctactggggaggctgaggcaggagaactgcttcaacgtgggaggcggaggttgcagtgagccgagatctcgccactgcactccagcctggcaacagagtgagactccgtctcgaaaaaaaagaaaaacaactcccaatggccaaagctggaacaatttgagcaagaataacagaaagggtaatattagattatagttcaaaaaatgaacatccatgattccatacttatttatataagtgatatgattgaataaataaatgctgagag

SEQ ID NO: 78379 - DNA, 195 bp, Homo sapiens
tttaacttctctgagcctaaatttccacccttgtaaaatgtgattagaaatatcttccttgcagtcaggtgggtggctcacgcctgtaatcccagcactttgggaggccaaggcagccagatcacttgaactcaagggtttgagaccagcctggccaacacggtgaaacctcgtctctagaaaaaaaaatgcagg

SEQ ID NO: 78380 - DNA, 1221 bp, Homo sapiens
agccagtgggcccagagagatgccacaatgccatttgtaggctgggccctgggagaagaataacatcacccagttctgggcccagcaatatgttgtgatcccaactggaaaaagtttccagacaagagaggagaatcacatcatcatgatgataagccaagagatttcacaatccccccctctgcacatgtcccaggcagaagacctgaattacctttttacttaggccagtaatgtcacagtgcttcctcagggcagggcacaaacaagataggacagtcacatcattaagtgctagacttaatgctagatatgtcataaccttacttgtgggcaggatccaggaaggagagatttatgtcacctaggtgctcagtaaagagatatattacaattacaattcctttgagggaagtggccaggcaaaatagtcacatcacctaggtgcttggcccaggtataagtcacaagatatctgtgtgttgagcccagaaggactatcaaattacgaagtttctacgtagaagtgcatgtcacagacacctgcaggaaggcccaggaatgagactcccaattccacacattttcccactccaagtgtaagagtcaacaactcctgagacttaggcccaagtacatgagtcacaatctcaacagtggattgcatcctgccatgagagccccaatcccttctctaagctgtgttccagtagaggagtcacaacatcaatggtgtgctgaatcctggttggagagttcccacttcacctgtggactggatctgtatatgagagtctcaattccagctctcaactgcccctgggtgtgagattcaggacctcaattgtgagctgtgtacacatggacatgtaacaatttctacttttggctgtgtgttcatacaagactcaatctcatctgtgttctcggccctgttatgagactctctgtaccacccatgggatttattcaatacgcatgggtgtcataatcctctgtgatcttcatacaagtagaagacccaggaccttacccatgccctaggcctatctatgagaattgacatttttcctcacatttttaattttaacaaataagttattctcctctcagttcagattcatcaggacattgaatcatattcagaagaattaaaactgaaagactaataggtttgttaaagcaatgcaggttgtcatactaataaaccctaaaatttca

SEQ ID NO: 78381 - DNA, 1586 bp, Homo sapiens
agccagtgggcccagagagatgccacaatgccatttgtaggctgggccctgggagaagaataacatcacccagttctgggcccagcaatatgttgtgatcccaactggaaaaagtttccagacaagagaggagaatcacatcatcatgatgataagccaagagatttcacaatccccccctctgcacatgtcccaggcagaagacctgaattacctttttacttaggccagtaatgtcacagtgcttcctcagggcagggcacaaacaagataggacagtcacatcattaagtgctagacttaatgctagatatgtcataaccttacttgtgggcaggatccaggaaggagagatttatgtcacctaggtgctcagtaaagagatatattacaattacaattcctttgagggaagtggccaggcaaaatagtcacatcacctaggtgcttggcccaggtataagtcacaagatatctgtgtgttgagcccagaaggactatcaaattacgaagtttctacgtagaagtgcatgtcacagacacctgcaggaaggcccaggaatgagactcccaattccacacattttcccactccaagtgtaagagtcaacaactcctgagacttaggcccaagtacatgagtcacaatctcaacagtggattgcatcctgccatgagagccccaatcccttctctaagctgtgttccagtagaggagtcacaacatcaatggtgtgctgaatcctggttggagagttcccacttcacctgtggactggatctgtatatgagagtctcaattccagctctcaactgcccctgggtgtgagattcaggacctcaattgtgagctgtgtacacatggacatgtaacaatttctacttttggctgtgtgttcatacaagactcaatctcatctgtgttctcggccctgttatgagactctctgtaccacccatgggatttattcaatacgcatgggtgtcataatcctctgtgatcttcatacaagtagaagacccaggaccttacccatgccctaggcctatctatgagaattgacatttttcctcacatttttaattttaacaaataagttattctcctctcagttcagattcatcaggacattgaatcatattcagaagaattaaaactgaaagactaataggtttgttaaagcaatgcaggttgtcatactaataaaccctaaaatttcaaaggcttagcaaaataatacattttctgcttacatcaccatcccctttggcttatttctggttaagagaacttctttgtgattattcggagattagatttttttaaaatttcctatctgcactctctctttcttcagccaatagatgaaaaaagatgcaaagaagacacatttgctttttatgcacacatcacttccagtcactatgttgagcagagtcagtgtgaggacaattgagaatagcagttttctggcaggacagccacttctcagcagaagatgacacaataaaagtataaatctttcatgggaggctcacatattttcagcaaattaagcatatgcatgaataaaattcttgtggta

SEQ ID NO: 78382 - DNA, 406 bp, Homo sapiens
acctcgccctcctagtagctaggactacaggctaatttttttgtagagatagggtttcaccacattcagcccaggctggtctccaattcctgggctcaagtgattcacctgccctgacctcccaaagtgctgggattacaggcatgaaccaccatacccagcctctttctgtatttctatatttttaaaatttagttttagtgccttgcctttgtgatctgtatttggccactggtgtcatttttgtttctattatcgttctcagccacattcctacataggttagctgtcaagcacagtgcttgcaacacagagtagacagacaataaataattgctccattctttctgacatttcctcctgaatgcctcataaacacctagaactcaaaattcagtgaattgtt

SEQ ID NO: 78383 - DNA, 129 bp, Homo sapiens
atgccaagatacacagagagaatgatagaatgatactattgtataacacccgggagtcagtggagacagctgttctcagctatcctgaagcttaagggtcgatactttggcacacctatagcccattca

SEQ ID NO: 78384 - DNA, 396 bp, Homo sapiens
gatggtaatgctcgctcaccagcctgatgctcaccttctgctgtacgacctgcttcctaacaggccacagtgtggtactggtccgacctggggactagggattcctgctctacatacacaacagtagcagaatacacattctttgcaagggcacatggaacatgcatcaggatacgtaatgccacaaaacaaatcttaacaaatataggaagacttaactcataaaaagtttcttttcagatcaggatacaattaaagtagaaatcaatagcagaagaggccgggcgtgggggctcacgcctgtaatcccagcactttgggaggccgaggcaggcagatcatgaggtcgggagatcaagaccatcctggctaacacggtgataccccgttgtctac

SEQ ID NO: 78385 - DNA, 714 bp, Homo sapiens
cagcaagaatggttaatggatccccatttgactagcaggcagagactaatctggtcctggaatctgttcggccgggctgagcaagctcacaggttaattgagtttcccagtttatggctgcttagaggagatgatggctgcttagtggggagagagttcaggtggttagatttggatcctggctgtgttcatttatagtccaaaactttcagaagagggtgattttatctttttctttctcaggaatgtattagtggttcagaaaatatcacagacatggtgttaatttactgttttcctgctggggatataggatagtggaagagaggatggaggaagggaaaaggagcacgttttctagaactcagctgtcgtgagagacaagtgtaagcctgtgggtaggagcagctttccttgttgagcgtaggcatttggctcaggagttcgagcactgatagtggtggctcttggtggttattgtctgtgggcagggataatgaagggtgaccgactgtcccatttttagccctgaaggtcctgggaaacccccagtcctggaaaaactaggactgttggtaaacccagtggagggacaaagcccccaaatgggcagtggggcagagtttttggcctgagtacataaaagtgatgagagtcagagctgaggactcagagctgtcttgggagaaagagtccagaatttaaagcacttaa

SEQ ID NO: 78386 - DNA, 676 bp, Homo sapiens
tattcggcacgatgctggccttcaactgcttgggtgaggcccgtccccactacagaagacaatagtctgttctactcagagtctactgatttaaatgctcatctcatcccaaaaaataccctcacagcaacatttagcctgtgcatttgaccaaacaactgggtaccatgccccccctcccaagttgacacacaaaattgaccatcataccctccccacccccagtcttactgaatgagagagaatctgtgcttcaacaagatccccagaagaggtataagcgcagggaagtctgagaagcaccacctttgaggcttatccaggatgcccacatgagccttctctggatatgtcagatccccttccctggccccctagacacctcctccactccccaaacttggaagcaacattgtggggaagcaggcagtgaggcgctcagtctacccacgttgtgagatacacagctccatctgtgtatcatgatttgatccaagggaaaacaaaagatccagaaacataagtacttttttgtgagctctcaaaaacttcctgtgacaagatcaggtcgttgatgcgagagccacacttgtttctttttcctctttattctccacctctgacataatacttagcataaacaaaaatccaataaacaccactgaatcaattatct

SEQ ID NO: 78387 - DNA, 664 bp, Homo sapiens
aggggcctataatttctgttaacagaaagttttagttatgttgattcaactggagaggaacagagctcccagaaggactccagaacacttgatgcttgtctgagtggggtcagcagcactgagttcccaccagacagaaagtttgtgtgtgtacattatttcccttaactgccacaataatcccatgaagaaaatgccctagttttacaaacaaggaaacagaggcagagaagagttaaatgacttgcccaagggcattcaaagtaagcaactgaattggaattttaactcaaaggcttggatgtcccactacaacaaataggctgtttctgctttactacatgtgcttacttctaagaatttaacattttaggctggttgtggtggctcactcctgtaatctcagcactttcggaggctgaggtgggtaaatcacttgagctcaggagtttgagaccaacctgggcaacatggtaaaacctcatctctaccaaaaaaaaaaaaaaaaactagctggacgtggtggcacgcgcctgtggtcccagctactcaggaggctgaagtaggaggatcgtttgagcctgggaggtggaggttgcagtgagcccacattgcatcactgcactctagcctaggtgacagagtgagagcctatctcacacac

SEQ ID NO: 78388 - DNA, 276 bp, Homo sapiens
cttgccactctgaaccagggagctgtgggggctcagctgcgttgtttttgggtgcgtgtctggggcaggaggccggggccgggcaaggggtgaatccaacagggaactgcgaggaggagggcaaggaagtcggtagaggcatgcaccagggaaacttcccagtagctttgtgcagcgataaggactgcacaagggagagatgagaagtgttttcttattgtatcagaatggggaagaaaggggggaaaaacggagagacaccaagaaagaacgaaa

SEQ ID NO: 78389 - DNA, 462 bp, Homo sapiens
atatatattataacagatatgtatattttataataaaaatgccatatctttggcatgagaaggaatcccagaatctggggcatatgtgcatgcagactagtcgcacctataactccttctcctcaaactgtgtttttggctttggtggtaacaaatataagcattctgcagtttccctgttcttatcttgtcttccccccaacgcctcctcataaggtcttggtgacctataaaatttcctctgaattcaccagcttcacctattctgttgctcttaactttccatgatacaatctccttctccaatacaatgaattcttcctttgatctgtgcccttaacgctatgtttttgatgcctgattaaagaaattatggcatagctgttctatgtaatattatgcaaggatgctatgaaatcattaaaaatgtttgtctgtatatgctgacatggaaggtcatct

SEQ ID NO: 78390 - DNA, 499 bp, Homo sapiens
cactttggataaaatttcaacataagatttggagacgacaaataaaccaaactatagcactagatctttaaaaatcatttttaaaaaaagtataaagatttttttgagccatccaaaagaaatctggaaaatagttgggtcattgtccttccattagagctggccactcctatgaatgagatgccactggtgacacactctggtggaaagagccctggcttgtgagccaaaagtcaatgttaatacctctgtcagcttgtacaaggcaaccgaactttcagggcctcagttttctgatggatataataaaaagatttagatgggcttattctaaattacctaaatcaatgccttgattatttttaagagttgaagtatctcaaacaaactggcttttgtctcaaaataaatgatcctgaactgaaagaaatcatgcagcaaacctatggcatttcaatgtttttagttttacttttgaggtggtggtatttttttgtcc

SEQ ID NO: 78391 - DNA, 762 bp, Homo sapiens
tgggccctgtgctagataggaggaatataaagtgaaaataataataaaagttaatgtttagtgtttatgtgccacagattgtattaaccattttacatatagtattttgttcagttctcaaaacattcctgtgagatcaggtctatcatcagtattactggccttgtaaaaggaccatttctttgtcttctctgtgcttcctcaaattggcttcctgctcttgacaggttgaccttcagagcagcagtgtaagggaaccattccaggtgctctgttaggaacaatgctgctgtggaagcccctagactgttggctattagatggggtgacttaagacatatcagtagggatagtttttttttctttttttcttaaaaaaataattcagccccatagcaagacttactataaatctccaattattaggacatggtggtattatctcatggatagacaaatagcccaatggaacagaagagtagagaaacaaatgcacatatctctgggtgcttgttatatgacataggtggcactgtaaagtagtgtggctgggtcatttcggctggatgatcatgtgaaaacaaaaaatgactcttgaccctatttcacgccacacacagaaatgacttaaagatggattgtagatctaaatgtaaatattaaaataataaaactgctagaaggtaaaatacaaggatgtctccatgatcttaaggtaggcaaagatttcttaaacaggacacaaaaatccctataaccata

SEQ ID NO: 78392 - DNA, 282 bp, Homo sapiens
gagaaaaacattaaacatcagaaatggtaattatataaggaaatataagactgttctcttgggttttaaaaatgattataatttgatggttgaaatcaacaattacaatatctgttggggtttccaatgtatgcatcgtatgtagatgtaatatgatgaattatttttactcctaacacttctggcactaaatacatgtttttgttttcacaccagcaaccaattctccaactcgctggatgccaactaggtgtccagcaattcaatttaattctgacactg

SEQ ID NO: 78393 - DNA, 891 bp, Homo sapiens
cgggcgccgcctctgcctgggggagccggggctcgctgggggcgacttccttgttcgtatcgagccagcgaaaagacagaaccggaagagaccgggggcgaaggcgacaggggtctgtggaagagacctgtcggcggagagcggtccacgttttcctggagaaagacgaggccccagggcaggagcgcgggctgcgctgggcctttacttcgccgcccgcgggcggggagaccggccccgtacccgaggggacgaggggacgaggggcccatgcccagtcagggaagccgaaggcctggaggggcttccgggagcaggggctggagctcctctgccaggcaggaggctggcaccagacacccggcagagggaggcggcgagggcccagcaaggattctccccagcccctgtgcctgcgtctcctgcggcttctgtgcgcggaccgtgtcctgtgctgtgtagggaacgctgcctctctgctcgggacgtggattcctttcccctcctcctcgcctggctactgctgacgcaggtcgtcaggactccgcttgggtgtcacccgtgcaggaagcctcccttagtcaagggccctcggcacccgccccatatgtgactagcagccctcctgtgtatttcatcgcgcccccgttgtttatatcagccattccactcaccacccttctgggcaaccctttatctcccgctctgaaatcccatcgctgagggctgggacccctcctcagtgcttatccctgtttccccgcgcgagtctggcgcctggcgtgtggaaggcgctcagtaaacgtttgtggagcgaagaaacgacgcaaaggtgatgagcacgacgcagttaggaggctattggccggcgcggggaaaggggaaggtcgg

SEQ ID NO: 78394 - DNA, 2625 bp, Homo sapiens
agtttcagtttccatttctgatttctgctctctgcgctgagcacagcggcaccaggctgagctaagcagggccgccttgggcaggcctacgtggtggtgcaggcgagacccaggctgggcaaggcgcagtttcagtttccatcttgggtctctgagctgagcagagtggcaccaggctgagttaagtgggactgccctgggcagacctacctactagagcagaatggagcttcggtcctaccaatgggaggtgatcatgcctgccctggagggcaagaatatcatcatctggctgcccacgggtgccgggaagacccgggcggctgcttatgtggccaagcggcacctagagactgtggatggagccaaggtggttgtattggtcaacagggtgcacctggtgacccagcatggtgaagagttcaggcgcatgctggatggacgctggaccgtgacaaccctgagtggggacatgggaccacgtgctggctttggccacctggcccggtgccatgacctgctcatctgcacagcagagcttctgcagatggcactgaccagccccgaggaggaggagcacgtggagctcactgtcttctccctgatcgtggtggatgagtgccaccacacgcacaaggacaccgtctacaacgtcatcatgagccagtacctagaacttaaactccagagggcacagccgctaccccaggtgctgggtctcacagcctccccaggcactggcggggcctccaaactcgatggggccatcaaccacgtcctgcagctctgtgccaacttggacacgtggtgcatcatgtcaccccagaactgctgcccccagctgcaggagcacagccaacagccttgcaaacagtacaacctctgccacaggcgcagccaggatccgtttggggacttgctgaagaagctcatggaccaaatccatgaccacctggagatgcctgagttgagccggaaatttgggacgcaaatgtatgagcagcaggtggtgaagctgagtgaggctgcggctttggctgggcttcaggagcaacgggtgtatgcgcttcacctgaggcgctacaatgacgcgctgctcatccatgacaccgtccgcgccgtggatgccttggctgcgctgcaggatttctatcacagggagcacgtcactaaaacccagatcctgtgtgccgagcgccggctgctggccctgttcgatgaccgcaagaatgagctggcccacttggcaactcatggcccagagaatccaaaactggagatgctggaaaagatcctgcaaaggcagttcagtagctctaacagccctcggggtatcatcttcacccgcacccgccaaagcgcacactccctcctgctctggctccagcagcagcagggcctgcagactgtggacatccgggcccagctactgattggggctgggaacagcagccagagcacccacatgacccagagggaccagcaagaagtgatccagaagttccaagatggaaccctgaaccttctggtggccacgagtgtggcggaggaggggctggacatcccacattgcaatgtggtggtgcgttatgggctcttgaccaatgaaatctccatggtccaggccaggggccgtgcccgggccgatcagagtgtatacgcgtttgtagcaactgaaggtagccgggagctgaagcgggagctgatcaacgaggcgctggagacgctgatggagcaggcagtggctgctgtgcagaaaatggaccaggccgagtaccaggccaagatccgggatctgcagcaggcagccttgaccaagcgggcggcccaggcagcccagcgggagaaccagcggcagcagttcccagtggagcacgtgcagctactctgcatcaactgcatggtggctgtgggccatggcagcgacctgcggaaggtggagggcacccaccatgtcaatgtgaaccccaacttctcgaactactataatgtctccagggatcctgtggtcatcaacaaagtcttcaaggactggaagcctgggggtgtcatcagctgcaggaactgtggggaggtctggggtctgcagatgatctacaagtcagtgaagctgccagtgctcaaagtccgcagcatgctgctggagacccctcaggggcggatccaggccaaaaagtggtcccgcgtgcccttctccgtgcctgactttgacttcctgcagcattgtgccgagaacttgtcggacctctccctggactgaccacctcattgctgcagtgcccggtttgggctgtagggggcgggagagtctgcagcagactccaggcccctccttcctgaatcatcagctgtgggcatcaggcccaccagccacacaggagtcctgggcaccctggcttaggctcccgcaatgggaaaacaaccggagggccagagcttagtccagacctaccttgtacgcacatagacattttcatatgcactggatggagttagggaaactgaggcaaaagaatttgccatactgtactcagaatcacgacattccttccctaccaaggccacttctattttttgaggctcctcataaaaataaatgaaaaaatgggatagaaaaaaaaaggt

SEQ ID NO: 78395 - DNA, 2572 bp, Homo sapiens
ttcttttctcttggttctttttcctggggcggggatgggagattcctaagtcggctcagctggctccttccctcagtttcagtttccatcttgggtctctgagctgagcagagtggcaccaggctgagttaagtgggactgccctgggcagacctacctactagagcagaatggagcttcggtcctaccaatgggaggtgatcatgcctgccctggagggcaagaatatcatcatctggctgcccacgggtgccgggaagacccgggcggctgcttatgtggccaagcggcacctagagactgtggatggagccaaggtggttgtattggtcaacagggtgcacctggtgacccagcatggtgaagagttcaggcgcatgctggatggacgctggaccgtgacaaccctgagtggggacatgggaccacgtgctggctttggccacctggcccggtgccatgacctgctcatctgcacagcagagcttctgcagatggcactgaccagccccgaggaggaggagcacgtggagctcactgtcttctccctgatcgtggtggatgagtgccaccacacgcacaaggacaccgtctacaacgtcatcatgagccagtacctagaacttaaactccagagggcacagccgctaccccaggtgctgggtctcacagcctccccaggcactggcggggcctccaaactcgatggggccatcaaccacgtcctgcagctctgtgccaacttggacacgtggtgcatcatgtcaccccagaactgctgcccccagctgcaggagcacagccaacagccttgcaaacagtacaacctctgccacaggcgcagccaggatccgtttggggacttgctgaagaagctcatggaccaaatccatgaccacctggagatgcctgagttgagccggaaatttgggacgcaaatgtatgagcagcaggtggtgaagctgagtgaggctgcggctttggctgggcttcaggagcaacgggtgtatgcgcttcacctgaggcgctacaatgacgcgctgctcatccatgacaccgtccgcgccgtggatgccttggctgcgctgcaggatttctatcacagggagcacgtcactaaaacccagatcctgtgtgccgagcgccggctgctggccctgttcgatgaccgcaagaatgagctggcccacttggcaactcatggcccagagaatccaaaactggagatgctggaaaagatcctgcaaaggcagttcagtagctctaacagccctcggggtatcatcttcacccgcacccgccaaagcgcacactccctcctgctctggctccagcagcagcagggcctgcagactgtggacatccgggcccagctactgattggggctgggaacagcagccagagcacccacatgacccagagggaccagcaagaagtgatccagaagttccaagatggaaccctgaaccttctggtggccacgagtgtggcggaggaggggctggacatcccacattgcaatgtggtggtgcgttatgggctcttgaccaatgaaatctccatggtccaggccaggggccgtgcccgggccgatcagagtgtatacgcgtttgtagcaactgaaggtagccgggagctgaagcgggagctgatcaacgaggcgctggagacgctgatggagcaggcagtggctgctgtgcagaaaatggaccaggccgagtaccaggccaagatccgggatctgcagcaggcagccttgaccaagcgggcggcccaggcagcccagcgggagaaccagcggcagcagttcccagtggagcacgtgcagctactctgcatcaactgcatggtggctgtgggccatggcagcgacctgcggaaggtggagggcacccaccatgtcaatgtgaaccccaacttctcgaactactataatgtctccagggatcctgtggtcatcaacaaagtcttcaaggactggaagcctgggggtgtcatcagctgcaggaactgtggggaggtctggggtctgcagatgatctacaagtcagtgaagctgccagtgctcaaagtccgcagcatgctgctggagacccctcaggggcggatccaggccaaaaagtggtcccgcgtgcccttctccgtgcctgactttgacttcctgcagcattgtgccgagaacttgtcggacctctccctggactgaccacctcattgctgcagtgcccggtttgggctgtagggggcgggagagtctgcagcagactccaggcccctccttcctgaatcatcagctgtgggcatcaggcccaccagccacacaggagtcctgggcaccctggcttaggctcccgcaatgggaaaacaaccggagggccagagcttagtccagacctaccttgtacgcacatagacattttcatatgcactggatggagttagggaaactgaggcaaaagaatttgccatactgtactcagaatcacgacattccttccctaccaaggccacttctattttttgaggctcctcataaaaataaatgaaaaaatgggatagaaaaaaaaaggt

SEQ ID NO: 78396 - DNA, 1156 bp, Homo sapiens
ctgcctttaaaaaaaaaaaagcgacaccagttgacctgagtggaagggactgtgaataatgagatttagaaaaagacagactagcccgtggaagatttgaaaggtcaggtgtgaaagtgtagcctttatccaggaggttcctcttaggaatcttggatagattttaaggaacagaatgtcagggcagatttatatttttagatccctctagcagttggtggaaggatggcttgggattgggagtaaaaatggaggcagagagacccataaggagactgtgaagaccaggtaaccgatgctgaggcttgaacctgggcacaagggaacgtgcgatggaggccacacaggtagaactcaccaaagattggatttcctggcctgggaagtctgtgcctcttaaccagcaggaaggcccaaggtccaggcagagacttggccggcaggagggcatgagatccggggctgaggagggtcaatgagggctgtggccaccccccttcctctccaggaactactataatgtctccagggatcctgtggtcatcaacaaagtcttcaaggactggaagcctgggggtgtcatcagctgcaggaactgtggggaggtctggggtctgcagatgatctacaagtcagtgaagctgccagtgctcaaagtccgcagcatgctgctggagacccctcaggggcggatccaggccaaaaagtggtcccgcgtgcccttctccgtgcctgactttgacttcctgcagcattgtgccgagaacttgtcggacctctccctggactgaccacctcattgctgcagtgcccggtttgggctgtagggggcgggagagtctgcagcagactccaggcccctccttcctgaatcatcagctgtgggcatcaggcccaccagccacacaggagtcctgggcaccctggcttaggctcccgcaatgggaaaacaaccggagggccagagcttagtccagacctaccttgtacgcacatagacattttcatatgcactggatggagttagggaaactgaggcaaaagaatttgccatactgtactcagaatcacgacattccttccctaccaaggccacttctattttttgaggctcctcataaaaataaatgaaaaaatgggatagaaaaaaaaaggt

SEQ ID NO: 78397 - DNA, 1375 bp, Homo sapiens
agggcagggggcggggctgtgggctgctcagaccctgcgccctattcccgcagcggctttggctgggcttcaggagcaacgggtgtatgcgcttcacctgaggcgctacaatgacgcgctgctcatccatgacaccgtccgcgccgtggatgccttggctgcgctgcaggatttctatcacagggagcacgtcactaaaacccagatcctgtgtgccgagcgccggctgctggccctgttcgatgagggaccagcaagaagtgatccagaagttccaagatggaaccctgaaccttctggtggccacgagtgtggcggaggaggggctggacatcccacattgcaatgtggtggtgcgttatgggctcttgaccaatgaaatctccatggtccaggccaggggccgtgcccgggccgatcagagtgtatacgcgtttgtagcaactgaaggtagccgggagctgaagcgggagctgatcaacgaggcgctggagacgctgatggagcaggcagtggctgctgtgcagaaaatggaccaggccgagtaccaggccaagatccgggatctgcagcaggcagccttgaccaagcgggcggcccaggcagcccagcgggagaaccagcggcagcagttcccagtggagcacgtgcagctactctgcatcaactgcatggtggctgtgggccatggcagcgacctgcggaaggtggagggcacccaccatgtcaatgtgaaccccaacttctcggatcctgtggtcatcaacaaagtcttcaaggactggaagcctgggggtgtcatcagctgcaggaactgtggggaggtctggggtctgcagatgatctacaagtcagtgaagctgccagtgctcaaagtccgcagcatgctgctggagacccctcaggggcggatccaggccaaaaagtggtcccgcgtgcccttctccgtgcctgactttgacttcctgcagcattgtgccgagaacttgtcggacctctccctggactgaccacctcattgctgcagtgcccggtttgggctgtagggggcgggagagtctgcagcagactccaggcccctccttcctgaatcatcagctgtgggcatcaggcccaccagccacacaggagtcctgggcaccctggcttaggctcccgcaatgggaaaacaaccggagggccagagcttagtccagacctaccttgtacgcacatagacattttcatatgcactggatggagttagggaaactgaggcaaaagaatttgccatactgtactcagaatcacgacattccttccctaccaaggccacttctattttttgaggctcctcataaaaataaatgaaaaaatgggatagaaaaaaaaaggt

SEQ ID NO: 78398 - DNA, 719 bp, Homo sapiens
agggcagggggcggggctgtgggctgctcagaccctgcgccctattcccgcagcggctttggctgggcttcaggagcaacgggtgtatgcgcttcacctgaggcgctacaatgacgcgctgctcatccatgacaccgtccgcgccgtggatgccttggctgcgctgcaggatttctatcacagggagcacgtcactaaaacccagatcctgtgtgccgagcgccggctgctggccctgttcgatgaccgcaagaatgagctggcccacttggcaactcatggcccttctccgtgcctgactttgacttcctgcagcattgtgccgagaacttgtcggacctctccctggactgaccacctcattgctgcagtgcccggtttgggctgtagggggcgggagagtctgcagcagactccaggcccctccttcctgaatcatcagctgtgggcatcaggcccaccagccacacaggagtcctgggcaccctggcttaggctcccgcaatgggaaaacaaccggagggccagagcttagtccagacctaccttgtacgcacatagacattttcatatgcactggatggagttagggaaactgaggcaaaagaatttgccatactgtactcagaatcacgacattccttccctaccaaggccacttctattttttgaggctcctcataaaaataaatgaaaaaatgggatagaaaaaaaaaggt

SEQ ID NO: 78399 - DNA, 2667 bp, Homo sapiens
actgctctggccaggagttgggatgagtggagggcccagtgggtctgagtcccctgccattcccagaatggagctgtggccctaccaatgggaggtgatcatgcctgccagggcgctggcgcagcagcagtacttaaccggagtttgtactcacggcagttggcgatgacttttcagtttccatcttgggtctctgagctgagcagagtggcaccaggctgagttaagtgggactgccctgggcagacctacctactagagcagaatggagcttcggtcctaccaatgggaggtgatcatgcctgccctggagggcaagaatatcatcatctggctgcccacgggtgccgggaagacccgggcggctgcttatgtggccaagcggcacctagagactgtggatggagccaaggtggttgtattggtcaacagggtgcacctggtgacccagcatggtgaagagttcaggcgcatgctggatggacgctggaccgtgacaaccctgagtggggacatgggaccacgtgctggctttggccacctggcccggtgccatgacctgctcatctgcacagcagagcttctgcagatggcactgaccagccccgaggaggaggagcacgtggagctcactgtcttctccctgatcgtggtggatgagtgccaccacacgcacaaggacaccgtctacaacgtcatcatgagccagtacctagaacttaaactccagagggcacagccgctaccccaggtgctgggtctcacagcctccccaggcactggcggggcctccaaactcgatggggccatcaaccacgtcctgcagctctgtgccaacttggacacgtggtgcatcatgtcaccccagaactgctgcccccagctgcaggagcacagccaacagccttgcaaacagtacaacctctgccacaggcgcagccaggatccgtttggggacttgctgaagaagctcatggaccaaatccatgaccacctggagatgcctgagttgagccggaaatttgggacgcaaatgtatgagcagcaggtggtgaagctgagtgaggctgcggctttggctgggcttcaggagcaacgggtgtatgcgcttcacctgaggcgctacaatgacgcgctgctcatccatgacaccgtccgcgccgtggatgccttggctgcgctgcaggatttctatcacagggagcacgtcactaaaacccagatcctgtgtgccgagcgccggctgctggccctgttcgatgaccgcaagaatgagctggcccacttggcaactcatggcccagagaatccaaaactggagatgctggaaaagatcctgcaaaggcagttcagtagctctaacagccctcggggtatcatcttcacccgcacccgccaaagcgcacactccctcctgctctggctccagcagcagcagggcctgcagactgtggacatccgggcccagctactgattggggctgggaacagcagccagagcacccacatgacccagagggaccagcaagaagtgatccagaagttccaagatggaaccctgaaccttctggtggccacgagtgtggcggaggaggggctggacatcccacattgcaatgtggtggtgcgttatgggctcttgaccaatgaaatctccatggtccaggccaggggccgtgcccgggccgatcagagtgtatacgcgtttgtagcaactgaaggtagccgggagctgaagcgggagctgatcaacgaggcgctggagacgctgatggagcaggcagtggctgctgtgcagaaaatggaccaggccgagtaccaggccaagatccgggatctgcagcaggcagccttgaccaagcgggcggcccaggcagcccagcgggagaaccagcggcagcagttcccagtggagcacgtgcagctactctgcatcaactgcatggtggctgtgggccatggcagcgacctgcggaaggtggagggcacccaccatgtcaatgtgaaccccaacttctcgaactactataatgtctccagggatcctgtggtcatcaacaaagtcttcaaggactggaagcctgggggtgtcatcagctgcaggaactgtggggaggtctggggtctgcagatgatctacaagtcagtgaagctgccagtgctcaaagtccgcagcatgctgctggagacccctcaggggcggatccaggccaaaaagtggtcccgcgtgcccttctccgtgcctgactttgacttcctgcagcattgtgccgagaacttgtcggacctctccctggactgaccacctcattgctgcagtgcccggtttgggctgtagggggcgggagagtctgcagcagactccaggcccctccttcctgaatcatcagctgtgggcatcaggcccaccagccacacaggagtcctgggcaccctggcttaggctcccgcaatgggaaaacaaccggagggccagagcttagtccagacctaccttgtacgcacatagacattttcatatgcactggatggagttagggaaactgaggcaaaagaatttgccatactgtactcagaatcacgacattccttccctaccaaggccacttctattttttgaggctcctcataaaaataaatgaaaaaatgggatagaaaaaaaaaggt

SEQ ID NO: 78400 - DNA, 389 bp, Homo sapiens
gttgtgaagggaagaaggaattcttacatcattgtggggactacttgaaagctgatgggaggaagggctttgcaaacataggtcacagccttcccccctgtgccctcagtcttctccctgatcgtggtggatgagtgccaccacacgcacaaggacaccgtctacaacgtcatcatgagccagtacctagaacttaaactccagagggcacagccgctaccccaggtgctgggtctcacagcctccccaggcactggcggggcctccaaactcgatggggccatcaaccacgtcctgcaggtcagcctggcccctgtgggcctcccactgccagacccaccagggacttccctccctccctgcctgccctgccactaccccgtccccac

SEQ ID NO: 78401 - DNA, 340 bp, Homo sapiens
gcaaagcttattttttcagttgtgggctctagtttggttgggaaactatttccttagacctgggtcacccctcgggctcccttaatctcccgccatatgttctccagaatcagggcatggtgttctgccctggtgcgactcagcccggttgctttgcacagactctgggccagggcaggatgtcggtgtttgccgggtgttcgccgggtgttatctgtggcgctcagtatggtgcatagtgtagacacgtgccctaggtggtgtttaattgatctgggtaagactcagccaaggcagggcacagtggctcacgtctataatcccagcactttgggaggct

SEQ ID NO: 78402 - DNA, 637 bp, Homo sapiens
gttttaaaacatttgtatgcaaaaatctcattcaaagcacaaagtcctttaaaatattttaacaataaatgtagctgaatgtctatttcttaacagtttgccaaaagtccctgcaacacccactcctgggcaccccccccccccgcccccaccccgtttcttagtctcttttggatcagcaccatttcactttaccccagtgctgacttacaaccaactgctgttccgttgtgtgtaattaaggagaattattattatctgcatttgatctcacaaagcatccacccgggaaaggttatagacagcagtgtattacagctcttaaaaaacgaatgtatacacttagactatggacccagcctcattttcacatttttttacttcagttccttaggaccagctcaatcgtcaagtggtcgcctgaccacttgaattccattttctgtgcataaatgcactttggggaaattgtctgtttgacccttattgggtagacatgaaaagaagatataattgtcatacttaaaaattatcttcccattatttctatttccagattggtgttggaaattaacaatattttatgaaggaaaaatataagtcagaggggaggtttaatcttagccttttgccaaaa

SEQ ID NO: 78403 - DNA, 261 bp, Homo sapiens
acgggtctcaagcctgaccttgggattggggatcacagatctccccccaaatgggagggaacttctcctaagggctgttggtgctttctaaaccaggttgaagtcagacaagccaccatcttgaagaaacctaccctgccccgtgtgccttatttttaagagttggattcacttcctttccctacagaccccaccagaaacacaaaccacctggttgcctgttgtcattgcggcccaactacatggctgacggggtcagtg

SEQ ID NO: 78404 - DNA, 558 bp, Homo sapiens
ttttttttttttcttgaatatttttgacctgcagttggttgaatctggggatatataatctatggatacagagtgctgactacatatccatattttatctagctatcttataaactgaaaagatttcccaaccttaaaaacatggacactaaaaaaaagcctcatattaattgtgatgttttacaaatcacaacatcagtacctcttatatatttcatctcattttaaatatggtctggtcacacttagggtcctttaaaataatgagatattgtataagaatatgcttaagaatagggatctgtatttgactgacaaagggtaattaaaatctatttctatctctatttaccaaataccctatctttaatgcatttttgtaaatctctggaaatcataatatagtcaaagttttaaaaagaagaccttaggctggacatggtggctcatgcctgtaatcacagcactctgggagggtgaggtgggtggactgtctgagcccagaattgaagaccagtgccggcaacatggcaaaacaccatctctacaaaaaaaaaa

SEQ ID NO: 78405 - DNA, 199 bp, Homo sapiens
ttttttttttttcttgaatatttttgacctgcagttggttgaatctggggatatataatctatggatacagagtgctgactacatatccatattttatctagctatcttataaactgaaaagatttcccaaccttaaaaacatgtccccgtacatcgttagaagcttgaattcgagcagtagtagtagtaggcggccgc

SEQ ID NO: 78406 - DNA, 551 bp, Homo sapiens
ttaggacacctcgtgcaaagctgctgacccccagcacacagaaagatagagcaggccaggtgggatcgcaggctgggcgacctggtggggatcaagacagagctctgagaccaacctgacagctagacttggcagtggctcccgcagccaggtgtctgcctgaaaaaagacaaaagggaaaactttgaaagtcgtaacctcattagaagttgttcaagaaagaccgtgcttagaaccagttgagtagataatggcagcagatgtaattgttgtggatgcttttagagtcccttggagtaatccttcttagtctcttaattccaggcttccagatacggagcctcagtgatgaagagacttgttcttgtccacagcaaaggttggtagaaaagcagatttagaatggagaattcttaacgcctactctagcattcacgtttccctgggaccatgttgtttctctagaggggaggaggattgtggcatctgcattaacacccggtcctgtgggcactcagagaacttaactgctgcatttgtggaacggaata

SEQ ID NO: 78407 - DNA, 765 bp, Homo sapiens
acaaggccttttaccattatataatgcccctctttgtttcttttaactgctgttgctttaaactttgttttgtctgttataagaatagctatccctgctgctcacttttggtgtccatttgcatgaaatgcctttttccacccctttactttaagtttatgggagtccttatgtgttaggtcctgtaggcaacggatagttggttgatgagttcttacccattctgcaattctgtatcttttcagtggaacatttaggccatttacattcaatgttagtattgaaacgtgaggtatctttgcattcatcatgctctttgttgcctgtgtactttgttttttttttggtttttgtttttgctttttagcatgtatttttgttttctagggcctgtgtgatgtatgctttgaagaggttctgctttgatgtgtttccaggatttgttaaaagatttagagctcctttcagcagttgttgtaggggtagcttggtaatggtgaattctctcagcatttgtttttctgaaaacgactgtatctttccttcatatatgatgcttagtttcactgaatacaaatttcctggctgataattgttttgtttgaggaggctgaagatagggccccaattcctcctagcttgtagagtttctgttgagaaatctgctattaatctgatgggttttctcctgtctcacagctcttaagattctttccttcaccttaactttggataacttgatgacaatgtgcctaggttaagatc

SEQ ID NO: 78408 - DNA, 436 bp, Homo sapiens
tcttggattctgtggttgctaggaaaattctgcctgcagtgatattgcgtggtcctagggctcaggcgaaaacagaatgttcctgagaagacgggaaggattcatagggcttcccaagcgagggtgccccatcctaggaagctggacaactcgtgtccctttctagatgcttatttcccttctgagcaatggaggttgtgctggtaaagccagaaccccatgaaggcgagctggcagtgggaggtgacaaggctcattcccttagcagcaccttggttctctagtgccaagtggaaggtgtgtcttgtgcattgcatccttgtagttgggccctccatctctggccctcccgacagctgggtgcgtcctccctctcttggtagagcagttggaaggaggtcagcacatgccggctgtgggggagacccggctcact

SEQ ID NO: 78409 - DNA, 411 bp, Homo sapiens
taaattgaatataaaatttaaaatatgcaatcaatatcaatcattataattgcataatgcaagccatgcttgtgaaatttttattttatattatgccatttggtaagaagattcaccagtctaaattatggtttcttaaattttgtagcacttttggtggcatatttcatgtggtaaaactacttgatgtttcacagaatggagataatattaacatcattaagattccacaagtatattcaaggaagattcttacttttagtattaatatattcaaggaaggttcttacatttctcactaattgtgggaaatgtctcttctctcagtctagtacagtatgtttcgatttctcacctaatgaagacaactttttcagagatggaaagtcaaataaatattcatctaaactc

SEQ ID NO: 78410 - DNA, 362 bp, Homo sapiens
gaaggtcaattccatcacgaggtggatcttttcatcttagccccaccaaaatatcccgaagtctaatatcgaatgggctaattcgcaagaaaaagcagcaacaggtacttaatttcaatctattctttcacctggtttcactaattgttaagaaagaaagaaatgcagatgagtatatagcagcttatggtttgtttctcatttgtttggtgtattaaatgagtatttctgatgcaaatctgtgatgactgcagaatacgaacattacttgaaagaatcttaactaaatgcaatattaaaatgcctccttgggtgactatcttatggggtggttttgtttctgatatcaaaaggctaacaaa

SEQ ID NO: 78411 - DNA, 142 bp, Homo sapiens
cgggtgtggcgccggcgtcctggggaggaggagcagcctctgcccgacccggctcgtgcggaccccaggaccgggcgcgggacgcgtgcgtccagcctccggcgctgcggagacccgcggctgggtccggggaggccccaaa

SEQ ID NO: 78412 - DNA, 322 bp, Homo sapiens
ttgtgtatttctggtgagtgtgggctactggagagattctgagagcttgtgagtttggccaggaggcagcagccaccgtgtagcacgtgtgcactgctgctcaactgctgactcatcccacctgtccaaaaacaatagctgggccatgtgtgtctcggctccatgacaaagggctccagcttccacagggtacctgatatggtttggctctgtgtccccacccaaatctcacctcgaattgtaataatccccacatgtcatgagagggagctggtggaaggtaattgaatcatgggggtgcgtttttcccatgctgttctca

SEQ ID NO: 78413 - DNA, 407 bp, Homo sapiens
aaattaacactggagtacggttgttcctaatttagtgcatcattgagcctcgcgtttcctgctctgtgggtttctgctatgtaaatattgcagtggtaatgcacaatctgtctccactttgtgccagtaacacttaaattaggtgtcgcctgaaggaagattttatgctagttgcagcattgtcagttaattatcttaaaggttatttgcaataataccgtttgcctctttttaagaggataggagggaaagttacatttataaatctatcctagaggtaatctctaaactcagcctgtgacttccagaaggagtaaagttttgatacctataatgcaaaattacttaggagaaagaatattgaaaatttattacagttctgaatattaaacattcccccctgcaaa

SEQ ID NO: 78414 - DNA, 592 bp, Homo sapiens
atgtgcaagggttccagtttcaccacatcctcaccaacacttattttctgtgatttttttaaataatagccatcctaataggtgtgaagtggtatcccactgtgattctgatgtgcgtttctctaatgattattgatgttgaacatctttccatgtgtttattggccatctgcgtatcttgtttggagaaatgtctatccagggccttggtccatttttttagcattttggtttttgtcacttgcatggcttttttcagtaattgctctaggtattacattgcatgtacataacttataagttataatccactggtattgccatttaaccaattccagcaaagcatagaaaccttacttcatgcccctttgccttacccagtttaaaatacttctttcaatattttctctacatacatttagaaccacatcagtgttttaacttttccttcagctatcaggtataatttttttttcttgttgacatggagttttgctcttgttgcccagactagagtgcaatggcgccatctcagctcactgcaacctccgccttccaggttcaagtgattctcctgcctcagcctcctgag

SEQ ID NO: 78415 - DNA, 430 bp, Homo sapiens
tcacatcatacacaaaactcaattctaaataaattgtaagtccccatctaaaaagacaatacatcttctagaagaaatcatagaatatttttgtttattcagggaaggaaaagatggtttaaatgggacagaaaagctaccaatgataaaggatatgattgattaaaatggactacattaacagtttaaaattctgaatttctcatcacagatactaagactaaaaatgcaaggcactgagtagatataaaaagtcagtcaatggatttgtacctagaatatataaagaactaattaataaaaaataggcatctaggctgggcatggtggcttacacctgtaatctcagcactttgggaggctgagcaggaggactgcttgagcccaggagtgtgggaccagcctgggccacacagtgagaccccatctc

SEQ ID NO: 78416 - DNA, 396 bp, Homo sapiens
cacaaaaggcacatgaaggaaaagaaaaagaaaaaaattgctggaaattaatagacagaaagtagactagtcaaagaggatctttcaactcctttacactgtggaagtaggggtttatgtcttgaatttaatgtccccttcatttacatatcttacattttataaaatctgtaataatgcccatgtctacagcctcttttctatgtaatcttagatttttaaaaaagcattgatagttaatttgttttgaaaataatggaccagctctaagctggagagcacagaagcagacagcaatttgttagcctgatatttttctttgtcttcctcttgttttttgaatgatcaaaaattggcacaattttagaaactttataatgaatagttttaaataat

SEQ ID NO: 78417 - DNA, 548 bp, Homo sapiens
ggaagcactcaagggtcatctttaccgtcccggagctggccttggcctgcgttcccactagctgttaaacccaacatgccaaacctggaagaacgctaatacatcaagcattggtgtacagcaggccttcgcttattataacctctaaagagcagtgagcccatttcaggccctctgtgagaggtcacaaggacctctgaatgaaaaaatatcaggattcaaaaaccattctgcagaaatcaacaggctgatcctaaaacgtacatggaaatgcaaaggacctaggatagtcaaaacccaacattattttgaaaaagaggaacaaaaatggagactgtacactacccaatttcaaaacttatcataaagttacaagtaaccacaatagcaacagacacataaatcaatggaacagaattgaaagccgagaaataaaccactacatttatgaccagttgattctgccaagggaattcaggaagaaaggatggtcttttcaacaaatgatgttgctacaactagaaatatgtgtgtttacaaaaaaaaaa

SEQ ID NO: 78418 - DNA, 534 bp, Homo sapiens
agggcagaattctagccagaagggggcgagggttacccagcccagtggagcatggagccgcccctctagttcccactgccaccgtgatgccatcagatgggagaaaacacagaactcgggatgaaacgtcacacggtctgggctaaagatcttgctctttaatttcccagcaggtaaccttgtggcagtcactaaccctctctacacctcaatgttctcatctgtaaaatggaaatgatgaccccttcccctctggaatgcactgaataaagcacgtgcaaggactcccggagcctgtgcagccttggtggcaaatatctcatctgccggcccccaggacaagtggtatgaccagtgataatgccccaaggacaaggggcgtgcctggcgcccagtggagtaatttatgccttagtcttgttttgaggtagaaatgcaagggggacacatgaaaggcatcagtccccctgtgcatagtacgacctttactgtcgtatttttgaaaaattaaaaatacagtgtttaaaaacaacc

SEQ ID NO: 78419 - DNA, 5018 bp, Homo sapiens
  misc_feature (44)..(44): n is a, c, g, or t
ggcacgaggccgcgccgaggaggctgccgctctggcttgccagncccccgccgccgctgcacaccggacccagccgccgtgccgcgggccatggacctgcccaggggcctggtggtggcctgggcgctcagcctgtggccagggttcacggacaccttcaacatggacaccaggaagccccgggtcatccctggctccaggaccgccttctttggctacacagtgcagcagcacgacatcagtggcaataagtggctggtcgtgggcgccccactggaaaccaatggctaccagaagacgggagacgtgtacaagtgtccagtgatccacgggaactgcaccaaactcaacctgggaagggtcaccctgtccaacgtgtccgagcggaaagacaacatgcgcctcggccttagtctcgccaccaaccccaaggacaacagcttcctggcctgcagccccctctggtctcatgagtgtgggagctcctactacaccacagggatgtgttcaagagtcaactccaacttcaggttctccaagaccgtggccccagctctccaaaggtgccagacctacatggacatcgtcattgtcctggatggctccaacagcatctacccctgggtggaggttcagcacttcctcatcaacatcctgaaaaagttttacattggcccagggcagatccaggttggagttgtgcagtatggcgaagatgtggtgcatgagtttcacctcaacgactacaggtctgtaaaagatgtggtggaagctgccagccacattgagcagagaggaggaacagagacccggacggcatttggcattgaatttgcacgctcagaggctttccagaagggtggaaggaaaggagccaagaaggtgatgattgtcatcacagatggggagtcccacgacagcccagacctggagaaggtgatccagcaaagcgaaagagacaacgtaacaagatatgcggtggccgtcctgggctactacaaccgcagggggatcaatccagaaacttttctaaatgaaatcaaatacatcgccagtgaccctgatgacaagcacttcttcaatgtcactgatgaggctgccttgaaggacattgtcgatgccctgggggacagaatcttcagcctggaaggcaccaacaagaacgagacctcctttgggctggagatgtcacagacgggcttttcctcgcacgtggtggaggatggggttctgctgggagccgtcggtgcctatgactggaatggagctgtgctaaaggagacgagtgccgggaaggtcattcctctccgcgagtcctacctgaaagagttccccgaggagctcaagaaccatggtgcatacctggggtacacagtcacatcggtcgtgtcctccaggcaggggcgagtgtacgtggccggagccccccggttcaaccacacgggcaaggtcatcctgttcaccatgcacaacaaccggagcctcaccatccaccaggctatgcggggccagcagataggctcttactttgggagtgaaatcacctcggtggacatcgacggcgacggcgtgactgatgtcctgctggtgggcgcacccatgtacttcaacgagggccgtgagcgaggcaaggtgtacgtctatgagctgagacagaaccggtttgtttataacggaacgctaaaggattcacacagttaccagaatgcccgatttgggtcctccattgcctcagttcgagacctcaaccaggattcctacaatgacgtggtggtgggagcccccctggaggacaaccacgcaggagccatctacatcttccacggcttccgaggcagcatcctgaagacacctaagcagagaatcacagcctcagagctggctaccggcctccagtattttggctgcagcatccacgggcaattggacctcaatgaggatgggctcatcgacctggcagtgggagcccttggcaacgctgtgattctgtggtcccgcccagtggttcagatcaatgccagcctccactttgagccatccaagatcaacatcttccacagagactgcaagcgcagtggcagggatgccacctgcctggccgccttcctctgcttcacgcccatcttcctggcaccccatttccaaacaacaactgttggcatcagatacaacgccaccatggatgagaggcggtatacaccgagggcccacctggacgagggcggggaccgattcaccaacagagccgtactgctctcctccggccaggagctctgtgagcggatcaacttccatgtcctggacactgctgactacgtgaagccagtgaccttctcagtcgagtattccctggaggaccctgaccatggccccatgctggacgacggctggcccaccactctcagagtctcggtgcccttctggaacggctgcaatgaggatgagcactgtgtccctgaccttgtgttggatgcccggagtgacctgcccacggccatggagtactgccagagggtgctgaggaagcctgcgcaggactgctccgcatacacgctgtccttcgacaccacagtcttcatcatagagagcacacgccagcgagtggcggtggaggccacactggagaacaggggcgagaacgcctacagcacggtcctaaatatctcgcagtcagcaaacctgcagtttgccagcttgatccagaaggaggactcagacggtagcattgagtgtgtgaacgaggagaggaggctccagaagcaagtctgcaacgtcagctatcccttcttccgggccaaggccaaggtggctttccgtcttgattttgagttcagcaaatccatcttcctacaccacctggagatcgagctcgctgcaggcagtgacagtaatgagcgggacagcaccaaggaagacaacgtggcccccttacgcttccacctcaaatacgaggctgacgtcctcttcaccaggagcagcagcctgagccactacgaggtcaagctcaacagctcgctggagagatacgatggtatcgggcctcccttcagctgcatcttcaggatccagaacttgggcttgttccccatccacgggatgatgatgaagatcaccattcccatcgccaccaggagcggcaaccgcctactgaagctgagggacttcctcacggacgaggcgaacacgtcctgtaacatctggggcaatagcactgagtaccggcccaccccagtggaggaagacttgcgtcgtgctccacagctgaatcacagcaactctgatgtcgtctccatcaactgcaatatacggctggtccccaaccaggaaatcaatttccatctactggggaacctgtggttgaggtccctaaaagcactcaagtacaaatccatgaaaatcatggtcaacgcagccttgcagaggcagttccacagccccttcatcttccgtgaggaggatcccagccgccagatcgtgtttgagatctccaagcaagaggactggcaggtccccatctggatcattgtaggcagcaccctggggggcctcctactgctggccctgctggtcctggcactgtggaagctcggcttctttagaagtgccaggcgcaggagggagcctggtctggaccccacccccaaagtgctggagtgaggctccagaggagactttgagttgatgggggccaggacaccagtccaggtagtgttgagacccaggcctgtggccccaccgagctggagcggagaggaagccagctggctttgcacttgacctcatctcccgagcaatggcgcctgctccctccagaatggaactcaagctggttttaagtggaactgccctactgggagactgggacacctttaacacagacccctagggatttaaagggacacccctacacacacccaggcccacgccaaggcctccctcaggctctgtggagggcatttgctgccccagctactaaggtgctaggaattcgtaatcatccccatcctccagagaaacccagggaggaagactgtaaatacgaacccaatctgcacactccaggcctctagttccagaaggatccaagacaaaacagatctgaattctgcccttttctctcacccatcccacccctccattggctcccaagtcacacccactcccttccccatagataggcccctggggctcccgaagaatgaacccaagagcaagggcttgatggtgacagctgcaagccagggatgaagaaagactctgagatgtggagactgatggccaggcaagtgggaccaggatactggacgctgtcctgagatgagaggtagccgggctctgcacccacgtgcattcacattgaccgcaactcacacattcccccaccagctgcagccccttgctctcagctgccaaccctcccgggtcacttttgttcccaggtacctcatgggaagcatgtggatgacacaatccctggggctgtgcattcccacgtcttcttgctgcagcctgcccctagacatggacgcaccggcctggctgcagctgggcagcaggggtaggggtagggagcctcccctccctgtatcaccccctccctacacacacacacacacacacacacacacacacacacacacacacacacacacacacacacacactgcctcccatccttccctcatgcccgccagtgcacagggaagggcttggccagcgctgttgaggggtcccctctggaatgcactgaataaagcacgtgcaaggactcccggagcctgtgcagccttggtggcaaatatctcatctgccggcccccaggacaagtggtatgaccagtgataatgccccaaggacaaggggcgtgcctggcgcccagtggagtaatttatgccttagtcttgttttgaggtagaaatgcaagggggacacatgaaaggcatcagtccccctgtgcatagtacgacctttactgtcgtatttttgaaaaattaaaaatacagtgtttaaaaacaacc

SEQ ID NO: 78420 - DNA, 4110 bp, Homo sapiens
  misc_feature (44)..(44): n is a, c, g, or t
ggcacgaggccgcgccgaggaggctgccgctctggcttgccagncccccgccgccgctgcacaccggacccagccgccgtgccgcgggccatggacctgcccaggggcctggtggtggcctgggcgctcagcctgtggccagggttcacggacaccttcaacatggacaccaggaagccccgggtcatccctggctccaggaccgccttctttggctacacagtgcagcagcacgacatcagtggcaataagtggctggtcgtgggcgccccactggaaaccaatggctaccagaagacgggagacgtgtacaagtgtccagtgatccacgggaactgcaccaaactcaacctgggaagggtcaccctgtccaacgtgtccgagcggaaagacaacatgcgcctcggccttagtctcgccaccaaccccaaggacaacagcttcctggcctgcagccccctctggtctcatgagtgtgggagctcctactacaccacagggatgtgttcaagagtcaactccaacttcaggttctccaagaccgtggccccagctctccaaaggtgccagacctacatggacatcgtcattgtcctggatggctccaacagcatctacccctgggtggaggttcagcacttcctcatcaacatcctgaaaaagttttacattggcccagggcagatccaggttggagttgtgcagtatggcgaagatgtggtgcatgagtttcacctcaacgactacaggtctgtaaaagatgtggtggaagctgccagccacattgagcagagaggaggaacagagacccggacggcatttggcattgaatttgcacgctcagaggctttccagaagggtggaaggaaaggagccaagaaggtgatgattgtcatcacagatggggagtcccacgacagcccagacctggagaaggtgatccagcaaagcgaaagagacaacgtaacaagatatgcggtggccgtcctgggctactacaaccgcagggggatcaatccagaaacttttctaaatgaaatcaaatacatcgccagtgaccctgatgacaagcacttcttcaatgtcactgatgaggctgccttgaaggacattgtcgatgccctgggggacagaatcttcagcctggaaggcaccaacaagaacgagacctcctttgggctggagatgtcacagacgggcttttcctcgcacgtggtggaggatggggttctgctgggagccgtcggtgcctatgactggaatggagctgtgctaaaggagacgagtgccgggaaggtcattcctctccgcgagtcctacctgaaagagttccccgaggagctcaagaaccatggtgcatacctggggtacacagtcacatcggtcgtgtcctccaggcaggggcgagtgtacgtggccggagccccccggttcaaccacacgggcaaggtcatcctgttcaccatgcacaacaaccggagcctcaccatccaccaggctatgcggggccagcagataggctcttactttgggagtgaaatcacctcggtggacatcgacggcgacggcgtgactgatgtcctgctggtgggcgcacccatgtacttcaacgagggccgtgagcgaggcaaggtgtacgtctatgagctgagacagaaccggtttgtttataacggaacgctaaaggattcacacagttaccagaatgcccgatttgggtcctccattgcctcagttcgagacctcaaccaggattcctacaatgacgtggtggtgggagcccccctggaggacaaccacgcaggagccatctacatcttccacggcttccgaggcagcatcctgaagacacctaagcagagaatcacagcctcagagctggctaccggcctccagtattttggctgcagcatccacgggcaattggacctcaatgaggatgggctcatcgacctggcagtgggagcccttggcaacgctgtgattctgtggtcccgcccagtggttcagatcaatgccagcctccactttgagccatccaagatcaacatcttccacagagactgcaagcgcagtggcagggatgccacctgcctggccgccttcctctgcttcacgcccatcttcctggcaccccatttccaaacaacaactgttggcatcagatacaacgccaccatggatgagaggcggtatacaccgagggcccacctggacgagggcggggaccgattcaccaacagagccgtactgctctcctccggccaggagctctgtgagcggatcaacttccatgtcctggacactgctgactacgtgaagccagtgaccttctcagtcgagtattccctggaggaccctgaccatggccccatgctggacgacggctggcccaccactctcagagtctcggtgcccttctggaacggctgcaatgaggatgagcactgtgtccctgaccttgtgttggatgcccggagtgacctgcccacggccatggagtactgccagagggtgctgaggaagcctgcgcaggactgctccgcatacacgctgtccttcgacaccacagtcttcatcatagagagcacacgccagcgagtggcggtggaggccacactggagaacaggggcgagaacgcctacagcacggtcctaaatatctcgcagtcagcaaacctgcagtttgccagcttgatccagaaggaggactcagacggtagcattgagtgtgtgaacgaggagaggaggctccagaagcaagtctgcaacgtcagctatcccttcttccgggccaaggccaaggtggctttccgtcttgattttgagttcagcaaatccatcttcctacaccacctggagatcgagctcgctgcaggcagtgacagtaatgagcgggacagcaccaaggaagacaacgtggcccccttacgcttccacctcaaatacgaggctgacgtcctcttcaccaggagcagcagcctgagccactacgaggtcaagctcaacagctcgctggagagatacgatggtatcgggcctcccttcagctgcatcttcaggatccagaacttgggcttgttccccatccacgggatgatgatgaagatcaccattcccatcgccaccaggagcggcaaccgcctactgaagctgagggacttcctcacggacgaggcgaacacgtcctgtaacatctggggcaatagcactgagtaccggcccaccccagtggaggaagacttgcgtcgtgctccacagctgaatcacagcaactctgatgtcgtctccatcaactgcaatatacggctggtccccaaccaggaaatcaatttccatctactggggaacctgtggttgaggtccctaaaagcactcaagtacaaatccatgaaaatcatggtcaacgcagccttgcagaggcagttccacagccccttcatcttccgtgaggaggatcccagccgccagatcgtgtttgagatctccaagcaagaggactggcaggtccccatctggatcattgtaggcagcaccctggggggcctcctactgctggccctgctggtcctggcactgtggaagctcggcttctttagaagtgccaggcgcaggagggagcctggtctggaccccacccccaaagtgctggagtgaggctccagaggagactttgagttgatgggggccaggacaccagtccaggtagtgttgagacccaggcctgtggccccaccgagctggagcggagaggaagccagctggctttgcacttgacctcatctcccgagcaatggcgcctgctccctccagaatggaactcaagctggttttaagtggaactgccctactgggagactgggacacctttaacacagacccctagggatttaaagggacacccctacacacacccaggcccacgccaaggcctccctcaggctctgtggagggcatttgctgccccagctactaaggtgctaggaattcgtaatcatccccatcctccagagaaacccagggaggaagactgtaaatacgaacccaatctgcacactccaggctcccctctggaatgcactgaataaagcacgtgcaaggactcccgga

SEQ ID NO: 78421 - DNA, 3391 bp, Homo sapiens
cctccatcttctcactccattctcccacagcagccagggcagccttcagcatgcaggtctgtcaggacattccctgcctgaggcattcggcgactcctaccagttgcaaggaatgaccccaaggccctgtcacaggcccctgaccatctcttcctctctcccacccctgtgtctcttaccacagcaacactgacccacctatcatttcccagactcaccgtcccgctcctgccccagggcccctgcatcaggccgtccttcctcctggacttcaccacctccatcccggtccacacagctaccttgaccgtccttcagaactctgatcccctgtcacttcctcgggcttccctgacttcctacaggccggtttttttgcacattttacactagtgatttgttcatacaccaatcttccccttgagctgagggcagaagctgcatctttcttgttttgtatccccagtacaaaagcccttgcccacacacagtagatgatcaataaatgttgaccagaaccgctctgctgggtgagtgggggtgggggttctgtgccatcagctcagttatgaactgaaggggagccaggaggagctgagctttgagcatcgttttaaagagggaagcatctatggaaaagcacaagacagagcagtgtggtgtctggggacagtgcaggaaagccagcccatgtctagtgtggtggagacagagctggtgtacattgagggcgaggggctgcgggtccctacccagctgcccacacctggctctccctggcccaggtgcccttctggaacggctgcaatgaggatgagcactgtgtccctgaccttgtgttggatgcccggagtgacctgcccacggccatggagtactgccagagggtgctgaggaagcctgcgcaggactgctccgcatacacgctgtccttcgacaccacagtcttcatcatagagagcacacgccagcgagtggcggtggaggccacactggagaacaggggcgagaacgcctacagcacggtcctaaatatctcgcagtcagcaaacctgcagtttgccagcttgatccagaaggaggactcagacggtagcattgagtgtgtgaacgaggagaggaggctccagaagcaagtctgcaacgtcagctatcccttcttccgggccaaggccaaggtggctttccgtcttgattttgagttcagcaaatccatcttcctacaccacctggagatcgagctcgctgcaggcagtgacagtaatgagcgggacagcaccaaggaagacaacgtggcccccttacgcttccacctcaaatacgaggctgacgtcctcttcaccaggagcagcagcctgagccactacgaggtcaagctcaacagctcgctggagagatacgatggtatcgggcctcccttcagctgcatcttcaggatccagaacttgggcttgttccccatccacgggatgatgatgaagatcaccattcccatcgccaccaggagcggcaaccgcctactgaagctgagggacttcctcacggacgaggcgaacacgtcctgtaacatctggggcaatagcactgagtaccggcccaccccagtggaggaagacttgcgtcgtgctccacagctgaatcacagcaactctgatgtcgtctccatcaactgcaatatacggctggtccccaaccaggaaatcaatttccatctactggggaacctgtggttgaggtccctaaaagcactcaagtacaaatccatgaaaatcatggtcaacgcagccttgcagaggcagttccacagccccttcatcttccgtgaggaggatcccagccgccagatcgtgtttgagatctccaagcaagaggactggcaggtccccatctggatcattgtaggcagcaccctggggggcctcctactgctggccctgctggtcctggcactgtggaagctcggcttctttagaagtgccaggcgcaggagggagcctggtctggaccccacccccaaagtgctggagtgaggctccagaggagactttgagttgatgggggccaggacaccagtccaggtagtgttgagacccaggcctgtggccccaccgagctggagcggagaggaagccagctggctttgcacttgacctcatctcccgagcaatggcgcctgctccctccagaatggaactcaagctggttttaagtggaactgccctactgggagactgggacacctttaacacagacccctagggatttaaagggacacccctacacacacccaggcccacgccaaggcctccctcaggctctgtggagggcatttgctgccccagctactaaggtgctaggaattcgtaatcatccccatcctccagagaaacccagggaggaagactgtaaatacgaacccaatctgcacactccaggcctctagttccagaaggatccaagacaaaacagatctgaattctgcccttttctctcacccatcccacccctccattggctcccaagtcacacccactcccttccccatagataggcccctggggctcccgaagaatgaacccaagagcaagggcttgatggtgacagctgcaagccagggatgaagaaagactctgagatgtggagactgatggccaggcaagtgggaccaggatactggacgctgtcctgagatgagaggtagccgggctctgcacccacgtgcattcacattgaccgcaactcacacattcccccaccagctgcagccccttgctctcagctgccaaccctcccgggtcacttttgttcccaggtacctcatgggaagcatgtggatgacacaatccctggggctgtgcattcccacgtcttcttgctgcagcctgcccctagacatggacgcaccggcctggctgcagctgggcagcaggggtaggggtagggagcctcccctccctgtatcaccccctccctacacacacacacacacacacacacacacacacacacacacacacacacacacacacacacacactgcctcccatccttccctcatgcccgccagtgcacagggaagggcttggccagcgctgttgaggggtcccctctggaatgcactgaataaagcacgtgcaaggactcccggagcctgtgcagccttggtggcaaatatctcatctgccggcccccaggacaagtggtatgaccagtgataatgccccaaggacaaggggcgtgcctggcgcccagtggagtaatttatgccttagtcttgttttgaggtagaaatgcaagggggacacatgaaaggcatcagtccccctgtgcatagtacgacctttactgtcgtatttttgaaaaattaaaaatacagtgtttaaaaacaacc

SEQ ID NO: 78422 - DNA, 2806 bp, Homo sapiens
  misc_feature (44)..(44): n is a, c, g, or t
ggcacgaggccgcgccgaggaggctgccgctctggcttgccagncccccgccgccgctgcacaccggacccagccgccgtgccgcgggccatggacctgcccaggggcctggtggtggcctgggcgctcagcctgtggccagggttcacggacaccttcaacatggacaccaggaagccccgggtcatccctggctccaggaccgccttctttggctacacagtgcagcagcacgacatcagtggcaataagtggctggtcgtgggcgccccactggaaaccaatggctaccagaagacgggagacgtgtacaagtgtccagtgatccacgggaactgcaccaaactcaacctgggaagggtcaccctgtccaacgtgtccgagcggaaagacaacatgcgcctcggccttagtctcgccaccaaccccaaggacaacagcttcctggcctgcagccccctctggtctcatgagtgtgggagctcctactacaccacagggatgtgttcaagagtcaactccaacttcaggttctccaagaccgtggccccagctctccaaaggtgccagacctacatggacatcgtcattgtcctggatggctccaacagcatctacccctgggtggaggttcagcacttcctcatcaacatcctgaaaaagttttacattggcccagggcagatccaggttggagttgtgcagtatggcgaagatgtggtgcatgagtttcacctcaacgactacaggtctgtaaaagatgtggtggaagctgccagccacattgagcagagaggaggaacagagacccggacggcatttggcattgaatttgcacgctcagaggctttccagaagggtggaaggaaaggagccaagaaggtgatgattgtcatcacagatggggagtcccacgacagcccagacctggagaaggtgatccagcaaagcgaaagagacaacgtaacaagatatgcggtggccgtcctgggctactacaaccgcagggggatcaatccagaaacttttctaaatgaaatcaaatacatcgccagtgaccctgatgacaagcacttcttcaatgtcactgatgaggctgccttgaaggacattgtcgatgccctgggggacagaatcttcagcctggaaggcaccaacaagaacgagacctcctttgggctggagatgtcacagacgggcttttcctcgcacgtggtggaggatggggttctgctgggagccgtcggtgcctatgactggaatggagctgtgctaaaggagacgagtgccgggaaggtcattcctctccgcgagtcctacctgaaagagttccccgaggagctcaagaaccatggtgcatacctggggtacacagtcacatcggtcgtgtcctccaggcaggggcgagtgtacgtggccggagccccccggttcaaccacacgggcaaggtcatcctgttcaccatgcacaacaaccggagcctcaccatccaccaggctatgcggggccagcagataggctcttactttgggagtgaaatcacctcggtggacatcgacggcgacggcgtgactgatgtcctgctggtgggcgcacccatgtacttcaacgagggccgtgagcgaggcaaggtgtacgtctatgagctgagacagaaccggtttgtttataacggaacgctaaaggattcacacagttaccagaatgcccgatttgggtcctccattgcctcagttcgagacctcaaccaggattcctacaatgacgtggtggtgggagcccccctggaggacaaccacgcaggagccatctacatcttccacggcttccgaggcagcatcctgaagacacctaagcagagaatcacagcctcagagctggctaccggcctccagtattttggctgcagcatccacgggcaattggacctcaatgaggatgggctcatcgacctggcagtgggagcccttggcaacgctgtgattctgtggtcccgcccagtggttcagatcaatgccagcctccactttgagccatccaagatcaacatcttccacagagactgcaagcgcagtggcagggatgccacctgcctggccgccttcctctgcttcacgcccatcttcctggcaccccatttccaaacaacaactgttggcatcagatacaacgccaccatggatgagaggcggtatacaccgagggcccacctggacgagggcggggaccgattcaccaacagagccgtactgctctcctccggccaggagctctgtgagcggatcaacttccatgtcctggacactgctgactacgtgaagccagtgaccttctcagtcgagtattccctggaggaccctgaccatggccccatgctggacgacggctggcccaccactctcagagtctcggtgcccttctggaacggctgcaatgaggatgagcactgtgtccctgaccttgtgttggatgcccggagtgacctgcccacggccatggagtactgccagagggtgctgaggaagcctgcgcaggactgctccgcatacacgctgtccttcgacaccacagtcttcatcatagagagcacacgccagcgagtggcggtggaggccacactggagaacaggggcgagaacgcctacagcacggtcctaaatatctcgcagtcagcaaacctgcagtttgccagcttgatccagaaggaggactcagacggtagcattgagtgtgtgaacgaggagaggagaaggggtgtgtaccaggctatgatttctcttgcattaaaatgtattattatttaaa

SEQ ID NO: 78423 - DNA, 2551 bp, Homo sapiens
  misc_feature (44)..(44): n is a, c, g, or t
  misc_feature (2511)..(2511): n is a, c, g, or t
  misc_feature (2525)..(2525): n is a, c, g, or t
  misc_feature (2531)..(2532): n is a, c, g, or t
  misc_feature (2534)..(2535): n is a, c, g, or t
ggcacgaggccgcgccgaggaggctgccgctctggcttgccagncccccgccgccgctgcacaccggacccagccgccgtgccgcgggccatggacctgcccaggggcctggtggtggcctgggcgctcagcctgtggccagggttcacggacaccttcaacatggacaccaggaagccccgggtcatccctggctccaggaccgccttctttggctacacagtgcagcagcacgacatcagtggcaataagtggctggtcgtgggcgccccactggaaaccaatggctaccagaagacgggagacgtgtacaagtgtccagtgatccacgggaactgcaccaaactcaacctgggaagggtcaccctgtccaacgtgtccgagcggaaagacaacatgcgcctcggccttagtctcgccaccaaccccaaggacaacagcttcctggcctgcagccccctctggtctcatgagtgtgggagctcctactacaccacagggatgtgttcaagagtcaactccaacttcaggttctccaagaccgtggccccagctctccaaaggtgccagacctacatggacatcgtcattgtcctggatggctccaacagcatctacccctgggtggaggttcagcacttcctcatcaacatcctgaaaaagttttacattggcccagggcagatccaggttggagttgtgcagtatggcgaagatgtggtgcatgagtttcacctcaacgactacaggtctgtaaaagatgtggtggaagctgccagccacattgagcagagaggaggaacagagacccggacggcatttggcattgaatttgcacgctcagaggctttccagaagggtggaaggaaaggagccaagaaggtgatgattgtcatcacagatggggagtcccacgacagcccagacctggagaaggtgatccagcaaagcgaaagagacaacgtaacaagatatgcggtggccgtcctgggctactacaaccgcagggggatcaatccagaaacttttctaaatgaaatcaaatacatcgccagtgaccctgatgacaagcacttcttcaatgtcactgatgaggctgccttgaaggacattgtcgatgccctgggggacagaatcttcagcctggaaggcaccaacaagaacgagacctcctttgggctggagatgtcacagacgggcttttcctcgcacgtggtggaggatggggttctgctgggagccgtcggtgcctatgactggaatggagctgtgctaaaggagacgagtgccgggaaggtcattcctctccgcgagtcctacctgaaagagttccccgaggagctcaagaaccatggtgcatacctggggtacacagtcacatcggtcgtgtcctccaggcaggggcgagtgtacgtggccggagccccccggttcaaccacacgggcaaggtcatcctgttcaccatgcacaacaaccggagcctcaccatccaccaggctatgcggggccagcagataggctcttactttgggagtgaaatcacctcggtggacatcgacggcgacggcgtgactgatgtcctgctggtgggcgcacccatgtacttcaacgagggccgtgagcgaggcaaggtgtacgtctatgagctgagacagaaccggtttgtttataacggaacgctaaaggattcacacagttaccagaatgcccgatttgggtcctccattgcctcagttcgagacctcaaccaggattcctacaatgacgtggtggtgggagcccccctggaggacaaccacgcaggagccatctacatcttccacggcttccgaggcagcatcctgaagacacctaagcagagaatcacagcctcagagctggctaccggcctccagtattttggctgcagcatccacgggcaattggacctcaatgaggatgggctcatcgacctggcagtgggagcccttggcaacgctgtgattctgtggtcccgcccagtggttcagatcaatgccagcctccactttgagccatccaagatcaacatcttccacagagactgcaagcgcagtggcagggatgccacctgcctggccgccttcctctgcttcacgcccatcttcctggcaccccatttccaaacaacaactgttggcatcagatacaacgccaccatggatgagaggcggtatacaccgagggcccacctggacgagggcggggaccgattcaccaacagagccgtactgctctcctccggccaggagctctgtgagcggatcaacttccatgtcctggacactgctgactacgtgaagccagtgaccttctcagtcgagtattccctggaggaccctgaccatggccccatgctggacgacggctggcccaccactctcagagtctcggtgcccttctggaacggctgcaatgaggatgagcactgtgtccctgaccttgtgttggatgcccggagtgacctgcccacggccatggagtactgccanagggtgctgaggancatacnntnncgcgcttataggacgc

SEQ ID NO: 78424 - DNA, 1103 bp, Homo sapiens
cctccatcttctcactccattctcccacagcagccagggcagccttcagcatgcaggtctgtcaggacattccctgcctgaggcattcggcgactcctaccagttgcaaggaatgaccccaaggccctgtcacaggcccctgaccatctcttcctctctcccacccctgtgtctcttaccacagcaacactgacccacctatcatttcccagactcaccgtcccgctcctgccccagggcccctgcatcaggccgtccttcctcctggacttcaccacctccatcccggtccacacagctaccttgaccgtccttcagaactctgatcccctgtcacttcctcgggcttccctgacttcctacaggccggtttttttgcacattttacactagtgatttgttcatacaccaatcttccccttgagctgagggcagaagctgcatctttcttgttttgtatccccagtacaaaagcccttgcccacacacagtagatgatcaataaatgttgaccagaaccgctctgctgggtgagtgggggtgggggttctgtgccatcagctcagttatgaactgaaggggagccaggaggagctgagctttgagcatcgttttaaagagggaagcatctatggaaaagcacaagacagagcagtgtggtgtctggggacagtgcaggaaagccagcccatgtctagtgtggtggagacagagctggtgtacattgagggcgaggggctgcgggtccctacccagctgcccacacctggctctccctggcccaggtgcccttctggaacggctgcaatgaggatgagcactgtgtccctgaccttgtgttggatgcccggagtgacctgcccacggccatgtgagttggctccttccacccccaccctcgccccttccccttcactgccagaggctctggggctcctggggccctggattatttcctggacatcctcctcacaggcagcatggatcaaacattgcacttggagcctgcgttctagcccaggctctgccaccaactcctgcataacctcaggaaagtctcttctgtaatatgaaactactagtctaatctaatttcaaatttt

SEQ ID NO: 78425 - DNA, 4986 bp, Homo sapiens
  misc_feature (44)..(44): n is a, c, g, or t
ggcacgaggccgcgccgaggaggctgccgctctggcttgccagncccccgccgccgctgcacaccggacccagccgccgtgccgcgggccatggacctgcccaggggcctggtggtggcctgggcgctcagcctgtggccagggttcacggacaccttcaacatggacaccaggaagccccgggtcatccctggctccaggaccgccttctttggctacacagtgcagcagcacgacatcagtggcaataagtggctggtcgtgggcgccccactggaaaccaatggctaccagaagacgggagacgtgtacaagtgtccagtgatccacgggaactgcaccaaactcaacctgggaagggtcaccctgtccaacgtgtccgagcggaaagacaacatgcgcctcggccttagtctcgccaccaaccccaaggacaacagcttcctggcctgcagccccctctggtctcatgagtgtgggagctcctactacaccacagggatgtgttcaagagtcaactccaacttcaggttctccaagaccgtggccccagctctccaaaggtgccagacctacatggacatcgtcattgtcctggatggctccaacagcatctacccctgggtggaggttcagcacttcctcatcaacatcctgaaaaagttttacattggcccagggcagatccaggttggagttgtgcagtatggcgaagatgtggtgcatgagtttcacctcaacgactacaggtctgtaaaagatgtggtggaagctgccagccacattgagcagagaggaggaacagagacccggacggcatttggcattgaatttgcacgctcagaggctttccagaagggtggaaggaaaggagccaagaaggtgatgattgtcatcacagatggggagtcccacgacagcccagacctggagaaggtgatccagcaaagcgaaagagacaacgtaacaagatatgcggtggccgtcctgggctactacaaccgcagggggatcaatccagaaacttttctaaatgaaatcaaatacatcgccagtgaccctgatgacaagcacttcttcaatgtcactgatgaggctgccttgaaggacattgtcgatgccctgggggacagaatcttcagcctggaaggcaccaacaagaacgagacctcctttgggctggagatgtcacagacgggcttttcctcgcacgtggtggaggatggggttctgctgggagccgtcggtgcctatgactggaatggagctgtgctaaaggagacgagtgccgggaaggtcattcctctccgcgagtcctacctgaaagagttccccgaggagctcaagaaccatggtgcatacctggggtacacagtcacatcggtcgtgtcctccaggcaggggcgagtgtacgtggccggagccccccggttcaaccacacgggcaaggtcatcctgttcaccatgcacaacaaccggagcctcaccatccaccaggctatgcggggccagcagataggctcttactttgggagtgaaatcacctcggtggacatcgacggcgacggcgtgactgatgtcctgctggtgggcgcacccatgtacttcaacgagggccgtgagcgaggcaaggtgtacgtctatgagctgagacagaaccggtttgtttataacggaacgctaaaggattcacacagttaccagaatgcccgatttgggtcctccattgcctcagttcgagacctcaaccaggattcctacaatgacgtggtggtgggagcccccctggaggacaaccacgcaggagccatctacatcttccacggcttccgaggcagcatcctgaagacacctaagcagagaatcacagcctcagagctggctaccggcctccagtattttggctgcagcatccacgggcaattggacctcaatgaggatgggctcatcgacctggcagtgggagcccttggcaacgctgtgattctgtggtcccgcccagtggttcagatcaatgccagcctccactttgagccatccaagatcaacatcttccacagagactgcaagcgcagtggcagggatgccacctgcctggccgccttcctctgcttcacgcccatcttcctggcaccccatttccaaacaacaactgttggcatcagatacaacgccaccatggatgagaggcggtatacaccgagggcccacctggacgagggcggggaccgattcaccaacagagccgtactgctctcctccggccaggagctctgtgagcggatcaacttccatgtcctggacactgctgactacgtgaagccagtgaccttctcagtcgagtattccctggaggaccctgaccatggccccatgctggacgacggctggcccaccactctcagagtctcggtgcccttctggaacggctgcaatgaggatgagcactgtgtccctgaccttgtgttggatgcccggagtgacctgcccacggccatggagtactgccagagggtgctgaggaagcctgcgcaggactgctccgcatacacgctgtccttcgacaccacagtcttcatcatagagagcacacgccagcgagtggcggtggaggccacactggagaacaggggcgagaacgcctacagcacggtcctaaatatctcgcagtcagcaaacctgcagtttgccagcttgatccagaaggaggactcagacggtagcattgagtgtgtgaacgaggagaggaggctccagaagcaagtctgcaacgtcagctatcccttcttccgggccaaggccaaggtggctttccgtcttgattttgagttcagcaaatccatcttcctacaccacctggagatcgagctcgctgcaggcagtgacagtaatgagcgggacagcaccaaggaagacaacgtggcccccttacgcttccacctcaaatacgaggctgacgtcctcttcaccaggagcagcagcctgagccactacgaggtcaagctcaacagctcgctggagagatacgatggtatcgggcctcccttcagctgcatcttcaggatccagaacttgggcttgttccccatccacgggatgatgatgaagatcaccattcccatcgccaccaggagcggcaaccgcctactgaagctgagggacttcctcacggacgaggcgaacacgtcctgtaacatctggggcaatagcactgagtaccggcccaccccagtggaggaagacttgcgtcgtgctccacagctgaatcacagcaactctgatgtcgtctccatcaactgcaatatacggctggtccccaaccaggaaatcaatttccatctactggggaacctgtggttgaggtccctaaaagcactcaagtacaaatccatgaaaatcatggtcaacgcagccttgcagaggcagttccacagccccttcatcttccgtgaggaggatcccagccgccagatcgtgtttgagatctccaagcaagaggactggcaggtccccatctggatcattgtaggcagcaccctggggggcctcctactgctggccctgctggtcctggcactgtggaagctcggcttctttagaagtgccaggcgcaggagggagcctggtctggaccccacccccaaagtgctggagtgaggctccagaggagactttgagttgatgggggccaggacaccagtccaggtagtgttgagacccaggcctgtggccccaccgagctggagcggagaggaagccagctggctttgcacttgacctcatctcccgagcaatggcgcctgctccctccagaatggaactcaagctggttttaagtggaactgccctactgggagactgggacacctttaacacagacccctagggatttaaagggacacccctacacacacccaggcccacgccaaggcctccctcaggctctgtggagggcatttgctgccccagctactaaggtgctaggaattcgtaatcatccccatcctccagagaaacccagggaggaagactgtaaatacgaacccaatctgcacactccaggcctctagttccagaaggatccaagacaaaacagatctgaattctgcccttttctctcacccatcccacccctccattggctcccaagtcacacccactcccttccccatagataggcccctggggctcccgaagaatgaacccaagagcaagggcttgatggtgacagctgcaagccagggatgaagaaagactctgagatgtggagactgatggccaggcaagtgggaccaggatactggacgctgtcctgagatgagaggtagccgggctctgcacccacgtgcattcacattgaccgcaactcacacattcccccaccagctgcagccccttgctctcagctgccaaccctcccgggtcacttttgttcccaggtacctcatgggaagcatgtggatgacacaatccctggggctgtgcattcccacgtcttcttgctgcagcctgcccctagacatggacgcaccggcctggctgcagctgggcagcaggggtaggggtagggagcctcccctccctgtatcaccccctccctacacacacacacacacacacacacacacacactgcctcccatccttccctcatgcccgccagtgcacagggaagggcttggccagcgctgttgaggggtcccctctggaatgcactgaataaagcacgtgcaaggactcccggagcctgtgcagccttggtggcaaatatctcatctgccggcccccaggacaagtggtatgaccagtgataatgccccaaggacaaggggcgtgcctggcgcccagtggagtaatttatgccttagtcttgttttgaggtagaaatgcaagggggacacatgaaaggcatcagtccccctgtgcatagtacgacctttactgtcgtatttttgaaaaattaaaaatacagtgtttaaaaacaacc

SEQ ID NO: 78426 - DNA, 4744 bp, Homo sapiens
  misc_feature (44)..(44): n is a, c, g, or t
ggcacgaggccgcgccgaggaggctgccgctctggcttgccagncccccgccgccgctgcacaccggacccagccgccgtgccgcgggccatggacctgcccaggggcctggtggtggcctgggcgctcagcctgtggccagggttcacggacaccttcaacatggacaccaggaagccccgggtcatccctggctccaggaccgccttctttggctacacagtgcagcagcacgacatcagtggcaataagtggctggtcgtgggcgccccactggaaaccaatggctaccagaagacgggagacgtgtacaagtgtccagtgatccacgggaactgcaccaaactcaacctgggaagggtcaccctgtccaacgtgtccgagcggaaagacaacatgcgcctcggccttagtctcgccaccaaccccaaggacaacagcttcctggcctgcagccccctctggtctcatgagtgtgggagctcctactacaccacagggatgtgttcaagagtcaactccaacttcaggttctccaagaccgtggccccagctctccaaaggtgccagacctacatggacatcgtcattgtcctggatggctccaacagcatctacccctgggtggaggttcagcacttcctcatcaacatcctgaaaaagttttacattggcccagggcagatccaggttggagttgtgcagtatggcgaagatgtggtgcatgagtttcacctcaacgactacaggtctgtaaaagatgtggtggaagctgccagccacattgagcagagaggaggaacagagacccggacggcatttggcattgaatttgcacgctcagaggctttccagaagggtggaaggaaaggagccaagaaggtgatgattgtcatcacagatggggagtcccacgacagcccagacctggagaaggtgatccagcaaagcgaaagagacaacgtaacaagatatgcggtggccgtcctgggctactacaaccgcagggggatcaatccagaaacttttctaaatgaaatcaaatacatcgccagtgaccctgatgacaagcacttcttcaatgtcactgatgaggctgccttgaaggacattgtcgatgccctgggggacagaatcttcagcctggaaggcaccaacaagaacgagacctcctttgggctggagatgtcacagacgggcttttcctcgcacgtggtggaggatggggttctgctgggagccgtcggtgcctatgactggaatggagctgtgctaaaggagacgagtgccgggaaggtcattcctctccgcgagtcctacctgaaagagttccccgaggagctcaagaaccatggtgcatacctggggtacacagtcacatcggtcgtgtcctccaggcaggggcgagtgtacgtggccggagccccccggttcaaccacacgggcaaggtcatcctgttcaccatgcacaacaaccggagcctcaccatccaccaggctatgcggggccagcagataggctcttactttgggagtgaaatcacctcggtggacatcgacggcgacggcgtgactgatgtcctgctggtgggcgcacccatgtacttcaacgagggccgtgagcgaggcaaggtgtacgtctatgagctgagacagaaccggtttgtttataacggaacgctaaaggattcacacagttaccagaatgcccgatttgggtcctccattgcctcagttcgagacctcaaccaggattcctacaatgacgtggtggtgggagcccccctggaggacaaccacgcaggagccatctacatcttccacggcttccgaggcagcatcctgaagacacctaagcagagaatcacagcctcagagctggctaccggcctccagtattttggctgcagcatccacgggcaattggacctcaatgaggatgggctcatcgacctggcagtgggagcccttggcaacgctgtgattctgtggtcccgcccagtggttcagatcaatgccagcctccactttgagccatccaagatcaacatcttccacagagactgcaagcgcagtggcagggatgccacctgcctggccgccttcctctgcttcacgcccatcttcctggcaccccatttccaaacaacaactgttggcatcagatacaacgccaccatggatgagaggcggtatacaccgagggcccacctggacgagggcggggaccgattcaccaacagagccgtactgctctcctccggccaggagctctgtgagcggatcaacttccatgtcctggacactgctgactacgtgaagccagtgaccttctcagtcgagtattccctggaggaccctgaccatggccccatgctggacgacggctggcccaccactctcagagtctcggtgcccttctggaacggctgcaatgaggatgagcactgtgtccctgaccttgtgttggatgcccggagtgacctgcccacggccatggagtactgccagagggtgctgaggaagcctgcgcaggactgctccgcatacacgctgtccttcgacaccacagtcttcatcatagagagcacacgccagcgagtggcggtggaggccacactggagaacaggggcgagaacgcctacagcacggtcctaaatatctcgcagtcagcaaacctgcagtttgccagcttgatccagaaggaggactcagacggtagcattgagtgtgtgaacgaggagaggaggctccagaagcaagtctgcaacgtcagctatcccttcttccgggccaaggccaaggtggctttccgtcttgattttgagttcagcaaatccatcttcctacaccacctggagatcgagctcgctgcaggcagtgacagtaatgagcgggacagcaccaaggaagacaacgtggcccccttacgcttccacctcaaatacgaggctgacgtcctcttcaccaggagcagcagcctgagccactacgaggtcaagctcaacagctcgctggagagatacgatggtatcgggcctcccttcagctgcatcttcaggatccagaacttgggcttgttccccatccacgggatgatgatgaagatcaccattcccatcgccaccaggagcggcaaccgcctactgaagctgagggacttcctcacggacgaggcgaacacgtcctgtaacatctggggcaatagcactgagtaccggcccaccccagtggaggaagacttgcgtcgtgctccacagctgaatcacagcaactctgatgtcgtctccatcaactgcaatatacggctggtccccaaccaggaaatcaatttccatctactggggaacctgtggttgaggtccctaaaagcactcaagtacaaatccatgaaaatcatggtcaacgcagccttgcagaggcagttccacagccccttcatcttccgtgaggaggatcccagccgccagatcgtgtttgagatctccaagcaagaggactggcaggtccccatctggatcattgtaggcagcaccctggggggcctcctactgctggccctgctggtcctggcactgtggaagctcggcttctttagaagtgccaggcgcaggagggagcctggtctggaccccacccccaaagtgctggagtgaggctccagaggagactttgagttgatgggggccaggacaccagtccaggtagtgttgagacccaggcctgtggccccaccgagctggagcggagaggaagccagctggctttgcacttgacctcatctcccgagcaatggcgcctgctccctccagaatggaactcaagctggttttaagtggaactgccctactgggagactgggacacctttaacacagacccctagggatttaaagggacacccctacacacacccaggcccacgccaaggcctccctcaggctctgtggagggcatttgctgccccagctactaaggtgctaggaattcgtaatcatccccatcctccagagaaacccagggaggaagactgtaaatacgaacccaatctgcacactccaggcctctagttccagaaggatccaagacaaaacagatctgaattctgcccttttctctcacccatcccacccctccattggctcccaagtcacacccactcccttccccatagataggcccctggggctcccgaagaatgaacccaagagcaagggcttgatggtgacagctgcaagccagggatgaagaaagactctgagatgtggagactgatggccaggcaagtgggaccaggatactggacgctgtcctgagatgagaggtagccgggctctgcacccacgtgcattcacattgaccgcaactcacacattcccccaccagctgcagccccttgctctcagctgccaaccctcccgggtcacttttgttcccaggtacctcatgggaagcatgtggatgacacaatccctggggctgtgcattcccacgtcttcttgctgcagcctgcccctagacatggacgcaccggcctggctgcagctgggcagcaggggtaggggtagggagcctcccctccctgtatcaccccctccctacacacacacacacacacacacacacacacactgcctcccatccttccctcatgcccgccagtgcacagggaagggcttggccagcgctgttgaggggtcccctctggaatgcactgaataaagcacgtgcaaggactcccgga

SEQ ID NO: 78427 - DNA, 4702 bp, Homo sapiens
actcacttcctttccttcggtggcctccaggatgatctggaagggtcaccctgtccaacgtgtccgagcggaaagacaacatgcgcctcggccttagtctcgccaccaaccccaaggacaacagcttcctggcctgcagccccctctggtctcatgagtgtgggagctcctactacaccacagggatgtgttcaagagtcaactccaacttcaggttctccaagaccgtggccccagctctccaaaggtgccagacctacatggacatcgtcattgtcctggatggctccaacagcatctacccctgggtggaggttcagcacttcctcatcaacatcctgaaaaagttttacattggcccagggcagatccaggttggagttgtgcagtatggcgaagatgtggtgcatgagtttcacctcaacgactacaggtctgtaaaagatgtggtggaagctgccagccacattgagcagagaggaggaacagagacccggacggcatttggcattgaatttgcacgctcagaggctttccagaagggtggaaggaaaggagccaagaaggtgatgattgtcatcacagatggggagtcccacgacagcccagacctggagaaggtgatccagcaaagcgaaagagacaacgtaacaagatatgcggtggccgtcctgggctactacaaccgcagggggatcaatccagaaacttttctaaatgaaatcaaatacatcgccagtgaccctgatgacaagcacttcttcaatgtcactgatgaggctgccttgaaggacattgtcgatgccctgggggacagaatcttcagcctggaaggcaccaacaagaacgagacctcctttgggctggagatgtcacagacgggcttttcctcgcacgtggtggaggatggggttctgctgggagccgtcggtgcctatgactggaatggagctgtgctaaaggagacgagtgccgggaaggtcattcctctccgcgagtcctacctgaaagagttccccgaggagctcaagaaccatggtgcatacctggggtacacagtcacatcggtcgtgtcctccaggcaggggcgagtgtacgtggccggagccccccggttcaaccacacgggcaaggtcatcctgttcaccatgcacaacaaccggagcctcaccatccaccaggctatgcggggccagcagataggctcttactttgggagtgaaatcacctcggtggacatcgacggcgacggcgtgactgatgtcctgctggtgggcgcacccatgtacttcaacgagggccgtgagcgaggcaaggtgtacgtctatgagctgagacagaaccggtttgtttataacggaacgctaaaggattcacacagttaccagaatgcccgatttgggtcctccattgcctcagttcgagacctcaaccaggattcctacaatgacgtggtggtgggagcccccctggaggacaaccacgcaggagccatctacatcttccacggcttccgaggcagcatcctgaagacacctaagcagagaatcacagcctcagagctggctaccggcctccagtattttggctgcagcatccacgggcaattggacctcaatgaggatgggctcatcgacctggcagtgggagcccttggcaacgctgtgattctgtggtcccgcccagtggttcagatcaatgccagcctccactttgagccatccaagatcaacatcttccacagagactgcaagcgcagtggcagggatgccacctgcctggccgccttcctctgcttcacgcccatcttcctggcaccccatttccaaacaacaactgttggcatcagatacaacgccaccatggatgagaggcggtatacaccgagggcccacctggacgagggcggggaccgattcaccaacagagccgtactgctctcctccggccaggagctctgtgagcggatcaacttccatgtcctggacactgctgactacgtgaagccagtgaccttctcagtcgagtattccctggaggaccctgaccatggccccatgctggacgacggctggcccaccactctcagagtctcggtgcccttctggaacggctgcaatgaggatgagcactgtgtccctgaccttgtgttggatgcccggagtgacctgcccacggccatggagtactgccagagggtgctgaggaagcctgcgcaggactgctccgcatacacgctgtccttcgacaccacagtcttcatcatagagagcacacgccagcgagtggcggtggaggccacactggagaacaggggcgagaacgcctacagcacggtcctaaatatctcgcagtcagcaaacctgcagtttgccagcttgatccagaaggaggactcagacggtagcattgagtgtgtgaacgaggagaggaggctccagaagcaagtctgcaacgtcagctatcccttcttccgggccaaggccaaggtggctttccgtcttgattttgagttcagcaaatccatcttcctacaccacctggagatcgagctcgctgcaggcagtgacagtaatgagcgggacagcaccaaggaagacaacgtggcccccttacgcttccacctcaaatacgaggctgacgtcctcttcaccaggagcagcagcctgagccactacgaggtcaagctcaacagctcgctggagagatacgatggtatcgggcctcccttcagctgcatcttcaggatccagaacttgggcttgttccccatccacgggatgatgatgaagatcaccattcccatcgccaccaggagcggcaaccgcctactgaagctgagggacttcctcacggacgaggcgaacacgtcctgtaacatctggggcaatagcactgagtaccggcccaccccagtggaggaagacttgcgtcgtgctccacagctgaatcacagcaactctgatgtcgtctccatcaactgcaatatacggctggtccccaaccaggaaatcaatttccatctactggggaacctgtggttgaggtccctaaaagcactcaagtacaaatccatgaaaatcatggtcaacgcagccttgcagaggcagttccacagccccttcatcttccgtgaggaggatcccagccgccagatcgtgtttgagatctccaagcaagaggactggcaggtccccatctggatcattgtaggcagcaccctggggggcctcctactgctggccctgctggtcctggcactgtggaagctcggcttctttagaagtgccaggcgcaggagggagcctggtctggaccccacccccaaagtgctggagtgaggctccagaggagactttgagttgatgggggccaggacaccagtccaggtagtgttgagacccaggcctgtggccccaccgagctggagcggagaggaagccagctggctttgcacttgacctcatctcccgagcaatggcgcctgctccctccagaatggaactcaagctggttttaagtggaactgccctactgggagactgggacacctttaacacagacccctagggatttaaagggacacccctacacacacccaggcccacgccaaggcctccctcaggctctgtggagggcatttgctgccccagctactaaggtgctaggaattcgtaatcatccccatcctccagagaaacccagggaggaagactgtaaatacgaacccaatctgcacactccaggcctctagttccagaaggatccaagacaaaacagatctgaattctgcccttttctctcacccatcccacccctccattggctcccaagtcacacccactcccttccccatagataggcccctggggctcccgaagaatgaacccaagagcaagggcttgatggtgacagctgcaagccagggatgaagaaagactctgagatgtggagactgatggccaggcaagtgggaccaggatactggacgctgtcctgagatgagaggtagccgggctctgcacccacgtgcattcacattgaccgcaactcacacattcccccaccagctgcagccccttgctctcagctgccaaccctcccgggtcacttttgttcccaggtacctcatgggaagcatgtggatgacacaatccctggggctgtgcattcccacgtcttcttgctgcagcctgcccctagacatggacgcaccggcctggctgcagctgggcagcaggggtaggggtagggagcctcccctccctgtatcaccccctccctacacacacacacacacacacacacacacacacacacacacacacacacacacacacacacacactgcctcccatccttccctcatgcccgccagtgcacagggaagggcttggccagcgctgttgaggggtcccctctggaatgcactgaataaagcacgtgcaaggactcccggagcctgtgcagccttggtggcaaatatctcatctgccggcccccaggacaagtggtatgaccagtgataatgccccaaggacaaggggcgtgcctggcgcccagtggagtaatttatgccttagtcttgttttgaggtagaaatgcaagggggacacatgaaaggcatcagtccccctgtgcatagtacgacctttactgtcgtatttttgaaaaattaaaaatacagtgtttaaaaacaacc

SEQ ID NO: 78428 - DNA, 3722 bp, Homo sapiens
  misc_feature (44)..(44): n is a, c, g, or t
ggcacgaggccgcgccgaggaggctgccgctctggcttgccagncccccgccgccgctgcacaccggacccagccgccgtgccgcgggccatggacctgcccaggggcctggtggtggcctgggcgctcagcctgtggccagggttcacggacaccttcaacatggacaccaggaagccccgggtcatccctggctccaggaccgccttctttggctacacagtgcagcagcacgacatcagtggcaataagtggctggtcgtgggcgccccactggaaaccaatggctaccagaagacgggagacgtgtacaagtgtccagtgatccacgggaactgcaccaaactcaacctgggaagggtcaccctgtccaacgtgtccgagcggaaagacaacatgcgcctcggccttagtctcgccaccaaccccaaggacaacagcttcctggcctgcagccccctctggtctcatgagtgtgggagctcctactacaccacagggatgtgttcaagagtcaactccaacttcaggttctccaagaccgtggccccagctctccaaaggtgccagacctacatggacatcgtcattgtcctggatggctccaacagcatctacccctgggtggaggttcagcacttcctcatcaacatcctgaaaaagttttacattggcccagggcagatccaggttggagttgtgcagtatggcgaagatgtggtgcatgagtttcacctcaacgactacaggtctgtaaaagatgtggtggaagctgccagccacattgagcagagaggaggaacagagacccggacggcatttggcattgaatttgcacgctcagaggctttccagaagggtggaaggaaaggagccaagaaggtgatgattgtcatcacagatggggagtcccacgacagcccagacctggagaaggtgatccagcaaagcgaaagagacaacgtaacaagatatgcggtggccgtcctgggctactacaaccgcagggggatcaatccagaaacttttctaaatgaaatcaaatacatcgccagtgaccctgatgacaagcacttcttcaatgtcactgatgaggctgccttgaaggacattgtcgatgccctgggggacagaatcttcagcctggaaggcaccaacaagaacgagacctcctttgggctggagatgtcacagacgggcttttcctcgcacgtggtggaggatggggttctgctgggagccgtcggtgcctatgactggaatggagctgtgctaaaggagacgagtgccgggaaggtcattcctctccgcgagtcctacctgaaagagttccccgaggagctcaagaaccatggtgcatacctggggtacacagtcacatcggtcgtgtcctccaggcaggggcgagtgtacgtggccggagccccccggttcaaccacacgggcaaggtcatcctgttcaccatgcacaacaaccggagcctcaccatccaccaggctatgcggggccagcagataggctcttactttgggagtgaaatcacctcggtggacatcgacggcgacggcgtgactgatgtcctgctggtgggcgcacccatgtacttcaacgagggccgtgagcgaggcaaggtgtacgtctatgagctgagacagaaccggtttgtttataacggaacgctaaaggattcacacagttaccagaatgcccgatttgggtcctccattgcctcagttcgagacctcaaccaggattcctacaatgacgtggtggtgggagcccccctggaggacaaccacgcaggagccatctacatcttccacggcttccgaggcagcatcctgaagacacctaagcagagaatcacagcctcagagctggctaccggcctccagtattttggctgcagcatccacgggcaattggacctcaatgaggatgggctcatcgacctggcagtgggagcccttggcaacgctgtgattctgtggtcccgcccagtggttcagatcaatgccagcctccactttgagccatccaagatcaacatcttccacagagactgcaagcgcagtggcagggatgccacctgcctggccgccttcctctgcttcacgcccatcttcctggcaccccatttccaaacaacaactgttggcatcagatacaacgccaccatggatgagaggcggtatacaccgagggcccacctggacgagggcggggaccgattcaccaacagagccgtactgctctcctccggccaggagctctgtgagcggatcaacttccatgtcctggacactgctgactacgtgaagccagtgaccttctcagtcgagtattccctggaggaccctgaccatggccccatgctggacgacggctggcccaccactctcagagtctcggtgcccttctggaacggctgcaatgaggatgagcactgtgtccctgaccttgtgttggatgcccggagtgacctgcccacggccatggagtactgccagagggtgctgaggaagcctgcgcaggactgctccgcatacacgctgtccttcgacaccacagtcttcatcatagagagcacacgccagcgagtggcggtggaggccacactggagaacaggggcgagaacgcctacagcacggtcctaaatatctcgcagtcagcaaacctgcagtttgccagcttgatccagaaggaggactcagacggtagcattgagtgtgtgaacgaggagaggaggctccagaagcaagtctgcaacgtcagctatcccttcttccgggccaaggccaaggtggctttccgtcttgattttgagttcagcaaatccatcttcctacaccacctggagatcgagctcgctgcaggcagtgacagtaatgagcgggacagcaccaaggaagacaacgtggcccccttacgcttccacctcaaatacgaggctgacgtcctcttcaccaggagcagcagcctgagccactacgaggtcaagctcaacagctcgctggagagatacgatggtatcgggcctcccttcagctgcatcttcaggatccagaacttgggcttgttccccatccacgggatgatgatgaagatcaccattcccatcgccaccaggagcggcaaccgcctactgaagctgagggacttcctcacggacgaggcgaacacgtcctgtaacatctggggcaatagcactgagtaccggcccaccccagtggaggaagacttgcgtcgtgctccacagctgaatcacagcaactctgatgtcgtctccatcaactgcaatatacggctggtccccaaccaggaaatcaatttccatctactggggaacctgtggttgaggtccctaaaagcactcaagtacaaatccatgaaaatcatggtcaacgcagccttgcagaggcagttccacagccccttcatcttccgtgaggaggatcccagccgccagatcgtgtttgagatctccaagcaagaggactggcaggtccccatctggatcattgtaggcagcaccctggggggcctcctactgctggccctgctggtcctggcactgtggaaggtgagggccctggcaggggagggaaggagcagcatcctggctgggcgcaacgggtctctgaccctgtatcagtgagagcgctcactcagggtcctatgcaagctatagggctctcctcgcttggtctgacgggtctt

SEQ ID NO: 78429 - DNA, 1172 bp, Homo sapiens
  misc_feature (44)..(44): n is a, c, g, or t
ggcacgaggccgcgccgaggaggctgccgctctggcttgccagncccccgccgccgctgcacaccggacccagccgccgtgccgcgggccatggacctgcccaggggcctggtggtggcctgggcgctcagcctgtggccagggttcacggacaccttcaacatggacaccaggaagccccgggtcatccctggctccaggaccgccttctttggctacacagtgcagcagcacgacatcagtggcaataagtggctggtcgtgggcgccccactggaaaccaatggctaccagaagacgggagacgtgtacaagtgtccagtgatccacgggaactgcaccaaactcaacctgggaagggtcaccctgtccaacgtgtccgagcggaaagacaacatgcgcctcggccttagtctcgccaccaaccccaaggacaacagcttcctggcctgcagccccctctggtctcatgagtgtgggagctcctactacaccacagggatgtgttcaagagtcaactccaacttcaggttctccaagaccgtggccccagctctccaaaggtgccagacctacatggacatcgtcattgtcctggatggctccaacagcatctacccctgggtggaggttcagcacttcctcatcaacatcctgaaaaagttttacattggcccagggcagatccaggttggagttgtgcagtatggcgaagatgtggtgcatgagtttcacctcaacgactacaggtctgtaaaagatgtggtggaagctgccagccacattgagcagagaggaggaacagagacccggacggcatttggcattgaatttgcacgctcagaggctttccagaagggtggaaggaaaggagccaagaaggtgatgattgtcatcacagatggggagtcccacgacagcccagacctggagaaggtgatccagcaaagcgaaagagacaacgtaacaagatatgcggtggccgtcctgggctactacaaccgcagggggatcaatccagaaactttttcaggatgttgatgaggaagtgctgaacctccacccaggggtagatgctgttggagccatccaggacaatgacgatgtcatgtaggtctggcacctttggagagctggggccacggtcttggagacctgaagatcggagttga

SEQ ID NO: 78430 - DNA, 867 bp, Homo sapiens
ctgaattatcagatgacagtgaagaaagcctagaaaaaacagtttacacatttgaaactccgaaaggctcagcaattagcagttgtgtgtatctctagaatgggcaggagggaagaagaaggttatagttataggtacaggcgaagctctacatataaaaactatatgaaaatgggaaatgtttattaaacattcattaaacatacaaagtctgttcaattagttagattcctcagtctcctccacttaacacagacaggtaacagtgcctcatttatccctttatccagaagaagactgaaagtcagacctttggggatgtacagttcaatcacattggtgtacggtcatcaccaccatccatctccagaattcttttcatctttcaaaactaaaagtctatgcacattaaacaataatgcctcatgaccactttcccctggcccttggtgacccaccattttacttcctgtctctatgattttgactactgtaagtacctcgtatatgtgagatcatacagtatttgtctttttgttactggattgtttcactcagtatcatgtccttgaagtttcatgcatgttgtagcatgtgccagaatgtcctttcgttttaaggctgaatgatactcctgtgtgtgtgtgtatgccatattttatttactcattcatctgtggatggactcttgggttgcttttgcctcttcactatcgtgatatcgacattttaaagtgatatttttattttgtttattaaacatagattaaattttgctgtaccacatgtaaatattaaagattgctttcgtttgctgatgtttgaagttctttcaatgtcaacaaataaactggtttgtttttgtaa

SEQ ID NO: 78431 - DNA, 420 bp, Homo sapiens
cttactgacacatttttatttgtaatgtaaactggacaggcctataaatgacaaaggaaaaaatgcatatattgaagaacagggatgaattacaaatttatgaatttaggtaattttaaaaaatttttagtgggatcatttaggacagcagttctgtaagtgtgtttcatgtaactatggggatctttgagatccatttagaaggttcatgtattagtcagtgttctctagaggagatttttttacggagaataggtttacacaatgatagatggagacagtaaagacccacaatcggctgtctgcaatctgaaaacccaagaaagccagtggtataattcagtctacatctgaagacctgagaaccaggggagcctatggtgtaaatcatagtctgagggcaggagaagatgagatgag

SEQ ID NO: 78432 - DNA, 584 bp, Homo sapiens
tcctaagtccttttaccttgaatctgtcatgtacataggacaaactatagtattggtaaaagggagattggaaacattttgatttgcaattgaggggaggagctgttatggtcttgacctcattttctttatcagcatgcttcctgttaataaaaagaatgggaaataacagaagtggatattctttggcttaaaagatgtattaatatttattcagatttccttaatatatcactgacagaatacttttaattactgagaactaaatgttgttttgggtctgcccttctccacaaattcctaaccatccctgaaaagtttctggaatctccttctgcctttggtagctggggaaggagaaattcacgagactgacagaattcagcccagtagcctctgccagagctgacaggcttgatggtcgcctttcggtcttcttttttttttttttcataatgcgtgtgcctttcttcattggtggtctcctgaagtcaccagccctgccagaagctctttcactgggacaaaaggggaactggagcgagatggcctctcatatgttggcaactctccctgaattttct

SEQ ID NO: 78433 - DNA, 636 bp, Homo sapiens
gaacactgaaccccactcatgggcctggtacctttctatacaagttatcctatttaatctccacaacaagcctactagatgctgagatctcaatgtgcaaataccccagaacagcacctagatgaggcacagggactcactggaagccttgtcttccttgggcccatctgtgaggagcagaacagctcacctcttgcctgacaggctagtcctgggtaatgcatccagcctacctcttgttgccaccctaccccaccgtcagtgccacatacccgtgaacacaaacccactggggctgagcggctgtgccactgtcacaggatccttagggtgtcacttcaccagctggagacttctgtggccagtggcggctttacctgagttttgcttgggcccactgggctccttccacccacttggcctggcaggctgtgcttgtctttcactactggtccagatcccatgcctgccaagggcaagccaggtgcagagcagcaagggttgcatgagcaaatgagtgtggggtctggccattgggcacagccaggcatgccagctgtggcagggcaggcagctccaggcacaggcgctggttacctgctgtggctgtggctagaccaagcgtactgcaagcag

SEQ ID NO: 78434 - DNA, 793 bp, Homo sapiens
taaactaaaaaaaataaaatctctggcgtggcatagtggctcacgcctgtactcccaaaatactgggattacaggcatgagccaccgtggcccgcccaattttgagtttttatgttctaatcccaaacatctgctcacaggcccctcagcatattctttcctgggtccagtgtcacctcccaggcctgcaggctggctagagcagtagggtgtgtgggaaagctctgggctttgcaggcactgatcagctgtgtgaccttaaccaccctgaacctcagtttcctcacctgtaatggaaataggtaccacggcagtttgttgcaaggactagagagtaaccttgggaataaaaggtagcagcagcttgggctctggagatggactgtccaagaccaacttccagttcctccccacacaagctctggcacttagattcctggtacctccgctgcttcatctgtaaaatggagtaacaataggaatactttatagagttgtaaggattgagtggctggatgaacgtcaagcacttcaaaggggacctggcatgtagtgagtgatcaatataaaccacctggcttgtagcaggtgtgctgtgtgtggctgcaggtgttattagtaacatctgtgtgcccttcagagcgtgcaccacacttcacaccttgtggagtctggaatgccactattatagttcaggatagaaaacctccctgcaagcactcgctttagcttgtctccactgaacaaaacaacacaagttctttattacttggaatgggaaaacttcaaaggc

SEQ ID NO: 78435 - DNA, 707 bp, Homo sapiens
  misc_feature (702)..(704): n is a, c, g, or t
ggcgcatgttatggtcacctctgtgaggattacatcaggaaggacagtctccaaaagacatggacagaggaaatttagcagatgtccattaaatcaggatctcatacaagttataacacctgaatgtttgacttttcagagtattttgccatcacaggtgtggcatcttgcccttggatatatctacattctgctgtagaatgtcgtggtctttctgagggtcacatacatcctgtcttgtcataatgttaaccattaagagtcctcaggggcatggaattgaagaaggaactgttgccagcagttaactgaccaagctagagttccctgacccaacgtaagggtgactgtgacacacatggataattttagcttcatgtttaagattttgttatttgggtaggaaacattccaaatgcagtttgaaacacatattaaaattgaggcacacaggaaagaactggctcaagtttagtccccaagttccttatagtaggaataggaatccttagagtataagcaatccatgcatagtattctgttatctatcatgtagatcatttaatctctaattttttggggtggggattctcttgtttctaaatcttacactttcagtttcttctgtgtcttaaatatagattattgactgttgtcttaaatactaataaatacattaaatgtatcttaaatactaaaaannnaaa

SEQ ID NO: 78436 - DNA, 745 bp, Homo sapiens
ctcctaccgcctactccagtcctctccaccccaaggtaggcagcttcccgctcctcgtcttgggacctaaacccaggaagtcaaatgtccttttctagcaggtcgcctggttagaggccgtggacgaagcggtccaggcacagccagctgcagggcgcggcctcggcggcgctgctcgtggccctggtcagtgagcgcactcactcctggactaaggtaacccgcgtggaggagacccagctcccagctctatgcaactcattttcatctagcattacctctccaaaacctgaatctccacaagaaagccacacagcaattaaccagtgttgcaagaactgcttctgtaataaaggtgggaagacaaattgatgcaaccctcttgaaaagcaatctggcaatatgaaccaagagccatgaaaaggcttatgctattataattaaatggctgtaatgttggctgtaaatatgaaattttctttcacacaccaatgttttcaagaatggcatattcacatgcagtatgtgatgaaagaagcagtaaaggatgctaacaaagctatttctttggacaatctgaacctgacggagtcttactctgtcgcccaggcaggagtgcaatggcacaatcttggctcaccacaacctccgcctcctgggttcaagtgactctcctgcctggccatagaagcaaacacaaacatagaggaattggctttgggcagatggaaggacctcagagaaa

SEQ ID NO: 78437 - DNA, 256 bp, Homo sapiens
cccaaaccctgagacaccatacaagcgcacaccagcaatcacccagtggcctagggaacggacctctctgaatgagcaatcagggcaaactgaggatccgtcccgtcttccgttgcataggttctctacccaaaggcaacgtttcttgaagagcaagaaacacttggggtaggtcctgtaaaaggaaacaaaccgaactccccaaagacaggcactttgcaaacagagaaactaagcgtaacttccaattatacaa

SEQ ID NO: 78438 - DNA, 316 bp, Homo sapiens
aggtaagtggggtctcatagactggaagtcccagaactgaaagtcaaggagttgggagctcatgcaactggcaatggagaaccaccaaaaggtgaactgttatgcttgtgattattttcttcatggtttctttggggtcctgggagtgtgtggtggctgttatgtgtaactgtgattaactttacatcgtgaaaagtcagtcaccaaaaggcagaagaggctagatgggactcgcctgcagaactggaccgagggctctgcggctgccaccgaatctgctccaggatcctgcccagtctcctcccacgcagggtaa

SEQ ID NO: 78439 - DNA, 441 bp, Homo sapiens
ggattacaggcatggccaccacacctgactaattttgtatttttagtagagacggggtttctccattttggtaaagctggtttcgaattcccgatctcaggtaatctgcctgcctcggcctcccaaagtgctgggattacaggtgtaagccaccacgctgggctaaattttatataattttcatgtgctagaaaatactattctttttttaatttttttcaaacatataaaaatgtaaaaatcttcttagcttacaggatgtacaaaaatagtggactggatttggccttcagatagtggatggctaacccctggtttagaggggcaagcactgtactgagaggcagaggacagattccgctttcccttacactactattaactgtgacctacggtgcctcacctctaccaaaagaaagtcacttaatttttctgagccta

SEQ ID NO: 78440 - DNA, 447 bp, Homo sapiens
cttattggcccatttcaaggattttgactttgattcatatgatgtgggaaggccttggagaattttccgaggggactatactatctgatgtatgtttcagtatgaaatagaatctctctggctgctatgatctgaaggaggacaagggagcagggattccacgggggcattgattgcacagagccaggtaagagtgatgatgcttggaccaaagtggtggcactgggtggagggtcagaaccgacaagatttgctctcggattagatgtgggatatgggggtgtgagaggggccaagtgtgactctcaggttttcgaactgaataactggaagaatagagttgccttttattgaaatgaaggtcgaggctgcagtggtaagctgtgattgcgccactgcactccagcctgggcaacagagcaagaccctgtctcaaaaaaaaaaaaa

SEQ ID NO: 78441 - DNA, 975 bp, Homo sapiens
aagtcaagggccggctggcaaccgccagcaagctgtcctgtgagccgccagcatggatgacatctacaaggctgcggtagagcagctgacagaagagcagaaaaatgagttcaaggcagccttcgacatcttcgtgctgggcgctgaggatggctgcatcagcaccaaggagctgggcaaggtgatgaggatgctgggccagaaccccacccctgaggagctgcaggagatgatcgatgaggtggacgaggacggcagcggcacggtggactttgatgagttcctggtcatgatggttcggtgcatgaaggacgacagcaaagggaaatctgaggaggagctgtctgacctcttccgcatgtttgacaaaaatgctgatggctacatcgacctggatgagctgaagataatgctgcaggctacaggcgagaccatcacggaggacgacatcgaggagctcatgaaggacggagacaagaacaacgacggccgcatcgactatgatgagttcctggagttcatgaagggtgtggagtagatgctgaccttcacccagagctgcctatgcccagcctccaactccagctgagtcctggggttggggagggggtcggggtcccaggacctgagcctggccatgtcctcaaccccaaatcccccgactccctccccagatctgtcctgggggatgcaaataaagcctgctctcccaaggtcaaaaaaaaaaaaaagaacagaacagaaagacagaagaaaagcaagagaacaaaaaaaacagagggacagatagaaagcacgagagaagagaacgacaagataaaaacaaggagcagaaaagagaagcgagcaggacaaagcacgggaaggaggaagagaagaaagaggagaaggacacaaaagagagaaaagacgagacaagagggaagagaacagacaaaggacagaacaaaaagagaaagaaagaaagcgccccca

SEQ ID NO: 78442 - DNA, 329 bp, Homo sapiens
  misc_feature (20)..(20): n is a, c, g, or t
  misc_feature (29)..(29): n is a, c, g, or t
  misc_feature (50)..(50): n is a, c, g, or t
  misc_feature (56)..(56): n is a, c, g, or t
ctacatcgacccggaggaanctggctganattttcagggcctccggggancacgtnactgatcgaggagctcatgaaggacggagacaagaacaacgacggccgcatcgactatgatgagttcctggagttcatgaagggtgtggagtagatgctgaccttcacccagagctgcctatgcccagcctccaactccagctgagtcctggggttggggagggggtcggggtcccaggacctgagcctggccatgtcctcaaccccaaatcccccgactccctccccagatctgtcctgggggatgcaaataaagcctgctctcccaaggtc

SEQ ID NO: 78443 - DNA, 1038 bp, Homo sapiens
cagtggccaccctggtcaggttaccgtgggtggcttgcctgcctccacactggttttattatcccaacttgagggacagctgtccttcgggccacccagcttgagtttcatcaggggccgaaagggcattgagtggtcactgactattgttactgagggtcaccttggtcctgaagggggtgcccacctgtcaccctggccctgagcccagtcgcagtgaggccagctgggtcacgtcagggctttgggggcagggagggaggactgagacctccactctgtggcctggaaatagcctgcctcctccagctccagccttctcacctgtggaatgggttggtttcctcagcagcagctatacctgagtctgagccttgagattccctttcctttctaggtagagcagctgacagaagagcagaaaaatgagttcaaggcagccttcgacatcttcgtgctgggcgctgaggatggctgcatcagcaccaaggagctgggcaaggtgatgaggatgctgggccagaaccccacccctgaggagctgcaggagatgatcgatgaggtggacgaggacggcagcggcacggtggactttgatgagttcctggtcatgatggttcggtgcatgaaggacgacagcaaagggaaatctgaggaggagctgtctgacctcttccgcatgtttgacaaaaatgctgatggctacatcgacctggatgagctgaagataatgctgcaggctacaggcgagaccatcacggaggacgacatcgaggagctcatgaaggacggagacaagaacaacgacggccgcatcgactatgatgagttcctggagttcatgaagggtgtggagtagatgctgaccttcacccagagctgcctatgcccagcctccaactccagctgagtcctggggttggggagggggtcggggtcccaggacctgagcctggccatgtcctcaaccccaaatcccccgactccctccccagatctgtcctgggggatgcaaataaagcctgctctcccaaggtc

SEQ ID NO: 78444 - DNA, 623 bp, Homo sapiens
aagtcaagggccggctggcaaccgccagcaagctgtcctgtgagccgccagcatggatgacatctacaaggctgcggtagagcagctgacagaagagcagaaaaatgagttcaaggcagccttcgacatcttcgtgctgggcgctgaggatggctgcatcagcaccaaggagctgggcaaggtgatgaggatgctgggccagaaccccacccctgaggagctgcaggagatgatcgatgaggtggacgaggacggcagcggcacggtggactttgatgagttcctggtcatgatggttcggtgcatgaaggacgacagcaaagggaaatctgaggaggagctgtctgacctcttccgcatgtttgacaaaaatgctgatggctacatcgacctggatgagctgaagataatgctgcaggctacaggcgagaccatcacggaggacgacatcgaggagctcatgaaggacggagacaagaacaacgacggccgcatcgactatgatgagttcctggagttcatgaagggtgtggagtagatgctgaccttcacccagagctgcctatgcccagctccccagatctgtcctgggggatgcaaataaagcctgctctcccaaggtc

SEQ ID NO: 78445 - DNA, 599 bp, Homo sapiens
aagtcaagggccggctggcaaccgccagcaagctgtcctgtgagccgccagcatggatgacatctacaaggctgcggtagagcagctgacagaagagcagaaaaatgagttcaaggcagccttcgacatcttcgtgctgggcgctgaggatggctgcatcagcaccaaggagctgggcaaggtgatgaggatgctgggccagaaccccacccctgaggagctgcaggagatgatcgatgaggtggacgaggacgaacttccgagaagtcaccaccaatcaagagctgattcagaagagcagagggactcagtgaagttccagaactggcctgatagcagccactacatgattaagaaaaaaacaagcggctttgttgtaaaaaagattggcttcatggtttctataatcgtgaatttctcctccatgttccaattgtcacctgatttttaatccaagagtatcaaacttgatgtacccctttgtttaactgaaggttgctttctcacttggtatccctttctttcaaaatttaactttcaggaaataaaggtaaccagtttgctatgaatgttaacacatagccttctgggcccaatta

SEQ ID NO: 78446 - DNA, 307 bp, Homo sapiens
aagtcaagggccggctggcaaccgccagcaagctgtcctgtgagccgccagcatggatgacatctacaaggctgcggtagagcagctgacagaagagcagaaaaatgagttcaaggcagccttcgacatcttcgtgctgggcgctgaggatggctgcatcagcctccaactccagctgagtcctggggttggggagggggtcggggtcccaggacctgagcctggccatgtcctcaaccccaaatcccccgactccctccccagatctgtcctgggggatgcaaataaagcctgctctcccaaggtc

SEQ ID NO: 78447 - DNA, 717 bp, Homo sapiens
aagtcaagggccggctggcaaccgccagcaagctgtcctgtgagccgccagcatggatgacatctacaaggctgcggtagagcagctgacagaagagcagaaaaatgagttcaaggcagccttcgacatcttcgtgctgggcgctgaggatggctgcatcagcaccaaggagctgggcaaggtgatgaggatgctgggccagaaccccacccctgaggagctgcaggagatgatcgatgaggtggacgaggacggcagcggcacggtggactttgatgagttcctggtcatgatggttcggtgcatgaaggacgacagcaaagggaaatctgaggaggagctgtctgacctcttccgcatgtttgacaaaaatgctgatggctacatcgacctggatgagctgaagataatgctgcaggctacaggcgagaccatcacggaggacgacatcgaggagctcatgaaggacggagacaagaacaacgacggccgcatcgactatgatgagttcctggagttcatgaagggtgtggagtagatgctgaccttcacccagagctgcctatgcccagcctccaactccagctgagtcctggggttggggagggggtcggggtcccaggacctgagcctggccatgtcctcaaccccaaatcccccgactccctccccagatctgtcctgggggatgcaaataaagcctgctctcccaaggtc

SEQ ID NO: 78448 - DNA, 517 bp, Homo sapiens
cagtggccaccctggtcaggttaccgtgggtggcttgcctgcctccacactggttttattatcccaacttgagggacagctgtccttcgggccacccagcttgagtttcatcaggggccgaaagggcattgagtggtcactgactattgttactgagggtcaccttggtcctgaagggggtgcccacctgtcaccctggccctgagcccagtcgcagtgaggccagctgggtcacgtcagggctttgggggcagggagggaggactgagacctccactctgtggcctggaaatagcctgcctcctccagctccagccttctcacctgtggaatgggttggtttcctcagcagcagctatacctgagtctgagccttgagattccctttcctttctaggtagagcagctgacagaagagcagaaaaatggtgagacttcccagaccccggaggcgtggaggagaggagactgtttgatgtggtacaggggcagtcagtggagggcgagtggtttcgga

SEQ ID NO: 78449 - DNA, 583 bp, Homo sapiens
aagtcaagggccggctggcaaccgccagcaagctgtcctgtgagccgccagcatggatgacatctacaaggctgcggtagagcagctgacagaagagcagaaaaatgagttcaaggcagccttcgacatcttcgtgctgggcgctgaggatggctgcatcagcaccaaggagctgggcaaggtgatgaggatgctgggccagaaccccacccctgaggagctgcaggagatgatcgatgaggtggacgaggacggcagcggcacggtggactttgatgagttcctggtcatgatggttcggtgcatgaaggacgacagcaaagggaaatctgaggaggagctgtctgacctcttccgcatgtttgacaaaaatgctgatggctacatcgacctggatgagctgaagataatgctgcaggctacaggcgagaccatcacggaggacgacatcgaggagctcatgaaggacggagacaagaacaacgacggccgcatcgactatgatgagctcatggagctcatgaaggttctggagtaagggttgatcctagtcacagacgctacagatgcacgacggctaaca

SEQ ID NO: 78450 - DNA, 1011 bp, Homo sapiens
gcctactagatatttaatgtaatcaccatgataatggctaagatttattaagcatctgctatgtgctttatggtgctaagaacttctcatgtatttactcattgaatcttcacaaaaaccttatgaagacggctctctcaaatgttactgtctatatgaatccaccttgggatattagtaaaatgagtttctgatacagaagatctagaaagcgcctgaaatgctgatattctgtctcccaggtggaggagttcagctattaccttgactttgccgaagtcctaggcactcccatgccctcagagtctcattttgaatccaggcacttagggatgctatttttccacatcaaacagcttcctcccagccaaagaattctggtgacagtagtgaagataattttcactcctgcttacagaatgacaaagcaaaagcaaagaggagaagaatgaagtaaagacaaccaaaggaaaagactgatggctccttaagaatgatcttgataaaggaatggtggctgaggggtccatctcctaaaccacccaccttactgactccctagagcaatgccatacagaaagctgcaccttgaggggaagacacaagaatcctggagtggaaaaaaattgggtaatgatgacagccttcgaggtcttgagagtaaagcagaagcaaaaaaaaagtgttatttttatcttttgaagatggttccctcttaagacttttgcgaatgattaagatttcaattatgttccaggaaaaaaataagatttttgcttgacaaaaaaaatttttgtctagaacaggtgggaaggaagagatagtttagccacatccaagagacctgtaaattgggtacagtgaagtgaatggtgtaccagtcataaaagaatgttaactggagaagtctctgctgtcttcctgtaactgaggggggtgtaaccatccttgtggaagcgtccacttttattgaagattggctaaataaatctgtgcctactgaaactcaaa

SEQ ID NO: 78451 - DNA, 618 bp, Homo sapiens
ccatacgcttcaaggcgttccaaatatccgcttggaaatactacaaaaacagtgtttcaaaactgctctatcaaaaggaaggatccacactgtgagttgaattcacacatcacaaagaagtctctgagaattcttctgtctgggtttataggaagaaatcccgtttccaacgaaggcctcaaagaggtccaaatatccacttgcagattctacagaaacaatgtttccaaactgctctatcaagaggaatgttgcactcggtgagttgaatgcacacatcacaaagtagtttctgagattgcttctgtctaccttttatggaaagatattcccttttctaccataggcctgaaagcgctctcaatgtacccttgcaaattctacaaaaagagtgtttccaaattgctctatcaagagaaatctttatctcggtgagttgaaagcacacatcacaaagaagactctgagaattcttctgtctgggtttataagatgcccgtttccaacgaaggcctcaaggaggtccaaatacaaacaagctgattctacagaaagagtgtttccctgctctctcaagaggaatgttccactcggtgagttgtgcagacatcacagagg

SEQ ID NO: 78452 - DNA, 497 bp, Homo sapiens
caaactttttacaatctcctatcagtttgctcaatgctactgatgattgtttctatgaggaagctttctaaaaaaacaaacaaacaaaaaaactttctttttttgtacttttgcattgcttagattcctcaaaaaagtgtgcactttttttttcaaaacaatgattttctgaggagaaggaggagaaagagaggcataaggagaggaaaagaagaaagcaaggcaaaggcagaggagaaggaaatacagaagattctgggacacatttctgctcagattttatgtcccattggacacttcttggccaaaacaaagctagcctcatgcaggagaagctgaatgtcaggcagaaccagctggtggcttctctgtcccttcatatgctcatgtgtggctgccacatgaatcctgaggaatctgcctcactcaaagggagtgttggcatgggggagtgttgatatatattttttggattaaaaaaactatgctgaatttta

SEQ ID NO: 78453 - DNA, 413 bp, Homo sapiens
gaatctagacggagcagctcttggagttccagagtagaacactttgaatctggctgggggaaaaagattaagttagaattaaccttcagcttttttcattgatttcagatttactgcaaacctttccagttattgttttctttgtttgaacttagcgtttcaatgtgtaagtaatttgtaaactaggaactgaaattgatttcaattttatatttttatgattcaaacttaaatgaaagattattctaaaaatcaagagagtgaataacatgaaaaaatttaaaaattatctcaatactaatttttaaaaattgaggatatgaggcaagttgagtagaatccaatgttttctaaataatccttctaactaaagccttcccatgatatcgttacttgcctcttttttgctttta

SEQ ID NO: 78454 - DNA, 1885 bp, Homo sapiens
  misc_feature (1324)..(1324): n is a, c, g, or t
atgctataatgtctgaacagccactgcacttgggcaacatagcaagaccctgtctcttaaaaaaacagtctccatttatatagcattcaggaataggaaaaactacagggaaggcaaacacatcaatggcctcctgagctgggaatgggagttaattacaaagggacatgagggaatttttaggggtggtgtgacttcaatatcttgactgctgatgattgattgattacatgtttgacagaactcacagaactctacacttacgaaggaaaaaaagttttgtttttctagcttaaccaaagtggtaccaaacctttaaaatatcaagcttagaagaagggctagaacatgtccatattttacctcattagaaataaagaataggatgttgaaaatggtttgtgctttaagaagactgaaccaagctagtagctcggatttgggtgtccaccacctcaccttccaggcttataactggtaattctgctcaagaatctgtcctcagtgttttcaacatcgagaattaatttgagacaaactacatctagttcataaacaaagctagaattaaaaaggattcctgtcacaggccaaaactagtctacaaaccctcagggtggccaattcttgcttttaacaacagccaaagatattaaagaattccatgaatacagagatggatttttaaaaatacaagtatatataatactaaaaccctcaggaaagccaacatcttgaggtactctggctccagaagaatccatttctgtgggccatattccaagatctaagaggtgtatctgtttgactttactgagtggcttttcacctgacagaccagacaaacttaaaagctttcaagtcaaactttggtaggcaaaggtaaagtatgtcttttgttttagagtaggtgagcctgcaggtcaatttgtcaaaaatattaactaaccacaactatgagacactacacacagtgtagttcctgccttcatggggctcagttctgttcactggagtgggttttatatatacccaataaatagaagtgtgactggcctgtccaatctcgaagtcagaaaagggccatgggtagcatcacatccttagagactggatgcagtcaccagactttgaggaaagagggaaattcatcccaacctgtcatgctagctaagagagcaaaaagtcaagaatatgaacaatgtgacctaggctctgaaagctgaccaagacaccatctaaataaacctggactgacaatgaaaggactttcgttctcccttaaaataatgttcaaaatagcaaggaaatagagcttcagatntgtcttgtgtcacctggtctttcatgtgacagtcaaagatccacaatgtgaaagtgggattaacccatctgtgaagttctagtctgtgcagtcacaattgaccactgcaggttttaacaagaggaccctgtggggacacaacagacttcaattctttagccagcttttccttggctcagaatatggagagagctggaggccctccaaaccagaggatgttcgctggtcttcccaggagagaaatgaactatcttttgtaaaagtaagtttcaaaggccaagtgtagtggctcatgcctgtaatcccagcactttgggaggccaaggcaggtggataacttgaggtcaggagttcaaaaccagcttggcaaacatggtgagatcctgtgtctactaaaaatacaaaaaaaaattagccaggcatactggtacatgcctgtaatcccagctacttgggaagctgaggtatgagaactgcttgaatccaagaggcggaggttgcagtgagccgagatcgagccactacgctccagcctgggtgacagagtgagactctgcctca

SEQ ID NO: 78455 - DNA, 2158 bp, Homo sapiens
  misc_feature (1597)..(1597): n is a, c, g, or t
ctggaggaactgcaaaggtgcacaggcagtttaaaaaacaatccatccattttctaataatctgtgacaaagcaatcccattcgtaggtatttacccaagtgaaggaacatattcacacaaacctgtatgtgaatatagcaactttattcataatcaccaaaaactgaattcagtgaagtagccttccacctggtgaatgaataaatttgtacatccatggcaatgcaatacttcttgggaataaaataatgaactactgataatatggataagtctcaagcatcatgctaaataaaaagccagactcaaaagcctccattagctgggcatagtggcatgcacttgtagtcccagctactcaggaataggaaaaactacagggaaggcaaacacatcaatggcctcctgagctgggaatgggagttaattacaaagggacatgagggaatttttaggggtggtgtgacttcaatatcttgactgctgatgattgattgattacatgtttgacagaactcacagaactctacacttacgaaggaaaaaaagttttgtttttctagcttaaccaaagtggtaccaaacctttaaaatatcaagcttagaagaagggctagaacatgtccatattttacctcattagaaataaagaataggatgttgaaaatggtttgtgctttaagaagactgaaccaagctagtagctcggatttgggtgtccaccacctcaccttccaggcttataactggtaattctgctcaagaatctgtcctcagtgttttcaacatcgagaattaatttgagacaaactacatctagttcataaacaaagctagaattaaaaaggattcctgtcacaggccaaaactagtctacaaaccctcagggtggccaattcttgcttttaacaacagccaaagatattaaagaattccatgaatacagagatggatttttaaaaatacaagtatatataatactaaaaccctcaggaaagccaacatcttgaggtactctggctccagaagaatccatttctgtgggccatattccaagatctaagaggtgtatctgtttgactttactgagtggcttttcacctgacagaccagacaaacttaaaagctttcaagtcaaactttggtaggcaaaggtaaagtatgtcttttgttttagagtaggtgagcctgcaggtcaatttgtcaaaaatattaactaaccacaactatgagacactacacacagtgtagttcctgccttcatggggctcagttctgttcactggagtgggttttatatatacccaataaatagaagtgtgactggcctgtccaatctcgaagtcagaaaagggccatgggtagcatcacatccttagagactggatgcagtcaccagactttgaggaaagagggaaattcatcccaacctgtcatgctagctaagagagcaaaaagtcaagaatatgaacaatgtgacctaggctctgaaagctgaccaagacaccatctaaataaacctggactgacaatgaaaggactttcgttctcccttaaaataatgttcaaaatagcaaggaaatagagcttcagatntgtcttgtgtcacctggtctttcatgtgacagtcaaagatccacaatgtgaaagtgggattaacccatctgtgaagttctagtctgtgcagtcacaattgaccactgcaggttttaacaagaggaccctgtggggacacaacagacttcaattctttagccagcttttccttggctcagaatatggagagagctggaggccctccaaaccagaggatgttcgctggtcttcccaggagagaaatgaactatcttttgtaaaagtaagtttcaaaggccaagtgtagtggctcatgcctgtaatcccagcactttgggaggccaaggcaggtggataacttgaggtcaggagttcaaaaccagcttggcaaacatggtgagatcctgtgtctactaaaaatacaaaaaaaaattagccaggcatactggtacatgcctgtaatcccagctacttgggaagctgaggtatgagaactgcttgaatccaagaggcggaggttgcagtgagccgagatcgagccactacgctccagcctgggtgacagagtgagactctgcctca

SEQ ID NO: 78456 - DNA, 313 bp, Homo sapiens
ccgactctactgaaaatacaaaattagccgggcgtggtgacgcatgcctgtaatcccagctactcgggaggctgaggcaggagaattgcttgaacccgggaggtggaggtttgcagtgatcacaccactgcactctagcctgggtgacaagagcaaaactctgtctcaaaaaaaaaaaaaaagattaaatgaggtcatgagggtgagaccctgatccaagctcataagtgtccttagaagaaggacacttcttctaagtgtccttagaagtgtccttagaagtgtcctaagttggggagcttgctctccccaa

SEQ ID NO: 78457 - DNA, 291 bp, Homo sapiens
ttcctggcgctcagcaatttggcaatcttgaagaaccggctgaaatcaagatgaaattatctgcccacaggtttaaaaatgtagcaatacatgatggggtaaattatgcctaacttagacaagtatagcgataaattttacatgtggcctgaggctgatagaactgtgacgcctgagagttacaggatttgagggctggagttacttccgattcatcttaactgttcttaatgcatcattgtttattttttctttttttaagagaaaaaaaagtcacccaggctggagtgc

SEQ ID NO: 78458 - DNA, 385 bp, Homo sapiens
ggtacctcagatggaaatgctgaaatcacccgtcttctgcgtcgctcaggctgggagctgtagaccggagctgttcctattcggccatcttgtctcctccccccagcccacaacagcctatgaagaataactagaggtcttcatatcagaggcagaaggtactgcaagcttactttccaacgtggctgcatcgtttcacattcccaccagcagtatgaggtttccaatttctctgcatcctcatcaaaacttgttattatctgtcttttttattttagacgttctagaaggtgtggagtggtatctcattgtggtattgatttgcatttccttaaggactaatgcttttgcaacattttttcatgtgcttattgggccatttgta

SEQ ID NO: 78459 - DNA, 655 bp, Homo sapiens
tcacccacaaacccccttcaccttcaaaccccctccttaggcaacctggtggtcccccgctcccgggaggtcaccatattgatgccgaacttagtgcggacacccgatcggcatagcgcactacagcccagaactcctgggctcaagcgatcctcccacctcagcctacagagtttctgggactatagggatgcaccaccatgtctggctatttttttaaaaacttttttttttgtagagatagggggtgtcaccatttaacccaggctggtcttggactcctggccttaagcaatccttccatctgggactcccaaagtgctgagattattacaggcatgagccaccatgcctagccttaggaataagtcttttatgtgtctttatttagctccggtgtccccagctttagctcagccctcctgagggagtgggtattcttttgaatggtcaaaggaaaaagaagatatcaataaaactgtgacaaaaagataagcaatttgggcctgtaggaagtttgtgaacatggaagacagataaccaactagaacactcccgacatctttataactgcagtctgcagaaggaaaaaggcgtgaggtaagagttggaagaaagttctgatccatccagaaattagaatttgtactttacc

SEQ ID NO: 78460 - DNA, 308 bp, Homo sapiens
tacccatggaggctgccatgctgaagtggccgcagagaggtgctctgagcaaccgtcccagctgagcccagccttccagccatccctgccaatgtgtcagacacaggactaaaaagaacaccttagaaggggatcctccagccaccgcctcatatactagagtcaccctcagctctggggcttctggctgagaccctagacatcatgaagtagaaaagcctttcttgttgtgccttgcccaaagtcctgacccacagaagccaggattctctcttttttaaaaattggtaataaataatcattatttt

SEQ ID NO: 78461 - DNA, 507 bp, Homo sapiens
tttttttgcactagtgtctttttatctatgtcctttccagccaaggtggccagtagtttgagccaaaggaaggtacaggggcattcttttaccaacagggaacttggtttccttgagggccacagacaccataacagaccttgaaatgcaggcaccagtcagtgaatggaaagcaactctctgtacttgaaacatctggtcactgcatgtcctgtagataaaacatctgggagattgactgagtgccttagtttctgtccagatgttctttagacacagaccattacatgaaatcattagttgctcttggcaacacgcccaggagttctgaatcaggcatattcctacagggactgtctgtaaagagtttgaagggtgtttccatgaagatgatttacggagtttcagaaaggagtaacagagacacagttctgccaccaaccctgtatccctagactcaagatcagtagcatcttgcttaaaccaaagtgtatagtagagacctgt

SEQ ID NO: 78462 - DNA, 569 bp, Homo sapiens
cgcgttcgccaaactgtgaccccagaccttggccccgccacacagaaacccctgacccagactgtgacatccgactcctaaaatggtcatccgactccagactgtgacccctgaccccaaactgtgacccgaaccccagactgtgccccgaccagactgtgacccttgacatcaaaccgtgacaccccctcctcctcttccaccctcggtcgcttttccctactctgacctaggacacgtccccaacggaagccccgccttcccttgcaccgcgatgaacccaacctccctgaagccaaaacttcccaccctgccgcacctccggaccaccccacttgccaccaagcacatcctctccaaatccaacccttatttgcgacccttcagtgatgacccagcagacctccaaaaagcctcctctgcccagatctccagccgggtctggggctgggttgcggaggggagggtctgggagtccacacttctccaccaacttcccttcccactctcttattccacattgcagtgtttggaataaaccatgtttttatgcctcctcaaaaaaaaac

SEQ ID NO: 78463 - DNA, 369 bp, Homo sapiens
gttcatacattgacatattccccttcaatatacgtcttgttggcacagatactgactttttcacactgttaactttaaaccctatcagaggctgggcgcggtggctcacgcctgtaatcccagcactttgggaggccgaggtgggtgaatcacttgaggccaggagtttgagaccagcctagccaacatggtgatatcctctctctactaaaaatacaaaaaaattagccgagcatggtggtgcatgtctgaaatcccagctacttgggaggctgaggcaagagaatcgcttgaacccaggagacagaggttgcagtgagccaagattgtgctgctgcactccagcctgggcgatagagactgtctcaa

SEQ ID NO: 78464 - DNA, 417 bp, Homo sapiens
tgagtgccaggaactgtgcaaggtgctggagacataagacagataagacaaataaggaatttacaggctgttagagagtaggatgtgctaaccagaggggagtgcaggttaccagaggagaggtcaggttaaccagctgggagggaaggttaccagaggagagggcaatcaaatcagagggtgtgtgttattaactcaaattcggctgattctcaaaatcatcccagttgttttataaatatatggattcctgggctctacccatggcctaatgaattggaatcttccagagccattatctatacttttaataagctccctcattgattgaaacaatcatgatagttgtggagtaaggtctcacagacacagtatagagaactttgctctgggtgcagggtggatgccaaggagggg

SEQ ID NO: 78465 - DNA, 913 bp, Homo sapiens
tgaaaggaggagatcaagaagtcggtcttttgattacaactatagaagatcgtatagtcctagaaatagaccgactggaagaccacggcgtagcagaagccattccgacaatgatagaccaaactgcagctggaatacccagtacagttctgcttactacacttcaagaaagatctgaaagcggaaaaagaaccaaagaagggcagttcaagcgaccaaagggtgggtggaaggtgctgcagtatgaatactgtacgaatattttgactctggtctgaaaagataaaagaatgttatcgaaaactacatggaataattgaagtcccttcaagtttgaaagtaagcattttaggacaaataaaaggaaattcaactttgtacttgtggaaactaatccctaaatatgaataggtttatattgattcatgggtaacaggtccataataaattattggaaactaggatgtctgaatatcaaggaagacagccatagtctcttacagtgcctctgttggtctgtctcaaactgaattgggtgggaaaaggtatggtccaatataaaagttccatttttgccattattggcaaatcttgcctttgtttattttggtgccagtgttttctgcttaatcatttgctttgttggcatctgtgtttatttacttgtacaccacatgcagtttacatctgtcttaactactccttcccaggtaaattccaattatatttgacatccagctaagagggcccatctcttctcacctctttcctagtcagtatattcagcaaatatttattgagcccttactgtgggcaaatcattgtactggataattgagaaaaatagataattcccttattcagtaaatgtctactgagcacaatctagtgaatcattacagtatggcctcat

SEQ ID NO: 78466 - DNA, 475 bp, Homo sapiens
ctggcagtgacccagggttacctagttccactgctcactttagaaataaggaaactgaggtgtcagataggtcaggcgactagccccaaatctcacagatgagttagtaccacctaactcactctactctagaatcctttctagctccaggttagtgccctattcttctaacttgatattgtttctgcttccttgaatgtatttttcactttgaagttgtatctatgcggaacaagcaagttatagatttagggggaatgtttttgagtaatttaaatatcagatcctggcatttaaaaaagagctgagttcagttatccaaactaattgccttcacagatctaattttgtggaagatttctcctctccattttctgttgcctacgtagtcacagttgaatgtcacatacctttcttaaacaatatcttctcttctgtccaaaccagaactttgcttattttctgttggggcaca

SEQ ID NO: 78467 - DNA, 722 bp, Homo sapiens
gatgagtgccatcagaaagctgtatcatgagctgcctgcacttctaaagtgtccagtggatttttaatcacatgagcctggaaatagggttatgagaagaagctcagagcagagcaccgaaagtggccactaccagcatgaagagcccaacaattcaaactggtgaagtgagaaaaacagaatgcagctttcaaggttcgtttcaagcagttggcttgtgggactctgagagatgctgctgcccatgacatgcgggaattatcatgatcaactacccagcttggatttcacccagtggccaagagctttgtgtgggagacggcaagggttggatttttcaaaagagtaaaccaggctaccttctcctgccacagatactctatcccatttgctgtcatccaacgactaacaccgttttcacttcagaacgtcaagccttttctgttctcttcatggcctcctcccattaaagctgaaagtatctgctatcagtcatttgtcctaactgagtaagagtacattctttttagaatttaagaacctacactttagacctctcttcactaattatagaatccatcattcaacaaatatttattgattgcctactatgtgccatgctctgttccaggctttaagggtgcagtggtagcaatcacagataggaccccattattctgtctacaccttgtgaggggagatagtcaataaagaaacaaaca

SEQ ID NO: 78468 - DNA, 343 bp, Homo sapiens
tcttagactgccagagccacaggggtctgggctcagagatggctggttggagggtgggggtctgaactagggatgaagacaagggttgaaggtctctgcttgcagtaggagcatgtatatcctccccacttccccacttctgggtacaaaatgtcaggcaggccacaaaagtttatccacagggacaaaaaagtgtggatgtctctaagaaactgtaagaaagccactagtgtgggaagtgaatgcctcctgatgtagtttggatgtatgccttgcccacatctcatattgaaacataatccccaatgttagacgtggggcctggggacaggtgataggatta

SEQ ID NO: 78469 - DNA, 360 bp, Homo sapiens
cgagactctgtctctaaataaataaagaaataacagtgtaaattggctggaaagcttgctttgggttagctatagggtggcatgcctagctcatatctaaatactcatcctgctaatcctatgaacatcgtctcaccttagcaacaaaaacccatctggtagtccctgctctactcctaactggttaacaagaaaaaaaaaagtggcatttttttataggacatatacatttttcttaaatgtcctatacatttacacaatttcatttaacattgtgaactaggaacatcaggtaacttaagggagatgatcgttgtacacctcacttctcgcccaatttcacatggaatgtgaaaaaag

SEQ ID NO: 78470 - DNA, 413 bp, Homo sapiens
cttataggatataggaagttatcaggtaatttgctctggaaaggcttctagatgaagacagttactcatccactttcatcgttcctgttttcaacttttcatcattttctgagagttaaatcaataggaattatttaaaactagtattttggatgaattttgccagtgaattaatgcacatttagattgtgtttttaagactgcatataagtgctttataagtggttgcatgaatgttatttattaaaacttcatgaattcatcaccaataaagctgaggaaatctgattcccattttgtcttttcatgctaaagatgataaacatctgatgacacgccagtcattctgaaggtggctgtcaatctcgtcagcagttgattggatgacagcccagtgcagtgggaagggcgct

SEQ ID NO: 78471 - DNA, 875 bp, Homo sapiens
agaaagaaaaaaaagaaaagttagagttctatgaaaagaaaagagcatcacaaaataaaaggactcagaaacgttcttgaacttcaccctaacaaacatggcctgtgtacagacagaccaggcgactgttaaactaggaatcctgtaaaacacctcagtgccataaaaacggacaagaagaaggtcaacaagtccacacagagcttttgaaaaacaaaacagaaaaaggagataatatttcacacatattacttgaggaaaatcttccttacaccctgagaccaactatgaagaggaacaaaattctaactcagcactccaaacagaataaaatattctcaagtctgcatttcagcatatataaaataccttgaatcagaaattcaaacgtgcaaatagaaatggacaaaaagcaaggaggaataaaaagattgtcaattgaactccagaaaaaaatataagaaaaagacaaaattatctcagaaataaataaatcataaggcacccaagggataacagatgtaaattaaaatttaataaacgacattaaaaaaaatcaggaaagtggccgggcatggtggctcacacctgtaatcccagaactttgggaggccgaggttggcagatcacctaaggtcgggagtttgagaccagcctgaccaacatggagaaaccctgtctctactaaaaatacaaaaattagctggacatggtggcgcatgcctataatcccagctactcggaaggctgaggcaggagaatcactggaacccgggaggcagaggttgcggtgagccaagatcacgccattgcactccagcctgggcaacaagggcaaaattccatctcaaaaaaaaaaaaaaaaaaatcaggaa

SEQ ID NO: 78472 - DNA, 377 bp, Homo sapiens
cttttatagattatcccattatgagaggtacagagtaataacaaacccaattaaagacgtagaaagatgaaatatgaaggaaggattcaaacccaaggcagcctgactccagaaacaaaggattaaccacacaatgattacaactcacagattattacaattgcaagaagtacctaagcatgtggttataggcgggaaggaaacatgacctgctatagtaaccagaccagattggtgttctccccacttacaaagtattatttatttatttatttatttattttgtgatgaagtcttgctgtctcccaggctgggctgcagtggcaagatcttggctcactgcaacctctgcctccagggttcaagcgattctcctc

SEQ ID NO: 78473 - DNA, 1289 bp, Homo sapiens
gcagttatcatagagcacagtccctcacatcacacagctgcagagatgagtaaacaaagaggaaccttctcagaagtgagtctggcccaggacccaaagcggcagcaaaggaaacctaaaggcaataaaagctccatttcaggaaccgaacaggaaatattccaagtagaattaaatcttcaaaatccttccctgaatcatcaagggattgataaaatatatgactgccaaggtttactgccacctccagagaagctcactgccgaggtcctaggaatcatttgcattgtcctgatggccactgtgttaaaaacaatagttcttattcctttcctggagcagaacaattcttccccgaatacaagaacgcagaaagcacgtcattgtggccattgtcctgaggagtggattacatattccaacagttgttattacattggtaagaaagaagaacttgggaagagagtttgctggcctgtacttcgaagaactccagtctgctttctatagataatgaagaagaaatgaaatttctggccagcattttaccttcctcatggattggtgtgtttcgtaacagcagtcatcatccatgggtgacaataaatggtttggctttcaaacataagataaaagactcagataatgctgaacttaactgtgcagtgctacaagtaaatcgacttaaatcagcccagtgtggatcttcaatgatatatcattgtaagcataagctttagaagtaaagcatttgcgtttgcagtgcatcagatacattttatatttcttaaaatagaaatattatgattgcataaatctgaaaatgaattatgttatttgctctaatacaaaaattctaaatcaattattgaaataggatgcacacaattactaaagtacagacatcctagcatttgtgtcgggctcattttgctcaacatggtatttgtggttttcagcctttctaaaagttgcatgttatgtgagtcagcttataggaagtaccaagaacagtcaaacccatagagacagaaagtagaatagtggttgccaatgtctcagggaggttgaaataggagatgaccactaattgatagaacgtttctttgtgtcgtgatgaaaactttctaaatttcagtagtggtgatggttgtaactttgcgaatatactaaacatcattgatttttaatcattttaagtgcatgaaatgtatgctttgtacatgacacttcaataaagctagatgcggccgatactccgatcccttcattccccgcccaattcatca

SEQ ID NO: 78474 - DNA, 1266 bp, Homo sapiens
gcagttatcatagagcacagtccctcacatcacacagctgcagagatgagtaaacaaagaggaaccttctcagaagtgagtctggcccaggacccaaagcggcagcaaaggaaacctaaaggcaataaaagctccatttcaggaaccgaacaggaaatattccaagtagaattaaatcttcaaaatccttccctgaatcatcaagggattgataaaatatatgactgccaaggtttactgccacctccagagaagctcactgccgaggtcctaggaatcatttgcattgtcctgatggccactgtgttaaaaacaatagttcttattcctttcctggagcagaacaattcttccccgaatacaagaacgcagaaagcacgtcattgtggccattgtcctgaggagtggattacatattccaacagttgttattacattggtaagaaagaagaacttgggaagagagtttgctggcctgtacttcgaagaactccagtctgctttctatagataatgaagaagaaatgaaatttctggccagcattttaccttcctcatggattggtgtgtttcgtaacagcagtcatcatccatgggtgacaataaatggtttggctttcaaacataagataaaagactcagataatgctgaacttaactgtgcagtgctacaagtaaatcgacttaaatcagcccagtgtggatcttcaatgatatatcattgtaagcataagctttagaagtaaagcatttgcgtttgcagtgcatcagatacattttatatttcttaaaatagaaatattatgattgcataaatctgaaaatgaattatgttatttgctctaatacaaaaattctaaatcaattattgaaataggatgcacacaattactaaagtacagacatcctagcatttgtgtcgggctcattttgctcaacatggtatttgtggttttcagcctttctaaaagttgcatgttatgtgagtcagcttataggaagtaccaagaacagtcaaacccatagagacagaaagtagaatagtggttgccaatgtctcagggaggttgaaataggagatgaccactaattgatagaacgtttctttgtgtcgtgatgaaaactttctaaatttcagtagtggtgatggttgtaactttgcgaatatactaaacatcattgatttttaatcattttaagtgcatgaaatgtatgctttgtacatgacacttcaataaagctatccagaaaaaaaaaagcctctga

SEQ ID NO: 78475 - DNA, 250 bp, Homo sapiens
tctctgaggggctcacagaacctttagcttctctttcttcatccccttccacactcattgttgaagggagaggatggggcagggagggtccttccgggagcccagctctttttctctcactctaaatttcacctgtgtctatccttgcctgccctggagctgtaattcagacccactacttttcttgttcacttttctcacctgcatggcacacaaagacagacagaaccatccatagacacctgagcac

SEQ ID NO: 78476 - DNA, 934 bp, Homo sapiens
tgactgcctccttccagaccttctggcctcacccgcccacagtgagagctctctgtgacactctgagctccgaagaatccaacctgcccgagggtgggcaggattcagccatgagtgaaagagaactgggggaggaagcttggagctgcggcaggagctcgagggagatgtgggtggagacagaacggctgttttaaggtaccatataatactccgtagcacgggcagaactgaatcgatggtggggcactgaggcaatttccagttcttcactatcatgacattgctatgccaaacatccttgtcaatgaatctttgccatctagttccccagaaaacgatctagctttttgaagggtgtgcacattttaaagtcatttgcttgattttgccaaactggcctccagagggactactgaccgcatctcatgagcagggaagcatatgcctgtttcctcacatcctgccaacactgggcagcactgtcctttcggattgattctggtctgccaggcaaggaactctacgtcattgtcagggctggtttcgtgagccgttttacgcaggctttgtccattcctccatctgaccaggcagcctgcgggagctggcttcatctgaccttctgctttgaagcagcgcacacaggatgtttaatgaatagccgcaggcagtgaaggaagaggatccccagagcctgggacatcagctttcagtagagtgcaagcagttgcaggagccctgaacagaagtggggatggcatgctgctcttcccaaagctgcctgagctgccccaatggcgccacctcccaaggtggatgttcctccaagaacctcctcttccccttggctctgtttcaggtggtctgccttagtattcactttcatttttcatggttaggcccagctcttccttacatttgcagtgcatcc

SEQ ID NO: 78477 - DNA, 378 bp, Homo sapiens
attgatcttatatcctgtgagtttggtagaacttcaaatataatgttgaatggtaagagcaaacatccttgccttgttcccaatcttaggggaaaagtattcaatgtttcaccattaaatatgatgttagctgtagctgttcatgaatgtcctttatcaaaataaataaattctcttctattgaaactttgctaagaaacttggcattgaattttgtcaaatgttcctttctgcatctgttgaattgactatataatttttttcctttattaatgtggttaaactaaccttgaattcctaggataaatccttagtgaactcatataggtactttgaatattaattgccttctggctcctcccctaaatactggaaggc

SEQ ID NO: 78478 - DNA, 833 bp, Homo sapiens
ccagaggctgatgaaacgccggaagtccgtttaggggaactaactgcacattcaagagaggcgtccgtggatgctgggtctcactgccaaagccgaacacggcttcgggatttctgccttctcaagtggacctctgctgtgctgggcgaatgcctctactcattcccctacacaactgtggggatggtccagctacacatagacaggaagcccagagaaacgctcgatgtgagggtccccgcaagcccgtcgggctctttcggcacctggcccccccaaagctcctcaacgaggagtagagactgccaagcccttccactcattcatcatcataaaaatgtaacttgctatggcagcctcttggccattaagggctatactttgtgacctctgtccttgagatctttgctctgacaagttctatagccttctcagtgctgctatcgtgacgcagtgtccctgctgtggctaagtaacctttcgttttgatcaagatttgtccacgcagactcctacctctgcgcctttgcccgtgccgttcccactacctggaaggtctccccgttgctctccagctttgaggtggagacagagcatctcacacttccttttggtgtctcctgacccttttgctccctgctggacttggcgatgtcctcttctgggctcccctagtccttgttttggttgtgagcgaccgcaccagggagcaaaccttctatggccccggccacaggagcagcaagcactgggcagtgccccagacggaaggaccatcgcgagaataaaggcactgagatgtctggcatcttgcccaaatggccacttatcac

SEQ ID NO: 78479 - DNA, 832 bp, Homo sapiens
tagctttctaaggcacaaggtcactttctgatacctgtaagtttctattagaatggtgatgtgagagaagtgggaaaagcatgttctttgactaggcttaaagggttaatgactaatactccagccccagggaggatcctgaatcggctttgaagttagacatgggtttgttaacaatctaacctgtatcatcagtgataaagggggggaatacggttcatttcacctgagtataaagatgtgtgaaagtgcttagcacactgtaggcattcacaactcgccttccaggacccctgtgagcaagctcatgaaaaagtgactgttggtagcacagcttgtgtcagtcctgagtatcctggctcttgtatcccatgcacaagactgctgggtgtcctcctgtattcactttactggttttagcctgaacaacaaccagagccaggccctagtttcttatttctgacttctcaccatcccatctgcactggtaaagtttgcccatctatgtagccactcctgctcatttaactaaaatgtttagctttcatcccctcagtgtatttactgtggataccaagattgcttaagcctccacacagaagtggggcaccttggacagcactggcaaagcttctacagttaccataatatcataaacccttccgccacctccacttgaggcctaaaacaaggatgtttatcttttctgccttagttcatagtttgtgagactcatattttcattaataccactaatttgtcaaaacacaccttatttgcctgctgtgtaagataatgtaacctaaaaataaaggtctttttctgaatctta

SEQ ID NO: 78480 - DNA, 415 bp, Homo sapiens
gcatagtgatggcacttaccccgtagagttgtcagcaacacttctcaaacctcagtgtgcattcaagccacctggtgaccttcttaaaatgctgattctgacttagtaggactgggtcgggcccaagattctgcatttctaacaagctcctggatgatgctgatgaagatgtaacacagatcaagggcccccaatcacagcttatccccacgccccaccatccacccatctacccgccatgctgaatgatcccgcagccaagctaaaatgcatattccagccgggctttgtggctcacgcttgtaatcccagcactttgggaggccgaggcaggcggatcacttgaggtcaggagttcgagaccaccctgtccaacacgacgaaaccctgtctctactaaaaatacaaaaaaaaa

SEQ ID NO: 78481 - DNA, 2978 bp, Homo sapiens
  misc_feature (153)..(153): n is a, c, g, or t
  misc_feature (663)..(663): n is a, c, g, or t
  misc_feature (896)..(896): n is a, c, g, or t
  misc_feature (1122)..(1122): n is a, c, g, or t
  misc_feature (1181)..(1181): n is a, c, g, or t
  misc_feature (1303)..(1303): n is a, c, g, or t
  misc_feature (1309)..(1309): n is a, c, g, or t
  misc_feature (1464)..(1464): n is a, c, g, or t
  misc_feature (1466)..(1466): n is a, c, g, or t
  misc_feature (1798)..(1798): n is a, c, g, or t
  misc_feature (1968)..(1968): n is a, c, g, or t
  misc_feature (2109)..(2109): n is a, c, g, or t
gacaccctttgctcaagtgcttttacccctcagagagagcagcctcctaatatcagacactgggtatttctttatttctctcatcagagtcttttttaaccactaggtgacaaaagtcatgattagaaaatgaaaagtttgaatattacggtntaacatttttttaaaggcaaaccattactgccaaacatctcacctttatcaatgaaaagtacctactctgtgaataaaaatatctggaacataatagtctcagttctgcctgtgtttgactgaggtttattaagctctttgacttgtatacttgtatctaaaagaaatggagcaatctcatgagtagctaaaaaaaaatctcaggcctccatttcacatttgataatctgaacatatgagacatgattttcaaatgaccacccacagaggtattaaacaatgctctgggcttttattttagataactgaagtcagactgcaaaaaagttttaacaaaacctttgagaatatcttctgtaataatccttcctctgtctctgctcctaaattcccagcatcctttagtacagtgtttccactctttctgccctcacctgggcaacgtttcatacaccagaacttatatggccctgtttacttcagcagatgttccattttttggtcactggnaggtaatcaaaatagccaatacataccaatcatcaccaaagtgtaatttttccaaaatactgtaactgtactttaatatgggtcttttagaaatgcaatgccttatatgaatgcagtgattcaaaaccaacattaattaattaccatattgattgcatttttggcctaatgcattattaatatataccagatgcaacttatccaaatgataattgatacaatgaattcatagncctaagaaaataaaatacaaaataattgagaggtaggtgtctctcacagaaagtgaccctgatcataataaaatacacacatccatattcagcgattataggaaaggaatcaatcttttgtagtattaatatacttttgtggtataatctgaaattttttccattttttataaatattaatctaaaatattctaaaaataatttatttcttggttattctcatttngagattgccttgattaacaataatccaaagaatacaattgataaatgaataagtattcntcacaggataaatagtaagggcacatctcccagtttatttatataataaataattctagcaaaagtcaactattccattttataaatgaacagaatacataaggggatataggaagacaggnctctantagattaagactgtatgtaatttggggtgaaacttatttttgtgagatttacaagtgactgtgataattctctggattgtcagccaaaacccaggaaaacatggataaagaatgactgaattttcacagcctgaaagggaagttaaggtacatgntnccatgacaaactgtaaaaactgggaaggagtgagcctggatgttatagttgagaacatttggtgaacgatagattgaaaacaatggttacaccaagggaggagagagaatttcagtacagaaggaaaatatataatatgatataatagtatgtatgaagggtcataaaataatcataaaataataaattgccaagaggaaaaggagctaatataagaaagagcaagaaaatgttataattgtttatcacatatatatgttttttgtatatgtatatatgtgtgtgtgtgtgtatatatacatatacatatacatatatatatatatatatanataaagacagggttttgctatgttacctaggctagccccaaactcctgggctcaagtgatgctcctgcatcagcctctggaagagttgggattatggatgcatggaactgcaccctataccaaaatatatttttaaaagaagcatagcatattagacctaggatgaagcntaaaaagcatctagttaatcttcttcattttgcaaatgaagagactaaggtcacgagagataatagttgttgaaagccacaaaatcaattaatgacatgataataccatgttacagtgcaatgaagtatcactaaagttcnatagataatttgtttatttgaattagagctcaacctttcccactctaattttccaaggaagtaagcaatattattcagtggggacttttctctaacctcttagcaaaaaattgctaatcattttagacttattttgtctatattaaataataataattagcatgtatccattacttactgtattaggctgttctttcattgctataaaggaatacctgagactgggtaatttataaagaaaagatatttaattggctgacagttttgcaggctgtacaagcatggccccagcatttgctcagcttctggggaggcctcagggagattttactcatgaccttatgacagaaggtgaagtgggagaaggcacaccacatggtgagagcaggagcgagggtggggaggtgccagatacttttaaacaatcagatctccaagaactcactcattattacaaggatagcaccaagccataagggatccacttgcatgacccaatcacctcctaccaggccccacctccaacatcgaggatcacatttcaacatgtgctttgagcaggataaatatccaaaccatatcacttactatatgtcagatactgtgatgagtactttatatattttcttcccctctcatttagctcttacagcaacatcgaggatcacatttcaacatgtgatttgaacaggataaatatccaaaccatatcacttactatatgtcagatactgtgacaagtactttatatattttctttccctctcatttagctcttatagcaaccttatgaggaaggcattattagtgttccaattttcggatgaagaaatggagagtaaatgggggagtaacttaaccaaactctc

SEQ ID NO: 78482 - DNA, 335 bp, Homo sapiens
gttagaatttacgcccgatgaaatatgaatagtgaaaatggaattttggcgtaggtttggtctagggtgtagcctgagaaataggggaaatcagtgaatgaagcctcctatgaatggcaaataacagctcctattgataggacatcgtactacacgacacgtactccggaattccgctgcaaattcaagatagcacaccctccttgggtttgataatctgctagaacctcttacagcattcaggaaaatgccatacttaacaattaccattttaccaaaaaggacatgagtgaacagccagatgcacaggtacatgtggcaagatccggaagggt

SEQ ID NO: 78483 - DNA, 368 bp, Homo sapiens
tatttactattgcaaaagaaaatatgcgtacaaaggtattttgttgtccgatatagatttcttacaaatgaaaataaatgttggccaattatggtccttagaatgattcaaggattataaatcaagactgaaccaaaaacttcttaaaattattttctaaataagcatgatctaggtaaatggctttcaaatgaaagcagaccacaagcatcacctggagaatttattgaaatgcgtattcctgggacctcaccccacaaggattctatttcagtagttctgcaactaggatctggagtctgtttttaacatatgccccaggtggtttgaccacattttgctaaaactgaatctaggtgctaagaggt

SEQ ID NO: 78484 - DNA, 1462 bp, Homo sapiens
gatttgattgatcaggaagatacatcaattctaagccaattatacctaataacgtagcattaaaatatatgaagcgatatttgagagaagagacttctggttctaaacaaatggagcatacatattttttcttattcttcccactaagtacagctaaaaactctggaaataattcttaaacattagagaagagaaaaagactagctagggactttggtacttgaagaatgttatggtgtgaaaggagtggaaataaaatattaatctgaaaaatatacaacatgttacattgtgtatatagtcttaaaatggtttatagactatcataaactgatacatacaaatatgattgtgggatatagacattaataatcctttttctatggtgcatagagttaatttttaagaaaaaaacgacttttcataatactccagcctcaaattttgcctcaccagaatcagtgtgttttcaagaactggaactttctcaggttgttttcattttttaaaatgatcgactttactatttgattacatttattatggaaaatgtaaatatgcagaagaatgctaaaatagaaagtacccattatcccatcatcccccaaacaacaaaagataatgtgtattcatttctagtccttttatgtggatatatagaattttaaaaacaaaatactgtaaaattatatcctgatttttcacattttggagtaaccatttcttgaggacaatattctttgaaaacatgatcttcagtttcattgtttacatcagagtctaattatagctgtaccatactttacctccaaatatttggtatttcagattgttttaaatttttgctattgtaaatttgtatgaatatatttttatacataactgtattgctgataatttgtttaagataaattatgggaacagagttaccaattcaaagagtatagctatttttaaatttttgatacattttactaaattacagaaagattgtacttatttatagtcataccaatgaatgtcccggaaatgtccatttttttcatatcccttgcccaaagagaatggtggaggttacctctcaaacttttattattacaaattttaatagaggtaaaatattacctccttatcttaattttgcactttttctctgataattaatgaagtatgatctttttccatatgtttacagctgatttgctttgcttttctgtatattttaagcagcgtaggtcttgtaggagcttccaatgtaagccattacttgtcatatcattagttcttcctaaatgagcaagacatgaaactacatgtatttatcacattatttcaagttaagtatcccaatgtgactgaaattataatcttttctcctgggcagccatgttattttaatgtcttgtaatctaacaaaattggctcttattcttcacgtaataaagaggttttgaatattcca

SEQ ID NO: 78485 - DNA, 452 bp, Homo sapiens
ctgttctaaaaattaaagcttataaaacaaatgcaaacatgcctttggacccaggaggaaactcctgggaatttttctttggaaataactaaggatgattcatccacaatgatgtgtgtcacagagatgtgggtaatagtgaaaaggtagaaataatttaaatgcccaatattaggtatgataaatccatacaaatcaatcatgatcataatcttacagaaatatatttcttgatatgacattcatgattgataactgagtggaaaaagcagactgtgaaggagactgtcaagtatgagctgattttataaaagataacttatttttatatatgtatagaaggtgtatggggaaatatatttcactgtgataatggtgattatctgtggtggtaacataatggaattttttttcttttttatggaaccaatacttgtgtgttacagaaagta

SEQ ID NO: 78486 - DNA, 888 bp, Homo sapiens
cgtcactatcagaaaacatgaaaattcagtggaatgctggaatcctgatacaaatacttggacttctctagagagaatgaatgaaagccgaagtactcttggagtagtagtacttgcaggagaactttatgccttaggtggttatgatggacaatcttatttacaatctgtagagaagtacattcccaaaataagaaaatggcaacctgtggcaccaatgacgacaacaagaagttgttttgctgcagcggtattggatggaatgatatatgccattggtgggtatggtcctgcccacatgaacaggtatttaacttaataattaaattgcatatgtttatggatttttaaaagtctcattagcaatgatttctgagttttaaacaatttgtgtgtatgaatgaacttccggcatttgggaaacttaatctgctccatggatataattgtaattgttttacatgggaatttaatacaaacctaacaatcaaatccctctcattaaattttacattcattcactataaatggactagattttaaaactcagaaacctaaaaataagatgaagttagacaactttagattttgtgtggtgtgtacatctatgtgcacagtatgtaaattatcttttattgtattgcttaatagaataaagaagtagaaatttaattcctgtgtgtctatacaatattatagcacatcataaacttaaaaccttatttaaatattcctttctgaattctttcctgtaatcatacatgtatcatcaggtatttgacttgtgctggagtttgaatttgtgatatctgtattctgtagttttatctgaataaaggagaaatatatatgagaaaataaaagtatgaagtaactagttatatgaga

SEQ ID NO: 78487 - DNA, 840 bp, Homo sapiens
tttgccgcttgcacaatataatggaatagcatatgggattgcaccttgtttacaaggtaagcttttatctttgcaatcttatcagcaaaacctaagcatttgtggcagactactcttgtttaatatctctctattatgtgaacttttaaagctgtagtgggttttagttttgctttgacaggaagaatgacacaaaagatctgtaaactaaattttttttaaatatttgcagtgtggagcgttatgatccaagtaaggactcctgggagatggttgcatccatggcagataaaaggattcactttggcgtgggtgtcatgctaggctttatttttgtggtgggtggacataatggagtctcacatttgtccagcattgaaagatacgatcctcatcaaaatcagtggactgtgtgtagaccaatgaaagaacctagaacaggagttggtgctgctgtaatcgataactacctttatgtcgtcggtggtcactcagggtcttcctatctgaatacagtgcagaaatatgatcctatctcagatacgtggctggattcagctggcatgatatactgtcgctgcaactttgggttaactgcactttgacaaatgtgaactctcggaaatagtatggtggtgaaacttgtactgcatgaacatccggatggcccagttttctgaaacccacaagctgcattgctttctttttaacttgaagtagcatgaaggctcaaaagttttgttgggtacttttaattgagaagtagttttggttgctcttgattacacagtaaatcaataatcaaaaagaaaaaaaagaaaaaaaaaaagtaaagacttt

SEQ ID NO: 78488 - DNA, 340 bp, Homo sapiens
taaattttttttaaatatttgcagtgtggagcgttatgatccaagtaaggactcctgggagatggttgcatccatggcagataaaaggattcactttggcgtgggtgtcatgctaggctttatttttgtggtgggtggacataatggagtctcacatttgtccagcattgaaagatacgatcctcatcaaaatcagtggactgtgtgtagaccaatgaaagaacctagaacaggtaataagaatttattaatttctaaacatgtaaggcaatgttttctataatgatgtgcttgcaataatagttccttggaatatagcagtaggaatattacttgtcca

SEQ ID NO: 78489 - DNA, 914 bp, Homo sapiens
cgtcactatcagaaaacatgaaaattcagtggaatgctggaatcctgatacaaatacttggacttctctagagagaatgaatgaaagccgaagtactcttggagtagtagtacttgcaggagaactttatgccttaggtggttatgatggacaatcttatttacaatctgtagagaagtacattcccaaaataagaaaatggcaacctgtggcaccaatgacgacaacaagaagttgttttgctgcagcggtattggatggaatgatatatgccattggtgggtatggtcctgcccacatgaacagtgtggagcgttatgatccaagtaaggactcctgggagatggttgcatccatggcagataaaaggattcactttggcgtgggtgtcatgctaggctttatttttgtggtgggtggacataatggagtctcacatttgtccagcattgaaagatacgatcctcatcaaaatcagtggactgtgtgtagaccaatgaaagaacctagaacaggagttggtgctgctgtaatcgataactacctttatgtcgtcggtggtcactcagggtcttcctatctgaatacagtgcagaaatatgatcctatctcagatacgtggctggattcagctggcatgatatactgtcgctgcaactttgggttaactgcactttgacaaatgtgaactctcggaaatagtatggtggtgaaacttgtactgcatgaacatccggatggcccagttttctgaaacccacaagctgcattgctttctttttaacttgaagtagcatgaaggctcaaaagttttgttgggtacttttaattgagaagtagttttggttgctcttgattacacagtaaatcaataatcaaaaagaaaaaaaagaaaaaaaaaaagtaaagacttt

SEQ ID NO: 78490 - DNA, 544 bp, Homo sapiens
gcaggcgctcctttcctccctctgtgcctgttctcagactctgattcaaagcaggagccccgagcacccttcactgccccgtgggctcttttccttaagtattttcaagtttaattcaagtccttgttggcttcatttttcatattaataaggcatttattaacaaacccattcatgatgtgcaaatctgaaggctttaaactacggtgaactgttattttacagagagggtgtttttggtgctaattggagcattgttacagtcatttattcttttaagtttatttttaagcgtattattttttatcagtggtattaagtgcatttatagggttatgcagccagcaccactattttcaaatattttggttacctgaaaatgaaactctgtaaatacaaagagtcactcccccagcctcctacacccctcgttccactttctgtctgtgaattcgatgactgtaactgcctcctccaagtggactcacagtacttggccttttgtgactggctgatgtcaccgatcgtgatgtcctcaaggttc

SEQ ID NO: 78491 - DNA, 707 bp, Homo sapiens
ccattgtactcaagcctgggcgacactgagactacgtctcaaaaaaataatcaatcaataaataaaagaggcgtccacgttaacgagtccacagtcctaacaagtgctgcaggctggacgcggggcagcgtcccacccagtgtctggtgcagggcatttaggggcttggcctccaggagaggcgagcccggggctgggtgcgagcactgctgctggccaggccactcacgttatgcggccgttcctgatacttcaacacggcccttgtgggcgaatgtgtggaatctcggaacaagcggagtggggaacagggctctgcggtgaagcccaggctgaggcagcccctcatctgctcacggtgccaggagctccctgcctcctggtcctgaggagccgcgggattcctcagggacactagggcctctgcagcgcgcctgcgccaggcagccacgcgctgcgcacgaattctgtctcagcctggagaaaaacacctccgtgcgccctcgcccagcaccagctttccgcggggcgtgcaaggggctcctcctagccccacagccctgtctttccacggggacaccaaggccctggaacggccccgcggccagcgtctcgcccgtgtttaacgagaacttaatccccgtgcccgttacctccccgaagtcccgggactaggtgactaggccccgaagcaagagtcgcagtcg

SEQ ID NO: 78492 - DNA, 486 bp, Homo sapiens
aaagggagatttgttaacagccaatattcaaagagatgagagatgggtgtaccagcctgtatccactttagtcctctcttgggactactgggatctacttgctttcttcattgttagttatattaagttatatatgatttctccaagattctgcatggtcacaatttttgggaaaaactttgagaagaggtttggtggtcaccctgccatagctggtccctaaaccataaatgatactcatcatctctctcatccatcaccctttctaaatttctgtcttccttggttaacacttctgcttgtcaagatggcttgcctggtagaatggctcagaccctcattcctgttataaataggcccctggtccatggtggctcatgcctgtaatcccagcactttggaaggccaaggtggatgaatcatgaggtcaggagttcaagaccagtttggccaacatggtgaaaccccgactctactaaaaataca

SEQ ID NO: 78493 - DNA, 182 bp, Homo sapiens
ggcaggtgctggaagaaggcccctggaggaaccttgaactgcagatagtttaaggcacttggaaattacactgactttcagacagagcatatcacattagtttatctaaagccccaaatgaagaggatggggtgggggtggggagcctactatttactgtggaaccactgagaaaatatcct

SEQ ID NO: 78494 - DNA, 406 bp, Homo sapiens
gactgaaatcaagcatcttttctgatctcagtggtacaaaactgaaagtcaataacaggaagaaaactagaaaacctccacaaatatgtgtaaacctaaacaaccctgctccctcaacaaccccggcagtaggtcaaagaagaaaccctaaagggaaatcaaaaaatataatgagacaaattaaaatggaaacacaacatattaaaaccaaacttatggggtacagtagaagcagctctaaaagggaagcctatggcaataagtgcctacattgagaaaaaagacatatctgaaataaacaacctaactttatacttgaaggaatgagaaaaagaacaaactaagcccaaacttagtagaaggaaggaaataacaaagctcagagccgaaataaatgaagagacta

SEQ ID NO: 78495 - DNA, 332 bp, Homo sapiens
acggcccaacactcctaaggactctttataactgacttatggtctaggtgtgccacatcaagaggggctgccgatttccagaaatcactagcttaaaaaatatatcaaataagcaagccactctaccactctgggaccctgtgcatttgaagcttggtttgttccaaatcaaagtaagaacagaaaatagaaaatcggcaaaatttagctattgcagcacagagagaaaaggaacttttagacacataagcaatgggcaggttttaatcacaggcctagatctatggcttttatatgcacacattataattaataagtaaatatacatctac

SEQ ID NO: 78496 - DNA, 473 bp, Homo sapiens
aacacagatggagggcaagagggacagatggctctagctgggctgcctgggtgagatgctggggcctggccaggacagtgtcagttcccagaggtcctgggacaggggagaagggaggtcagggtcacagagagagaggcaggaagtagcaaaggcagagtctgcctgtgcaccaagcccgacccccctgctctgcccctgggccgtctctacctcaccccctcagctcccccggtctgagagaggggaggccgagcaggctgcagacccagccacatggggcaggggaaggagaggctggcattggtggagccacccactgcactgccagtcatacaaagaagtctatcacacagaattatgtgcagtattttttttttttgagacagagttttgatcttgtctctcaggctgggttgcaatggcacaatctcggctcactgcaacctccacctcctggcttcaagcgattc

SEQ ID NO: 78497 - DNA, 643 bp, Homo sapiens
aacacagatggagggcaagagggacagatggctctagctgggctgcctgggtgagatgctggggcctggccaggacagtgtcagttcccagaggtcctgggacaggggagaagggaggtcagggtcacagagagagaggcaggaagtagcaaaggcagagtctgcctgtgcaccaagcccgacccccctgctctgcccctgggccgtctctacctcaccccctcagctcccccggtctgagagaggggaggccgagcaggctgcagacccagccacatggggcaggggaaggagaggctggcattgtggtgcgctttcggcttactgcaaactctgcctcccgggttcaagtgattcttgtgcctcagcctcctaagtagctgggattacaggcatgtgccacacacctggctaatttttgtatttttagtagagatggggtttcaacatgttggccaggttggtctcgaactcctgacctcaagtgatccacctgcctgacctcaagtgatccacctgcctcggcctcccaaagtgctgggattacaggcgtgagccaccacgcccagccaccttttctatgtttagatacataaacactcaccactgtgtcacagtcacctacagtattcagtacagtagc

SEQ ID NO: 78498 - DNA, 550 bp, Homo sapiens
tggagctatttgtcagaaaaaactagatggaaagtagaggtggatgactttctgccctgtgaatgatagatcttcattcagggagtattttggagccagtgacctgtgacagttgtgagacttctcataatcattctgtggatggttggggtcttagaagaagtaatgattttgttttgaactggttgcatcagtttgaaccagagtttgtactaagggtattccaactgctttatttcctactctgtttagtctggggattgaaaaaggattacattttgggtgggttggtgcctattgacctatcctgtgtagcttagattttaatttgaatcatctggttctctttctttctctcaggcaatgtcactatctctgtttgtttaattatggggtgactcaagaaagcaaaggaagaggagcagcagacggggtttcctggggaaggaatggcaggtcatggctggtttttataagtgagttcctaagtgagaagtggtacaagaatatagagagaattaggaaatttaattttagaagagaccaaagg

SEQ ID NO: 78499 - DNA, 895 bp, Homo sapiens
caggaagcaagagagagagacagaggggaggtaacaggctccttttagccatcagctctcatgggaattgacagaacgagaattcactcacccccacccacctcctggaggggattaatctattcatgagggatccacccccatgacccaaacacctcccattaggcctcacctccaacactggagatcagactccaacattagatttggaagggacaagcatccaagctgtagcatggttccaggttggaaatcattttcccttcaacattcgaaggcagtgcactcagtgttgctgttgagaaatctgaagccgtgcagattcccatctccgggttgtatctgtttgctcgggatgccataacaaaggaccacagactggggggtttaaacagcagaagtttactttctcacagtactggaggctggaagtctgaggtcaaggtgctggcggtgtcggtttctcctgagccctctctcttttgccggggctgttctgcttgctggattggaaatgattttagcccctcatgccaggaagaaaacataggcagatttctcaccagctaaaaaggaaggaaaaattgtgaagtgaaattttctactggctgtggtttatccatgttaaattgtaaagcatataacacagatggaatccggcacatgcaaaacactcacaaaacctagttactactactgctggcgctgcggctacacgactacaactactactacagccactactctcctcctactgctactgctgctgctgctagtgtttcgtaaagtggagctacagaaatcaacattttttttcttagctgcacagtgaattcgttttttggactccagtattcttcctgaaggtctgtttcatcctagtatgactctcact

SEQ ID NO: 78500 - DNA, 369 bp, Homo sapiens
ttggaaagatgaaaaaattctggaagcagaaggtggtgatggttgcataacaatgtgaatgtacttaatgccatgaactatatacattttaaaatggttaaaatggtaaattttatattatatatattttatcacagtttaaaaataaaaaatgccactcactcaaggagaggagctgacgttgaaagcaattctgttttgcccttggtaccaaaattgaagaaggctgggggaagaagcatggtgggcaagcatgagaggcagatagtgtgggctcctgggcaagggcctgcaccctgctcttggggaatgggcagaaaccttgacagatttaagacaaaggaaacttggacctcatttcctaggtaa

SEQ ID NO: 78501 - DNA, 339 bp, Homo sapiens
tatgatctacttttcaatatgcatttgatacactttctgggaatgctttaggcaaagcgtggagttgcttatatatcattagcatgaaacttagtaagtattaataactgagaactcgttttgcccctacaaagctcacatatttatttagaccctttatccaccaagtgaaggtcacaaataaagctatctcttctcaaatcaaggcttaaattagagcatttaatcagcctgtattatgcagcatagatgtcaaagatacttgaagggatttccactatccagcttgaagggatgctatctaaccaaacctggataaattgagcattaaaattaaaa

SEQ ID NO: 78502 - DNA, 459 bp, Homo sapiens
aattaagtatcatatacccttttgtctcccaactgccggtcagttatgctttggacattattttagtagccatagtaagttgcttctaaaagtgaaaaacacaaatgttatgtttcttaatttcgttgaattagtcactataatgttgatgtagctaatcataaaaaggaatttgtgtcttatttgtctaatagaattcaaaatgaatttataatgtatataatttgatagggctacaataacaaaataccacacactgggtggatcaaacaaaaggaatttgttttcttactgttccagaggctagaagtctaggatcaaggtgtcaacaggttgtgtttcttctgaggcctcactgcctggcttggtctgtgtgttgtctatgtcacctcttggtctatgtgttgtctatgtcatatcggattaaagcctgcacatatgaactcattttactttaat

SEQ ID NO: 78503 - DNA, 2760 bp, Homo sapiens
  misc_feature (654)..(654): n is a, c, g, or t
  misc_feature (2754)..(2754): n is a, c, g, or t
  misc_feature (2756)..(2756): n is a, c, g, or t
  misc_feature (2760)..(2760): n is a, c, g, or t
aggagtctgtcagctacggaggacaatgaccttgcagacaccaccgcctgagtgagaaccaggggtctgtgcctctcctcattccccgctcttgcccttgtcaagcctgcaccagcatgtcaggaacctccaaggagagtctggggcatggggggctgccagggttgggcaagacctgcttaacaaccatggacacaaagctgaacatgctgaacgagaaggtggaccagctcctgcacttccaagaagatgtcacagagaagttgcagagcatgtgccgagacatgggccacctggagcggggcctgcacaggctggaggcctcccgggcaccgggcccgggcggggctgatggggttccccacattgacacccaggctgggtggcccgaggtcctggagctggtgagggccatgcagcaggatgcggcccagcacggtgccaggctggaggccctcttcaggatggtggctgcggtggacagggccatcgctttggtgggggccacgttccagaaatcaaaggtggcggatttcctcatgcaggggcgtgtgccctggaggagaggcagcccaggtgacagccctgaggagaataaagagcgagtggaagaagagggaggaaaaccaaagcatgtgctgagcaccagtgggntgcagtctgatgccagggagcctggggaagagagccagaaggcggacgtgctggaggggacagcggagaggctgccccccatcagagcgtcagggctgggagctgaccccgcccaggcagtggtctcaccgggccagggagatggtgttcctggcccagcccaggcattccctggccacctgcccctgcccacaaaggtggaagccaaggctcctgagacacccagcgagaacctcaggactggcctggaattggctccagcacccggcagggtcaatgtggtctccccgagcctggaggttgcaccaggtgcaggacaaggagcatcgtccagcaggcctgaccctgagcccttagaggaaggcacgaggctgactccagggcctggccctcagtgcccagggcctccagggctgccagcccaggccagggcaacccacagtggtggagaaacacctccaaggatctccatccacatacaagagatggatactcctggggagatgctgatgacaggcaggggcagccttggacccaccctcaccacagaggctccagcagctgcccagccaggcaagcagggcccacctgggaccgggcgctgcctccaagcccctgggactgagcccggagaacagacccctgaaggagccagagagctctccccgctgcaggagagcagcagccccgggggagtgaaggcagaggaggagcaaagggctggggccgagcctggcacgagaccaagcttggccaggagtgacgacaatgaccacgaggttggggccctgggcctgcagcagggcaaaagcccaggggcgggaaaccctgagcctgagcaggactgtgcagccagggctccggtgagagctgaagcagtaaggaggatgcccccaggcgccgaggctggcagcgtggttctggatgacagtccggccccaccagctccttttgaacaccgggtagtgagcgtcaaggagacctccatctctgcgggttacgaggtgtgccagcacgaagtcttgggagggggtcggtttggccaggtccacaggtgcacagagaagtccacaggcctcccactggctgccaagatcatcaaagtgaagagcgccaaggaccgggaggacgtgaagaacgagatcaacatcatgaaccagctcagccacgtgaacctgatccagctctatgacgccttcgagagcaagcacagctgcacccttgtcatggagtacgtggacgggggtgagctcttcgaccggatcacagatgagaagtaccacctgactgagctggatgtggtcctgttcaccaggcagatctgtgagggtgtgcattacctgcaccagcactacatcctgcacctggacctcaagccggagaacatattgtgcgtcaatcagacaggacatcaaattaagatcattgactttgggctggccagaaggtacaagcctcgagagaagctgaaggtgaacttcggcactcctgagttcctggccccagaagtcgtcaattatgagtttgtctcattccccacagacatgtggagtgtgggagtcatcacctacatgctactcagtggcttgtccccatttctaggggaaacagatgcagagaccatgaatttcattgtaaactgtagctgggattttgatgctgacacctttgaagggctctcggaggaggccaaggactttgtttcccggttgctggtcaaagagaagagctgcagaatgagtgccacacagtgcctgaaacacgagtggctgaataatttgcctgccaaagcttcaagatccaaaactcgtctcaaatcccaactactgctgcagaaatacatagctcaaagaaaatggaagaaacatttctatgtggtgactgctgccaacaggttaaggaaatttccaacttctccctaatcttcaactctgctgctccaatgggtccagaaattactgaggccagtggtgaagtgaagagatgactcaaacatttaaataatttggcttttggtattattgattccacttatttgtaaatggttatggctgctgcttcctgtggatgaaagtggctgtaagagctcctagacgtttntnctgn

SEQ ID NO: 78504 - DNA, 1100 bp, Homo sapiens
  misc_feature (1094)..(1094): n is a, c, g, or t
  misc_feature (1096)..(1096): n is a, c, g, or t
  misc_feature (1100)..(1100): n is a, c, g, or t
tgccgtgtggctatgtctctgcaggggtcggtttggccaggtccacaggtgcacagagaagtccacaggcctcccactggctgccaagatcatcaaagtgaagagcgccaaggaccgggaggacgtgaagaacgagatcaacatcatgaaccagctcagccacgtgaacctgatccagctctatgacgccttcgagagcaagcacagctgcacccttgtcatggagtacgtggacgggggtgagctcttcgaccggatcacagatgagaagtaccacctgactgagctggatgtggtcctgttcaccaggcagatctgtgagggtgtgcattacctgcaccagcactacatcctgcacctggacctcaagccggagaacatattgtgcgtcaatcagacaggacatcaaattaagatcattgactttgggctggccagaaggtacaagcctcgagagaagctgaaggtgaacttcggcactcctgagttcctggccccagaagtcgtcaattatgagtttgtctcattccccacagacatgtggagtgtgggagtcatcacctacatgctactcagtggcttgtccccatttctaggggaaacagatgcagagaccatgaatttcattgtaaactgtagctgggattttgatgctgacacctttgaagggctctcggaggaggccaaggactttgtttcccggttgctggtcaaagagaagagctgcagaatgagtgccacacagtgcctgaaacacgagtggctgaataatttgcctgccaaagcttcaagatccaaaactcgtctcaaatcccaactactgctgcagaaatacatagctcaaagaaaatggaagaaacatttctatgtggtgactgctgccaacaggttaaggaaatttccaacttctccctaatcttcaactctgctgctccaatgggtccagaaattactgaggccagtggtgaagtgaagagatgactcaaacatttaaataatttggcttttggtattattgattccacttatttgtaaatggttatggctgctgcttcctgtggatgaaagtggctgtaagagctcctagacgtttntnctgn

SEQ ID NO: 78505 - DNA, 924 bp, Homo sapiens
aatttttgtattttttagtagagacagggtttcaccatgctggccagggtggcctcgaactcctgacctcaggtgatctcccaaagtgctgggtctcccaaagtgctgggattacaggcgtgagcaattgcgcctggcctctctgggtagtattttgatagttagagggtgcatttatttctgtcctttgccagaagacatagactgtacacatttttttaaggtacttatataactatactgtacattaaaatataccactagggaagtggagtaccatgttctttggccactgtatccagtttggagagttaagtttttactttagggaagaagtggcagggtggggaggaaacagacccctcagcccttaccatttttcacgtagctggttctttctcatccttcctgtcccatcctacccaaacattttcctgcaccaacttctattgtagcaccttgaatatttccttcataacattgttttctcagaagtagaatagtatttggtacaagttggtactcaataaacatttattaaatgaatgaatatggaggaaatgatgtactcagctggctttcatgtattaaactctattttcaaaggacgaaaagggtcccatttccaagatacatgctgatttcataaagaatttggtcagatcttggctcataagtcatattacaaatatctttaacaggtcagctctggcttacaagccacacaaaggatctgaacctcttggtagataacagttatatttacaaaatgtatataaaataaaatgttacataaattaaaaataaaattatatataaatatatatttttaacatttatatattaattttgcaaatataaatatgaaaagtggctaacattgtatataaaatgcaatttggaataaaatacatttatgtaatg

SEQ ID NO: 78506 - DNA, 361 bp, Homo sapiens
agaatttataatggtaggaatttgacatttctgcctttcattctgaaaagatacattgattaaagtgatgtcaaactcagttaatggaggcggtgcagttatttgaaatatacagggtatataatttgaaggcacgccaaatcacaatgacaaggaataatgatgaccttggtttatttttatacagtacattcaggttttgattggattcagagagaggcaatggttttctttctcacaaagtcctgctatagtcctaggaggtttgtgttctgttatcaaggcagttggttcgtattggaatattttctggggaaggtcatgggctgcagtgtgggaaataaacgtttttattaaatgc

SEQ ID NO: 78507 - DNA, 1082 bp, Homo sapiens
cactttcctttcctgccctctcctatcttctccagatctgcctgtgaaaggacccaattctaggaccccccaggatggttaggcccttcctctgaaagtacactttgcaatttgttagtctcctcaagaaccccagcgatcgaaactgatgcacacaaattgcatgtgttcaaaggagcaattttgaatctagctttgttgatcctgggagaaatctttgacctgtgttagtgaaaggctatggtgtttctcagctgattataatagcgaggtagctgaatgcaaaaaaacagtttcagagaatggtagagtatatcctccaaaggtgatactcgcttctctattctggtgagagaaacaagagctaaagcaaaattctacagagggctttatttggagagaggtggattttatttataatgcatttaaaattcaaaatctttctagtttgaactcttgacattctgattaatgcatttttattcaactgttaattattcctcgatacacctcgccatcacttgtgtatcccttttctacatgtgacctttccctggccacatctgctactctctttgagcatgatgcctctactgtattctattccagagctcattgttttgtcagttttttttctctccacaaaaaaagatgatcaaataattacatagaatttttcccttctcagtctttgggtaactaagtgtggttttattgacgatgaaatacaagatgggtcatttaaaagcaacttcttgtcatcacttggtattttgctaaatccacggtgagctggagctcccgtagtcacctatcaccgcgtgtattttaaggagtcagatattctcgaaactgttaagatcatgaaagacaaagagactaaggaactgtcacagattaaaggagactaaagatacttgacaactgaatgtaatatatgacactcaaccggctcctgtaccagaaaaaggacattggttatattggtgaggtttgaatatctgtagattaccaatactattcttggttatggtggttatgtaagatttagagaagttgaataaaggatataaggacaaaaa

SEQ ID NO: 78508 - DNA, 834 bp, Homo sapiens
tgtagactcatgttaatagcagccttattcgaaatagccaagatgtgaaagcaactcaagtgtccacagatgaaaggataagcaaattgtggtatatacacatgatggattattattcaatcttaaaatggaaagaaattttgccatatgctgcagtatggataaaacttagagacatcacgctaaatgaaataagccagacacacaacaaacaaatactgtatgttccactctatgagtagtcaaaatcatgaagacatagtagcatggtggttgccagggagtggaggaggaggcaatgaaaggttagtgtttcatgtgtaaaaggtttcagttctgcaagatgaaaatagttctggagatggatgatggtgatggctgcacaacattatgaatgtacttaatgctactgaactgaacacttaaaaatggttaagatagtaaatttgatgttatgtgcattttcccacagtcaaaaaaaaaattgaggaaaaatattaatatttttaaaaatctgagattaaagaaactaataaaatgtaggtctgcacatttttctggacctgtagtagttgcaggcagatccctgaggtcaggagttcgagaccagcctggtcaacgtggtgaaacccccgtctctactaaaactgcaaaaattagctgggtgtggtggcaggtgcctgtaatcccagctactcgggaggctgaggtaggagaattgcttgaacccagcagacagaggttgcagtgagctgagatcgcgccactgcactcccacctcggcgacagagcgagactccatctcaaaaaaaaaaaaaaaatctgcagtagttt

SEQ ID NO: 78509 - DNA, 224 bp, Homo sapiens
cggaggatcaccacattccctttctgtgtgtatacactctggaaggcgctcggaggatcaccacattccctttctatgtgtatacactctggaaggcgctcggaggatcaccacattccctttctatgtgtgtacactctggaaggcgttcagaggttcaccacattccctttctatgtatatacactctggaaggcggttggaggttcaccacattccctttc

SEQ ID NO: 78510 - DNA, 548 bp, Homo sapiens
gggatgaagattgcctggtactttgggaaatataagagagggtgttctcagaggctaaccagggaaaggaaaatctaaatgaaaataagaactgtttcaaaaatcccattattattacccagttgacttaaatagaaaagtttcctcttttgtggatggggaagagtgcttttgtttttaggataattgagacgttcccagtatcaaaattgcaaatatttccagtatcttggtaatgatttccatgaggactataaagaaaaaagtttggagacctcccctccccctagcctccacccccaaccccgttcattttgctaagcaaaaaataaccagaggccctgtactaaattttgactttgaggatcaacatcgaaccttgtaaaatataaagcaaatacatttcttatatttttctaatcttgttaatggcagtcttcagattttatgttcttgatattcatttagaaacgtcttcctttaagtcatggcaatttgaagcattgaatagctttatcttaattgataatggtcagttttaaaacttg

SEQ ID NO: 78511 - DNA, 298 bp, Homo sapiens
ctcaggcctcacctagctccaggcccgcactccacagaaaaaaagattgacccggcgtgggggtgggggcttccagagatggcaaccctctggcaggaatccctcaggatcctgtcagagcctggtctctgggagttgacggagggagggagggagggagagagagagagagaaagagagagagattatcccagaatgtgcaggggaggaagcataagcaagggctcaggctcagagagacctgagcccaggcacatgcttgctgtgtgacctcggataaaacacttaacttctctga

SEQ ID NO: 78512 - DNA, 476 bp, Homo sapiens
caggtatcctcattctagattataacctttattcttatcaaatgcctccagtcccacaattcgctaagaattctctttctggacttgatagtgatttaatgattccccccgcccatggaatggtaggctcctaattaagtggatttaaaggcaaaaagggatgtgtgagaaggcacaagaagtggcttcatcttgcaaggtgactgtcagacaagtgggttccaacctgttaaaataagggaggaatggccacatcccgtagggactgctgtagctgaccaggaagacacaatgagggcagcagacagggctctccctgtccgctgagtcctcccatgaactcatgtttccaaaggccccactctttcttggtcagtgtcccagtttttatagaagagacctgatgaggctgtggagtaattgtataaaagcttgcactgttttcctgacttgacctgacaatgtggcgttatctt

SEQ ID NO: 78513 - DNA, 520 bp, Homo sapiens
attcacagtatggccaacagcaagatgcataccagggaccacctccacaacagggatatccaccccagcagcagcagtacccagggcagcaaggttacccaggacagcagcagggctacggtccttcacagggtggtccaggtcctcagtatcctaactacccacagggacaaggtcagcagtatggaggatatagaccaacacagcctggaccaccacagccaccccagcagaggccttatggatatgaccagggacagtatggaaattaccagcagtgaaaaagtacttacattccagtagccagtatctattagcagccatattgtcacctcagcactgtggacacctccctgtgaagagatccttccattccatctagtttttggaaaaaccttgtggataagtggctgtttcatcagtaagcagcctttgtggattagttataaaaggctttagtagctcaaaaatactcttgatttcacatttctaaattatttgtgattttaatttaaaaaaa

SEQ ID NO: 78514 - DNA, 968 bp, Homo sapiens
attcacagtatggccaacagcaagatgcataccagggaccacctccacaacagggatatccaccccagcagcagcagtacccagggcagcaaggttacccaggacagcagcagggctacggtccttcacagggtggtccaggtcctcagtatcctaactacccacagggacaaggtcagcagtatggaggatatagaccaacacagcctggaccaccacagccaccccagcagaggccttatggatatgaccagggacagtatggaaattaccagcagtgaaaaagtacttacattccagtagccagtatctattagcagccatattgtcacctcagcactgtggacacctccctgtgaagagatccttccattccatctagtttttggaaaaaccttgtggataagtggctgtttcatcagtaagcagcctttgtggattagttataaaaggctttagtagctcaaaaatactcttgatttcacatttctactctagatggcaacattggacagaaaatgcaatgacataaccaatttgtaatgattttggaactgtgtttcaaatggactgttacagactgaaaggtgtgaacagctttgtatgtttatgaagggtaagggaatttaatacttttccacagatttttttgtaaggggaagagggaaatgtacactttttacagcagcaatattttgtatattatgtttatttcatgtggtgaatatgcaaggcggtacactacgcactggacagcatcagaaatcctctgttaatgtggactggagcatggtagatgcttgattgttttggtctcaaaatggtgtgctataaagataaaggtgaggggaagacaaagcacaccatatgtccactgttctgttctcatagaggaaattcaaatcccttttatctattagataatcaagggcactgtgatacagttttgagtaaaaagacatttttta

SEQ ID NO: 78515 - DNA, 1407 bp, Homo sapiens
attcacagtatggccaacagcaagatgcataccagggaccacctccacaacagggatatccaccccagcagcagcagtacccagggcagcaaggttacccaggacagcagcagggctacggtccttcacagggtggtccaggtcctcagtatcctaactacccacagggacaaggtcagcagtatggaggatatagaccaacacagcctggaccaccacagccaccccagcagaggccttatggatatgaccagggacagtatggaaattaccagcagtgaaaaagtacttacattccagtagccagtatctattagcagccatattgtcacctcagcactgtggacacctccctgtgaagagatccttccattccatctagtttttggaaaaaccttgtggataagtggctgtttcatcagtaagcagcctttgtggattagttataaaaggctttagtagctcaaaaatactcttgatttcacatttctactctagatggcaacattggacagaaaatgcaatgacataaccaatttgtaatgattttggaactgtgtttcaaatggactgttacagactgaaaggtgtgaacagctttgtatgtttatgaagggtaagggaatttaatacttttccacagatttttttgtaaggggaagagggaaatgtacactttttacagcagcaatattttgtatattatgtttatttcatgtggtgaatatgcaaggcggtacactacgcactggacagcatcagaaatcctctgttaatgtggactggagcatggtagatgcttgattgttttggtctcaaaatggtgtgctataaagataaaggtgaggggaagacaaagcacaccatatgtccactgttctgttctcatagaggaaattcaaatcccttttatctattagataatcaagggcactgtgatacagttttgagtaaaaagacattttttaaaagccttccagttttgtggattaaacctttttataaagatcatttataatactgttttaaaatgtgaggcaataagaattactttgtgttggatctgaggaggctttggtaaaacagtttcatctaaatgaaagtggtaatcctcttctaaaatagcaataactgaaaatgaaagtgttaattttaccttgtttgagttatcagggaacttagtaagtaatatcaaagcattttataaatgatatcaaagaagagtcaacattgatccagtcattttattttgtaatattgagggataattggttattaaactgaatagttcaggagactttacaaacctttgtttcaactttcttatctggaaataatatcatttataaagggacactttatgtttttcccttttttatgttggttgatataacacaaagagatatt

SEQ ID NO: 78516 - DNA, 1417 bp, Homo sapiens
gggggatctcatttctccccaggggctctaggctgtggatgtgagaaggggagcaagggaggcagatggcgacaaggaacagccccatgcccctgggcacggctcagggtgatcctggagaggcaggaacacggcccggccctgacgccagcctccgggacacaggtgcggccactcagctcaagatgaagcccaggaaggtgcacaagatcaaggcggtcatcatcgacctgggctcccagtactgcaagtgcggctacgcgggagagccgaggcccacctacttcatctcctccaccgtgggcaaacgctgccccgaggcggccgacgctggcgacacccgcaagtggactttagtgggccatgagctgctcaacacggaggcgcctctcaagctggtgaacccgctgaagcacggcatcgtggtggactgggactgcgtgcaggacatctgggagtacatcttccgcaccgccatgaagatcctccccgaggagcacgctgtgctggtctccgaccctccgctcagccccagcagcaaccgggagaagtacgcggagctcatgtttgagaccttcggcatcccagccatgcacgtgacgtcccagtcgttgctgtccatctattcctacggcaagacctcggggctggtggtggagagcgggcacggcgtctcgcacgtggtgcccatatccgagggcgacgtgctgccgggcctgaccagccgcgccgactacgctgggggtgacctcaccaactacctgatgcagctgctcaatgaggcgggccacgcattcacggacgaccacctgcacatcatagagcacatcaagaagaagtgctgctatgcggccttcctgcccgaggaggagctgggcctggtcccggaggagctgcgcgtggactacgagctcccggacggcaaactcatcactattggccaggagcgcttccgttgctctgagatgctcttccagccctccctggcaggcagcacccagccgggcctcccggagctcacagctgcctgcctgggccgctgccaggacacgggcttcaaggaggagatggccgccaacgtgctactgtgtggcggctgcactatgctggatggcttccccgagcgcttccagagggagctgagcctcctctgccccggggacagccctgcagtggctgccgctcctgagaggaagacctccgtgtggaccggcggttccatcctggcctccctgcaggccttccaacagctctgggtcagcaaggaagagtttgaggagcggggcagcgtggccatctacagcaagtgctgagcctcggcatttccacagacaaggcctccagcacagatggccacaggcctctctatacacatttacagaatttcacataaaggtttactctgaaaaaaaaaatg

SEQ ID NO: 78517 - DNA, 575 bp, Homo sapiens
ttctaaattgtattcctaaatgatgttaactattgttccccgaaattgcatcagggttaaaaatttgtgttgaggttggtttgaattaatctaaatattcaacatgtgctcttgccataaagcagaaagcaaaggcctgaagtagacaagctttttaacctttctggcatttcatagatttcaccttaataaaattctgaaaactcccattatagtataattagcttcctttattttatttatgtatttttttgagacacctgtgtaggtatctgtggacacatttatgagaatcggttggccctgcaactctcccagtcaagctcactgccaggctaactttggcttgtgtaccttctcctcttagtttcaccaatacttgacagagtctggctcagcacagctctatgggatggagggccagatggctcccaaagagccctgaccagaggcacaggcctgtgaccaggtgtcctattctaggacagatggcttgaattgcctcctgctcccttttgctctgacagtctctgggactactgagcgctggggccactacagaaattggatgatgc

SEQ ID NO: 78518 - DNA, 335 bp, Homo sapiens
aagtcagggaagctagattatgtttagtgtcataagtacaaataaagcagcattagcatttaagagtgacagagaaagcaagctgaatttatagtctgtgttttctgctactgttactattctctgagttgacatatttgagttctaagactgcaaagatatattcctgatgacgtcagtctctcatcctagggtttcaaactcctttaaaaataaggtagctatgataccttataaacttattggctaaagggatcagaattgccctacctctctgctttcctcctattcccaaccttagtgactacataacagaggcagttttccagatattc

SEQ ID NO: 78519 - DNA, 763 bp, Homo sapiens
ggtgacttggccatagtcacacagccacctggatagagatgagtggtgagtggtgaacccggagaaacatggcttcttgcctccttggtctttgtgcacgggcctcccgcttcccgagtctctcctggcccagcagtggtttgctgaaggctgttttattttaggcaccggctgagctacctctgatcttgttgggttagcctaggtgtggttctttggtttttcagtttgtataaccatgttctttgttcagctcctatcagggttagggaggtcaaacacctatgtgtcaggatacgcctgacacacactatttaaaactcacactgttttaaatgtatagtatttaaaactttatggtcagctgtacttaccggctgagtacagaactaggaaagctggtggctacttgcaaggagcagctgcttagtagcggaggttgagtaataaggaccccagttgctgaacagctcctggaagaatatctgttcccggctgggcgtgatggctcaagcctgtaatcccagcactttgggaggccaaggcgggtggattgcctgagctcaggagttcgagactaccctgggtaacatggtgaaaccctgtctctactaaaaatacaaaaattagccaggcatggtggcgggtgcctgtagtcccggtgactcgagaggctgaggcaggagaatcgcttgaacctgagaggcggaggttacaatgagctgagatcatgccgctgcattccagcctgagtgacagagcg

SEQ ID NO: 78520 - DNA, 2603 bp, Homo sapiens
tcgggatcgccgctcggagcgggagtcgcgccctcccgccccgcgccgcggaacttgctctaacttcctcggccgagccgggccgcgccgccgctgccgccgccgcgcgcggattctgcttctcagaagatgcactattatagatactctaacgccaaggtcagctgctggtacaagtacctccttttcagctacaacatcatcttctggttggctggagttgtcttccttggagtcgggctgtgggcatggagcgaaaagggtgtgctgtccgacctcaccaaagtgacccggatgcatggaatcgaccctgtggtgctggtcctgatggtgggcgtggtgatgttcaccctggggttcgccggctgcgtgggggctctgcgggagaatatctgcttgctcaactttttctgtggcaccatcgtgctcatcttcttcctggagctggctgtggccgtgctggccttcctgttccaggactgggtgagggaccggttccgggagttcttcgagagcaacatcaagtcctaccgggacgatatcgatctgcaaaacctcatcgactcccttcagaaagctaaccagtgctgtggcgcatatggccctgaagactgggacctcaacgtctacttcaattgcagcggtgccagctacagccgagagaagtgcggggtccccttctcctgctgcgtgccagatcctgcgcaaaaagttgtgaacacacagtgtggatatgatgtcaggattcagctgaagagcaagtgggatgagtccatcttcacgaaaggctgcatccaggcgctggaaagctggctcccgcggaacatttacattgtggctggcgtcttcatcgccatctcgctgttgcagatatttggcatcttcctggcaaggacgctgatctcagacatcgaggcagtgaaggccggccatcacttctgaggagcagagttgagggagccgagctgagccacgctgggaggccagagcctttctctgccatcagccctacgtccagagggagaggagccgacacccccagagccagtgccccatcttaagcatcagcgtgacgtgacctctctgtttctgcttgctggtgctgaagaccaagggtcccccttgttacctgcccaaacttgtgactgcatccctctggagtctacccagagacagagaatgtgtctttatgtgggagtggtgactctgaaagacagagagggctcctgtggctgccaggagggcttgactcagaccccctgcagctcaagcatgtctgcaggacaccctggtcccctctccactggcatccagacatctgctttgggtcatccacatctgtgggtgggccgtgggtagagggacccacaggcgtggacagggcatctctctccatcaagcaaagcagcatgggggcctgcccgtaacgggaggcggacgtggccccgctgggcctctgagtgccagcgcagtctgctgggacatgcacatatcaggggttgtttgcaggatcctcagccatgttcaagtgaagtaagcctgagccagtgcgtggactggtgccacgggagtgccttgtccactgtccccctgtgtccaccagctattctcctggcgccggaactgcctctggtcttgatagcattaagccctgatggcgccggtggcgcggtgggcatggttcttcactgagagccggctctccttttcttaaagtgtgtaaatagtttatttataggggtaagaatgttctcacaccatttcacttcctcttcctctcctccagcattctcctctgagcagccttagatagtgtccatggctggagccgaccctttgagtccccttgagtgtcttaagaaccagcccacaacagcctctctttctcctccacatactgcagcctccctccatgcatcccacatacaagcactcccccactccccagcgtggcctcactgtcttctggtcttggtgctactgaaattgtcacccagaatttgaatcctgaccctccccactgcaagcccagggagccccagcccaagatggccagcctgaaactgttggccagggctcctcttgtggccatgtacccagggctggctggcctgccatttgcctctccccggagacagccgttcttctgcaaccacaccccgtgcctagccacaaccccaggctgcagctgctcagaagctccaggcattttgtttctggtgaccgcccctaatgggatatcggtgatcactggtccacccttcctgtcagggcttttctggggctgctcttggaaatgaagtcttaagtactgaataactcccctggggatagctggggcatttgtctagctgggctactttctaacactttgccatagctcagaccacttctcatcgttcagggatggactgcaaccttaatttacttgccggagtgtacattctagtgtggtgtatactggtggctgttgatgatgatttttttttttttttttacacaattctctgtagactaggagaagaatgcttgtgtttttcggaagtgtgatgcttctctttgactgccaaactcttttatggaatatatctttatattaatgc

SEQ ID NO: 78521 - DNA, 2507 bp, Homo sapiens
tcgcaggtgaggcccggtttatcggacgagggccgggccgcgccgccgctgccgccgccgcgcgcggattctgcttctcagaagatgcactattatagatactctaacgccaaggtcagctgctggtacaagtacctccttttcagctacaacatcatcttctggggtgtgctgtccgacctcaccaaagtgacccggatgcatggaatcgaccctgtggtgctggtcctgatggtgggcgtggtgatgttcaccctggggttcgccggctgcgtgggggctctgcgggagaatatctgcttgctcaactttttctgtggcaccatcgtgctcatcttcttcctggagctggctgtggccgtgctggccttcctgttccaggactgggtgagggaccggttccgggagttcttcgagagcaacatcaagtcctaccgggacgatatcgatctgcaaaacctcatcgactcccttcagaaagctaaccagtgctgtggcgcatatggccctgaagactgggacctcaacgtctacttcaattgcagcggtgccagctacagccgagagaagtgcggggtccccttctcctgctgcgtgccagatcctgcgcaaaaagttgtgaacacacagtgtggatatgatgtcaggattcagctgaagagcaagtgggatgagtccatcttcacgaaaggctgcatccaggcgctggaaagctggctcccgcggaacatttacattgtggctggcgtcttcatcgccatctcgctgttgcagatatttggcatcttcctggcaaggacgctgatctcagacatcgaggcagtgaaggccggccatcacttctgaggagcagagttgagggagccgagctgagccacgctgggaggccagagcctttctctgccatcagccctacgtccagagggagaggagccgacacccccagagccagtgccccatcttaagcatcagcgtgacgtgacctctctgtttctgcttgctggtgctgaagaccaagggtcccccttgttacctgcccaaacttgtgactgcatccctctggagtctacccagagacagagaatgtgtctttatgtgggagtggtgactctgaaagacagagagggctcctgtggctgccaggagggcttgactcagaccccctgcagctcaagcatgtctgcaggacaccctggtcccctctccactggcatccagacatctgctttgggtcatccacatctgtgggtgggccgtgggtagagggacccacaggcgtggacagggcatctctctccatcaagcaaagcagcatgggggcctgcccgtaacgggaggcggacgtggccccgctgggcctctgagtgccagcgcagtctgctgggacatgcacatatcaggggttgtttgcaggatcctcagccatgttcaagtgaagtaagcctgagccagtgcgtggactggtgccacgggagtgccttgtccactgtccccctgtgtccaccagctattctcctggcgccggaactgcctctggtcttgatagcattaagccctgatggcgccggtggcgcggtgggcatggttcttcactgagagccggctctccttttcttaaagtgtgtaaatagtttatttataggggtaagaatgttctcacaccatttcacttcctcttcctctcctccagcattctcctctgagcagccttagatagtgtccatggctggagccgaccctttgagtccccttgagtgtcttaagaaccagcccacaacagcctctctttctcctccacatactgcagcctccctccatgcatcccacatacaagcactcccccactccccagcgtggcctcactgtcttctggtcttggtgctactgaaattgtcacccagaatttgaatcctgaccctccccactgcaagcccagggagccccagcccaagatggccagcctgaaactgttggccagggctcctcttgtggccatgtacccagggctggctggcctgccatttgcctctccccggagacagccgttcttctgcaaccacaccccgtgcctagccacaaccccaggctgcagctgctcagaagctccaggcattttgtttctggtgaccgcccctaatgggatatcggtgatcactggtccacccttcctgtcagggcttttctggggctgctcttggaaatgaagtcttaagtactgaataactcccctggggatagctggggcatttgtctagctgggctactttctaacactttgccatagctcagaccacttctcatcgttcagggatggactgcaaccttaatttacttgccggagtgtacattctagtgtggtgtatactggtggctgttgatgatgatttttttttttttttttacacaattctctgtagactaggagaagaatgcttgtgtttttcggaagtgtgatgcttctctttgactgccaaactcttttatggaatatatctttatattaatgc

SEQ ID NO: 78522 - DNA, 695 bp, Homo sapiens
cggatccccattttcccccagggaaacaggttatcacatatttccgaatttaattcggctcccctttagggaatttggcccctgagggccaagatttcggcccaggccatgactgcaagcccagggagccccagcccaagatggccagcctgaaactgttggccagggctcctcttgtggccatgtacccagggctggctggcctgccatttgcctctccccggagacagccgttcttctgcaaccacaccccgtgcctagccacaaccccaggctgcagctgctcagaagctccaggcattttgtttctggtgaccgcccctaatgggatatcggtgatcactggtccacccttcctgtcagggcttttctggggctgctcttggaaatgaagtcttaagtactgaataactcccctggggatagctggggcatttgtctagctgggctactttctaacactttgccatagctcagaccacttctcatcgttcagggatggactgcaaccttaatttacttgccggagtgtacattctagtgtggtgtatactggtggctgttgatgatgatttttttttttttttttacacaattctctgtagactaggagaagaatgcttgtgtttttcggaagtgtgatgcttctctttgactgccaaactcttttatggaatatatctttatattaatgc

SEQ ID NO: 78523 - DNA, 807 bp, Homo sapiens
  misc_feature (48)..(48): n is a, c, g, or t
  misc_feature (54)..(54): n is a, c, g, or t
  misc_feature (57)..(57): n is a, c, g, or t
aacaataatgtcatagtagatcctggtgttaatcatcacgagggcggnccggcngtngtgccgcgccgcgcgcggattctgcttctcagaagatgcactattatagatactctaacgccaaggtcagctgctggtacaagtacctccttttcagctacaacatcatcttctggggtgtgctgtccgacctcaccaaagtgacccggatgcatggaatcgaccctgtggtgctggtcctgatggtgggcgtggtgatgttcaccctggggttcgccggctgcgtgggggctctgcgggagaatatctgcttgctcaactttttctgtggcaccatcgtgctcatcttcttcctggagctggctgtggccgtgctggccttcctgttccaggactgggtgagggaccggttccgggagttcttcgagagcaacatcaagtcctaccgggacgatatcgatctgcaaaacctcatcgactcccttcagaaagctaaccagtgctgtggcgcatatggccctgaagactgggacctcaacgtctacttcaattgcagcggtgccagctacagccgagagaagtgcggggtccccttctcctgctgcgtgccagatcctgcgcaaaaagttgtgaacacacagtgtggatatgatgtcaggattcagctgaagagcaagtgggatgagtccatcttcacgaaaggctgcatccaggcgctggaaagctggctcccgggaccttccttgtggggggctctcgctctcgcggggcgtttggtctccggaggccgtccactgggggggggccttg

SEQ ID NO: 78524 - DNA, 744 bp, Homo sapiens
tcgttgtaaatctagatgggccgccggctcgatcgacgtcgcacgcgcgcggattctgcttctcagaagatgcactattatagatactctaacgccaaggtcagctgctggtacaagtacctccttttcagctacaacatcatcttctggttggctggagttgtcttccttggagtcgggctgtgggcatggagcgaaaagggtgtgctgtccgacctcaccaaagtgacccggatgcatggaatcgaccctgtggtgctggtcctgatggtgggcgtggtgatgttcaccctggggttcgccggctgcgtgggggctctgcgggagaatatctgcttgctcaactttttctgtggcaccatcgtgctcatcttcttcctggagctggctgtggccgtgctggccttcctgttccaggactgggtgagggaccggttccgggagttcttcgagagcaacatcaagtcctaccgggacgatatcgatctgcaaaacctcatcgactcccttcagaaagctaaccagtgctgtggcgcatatggccctgaagactgggacctcaacgtctacttcaattgcagcggtgccagctacagccgagagaagtgcggggtccccttctcctgctgcgtgccagatcctgcggcaaaaagttgtgaacacacaggtgggtttgatgcaggattcactgagaccagtggatagcccctccgaaggtgtcagggcggaaaatgtccggaaata

SEQ ID NO: 78525 - DNA, 338 bp, Homo sapiens
agacgtctcgtccattctggcatacagaccctccctgccagagctcctggaaggctcctgcaggcctgacccatctattcctgtagacctggtttaggatgaagtctcggtgcgatttttgcagagttgggtttatctttcaactatagacccttctggctgttctcagccatatcatgtgactctgaatagttggatgaggaatggaaagaaagcaaggatggacgtctatgcaagaatggacgtctatgcaagaatggacgtctatgcaagaatggacgtctatgcaagaatggacgtctatgcaagaatggacgtctatgcaagaatggacgtct

SEQ ID NO: 78526 - DNA, 5595 bp, Homo sapiens
tcgggatcgccgctcggagcgggagtcgcgccctcccgccccgcgccgcggaacttgctctaacttcctcggccgagccgggccgcgccgccgctgccgccgccgcgcgcggattctgcttctcagaagatgcactattatagatactctaacgccaaggtcagctgctggtacaagtacctccttttcagctacaacatcatcttctggttggctggagttgtcttccttggagtcgggctgtgggcatggagcgaaaagggtgtgctgtccgacctcaccaaagtgacccggatgcatggaatcgaccctgtggtgctggtcctgatggtgggcgtggtgatgttcaccctggggttcgccggctgcgtgggggctctgcgggagaatatctgcttgctcaactttttctgtggcaccatcgtgctcatcttcttcctggagctggctgtggccgtgctggccttcctgttccaggactgggtgagggaccggttccgggagttcttcgagagcaacatcaagtcctaccgggacgatatcgatctgcaaaacctcatcgactcccttcagaaagctaaccagtgctgtggcgcatatggccctgaagactgggacctcaacgtctacttcaattgcagcggtgccagctacagccgagagaagtgcggggtccccttctcctgctgcgtgccagatcctgcgcaaaaagttgtgaacacacagtgtggatatgatgtcaggattcagctgaagagcaagtgggatgagtccatcttcacgaaaggctgcatccaggcgctggaaagctggctcccgcggaacatttacattgtggctggcgtcttcatcgccatctcgctgttgcagatatttggcatcttcctggcaaggacgctgatctcagacatcgaggcagtgaaggccggccatcacttctgaggagcagagttgagggagccgagctgagccacgctgggaggccagagcctttctctgccatcagccctacgtccagagggagaggagccgacacccccagagccagtgccccatcttaagcatcagcgtgacgtgacctctctgtttctgcttgctggtgctgaagaccaagggtcccccttgttacctgcccaaacttgtgactgcatccctctggagtctacccagagacagagaatgtgtctttatgtgggagtggtgactctgaaagacagagagggctcctgtggctgccaggagggcttgactcagaccccctgcagctcaagcatgtctgcaggacaccctggtcccctctccactggcatccagacatctgctttgggtcatccacatctgtgggtgggccgtgggtagagggacccacaggcgtggacagggcatctctctccatcaagcaaagcagcatgggggcctgcccgtaacgggaggcggacgtggccccgctgggcctctgagtgccagcgcagtctgctgggacatgcacatatcaggggttgtttgcaggatcctcagccatgttcaagtgaagtaagcctgagccagtgcgtggactggtgccacgggagtgccttgtccactgtccccctgtgtccaccagctattctcctggcgccggaactgcctctggtcttgatagcattaagccctgatggcgccggtggcgcggtgggcatggttcttcactgagagccggctctccttttcttaaagtgtgtaaatagtttatttataggggtaagaatgttctcacaccatttcacttcctcttcctctcctccagcattctcctctgagcagccttagatagtgtccatggctggagccgaccctttgagtccccttgagtgtcttaagaaccagcccacaacagcctctctttctcctccacatactgcagcctccctccatgcatcccacatacaagcactcccccactccccagcgtggcctcactgtcttctggtcttggtgctactgaaattgtcacccagaatttgaatcctgaccctccccactgcaagcccagggagccccagcccaagatggccagcctgaaactgttggccagggctcctcttgtggccatgtacccagggctggctggcctgccatttgcctctccccggagacagccgttcttctgcaaccacaccccgtgcctagccacaaccccaggctgcagctgctcagaagctccaggcattttgtttctggtgaccgcccctaatgggatatcggtgatcactggtccacccttcctgtcagggcttttctggggctgctcttggaaatgaagtcttaagtactgaataactcccctggggatagctggggcatttgtctagctgggctactttctaacactttgccatagctcagaccacttctcatcgttcagggatggactgcaaccttaatttacttgccggagtgtacattctagtgtggtgtatactggtggctgttgatgatgatttttttttttttttttacacaattctctgtagactaggagaagaatgcttgtgtttttcggaagtgtgatgcttctctttgactgccaaactcttttatggaatatatctttatattaatgctgttttggtcatttttgtttggggtcactattgagatattgctaagcatctcagtggtaaacgcggctgccagaggaaccaagggatagggtatgtagaccttacagaaggatggatggtaaaggcagtccatcatcagcacaatctgacttacatttcattgagtaattttttttttttttaagattctgtatggcagcactttcagttgcccttgtgtgccggccacagccgcacaagttggcttgtggtttatcccccgctataagtgagagctggagaaacttcaactccataggtctagaggaaacattgttttaggttatttctgtccacccctgtgcgatactatttattgatccaagcagaagagcttggggacactgagtcgaagtggggacatgggattgaagcctgggcactgctgctgcatgagctgtgtgtcctgggtgtgccggcctttctgtgaagggggttggtggcagtgcccacctcactagatgcctctgacccagcctcccctgggggagtgggtggccacagaccctccctgccagagctcctggaaggctcctgcaggcctgacccatctattcctgtagacctggtttaggatgaagtctcggtgcgatttttgcagagttgggtttatctttcaactatagacccttctggctgttctcagccatatcatgtgactctgaatagttggatgaggaatggaaagaaagcaaggatgagagccgggcacgtggcagtctccgcccagcatcggctgtccgcacagaggcacagggcaggcctcctgtgcactccccacctagcactggcctgtcctgaatccccgccttccctggttggaggccagctgtggcatttgcaccctcttctcacctcaccatgcacatgctaactttaaagccttggggtctttcctgtaccccctcctcaaccctggtccaccccctctcaggatcttgtcaacgttatttttcctgtcccgtcttcctatcgctggccttcctttcccatcctaaaaacttgccgaggccctatggctccctccctttctttcccaggcagcttcttatctgggctgtctgtaccccttcctttgcaccacccaccatgccccacgtagctgaaagctgcttatcccaattgtcaactctggccttcttcagcctctgtagcaccagacactgcacctcctgaatgtcctctgcttctctgcttcagaggcccaggctcgccagttctctgacctctcccatatgtctgcttaggactctgctgcagctgtcctcaccagcctccggggaatcccactacccacagggcagggctgtgggctgggctgaaaaaccatctgcatggtccacaagaagcctggcactgggtttccccatgaataacaatgaaaattaatggatgcacaaccttcctggaacgtggaatttctctgggagattccatgcagaggccactggggaggtggcaggcatgcatgtgactgtaggtggctgcagtgttggaaggctcccagcagagcagagagggtgtcagtctcatcagggaacccacctgatggcttctcagccagcagtctcagaggaacatagacgactgctgagaaaggagggaggcagcagtggtcccagcacctgaggcatcctgctgtcatgggaaggtctccgcccaaatgtcagatgcatcagcctgtcacccgctggtccagagctttcagctgtactggtagggggtgggtggtggagtgctgaatgaccttcacaggtgggcctttccagctctagggtcttacgggtgtcggtccacagaaccacggtttttaggttgtgtgtccggggctatgggaacctgtcccccatgatggatcttggtagagacacttccctctgtcatcgtgcccaggaggatgctgcaggtgactacctgcagccctgttctcattcatttggatgccctccagaaatctggggagccatacacctttagagccttttttgctccttatcaagttggcaaggcttggccaattcctgttcaaggctgcattaaaggcatgttcaccatcctggctaatacggtgaaaccccttctctactaaaaatacaaaaaaattagccgggcttggtggcgggtgcctgtagtcccagctactccggaggctgaggcaggggaatggtgtgaacccaggaggcggagcttgcagtgagccgagatcacaccactgcactccagcctgggctcaaaaaagaaaaaaaaaaaaaaaaaaaggcccgttcattctcaaatgcttttggcgtctccagggtgcctcaggaaaacatgaagtgggcattgtagaacttggggctactgtgtaactttggaagaaaaagttaagggtacttttaagtggatactgttttgatgaaattgccaacttcagggagcccagcttggagaaggaggacgtgagtattccttacaaggctccgaaacaattctttcttcacttagttttctttctgtgctctgcatcttatattccagcagggtcttccaatgcatggtttaataactaccagaactggccaggtgcagtggctcacgcctgtaatcccagaactttgggaggctaagacaggcagatcacttgaggccaggagttcgagaccagcctggacaacatggtgatacccagtttctactaaaaatacaaaaattagtcgggcatggtgatgtgcacctgtagtcccagctgctcgggaggctgaggcaggagaatcgcttgaacccgggagacagaggttgcaacgagccaagatcgagccactgcgctccggcctgggtgacaggagactccatctcaaaaaataaaattaaaaaaaaactactacaataaattatcaccttggactgtataaaacaacttttaaactagtctttttaaaaagtacacttaaataaaaatctaaacataagagaa

SEQ ID NO: 78527 - DNA, 5593 bp, Homo sapiens
aaaatgccaggctggtaccggacagaggtgttatggatcgcgccgcggaacttgctctaacttcctcgagccgagccgggccgcgccgccgctgccgccgccgcgcgcggattctgcttctcagaagatgcactattatagatactctaacgccaaggtcagctgctggtacaagtacctccttttcagctacaacatcatcttctggttggctggagttgtcttccttggagtcgggctgtgggcatggagcgaaaagggtgtgctgtccgacctcaccaaagtgacccggatgcatggaatcgaccctgtggtgctggtcctgatggtgggcgtggtgatgttcaccctggggttcgccggctgcgtgggggctctgcgggagaatatctgcttgctcaactttttctgtggcaccatcgtgctcatcttcttcctggagctggctgtggccgtgctggccttcctgttccaggactgggtgagggaccggttccgggagttcttcgagagcaacatcaagtcctaccgggacgatatcgatctgcaaaacctcatcgactcccttcagaaagctaaccagtgctgtggcgcatatggccctgaagactgggacctcaacgtctacttcaattgcagcggtgccagctacagccgagagaagtgcggggtccccttctcctgctgcgtgccagatcctgcgcaaaaagttgtgaacacacagtgtggatatgatgtcaggattcagctgaagagcaagtgggatgagtccatcttcacgaaaggctgcatccaggcgctggaaagctggctcccgcggaacatttacattgtggctggcgtcttcatcgccatctcgctgttgcagatatttggcatcttcctggcaaggacgctgatctcagacatcgaggcagtgaaggccggccatcacttctgaggagcagagttgagggagccgagctgagccacgctgggaggccagagcctttctctgccatcagccctacgtccagagggagaggagccgacacccccagagccagtgccccatcttaagcatcagcgtgacgtgacctctctgtttctgcttgctggtgctgaagaccaagggtcccccttgttacctgcccaaacttgtgactgcatccctctggagtctacccagagacagagaatgtgtctttatgtgggagtggtgactctgaaagacagagagggctcctgtggctgccaggagggcttgactcagaccccctgcagctcaagcatgtctgcaggacaccctggtcccctctccactggcatccagacatctgctttgggtcatccacatctgtgggtgggccgtgggtagagggacccacaggcgtggacagggcatctctctccatcaagcaaagcagcatgggggcctgcccgtaacgggaggcggacgtggccccgctgggcctctgagtgccagcgcagtctgctgggacatgcacatatcaggggttgtttgcaggatcctcagccatgttcaagtgaagtaagcctgagccagtgcgtggactggtgccacgggagtgccttgtccactgtccccctgtgtccaccagctattctcctggcgccggaactgcctctggtcttgatagcattaagccctgatggcgccggtggcgcggtgggcatggttcttcactgagagccggctctccttttcttaaagtgtgtaaatagtttatttataggggtaagaatgttctcacaccatttcacttcctcttcctctcctccagcattctcctctgagcagccttagatagtgtccatggctggagccgaccctttgagtccccttgagtgtcttaagaaccagcccacaacagcctctctttctcctccacatactgcagcctccctccatgcatcccacatacaagcactcccccactccccagcgtggcctcactgtcttctggtcttggtgctactgaaattgtcacccagaatttgaatcctgaccctccccactgcaagcccagggagccccagcccaagatggccagcctgaaactgttggccagggctcctcttgtggccatgtacccagggctggctggcctgccatttgcctctccccggagacagccgttcttctgcaaccacaccccgtgcctagccacaaccccaggctgcagctgctcagaagctccaggcattttgtttctggtgaccgcccctaatgggatatcggtgatcactggtccacccttcctgtcagggcttttctggggctgctcttggaaatgaagtcttaagtactgaataactcccctggggatagctggggcatttgtctagctgggctactttctaacactttgccatagctcagaccacttctcatcgttcagggatggactgcaaccttaatttacttgccggagtgtacattctagtgtggtgtatactggtggctgttgatgatgatttttttttttttttttacacaattctctgtagactaggagaagaatgcttgtgtttttcggaagtgtgatgcttctctttgactgccaaactcttttatggaatatatctttatattaatgctgttttggtcatttttgtttggggtcactattgagatattgctaagcatctcagtggtaaacgcggctgccagaggaaccaagggatagggtatgtagaccttacagaaggatggatggtaaaggcagtccatcatcagcacaatctgacttacatttcattgagtaattttttttttttttaagattctgtatggcagcactttcagttgcccttgtgtgccggccacagccgcacaagttggcttgtggtttatcccccgctataagtgagagctggagaaacttcaactccataggtctagaggaaacattgttttaggttatttctgtccacccctgtgcgatactatttattgatccaagcagaagagcttggggacactgagtcgaagtggggacatgggattgaagcctgggcactgctgctgcatgagctgtgtgtcctgggtgtgccggcctttctgtgaagggggttggtggcagtgcccacctcactagatgcctctgacccagcctcccctgggggagtgggtggccacagaccctccctgccagagctcctggaaggctcctgcaggcctgacccatctattcctgtagacctggtttaggatgaagtctcggtgcgatttttgcagagttgggtttatctttcaactatagacccttctggctgttctcagccatatcatgtgactctgaatagttggatgaggaatggaaagaaagcaaggatgagagccgggcacgtggcagtctccgcccagcatcggctgtccgcacagaggcacagggcaggcctcctgtgcactccccacctagcactggcctgtcctgaatccccgccttccctggttggaggccagctgtggcatttgcaccctcttctcacctcaccatgcacatgctaactttaaagccttggggtctttcctgtaccccctcctcaaccctggtccaccccctctcaggatcttgtcaacgttatttttcctgtcccgtcttcctatcgctggccttcctttcccatcctaaaaacttgccgaggccctatggctccctccctttctttcccaggcagcttcttatctgggctgtctgtaccccttcctttgcaccacccaccatgccccacgtagctgaaagctgcttatcccaattgtcaactctggccttcttcagcctctgtagcaccagacactgcacctcctgaatgtcctctgcttctctgcttcagaggcccaggctcgccagttctctgacctctcccatatgtctgcttaggactctgctgcagctgtcctcaccagcctccggggaatcccactacccacagggcagggctgtgggctgggctgaaaaaccatctgcatggtccacaagaagcctggcactgggtttccccatgaataacaatgaaaattaatggatgcacaaccttcctggaacgtggaatttctctgggagattccatgcagaggccactggggaggtggcaggcatgcatgtgactgtaggtggctgcagtgttggaaggctcccagcagagcagagagggtgtcagtctcatcagggaacccacctgatggcttctcagccagcagtctcagaggaacatagacgactgctgagaaaggagggaggcagcagtggtcccagcacctgaggcatcctgctgtcatgggaaggtctccgcccaaatgtcagatgcatcagcctgtcacccgctggtccagagctttcagctgtactggtagggggtgggtggtggagtgctgaatgaccttcacaggtgggcctttccagctctagggtcttacgggtgtcggtccacagaaccacggtttttaggttgtgtgtccggggctatgggaacctgtcccccatgatggatcttggtagagacacttccctctgtcatcgtgcccaggaggatgctgcaggtgactacctgcagccctgttctcattcatttggatgccctccagaaatctggggagccatacacctttagagccttttttgctccttatcaagttggcaaggcttggccaattcctgttcaaggctgcattaaaggcatgttcaccatcctggctaatacggtgaaaccccttctctactaaaaatacaaaaaaattagccgggcttggtggcgggtgcctgtagtcccagctactccggaggctgaggcaggggaatggtgtgaacccaggaggcggagcttgcagtgagccgagatcacaccactgcactccagcctgggctcaaaaaagaaaaaaaaaaaaaaaaaaaggcccgttcattctcaaatgcttttggcgtctccagggtgcctcaggaaaacatgaagtgggcattgtagaacttggggctactgtgtaactttggaagaaaaagttaagggtacttttaagtggatactgttttgatgaaattgccaacttcagggagcccagcttggagaaggaggacgtgagtattccttacaaggctccgaaacaattctttcttcacttagttttctttctgtgctctgcatcttatattccagcagggtcttccaatgcatggtttaataactaccagaactggccaggtgcagtggctcacgcctgtaatcccagaactttgggaggctaagacaggcagatcacttgaggccaggagttcgagaccagcctggacaacatggtgatacccagtttctactaaaaatacaaaaattagtcgggcatggtgatgtgcacctgtagtcccagctgctcgggaggctgaggcaggagaatcgcttgaacccgggagacagaggttgcaacgagccaagatcgagccactgcgctccggcctgggtgacaggagactccatctcaaaaaataaaattaaaaaaaaactactacaataaattatcaccttggactgtataaaacaacttttaaactagtctttttaaaaagtacacttaaataaaaatctaaacataagagaa

SEQ ID NO: 78528 - DNA, 5499 bp, Homo sapiens
tcgcaggtgaggcccggtttatcggacgagggccgggccgcgccgccgctgccgccgccgcgcgcggattctgcttctcagaagatgcactattatagatactctaacgccaaggtcagctgctggtacaagtacctccttttcagctacaacatcatcttctggggtgtgctgtccgacctcaccaaagtgacccggatgcatggaatcgaccctgtggtgctggtcctgatggtgggcgtggtgatgttcaccctggggttcgccggctgcgtgggggctctgcgggagaatatctgcttgctcaactttttctgtggcaccatcgtgctcatcttcttcctggagctggctgtggccgtgctggccttcctgttccaggactgggtgagggaccggttccgggagttcttcgagagcaacatcaagtcctaccgggacgatatcgatctgcaaaacctcatcgactcccttcagaaagctaaccagtgctgtggcgcatatggccctgaagactgggacctcaacgtctacttcaattgcagcggtgccagctacagccgagagaagtgcggggtccccttctcctgctgcgtgccagatcctgcgcaaaaagttgtgaacacacagtgtggatatgatgtcaggattcagctgaagagcaagtgggatgagtccatcttcacgaaaggctgcatccaggcgctggaaagctggctcccgcggaacatttacattgtggctggcgtcttcatcgccatctcgctgttgcagatatttggcatcttcctggcaaggacgctgatctcagacatcgaggcagtgaaggccggccatcacttctgaggagcagagttgagggagccgagctgagccacgctgggaggccagagcctttctctgccatcagccctacgtccagagggagaggagccgacacccccagagccagtgccccatcttaagcatcagcgtgacgtgacctctctgtttctgcttgctggtgctgaagaccaagggtcccccttgttacctgcccaaacttgtgactgcatccctctggagtctacccagagacagagaatgtgtctttatgtgggagtggtgactctgaaagacagagagggctcctgtggctgccaggagggcttgactcagaccccctgcagctcaagcatgtctgcaggacaccctggtcccctctccactggcatccagacatctgctttgggtcatccacatctgtgggtgggccgtgggtagagggacccacaggcgtggacagggcatctctctccatcaagcaaagcagcatgggggcctgcccgtaacgggaggcggacgtggccccgctgggcctctgagtgccagcgcagtctgctgggacatgcacatatcaggggttgtttgcaggatcctcagccatgttcaagtgaagtaagcctgagccagtgcgtggactggtgccacgggagtgccttgtccactgtccccctgtgtccaccagctattctcctggcgccggaactgcctctggtcttgatagcattaagccctgatggcgccggtggcgcggtgggcatggttcttcactgagagccggctctccttttcttaaagtgtgtaaatagtttatttataggggtaagaatgttctcacaccatttcacttcctcttcctctcctccagcattctcctctgagcagccttagatagtgtccatggctggagccgaccctttgagtccccttgagtgtcttaagaaccagcccacaacagcctctctttctcctccacatactgcagcctccctccatgcatcccacatacaagcactcccccactccccagcgtggcctcactgtcttctggtcttggtgctactgaaattgtcacccagaatttgaatcctgaccctccccactgcaagcccagggagccccagcccaagatggccagcctgaaactgttggccagggctcctcttgtggccatgtacccagggctggctggcctgccatttgcctctccccggagacagccgttcttctgcaaccacaccccgtgcctagccacaaccccaggctgcagctgctcagaagctccaggcattttgtttctggtgaccgcccctaatgggatatcggtgatcactggtccacccttcctgtcagggcttttctggggctgctcttggaaatgaagtcttaagtactgaataactcccctggggatagctggggcatttgtctagctgggctactttctaacactttgccatagctcagaccacttctcatcgttcagggatggactgcaaccttaatttacttgccggagtgtacattctagtgtggtgtatactggtggctgttgatgatgatttttttttttttttttacacaattctctgtagactaggagaagaatgcttgtgtttttcggaagtgtgatgcttctctttgactgccaaactcttttatggaatatatctttatattaatgctgttttggtcatttttgtttggggtcactattgagatattgctaagcatctcagtggtaaacgcggctgccagaggaaccaagggatagggtatgtagaccttacagaaggatggatggtaaaggcagtccatcatcagcacaatctgacttacatttcattgagtaattttttttttttttaagattctgtatggcagcactttcagttgcccttgtgtgccggccacagccgcacaagttggcttgtggtttatcccccgctataagtgagagctggagaaacttcaactccataggtctagaggaaacattgttttaggttatttctgtccacccctgtgcgatactatttattgatccaagcagaagagcttggggacactgagtcgaagtggggacatgggattgaagcctgggcactgctgctgcatgagctgtgtgtcctgggtgtgccggcctttctgtgaagggggttggtggcagtgcccacctcactagatgcctctgacccagcctcccctgggggagtgggtggccacagaccctccctgccagagctcctggaaggctcctgcaggcctgacccatctattcctgtagacctggtttaggatgaagtctcggtgcgatttttgcagagttgggtttatctttcaactatagacccttctggctgttctcagccatatcatgtgactctgaatagttggatgaggaatggaaagaaagcaaggatgagagccgggcacgtggcagtctccgcccagcatcggctgtccgcacagaggcacagggcaggcctcctgtgcactccccacctagcactggcctgtcctgaatccccgccttccctggttggaggccagctgtggcatttgcaccctcttctcacctcaccatgcacatgctaactttaaagccttggggtctttcctgtaccccctcctcaaccctggtccaccccctctcaggatcttgtcaacgttatttttcctgtcccgtcttcctatcgctggccttcctttcccatcctaaaaacttgccgaggccctatggctccctccctttctttcccaggcagcttcttatctgggctgtctgtaccccttcctttgcaccacccaccatgccccacgtagctgaaagctgcttatcccaattgtcaactctggccttcttcagcctctgtagcaccagacactgcacctcctgaatgtcctctgcttctctgcttcagaggcccaggctcgccagttctctgacctctcccatatgtctgcttaggactctgctgcagctgtcctcaccagcctccggggaatcccactacccacagggcagggctgtgggctgggctgaaaaaccatctgcatggtccacaagaagcctggcactgggtttccccatgaataacaatgaaaattaatggatgcacaaccttcctggaacgtggaatttctctgggagattccatgcagaggccactggggaggtggcaggcatgcatgtgactgtaggtggctgcagtgttggaaggctcccagcagagcagagagggtgtcagtctcatcagggaacccacctgatggcttctcagccagcagtctcagaggaacatagacgactgctgagaaaggagggaggcagcagtggtcccagcacctgaggcatcctgctgtcatgggaaggtctccgcccaaatgtcagatgcatcagcctgtcacccgctggtccagagctttcagctgtactggtagggggtgggtggtggagtgctgaatgaccttcacaggtgggcctttccagctctagggtcttacgggtgtcggtccacagaaccacggtttttaggttgtgtgtccggggctatgggaacctgtcccccatgatggatcttggtagagacacttccctctgtcatcgtgcccaggaggatgctgcaggtgactacctgcagccctgttctcattcatttggatgccctccagaaatctggggagccatacacctttagagccttttttgctccttatcaagttggcaaggcttggccaattcctgttcaaggctgcattaaaggcatgttcaccatcctggctaatacggtgaaaccccttctctactaaaaatacaaaaaaattagccgggcttggtggcgggtgcctgtagtcccagctactccggaggctgaggcaggggaatggtgtgaacccaggaggcggagcttgcagtgagccgagatcacaccactgcactccagcctgggctcaaaaaagaaaaaaaaaaaaaaaaaaaggcccgttcattctcaaatgcttttggcgtctccagggtgcctcaggaaaacatgaagtgggcattgtagaacttggggctactgtgtaactttggaagaaaaagttaagggtacttttaagtggatactgttttgatgaaattgccaacttcagggagcccagcttggagaaggaggacgtgagtattccttacaaggctccgaaacaattctttcttcacttagttttctttctgtgctctgcatcttatattccagcagggtcttccaatgcatggtttaataactaccagaactggccaggtgcagtggctcacgcctgtaatcccagaactttgggaggctaagacaggcagatcacttgaggccaggagttcgagaccagcctggacaacatggtgatacccagtttctactaaaaatacaaaaattagtcgggcatggtgatgtgcacctgtagtcccagctgctcgggaggctgaggcaggagaatcgcttgaacccgggagacagaggttgcaacgagccaagatcgagccactgcgctccggcctgggtgacaggagactccatctcaaaaaataaaattaaaaaaaaactactacaataaattatcaccttggactgtataaaacaacttttaaactagtctttttaaaaagtacacttaaataaaaatctaaacataagagaa

SEQ ID NO: 78529 - DNA, 5682 bp, Homo sapiens
aggctgtcgcccgggtagggatgccgggccgcgccgccgctgccgccgccgcgcgcggcgttacatccttactattcaaagtgccatccacagacctgctgatgggcagcatgagcatcacctgggagcttgctgcgctgtagaatcttgaggggtctccatccagatcagctgaatcagagtttgcattgttaacaagattctgcttctcagaagatgcactattatagatactctaacgccaaggtcagctgctggtacaagtacctccttttcagctacaacatcatcttctggttggctggagttgtcttccttggagtcgggctgtgggcatggagcgaaaagggtgtgctgtccgacctcaccaaagtgacccggatgcatggaatcgaccctgtggtgctggtcctgatggtgggcgtggtgatgttcaccctggggttcgccggctgcgtgggggctctgcgggagaatatctgcttgctcaactttttctgtggcaccatcgtgctcatcttcttcctggagctggctgtggccgtgctggccttcctgttccaggactgggtgagggaccggttccgggagttcttcgagagcaacatcaagtcctaccgggacgatatcgatctgcaaaacctcatcgactcccttcagaaagctaaccagtgctgtggcgcatatggccctgaagactgggacctcaacgtctacttcaattgcagcggtgccagctacagccgagagaagtgcggggtccccttctcctgctgcgtgccagatcctgcgcaaaaagttgtgaacacacagtgtggatatgatgtcaggattcagctgaagagcaagtgggatgagtccatcttcacgaaaggctgcatccaggcgctggaaagctggctcccgcggaacatttacattgtggctggcgtcttcatcgccatctcgctgttgcagatatttggcatcttcctggcaaggacgctgatctcagacatcgaggcagtgaaggccggccatcacttctgaggagcagagttgagggagccgagctgagccacgctgggaggccagagcctttctctgccatcagccctacgtccagagggagaggagccgacacccccagagccagtgccccatcttaagcatcagcgtgacgtgacctctctgtttctgcttgctggtgctgaagaccaagggtcccccttgttacctgcccaaacttgtgactgcatccctctggagtctacccagagacagagaatgtgtctttatgtgggagtggtgactctgaaagacagagagggctcctgtggctgccaggagggcttgactcagaccccctgcagctcaagcatgtctgcaggacaccctggtcccctctccactggcatccagacatctgctttgggtcatccacatctgtgggtgggccgtgggtagagggacccacaggcgtggacagggcatctctctccatcaagcaaagcagcatgggggcctgcccgtaacgggaggcggacgtggccccgctgggcctctgagtgccagcgcagtctgctgggacatgcacatatcaggggttgtttgcaggatcctcagccatgttcaagtgaagtaagcctgagccagtgcgtggactggtgccacgggagtgccttgtccactgtccccctgtgtccaccagctattctcctggcgccggaactgcctctggtcttgatagcattaagccctgatggcgccggtggcgcggtgggcatggttcttcactgagagccggctctccttttcttaaagtgtgtaaatagtttatttataggggtaagaatgttctcacaccatttcacttcctcttcctctcctccagcattctcctctgagcagccttagatagtgtccatggctggagccgaccctttgagtccccttgagtgtcttaagaaccagcccacaacagcctctctttctcctccacatactgcagcctccctccatgcatcccacatacaagcactcccccactccccagcgtggcctcactgtcttctggtcttggtgctactgaaattgtcacccagaatttgaatcctgaccctccccactgcaagcccagggagccccagcccaagatggccagcctgaaactgttggccagggctcctcttgtggccatgtacccagggctggctggcctgccatttgcctctccccggagacagccgttcttctgcaaccacaccccgtgcctagccacaaccccaggctgcagctgctcagaagctccaggcattttgtttctggtgaccgcccctaatgggatatcggtgatcactggtccacccttcctgtcagggcttttctggggctgctcttggaaatgaagtcttaagtactgaataactcccctggggatagctggggcatttgtctagctgggctactttctaacactttgccatagctcagaccacttctcatcgttcagggatggactgcaaccttaatttacttgccggagtgtacattctagtgtggtgtatactggtggctgttgatgatgatttttttttttttttttacacaattctctgtagactaggagaagaatgcttgtgtttttcggaagtgtgatgcttctctttgactgccaaactcttttatggaatatatctttatattaatgctgttttggtcatttttgtttggggtcactattgagatattgctaagcatctcagtggtaaacgcggctgccagaggaaccaagggatagggtatgtagaccttacagaaggatggatggtaaaggcagtccatcatcagcacaatctgacttacatttcattgagtaattttttttttttttaagattctgtatggcagcactttcagttgcccttgtgtgccggccacagccgcacaagttggcttgtggtttatcccccgctataagtgagagctggagaaacttcaactccataggtctagaggaaacattgttttaggttatttctgtccacccctgtgcgatactatttattgatccaagcagaagagcttggggacactgagtcgaagtggggacatgggattgaagcctgggcactgctgctgcatgagctgtgtgtcctgggtgtgccggcctttctgtgaagggggttggtggcagtgcccacctcactagatgcctctgacccagcctcccctgggggagtgggtggccacagaccctccctgccagagctcctggaaggctcctgcaggcctgacccatctattcctgtagacctggtttaggatgaagtctcggtgcgatttttgcagagttgggtttatctttcaactatagacccttctggctgttctcagccatatcatgtgactctgaatagttggatgaggaatggaaagaaagcaaggatgagagccgggcacgtggcagtctccgcccagcatcggctgtccgcacagaggcacagggcaggcctcctgtgcactccccacctagcactggcctgtcctgaatccccgccttccctggttggaggccagctgtggcatttgcaccctcttctcacctcaccatgcacatgctaactttaaagccttggggtctttcctgtaccccctcctcaaccctggtccaccccctctcaggatcttgtcaacgttatttttcctgtcccgtcttcctatcgctggccttcctttcccatcctaaaaacttgccgaggccctatggctccctccctttctttcccaggcagcttcttatctgggctgtctgtaccccttcctttgcaccacccaccatgccccacgtagctgaaagctgcttatcccaattgtcaactctggccttcttcagcctctgtagcaccagacactgcacctcctgaatgtcctctgcttctctgcttcagaggcccaggctcgccagttctctgacctctcccatatgtctgcttaggactctgctgcagctgtcctcaccagcctccggggaatcccactacccacagggcagggctgtgggctgggctgaaaaaccatctgcatggtccacaagaagcctggcactgggtttccccatgaataacaatgaaaattaatggatgcacaaccttcctggaacgtggaatttctctgggagattccatgcagaggccactggggaggtggcaggcatgcatgtgactgtaggtggctgcagtgttggaaggctcccagcagagcagagagggtgtcagtctcatcagggaacccacctgatggcttctcagccagcagtctcagaggaacatagacgactgctgagaaaggagggaggcagcagtggtcccagcacctgaggcatcctgctgtcatgggaaggtctccgcccaaatgtcagatgcatcagcctgtcacccgctggtccagagctttcagctgtactggtagggggtgggtggtggagtgctgaatgaccttcacaggtgggcctttccagctctagggtcttacgggtgtcggtccacagaaccacggtttttaggttgtgtgtccggggctatgggaacctgtcccccatgatggatcttggtagagacacttccctctgtcatcgtgcccaggaggatgctgcaggtgactacctgcagccctgttctcattcatttggatgccctccagaaatctggggagccatacacctttagagccttttttgctccttatcaagttggcaaggcttggccaattcctgttcaaggctgcattaaaggcatgttcaccatcctggctaatacggtgaaaccccttctctactaaaaatacaaaaaaattagccgggcttggtggcgggtgcctgtagtcccagctactccggaggctgaggcaggggaatggtgtgaacccaggaggcggagcttgcagtgagccgagatcacaccactgcactccagcctgggctcaaaaaagaaaaaaaaaaaaaaaaaaaggcccgttcattctcaaatgcttttggcgtctccagggtgcctcaggaaaacatgaagtgggcattgtagaacttggggctactgtgtaactttggaagaaaaagttaagggtacttttaagtggatactgttttgatgaaattgccaacttcagggagcccagcttggagaaggaggacgtgagtattccttacaaggctccgaaacaattctttcttcacttagttttctttctgtgctctgcatcttatattccagcagggtcttccaatgcatggtttaataactaccagaactggccaggtgcagtggctcacgcctgtaatcccagaactttgggaggctaagacaggcagatcacttgaggccaggagttcgagaccagcctggacaacatggtgatacccagtttctactaaaaatacaaaaattagtcgggcatggtgatgtgcacctgtagtcccagctgctcgggaggctgaggcaggagaatcgcttgaacccgggagacagaggttgcaacgagccaagatcgagccactgcgctccggcctgggtgacaggagactccatctcaaaaaataaaattaaaaaaaaactactacaataaattatcaccttggactgtataaaacaacttttaaactagtctttttaaaaagtacacttaaataaaaatctaaacataagagaa

SEQ ID NO: 78530 - DNA, 5736 bp, Homo sapiens
tcgggatcgccgctcggagcgggagtcgcgccctcccgccccgcgccgcggaacttgctctaacttcctcggccgagccgggccgcgccgccgctgccgccgccgcgcgcggcgttacatccttactattcaaagtgccatccacagacctgctgatgggcagcatgagcatcacctgggagcttgctgcgctgtagaatcttgaggggtctccatccagatcagctgaatcagagtttgcattgttaacaagattctgcttctcagaagatgcactattatagatactctaacgccaaggtcagctgctggtacaagtacctccttttcagctacaacatcatcttctggttggctggagttgtcttccttggagtcgggctgtgggcatggagcgaaaagggtgtgctgtccgacctcaccaaagtgacccggatgcatggaatcgaccctgtggtgctggtcctgatggtgggcgtggtgatgttcaccctggggttcgccggctgcgtgggggctctgcgggagaatatctgcttgctcaactttttctgtggcaccatcgtgctcatcttcttcctggagctggctgtggccgtgctggccttcctgttccaggactgggtgagggaccggttccgggagttcttcgagagcaacatcaagtcctaccgggacgatatcgatctgcaaaacctcatcgactcccttcagaaagctaaccagtgctgtggcgcatatggccctgaagactgggacctcaacgtctacttcaattgcagcggtgccagctacagccgagagaagtgcggggtccccttctcctgctgcgtgccagatcctgcgcaaaaagttgtgaacacacagtgtggatatgatgtcaggattcagctgaagagcaagtgggatgagtccatcttcacgaaaggctgcatccaggcgctggaaagctggctcccgcggaacatttacattgtggctggcgtcttcatcgccatctcgctgttgcagatatttggcatcttcctggcaaggacgctgatctcagacatcgaggcagtgaaggccggccatcacttctgaggagcagagttgagggagccgagctgagccacgctgggaggccagagcctttctctgccatcagccctacgtccagagggagaggagccgacacccccagagccagtgccccatcttaagcatcagcgtgacgtgacctctctgtttctgcttgctggtgctgaagaccaagggtcccccttgttacctgcccaaacttgtgactgcatccctctggagtctacccagagacagagaatgtgtctttatgtgggagtggtgactctgaaagacagagagggctcctgtggctgccaggagggcttgactcagaccccctgcagctcaagcatgtctgcaggacaccctggtcccctctccactggcatccagacatctgctttgggtcatccacatctgtgggtgggccgtgggtagagggacccacaggcgtggacagggcatctctctccatcaagcaaagcagcatgggggcctgcccgtaacgggaggcggacgtggccccgctgggcctctgagtgccagcgcagtctgctgggacatgcacatatcaggggttgtttgcaggatcctcagccatgttcaagtgaagtaagcctgagccagtgcgtggactggtgccacgggagtgccttgtccactgtccccctgtgtccaccagctattctcctggcgccggaactgcctctggtcttgatagcattaagccctgatggcgccggtggcgcggtgggcatggttcttcactgagagccggctctccttttcttaaagtgtgtaaatagtttatttataggggtaagaatgttctcacaccatttcacttcctcttcctctcctccagcattctcctctgagcagccttagatagtgtccatggctggagccgaccctttgagtccccttgagtgtcttaagaaccagcccacaacagcctctctttctcctccacatactgcagcctccctccatgcatcccacatacaagcactcccccactccccagcgtggcctcactgtcttctggtcttggtgctactgaaattgtcacccagaatttgaatcctgaccctccccactgcaagcccagggagccccagcccaagatggccagcctgaaactgttggccagggctcctcttgtggccatgtacccagggctggctggcctgccatttgcctctccccggagacagccgttcttctgcaaccacaccccgtgcctagccacaaccccaggctgcagctgctcagaagctccaggcattttgtttctggtgaccgcccctaatgggatatcggtgatcactggtccacccttcctgtcagggcttttctggggctgctcttggaaatgaagtcttaagtactgaataactcccctggggatagctggggcatttgtctagctgggctactttctaacactttgccatagctcagaccacttctcatcgttcagggatggactgcaaccttaatttacttgccggagtgtacattctagtgtggtgtatactggtggctgttgatgatgatttttttttttttttttacacaattctctgtagactaggagaagaatgcttgtgtttttcggaagtgtgatgcttctctttgactgccaaactcttttatggaatatatctttatattaatgctgttttggtcatttttgtttggggtcactattgagatattgctaagcatctcagtggtaaacgcggctgccagaggaaccaagggatagggtatgtagaccttacagaaggatggatggtaaaggcagtccatcatcagcacaatctgacttacatttcattgagtaattttttttttttttaagattctgtatggcagcactttcagttgcccttgtgtgccggccacagccgcacaagttggcttgtggtttatcccccgctataagtgagagctggagaaacttcaactccataggtctagaggaaacattgttttaggttatttctgtccacccctgtgcgatactatttattgatccaagcagaagagcttggggacactgagtcgaagtggggacatgggattgaagcctgggcactgctgctgcatgagctgtgtgtcctgggtgtgccggcctttctgtgaagggggttggtggcagtgcccacctcactagatgcctctgacccagcctcccctgggggagtgggtggccacagaccctccctgccagagctcctggaaggctcctgcaggcctgacccatctattcctgtagacctggtttaggatgaagtctcggtgcgatttttgcagagttgggtttatctttcaactatagacccttctggctgttctcagccatatcatgtgactctgaatagttggatgaggaatggaaagaaagcaaggatgagagccgggcacgtggcagtctccgcccagcatcggctgtccgcacagaggcacagggcaggcctcctgtgcactccccacctagcactggcctgtcctgaatccccgccttccctggttggaggccagctgtggcatttgcaccctcttctcacctcaccatgcacatgctaactttaaagccttggggtctttcctgtaccccctcctcaaccctggtccaccccctctcaggatcttgtcaacgttatttttcctgtcccgtcttcctatcgctggccttcctttcccatcctaaaaacttgccgaggccctatggctccctccctttctttcccaggcagcttcttatctgggctgtctgtaccccttcctttgcaccacccaccatgccccacgtagctgaaagctgcttatcccaattgtcaactctggccttcttcagcctctgtagcaccagacactgcacctcctgaatgtcctctgcttctctgcttcagaggcccaggctcgccagttctctgacctctcccatatgtctgcttaggactctgctgcagctgtcctcaccagcctccggggaatcccactacccacagggcagggctgtgggctgggctgaaaaaccatctgcatggtccacaagaagcctggcactgggtttccccatgaataacaatgaaaattaatggatgcacaaccttcctggaacgtggaatttctctgggagattccatgcagaggccactggggaggtggcaggcatgcatgtgactgtaggtggctgcagtgttggaaggctcccagcagagcagagagggtgtcagtctcatcagggaacccacctgatggcttctcagccagcagtctcagaggaacatagacgactgctgagaaaggagggaggcagcagtggtcccagcacctgaggcatcctgctgtcatgggaaggtctccgcccaaatgtcagatgcatcagcctgtcacccgctggtccagagctttcagctgtactggtagggggtgggtggtggagtgctgaatgaccttcacaggtgggcctttccagctctagggtcttacgggtgtcggtccacagaaccacggtttttaggttgtgtgtccggggctatgggaacctgtcccccatgatggatcttggtagagacacttccctctgtcatcgtgcccaggaggatgctgcaggtgactacctgcagccctgttctcattcatttggatgccctccagaaatctggggagccatacacctttagagccttttttgctccttatcaagttggcaaggcttggccaattcctgttcaaggctgcattaaaggcatgttcaccatcctggctaatacggtgaaaccccttctctactaaaaatacaaaaaaattagccgggcttggtggcgggtgcctgtagtcccagctactccggaggctgaggcaggggaatggtgtgaacccaggaggcggagcttgcagtgagccgagatcacaccactgcactccagcctgggctcaaaaaagaaaaaaaaaaaaaaaaaaaggcccgttcattctcaaatgcttttggcgtctccagggtgcctcaggaaaacatgaagtgggcattgtagaacttggggctactgtgtaactttggaagaaaaagttaagggtacttttaagtggatactgttttgatgaaattgccaacttcagggagcccagcttggagaaggaggacgtgagtattccttacaaggctccgaaacaattctttcttcacttagttttctttctgtgctctgcatcttatattccagcagggtcttccaatgcatggtttaataactaccagaactggccaggtgcagtggctcacgcctgtaatcccagaactttgggaggctaagacaggcagatcacttgaggccaggagttcgagaccagcctggacaacatggtgatacccagtttctactaaaaatacaaaaattagtcgggcatggtgatgtgcacctgtagtcccagctgctcgggaggctgaggcaggagaatcgcttgaacccgggagacagaggttgcaacgagccaagatcgagccactgcgctccggcctgggtgacaggagactccatctcaaaaaataaaattaaaaaaaaactactacaataaattatcaccttggactgtataaaacaacttttaaactagtctttttaaaaagtacacttaaataaaaatctaaacataagagaa

SEQ ID NO: 78531 - DNA, 5969 bp, Homo sapiens
tgggcaggccggggttgaaactcttcaccccttgcggtctgtactgcctcccaactgagcagccagggagaaggcctagagcctgtgcctttcagctagatagctggaggaactggctcctccctccttaggctgtgctggcctgagctgggagcctgagagctggggcagttgtctctaaagtggcttctgggattctggtaagaggacttggggtggagtcgaaagcagggagccctgtgagttgagacgaactcttgcaatgttgccttggctggtctcgaactcatcttctgggttcaagctgtccgtctgcctcggactcccaaagtgctaggattacagcgttacatccttactattcaaagtgccatccacagacctgctgatgggcagcatgagcatcacctgggagcttgctgcgctgtagaatcttgaggggtctccatccagatcagctgaatcagagtttgcattgttaacaagattctgcttctcagaagatgcactattatagatactctaacgccaaggtcagctgctggtacaagtacctccttttcagctacaacatcatcttctggttggctggagttgtcttccttggagtcgggctgtgggcatggagcgaaaagggtgtgctgtccgacctcaccaaagtgacccggatgcatggaatcgaccctgtggtgctggtcctgatggtgggcgtggtgatgttcaccctggggttcgccggctgcgtgggggctctgcgggagaatatctgcttgctcaactttttctgtggcaccatcgtgctcatcttcttcctggagctggctgtggccgtgctggccttcctgttccaggactgggtgagggaccggttccgggagttcttcgagagcaacatcaagtcctaccgggacgatatcgatctgcaaaacctcatcgactcccttcagaaagctaaccagtgctgtggcgcatatggccctgaagactgggacctcaacgtctacttcaattgcagcggtgccagctacagccgagagaagtgcggggtccccttctcctgctgcgtgccagatcctgcgcaaaaagttgtgaacacacagtgtggatatgatgtcaggattcagctgaagagcaagtgggatgagtccatcttcacgaaaggctgcatccaggcgctggaaagctggctcccgcggaacatttacattgtggctggcgtcttcatcgccatctcgctgttgcagatatttggcatcttcctggcaaggacgctgatctcagacatcgaggcagtgaaggccggccatcacttctgaggagcagagttgagggagccgagctgagccacgctgggaggccagagcctttctctgccatcagccctacgtccagagggagaggagccgacacccccagagccagtgccccatcttaagcatcagcgtgacgtgacctctctgtttctgcttgctggtgctgaagaccaagggtcccccttgttacctgcccaaacttgtgactgcatccctctggagtctacccagagacagagaatgtgtctttatgtgggagtggtgactctgaaagacagagagggctcctgtggctgccaggagggcttgactcagaccccctgcagctcaagcatgtctgcaggacaccctggtcccctctccactggcatccagacatctgctttgggtcatccacatctgtgggtgggccgtgggtagagggacccacaggcgtggacagggcatctctctccatcaagcaaagcagcatgggggcctgcccgtaacgggaggcggacgtggccccgctgggcctctgagtgccagcgcagtctgctgggacatgcacatatcaggggttgtttgcaggatcctcagccatgttcaagtgaagtaagcctgagccagtgcgtggactggtgccacgggagtgccttgtccactgtccccctgtgtccaccagctattctcctggcgccggaactgcctctggtcttgatagcattaagccctgatggcgccggtggcgcggtgggcatggttcttcactgagagccggctctccttttcttaaagtgtgtaaatagtttatttataggggtaagaatgttctcacaccatttcacttcctcttcctctcctccagcattctcctctgagcagccttagatagtgtccatggctggagccgaccctttgagtccccttgagtgtcttaagaaccagcccacaacagcctctctttctcctccacatactgcagcctccctccatgcatcccacatacaagcactcccccactccccagcgtggcctcactgtcttctggtcttggtgctactgaaattgtcacccagaatttgaatcctgaccctccccactgcaagcccagggagccccagcccaagatggccagcctgaaactgttggccagggctcctcttgtggccatgtacccagggctggctggcctgccatttgcctctccccggagacagccgttcttctgcaaccacaccccgtgcctagccacaaccccaggctgcagctgctcagaagctccaggcattttgtttctggtgaccgcccctaatgggatatcggtgatcactggtccacccttcctgtcagggcttttctggggctgctcttggaaatgaagtcttaagtactgaataactcccctggggatagctggggcatttgtctagctgggctactttctaacactttgccatagctcagaccacttctcatcgttcagggatggactgcaaccttaatttacttgccggagtgtacattctagtgtggtgtatactggtggctgttgatgatgatttttttttttttttttacacaattctctgtagactaggagaagaatgcttgtgtttttcggaagtgtgatgcttctctttgactgccaaactcttttatggaatatatctttatattaatgctgttttggtcatttttgtttggggtcactattgagatattgctaagcatctcagtggtaaacgcggctgccagaggaaccaagggatagggtatgtagaccttacagaaggatggatggtaaaggcagtccatcatcagcacaatctgacttacatttcattgagtaattttttttttttttaagattctgtatggcagcactttcagttgcccttgtgtgccggccacagccgcacaagttggcttgtggtttatcccccgctataagtgagagctggagaaacttcaactccataggtctagaggaaacattgttttaggttatttctgtccacccctgtgcgatactatttattgatccaagcagaagagcttggggacactgagtcgaagtggggacatgggattgaagcctgggcactgctgctgcatgagctgtgtgtcctgggtgtgccggcctttctgtgaagggggttggtggcagtgcccacctcactagatgcctctgacccagcctcccctgggggagtgggtggccacagaccctccctgccagagctcctggaaggctcctgcaggcctgacccatctattcctgtagacctggtttaggatgaagtctcggtgcgatttttgcagagttgggtttatctttcaactatagacccttctggctgttctcagccatatcatgtgactctgaatagttggatgaggaatggaaagaaagcaaggatgagagccgggcacgtggcagtctccgcccagcatcggctgtccgcacagaggcacagggcaggcctcctgtgcactccccacctagcactggcctgtcctgaatccccgccttccctggttggaggccagctgtggcatttgcaccctcttctcacctcaccatgcacatgctaactttaaagccttggggtctttcctgtaccccctcctcaaccctggtccaccccctctcaggatcttgtcaacgttatttttcctgtcccgtcttcctatcgctggccttcctttcccatcctaaaaacttgccgaggccctatggctccctccctttctttcccaggcagcttcttatctgggctgtctgtaccccttcctttgcaccacccaccatgccccacgtagctgaaagctgcttatcccaattgtcaactctggccttcttcagcctctgtagcaccagacactgcacctcctgaatgtcctctgcttctctgcttcagaggcccaggctcgccagttctctgacctctcccatatgtctgcttaggactctgctgcagctgtcctcaccagcctccggggaatcccactacccacagggcagggctgtgggctgggctgaaaaaccatctgcatggtccacaagaagcctggcactgggtttccccatgaataacaatgaaaattaatggatgcacaaccttcctggaacgtggaatttctctgggagattccatgcagaggccactggggaggtggcaggcatgcatgtgactgtaggtggctgcagtgttggaaggctcccagcagagcagagagggtgtcagtctcatcagggaacccacctgatggcttctcagccagcagtctcagaggaacatagacgactgctgagaaaggagggaggcagcagtggtcccagcacctgaggcatcctgctgtcatgggaaggtctccgcccaaatgtcagatgcatcagcctgtcacccgctggtccagagctttcagctgtactggtagggggtgggtggtggagtgctgaatgaccttcacaggtgggcctttccagctctagggtcttacgggtgtcggtccacagaaccacggtttttaggttgtgtgtccggggctatgggaacctgtcccccatgatggatcttggtagagacacttccctctgtcatcgtgcccaggaggatgctgcaggtgactacctgcagccctgttctcattcatttggatgccctccagaaatctggggagccatacacctttagagccttttttgctccttatcaagttggcaaggcttggccaattcctgttcaaggctgcattaaaggcatgttcaccatcctggctaatacggtgaaaccccttctctactaaaaatacaaaaaaattagccgggcttggtggcgggtgcctgtagtcccagctactccggaggctgaggcaggggaatggtgtgaacccaggaggcggagcttgcagtgagccgagatcacaccactgcactccagcctgggctcaaaaaagaaaaaaaaaaaaaaaaaaaggcccgttcattctcaaatgcttttggcgtctccagggtgcctcaggaaaacatgaagtgggcattgtagaacttggggctactgtgtaactttggaagaaaaagttaagggtacttttaagtggatactgttttgatgaaattgccaacttcagggagcccagcttggagaaggaggacgtgagtattccttacaaggctccgaaacaattctttcttcacttagttttctttctgtgctctgcatcttatattccagcagggtcttccaatgcatggtttaataactaccagaactggccaggtgcagtggctcacgcctgtaatcccagaactttgggaggctaagacaggcagatcacttgaggccaggagttcgagaccagcctggacaacatggtgatacccagtttctactaaaaatacaaaaattagtcgggcatggtgatgtgcacctgtagtcccagctgctcgggaggctgaggcaggagaatcgcttgaacccgggagacagaggttgcaacgagccaagatcgagccactgcgctccggcctgggtgacaggagactccatctcaaaaaataaaattaaaaaaaaactactacaataaattatcaccttggactgtataaaacaacttttaaactagtctttttaaaaagtacacttaaataaaaatctaaacataagagaa

SEQ ID NO: 78532 - DNA, 5871 bp, Homo sapiens
tgggcaggccggggttgaaactcttcaccccttgcggtctgtactgcctcccaactgagcagccagggagaaggcctagagcctgtgcctttcagctagatagctggaggaactggctcctccctccttaggctgtgctggcctgagctgggagcctgagagctggggcagttgtctctaaagtggcttctgggattctggtaagaggacttggggtggagtcgaaagcagggagccctgtgagttgcgttacatccttactattcaaagtgccatccacagacctgctgatgggcagcatgagcatcacctgggagcttgctgcgctgtagaatcttgaggggtctccatccagatcagctgaatcagagtttgcattgttaacaagattctgcttctcagaagatgcactattatagatactctaacgccaaggtcagctgctggtacaagtacctccttttcagctacaacatcatcttctggttggctggagttgtcttccttggagtcgggctgtgggcatggagcgaaaagggtgtgctgtccgacctcaccaaagtgacccggatgcatggaatcgaccctgtggtgctggtcctgatggtgggcgtggtgatgttcaccctggggttcgccggctgcgtgggggctctgcgggagaatatctgcttgctcaactttttctgtggcaccatcgtgctcatcttcttcctggagctggctgtggccgtgctggccttcctgttccaggactgggtgagggaccggttccgggagttcttcgagagcaacatcaagtcctaccgggacgatatcgatctgcaaaacctcatcgactcccttcagaaagctaaccagtgctgtggcgcatatggccctgaagactgggacctcaacgtctacttcaattgcagcggtgccagctacagccgagagaagtgcggggtccccttctcctgctgcgtgccagatcctgcgcaaaaagttgtgaacacacagtgtggatatgatgtcaggattcagctgaagagcaagtgggatgagtccatcttcacgaaaggctgcatccaggcgctggaaagctggctcccgcggaacatttacattgtggctggcgtcttcatcgccatctcgctgttgcagatatttggcatcttcctggcaaggacgctgatctcagacatcgaggcagtgaaggccggccatcacttctgaggagcagagttgagggagccgagctgagccacgctgggaggccagagcctttctctgccatcagccctacgtccagagggagaggagccgacacccccagagccagtgccccatcttaagcatcagcgtgacgtgacctctctgtttctgcttgctggtgctgaagaccaagggtcccccttgttacctgcccaaacttgtgactgcatccctctggagtctacccagagacagagaatgtgtctttatgtgggagtggtgactctgaaagacagagagggctcctgtggctgccaggagggcttgactcagaccccctgcagctcaagcatgtctgcaggacaccctggtcccctctccactggcatccagacatctgctttgggtcatccacatctgtgggtgggccgtgggtagagggacccacaggcgtggacagggcatctctctccatcaagcaaagcagcatgggggcctgcccgtaacgggaggcggacgtggccccgctgggcctctgagtgccagcgcagtctgctgggacatgcacatatcaggggttgtttgcaggatcctcagccatgttcaagtgaagtaagcctgagccagtgcgtggactggtgccacgggagtgccttgtccactgtccccctgtgtccaccagctattctcctggcgccggaactgcctctggtcttgatagcattaagccctgatggcgccggtggcgcggtgggcatggttcttcactgagagccggctctccttttcttaaagtgtgtaaatagtttatttataggggtaagaatgttctcacaccatttcacttcctcttcctctcctccagcattctcctctgagcagccttagatagtgtccatggctggagccgaccctttgagtccccttgagtgtcttaagaaccagcccacaacagcctctctttctcctccacatactgcagcctccctccatgcatcccacatacaagcactcccccactccccagcgtggcctcactgtcttctggtcttggtgctactgaaattgtcacccagaatttgaatcctgaccctccccactgcaagcccagggagccccagcccaagatggccagcctgaaactgttggccagggctcctcttgtggccatgtacccagggctggctggcctgccatttgcctctccccggagacagccgttcttctgcaaccacaccccgtgcctagccacaaccccaggctgcagctgctcagaagctccaggcattttgtttctggtgaccgcccctaatgggatatcggtgatcactggtccacccttcctgtcagggcttttctggggctgctcttggaaatgaagtcttaagtactgaataactcccctggggatagctggggcatttgtctagctgggctactttctaacactttgccatagctcagaccacttctcatcgttcagggatggactgcaaccttaatttacttgccggagtgtacattctagtgtggtgtatactggtggctgttgatgatgatttttttttttttttttacacaattctctgtagactaggagaagaatgcttgtgtttttcggaagtgtgatgcttctctttgactgccaaactcttttatggaatatatctttatattaatgctgttttggtcatttttgtttggggtcactattgagatattgctaagcatctcagtggtaaacgcggctgccagaggaaccaagggatagggtatgtagaccttacagaaggatggatggtaaaggcagtccatcatcagcacaatctgacttacatttcattgagtaattttttttttttttaagattctgtatggcagcactttcagttgcccttgtgtgccggccacagccgcacaagttggcttgtggtttatcccccgctataagtgagagctggagaaacttcaactccataggtctagaggaaacattgttttaggttatttctgtccacccctgtgcgatactatttattgatccaagcagaagagcttggggacactgagtcgaagtggggacatgggattgaagcctgggcactgctgctgcatgagctgtgtgtcctgggtgtgccggcctttctgtgaagggggttggtggcagtgcccacctcactagatgcctctgacccagcctcccctgggggagtgggtggccacagaccctccctgccagagctcctggaaggctcctgcaggcctgacccatctattcctgtagacctggtttaggatgaagtctcggtgcgatttttgcagagttgggtttatctttcaactatagacccttctggctgttctcagccatatcatgtgactctgaatagttggatgaggaatggaaagaaagcaaggatgagagccgggcacgtggcagtctccgcccagcatcggctgtccgcacagaggcacagggcaggcctcctgtgcactccccacctagcactggcctgtcctgaatccccgccttccctggttggaggccagctgtggcatttgcaccctcttctcacctcaccatgcacatgctaactttaaagccttggggtctttcctgtaccccctcctcaaccctggtccaccccctctcaggatcttgtcaacgttatttttcctgtcccgtcttcctatcgctggccttcctttcccatcctaaaaacttgccgaggccctatggctccctccctttctttcccaggcagcttcttatctgggctgtctgtaccccttcctttgcaccacccaccatgccccacgtagctgaaagctgcttatcccaattgtcaactctggccttcttcagcctctgtagcaccagacactgcacctcctgaatgtcctctgcttctctgcttcagaggcccaggctcgccagttctctgacctctcccatatgtctgcttaggactctgctgcagctgtcctcaccagcctccggggaatcccactacccacagggcagggctgtgggctgggctgaaaaaccatctgcatggtccacaagaagcctggcactgggtttccccatgaataacaatgaaaattaatggatgcacaaccttcctggaacgtggaatttctctgggagattccatgcagaggccactggggaggtggcaggcatgcatgtgactgtaggtggctgcagtgttggaaggctcccagcagagcagagagggtgtcagtctcatcagggaacccacctgatggcttctcagccagcagtctcagaggaacatagacgactgctgagaaaggagggaggcagcagtggtcccagcacctgaggcatcctgctgtcatgggaaggtctccgcccaaatgtcagatgcatcagcctgtcacccgctggtccagagctttcagctgtactggtagggggtgggtggtggagtgctgaatgaccttcacaggtgggcctttccagctctagggtcttacgggtgtcggtccacagaaccacggtttttaggttgtgtgtccggggctatgggaacctgtcccccatgatggatcttggtagagacacttccctctgtcatcgtgcccaggaggatgctgcaggtgactacctgcagccctgttctcattcatttggatgccctccagaaatctggggagccatacacctttagagccttttttgctccttatcaagttggcaaggcttggccaattcctgttcaaggctgcattaaaggcatgttcaccatcctggctaatacggtgaaaccccttctctactaaaaatacaaaaaaattagccgggcttggtggcgggtgcctgtagtcccagctactccggaggctgaggcaggggaatggtgtgaacccaggaggcggagcttgcagtgagccgagatcacaccactgcactccagcctgggctcaaaaaagaaaaaaaaaaaaaaaaaaaggcccgttcattctcaaatgcttttggcgtctccagggtgcctcaggaaaacatgaagtgggcattgtagaacttggggctactgtgtaactttggaagaaaaagttaagggtacttttaagtggatactgttttgatgaaattgccaacttcagggagcccagcttggagaaggaggacgtgagtattccttacaaggctccgaaacaattctttcttcacttagttttctttctgtgctctgcatcttatattccagcagggtcttccaatgcatggtttaataactaccagaactggccaggtgcagtggctcacgcctgtaatcccagaactttgggaggctaagacaggcagatcacttgaggccaggagttcgagaccagcctggacaacatggtgatacccagtttctactaaaaatacaaaaattagtcgggcatggtgatgtgcacctgtagtcccagctgctcgggaggctgaggcaggagaatcgcttgaacccgggagacagaggttgcaacgagccaagatcgagccactgcgctccggcctgggtgacaggagactccatctcaaaaaataaaattaaaaaaaaactactacaataaattatcaccttggactgtataaaacaacttttaaactagtctttttaaaaagtacacttaaataaaaatctaaacataagagaa

SEQ ID NO: 78533 - DNA, 5735 bp, Homo sapiens
  misc_feature (1)..(1): n is a, c, g, or t
  misc_feature (40)..(40): n is a, c, g, or t
  misc_feature (45)..(45): n is a, c, g, or t
  misc_feature (48)..(48): n is a, c, g, or t
  misc_feature (51)..(53): n is a, c, g, or t
  misc_feature (56)..(56): n is a, c, g, or t
  misc_feature (82)..(82): n is a, c, g, or t
  misc_feature (90)..(90): n is a, c, g, or t
ncccgccgctcggacggcccgagtcgcgccctcccgcccngcgcngcngannntgntctaagcttcctcggccgagccgggncgcgccgncgctgccgccgccgcgcgcggcgttacatccttactattcaaagtgccatccacagacctgctgatgggcagcatgagcatcacctgggagcttgctgcgctgtagaatcttgaggggtctccatccagatcagctgaatcagagtttgcattgttaacaagattctgcttctcagaagatgcactattatagatactctaacgccaaggtcagctgctggtacaagtacctccttttcagctacaacatcatcttctggttggctggagttgtcttccttggagtcgggctgtgggcatggagcgaaaagggtgtgctgtccgacctcaccaaagtgacccggatgcatggaatcgaccctgtggtgctggtcctgatggtgggcgtggtgatgttcaccctggggttcgccggctgcgtgggggctctgcgggagaatatctgcttgctcaactttttctgtggcaccatcgtgctcatcttcttcctggagctggctgtggccgtgctggccttcctgttccaggactgggtgagggaccggttccgggagttcttcgagagcaacatcaagtcctaccgggacgatatcgatctgcaaaacctcatcgactcccttcagaaagctaaccagtgctgtggcgcatatggccctgaagactgggacctcaacgtctacttcaattgcagcggtgccagctacagccgagagaagtgcggggtccccttctcctgctgcgtgccagatcctgcgcaaaaagttgtgaacacacagtgtggatatgatgtcaggattcagctgaagagcaagtgggatgagtccatcttcacgaaaggctgcatccaggcgctggaaagctggctcccgcggaacatttacattgtggctggcgtcttcatcgccatctcgctgttgcagatatttggcatcttcctggcaaggacgctgatctcagacatcgaggcagtgaaggccggccatcacttctgaggagcagagttgagggagccgagctgagccacgctgggaggccagagcctttctctgccatcagccctacgtccagagggagaggagccgacacccccagagccagtgccccatcttaagcatcagcgtgacgtgacctctctgtttctgcttgctggtgctgaagaccaagggtcccccttgttacctgcccaaacttgtgactgcatccctctggagtctacccagagacagagaatgtgtctttatgtgggagtggtgactctgaaagacagagagggctcctgtggctgccaggagggcttgactcagaccccctgcagctcaagcatgtctgcaggacaccctggtcccctctccactggcatccagacatctgctttgggtcatccacatctgtgggtgggccgtgggtagagggacccacaggcgtggacagggcatctctctccatcaagcaaagcagcatgggggcctgcccgtaacgggaggcggacgtggccccgctgggcctctgagtgccagcgcagtctgctgggacatgcacatatcaggggttgtttgcaggatcctcagccatgttcaagtgaagtaagcctgagccagtgcgtggactggtgccacgggagtgccttgtccactgtccccctgtgtccaccagctattctcctggcgccggaactgcctctggtcttgatagcattaagccctgatggcgccggtggcgcggtgggcatggttcttcactgagagccggctctccttttcttaaagtgtgtaaatagtttatttataggggtaagaatgttctcacaccatttcacttcctcttcctctcctccagcattctcctctgagcagccttagatagtgtccatggctggagccgaccctttgagtccccttgagtgtcttaagaaccagcccacaacagcctctctttctcctccacatactgcagcctccctccatgcatcccacatacaagcactcccccactccccagcgtggcctcactgtcttctggtcttggtgctactgaaattgtcacccagaatttgaatcctgaccctccccactgcaagcccagggagccccagcccaagatggccagcctgaaactgttggccagggctcctcttgtggccatgtacccagggctggctggcctgccatttgcctctccccggagacagccgttcttctgcaaccacaccccgtgcctagccacaaccccaggctgcagctgctcagaagctccaggcattttgtttctggtgaccgcccctaatgggatatcggtgatcactggtccacccttcctgtcagggcttttctggggctgctcttggaaatgaagtcttaagtactgaataactcccctggggatagctggggcatttgtctagctgggctactttctaacactttgccatagctcagaccacttctcatcgttcagggatggactgcaaccttaatttacttgccggagtgtacattctagtgtggtgtatactggtggctgttgatgatgatttttttttttttttttacacaattctctgtagactaggagaagaatgcttgtgtttttcggaagtgtgatgcttctctttgactgccaaactcttttatggaatatatctttatattaatgctgttttggtcatttttgtttggggtcactattgagatattgctaagcatctcagtggtaaacgcggctgccagaggaaccaagggatagggtatgtagaccttacagaaggatggatggtaaaggcagtccatcatcagcacaatctgacttacatttcattgagtaattttttttttttttaagattctgtatggcagcactttcagttgcccttgtgtgccggccacagccgcacaagttggcttgtggtttatcccccgctataagtgagagctggagaaacttcaactccataggtctagaggaaacattgttttaggttatttctgtccacccctgtgcgatactatttattgatccaagcagaagagcttggggacactgagtcgaagtggggacatgggattgaagcctgggcactgctgctgcatgagctgtgtgtcctgggtgtgccggcctttctgtgaagggggttggtggcagtgcccacctcactagatgcctctgacccagcctcccctgggggagtgggtggccacagaccctccctgccagagctcctggaaggctcctgcaggcctgacccatctattcctgtagacctggtttaggatgaagtctcggtgcgatttttgcagagttgggtttatctttcaactatagacccttctggctgttctcagccatatcatgtgactctgaatagttggatgaggaatggaaagaaagcaaggatgagagccgggcacgtggcagtctccgcccagcatcggctgtccgcacagaggcacagggcaggcctcctgtgcactccccacctagcactggcctgtcctgaatccccgccttccctggttggaggccagctgtggcatttgcaccctcttctcacctcaccatgcacatgctaactttaaagccttggggtctttcctgtaccccctcctcaaccctggtccaccccctctcaggatcttgtcaacgttatttttcctgtcccgtcttcctatcgctggccttcctttcccatcctaaaaacttgccgaggccctatggctccctccctttctttcccaggcagcttcttatctgggctgtctgtaccccttcctttgcaccacccaccatgccccacgtagctgaaagctgcttatcccaattgtcaactctggccttcttcagcctctgtagcaccagacactgcacctcctgaatgtcctctgcttctctgcttcagaggcccaggctcgccagttctctgacctctcccatatgtctgcttaggactctgctgcagctgtcctcaccagcctccggggaatcccactacccacagggcagggctgtgggctgggctgaaaaaccatctgcatggtccacaagaagcctggcactgggtttccccatgaataacaatgaaaattaatggatgcacaaccttcctggaacgtggaatttctctgggagattccatgcagaggccactggggaggtggcaggcatgcatgtgactgtaggtggctgcagtgttggaaggctcccagcagagcagagagggtgtcagtctcatcagggaacccacctgatggcttctcagccagcagtctcagaggaacatagacgactgctgagaaaggagggaggcagcagtggtcccagcacctgaggcatcctgctgtcatgggaaggtctccgcccaaatgtcagatgcatcagcctgtcacccgctggtccagagctttcagctgtactggtagggggtgggtggtggagtgctgaatgaccttcacaggtgggcctttccagctctagggtcttacgggtgtcggtccacagaaccacggtttttaggttgtgtgtccggggctatgggaacctgtcccccatgatggatcttggtagagacacttccctctgtcatcgtgcccaggaggatgctgcaggtgactacctgcagccctgttctcattcatttggatgccctccagaaatctggggagccatacacctttagagccttttttgctccttatcaagttggcaaggcttggccaattcctgttcaaggctgcattaaaggcatgttcaccatcctggctaatacggtgaaaccccttctctactaaaaatacaaaaaaattagccgggcttggtggcgggtgcctgtagtcccagctactccggaggctgaggcaggggaatggtgtgaacccaggaggcggagcttgcagtgagccgagatcacaccactgcactccagcctgggctcaaaaaagaaaaaaaaaaaaaaaaaaaggcccgttcattctcaaatgcttttggcgtctccagggtgcctcaggaaaacatgaagtgggcattgtagaacttggggctactgtgtaactttggaagaaaaagttaagggtacttttaagtggatactgttttgatgaaattgccaacttcagggagcccagcttggagaaggaggacgtgagtattccttacaaggctccgaaacaattctttcttcacttagttttctttctgtgctctgcatcttatattccagcagggtcttccaatgcatggtttaataactaccagaactggccaggtgcagtggctcacgcctgtaatcccagaactttgggaggctaagacaggcagatcacttgaggccaggagttcgagaccagcctggacaacatggtgatacccagtttctactaaaaatacaaaaattagtcgggcatggtgatgtgcacctgtagtcccagctgctcgggaggctgaggcaggagaatcgcttgaacccgggagacagaggttgcaacgagccaagatcgagccactgcgctccggcctgggtgacaggagactccatctcaaaaaataaaattaaaaaaaaactactacaataaattatcaccttggactgtataaaacaacttttaaactagtctttttaaaaagtacacttaaataaaaatctaaacataagagaa

SEQ ID NO: 78534 - DNA, 5594 bp, Homo sapiens
  misc_feature (1)..(1): n is a, c, g, or t
  misc_feature (40)..(40): n is a, c, g, or t
  misc_feature (45)..(45): n is a, c, g, or t
  misc_feature (48)..(48): n is a, c, g, or t
  misc_feature (51)..(53): n is a, c, g, or t
  misc_feature (56)..(56): n is a, c, g, or t
  misc_feature (82)..(82): n is a, c, g, or t
  misc_feature (90)..(90): n is a, c, g, or t
ncccgccgctcggacggcccgagtcgcgccctcccgcccngcgcngcngannntgntctaagcttcctcggccgagccgggncgcgccgncgctgccgccgccgcgcgcggattctgcttctcagaagatgcactattatagatactctaacgccaaggtcagctgctggtacaagtacctccttttcagctacaacatcatcttctggttggctggagttgtcttccttggagtcgggctgtgggcatggagcgaaaagggtgtgctgtccgacctcaccaaagtgacccggatgcatggaatcgaccctgtggtgctggtcctgatggtgggcgtggtgatgttcaccctggggttcgccggctgcgtgggggctctgcgggagaatatctgcttgctcaactttttctgtggcaccatcgtgctcatcttcttcctggagctggctgtggccgtgctggccttcctgttccaggactgggtgagggaccggttccgggagttcttcgagagcaacatcaagtcctaccgggacgatatcgatctgcaaaacctcatcgactcccttcagaaagctaaccagtgctgtggcgcatatggccctgaagactgggacctcaacgtctacttcaattgcagcggtgccagctacagccgagagaagtgcggggtccccttctcctgctgcgtgccagatcctgcgcaaaaagttgtgaacacacagtgtggatatgatgtcaggattcagctgaagagcaagtgggatgagtccatcttcacgaaaggctgcatccaggcgctggaaagctggctcccgcggaacatttacattgtggctggcgtcttcatcgccatctcgctgttgcagatatttggcatcttcctggcaaggacgctgatctcagacatcgaggcagtgaaggccggccatcacttctgaggagcagagttgagggagccgagctgagccacgctgggaggccagagcctttctctgccatcagccctacgtccagagggagaggagccgacacccccagagccagtgccccatcttaagcatcagcgtgacgtgacctctctgtttctgcttgctggtgctgaagaccaagggtcccccttgttacctgcccaaacttgtgactgcatccctctggagtctacccagagacagagaatgtgtctttatgtgggagtggtgactctgaaagacagagagggctcctgtggctgccaggagggcttgactcagaccccctgcagctcaagcatgtctgcaggacaccctggtcccctctccactggcatccagacatctgctttgggtcatccacatctgtgggtgggccgtgggtagagggacccacaggcgtggacagggcatctctctccatcaagcaaagcagcatgggggcctgcccgtaacgggaggcggacgtggccccgctgggcctctgagtgccagcgcagtctgctgggacatgcacatatcaggggttgtttgcaggatcctcagccatgttcaagtgaagtaagcctgagccagtgcgtggactggtgccacgggagtgccttgtccactgtccccctgtgtccaccagctattctcctggcgccggaactgcctctggtcttgatagcattaagccctgatggcgccggtggcgcggtgggcatggttcttcactgagagccggctctccttttcttaaagtgtgtaaatagtttatttataggggtaagaatgttctcacaccatttcacttcctcttcctctcctccagcattctcctctgagcagccttagatagtgtccatggctggagccgaccctttgagtccccttgagtgtcttaagaaccagcccacaacagcctctctttctcctccacatactgcagcctccctccatgcatcccacatacaagcactcccccactccccagcgtggcctcactgtcttctggtcttggtgctactgaaattgtcacccagaatttgaatcctgaccctccccactgcaagcccagggagccccagcccaagatggccagcctgaaactgttggccagggctcctcttgtggccatgtacccagggctggctggcctgccatttgcctctccccggagacagccgttcttctgcaaccacaccccgtgcctagccacaaccccaggctgcagctgctcagaagctccaggcattttgtttctggtgaccgcccctaatgggatatcggtgatcactggtccacccttcctgtcagggcttttctggggctgctcttggaaatgaagtcttaagtactgaataactcccctggggatagctggggcatttgtctagctgggctactttctaacactttgccatagctcagaccacttctcatcgttcagggatggactgcaaccttaatttacttgccggagtgtacattctagtgtggtgtatactggtggctgttgatgatgatttttttttttttttttacacaattctctgtagactaggagaagaatgcttgtgtttttcggaagtgtgatgcttctctttgactgccaaactcttttatggaatatatctttatattaatgctgttttggtcatttttgtttggggtcactattgagatattgctaagcatctcagtggtaaacgcggctgccagaggaaccaagggatagggtatgtagaccttacagaaggatggatggtaaaggcagtccatcatcagcacaatctgacttacatttcattgagtaattttttttttttttaagattctgtatggcagcactttcagttgcccttgtgtgccggccacagccgcacaagttggcttgtggtttatcccccgctataagtgagagctggagaaacttcaactccataggtctagaggaaacattgttttaggttatttctgtccacccctgtgcgatactatttattgatccaagcagaagagcttggggacactgagtcgaagtggggacatgggattgaagcctgggcactgctgctgcatgagctgtgtgtcctgggtgtgccggcctttctgtgaagggggttggtggcagtgcccacctcactagatgcctctgacccagcctcccctgggggagtgggtggccacagaccctccctgccagagctcctggaaggctcctgcaggcctgacccatctattcctgtagacctggtttaggatgaagtctcggtgcgatttttgcagagttgggtttatctttcaactatagacccttctggctgttctcagccatatcatgtgactctgaatagttggatgaggaatggaaagaaagcaaggatgagagccgggcacgtggcagtctccgcccagcatcggctgtccgcacagaggcacagggcaggcctcctgtgcactccccacctagcactggcctgtcctgaatccccgccttccctggttggaggccagctgtggcatttgcaccctcttctcacctcaccatgcacatgctaactttaaagccttggggtctttcctgtaccccctcctcaaccctggtccaccccctctcaggatcttgtcaacgttatttttcctgtcccgtcttcctatcgctggccttcctttcccatcctaaaaacttgccgaggccctatggctccctccctttctttcccaggcagcttcttatctgggctgtctgtaccccttcctttgcaccacccaccatgccccacgtagctgaaagctgcttatcccaattgtcaactctggccttcttcagcctctgtagcaccagacactgcacctcctgaatgtcctctgcttctctgcttcagaggcccaggctcgccagttctctgacctctcccatatgtctgcttaggactctgctgcagctgtcctcaccagcctccggggaatcccactacccacagggcagggctgtgggctgggctgaaaaaccatctgcatggtccacaagaagcctggcactgggtttccccatgaataacaatgaaaattaatggatgcacaaccttcctggaacgtggaatttctctgggagattccatgcagaggccactggggaggtggcaggcatgcatgtgactgtaggtggctgcagtgttggaaggctcccagcagagcagagagggtgtcagtctcatcagggaacccacctgatggcttctcagccagcagtctcagaggaacatagacgactgctgagaaaggagggaggcagcagtggtcccagcacctgaggcatcctgctgtcatgggaaggtctccgcccaaatgtcagatgcatcagcctgtcacccgctggtccagagctttcagctgtactggtagggggtgggtggtggagtgctgaatgaccttcacaggtgggcctttccagctctagggtcttacgggtgtcggtccacagaaccacggtttttaggttgtgtgtccggggctatgggaacctgtcccccatgatggatcttggtagagacacttccctctgtcatcgtgcccaggaggatgctgcaggtgactacctgcagccctgttctcattcatttggatgccctccagaaatctggggagccatacacctttagagccttttttgctccttatcaagttggcaaggcttggccaattcctgttcaaggctgcattaaaggcatgttcaccatcctggctaatacggtgaaaccccttctctactaaaaatacaaaaaaattagccgggcttggtggcgggtgcctgtagtcccagctactccggaggctgaggcaggggaatggtgtgaacccaggaggcggagcttgcagtgagccgagatcacaccactgcactccagcctgggctcaaaaaagaaaaaaaaaaaaaaaaaaaggcccgttcattctcaaatgcttttggcgtctccagggtgcctcaggaaaacatgaagtgggcattgtagaacttggggctactgtgtaactttggaagaaaaagttaagggtacttttaagtggatactgttttgatgaaattgccaacttcagggagcccagcttggagaaggaggacgtgagtattccttacaaggctccgaaacaattctttcttcacttagttttctttctgtgctctgcatcttatattccagcagggtcttccaatgcatggtttaataactaccagaactggccaggtgcagtggctcacgcctgtaatcccagaactttgggaggctaagacaggcagatcacttgaggccaggagttcgagaccagcctggacaacatggtgatacccagtttctactaaaaatacaaaaattagtcgggcatggtgatgtgcacctgtagtcccagctgctcgggaggctgaggcaggagaatcgcttgaacccgggagacagaggttgcaacgagccaagatcgagccactgcgctccggcctgggtgacaggagactccatctcaaaaaataaaattaaaaaaaaactactacaataaattatcaccttggactgtataaaacaacttttaaactagtctttttaaaaagtacacttaaataaaaatctaaacataagagaa

SEQ ID NO: 78535 - DNA, 5871 bp, Homo sapiens
tgggcaggccggggttgaaactcttcaccccttgcggtctgtactgcctcccaactgagcagccagggagaaggcctagagcctgtgcctttcagctagatagctggaggaactggctcctccctccttaggctgtgctggcctgagctgggagcctgagagctggggcagttgtctctaaagtggcttctgggattctggtaagaggacttggggtggagtcgaaagcagggagccctgtgagttgagacgaactcttgcaatgttgccttggctggtctcgaactcatcttctgggttcaagctgtccgtctgcctcggactcccaaagtgctaggattacagcgttacatccttactattcaaagtgccatccacagacctgctgatgggcagcatgagcatcacctgggagcttgctgcgctgtagaatcttgaggggtctccatccagatcagctgaatcagagtttgcattgttaacaagttggctggagttgtcttccttggagtcgggctgtgggcatggagcgaaaagggtgtgctgtccgacctcaccaaagtgacccggatgcatggaatcgaccctgtggtgctggtcctgatggtgggcgtggtgatgttcaccctggggttcgccggctgcgtgggggctctgcgggagaatatctgcttgctcaactttttctgtggcaccatcgtgctcatcttcttcctggagctggctgtggccgtgctggccttcctgttccaggactgggtgagggaccggttccgggagttcttcgagagcaacatcaagtcctaccgggacgatatcgatctgcaaaacctcatcgactcccttcagaaagctaaccagtgctgtggcgcatatggccctgaagactgggacctcaacgtctacttcaattgcagcggtgccagctacagccgagagaagtgcggggtccccttctcctgctgcgtgccagatcctgcgcaaaaagttgtgaacacacagtgtggatatgatgtcaggattcagctgaagagcaagtgggatgagtccatcttcacgaaaggctgcatccaggcgctggaaagctggctcccgcggaacatttacattgtggctggcgtcttcatcgccatctcgctgttgcagatatttggcatcttcctggcaaggacgctgatctcagacatcgaggcagtgaaggccggccatcacttctgaggagcagagttgagggagccgagctgagccacgctgggaggccagagcctttctctgccatcagccctacgtccagagggagaggagccgacacccccagagccagtgccccatcttaagcatcagcgtgacgtgacctctctgtttctgcttgctggtgctgaagaccaagggtcccccttgttacctgcccaaacttgtgactgcatccctctggagtctacccagagacagagaatgtgtctttatgtgggagtggtgactctgaaagacagagagggctcctgtggctgccaggagggcttgactcagaccccctgcagctcaagcatgtctgcaggacaccctggtcccctctccactggcatccagacatctgctttgggtcatccacatctgtgggtgggccgtgggtagagggacccacaggcgtggacagggcatctctctccatcaagcaaagcagcatgggggcctgcccgtaacgggaggcggacgtggccccgctgggcctctgagtgccagcgcagtctgctgggacatgcacatatcaggggttgtttgcaggatcctcagccatgttcaagtgaagtaagcctgagccagtgcgtggactggtgccacgggagtgccttgtccactgtccccctgtgtccaccagctattctcctggcgccggaactgcctctggtcttgatagcattaagccctgatggcgccggtggcgcggtgggcatggttcttcactgagagccggctctccttttcttaaagtgtgtaaatagtttatttataggggtaagaatgttctcacaccatttcacttcctcttcctctcctccagcattctcctctgagcagccttagatagtgtccatggctggagccgaccctttgagtccccttgagtgtcttaagaaccagcccacaacagcctctctttctcctccacatactgcagcctccctccatgcatcccacatacaagcactcccccactccccagcgtggcctcactgtcttctggtcttggtgctactgaaattgtcacccagaatttgaatcctgaccctccccactgcaagcccagggagccccagcccaagatggccagcctgaaactgttggccagggctcctcttgtggccatgtacccagggctggctggcctgccatttgcctctccccggagacagccgttcttctgcaaccacaccccgtgcctagccacaaccccaggctgcagctgctcagaagctccaggcattttgtttctggtgaccgcccctaatgggatatcggtgatcactggtccacccttcctgtcagggcttttctggggctgctcttggaaatgaagtcttaagtactgaataactcccctggggatagctggggcatttgtctagctgggctactttctaacactttgccatagctcagaccacttctcatcgttcagggatggactgcaaccttaatttacttgccggagtgtacattctagtgtggtgtatactggtggctgttgatgatgatttttttttttttttttacacaattctctgtagactaggagaagaatgcttgtgtttttcggaagtgtgatgcttctctttgactgccaaactcttttatggaatatatctttatattaatgctgttttggtcatttttgtttggggtcactattgagatattgctaagcatctcagtggtaaacgcggctgccagaggaaccaagggatagggtatgtagaccttacagaaggatggatggtaaaggcagtccatcatcagcacaatctgacttacatttcattgagtaattttttttttttttaagattctgtatggcagcactttcagttgcccttgtgtgccggccacagccgcacaagttggcttgtggtttatcccccgctataagtgagagctggagaaacttcaactccataggtctagaggaaacattgttttaggttatttctgtccacccctgtgcgatactatttattgatccaagcagaagagcttggggacactgagtcgaagtggggacatgggattgaagcctgggcactgctgctgcatgagctgtgtgtcctgggtgtgccggcctttctgtgaagggggttggtggcagtgcccacctcactagatgcctctgacccagcctcccctgggggagtgggtggccacagaccctccctgccagagctcctggaaggctcctgcaggcctgacccatctattcctgtagacctggtttaggatgaagtctcggtgcgatttttgcagagttgggtttatctttcaactatagacccttctggctgttctcagccatatcatgtgactctgaatagttggatgaggaatggaaagaaagcaaggatgagagccgggcacgtggcagtctccgcccagcatcggctgtccgcacagaggcacagggcaggcctcctgtgcactccccacctagcactggcctgtcctgaatccccgccttccctggttggaggccagctgtggcatttgcaccctcttctcacctcaccatgcacatgctaactttaaagccttggggtctttcctgtaccccctcctcaaccctggtccaccccctctcaggatcttgtcaacgttatttttcctgtcccgtcttcctatcgctggccttcctttcccatcctaaaaacttgccgaggccctatggctccctccctttctttcccaggcagcttcttatctgggctgtctgtaccccttcctttgcaccacccaccatgccccacgtagctgaaagctgcttatcccaattgtcaactctggccttcttcagcctctgtagcaccagacactgcacctcctgaatgtcctctgcttctctgcttcagaggcccaggctcgccagttctctgacctctcccatatgtctgcttaggactctgctgcagctgtcctcaccagcctccggggaatcccactacccacagggcagggctgtgggctgggctgaaaaaccatctgcatggtccacaagaagcctggcactgggtttccccatgaataacaatgaaaattaatggatgcacaaccttcctggaacgtggaatttctctgggagattccatgcagaggccactggggaggtggcaggcatgcatgtgactgtaggtggctgcagtgttggaaggctcccagcagagcagagagggtgtcagtctcatcagggaacccacctgatggcttctcagccagcagtctcagaggaacatagacgactgctgagaaaggagggaggcagcagtggtcccagcacctgaggcatcctgctgtcatgggaaggtctccgcccaaatgtcagatgcatcagcctgtcacccgctggtccagagctttcagctgtactggtagggggtgggtggtggagtgctgaatgaccttcacaggtgggcctttccagctctagggtcttacgggtgtcggtccacagaaccacggtttttaggttgtgtgtccggggctatgggaacctgtcccccatgatggatcttggtagagacacttccctctgtcatcgtgcccaggaggatgctgcaggtgactacctgcagccctgttctcattcatttggatgccctccagaaatctggggagccatacacctttagagccttttttgctccttatcaagttggcaaggcttggccaattcctgttcaaggctgcattaaaggcatgttcaccatcctggctaatacggtgaaaccccttctctactaaaaatacaaaaaaattagccgggcttggtggcgggtgcctgtagtcccagctactccggaggctgaggcaggggaatggtgtgaacccaggaggcggagcttgcagtgagccgagatcacaccactgcactccagcctgggctcaaaaaagaaaaaaaaaaaaaaaaaaaggcccgttcattctcaaatgcttttggcgtctccagggtgcctcaggaaaacatgaagtgggcattgtagaacttggggctactgtgtaactttggaagaaaaagttaagggtacttttaagtggatactgttttgatgaaattgccaacttcagggagcccagcttggagaaggaggacgtgagtattccttacaaggctccgaaacaattctttcttcacttagttttctttctgtgctctgcatcttatattccagcagggtcttccaatgcatggtttaataactaccagaactggccaggtgcagtggctcacgcctgtaatcccagaactttgggaggctaagacaggcagatcacttgaggccaggagttcgagaccagcctggacaacatggtgatacccagtttctactaaaaatacaaaaattagtcgggcatggtgatgtgcacctgtagtcccagctgctcgggaggctgaggcaggagaatcgcttgaacccgggagacagaggttgcaacgagccaagatcgagccactgcgctccggcctgggtgacaggagactccatctcaaaaaataaaattaaaaaaaaactactacaataaattatcaccttggactgtataaaacaacttttaaactagtctttttaaaaagtacacttaaataaaaatctaaacataagagaa

SEQ ID NO: 78536 - DNA, 5507 bp, Homo sapiens
  misc_feature (48)..(48): n is a, c, g, or t
  misc_feature (54)..(54): n is a, c, g, or t
  misc_feature (57)..(57): n is a, c, g, or t
aacaataatgtcatagtagatcctggtgttaatcatcacgagggcggnccggcngtngtgccgcgccgcgcgcggattctgcttctcagaagatgcactattatagatactctaacgccaaggtcagctgctggtacaagtacctccttttcagctacaacatcatcttctggggtgtgctgtccgacctcaccaaagtgacccggatgcatggaatcgaccctgtggtgctggtcctgatggtgggcgtggtgatgttcaccctggggttcgccggctgcgtgggggctctgcgggagaatatctgcttgctcaactttttctgtggcaccatcgtgctcatcttcttcctggagctggctgtggccgtgctggccttcctgttccaggactgggtgagggaccggttccgggagttcttcgagagcaacatcaagtcctaccgggacgatatcgatctgcaaaacctcatcgactcccttcagaaagctaaccagtgctgtggcgcatatggccctgaagactgggacctcaacgtctacttcaattgcagcggtgccagctacagccgagagaagtgcggggtccccttctcctgctgcgtgccagatcctgcgcaaaaagttgtgaacacacagtgtggatatgatgtcaggattcagctgaagagcaagtgggatgagtccatcttcacgaaaggctgcatccaggcgctggaaagctggctcccgcggaacatttacattgtggctggcgtcttcatcgccatctcgctgttgcagatatttggcatcttcctggcaaggacgctgatctcagacatcgaggcagtgaaggccggccatcacttctgaggagcagagttgagggagccgagctgagccacgctgggaggccagagcctttctctgccatcagccctacgtccagagggagaggagccgacacccccagagccagtgccccatcttaagcatcagcgtgacgtgacctctctgtttctgcttgctggtgctgaagaccaagggtcccccttgttacctgcccaaacttgtgactgcatccctctggagtctacccagagacagagaatgtgtctttatgtgggagtggtgactctgaaagacagagagggctcctgtggctgccaggagggcttgactcagaccccctgcagctcaagcatgtctgcaggacaccctggtcccctctccactggcatccagacatctgctttgggtcatccacatctgtgggtgggccgtgggtagagggacccacaggcgtggacagggcatctctctccatcaagcaaagcagcatgggggcctgcccgtaacgggaggcggacgtggccccgctgggcctctgagtgccagcgcagtctgctgggacatgcacatatcaggggttgtttgcaggatcctcagccatgttcaagtgaagtaagcctgagccagtgcgtggactggtgccacgggagtgccttgtccactgtccccctgtgtccaccagctattctcctggcgccggaactgcctctggtcttgatagcattaagccctgatggcgccggtggcgcggtgggcatggttcttcactgagagccggctctccttttcttaaagtgtgtaaatagtttatttataggggtaagaatgttctcacaccatttcacttcctcttcctctcctccagcattctcctctgagcagccttagatagtgtccatggctggagccgaccctttgagtccccttgagtgtcttaagaaccagcccacaacagcctctctttctcctccacatactgcagcctccctccatgcatcccacatacaagcactcccccactccccagcgtggcctcactgtcttctggtcttggtgctactgaaattgtcacccagaatttgaatcctgaccctccccactgcaagcccagggagccccagcccaagatggccagcctgaaactgttggccagggctcctcttgtggccatgtacccagggctggctggcctgccatttgcctctccccggagacagccgttcttctgcaaccacaccccgtgcctagccacaaccccaggctgcagctgctcagaagctccaggcattttgtttctggtgaccgcccctaatgggatatcggtgatcactggtccacccttcctgtcagggcttttctggggctgctcttggaaatgaagtcttaagtactgaataactcccctggggatagctggggcatttgtctagctgggctactttctaacactttgccatagctcagaccacttctcatcgttcagggatggactgcaaccttaatttacttgccggagtgtacattctagtgtggtgtatactggtggctgttgatgatgatttttttttttttttttacacaattctctgtagactaggagaagaatgcttgtgtttttcggaagtgtgatgcttctctttgactgccaaactcttttatggaatatatctttatattaatgctgttttggtcatttttgtttggggtcactattgagatattgctaagcatctcagtggtaaacgcggctgccagaggaaccaagggatagggtatgtagaccttacagaaggatggatggtaaaggcagtccatcatcagcacaatctgacttacatttcattgagtaattttttttttttttaagattctgtatggcagcactttcagttgcccttgtgtgccggccacagccgcacaagttggcttgtggtttatcccccgctataagtgagagctggagaaacttcaactccataggtctagaggaaacattgttttaggttatttctgtccacccctgtgcgatactatttattgatccaagcagaagagcttggggacactgagtcgaagtggggacatgggattgaagcctgggcactgctgctgcatgagctgtgtgtcctgggtgtgccggcctttctgtgaagggggttggtggcagtgcccacctcactagatgcctctgacccagcctcccctgggggagtgggtggccacagaccctccctgccagagctcctggaaggctcctgcaggcctgacccatctattcctgtagacctggtttaggatgaagtctcggtgcgatttttgcagagttgggtttatctttcaactatagacccttctggctgttctcagccatatcatgtgactctgaatagttggatgaggaatggaaagaaagcaaggatgagagccgggcacgtggcagtctccgcccagcatcggctgtccgcacagaggcacagggcaggcctcctgtgcactccccacctagcactggcctgtcctgaatccccgccttccctggttggaggccagctgtggcatttgcaccctcttctcacctcaccatgcacatgctaactttaaagccttggggtctttcctgtaccccctcctcaaccctggtccaccccctctcaggatcttgtcaacgttatttttcctgtcccgtcttcctatcgctggccttcctttcccatcctaaaaacttgccgaggccctatggctccctccctttctttcccaggcagcttcttatctgggctgtctgtaccccttcctttgcaccacccaccatgccccacgtagctgaaagctgcttatcccaattgtcaactctggccttcttcagcctctgtagcaccagacactgcacctcctgaatgtcctctgcttctctgcttcagaggcccaggctcgccagttctctgacctctcccatatgtctgcttaggactctgctgcagctgtcctcaccagcctccggggaatcccactacccacagggcagggctgtgggctgggctgaaaaaccatctgcatggtccacaagaagcctggcactgggtttccccatgaataacaatgaaaattaatggatgcacaaccttcctggaacgtggaatttctctgggagattccatgcagaggccactggggaggtggcaggcatgcatgtgactgtaggtggctgcagtgttggaaggctcccagcagagcagagagggtgtcagtctcatcagggaacccacctgatggcttctcagccagcagtctcagaggaacatagacgactgctgagaaaggagggaggcagcagtggtcccagcacctgaggcatcctgctgtcatgggaaggtctccgcccaaatgtcagatgcatcagcctgtcacccgctggtccagagctttcagctgtactggtagggggtgggtggtggagtgctgaatgaccttcacaggtgggcctttccagctctagggtcttacgggtgtcggtccacagaaccacggtttttaggttgtgtgtccggggctatgggaacctgtcccccatgatggatcttggtagagacacttccctctgtcatcgtgcccaggaggatgctgcaggtgactacctgcagccctgttctcattcatttggatgccctccagaaatctggggagccatacacctttagagccttttttgctccttatcaagttggcaaggcttggccaattcctgttcaaggctgcattaaaggcatgttcaccatcctggctaatacggtgaaaccccttctctactaaaaatacaaaaaaattagccgggcttggtggcgggtgcctgtagtcccagctactccggaggctgaggcaggggaatggtgtgaacccaggaggcggagcttgcagtgagccgagatcacaccactgcactccagcctgggctcaaaaaagaaaaaaaaaaaaaaaaaaaggcccgttcattctcaaatgcttttggcgtctccagggtgcctcaggaaaacatgaagtgggcattgtagaacttggggctactgtgtaactttggaagaaaaagttaagggtacttttaagtggatactgttttgatgaaattgccaacttcagggagcccagcttggagaaggaggacgtgagtattccttacaaggctccgaaacaattctttcttcacttagttttctttctgtgctctgcatcttatattccagcagggtcttccaatgcatggtttaataactaccagaactggccaggtgcagtggctcacgcctgtaatcccagaactttgggaggctaagacaggcagatcacttgaggccaggagttcgagaccagcctggacaacatggtgatacccagtttctactaaaaatacaaaaattagtcgggcatggtgatgtgcacctgtagtcccagctgctcgggaggctgaggcaggagaatcgcttgaacccgggagacagaggttgcaacgagccaagatcgagccactgcgctccggcctgggtgacaggagactccatctcaaaaaataaaattaaaaaaaaactactacaataaattatcaccttggactgtataaaacaacttttaaactagtctttttaaaaagtacacttaaataaaaatctaaacataagagaa

SEQ ID NO: 78537 - DNA, 5624 bp, Homo sapiens
tcgggatcgccgctcggagcgggagtcgcgccctcccgccccgcgccgcggaacttgctctaacttcctcggccgagccgggccgcgccgccgctgccgccgccgcgcgcggattctgcttctcagaagatgcactattatagatactctaacgccaaggtcagctgctggtacaagtacctccttttcagctacaacatcatcttctggttggctggagttgtcttccttggagtcgggctgtgggcatggagcgaaaagtgctgccctgctttctctgtctctttcagggtgtgctgtccgacctcaccaaagtgacccggatgcatggaatcgaccctgtggtgctggtcctgatggtgggcgtggtgatgttcaccctggggttcgccggctgcgtgggggctctgcgggagaatatctgcttgctcaactttttctgtggcaccatcgtgctcatcttcttcctggagctggctgtggccgtgctggccttcctgttccaggactgggtgagggaccggttccgggagttcttcgagagcaacatcaagtcctaccgggacgatatcgatctgcaaaacctcatcgactcccttcagaaagctaaccagtgctgtggcgcatatggccctgaagactgggacctcaacgtctacttcaattgcagcggtgccagctacagccgagagaagtgcggggtccccttctcctgctgcgtgccagatcctgcgcaaaaagttgtgaacacacagtgtggatatgatgtcaggattcagctgaagagcaagtgggatgagtccatcttcacgaaaggctgcatccaggcgctggaaagctggctcccgcggaacatttacattgtggctggcgtcttcatcgccatctcgctgttgcagatatttggcatcttcctggcaaggacgctgatctcagacatcgaggcagtgaaggccggccatcacttctgaggagcagagttgagggagccgagctgagccacgctgggaggccagagcctttctctgccatcagccctacgtccagagggagaggagccgacacccccagagccagtgccccatcttaagcatcagcgtgacgtgacctctctgtttctgcttgctggtgctgaagaccaagggtcccccttgttacctgcccaaacttgtgactgcatccctctggagtctacccagagacagagaatgtgtctttatgtgggagtggtgactctgaaagacagagagggctcctgtggctgccaggagggcttgactcagaccccctgcagctcaagcatgtctgcaggacaccctggtcccctctccactggcatccagacatctgctttgggtcatccacatctgtgggtgggccgtgggtagagggacccacaggcgtggacagggcatctctctccatcaagcaaagcagcatgggggcctgcccgtaacgggaggcggacgtggccccgctgggcctctgagtgccagcgcagtctgctgggacatgcacatatcaggggttgtttgcaggatcctcagccatgttcaagtgaagtaagcctgagccagtgcgtggactggtgccacgggagtgccttgtccactgtccccctgtgtccaccagctattctcctggcgccggaactgcctctggtcttgatagcattaagccctgatggcgccggtggcgcggtgggcatggttcttcactgagagccggctctccttttcttaaagtgtgtaaatagtttatttataggggtaagaatgttctcacaccatttcacttcctcttcctctcctccagcattctcctctgagcagccttagatagtgtccatggctggagccgaccctttgagtccccttgagtgtcttaagaaccagcccacaacagcctctctttctcctccacatactgcagcctccctccatgcatcccacatacaagcactcccccactccccagcgtggcctcactgtcttctggtcttggtgctactgaaattgtcacccagaatttgaatcctgaccctccccactgcaagcccagggagccccagcccaagatggccagcctgaaactgttggccagggctcctcttgtggccatgtacccagggctggctggcctgccatttgcctctccccggagacagccgttcttctgcaaccacaccccgtgcctagccacaaccccaggctgcagctgctcagaagctccaggcattttgtttctggtgaccgcccctaatgggatatcggtgatcactggtccacccttcctgtcagggcttttctggggctgctcttggaaatgaagtcttaagtactgaataactcccctggggatagctggggcatttgtctagctgggctactttctaacactttgccatagctcagaccacttctcatcgttcagggatggactgcaaccttaatttacttgccggagtgtacattctagtgtggtgtatactggtggctgttgatgatgatttttttttttttttttacacaattctctgtagactaggagaagaatgcttgtgtttttcggaagtgtgatgcttctctttgactgccaaactcttttatggaatatatctttatattaatgctgttttggtcatttttgtttggggtcactattgagatattgctaagcatctcagtggtaaacgcggctgccagaggaaccaagggatagggtatgtagaccttacagaaggatggatggtaaaggcagtccatcatcagcacaatctgacttacatttcattgagtaattttttttttttttaagattctgtatggcagcactttcagttgcccttgtgtgccggccacagccgcacaagttggcttgtggtttatcccccgctataagtgagagctggagaaacttcaactccataggtctagaggaaacattgttttaggttatttctgtccacccctgtgcgatactatttattgatccaagcagaagagcttggggacactgagtcgaagtggggacatgggattgaagcctgggcactgctgctgcatgagctgtgtgtcctgggtgtgccggcctttctgtgaagggggttggtggcagtgcccacctcactagatgcctctgacccagcctcccctgggggagtgggtggccacagaccctccctgccagagctcctggaaggctcctgcaggcctgacccatctattcctgtagacctggtttaggatgaagtctcggtgcgatttttgcagagttgggtttatctttcaactatagacccttctggctgttctcagccatatcatgtgactctgaatagttggatgaggaatggaaagaaagcaaggatgagagccgggcacgtggcagtctccgcccagcatcggctgtccgcacagaggcacagggcaggcctcctgtgcactccccacctagcactggcctgtcctgaatccccgccttccctggttggaggccagctgtggcatttgcaccctcttctcacctcaccatgcacatgctaactttaaagccttggggtctttcctgtaccccctcctcaaccctggtccaccccctctcaggatcttgtcaacgttatttttcctgtcccgtcttcctatcgctggccttcctttcccatcctaaaaacttgccgaggccctatggctccctccctttctttcccaggcagcttcttatctgggctgtctgtaccccttcctttgcaccacccaccatgccccacgtagctgaaagctgcttatcccaattgtcaactctggccttcttcagcctctgtagcaccagacactgcacctcctgaatgtcctctgcttctctgcttcagaggcccaggctcgccagttctctgacctctcccatatgtctgcttaggactctgctgcagctgtcctcaccagcctccggggaatcccactacccacagggcagggctgtgggctgggctgaaaaaccatctgcatggtccacaagaagcctggcactgggtttccccatgaataacaatgaaaattaatggatgcacaaccttcctggaacgtggaatttctctgggagattccatgcagaggccactggggaggtggcaggcatgcatgtgactgtaggtggctgcagtgttggaaggctcccagcagagcagagagggtgtcagtctcatcagggaacccacctgatggcttctcagccagcagtctcagaggaacatagacgactgctgagaaaggagggaggcagcagtggtcccagcacctgaggcatcctgctgtcatgggaaggtctccgcccaaatgtcagatgcatcagcctgtcacccgctggtccagagctttcagctgtactggtagggggtgggtggtggagtgctgaatgaccttcacaggtgggcctttccagctctagggtcttacgggtgtcggtccacagaaccacggtttttaggttgtgtgtccggggctatgggaacctgtcccccatgatggatcttggtagagacacttccctctgtcatcgtgcccaggaggatgctgcaggtgactacctgcagccctgttctcattcatttggatgccctccagaaatctggggagccatacacctttagagccttttttgctccttatcaagttggcaaggcttggccaattcctgttcaaggctgcattaaaggcatgttcaccatcctggctaatacggtgaaaccccttctctactaaaaatacaaaaaaattagccgggcttggtggcgggtgcctgtagtcccagctactccggaggctgaggcaggggaatggtgtgaacccaggaggcggagcttgcagtgagccgagatcacaccactgcactccagcctgggctcaaaaaagaaaaaaaaaaaaaaaaaaaggcccgttcattctcaaatgcttttggcgtctccagggtgcctcaggaaaacatgaagtgggcattgtagaacttggggctactgtgtaactttggaagaaaaagttaagggtacttttaagtggatactgttttgatgaaattgccaacttcagggagcccagcttggagaaggaggacgtgagtattccttacaaggctccgaaacaattctttcttcacttagttttctttctgtgctctgcatcttatattccagcagggtcttccaatgcatggtttaataactaccagaactggccaggtgcagtggctcacgcctgtaatcccagaactttgggaggctaagacaggcagatcacttgaggccaggagttcgagaccagcctggacaacatggtgatacccagtttctactaaaaatacaaaaattagtcgggcatggtgatgtgcacctgtagtcccagctgctcgggaggctgaggcaggagaatcgcttgaacccgggagacagaggttgcaacgagccaagatcgagccactgcgctccggcctgggtgacaggagactccatctcaaaaaataaaattaaaaaaaaactactacaataaattatcaccttggactgtataaaacaacttttaaactagtctttttaaaaagtacacttaaataaaaatctaaacataagagaa

SEQ ID NO: 78538 - DNA, 5226 bp, Homo sapiens
tcgggatcgccgctcggagcgggagtcgcgccctcccgccccgcgccgcggaacttgctctaacttcctcggccgagccgggccgcgccgccgctgccgccgccgcgcgcggattctgcttctcagaagatgcactattatagatactctaacgccaaggtcagctgctggtacaagtacctccttttcagctacaacatcatcttctggaaccagtgctgtggcgcatatggccctgaagactgggacctcaacgtctacttcaattgcagcggtgccagctacagccgagagaagtgcggggtccccttctcctgctgcgtgccagatcctgcgcaaaaagttgtgaacacacagtgtggatatgatgtcaggattcagctgaagagcaagtgggatgagtccatcttcacgaaaggctgcatccaggcgctggaaagctggctcccgcggaacatttacattgtggctggcgtcttcatcgccatctcgctgttgcagatatttggcatcttcctggcaaggacgctgatctcagacatcgaggcagtgaaggccggccatcacttctgaggagcagagttgagggagccgagctgagccacgctgggaggccagagcctttctctgccatcagccctacgtccagagggagaggagccgacacccccagagccagtgccccatcttaagcatcagcgtgacgtgacctctctgtttctgcttgctggtgctgaagaccaagggtcccccttgttacctgcccaaacttgtgactgcatccctctggagtctacccagagacagagaatgtgtctttatgtgggagtggtgactctgaaagacagagagggctcctgtggctgccaggagggcttgactcagaccccctgcagctcaagcatgtctgcaggacaccctggtcccctctccactggcatccagacatctgctttgggtcatccacatctgtgggtgggccgtgggtagagggacccacaggcgtggacagggcatctctctccatcaagcaaagcagcatgggggcctgcccgtaacgggaggcggacgtggccccgctgggcctctgagtgccagcgcagtctgctgggacatgcacatatcaggggttgtttgcaggatcctcagccatgttcaagtgaagtaagcctgagccagtgcgtggactggtgccacgggagtgccttgtccactgtccccctgtgtccaccagctattctcctggcgccggaactgcctctggtcttgatagcattaagccctgatggcgccggtggcgcggtgggcatggttcttcactgagagccggctctccttttcttaaagtgtgtaaatagtttatttataggggtaagaatgttctcacaccatttcacttcctcttcctctcctccagcattctcctctgagcagccttagatagtgtccatggctggagccgaccctttgagtccccttgagtgtcttaagaaccagcccacaacagcctctctttctcctccacatactgcagcctccctccatgcatcccacatacaagcactcccccactccccagcgtggcctcactgtcttctggtcttggtgctactgaaattgtcacccagaatttgaatcctgaccctccccactgcaagcccagggagccccagcccaagatggccagcctgaaactgttggccagggctcctcttgtggccatgtacccagggctggctggcctgccatttgcctctccccggagacagccgttcttctgcaaccacaccccgtgcctagccacaaccccaggctgcagctgctcagaagctccaggcattttgtttctggtgaccgcccctaatgggatatcggtgatcactggtccacccttcctgtcagggcttttctggggctgctcttggaaatgaagtcttaagtactgaataactcccctggggatagctggggcatttgtctagctgggctactttctaacactttgccatagctcagaccacttctcatcgttcagggatggactgcaaccttaatttacttgccggagtgtacattctagtgtggtgtatactggtggctgttgatgatgatttttttttttttttttacacaattctctgtagactaggagaagaatgcttgtgtttttcggaagtgtgatgcttctctttgactgccaaactcttttatggaatatatctttatattaatgctgttttggtcatttttgtttggggtcactattgagatattgctaagcatctcagtggtaaacgcggctgccagaggaaccaagggatagggtatgtagaccttacagaaggatggatggtaaaggcagtccatcatcagcacaatctgacttacatttcattgagtaattttttttttttttaagattctgtatggcagcactttcagttgcccttgtgtgccggccacagccgcacaagttggcttgtggtttatcccccgctataagtgagagctggagaaacttcaactccataggtctagaggaaacattgttttaggttatttctgtccacccctgtgcgatactatttattgatccaagcagaagagcttggggacactgagtcgaagtggggacatgggattgaagcctgggcactgctgctgcatgagctgtgtgtcctgggtgtgccggcctttctgtgaagggggttggtggcagtgcccacctcactagatgcctctgacccagcctcccctgggggagtgggtggccacagaccctccctgccagagctcctggaaggctcctgcaggcctgacccatctattcctgtagacctggtttaggatgaagtctcggtgcgatttttgcagagttgggtttatctttcaactatagacccttctggctgttctcagccatatcatgtgactctgaatagttggatgaggaatggaaagaaagcaaggatgagagccgggcacgtggcagtctccgcccagcatcggctgtccgcacagaggcacagggcaggcctcctgtgcactccccacctagcactggcctgtcctgaatccccgccttccctggttggaggccagctgtggcatttgcaccctcttctcacctcaccatgcacatgctaactttaaagccttggggtctttcctgtaccccctcctcaaccctggtccaccccctctcaggatcttgtcaacgttatttttcctgtcccgtcttcctatcgctggccttcctttcccatcctaaaaacttgccgaggccctatggctccctccctttctttcccaggcagcttcttatctgggctgtctgtaccccttcctttgcaccacccaccatgccccacgtagctgaaagctgcttatcccaattgtcaactctggccttcttcagcctctgtagcaccagacactgcacctcctgaatgtcctctgcttctctgcttcagaggcccaggctcgccagttctctgacctctcccatatgtctgcttaggactctgctgcagctgtcctcaccagcctccggggaatcccactacccacagggcagggctgtgggctgggctgaaaaaccatctgcatggtccacaagaagcctggcactgggtttccccatgaataacaatgaaaattaatggatgcacaaccttcctggaacgtggaatttctctgggagattccatgcagaggccactggggaggtggcaggcatgcatgtgactgtaggtggctgcagtgttggaaggctcccagcagagcagagagggtgtcagtctcatcagggaacccacctgatggcttctcagccagcagtctcagaggaacatagacgactgctgagaaaggagggaggcagcagtggtcccagcacctgaggcatcctgctgtcatgggaaggtctccgcccaaatgtcagatgcatcagcctgtcacccgctggtccagagctttcagctgtactggtagggggtgggtggtggagtgctgaatgaccttcacaggtgggcctttccagctctagggtcttacgggtgtcggtccacagaaccacggtttttaggttgtgtgtccggggctatgggaacctgtcccccatgatggatcttggtagagacacttccctctgtcatcgtgcccaggaggatgctgcaggtgactacctgcagccctgttctcattcatttggatgccctccagaaatctggggagccatacacctttagagccttttttgctccttatcaagttggcaaggcttggccaattcctgttcaaggctgcattaaaggcatgttcaccatcctggctaatacggtgaaaccccttctctactaaaaatacaaaaaaattagccgggcttggtggcgggtgcctgtagtcccagctactccggaggctgaggcaggggaatggtgtgaacccaggaggcggagcttgcagtgagccgagatcacaccactgcactccagcctgggctcaaaaaagaaaaaaaaaaaaaaaaaaaggcccgttcattctcaaatgcttttggcgtctccagggtgcctcaggaaaacatgaagtgggcattgtagaacttggggctactgtgtaactttggaagaaaaagttaagggtacttttaagtggatactgttttgatgaaattgccaacttcagggagcccagcttggagaaggaggacgtgagtattccttacaaggctccgaaacaattctttcttcacttagttttctttctgtgctctgcatcttatattccagcagggtcttccaatgcatggtttaataactaccagaactggccaggtgcagtggctcacgcctgtaatcccagaactttgggaggctaagacaggcagatcacttgaggccaggagttcgagaccagcctggacaacatggtgatacccagtttctactaaaaatacaaaaattagtcgggcatggtgatgtgcacctgtagtcccagctgctcgggaggctgaggcaggagaatcgcttgaacccgggagacagaggttgcaacgagccaagatcgagccactgcgctccggcctgggtgacaggagactccatctcaaaaaataaaattaaaaaaaaactactacaataaattatcaccttggactgtataaaacaacttttaaactagtctttttaaaaagtacacttaaataaaaatctaaacataagagaa

SEQ ID NO: 78539 - DNA, 5499 bp, Homo sapiens
tcgggatcgccgctcggagcgggagtcgcgccctcccgccccgcgccgcggaacttgctctaacttcctcggccgagccgggccgcgccgccgctgccgccgccgcgcgcggattctgcttctcagaagatgcactattatagatactctaacgccaaggtcagctgctggtacaagtacctccttttcagctacaacatcatcttctggttggctggagttgtcttccttggagtcgggctgtgggcatggagcgaaaagggtgtgctgtccgacctcaccaaagtgacccggatgcatggaatcgaccctgtggtgctggtcctgatggtgggcgtggtgatgttcaccctggggttcgccggctgcgtgggggctctgcgggagaatatctgcttgctcaactttttctgtggcaccatcgtgctcatcttcttcctggagctggctgtggccgtgctggccttcctgttccaggactgggtgagggaccggttccgggagttcttcgagagcaacatcaagtcctaccgggacgatatcgatctgcaaaacctcatcgactcccttcagaaagctaaccagtgctgtggcgcatatggccctgaagactgggacctcaacgtctacttcaattgcagcggtgccagctacagccgagagaagtgcggggtccccttctcctgctgcgtgccagatcctgcgcaaaaagttgtgaacacacagtgtggatatgatgtcaggattcagctgaagagcaagtgggatgagtccatcttcacgaaaggctgcatccaggcgctggaaagctggctcccgcggaacatttacattgtggctggcgtcttcatcgccatctcgctgttgcagatatttggcatcttcctggcaaggacgctgatctcagacatcgaggcagtgaaggccggccatcacttctgaggagcagagttgagggagccgagctgagccacgctgggaggccagagcctttctctgccatcagccctacgtccagagggagaggagccgacacccccagagccagtgccccatcttaagcatcagcgtgacgtgacctctctgtttctgcttgctggtgctgaagaccaagggtcccccttgttacctgcccaaacttgtgactgcatccctctggagtctacccagagacagagaatgtgtctttatgtgggagtggtgactctgaaagacagagagggctcctgtggctgccaggagggcttgactcagaccccctgcagctcaagcatgtctgcaggacaccctggtcccctctccactggcatccagacatctgctttgggtcatccacatctgtgggtgggccgtgggtagagggacccacaggcgtggacagggcatctctctccatcaagcaaagcagcatgggggcctgcccgtaacgggaggcggacgtggccccgctgggcctctgagtgccagcgcagtctgctgggacatgcacatatcaggggttgtttgcaggatcctcagccatgttcaagtgaagtaagcctgagccagtgcgtggactggtgccacgggagtgccttgtccactgtccccctgtgtccaccagctattctcctggcgccggaactgcctctggtcttgatagcattaagccctgatggcgccggtggcgcggtgggcatggttcttcactgagagccggctctccttttcttaaagtgtgtaaatagtttatttataggggtaagaatgttctcacaccatttcacttcctcttcctctcctccagcattctcctctgagcagccttagatagtgtccatggctggagccgaccctttgagtccccttgagtgtcttaagaaccagcccacaacagcctctctttctcctccacatactgcagcctccctccatgcatcccacatacaagcactcccccactccccagcgtggcctcactgtcttctggtcttggtgctactgaaattgtcacccagaatttgaatcctgaccctccccactgcaagcccagggagccccagcccaagatggccagcctgaaactgttggccagggctcctcttgtggccatgtacccagggctggctggcctgccatttgcctctccccggagacagccgttcttctgcaaccacaccccgtgcctagccacaaccccaggctgcagctgctcagaagctccaggcattttgtttctggtgaccgcccctaatgggatatcggtgatcactggtccacccttcctgtcagggcttttctggggctgctcttggaaatgaagtcttaagtactgaataactcccctggggatagctggggcatttgtctagctgggctactttctaacactttgccatagctcagaccacttctcatcgttcagggatggactgcaaccttaatttacttgccggagtgtacattctagtgtggtgtatactggtggctgttgatgatgatttttttttttttttttacacaattctctgtagactaggagaagaatgcttgtgtttttcggaagtgtgatgcttctctttgactgccaaactcttttatggaatatatctttatattaatgctgttttggtcatttttgtttggggtcactattgagatattgctaagcatctcagtggtaaacgcggctgccagaggaaccaagggatagggtatgtagaccttacagaaggatggatggtaaaggcagtccatcatcagcacaatctgacttacatttcattgagtaattttttttttttttaagattctgtatggcagcactttcagttgcccttgtgtgccggccacagccgcacaagttggcttgtggtttatcccccgctataagtgagagctggagaaacttcaactccataggtctagaggaaacattgttttaggttatttctgtccacccctgtgcgatactatttattgatccaagcagaagagcttggggacactgagtcgaagtggggacatgggattgaagcctgggcactgctgctgcatgagctgtgtgtcctgggtgtgccggcctttctgtgaagggggttggtggcagtgcccacctcactagatgcctctgacccagcctcccctgggggagtgggtggccacagaccctccctgccagagctcctggaaggctcctgcaggcctgacccatctattcctgtagacctggtttaggatgaagtctcggtgcgatttttgcagagttgggtttatctttcaactatagacccttctggctgttctcagccatatcatgtgactctgaatagttggatgaggaatggaaagaaagcaaggatgagagccgggcacgtggcagtctccgcccagcatcggctgtccgcacagaggcacagggcaggcctcctgtgcactccccacctagcactggcctgtcctgaatccccgccttccctggttggaggccagctgtggcatttgcaccctcttctcacctcaccatgcacatgctaactttaaagccttggggtctttcctgtaccccctcctcaaccctggtccaccccctctcaggatcttgtcaacgttatttttcctgtcccgtcttcctatcgctggccttcctttcccatcctaaaaacttgccgaggccctatggctccctccctttctttcccaggcagcttcttatctgggctgtctgtaccccttcctttgcaccacccaccatgccccacgtagctgaaagctgcttatcccaattgtcaactctggccttcttcagcctctgtagcaccagacactgcacctcctgaatgtcctctgcttctctgcttcagaggcccaggctcgccagttctctgacctctcccatatgtctgcttaggactctgctgcagctgtcctcaccagcctccggggaatcccactacccacagggcagggctgtgggctgggctgaaaaaccatctgcatggtccacaagaagcctggcactgggtttccccatgaataacaatgtaggtggctgcagtgttggaaggctcccagcagagcagagagggtgtcagtctcatcagggaacccacctgatggcttctcagccagcagtctcagaggaacatagacgactgctgagaaaggagggaggcagcagtggtcccagcacctgaggcatcctgctgtcatgggaaggtctccgcccaaatgtcagatgcatcagcctgtcacccgctggtccagagctttcagctgtactggtagggggtgggtggtggagtgctgaatgaccttcacaggtgggcctttccagctctagggtcttacgggtgtcggtccacagaaccacggtttttaggttgtgtgtccggggctatgggaacctgtcccccatgatggatcttggtagagacacttccctctgtcatcgtgcccaggaggatgctgcaggtgactacctgcagccctgttctcattcatttggatgccctccagaaatctggggagccatacacctttagagccttttttgctccttatcaagttggcaaggcttggccaattcctgttcaaggctgcattaaaggcatgttcaccatcctggctaatacggtgaaaccccttctctactaaaaatacaaaaaaattagccgggcttggtggcgggtgcctgtagtcccagctactccggaggctgaggcaggggaatggtgtgaacccaggaggcggagcttgcagtgagccgagatcacaccactgcactccagcctgggctcaaaaaagaaaaaaaaaaaaaaaaaaaggcccgttcattctcaaatgcttttggcgtctccagggtgcctcaggaaaacatgaagtgggcattgtagaacttggggctactgtgtaactttggaagaaaaagttaagggtacttttaagtggatactgttttgatgaaattgccaacttcagggagcccagcttggagaaggaggacgtgagtattccttacaaggctccgaaacaattctttcttcacttagttttctttctgtgctctgcatcttatattccagcagggtcttccaatgcatggtttaataactaccagaactggccaggtgcagtggctcacgcctgtaatcccagaactttgggaggctaagacaggcagatcacttgaggccaggagttcgagaccagcctggacaacatggtgatacccagtttctactaaaaatacaaaaattagtcgggcatggtgatgtgcacctgtagtcccagctgctcgggaggctgaggcaggagaatcgcttgaacccgggagacagaggttgcaacgagccaagatcgagccactgcgctccggcctgggtgacaggagactccatctcaaaaaataaaattaaaaaaaaactactacaataaattatcaccttggactgtataaaacaacttttaaactagtctttttaaaaagtacacttaaataaaaatctaaacataagagaa

SEQ ID NO: 78540 - DNA, 4508 bp, Homo sapiens
  misc_feature (4378)..(4379): n is a, c, g, or t
  misc_feature (4381)..(4382): n is a, c, g, or t
  misc_feature (4384)..(4384): n is a, c, g, or t
tcgggatcgccgctcggagcgggagtcgcgccctcccgccccgcgccgcggaacttgctctaacttcctcggccgagccgggccgcgccgccgctgccgccgccgcgcgcggattctgcttctcagaagatgcactattatagatactctaacgccaaggtcagctgctggtacaagtacctccttttcagctacaacatcatcttctggttggctggagttgtcttccttggagtcgggctgtgggcatggagcgaaaagggtgtgctgtccgacctcaccaaagtgacccggatgcatggaatcgaccctgtggtgctggtcctgatggtgggcgtggtgatgttcaccctggggttcgccggctgcgtgggggctctgcgggagaatatctgcttgctcaactttttctgtggcaccatcgtgctcatcttcttcctggagctggctgtggccgtgctggccttcctgttccaggactgggtgagggaccggttccgggagttcttcgagagcaacatcaagtcctaccgggacgatatcgatctgcaaaacctcatcgactcccttcagaaagctaaccagtgctgtggcgcatatggccctgaagactgggacctcaacgtctacttcaattgcagcggtgccagctacagccgagagaagtgcggggtccccttctcctgctgcgtgccagatcctgcgcaaaaagttgtgaacacacagtgtggatatgatgtcaggattcagctgaagagcaagtgggatgagtccatcttcacgaaaggctgcatccaggcgctggaaagctggctcccgcggaacatttacattgtggctggcgtcttcatcgccatctcgctgttgcagatatttggcatcttcctggcaaggacgctgatctcagacatcgaggcagtgaaggccggccatcacttctgaggagcagagttgagggagccgagctgagccacgctgggaggccagagcctttctctgccatcagccctacgtccagagggagaggagccgacacccccagagccagtgccccatcttaagcatcagcgtgacgtgacctctctgtttctgcttgctggtgctgaagaccaagggtcccccttgttacctgcccaaacttgtgactgcatccctctggagtctacccagagacagagaatgtgtctttatgtgggagtggtgactctgaaagacagagagggctcctgtggctgccaggagggcttgactcagaccccctgcagctcaagcatgtctgcaggacaccctggtcccctctccactggcatccagacatctgctttgggtcatccacatctgtgggtgggccgtgggtagagggacccacaggcgtggacagggcatctctctccatcaagcaaagcagcatgggggcctgcccgtaacgggaggcggacgtggccccgctgggcctctgagtgccagcgcagtctgctgggacatgcacatatcaggggttgtttgcaggatcctcagccatgttcaagtgaagtaagcctgagccagtgcgtggactggtgccacgggagtgccttgtccactgtccccctgtgtccaccagctattctcctggcgccggaactgcctctggtcttgatagcattaagccctgatggcgccggtggcgcggtgggcatggttcttcactgagagccggctctccttttcttaaagtgtgtaaatagtttatttataggggtaagaatgttctcacaccatttcacttcctcttcctctcctccagcattctcctctgagcagccttagatagtgtccatggctggagccgaccctttgagtccccttgagtgtcttaagaaccagcccacaacagcctctctttctcctccacatactgcagcctccctccatgcatcccacatacaagcactcccccactccccagcgtggcctcactgtcttctggtcttggtgctactgaaattgtcacccagaatttgaatcctgaccctccccactgcaagcccagggagccccagcccaagatggccagcctgaaactgttggccagggctcctcttgtggccatgtacccagggctggctggcctgccatttgcctctccccggagacagccgttcttctgcaaccacaccccgtgcctagccacaaccccaggctgcagctgctcagaagctccaggcattttgtttctggtgaccgcccctaatgggatatcggtgatcactggtccacccttcctgtcagggcttttctggggctgctcttggaaatgaagtcttaagtactgaataactcccctggggatagctggggcatttgtctagctgggctactttctaacactttgccatagctcagaccacttctcatcgttcagggatggactgcaaccttaatttacttgccggagtgtacattctagtgtggtgtatactggtggctgttgatgatgatttttttttttttttttacacaattctctgtagactaggagaagaatgcttgtgtttttcggaagtgtgatgcttctctttgactgccaaactcttttatggaatatatctttatattaatgctgttttggtcatttttgtttggggtcactattgagatattgctaagcatctcagtggtaaacgcggctgccagaggaaccaagggatagggtatgtagaccttacagaaggatggatggtaaaggcagtccatcatcagcacaatctgacttacatttcattgagtaattttttttttttttaagattctgtatggcagcactttcagttgcccttgtgtgccggccacagccgcacaagttggcttgtggtttatcccccgctataagtgagagctggagaaacttcaactccataggtctagaggaaacattgttttaggttatttctgtccacccctgtgcgatactatttattgatccaagcagaagagcttggggacactgagtcgaagtggggacatgggattgaagcctgggcactgctgctgcatgagctgtgtgtcctgggtgtgccggcctttctgtgaagggggttggtggcagtgcccacctcactagatgcctctgacccagcctcccctgggggagtgggtggccacagaccctccctgccagagctcctggaaggctcctgcaggcctgacccatctattcctgtagacctggtttaggatgaagtctcggtgcgatttttgcagagttgggtttatctttcaactatagacccttctggctgttctcagccatatcatgtgactctgaatagttggatgaggaatggaaagaaagcaaggatgagagccgggcacgtggcagtctccgcccagcatcggctgtccgcacagaggcacagggcaggcctcctgtgcactccccacctagcactggcctgtcctgaatccccgccttccctggttggaggccagctgtggcatttgcaccctcttctcacctcaccatgcacatgctaactttaaagccttggggtctttcctgtaccccctcctcaaccctggtccaccccctctcaggatcttgtcaacgttatttttcctgtcccgtcttcctatcgctggccttcctttcccatcctaaaaacttgccgaggccctatggctccctccctttctttcccaggcagcttcttatctgggctgtctgtaccccttcctttgcaccacccaccatgccccacgtagctgaaagctgcttatcccaattgtcaactctggccttcttcagcctctgtagcaccagacactgcacctcctgaatgtcctctgcttctctgcttcagaggcccaggctcgccagttctctgacctctcccatatgtctgcttaggactctgctgcagctgtcctcaccagcctccggggaatcccactacccacagggcagggctgtgggctgggctgaaaaaccatctgcatggtccacaagaagcctggcactgggtttccccatgaataacaatgaaaattaatggatgcacaaccttcctggaacgtggaatttctctgggagattccatgcagaggccactggggaggtggcaggcatgcatgtgactgtaggtggctgcagtgttggaaggctcccagcagagcagagagggtgtcagtctcatcagggaacccacctgatggcttctcagccagcagtctcagaggaacatagacgactgctgagaaaggagggaggcagcagtggtcccagcacctgaggcatcctgctgtcatgggaaggtctccgcccaaatgtcagatgcatcagcctgtcacccgctggtccagagctttcagctgtactggtagggggtgggtggtggannanncntatactctccttggtaggacaaaaaaaacttaggctgtttatttatttcggcccttggaaacacagaatattttctttttcttttagggcataagccttattttgcccttttaagtatcttttg

SEQ ID NO: 78541 - DNA, 3818 bp, Homo sapiens
gacgaaaaactacaatacaggactctttcgaggccctgtaatgggaatgttccgaccctttgagtccccttgagtgtcttaagaaccagcccacaacagcctctctttctcctccacatactgcagcctccctccatgcatcccacatacaagcactcccccactccccagcgtggcctcactgtcttctggtcttggtgctactgaaattgtcacccagaatttgaatcctgaccctccccactgcaagcccagggagccccagcccaagatggccagcctgaaactgttggccagggctcctcttgtggccatgtacccagggctggctggcctgccatttgcctctccccggagacagccgttcttctgcaaccacaccccgtgcctagccacaaccccaggctgcagctgctcagaagctccaggcattttgtttctggtgaccgcccctaatgggatatcggtgatcactggtccacccttcctgtcagggcttttctggggctgctcttggaaatgaagtcttaagtactgaataactcccctggggatagctggggcatttgtctagctgggctactttctaacactttgccatagctcagaccacttctcatcgttcagggatggactgcaaccttaatttacttgccggagtgtacattctagtgtggtgtatactggtggctgttgatgatgatttttttttttttttttacacaattctctgtagactaggagaagaatgcttgtgtttttcggaagtgtgatgcttctctttgactgccaaactcttttatggaatatatctttatattaatgctgttttggtcatttttgtttggggtcactattgagatattgctaagcatctcagtggtaaacgcggctgccagaggaaccaagggatagggtatgtagaccttacagaaggatggatggtaaaggcagtccatcatcagcacaatctgacttacatttcattgagtaattttttttttttttaagattctgtatggcagcactttcagttgcccttgtgtgccggccacagccgcacaagttggcttgtggtttatcccccgctataagtgagagctggagaaacttcaactccataggtctagaggaaacattgttttaggttatttctgtccacccctgtgcgatactatttattgatccaagcagaagagcttggggacactgagtcgaagtggggacatgggattgaagcctgggcactgctgctgcatgagctgtgtgtcctgggtgtgccggcctttctgtgaagggggttggtggcagtgcccacctcactagatgcctctgacccagcctcccctgggggagtgggtggccacagaccctccctgccagagctcctggaaggctcctgcaggcctgacccatctattcctgtagacctggtttaggatgaagtctcggtgcgatttttgcagagttgggtttatctttcaactatagacccttctggctgttctcagccatatcatgtgactctgaatagttggatgaggaatggaaagaaagcaaggatgagagccgggcacgtggcagtctccgcccagcatcggctgtccgcacagaggcacagggcaggcctcctgtgcactccccacctagcactggcctgtcctgaatccccgccttccctggttggaggccagctgtggcatttgcaccctcttctcacctcaccatgcacatgctaactttaaagccttggggtctttcctgtaccccctcctcaaccctggtccaccccctctcaggatcttgtcaacgttatttttcctgtcccgtcttcctatcgctggccttcctttcccatcctaaaaacttgccgaggccctatggctccctccctttctttcccaggcagcttcttatctgggctgtctgtaccccttcctttgcaccacccaccatgccccacgtagctgaaagctgcttatcccaattgtcaactctggccttcttcagcctctgtagcaccagacactgcacctcctgaatgtcctctgcttctctgcttcagaggcccaggctcgccagttctctgacctctcccatatgtctgcttaggactctgctgcagctgtcctcaccagcctccggggaatcccactacccacagggcagggctgtgggctgggctgaaaaaccatctgcatggtccacaagaagcctggcactgggtttccccatgaataacaatgaaaattaatggatgcacaaccttcctggaacgtggaatttctctgggagattccatgcagaggccactggggaggtggcaggcatgcatgtgactgtaggtggctgcagtgttggaaggctcccagcagagcagagagggtgtcagtctcatcagggaacccacctgatggcttctcagccagcagtctcagaggaacatagacgactgctgagaaaggagggaggcagcagtggtcccagcacctgaggcatcctgctgtcatgggaaggtctccgcccaaatgtcagatgcatcagcctgtcacccgctggtccagagctttcagctgtactggtagggggtgggtggtggagtgctgaatgaccttcacaggtgggcctttccagctctagggtcttacgggtgtcggtccacagaaccacggtttttaggttgtgtgtccggggctatgggaacctgtcccccatgatggatcttggtagagacacttccctctgtcatcgtgcccaggaggatgctgcaggtgactacctgcagccctgttctcattcatttggatgccctccagaaatctggggagccatacacctttagagccttttttgctccttatcaagttggcaaggcttggccaattcctgttcaaggctgcattaaaggcatgttcaccatcctggctaatacggtgaaaccccttctctactaaaaatacaaaaaaattagccgggcttggtggcgggtgcctgtagtcccagctactccggaggctgaggcaggggaatggtgtgaacccaggaggcggagcttgcagtgagccgagatcacaccactgcactccagcctgggctcaaaaaagaaaaaaaaaaaaaaaaaaaggcccgttcattctcaaatgcttttggcgtctccagggtgcctcaggaaaacatgaagtgggcattgtagaacttggggctactgtgtaactttggaagaaaaagttaagggtacttttaagtggatactgttttgatgaaattgccaacttcagggagcccagcttggagaaggaggacgtgagtattccttacaaggctccgaaacaattctttcttcacttagttttctttctgtgctctgcatcttatattccagcagggtcttccaatgcatggtttaataactaccagaactggccaggtgcagtggctcacgcctgtaatcccagaactttgggaggctaagacaggcagatcacttgaggccaggagttcgagaccagcctggacaacatggtgatacccagtttctactaaaaatacaaaaattagtcgggcatggtgatgtgcacctgtagtcccagctgctcgggaggctgaggcaggagaatcgcttgaacccgggagacagaggttgcaacgagccaagatcgagccactgcgctccggcctgggtgacaggagactccatctcaaaaaataaaattaaaaaaaaactactacaataaattatcaccttggactgtataaaacaacttttaaactagtctttttaaaaagtacacttaaataaaaatctaaacataagagaa

SEQ ID NO: 78542 - DNA, 2490 bp, Homo sapiens
tcgggatcgccgctcggagcgggagtcgcgccctcccgccccgcgccgcggaacttgctctaacttcctcggccgagccgggccgcgccgccgctgccgccgccgcgcgcggattctgcttctcagaagatgcactattatagatactctaacgccaaggtcagctgctggtacaagtacctccttttcagctacaacatcatcttctggttggctggagttgtcttccttggagtcgggctgtgggcatggagcgaaaagggtgtgctgtccgacctcaccaaagtgacccggatgcatggaatcgaccctgtggtgctggtcctgatggtgggcgtggtgatgttcaccctggggttcgccggctgcgtgggggctctgcgggagaatatctgcttgctcaactttttctgtggcaccatcgtgctcatcttcttcctggagctggctgtggccgtgctggccttcctgttccaggactgggtgagggaccggttccgggagttcttcgagagcaacatcaagtcctaccgggacgatatcgatctgcaaaacctcatcgactcccttcagaaagctaaccagtgctgtggcgcatatggccctgaagactgggacctcaacgtctacttcaattgcagcggtgccagctacagccgagagaagtgcggggtccccttctcctgctgcgtgccagatcctgcgcaaaaagttgtgaacacacagtgtggatatgatgtcaggattcagctgaagagcaagtgggatgagtccatcttcacgaaaggctgcatccaggcgctggaaagctggctcccgcggaacatttacattgtggctggcgtcttcatcgccatctcgctgttgcagatatttggcatcttcctggcaaggacgctgatctcagacatcgaggcagtgaaggccggccatcacttctgaggagcagagttgagggagccgagctgagccacgctgggaggccagagcctttctctgccatcagccctacgtccagagggagaggagccgacacccccagagccagtgccccatcttaagcatcagcgtgacgtgacctctctgtttctgcttgctggtgctgaagaccaagggtcccccttgttacctgcccaaacttgtgactgcatccctctggagtctacccagagacagagaatgtgtctttatgtgggagtggtgactctgaaagacagagagggctcctgtggctgccaggagggcttgactcagaccccctgcagctcaagcatgtctgcaggacaccctggtcccctctccactggcatccagacatctgctttgggtcatccacatctgtgggtgggccgtgggtagagggacccacaggcgtggacagggcatctctctccatcaagcaaagcagcatgggggcctgcccgtaacgggaggcggacgtggccccgctgggcctctgagtgccagcgcagtctgctgggacatgcacatatcaggggttgtttgcaggatcctcagccatgttcaagtgaagtaagcctgagccagtgcgtggactggtgccacgggagtgccttgtccactgtccccctgtgtccaccagctattctcctggcgccggaactgcctctggtcttgatagcattaagccctgatggcgccggtggcgcggtgggcatggttcttcactgagagccggctctccttttcttaaagtgtgtaaatagtttatttataggggtaagaatgttctcacaccatttcacttcctcttcctctcctccagcattctcctctgagcagccttagatagtgtccatggctggagccgaccctttgagtccccttgagtgtcttaagaaccagcccacaacagcctctctttctcctccacatactgcagcctccctccatgcatcccacatacaagcactcccccactccccagcgtggcctcactgtcttctggtcttggtgctactgaaattgtcacccagaatttgaatcctgaccctccccactgcaagcccagggagccccagcccaagatggccagcctgaaactgttggccagggctcctcttgtggccatgtacccagggctggctggcctgccatttgcctctccccggagacagccgttcttctgcaaccacaccccgtgcctagccacaaccccaggctgcagctgctcagaagctccaggcattttgtttctggtgaccgcccctaatgggatatcggtgatcactggtccacccttcctgtcagggcttttctggggctgctcttggaaatgaagtcttaagtactgaataactcccctggggatagctggggcatttgtctagctgggctactttctaacactttgccatagctcagaccacttctcatcgttcagggatggactgcaaccttaattcttgctgtcgtaggaccagtggggaattttttttttttttttttttttttttttttttgggaaag

SEQ ID NO: 78543 - DNA, 2176 bp, Homo sapiens
tcgggatcgccgctcggagcgggagtcgcgccctcccgccccgcgccgcggaacttgctctaacttcctcggccgagccgggccgcgccgccgctgccgccgccgcgcgcggattctgcttctcagaagatgcactattatagatactctaacgccaaggtcagctgctggtacaagtacctccttttcagctacaacatcatcttctggttggctggagttgtcttccttggagtcgggctgtgggcatggagcgaaaagggtgtgctgtccgacctcaccaaagtgacccggatgcatggaatcgaccctgtggtgctggtcctgatggtgggcgtggtgatgttcaccctggggttcgccggctgcgtgggggctctgcgggagaatatctgcttgctcaactttttctgtggcaccatcgtgctcatcttcttcctggagctggctgtggccgtgctggccttcctgttccaggactgggtgagggaccggttccgggagttcttcgagagcaacatcaagtcctaccgggacgatatcgatctgcaaaacctcatcgactcccttcagaaagctaaccagtgctgtggcgcatatggccctgaagactgggacctcaacgtctacttcaattgcagcggtgccagctacagccgagagaagtgcggggtccccttctcctgctgcgtgccagatcctgcgcaaaaagttgtgaacacacagtgtggatatgatgtcaggattcagctgaagagcaagtgggatgagtccatcttcacgaaaggctgcatccaggcgctggaaagctggctcccgcggaacatttacattgtggctggcgtcttcatcgccatctcgctgttgcagatatttggcatcttcctggcaaggacgctgatctcagacatcgaggcagtgaaggccggccatcacttctgaggagcagagttgagggagccgagctgagccacgctgggaggccagagcctttctctgccatcagccctacgtccagagggagaggagccgacacccccagagccagtgccccatcttaagcatcagcgtgacgtgacctctctgtttctgcttgctggtgctgaagaccaagggtcccccttgttacctgcccaaacttgtgactgcatccctctggagtctacccagagacagagaatgtgtctttatgtgggagtggtgactctgaaagacagagagggctcctgtggctgccaggagggcttgactcagaccccctgcagctcaagcatgtctgcaggacaccctggtcccctctccactggcatccagacatctgctttgggtcatccacatctgtgggtgggccgtgggtagagggacccacaggcgtggacagggcatctctctccatcaagcaaagcagcatgggggcctgcccgtaacgggaggcggacgtggccccgctgggcctctgagtgccagcgcagtctgctgggacatgcacatatcaggggttgtttgcaggatcctcagccatgttcaagtgaagtaagcctgagccagtgcgtggactggtgccacgggagtgccttgtccactgtccccctgtgtccaccagctattctcctggcgccggaactgcctctggtcttgatagcattaagccctgatggcgccggtggcgcggtgggcatggttcttcactgagagccggctctccttttcttaaagtgtgtaaatagtttatttataggggtaagaatgttctcacaccatttcacttcctcttcctctcctccagcattctcctctgagcagccttagatagtgtccatggctggagccgaccctttgagtccccttgagtgtcttaagaaccagcccacaacagcctctctttctcctccacatactgcagcctccctccatgcatcccacatacaagcactcccccactccccagcgtggcctcactgtcttctggtcttggtgctactgaaattgtcacccagaatttgaatcctgaccctccccattccccagcccagggctggggaagagggggtggtgccatgggccacatgctgctgccctttcgcctgggcctgggggtcacccatcagctcaggccaccaattcttccactggatacacatcggggacctgcaggatctgacccatgcaccgtgaa

SEQ ID NO: 78544 - DNA, 4424 bp, Homo sapiens
tcgggatcgccgctcggagcgggagtcgcgccctcccgccccgcgccgcggaacttgctctaacttcctcggccgagccgggccgcgccgccgctgccgccgccgcgcgcggattctgcttctcagaagatgcactattatagatactctaacgccaaggtcagctgctggtacaagtacctccttttcagctacaacatcatcttctggttggctggagttgtcttccttggagtcgggctgtgggcatggagcgaaaagggtgtgctgtccgacctcaccaaagtgacccggatgcatggaatcgaccctgtggtgctggtcctgatggtgggcgtggtgatgttcaccctggggttcgccggctgcgtgggggctctgcgggagaatatctgcttgctcaactttttctgtggcaccatcgtgctcatcttcttcctggagctggctgtggccgtgctggccttcctgttccaggactgggtgagggaccggttccgggagttcttcgagagcaacatcaagtcctaccgggacgatatcgatctgcaaaacctcatcgactcccttcagaaagctaaccagtgctgtggcgcatatggccctgaagactgggacctcaacgtctacttcaattgcagcggtgccagctacagccgagagaagtgcggggtccccttctcctgctgcgtgccagatcctgcgcctctctttctcctccacatactgcagcctccctccatgcatcccacatacaagcactcccccactccccagcgtggcctcactgtcttctggtcttggtgctactgaaattgtcacccagaatttgaatcctgaccctccccactgcaagcccagggagccccagcccaagatggccagcctgaaactgttggccagggctcctcttgtggccatgtacccagggctggctggcctgccatttgcctctccccggagacagccgttcttctgcaaccacaccccgtgcctagccacaaccccaggctgcagctgctcagaagctccaggcattttgtttctggtgaccgcccctaatgggatatcggtgatcactggtccacccttcctgtcagggcttttctggggctgctcttggaaatgaagtcttaagtactgaataactcccctggggatagctggggcatttgtctagctgggctactttctaacactttgccatagctcagaccacttctcatcgttcagggatggactgcaaccttaatttacttgccggagtgtacattctagtgtggtgtatactggtggctgttgatgatgatttttttttttttttttacacaattctctgtagactaggagaagaatgcttgtgtttttcggaagtgtgatgcttctctttgactgccaaactcttttatggaatatatctttatattaatgctgttttggtcatttttgtttggggtcactattgagatattgctaagcatctcagtggtaaacgcggctgccagaggaaccaagggatagggtatgtagaccttacagaaggatggatggtaaaggcagtccatcatcagcacaatctgacttacatttcattgagtaattttttttttttttaagattctgtatggcagcactttcagttgcccttgtgtgccggccacagccgcacaagttggcttgtggtttatcccccgctataagtgagagctggagaaacttcaactccataggtctagaggaaacattgttttaggttatttctgtccacccctgtgcgatactatttattgatccaagcagaagagcttggggacactgagtcgaagtggggacatgggattgaagcctgggcactgctgctgcatgagctgtgtgtcctgggtgtgccggcctttctgtgaagggggttggtggcagtgcccacctcactagatgcctctgacccagcctcccctgggggagtgggtggccacagaccctccctgccagagctcctggaaggctcctgcaggcctgacccatctattcctgtagacctggtttaggatgaagtctcggtgcgatttttgcagagttgggtttatctttcaactatagacccttctggctgttctcagccatatcatgtgactctgaatagttggatgaggaatggaaagaaagcaaggatgagagccgggcacgtggcagtctccgcccagcatcggctgtccgcacagaggcacagggcaggcctcctgtgcactccccacctagcactggcctgtcctgaatccccgccttccctggttggaggccagctgtggcatttgcaccctcttctcacctcaccatgcacatgctaactttaaagccttggggtctttcctgtaccccctcctcaaccctggtccaccccctctcaggatcttgtcaacgttatttttcctgtcccgtcttcctatcgctggccttcctttcccatcctaaaaacttgccgaggccctatggctccctccctttctttcccaggcagcttcttatctgggctgtctgtaccccttcctttgcaccacccaccatgccccacgtagctgaaagctgcttatcccaattgtcaactctggccttcttcagcctctgtagcaccagacactgcacctcctgaatgtcctctgcttctctgcttcagaggcccaggctcgccagttctctgacctctcccatatgtctgcttaggactctgctgcagctgtcctcaccagcctccggggaatcccactacccacagggcagggctgtgggctgggctgaaaaaccatctgcatggtccacaagaagcctggcactgggtttccccatgaataacaatgaaaattaatggatgcacaaccttcctggaacgtggaatttctctgggagattccatgcagaggccactggggaggtggcaggcatgcatgtgactgtaggtggctgcagtgttggaaggctcccagcagagcagagagggtgtcagtctcatcagggaacccacctgatggcttctcagccagcagtctcagaggaacatagacgactgctgagaaaggagggaggcagcagtggtcccagcacctgaggcatcctgctgtcatgggaaggtctccgcccaaatgtcagatgcatcagcctgtcacccgctggtccagagctttcagctgtactggtagggggtgggtggtggagtgctgaatgaccttcacaggtgggcctttccagctctagggtcttacgggtgtcggtccacagaaccacggtttttaggttgtgtgtccggggctatgggaacctgtcccccatgatggatcttggtagagacacttccctctgtcatcgtgcccaggaggatgctgcaggtgactacctgcagccctgttctcattcatttggatgccctccagaaatctggggagccatacacctttagagccttttttgctccttatcaagttggcaaggcttggccaattcctgttcaaggctgcattaaaggcatgttcaccatcctggctaatacggtgaaaccccttctctactaaaaatacaaaaaaattagccgggcttggtggcgggtgcctgtagtcccagctactccggaggctgaggcaggggaatggtgtgaacccaggaggcggagcttgcagtgagccgagatcacaccactgcactccagcctgggctcaaaaaagaaaaaaaaaaaaaaaaaaaggcccgttcattctcaaatgcttttggcgtctccagggtgcctcaggaaaacatgaagtgggcattgtagaacttggggctactgtgtaactttggaagaaaaagttaagggtacttttaagtggatactgttttgatgaaattgccaacttcagggagcccagcttggagaaggaggacgtgagtattccttacaaggctccgaaacaattctttcttcacttagttttctttctgtgctctgcatcttatattccagcagggtcttccaatgcatggtttaataactaccagaactggccaggtgcagtggctcacgcctgtaatcccagaactttgggaggctaagacaggcagatcacttgaggccaggagttcgagaccagcctggacaacatggtgatacccagtttctactaaaaatacaaaaattagtcgggcatggtgatgtgcacctgtagtcccagctgctcgggaggctgaggcaggagaatcgcttgaacccgggagacagaggttgcaacgagccaagatcgagccactgcgctccggcctgggtgacaggagactccatctcaaaaaataaaattaaaaaaaaactactacaataaattatcaccttggactgtataaaacaacttttaaactagtctttttaaaaagtacacttaaataaaaatctaaacataagagaa

SEQ ID NO: 78545 - DNA, 4246 bp, Homo sapiens
  misc_feature (1)..(1): n is a, c, g, or t
  misc_feature (40)..(40): n is a, c, g, or t
  misc_feature (45)..(45): n is a, c, g, or t
  misc_feature (48)..(48): n is a, c, g, or t
  misc_feature (51)..(53): n is a, c, g, or t
  misc_feature (56)..(56): n is a, c, g, or t
  misc_feature (82)..(82): n is a, c, g, or t
  misc_feature (90)..(90): n is a, c, g, or t
ncccgccgctcggacggcccgagtcgcgccctcccgcccngcgcngcngannntgntctaagcttcctcggccgagccgggncgcgccgncgctgccgccgccgcgcgcggattctgcttctcagaagatgcactattatagatactctaacgccaaggtcagctgctggtacaagtacctccttttcagctacaacatcatcttctggttggctggagttgtcttccttggagtcgggctgtgggcatggagcgaaaagggtgtgctgtccgacctcaccaaagtgacccggatgcatggaatcgaccctgtggtgctggtcctgatggtgggcgtggtgatgttcaccctggggttcgccggctgcgtgggggctctgcgggagaatatctgcttgctcaactttttctgtggcaccatcgtgctcatcttcttcctggagctggctgtggccgtgctggccttcctgttccaggactgggtgagggaccggttccgggagttcttcgagagcaacatcaagtcctaccgggacgatatcgatctgcaaaacctcatcgactcccttcagaaagctaagcactcccccactccccagcgtggcctcactgtcttctggtcttggtgctactgaaattgtcacccagaatttgaatcctgaccctccccactgcaagcccagggagccccagcccaagatggccagcctgaaactgttggccagggctcctcttgtggccatgtacccagggctggctggcctgccatttgcctctccccggagacagccgttcttctgcaaccacaccccgtgcctagccacaaccccaggctgcagctgctcagaagctccaggcattttgtttctggtgaccgcccctaatgggatatcggtgatcactggtccacccttcctgtcagggcttttctggggctgctcttggaaatgaagtcttaagtactgaataactcccctggggatagctggggcatttgtctagctgggctactttctaacactttgccatagctcagaccacttctcatcgttcagggatggactgcaaccttaatttacttgccggagtgtacattctagtgtggtgtatactggtggctgttgatgatgatttttttttttttttttacacaattctctgtagactaggagaagaatgcttgtgtttttcggaagtgtgatgcttctctttgactgccaaactcttttatggaatatatctttatattaatgctgttttggtcatttttgtttggggtcactattgagatattgctaagcatctcagtggtaaacgcggctgccagaggaaccaagggatagggtatgtagaccttacagaaggatggatggtaaaggcagtccatcatcagcacaatctgacttacatttcattgagtaattttttttttttttaagattctgtatggcagcactttcagttgcccttgtgtgccggccacagccgcacaagttggcttgtggtttatcccccgctataagtgagagctggagaaacttcaactccataggtctagaggaaacattgttttaggttatttctgtccacccctgtgcgatactatttattgatccaagcagaagagcttggggacactgagtcgaagtggggacatgggattgaagcctgggcactgctgctgcatgagctgtgtgtcctgggtgtgccggcctttctgtgaagggggttggtggcagtgcccacctcactagatgcctctgacccagcctcccctgggggagtgggtggccacagaccctccctgccagagctcctggaaggctcctgcaggcctgacccatctattcctgtagacctggtttaggatgaagtctcggtgcgatttttgcagagttgggtttatctttcaactatagacccttctggctgttctcagccatatcatgtgactctgaatagttggatgaggaatggaaagaaagcaaggatgagagccgggcacgtggcagtctccgcccagcatcggctgtccgcacagaggcacagggcaggcctcctgtgcactccccacctagcactggcctgtcctgaatccccgccttccctggttggaggccagctgtggcatttgcaccctcttctcacctcaccatgcacatgctaactttaaagccttggggtctttcctgtaccccctcctcaaccctggtccaccccctctcaggatcttgtcaacgttatttttcctgtcccgtcttcctatcgctggccttcctttcccatcctaaaaacttgccgaggccctatggctccctccctttctttcccaggcagcttcttatctgggctgtctgtaccccttcctttgcaccacccaccatgccccacgtagctgaaagctgcttatcccaattgtcaactctggccttcttcagcctctgtagcaccagacactgcacctcctgaatgtcctctgcttctctgcttcagaggcccaggctcgccagttctctgacctctcccatatgtctgcttaggactctgctgcagctgtcctcaccagcctccggggaatcccactacccacagggcagggctgtgggctgggctgaaaaaccatctgcatggtccacaagaagcctggcactgggtttccccatgaataacaatgaaaattaatggatgcacaaccttcctggaacgtggaatttctctgggagattccatgcagaggccactggggaggtggcaggcatgcatgtgactgtaggtggctgcagtgttggaaggctcccagcagagcagagagggtgtcagtctcatcagggaacccacctgatggcttctcagccagcagtctcagaggaacatagacgactgctgagaaaggagggaggcagcagtggtcccagcacctgaggcatcctgctgtcatgggaaggtctccgcccaaatgtcagatgcatcagcctgtcacccgctggtccagagctttcagctgtactggtagggggtgggtggtggagtgctgaatgaccttcacaggtgggcctttccagctctagggtcttacgggtgtcggtccacagaaccacggtttttaggttgtgtgtccggggctatgggaacctgtcccccatgatggatcttggtagagacacttccctctgtcatcgtgcccaggaggatgctgcaggtgactacctgcagccctgttctcattcatttggatgccctccagaaatctggggagccatacacctttagagccttttttgctccttatcaagttggcaaggcttggccaattcctgttcaaggctgcattaaaggcatgttcaccatcctggctaatacggtgaaaccccttctctactaaaaatacaaaaaaattagccgggcttggtggcgggtgcctgtagtcccagctactccggaggctgaggcaggggaatggtgtgaacccaggaggcggagcttgcagtgagccgagatcacaccactgcactccagcctgggctcaaaaaagaaaaaaaaaaaaaaaaaaaggcccgttcattctcaaatgcttttggcgtctccagggtgcctcaggaaaacatgaagtgggcattgtagaacttggggctactgtgtaactttggaagaaaaagttaagggtacttttaagtggatactgttttgatgaaattgccaacttcagggagcccagcttggagaaggaggacgtgagtattccttacaaggctccgaaacaattctttcttcacttagttttctttctgtgctctgcatcttatattccagcagggtcttccaatgcatggtttaataactaccagaactggccaggtgcagtggctcacgcctgtaatcccagaactttgggaggctaagacaggcagatcacttgaggccaggagttcgagaccagcctggacaacatggtgatacccagtttctactaaaaatacaaaaattagtcgggcatggtgatgtgcacctgtagtcccagctgctcgggaggctgaggcaggagaatcgcttgaacccgggagacagaggttgcaacgagccaagatcgagccactgcgctccggcctgggtgacaggagactccatctcaaaaaataaaattaaaaaaaaactactacaataaattatcaccttggactgtataaaacaacttttaaactagtctttttaaaaagtacacttaaataaaaatctaaacataagagaa

SEQ ID NO: 78546 - DNA, 3610 bp, Homo sapiens
tcgagctcggctacctttgtcgaagaacaacggcactgcaagcccagggagccccagcccaagatggccagcctgaaactgttggccagggctcctcttgtggccatgtacccagggctggctggcctgccatttgcctctccccggagacagccgttcttctgcaaccacaccccgtgcctagccacaaccccaggctgcagctgctcagaagctccaggcattttgtttctggtgaccgcccctaatgggatatcggtgatcactggtccacccttcctgtcagggcttttctggggctgctcttggaaatgaagtcttaagtactgaataactcccctggggatagctggggcatttgtctagctgggctactttctaacactttgccatagctcagaccacttctcatcgttcagggatggactgcaaccttaatttacttgccggagtgtacattctagtgtggtgtatactggtggctgttgatgatgatttttttttttttttttacacaattctctgtagactaggagaagaatgcttgtgtttttcggaagtgtgatgcttctctttgactgccaaactcttttatggaatatatctttatattaatgctgttttggtcatttttgtttggggtcactattgagatattgctaagcatctcagtggtaaacgcggctgccagaggaaccaagggatagggtatgtagaccttacagaaggatggatggtaaaggcagtccatcatcagcacaatctgacttacatttcattgagtaattttttttttttttaagattctgtatggcagcactttcagttgcccttgtgtgccggccacagccgcacaagttggcttgtggtttatcccccgctataagtgagagctggagaaacttcaactccataggtctagaggaaacattgttttaggttatttctgtccacccctgtgcgatactatttattgatccaagcagaagagcttggggacactgagtcgaagtggggacatgggattgaagcctgggcactgctgctgcatgagctgtgtgtcctgggtgtgccggcctttctgtgaagggggttggtggcagtgcccacctcactagatgcctctgacccagcctcccctgggggagtgggtggccacagaccctccctgccagagctcctggaaggctcctgcaggcctgacccatctattcctgtagacctggtttaggatgaagtctcggtgcgatttttgcagagttgggtttatctttcaactatagacccttctggctgttctcagccatatcatgtgactctgaatagttggatgaggaatggaaagaaagcaaggatgagagccgggcacgtggcagtctccgcccagcatcggctgtccgcacagaggcacagggcaggcctcctgtgcactccccacctagcactggcctgtcctgaatccccgccttccctggttggaggccagctgtggcatttgcaccctcttctcacctcaccatgcacatgctaactttaaagccttggggtctttcctgtaccccctcctcaaccctggtccaccccctctcaggatcttgtcaacgttatttttcctgtcccgtcttcctatcgctggccttcctttcccatcctaaaaacttgccgaggccctatggctccctccctttctttcccaggcagcttcttatctgggctgtctgtaccccttcctttgcaccacccaccatgccccacgtagctgaaagctgcttatcccaattgtcaactctggccttcttcagcctctgtagcaccagacactgcacctcctgaatgtcctctgcttctctgcttcagaggcccaggctcgccagttctctgacctctcccatatgtctgcttaggactctgctgcagctgtcctcaccagcctccggggaatcccactacccacagggcagggctgtgggctgggctgaaaaaccatctgcatggtccacaagaagcctggcactgggtttccccatgaataacaatgaaaattaatggatgcacaaccttcctggaacgtggaatttctctgggagattccatgcagaggccactggggaggtggcaggcatgcatgtgactgtaggtggctgcagtgttggaaggctcccagcagagcagagagggtgtcagtctcatcagggaacccacctgatggcttctcagccagcagtctcagaggaacatagacgactgctgagaaaggagggaggcagcagtggtcccagcacctgaggcatcctgctgtcatgggaaggtctccgcccaaatgtcagatgcatcagcctgtcacccgctggtccagagctttcagctgtactggtagggggtgggtggtggagtgctgaatgaccttcacaggtgggcctttccagctctagggtcttacgggtgtcggtccacagaaccacggtttttaggttgtgtgtccggggctatgggaacctgtcccccatgatggatcttggtagagacacttccctctgtcatcgtgcccaggaggatgctgcaggtgactacctgcagccctgttctcattcatttggatgccctccagaaatctggggagccatacacctttagagccttttttgctccttatcaagttggcaaggcttggccaattcctgttcaaggctgcattaaaggcatgttcaccatcctggctaatacggtgaaaccccttctctactaaaaatacaaaaaaattagccgggcttggtggcgggtgcctgtagtcccagctactccggaggctgaggcaggggaatggtgtgaacccaggaggcggagcttgcagtgagccgagatcacaccactgcactccagcctgggctcaaaaaagaaaaaaaaaaaaaaaaaaaggcccgttcattctcaaatgcttttggcgtctccagggtgcctcaggaaaacatgaagtgggcattgtagaacttggggctactgtgtaactttggaagaaaaagttaagggtacttttaagtggatactgttttgatgaaattgccaacttcagggagcccagcttggagaaggaggacgtgagtattccttacaaggctccgaaacaattctttcttcacttagttttctttctgtgctctgcatcttatattccagcagggtcttccaatgcatggtttaataactaccagaactggccaggtgcagtggctcacgcctgtaatcccagaactttgggaggctaagacaggcagatcacttgaggccaggagttcgagaccagcctggacaacatggtgatacccagtttctactaaaaatacaaaaattagtcgggcatggtgatgtgcacctgtagtcccagctgctcgggaggctgaggcaggagaatcgcttgaacccgggagacagaggttgcaacgagccaagatcgagccactgcgctccggcctgggtgacaggagactccatctcaaaaaataaaattaaaaaaaaactactacaataaattatcaccttggactgtataaaacaacttttaaactagtctttttaaaaagtacacttaaataaaaatctaaacataagagaa

SEQ ID NO: 78547 - DNA, 3807 bp, Homo sapiens
ggacgcgtgggtcgacccacgcgtccggaaaccttcttcttggtgaacacgatgtccctttaacatgtatgagcaaatgtcacagtaaacgaccacaagaggaagcagaaagtcctaggccccaaccagaaactgaaatttaatccaacagagttaattatttattgtaaagatttcagaattgtcagatttcgctttgatgaatcaggtcccgaaagtgctaaaaagttggctggagttgtcttccttggagtcgggctgtgggcatggagcgaaaagggtgtgctgtccgacctcaccaaagtgacccagggctggctggcctgccatttgcctctccccggagacagccgttcttctgcaaccacaccccgtgcctagccacaaccccaggctgcagctgctcagaagctccaggcattttgtttctggtgaccgcccctaatgggatatcggtgatcactggtccacccttcctgtcagggcttttctggggctgctcttggaaatgaagtcttaagtactgaataactcccctggggatagctggggcatttgtctagctgggctactttctaacactttgccatagctcagaccacttctcatcgttcagggatggactgcaaccttaatttacttgccggagtgtacattctagtgtggtgtatactggtggctgttgatgatgatttttttttttttttttacacaattctctgtagactaggagaagaatgcttgtgtttttcggaagtgtgatgcttctctttgactgccaaactcttttatggaatatatctttatattaatgctgttttggtcatttttgtttggggtcactattgagatattgctaagcatctcagtggtaaacgcggctgccagaggaaccaagggatagggtatgtagaccttacagaaggatggatggtaaaggcagtccatcatcagcacaatctgacttacatttcattgagtaattttttttttttttaagattctgtatggcagcactttcagttgcccttgtgtgccggccacagccgcacaagttggcttgtggtttatcccccgctataagtgagagctggagaaacttcaactccataggtctagaggaaacattgttttaggttatttctgtccacccctgtgcgatactatttattgatccaagcagaagagcttggggacactgagtcgaagtggggacatgggattgaagcctgggcactgctgctgcatgagctgtgtgtcctgggtgtgccggcctttctgtgaagggggttggtggcagtgcccacctcactagatgcctctgacccagcctcccctgggggagtgggtggccacagaccctccctgccagagctcctggaaggctcctgcaggcctgacccatctattcctgtagacctggtttaggatgaagtctcggtgcgatttttgcagagttgggtttatctttcaactatagacccttctggctgttctcagccatatcatgtgactctgaatagttggatgaggaatggaaagaaagcaaggatgagagccgggcacgtggcagtctccgcccagcatcggctgtccgcacagaggcacagggcaggcctcctgtgcactccccacctagcactggcctgtcctgaatccccgccttccctggttggaggccagctgtggcatttgcaccctcttctcacctcaccatgcacatgctaactttaaagccttggggtctttcctgtaccccctcctcaaccctggtccaccccctctcaggatcttgtcaacgttatttttcctgtcccgtcttcctatcgctggccttcctttcccatcctaaaaacttgccgaggccctatggctccctccctttctttcccaggcagcttcttatctgggctgtctgtaccccttcctttgcaccacccaccatgccccacgtagctgaaagctgcttatcccaattgtcaactctggccttcttcagcctctgtagcaccagacactgcacctcctgaatgtcctctgcttctctgcttcagaggcccaggctcgccagttctctgacctctcccatatgtctgcttaggactctgctgcagctgtcctcaccagcctccggggaatcccactacccacagggcagggctgtgggctgggctgaaaaaccatctgcatggtccacaagaagcctggcactgggtttccccatgaataacaatgaaaattaatggatgcacaaccttcctggaacgtggaatttctctgggagattccatgcagaggccactggggaggtggcaggcatgcatgtgactgtaggtggctgcagtgttggaaggctcccagcagagcagagagggtgtcagtctcatcagggaacccacctgatggcttctcagccagcagtctcagaggaacatagacgactgctgagaaaggagggaggcagcagtggtcccagcacctgaggcatcctgctgtcatgggaaggtctccgcccaaatgtcagatgcatcagcctgtcacccgctggtccagagctttcagctgtactggtagggggtgggtggtggagtgctgaatgaccttcacaggtgggcctttccagctctagggtcttacgggtgtcggtccacagaaccacggtttttaggttgtgtgtccggggctatgggaacctgtcccccatgatggatcttggtagagacacttccctctgtcatcgtgcccaggaggatgctgcaggtgactacctgcagccctgttctcattcatttggatgccctccagaaatctggggagccatacacctttagagccttttttgctccttatcaagttggcaaggcttggccaattcctgttcaaggctgcattaaaggcatgttcaccatcctggctaatacggtgaaaccccttctctactaaaaatacaaaaaaattagccgggcttggtggcgggtgcctgtagtcccagctactccggaggctgaggcaggggaatggtgtgaacccaggaggcggagcttgcagtgagccgagatcacaccactgcactccagcctgggctcaaaaaagaaaaaaaaaaaaaaaaaaaggcccgttcattctcaaatgcttttggcgtctccagggtgcctcaggaaaacatgaagtgggcattgtagaacttggggctactgtgtaactttggaagaaaaagttaagggtacttttaagtggatactgttttgatgaaattgccaacttcagggagcccagcttggagaaggaggacgtgagtattccttacaaggctccgaaacaattctttcttcacttagttttctttctgtgctctgcatcttatattccagcagggtcttccaatgcatggtttaataactaccagaactggccaggtgcagtggctcacgcctgtaatcccagaactttgggaggctaagacaggcagatcacttgaggccaggagttcgagaccagcctggacaacatggtgatacccagtttctactaaaaatacaaaaattagtcgggcatggtgatgtgcacctgtagtcccagctgctcgggaggctgaggcaggagaatcgcttgaacccgggagacagaggttgcaacgagccaagatcgagccactgcgctccggcctgggtgacaggagactccatctcaaaaaataaaattaaaaaaaaactactacaataaattatcaccttggactgtataaaacaacttttaaactagtctttttaaaaagtacacttaaataaaaatctaaacataagagaa

SEQ ID NO: 78548 - DNA, 3512 bp, Homo sapiens
agaagacgtctctcgttaaggggacagctgcaggagtgtaggtgccttgttctggcctccgtgtggaggcagtagtgacaaagagggaggcaggcctggggcaggggcgaggctctgtccaggcattttgtttctggtgaccgcccctaatgggatatcggtgatcactggtccacccttcctgtcagggcttttctggggctgctcttggaaatgaagtcttaagtactgaataactcccctggggatagctggggcatttgtctagctgggctactttctaacactttgccatagctcagaccacttctcatcgttcagggatggactgcaaccttaatttacttgccggagtgtacattctagtgtggtgtatactggtggctgttgatgatgatttttttttttttttttacacaattctctgtagactaggagaagaatgcttgtgtttttcggaagtgtgatgcttctctttgactgccaaactcttttatggaatatatctttatattaatgctgttttggtcatttttgtttggggtcactattgagatattgctaagcatctcagtggtaaacgcggctgccagaggaaccaagggatagggtatgtagaccttacagaaggatggatggtaaaggcagtccatcatcagcacaatctgacttacatttcattgagtaattttttttttttttaagattctgtatggcagcactttcagttgcccttgtgtgccggccacagccgcacaagttggcttgtggtttatcccccgctataagtgagagctggagaaacttcaactccataggtctagaggaaacattgttttaggttatttctgtccacccctgtgcgatactatttattgatccaagcagaagagcttggggacactgagtcgaagtggggacatgggattgaagcctgggcactgctgctgcatgagctgtgtgtcctgggtgtgccggcctttctgtgaagggggttggtggcagtgcccacctcactagatgcctctgacccagcctcccctgggggagtgggtggccacagaccctccctgccagagctcctggaaggctcctgcaggcctgacccatctattcctgtagacctggtttaggatgaagtctcggtgcgatttttgcagagttgggtttatctttcaactatagacccttctggctgttctcagccatatcatgtgactctgaatagttggatgaggaatggaaagaaagcaaggatgagagccgggcacgtggcagtctccgcccagcatcggctgtccgcacagaggcacagggcaggcctcctgtgcactccccacctagcactggcctgtcctgaatccccgccttccctggttggaggccagctgtggcatttgcaccctcttctcacctcaccatgcacatgctaactttaaagccttggggtctttcctgtaccccctcctcaaccctggtccaccccctctcaggatcttgtcaacgttatttttcctgtcccgtcttcctatcgctggccttcctttcccatcctaaaaacttgccgaggccctatggctccctccctttctttcccaggcagcttcttatctgggctgtctgtaccccttcctttgcaccacccaccatgccccacgtagctgaaagctgcttatcccaattgtcaactctggccttcttcagcctctgtagcaccagacactgcacctcctgaatgtcctctgcttctctgcttcagaggcccaggctcgccagttctctgacctctcccatatgtctgcttaggactctgctgcagctgtcctcaccagcctccggggaatcccactacccacagggcagggctgtgggctgggctgaaaaaccatctgcatggtccacaagaagcctggcactgggtttccccatgaataacaatgaaaattaatggatgcacaaccttcctggaacgtggaatttctctgggagattccatgcagaggccactggggaggtggcaggcatgcatgtgactgtaggtggctgcagtgttggaaggctcccagcagagcagagagggtgtcagtctcatcagggaacccacctgatggcttctcagccagcagtctcagaggaacatagacgactgctgagaaaggagggaggcagcagtggtcccagcacctgaggcatcctgctgtcatgggaaggtctccgcccaaatgtcagatgcatcagcctgtcacccgctggtccagagctttcagctgtactggtagggggtgggtggtggagtgctgaatgaccttcacaggtgggcctttccagctctagggtcttacgggtgtcggtccacagaaccacggtttttaggttgtgtgtccggggctatgggaacctgtcccccatgatggatcttggtagagacacttccctctgtcatcgtgcccaggaggatgctgcaggtgactacctgcagccctgttctcattcatttggatgccctccagaaatctggggagccatacacctttagagccttttttgctccttatcaagttggcaaggcttggccaattcctgttcaaggctgcattaaaggcatgttcaccatcctggctaatacggtgaaaccccttctctactaaaaatacaaaaaaattagccgggcttggtggcgggtgcctgtagtcccagctactccggaggctgaggcaggggaatggtgtgaacccaggaggcggagcttgcagtgagccgagatcacaccactgcactccagcctgggctcaaaaaagaaaaaaaaaaaaaaaaaaaggcccgttcattctcaaatgcttttggcgtctccagggtgcctcaggaaaacatgaagtgggcattgtagaacttggggctactgtgtaactttggaagaaaaagttaagggtacttttaagtggatactgttttgatgaaattgccaacttcagggagcccagcttggagaaggaggacgtgagtattccttacaaggctccgaaacaattctttcttcacttagttttctttctgtgctctgcatcttatattccagcagggtcttccaatgcatggtttaataactaccagaactggccaggtgcagtggctcacgcctgtaatcccagaactttgggaggctaagacaggcagatcacttgaggccaggagttcgagaccagcctggacaacatggtgatacccagtttctactaaaaatacaaaaattagtcgggcatggtgatgtgcacctgtagtcccagctgctcgggaggctgaggcaggagaatcgcttgaacccgggagacagaggttgcaacgagccaagatcgagccactgcgctccggcctgggtgacaggagactccatctcaaaaaataaaattaaaaaaaaactactacaataaattatcaccttggactgtataaaacaacttttaaactagtctttttaaaaagtacacttaaataaaaatctaaacataagagaa

SEQ ID NO: 78549 - DNA, 3619 bp, Homo sapiens
aacagccttagatagtgtccatggctggagccgaccctttgagtccccttgagtgtcttgatagcattaagccctgatggcgccggtggcgcggtgggcatggttcttcactgagagccggctctccttttcttaaagtgtgtaaatagtttatttataggggtaagaatgttctcacaccatttcacttcctcttcctctcctccagcattctcctctgagcagccaggcattttgtttctggtgaccgcccctaatgggatatcggtgatcactggtccacccttcctgtcagggcttttctggggctgctcttggaaatgaagtcttaagtactgaataactcccctggggatagctggggcatttgtctagctgggctactttctaacactttgccatagctcagaccacttctcatcgttcagggatggactgcaaccttaatttacttgccggagtgtacattctagtgtggtgtatactggtggctgttgatgatgatttttttttttttttttacacaattctctgtagactaggagaagaatgcttgtgtttttcggaagtgtgatgcttctctttgactgccaaactcttttatggaatatatctttatattaatgctgttttggtcatttttgtttggggtcactattgagatattgctaagcatctcagtggtaaacgcggctgccagaggaaccaagggatagggtatgtagaccttacagaaggatggatggtaaaggcagtccatcatcagcacaatctgacttacatttcattgagtaattttttttttttttaagattctgtatggcagcactttcagttgcccttgtgtgccggccacagccgcacaagttggcttgtggtttatcccccgctataagtgagagctggagaaacttcaactccataggtctagaggaaacattgttttaggttatttctgtccacccctgtgcgatactatttattgatccaagcagaagagcttggggacactgagtcgaagtggggacatgggattgaagcctgggcactgctgctgcatgagctgtgtgtcctgggtgtgccggcctttctgtgaagggggttggtggcagtgcccacctcactagatgcctctgacccagcctcccctgggggagtgggtggccacagaccctccctgccagagctcctggaaggctcctgcaggcctgacccatctattcctgtagacctggtttaggatgaagtctcggtgcgatttttgcagagttgggtttatctttcaactatagacccttctggctgttctcagccatatcatgtgactctgaatagttggatgaggaatggaaagaaagcaaggatgagagccgggcacgtggcagtctccgcccagcatcggctgtccgcacagaggcacagggcaggcctcctgtgcactccccacctagcactggcctgtcctgaatccccgccttccctggttggaggccagctgtggcatttgcaccctcttctcacctcaccatgcacatgctaactttaaagccttggggtctttcctgtaccccctcctcaaccctggtccaccccctctcaggatcttgtcaacgttatttttcctgtcccgtcttcctatcgctggccttcctttcccatcctaaaaacttgccgaggccctatggctccctccctttctttcccaggcagcttcttatctgggctgtctgtaccccttcctttgcaccacccaccatgccccacgtagctgaaagctgcttatcccaattgtcaactctggccttcttcagcctctgtagcaccagacactgcacctcctgaatgtcctctgcttctctgcttcagaggcccaggctcgccagttctctgacctctcccatatgtctgcttaggactctgctgcagctgtcctcaccagcctccggggaatcccactacccacagggcagggctgtgggctgggctgaaaaaccatctgcatggtccacaagaagcctggcactgggtttccccatgaataacaatgaaaattaatggatgcacaaccttcctggaacgtggaatttctctgggagattccatgcagaggccactggggaggtggcaggcatgcatgtgactgtaggtggctgcagtgttggaaggctcccagcagagcagagagggtgtcagtctcatcagggaacccacctgatggcttctcagccagcagtctcagaggaacatagacgactgctgagaaaggagggaggcagcagtggtcccagcacctgaggcatcctgctgtcatgggaaggtctccgcccaaatgtcagatgcatcagcctgtcacccgctggtccagagctttcagctgtactggtagggggtgggtggtggagtgctgaatgaccttcacaggtgggcctttccagctctagggtcttacgggtgtcggtccacagaaccacggtttttaggttgtgtgtccggggctatgggaacctgtcccccatgatggatcttggtagagacacttccctctgtcatcgtgcccaggaggatgctgcaggtgactacctgcagccctgttctcattcatttggatgccctccagaaatctggggagccatacacctttagagccttttttgctccttatcaagttggcaaggcttggccaattcctgttcaaggctgcattaaaggcatgttcaccatcctggctaatacggtgaaaccccttctctactaaaaatacaaaaaaattagccgggcttggtggcgggtgcctgtagtcccagctactccggaggctgaggcaggggaatggtgtgaacccaggaggcggagcttgcagtgagccgagatcacaccactgcactccagcctgggctcaaaaaagaaaaaaaaaaaaaaaaaaaggcccgttcattctcaaatgcttttggcgtctccagggtgcctcaggaaaacatgaagtgggcattgtagaacttggggctactgtgtaactttggaagaaaaagttaagggtacttttaagtggatactgttttgatgaaattgccaacttcagggagcccagcttggagaaggaggacgtgagtattccttacaaggctccgaaacaattctttcttcacttagttttctttctgtgctctgcatcttatattccagcagggtcttccaatgcatggtttaataactaccagaactggccaggtgcagtggctcacgcctgtaatcccagaactttgggaggctaagacaggcagatcacttgaggccaggagttcgagaccagcctggacaacatggtgatacccagtttctactaaaaatacaaaaattagtcgggcatggtgatgtgcacctgtagtcccagctgctcgggaggctgaggcaggagaatcgcttgaacccgggagacagaggttgcaacgagccaagatcgagccactgcgctccggcctgggtgacaggagactccatctcaaaaaataaaattaaaaaaaaactactacaataaattatcaccttggactgtataaaacaacttttaaactagtctttttaaaaagtacacttaaataaaaatctaaacataagagaa

SEQ ID NO: 78550 - DNA, 2069 bp, Homo sapiens
caggtaagctggttgaatcggacgaggtcacctggtccaccccctctcaggatcttgtcaacgttatttttcctgtcccgtcttcctatcgctggccttcctttcccatcctaaaaacttgccgaggccctatggctccctccctttctttcccaggcagcttcttatctgggctgtctgtaccccttcctttgcaccacccaccatgccccacgtagctgaaagctgcttatcccaattgtcaactctggccttcttcagcctctgtagcaccagacactgcacctcctgaatgtcctctgcttctctgcttcagaggcccaggctcgccagttctctgacctctcccatatgtctgcttaggactctgctgcagctgtcctcaccagcctccggggaatcccactacccacagggcagggctgtgggctgggctgaaaaaccatctgcatggtccacaagaagcctggcactgggtttccccatgaataacaatgaaaattaatggatgcacaaccttcctggaacgtggaatttctctgggagattccatgcagaggccactggggaggtggcaggcatgcatgtgactgtaggtggctgcagtgttggaaggctcccagcagagcagagagggtgtcagtctcatcagggaacccacctgatggcttctcagccagcagtctcagaggaacatagacgactgctgagaaaggagggaggcagcagtggtcccagcacctgaggcatcctgctgtcatgggaaggtctccgcccaaatgtcagatgcatcagcctgtcacccgctggtccagagctttcagctgtactggtagggggtgggtggtggagtgctgaatgaccttcacaggtgggcctttccagctctagggtcttacgggtgtcggtccacagaaccacggtttttaggttgtgtgtccggggctatgggaacctgtcccccatgatggatcttggtagagacacttccctctgtcatcgtgcccaggaggatgctgcaggtgactacctgcagccctgttctcattcatttggatgccctccagaaatctggggagccatacacctttagagccttttttgctccttatcaagttggcaaggcttggccaattcctgttcaaggctgcattaaaggcatgttcaccatcctggctaatacggtgaaaccccttctctactaaaaatacaaaaaaattagccgggcttggtggcgggtgcctgtagtcccagctactccggaggctgaggcaggggaatggtgtgaacccaggaggcggagcttgcagtgagccgagatcacaccactgcactccagcctgggctcaaaaaagaaaaaaaaaaaaaaaaaaaggcccgttcattctcaaatgcttttggcgtctccagggtgcctcaggaaaacatgaagtgggcattgtagaacttggggctactgtgtaactttggaagaaaaagttaagggtacttttaagtggatactgttttgatgaaattgccaacttcagggagcccagcttggagaaggaggacgtgagtattccttacaaggctccgaaacaattctttcttcacttagttttctttctgtgctctgcatcttatattccagcagggtcttccaatgcatggtttaataactaccagaactggccaggtgcagtggctcacgcctgtaatcccagaactttgggaggctaagacaggcagatcacttgaggccaggagttcgagaccagcctggacaacatggtgatacccagtttctactaaaaatacaaaaattagtcgggcatggtgatgtgcacctgtagtcccagctgctcgggaggctgaggcaggagaatcgcttgaacccgggagacagaggttgcaacgagccaagatcgagccactgcgctccggcctgggtgacaggagactccatctcaaaaaataaaattaaaaaaaaactactacaataaattatcaccttggactgtataaaacaacttttaaactagtctttttaaaaagtacacttaaataaaaatctaaacataagagaa

SEQ ID NO: 78551 - DNA, 2158 bp, Homo sapiens
ttccttgcagagcagagagggtgtcagtctcatcagggaacccacctgatggcttctcacctcaccatgcacatgctaactttaaagccttggggtctttcctgtaccccctcctcaaccctggtccaccccctctcaggatcttgtcaacgttatttttcctgtcccgtcttcctatcgctggccttcctttcccatcctaaaaacttgccgaggccctatggctccctccctttctttcccaggcagcttcttatctgggctgtctgtaccccttcctttgcaccacccaccatgccccacgtagctgaaagctgcttatcccaattgtcaactctggccttcttcagcctctgtagcaccagacactgcacctcctgaatgtcctctgcttctctgcttcagaggcccaggctcgccagttctctgacctctcccatatgtctgcttaggactctgctgcagctgtcctcaccagcctccggggaatcccactacccacagggcagggctgtgggctgggctgaaaaaccatctgcatggtccacaagaagcctggcactgggtttccccatgaataacaatgaaaattaatggatgcacaaccttcctggaacgtggaatttctctgggagattccatgcagaggccactggggaggtggcaggcatgcatgtgactgtaggtggctgcagtgttggaaggctcccagcagagcagagagggtgtcagtctcatcagggaacccacctgatggcttctcagccagcagtctcagaggaacatagacgactgctgagaaaggagggaggcagcagtggtcccagcacctgaggcatcctgctgtcatgggaaggtctccgcccaaatgtcagatgcatcagcctgtcacccgctggtccagagctttcagctgtactggtagggggtgggtggtggagtgctgaatgaccttcacaggtgggcctttccagctctagggtcttacgggtgtcggtccacagaaccacggtttttaggttgtgtgtccggggctatgggaacctgtcccccatgatggatcttggtagagacacttccctctgtcatcgtgcccaggaggatgctgcaggtgactacctgcagccctgttctcattcatttggatgccctccagaaatctggggagccatacacctttagagccttttttgctccttatcaagttggcaaggcttggccaattcctgttcaaggctgcattaaaggcatgttcaccatcctggctaatacggtgaaaccccttctctactaaaaatacaaaaaaattagccgggcttggtggcgggtgcctgtagtcccagctactccggaggctgaggcaggggaatggtgtgaacccaggaggcggagcttgcagtgagccgagatcacaccactgcactccagcctgggctcaaaaaagaaaaaaaaaaaaaaaaaaaggcccgttcattctcaaatgcttttggcgtctccagggtgcctcaggaaaacatgaagtgggcattgtagaacttggggctactgtgtaactttggaagaaaaagttaagggtacttttaagtggatactgttttgatgaaattgccaacttcagggagcccagcttggagaaggaggacgtgagtattccttacaaggctccgaaacaattctttcttcacttagttttctttctgtgctctgcatcttatattccagcagggtcttccaatgcatggtttaataactaccagaactggccaggtgcagtggctcacgcctgtaatcccagaactttgggaggctaagacaggcagatcacttgaggccaggagttcgagaccagcctggacaacatggtgatacccagtttctactaaaaatacaaaaattagtcgggcatggtgatgtgcacctgtagtcccagctgctcgggaggctgaggcaggagaatcgcttgaacccgggagacagaggttgcaacgagccaagatcgagccactgcgctccggcctgggtgacaggagactccatctcaaaaaataaaattaaaaaaaaactactacaataaattatcaccttggactgtataaaacaacttttaaactagtctttttaaaaagtacacttaaataaaaatctaaacataagagaa

SEQ ID NO: 78552 - DNA, 1592 bp, Homo sapiens
caaagcaaaagaaaaaaaagaaagaacaaagaagaagaaaagaaaaaaggcatgatgagccgtggttaacggccgagggcagaggcacggttaggtggcaggcatgcatgtgactgtaggtggctgcagtgttggaaggctcccagcagagcagagagggtgtcagtctcatcagggaacccacctgatggcttctcagccagcagtctcagaggaacatagacgactgctgagaaaggagggaggcagcagtggtcccagcacctgaggcatcctgctgtcatgggaaggtctccgcccaaatgtcagatgcatcagcctgtcacccgctggtccagagctttcagctgtactggtagggggtgggtggtggagtgctgaatgaccttcacaggtgggcctttccagctctagggtcttacgggtgtcggtccacagaaccacggtttttaggttgtgtgtccggggctatgggaacctgtcccccatgatggatcttggtagagacacttccctctgtcatcgtgcccaggaggatgctgcaggtgactacctgcagccctgttctcattcatttggatgccctccagaaatctggggagccatacacctttagagccttttttgctccttatcaagttggcaaggcttggccaattcctgttcaaggctgcattaaaggcatgttcaccatcctggctaatacggtgaaaccccttctctactaaaaatacaaaaaaattagccgggcttggtggcgggtgcctgtagtcccagctactccggaggctgaggcaggggaatggtgtgaacccaggaggcggagcttgcagtgagccgagatcacaccactgcactccagcctgggctcaaaaaagaaaaaaaaaaaaaaaaaaaggcccgttcattctcaaatgcttttggcgtctccagggtgcctcaggaaaacatgaagtgggcattgtagaacttggggctactgtgtaactttggaagaaaaagttaagggtacttttaagtggatactgttttgatgaaattgccaacttcagggagcccagcttggagaaggaggacgtgagtattccttacaaggctccgaaacaattctttcttcacttagttttctttctgtgctctgcatcttatattccagcagggtcttccaatgcatggtttaataactaccagaactggccaggtgcagtggctcacgcctgtaatcccagaactttgggaggctaagacaggcagatcacttgaggccaggagttcgagaccagcctggacaacatggtgatacccagtttctactaaaaatacaaaaattagtcgggcatggtgatgtgcacctgtagtcccagctgctcgggaggctgaggcaggagaatcgcttgaacccgggagacagaggttgcaacgagccaagatcgagccactgcgctccggcctgggtgacaggagactccatctcaaaaaataaaattaaaaaaaaactactacaataaattatcaccttggactgtataaaacaacttttaaactagtctttttaaaaagtacacttaaataaaaatctaaacataagagaa

SEQ ID NO: 78553 - DNA, 1682 bp, Homo sapiens
tcgggatcgccgctcggagcgggagtcgcgccctcccgccccgcgccgcggaacttgctctaacttcctcggccgagccgggccgcgccgccgctgccgccgccgcgcgcggcgttacatccttactattcaaagtgccatccacagacctgctgatgggcagcatgagcatcacctgggagcttgctgcgctgtagaatcttgaggggtctccatccagatcagctgaatcagagtttgcattgttaacaagattctgcttctcagaagatgcactattatagatactctaacgccaaggtcagctgctggtacaagtacctccttttcagctacaacatcatcttctggttggctggagttgtcttccttggagtcgggctgtgggcatggagcgaaaagggtgtgctgtccgacctcaccaaagtgacccggatgcatggaatcgaccctgtggtgctggtcctgatggtgggcgtggtgatgttcaccctggggttcgccggctgcgtgggggctctgcgggagaatatctgcttgctcaactttttctgtggcaccatcgtgctcatcttcttcctggagctggctgtggccgtgctggccttcctgttccaggactgggtgagggaccggttccgggagttcttcgagagcaacatcaagtcctaccgggacgatatcgatctgcaaaacctcatcgactcccttcagaaagctgtaagcacctccccagcgggcccccgatagagcatgcacctccctgtgctgcctggagctgagtctagcaggggcatcaggccttctctgtgggttgtctgcctgcagcttggcagacagcagggaggccgtggaacaagccactccacctctggtctgttccactttgccggcttgtggttgcctggtgggccagccctttcccattgggattgggcaggcaagtccagctgcacccgaggccacccaccccccacgtgcccggccctcctctttcggccccagatctttccaatcctgcccaatagccataccagctgcaatcctccttaggcgctgcataccgtaaggcacagcttcttccccccggctcatgactcaccgtctgacgctattcctatccccttcctccccgggaccttttccccttcctgtttaagaagccagggctgcctggaggaagctttgtcagatctagtggaatgtgacctccctggaatatgtgcccaggggtttgtctaagcagttccaggctatggcctttactccatctggtccccatccctcttatctctctcatgtgtggctgcacctggacgcttggaccatagctgtcacagccccctggggaggaacccactccttggccatgtcagcctgtgcaatgcaaggctcttgtttgatctgtgtgctgacagaaagcccagcttccttaagaacttttcatgtggaacactttggttttgagaagaaaataaatcagaaaccattaaaaatctatgattcactctcattattaaccaaaacttgttcacctttatttcatgtattatgggatccagcaaaacccatttatgggaccaaagaccctgcctgtattgttattactaatgtgtattagtctgtgaaagtcaccaaatccccgccatgttttgatgcctctcctttcttttctgttcagt

SEQ ID NO: 78554 - DNA, 1315 bp, Homo sapiens
tcgggatcgccgctcggagcgggagtcgcgccctcccgccccgcgccgcggaacttgctctaacttcctcggccgagccgggccgcgccgccgctgccgccgccgcgcgcggcgttacatccttactattcaaagtgccatccacagacctgctgatgggcagcatgagcatcacctgggagcttgctgcgctgtagaatcttgaggggtctccatccagatcagctgaatcagagtttgcattgttaacaagattctgcttctcagaagatgcactattatagatactctaacgccaaggtcagctgctggtacaagtacctccttttcagctacaacatcatcttctggttggctggagttgtcttccttggagtcgggctgtgggcatggagcgaaaagggtgtgctgtccgacctcaccaaagtgacccggatgcatggaatcgaccctgtggtgctggtcctgatggtgggcgtggtgatgttcaccctggggttcgccggctgcgtgggggctctgcgggagaatatctgcttgctcaactttttctgtggcaccatcgtgctcatcttcttcctggagctggctgtggccgtgctggccttcctgttccaggactgggtgagggaccggttccgggagttcttcgagagcaacatcaagtcctaccgggacgatatcgatctgcaaaacctcatcgactcccttcagaaagctgtaagcacctccccagcgggcccccgatagagcatgcacctccctgtgctgcctggagctgagtctagcaggggcatcaggccttctctgtgggttgtctgcctgcagcttggcagacagcagggaggccgtggaacaagccactccacctctggtctgttccactttgccggcttgtggttgcctggtgggccagccctttcccattgggattgggcaggcaagtccagctgcacccgaggccacccaccccccacgtgcccggccctcctctttcggccccagatctttccaatcctgcccaatagccataccagctgcaatcctccttaggcgctgcataccgtaaggcacagcttcttccccccggctcatgactcaccgtctgacgctattcctatccccttcctccccgggaccttttccccttcctccctgggaccttttccccttcctgtttaagaagccagggctgcctggaggaagctttgtcagatctagtggaatgtgacctccctggaatatgcagtcccacggcttccttatgctatcaccagccatcgctacacccgctctcgattttacagcggccgcg

SEQ ID NO: 78555 - DNA, 312 bp, Homo sapiens
ggcagacttagcctggcatcactatgaatgatgccctatgctgggcagccatggccctgtcttggagcccctaacagttctggcttttgtggttgcagaaccagtgctgtggcgcatatggccctgaagactgggacctcaacgtctacttcaattgcagcggtgccagctacagccgagagaagtgcggggtccccttctcctgctgcgtgccagatcctgcgggtgagttggcttgtgctggggcacagggagcccgcccttcctgaagcccagaagctttcctgactcctccagtgctctaggatactt

SEQ ID NO: 78556 - DNA, 573 bp, Homo sapiens
ggacaaagactgcatttttaggaggctccttggcatcccagaagacgtctctcgttaaggggacagctgcaggagtgtaggtgccttgttctggcctccgtgtggaggcagtagtgacaaagagggaggcaggcctggggcaggggcgaggctctgtcctccaggacttcctttaggctgtagggagtgtgctcttagatgcaaagagaaggaagaccccaccccactccagtccttgttctagtggtctttggtgatatgaatgactgctgttctaaaagggaggagtctcgaggaatcttcagagaccccacctgttagccgtggatatgagggatgtgtccctacagcttggggaactgtcctcctttagggacctgcatttcacagggagaaagtgctgtaaactgaatgtgtgtgtctctccaaaattcacatgttggaacttaaactccaatgtgatggtatttaagaggtggggtcttggggaggggattgggtcatgagggcagagtccttatgagtgggatgagtgtccttatgtaagaggcccagagagcttatttgtcactc

SEQ ID NO: 78557 - DNA, 1705 bp, Homo sapiens
tcgggatcgccgctcggagcgggagtcgcgccctcccgccccgcgccgcggaacttgctctaacttcctcggccgagccgggccgcgccgccgctgccgccgccgcgcgcggcgttacatccttactattcaaagtgccatccacagacctgctgatgggcagcatgagcatcacctgggagcttgctgcgctgtagaatcttgaggggtctccatccagatcagctgaatcagagtttgcattgttaacaagattctgcttctcagaagatgcactattatagatactctaacgccaaggtcagctgctggtacaagtacctccttttcagctacaacatcatcttctggttggctggagttgtcttccttggagtcgggctgtgggcatggagcgaaaagggtgtgctgtccgacctcaccaaagtgacccggatgcatggaatcgaccctgtggtgctggtcctgatggtgggcgtggtgatgttcaccctggggttcgccggctgcgtgggggctctgcgggagaatatctgcttgctcaactttttctgtggcaccatcgtgctcatcttcttcctggagctggctgtggccgtgctggccttcctgttccaggactgggtgagggaccggttccgggagttcttcgagagcaacatcaagtcctaccgggacgatatcgatctgcaaaacctcatcgactcccttcagaaagctgtaagcacctccccagcgggcccccgatagagcatgcacctccctgtgctgcctggagctgagtctagcaggggcatcaggccttctctgtgggttgtctgcctgcagcttggcagacagcagggaggccgtggaacaagccactccacctctggtctgttccactttgccggcttgtggttgcctggtgggccagccctttcccattgggattgggcaggcaagtccagctgcacccgaggccacccaccccccacgtgcccggccctcctctttcggccccagatctttccaatcctgcccaatagccataccagctgcaatcctccttaggcgctgcataccgtaaggcacagcttcttccccccggctcatgactcaccgtctgacgctattcctatccccttcctccccgggaccttttccccttcctccctgggaccttttccccttcctgtttaagaagccagggctgcctggaggaagctttgtcagatctagtggaatgtgacctccctggaatatgtgcccaggggtttgtctaagcagttccaggctatggcctttactccatctggtccccatccctcttatctctctcatgtgtggctgcacctggacgcttggaccatagctgtcacagccccctggggaggaacccactccttggccatgtcagcctgtgcaatgcaaggctcttgtttgatctgtgtgctgacagaaagcccagcttccttaagaacttttcatgtggaacactttggttttgagaagaaaataaatcagaaaccattaaaaatctatgattcactctcattattaaccaaaacttgttcacctttatttcatgtattatgggatccagcaaaacccatttatgggaccaaagaccctgcctgtattgttattactaatgtgtattagtctgtgaaagtcaccaaatccccgccatgttttgatgcctctcctttcttttctgttcagt

SEQ ID NO: 78558 - DNA, 746 bp, Homo sapiens
ggttagtcggtacaagggaggattgggtatacttgatggaggatatagtagatggcattgatttggcgtcagagcaaagagaagagattattacaagtgcaatagaccatgcgggtaactgacataggtttttcatggcggatcaggaaagagccttgagaatgcgagcgatatcagagtctgcgcttgggaaaatacagcactgatgaatccatcacatctttagcagagttggtagtccaaaaaatatcacctagacattcggagcctgttaaaagagttctagcacttacagaaacatgtttagtagaacgtgatccggcaacctataatatggcaacattgaagcctttaggagctgggttggttatgaaggcaataatagaggaaggtgataaagaaattgctacaaaaatgcaggagcttgccctaagtgaaggtgccttacctcgacacttgcatactgcgatgtttacaataagctcagatcaaaggatgcttacaaatagacagctaagtagacatttagtgggactctggacagctgataatgcaactgcaacaaacttgttgaaacgcattttgccgccaggcttgctggcatacttggaaagctcagatctcgtacctgagaaggatgctgatcggatgcatgttagagacaatgtgaaaatagcaatggatcagtatggaaaatttaataaagttccagagtggcaaagactagctggaaaagctgctaaaga

SEQ ID NO: 78559 - DNA, 2343 bp, Homo sapiens
ggagaccgcagccccggagcccgggccagggtccacctgtccccgcagcgccggctcgcgccctcctgccgcagccaccgagccgccgtctagcgccccgacctcgccaccatgagagccctgctggcgcgcctgcttctctgcgtcctggtcgtgagcgactccaaaggcagcaatgaacttcatcaagttccatcgaactgtgactgtctaaatggaggaacatgtgtgtccaacaagtacttctccaacattcactggtgcaactgcccaaagaaattcggagggcagcactgtgaaatagataagtcaaaaacctgctatgaggggaatggtcacttttaccgaggaaaggccagcactgacaccatgggccggccctgcctgccctggaactctgccactgtccttcagcaaacgtaccatgcccacagatctgatgctcttcagctgggcctggggaaacataattactgcaggaacccagacaaccggaggcgaccctggtgctatgtgcaggtgggcctaaagctgcttgtccaagagtgcatggtgcatgactgcgcagatggaaaaaagccctcctctcctccagaagaattaaaatttcagtgtggccaaaagactctgaggccccgctttaagattattgggggagaattcaccaccatcgagaaccagccctggtttgcggccatctacaggaggcaccgggggggctctgtcacctacgtgtgtggaggcagcctcatcagcccttgctgggtgatcagcgccacacactgcttcattgattacccaaagaaggaggactacatcgtctacctgggtcgctcaaggcttaactccaacacgcaaggggagatgaagtttgaggtggaaaacctcatcctacacaaggactacagcgctgacacgcttgctcaccacaacgacattgccttgctgaagatccgttccaaggagggcaggtgtgcgcagccatcccggactatacagaccatctgcctgccctcgatgtataacgatccccagtttggcacaagctgtgagatcactggctttggaaaagagaattctaccgactatctctatccggagcagctgaaaatgactgttgtgaagctgatttcccaccgggagtgtcagcagccccactactacggctctgaagtcaccaccaaaatgctgtgtgctgctgacccacagtggaaaacagattcctgccagggagactcagggggacccctcgtctgttccctccaaggccgcatgactttgactggaattgtgagctggggccgtggatgtgccctgaaggacaagccaggcgtctacacgagagtctcacacttcttaccctggatccgcagtcacaccaaggaagagaatggcctggccctctgagggtccccagggaggaaacgggcaccacccgctttcttgctggttgtcatttttgcagtagagtcatctccatcagctgtaagaagagactgggaagataggctctgcacagatggatttgcctgtgccacccaccagggcgaacgacaatagctttaccctcaggcataggcctgggtgctggctgcccagacccctctggccaggatggaggggtggtcctgactcaacatgttactgaccagcaacttgtctttttctggactgaagcctgcaggagttaaaaagggcagggcatctcctgtgcatgggtgaagggagagccagctcccccgacggtgggcatttgtgaggcccatggttgagaaatgaataatttcccaattaggaagtgtaacagctgaggtctcttgagggagcttagccaatgtgggagcagcggtttggggagcagagacactaacgacttcagggcagggctctgatattccatgaatgtatcaggaaatatatatgtgtgtgtatgtttgcacacttgtgtgtgggctgtgagtgtaagtgtgagtaagagctggtgtctgattgttaagtctaaatatttccttaaactgtgtggactgtgatgccacacagagtggtctttctggagaggttataggtcactcctggggcctcttgggtcccccacgtgacagtgcctgggaatgtattattctgcagcatgacctgtgaccagcactgtctcagtttcactttcacatagatgtccctttcttggccagttatcccttccttttagcctagttcatccaatcctcactgggtggggtgaggaccactcctgtacactgaatatttatatttcactatttttatttatatttttgtaattttaaataaaagtgatcaataaaatgtgatttttctgatgaaaaa

SEQ ID NO: 78560 - DNA, 2306 bp, Homo sapiens
ggagaccgcagccccggagcccgggccagggtccacctgtccccgcagcgccggctcgcgccctcctgccgcagccaccgagccgccgtctagcgccccgacctcgccaccatgagagccctgctggcgcgcctgcttctctgcgtcctggtcgtgagcgactccaaaggcagcaatgaacttcatcaagttccatcgaactgtgactgtctaaatggaggaacatgtgtgtccaacaagtacttctccaacattcactggtgcaactgcccaaagaaattcggagggcagcactgtgaaatagataagtcaaaaacctgctatgaggggaatggtcacttttaccgaggaaaggccagcactgacaccatgggccggccctgcctgccctggaactctgccactgtccttcagcaaacgtaccatgcccacagatctgatgctcttcagctgggcctggggaaacataattactgcaggaacccagacaaccggaggcgaccctggtgctatgtgcaggtgggcctaaagctgcttgtccaagagtgcatggtgcatgactgcgcagatggaaaaaagccctcctctcctccagaagaattaaaatttcagtgtggccaaaagactctgaggccccgctttaagattattgggggagaattcaccaccatcgagaaccagccctggtttgcggccatctacaggaggcaccgggggggctctgtcacctacgtgtgtggaggcagcctcatcagcccttgctgggtgatcagcgccacacactgcttcattgattacccaaagaaggaggactacatcgtctacctgggtcgctcaaggcttaactccaacacgcaaggggagatgaagtttgaggtggaaaacctcatcctacacaaggactacagcgctgacacgcttgctcaccacaacgacattgccttgctgaagatccgttccaaggagggcaggtgtgcgcagccatcccggactatacagaccatctgcctgccctcgatgtataacgatccccagtttggcacaagctgtgagatcactggctttggaaaagagaattctaccgactatctctatccggagcagctgaaaatgactgttgtgaagctgatttcccaccgggagtgtcagcagccccactactacggctctgaagtcaccaccaaaatgctgtgtgctgctgacccacagtggaaaacagattcctgccaggccgcatgactttgactggaattgtgagctggggccgtggatgtgccctgaaggacaagccaggcgtctacacgagagtctcacacttcttaccctggatccgcagtcacaccaaggaagagaatggcctggccctctgagggtccccagggaggaaacgggcaccacccgctttcttgctggttgtcatttttgcagtagagtcatctccatcagctgtaagaagagactgggaagataggctctgcacagatggatttgcctgtgccacccaccagggcgaacgacaatagctttaccctcaggcataggcctgggtgctggctgcccagacccctctggccaggatggaggggtggtcctgactcaacatgttactgaccagcaacttgtctttttctggactgaagcctgcaggagttaaaaagggcagggcatctcctgtgcatgggtgaagggagagccagctcccccgacggtgggcatttgtgaggcccatggttgagaaatgaataatttcccaattaggaagtgtaacagctgaggtctcttgagggagcttagccaatgtgggagcagcggtttggggagcagagacactaacgacttcagggcagggctctgatattccatgaatgtatcaggaaatatatatgtgtgtgtatgtttgcacacttgtgtgtgggctgtgagtgtaagtgtgagtaagagctggtgtctgattgttaagtctaaatatttccttaaactgtgtggactgtgatgccacacagagtggtctttctggagaggttataggtcactcctggggcctcttgggtcccccacgtgacagtgcctgggaatgtattattctgcagcatgacctgtgaccagcactgtctcagtttcactttcacatagatgtccctttcttggccagttatcccttccttttagcctagttcatccaatcctcactgggtggggtgaggaccactcctgtacactgaatatttatatttcactatttttatttatatttttgtaattttaaataaaagtgatcaataaaatgtgatttttctgatgaaaaa

SEQ ID NO: 78561 - DNA, 1071 bp, Homo sapiens
tgagctcggtaccagttcgacggagactctcgtggatgtgccctgaaggacaagccaggcgtctacacgagagtctcacacttcttaccctggatccgcagtcacaccaaggaagagaatggcctggccctctgagggtccccagggaggaaacgggcaccacccgctttcttgctggttgtcatttttgcagtagagtcatctccatcagctgtaagaagagactgggaagataggctctgcacagatggatttgcctgtgccacccaccagggcgaacgacaatagctttaccctcaggcataggcctgggtgctggctgcccagacccctctggccaggatggaggggtggtcctgactcaacatgttactgaccagcaacttgtctttttctggactgaagcctgcaggagttaaaaagggcagggcatctcctgtgcatgggtgaagggagagccagctcccccgacggtgggcatttgtgaggcccatggttgagaaatgaataatttcccaattaggaagtgtaacagctgaggtctcttgagggagcttagccaatgtgggagcagcggtttggggagcagagacactaacgacttcagggcagggctctgatattccatgaatgtatcaggaaatatatatgtgtgtgtatgtttgcacacttgtgtgtgggctgtgagtgtaagtgtgagtaagagctggtgtctgattgttaagtctaaatatttccttaaactgtgtggactgtgatgccacacagagtggtctttctggagaggttataggtcactcctggggcctcttgggtcccccacgtgacagtgcctgggaatgtattattctgcagcatgacctgtgaccagcactgtctcagtttcactttcacatagatgtccctttcttggccagttatcccttccttttagcctagttcatccaatcctcactgggtggggtgaggaccactcctgtacactgaatatttatatttcactatttttatttatatttttgtaattttaaataaaagtgatcaataaaatgtgatttttctgatgaaaaa

SEQ ID NO: 78562 - DNA, 2610 bp, Homo sapiens
  misc_feature (2358)..(2358): n is a, c, g, or t
  misc_feature (2361)..(2361): n is a, c, g, or t
ggagaccgcagccccggagcccgggccagggtccacctgtccccgcagcgccggctcgcgccctcctgccgcagccaccgagccgccgtctagcgccccgacctcgccaccatgagagccctgctggcgcgcctgcttctctgcgtcctggtcgtgagcgactccaaaggcagcaatgaacttcatcaagttccatcgaactgtgactgtctaaatggaggaacatgtgtgtccaacaagtacttctccaacattcactggtgcaactgcccaaagaaattcggagggcagcactgtgaaatagataagtcaaaaacctgctatgaggggaatggtcacttttaccgaggaaaggccagcactgacaccatgggccggccctgcctgccctggaactctgccactgtccttcagcaaacgtaccatgcccacagatctgatgctcttcagctgggcctggggaaacataattactgcaggaacccagacaaccggaggcgaccctggtgctatgtgcaggtgggcctaaagctgcttgtccaagagtgcatggtgcatgactgcgcagatggaaaaaagccctcctctcctccagaagaattaaaatttcagtgtggccaaaagactctgaggccccgctttaagattattgggggagaattcaccaccatcgagaaccagccctggtttgcggccatctacaggaggcaccgggggggctctgtcacctacgtgtgtggaggcagcctcatcagcccttgctgggtgatcagcgccacacactgcttcattgattacccaaagaaggaggactacatcgtctacctgggtcgctcaaggcttaactccaacacgcaaggggagatgaagtttgaggtggaaaacctcatcctacacaaggactacagcgctgacacgcttgctcaccacaacgacattgccttgctgaagatccgttccaaggagggcaggtgtgcgcagccatcccggactatacagaccatctgcctgccctcgatgtataacgatccccagtttggcacaagctgtgagatcactggctttggaaaagagaattctaccgactatctctatccggagcagctgaaaatgactgttgtgaagctgatttcccaccgggagtgtcagcagccccactactacggctctgaagtcaccaccaaaatgctgtgtgctgctgacccacagtggaaaacagattcctgccagggagactcagggggacccctcgtctgttccctccaaggccgcatgactttgactggaattgtgagctggggccgtggatgtgccctgaaggacaagccaggcgtctacacgagagtctcacacttcttaccctggatccgcagtcacaccaaggaagagaatggcctggccctctgagggtccccagggaggaaacgggcaccacccgctttcttgctggttgtcatttttgcagtagagtcatctccatcagctgtaagaagagactgggaagataggctctgcacagatggatttgcctgtgccacccaccagggcgaacgacaatagctttaccctcaggcataggcctgggtgctggctgcccagacccctctggccaggatggaggggtggtcctgactcaacatgttactgaccagcaacttgtctttttctggactgaagcctgcaggagttaaaaagggcagggcatctcctgtgcatgggtgaagggagagccagctcccccgacggtgggcatttgtgaggcccatggttgagaaatgaataatttcccaattaggaagtgtaacagctgaggtctcttgagggagcttagccaatgtgggagcagcggtttggggagcagagacactaacgacttcagggcagggctctgatattccatgaatgtatcaggaaatatatatgtgtgtgtatgtttgcacacttgtgtgtgggctgtgagtgtaagtgtgagtaagagctggtgtctgattgttaagtctaaatatttccttaaactgtgtggactgtgatgccacacagagtggtctttctggagaggttataggtcactcctggggcctcttgggtcccccacgtgacagtgcctgggaatgtattattctgcagcatgacctgtgaccagcactgtctcagtttcactttcacatagatgtccctttcttggccagttatcccttccttttagcctagttcatccaatcctcactgggtggggtgaggaccactcctgtacactgaatatttatatttcactatttttatttatatttttgtaattttaaataaaagtgatcaataaaatgtgatttttctgatgaaaaaacaaaaaaacaaaanaanacaaaaaaaaccacagagcacactcccacaagcacgccacaagcgaccagcagtaccgcgacgcccgggcgcagtcaccccaagccgcgccaccagcggcgcaccgctcgcacaccggcgcaccgaccacacccacgcgccagagccggggcacacaacaccggcgggagcggccgcgagcgcccggcacgcgaggcagccccccgcgagccgcggccacgcggccccagcgcggccacggcccgccca

SEQ ID NO: 78563 - DNA, 2064 bp, Homo sapiens
ggagaccgcagccccggagcccgggccagggtccacctgtccccgcagcgccggctcgcgccctcctgccgcagccaccgagccgccgtctagcgccccgacctcgccaccatgagagccctgctggcgcgcctgcttctctgcgtcctggtcgtgagcgactccaaaggcagcaatgaacttcatcaagttccatcgaactgtgactgtctaaatggaggaacatgtgtgtccaacaagtacttctccaacattcactggtgcaactgcccaaagaaattcggagggcagcactgtgaaatagataagtcaaaaacctgctatgaggggaatggtcacttttaccgaggaaaggccagcactgacaccatgggccggccctgcctgccctggaactctgccactgtccttcagcaaacgtaccatgcccacagatctgatgctcttcagctgggcctggggaaacataattactgcaggaacccagacaaccggaggcgaccctggtgctatgtgcaggtgggcctaaagctgcttgtccaagagtgcatggtgcatgactgcgcagatggaaaaaagccctcctctcctccagaagaattaaaatttcagtgtggccaaaagactctgaggccccgctttaagattattgggggagaattcaccaccatcgagaaccagccctggtttgcggccatctacaggaggcaccgggggggctctgtcacctacgtgtgtggaggcagcctcatcagcccttgctgggtgatcagcgccacacactgcttcattgattacccaaagaaggaggactacatcgtctacctgggtcgctcaaggcttaactccaacacgcaaggggagatgaagtttgaggtggaaaacctcatcctacacaaggactacagcgctgacacgcttgctcaccacaacgacattgccttgctgaagatccgttccaaggagggcaggtgtgcgcagccatcccggactatacagaccatctgcctgccctcgatgtataacgatccccagtttggcacaagctgtgagatcactggctttggaaaagagaattctaccgactatctctatccggagcagctgaaaatgactgttgtgaagctgatttcccaccgggagtgtcagcagccccactactacggctctgaagtcaccaccaaaatgctgtgtgctgctgacccacagtggaaaacagattcctgccagggagactcagggggacccctcgtctgttccctccaaggccgcatgactttgactggaattgtgagctggggccgtggatgtgccctgaaggacaagccaggcgtctacacgagagtctcacacttcttaccctggatccgcagtcacaccaaggaagagaatggcctggccctctgagggtccccagggaggaaacgggcaccacccgctttcttgctggttgtcatttttgcagtagagtcatctccatcagctgtaagaagagactgggaagataggctctgcacagatggatttgcctgtgccacccaccagggcgaacgacaatagctttaccctcaggcataggcctgggtgctggctgcccagacccctctggccaggatggaggggtggtcctgactcaacatgttactgaccagcaacttgtctttttctggactgaagcctgcaggagttaaaaagggcagggcatctcctgtgcatgggtgaagggagagccagctcccccgacggtgggcatttgtgaggcccatggttgagaaatgaataatttcccaattaggaagtgtaacagctgaggtctcttgagggagcttagccaatgtgggagcagcggtttggggagcagagacactaacgacttcagggcagggctctgatattccatgaatgtatcaggaaatatatatgtgtgtgtatgtttgcacacttgtgtgtgggctgtgagtgtaagtgtgagtaagagctggtgtctgattgttaagctaggtttatgccactctggggccttttgggccccacatgacaatccttggggtttattttgcccct

SEQ ID NO: 78564 - DNA, 604 bp, Homo sapiens
ttgtgagcgttgcggaagcacgcggggtccgggtcgctgagcgctgcaagacaggggagggagccgggcgggagagggaggggcggcgccggggcgggccctgatatagagcaggcgccgcgggtcgcagcacagtgcggagaccgcagccccggagcccgggccagggtccacctgtccccgcagcgccggctcgcgccctcctgccgcagccaccggtgagtgccgcggtcctgagatccccgggccggatgcgcggcggccccagctcccgagcgtctgcctcccccgccctgggctgcccgggctccctgggctccccggcggctgcacggagtcaaggcgccccgtcccgggcgtcccccgcgggtgccgatccaggctgcccggagtccggagcccagagaggagagagacagctggggagcctggtcaccgcgggcatctcccctgcgctgcagtcgcccgcctggcctgccttcccgttcctccgcctcttgccctgacttctccttcctttgcagagccgccgtctagcgccccgacctcgccaccatgagagccctgctggcgcgcctgcttctctgcgtcctggtcgtgagcg

SEQ ID NO: 78565 - DNA, 825 bp, Homo sapiens
gagagagaaaaaaaatgtttcagaggaaggagcccctgccttctggtgaagagtattcaagatgaagataaacttttcaacttaatatcgagactttgatagcagaagggatctactcttgaaagtccaaaaaatgttgttgctataggaacagactcggtgaacaagacatttgagaagagaaggtcaaagacccagctgcacttctgcttcactgctgaacttctgcttcttcctatcagggaatacactgctcctcacattagggatttcctaaaattgttaggtgttttgaacagaactggctataccaatgaggctcaaacaagaatcataaagtgcatggtgcttctctccctctctgttttctttaaaaagaaaacattcttgacaagatgaatacaatattttcattctagcaaatttctgctgtcagaggttatatttacaggatagagagatttctcaaacatgaccttttctcgtgtaataccagagtgaaattttagaaaagtctgtgtgtgtgtgatgcgtgcgtgtgtgtgtgtgtgtgtgtgtgtgtgtgtgtgtctcgcaggctgagaagtgggatgggaagaagggaatgtggctagaatcttaccatctcattctcttctccttcattgagcagagcgtgctggcccttctcaaagtgtcccatgaaaaagttattccacacctcctccctgaccttgtcgtgcagacgcttccaggatgaactccaactcgccgagccaccgcagctcctcagctgactaaaagagttaatgatcctccaggttaaaactcctccttgagcacaca

SEQ ID NO: 78566 - DNA, 1085 bp, Homo sapiens
agcgacacttgtgaagaaatttgctggaaattaatggaattgctgactttttactgtcaggctgcctacctgaaattttggacttagttcttaaaggtaaaaaggtgcaattttgaagtgctcaaaatctgttcttgtatttcataatcaagaacttctgtgtcaagtaagaaatactcttcacacactatattttttttgagggaaacagatagtgctattcagaaatagtcattctgaaatttcttattaattggtcaccaaagggtggacatatagaggagaacatttacatgcatggtgttttaattataaaattaatttttatctagaaatattaaagtaatttattaaatacagactgattatggatttttagcagacaaaaccaattactgtttactctgtgccttgaggccttgctcttttcacatactattctttttttttttcctgagtttcgctcttgctgcccaggctggagtgcaatggtacaatcttggctcactgcagcctttgcctcctgggttcaagtgattctcttgcctcagcctcctgagtagctgggactacaggcatgtgccaccacacccggctaatttttgtgttttcggtggagacaggtttcatcgtcttggtcaggctggcctcgaactcctgactgcaggtggtccacctgcttcggcctcccaaagtgctgggatcacaggcatgagccaccgcacctggccttcacacactatcgtttaatcctcaatatctgtaaactttggtgacacatccatttaaaattcaaaaaaccatcttggcttagcacatgactgaaaatgaaaaaatatcaaggcaaccacaacatgtcatgctttttcttcttttgaaacatcatcacagttgataattggtttactgtttatgacttttctgctagactgtagtctccatgaaagcaggatacttactaggtttttcttattcaccatggtatccccacctagcacagtttccagcaacattgagtagtcagtatgtattaatcaaataaataaaataataaataaataaatgtgttcataatatttattgct

SEQ ID NO: 78567 - DNA, 763 bp, Homo sapiens
agccagcgaggccctgcctgccagccgggaaggaggcgtggttatggagctggcggctgcaaccccggggcccgcgccgctgcctagcgcttcccgggggctctttggggacgcgccccccgccgcggctcggggacccgtagagcccggcgctgcgcggttggcccttctcccgcgccccgcgctcaccctcctgctcctcctcatggccgctgttatcaggtgcctggagcaggcctagaccaccgactggagggccaccctgaagaccatccggaacggcgttcataagatagacacgtacctgaacgccgccttggacctcctgggaggcgaggacggtctctgccagtataaatgcagtgacggatctaagcctttcccacgttatggttataaaccctccccaccgaatggatgtggctctccactgtttggcgttcatcttaacattggtatcccttccctgacaaagtgttgcaactaacacgacaggtgctatgagaactgtggcaaaagcaagaatgactgtgatgagaaattccagtattgcctctccaagatctgccgagaagtacagaaaacactaggactaacttagcatgttcaggcatgtgaaacaacaatggagctcttgtttgacagtgttatacatttaggttgtaaaccatatctggacagccaacgagccacatgcaggtgtcattatgaagaaaaaaccgatatttaaaggagatgctgacagctggtgacagatgaagac

SEQ ID NO: 78568 - DNA, 278 bp, Homo sapiens
gcagtatgatcccatgtatggttttaaagatagaagggcaatgcctagcacatagtagacgctcactatttgttaaatgaatcaatgcatggtatataccaaagtgttacactaaagctgggaatacggtggggagagttttatttttcctgctgttttcctttttgcaatagtcatgttattttaacatgacattactgatccttaatgtatctgtctggtggccatacatgctttagaagggccaggagaaccacatggcataaattcctacagtg

SEQ ID NO: 78569 - DNA, 425 bp, Homo sapiens
accattactgtctaagaaggaatttagaaattagaaaagcatattgatctctgagtaaccatgcatgaaacaaatacacaacagaaaagatatgcaaagtcacctttgagatgaactgattgctggctatcctactgtcctcgaggtaatgagtatcagtaaatccaaagaaagtatgtgttgtcacagagggaaggagggtattgttatgtaagcatgccagggaaagaagggcctgaaaagagcccttctgtggcttttatctccatcggaccactatgtatttacctatgaatttcattactatctctctcaaccaaaatgtaactccttaagggtagggactgtgattattgctgttatttgtagagccgcaatgagtacccagcatgtagtaggtgcttattaaatatttgaatgaatga

SEQ ID NO: 78570 - DNA, 119 bp, Homo sapiens
tgggaaggcagctaataacactcaggaaaaatggtagcacccccttctgaaaggaaggcaaccagaatacctcatctagcagcatgtccctggcatctatgacaagcaaatagagaact

SEQ ID NO: 78571 - DNA, 528 bp, Homo sapiens
tcacccctccccttggcggctgcctgcagtgggccgtgtttccattcccctcccaggtctgaggatcccgggctctaccatgttaaagtcggagggctgacaccctcactttcagagccccactcggccttggtggctgtgaggaggctcctggtccactcctcataccatgggaccaccaccagcggggacattgccctgatggagctggactcccccttgcaggcctcccagttcagccccatctgcctcccaggaccccagacccccctcgccattgggaccgtgtgctgggtaaacgggctgggggtccactcaggagagggggaaggggaatatgcactcaccagcccctactcctagtcagggaggacaagcccagggaccacgcagagccagcctgagtggtctccacagacgttggtctgcgtgtttatctcctctcccctcccaccccaccctgaagctgggaacacttggggccaggacccatgctgtccagactgtgggactccccttggccaaggt

SEQ ID NO: 78572 - DNA, 431 bp, Homo sapiens
gacaccatctctaccaaaaaattttaaaattagccaggcgtgggggcacgtgcctgtcatcccaactacacgtgaggctgaagtaggaggatcacttgagcctgggaggttgaggttgcagtcaactgtgattgtgccactgcactccagcctgtgtgacagagtgacatcctgtaaaacaaacaaacaaacaaaaaaccagcctaacatttcttgaggcatctctgacttctaggcccttttccccatataatgaaaactcgtctaccatccaccttactaatgtgacagcaaatccaatgactagaatttatcaagttagcctgttacagttagagaatttaagaatgcttccaaatagacagttgtcaatatatttttctatgtcaacacacttgagaaaatccaacattctcaggggtgtcagtgag

SEQ ID NO: 78573 - DNA, 708 bp, Homo sapiens
agctttgtcatctatgctacactcagaaggaatattaatttcctaagcttattctgatgcagtaactgatgtataagaaaacaacttattttctacatctgcccaggactctcttcccaactttgccaatcaagctcttccacctcttttaagccccagctctaatattccacctcacagtcttttaacctcccattcccccatggccattcttttcagtatacacccatggttcatgcatctacaactgcacaccacactgcgttgtaactgttttttaatgcattactccccctgtcagctctcgatcccatatttgtaggaactgtgtccccatatctgtattttggttgcatccagttgaaagacagggcatggtagaatagaaataacatgcaccttataaactgatgcaggttaaatccaaactgctccttacttgctgtggggactggggcaagttacttctttgagcttctttaaaacaacaatagtaatacctgctatgcaggattgttgtgaagattaaataagctgcattcattagttcaacaaatatatggagacgtcctattacatgtcagtaattgcaagtgtaactgtacttgctattaagaatataaaggtgaataagtcatgactttatcctaagaactttataatgtggtagtagagaaagactaggaaatagacagttgcaacataatt

SEQ ID NO: 78574 - DNA, 448 bp, Homo sapiens
gtggcttctgcttctgagaaggcctcaggaagcttccaatcaaggtagaagacacagagggaagaaggcatcgcacaaggcaggagcaggagcaagagagagcaagaggggaggtgccacacactttaaacaaccagatctcataagaactcactcaccatcacaaggacagtaccagatggtgctaagctggtcatgacaaaccaccctcatgatacaatcagcttccaccagaccctacctccagccttgaggttacagttagacatgagaattgggcagagaaatagatcccaactatgtcacctactcgtgtaaaacaacaacagtaacctgaacgtgttaactgtaccaaaatttcacaacagaatggtcaaaatgtccatggtataattcaaatttatctgacatacaaaaaagaatgaaaatgtgatcagttttagaggaa

SEQ ID NO: 78575 - DNA, 617 bp, Homo sapiens
gatcttcaggatcacttgctgcagctctgtgtaccccttactgcttccagttgcacctttatattatggagatgacttcttcccttaaaccctcataaacccaacctctgctggcgtcagatttttcttctgcagcttccttaccactctcagcctttgtagtgttgaagagagttagagccttgttctggatttagcctttggcttaaggaaatgctgtggctggtttggtcttctatccagaccactaaaactttcttcacatcggcaataagactgtttcgcttccttattattcatgtgttcactggattagcactttgaatttccttcaagaactttcctgttgtattcacaacttggcttttaccctgaattttatggtaattactttcttgctttcctttatagttttataacctaatattctataataaatatattttttatttttttgacttcatataaatggcatcatatagtagtagaaatagaatgagaaaagtttcagtatgctaacttatgaaaaacagtaaattttatattaatttttctttttataatttatgactcaggtttcaattcatcagttaaaatatgtcacttcatgctcacac

SEQ ID NO: 78576 - DNA, 329 bp, Homo sapiens
ctttgtaatagaaacttttaagaaaagatttcatctttgatgactgtggaatagccctttttttttatctgttaaagtatttggtttttttttttgtgatgccacagccaagaaaactgcagtagtaatagtatgcaaaaagatgtaacattctctcttcatcttactgtttaacttcaaagcattcttgtgaacagaaaccagttaggactatagaacaagatgccaaaacatgaatgactctgctgaagtcaatgaaatgcaattacaaagtgcagtgctaactttgaattgaatcagaggggccactaaaaaacagtaattagcct

SEQ ID NO: 78577 - DNA, 266 bp, Homo sapiens
atactttaaatactttaaatatatatatttaaagtatgttaataataaatatactttaaataattatataagattgcttataatacctaatataatacccatacatcacttcatgcaagtggatacgatgtagtacttggtgttgcagcaaattcaaattttgcttttcgcaactttatggaatttttttcttctgaatatttccttagttgaatccctggatatggaactcacggatacagagtgccaactctattttcgctatt

SEQ ID NO: 78578 - DNA, 476 bp, Homo sapiens
gtagcaaaatgagatcccagataagataatgtttcaccttgaactcagcctgttcttaggagggttatgtataaataagggttgtaggtttgctgaagctgtgggtgagtcaaagttcaggggctgtttggaagaagagaaacaagcaaagtttctgtaaagagtatgttattttgaccactgaagactaaattactgaatggttgttcatttttaaaaatgggaatttgcaatctgtgtccatttttgtgataggttaaaaaaacagcagggagcatcctcaaagtcatcacgggaagcacgtttctcttcactaagctgttctttgagaatgcaaagaatgggggaatttctttaaatatagctatttccaggattaccttcacccacaactgttccttgccctagacatctcttccatttggctgtttctgagttatatttttataataaagtagtaaatataattacagtta

SEQ ID NO: 78579 - DNA, 1279 bp, Homo sapiens
ctccgcgggcagccaacattgatttcctccgggccgagggcgagggcccgggcggcggcgggctgcagccgcggcagggcgagagcatgtccaagccggtggaccacgtcaagcggcccatgaacgccttcatggtgtggtcgcgggctcagcggcgcaagatggcccaggagaaccccaagatgcacaactcggagatcagcaagcgcttgggcgccgagtggaaactgctcacagagtcggagaagcggccgttcatcgacgaggccaagcgtctacgcgccatgcacatgaaggagcaccccgactacaagtaccggccgcggcgcaagcccaagacgctgctcaagaaggacaagttcgccttcccggtgccctacggcctgggcggcgtggcggacgccgagcaccctgcgctcaaggcgggcgccgggctgcacgcgggggcgggcggcggcctggtgcctgagtcgctgctcgccaatcccgagaaggcggccgcggccgccgccgctgccgccgcacgcgtcttcttcccgcagtcggccgctgccgccgccgctgccgccgccgccgccgccgcgggcagcccctactcgctgctcgacctgggctccaaaatggcagagatctcgtcgtcctcgtccggcctcccgtacgcgtcgtcgctgggctacccgaccgcgggcgcgggcgccttccacggcgcggcggcggcggctgcagcggcggccgccgccgccggggggcacacgcactcgcaccccagcccgggcaacccgggctacatgatcccgtgcaactgcagcgcgtggcccagccccgggctgcagccgccgctcgcctacatcctgctgccgggcatgggcaagccccagctggacccctaccccgcggcctacgctgccgcgctatgaccccgcggggccgcctcgcgaggaccggtgtgcacacgtgtacatatgtataggtacgagcgctgcggcctccccgtgcgccctcccgcgaccgggggcccggtttgtatgtacatagaatgtataggtgccaggtagaggcagagaggccaggcggggcaggagtggccaagcgcgcaagggcgcgggcgagcaggcctgtgaattcgcaggatcatttcagacccgcacttcggcagccaactcgaaagcaggcggttgtgtgcggcagcagttggcgtttgctttgcacttcggaacctgttgcgttttgacccacggaggtggaggagtaactttttgacatgttggcctttccagtt

SEQ ID NO: 78580 - DNA, 781 bp, Homo sapiens
tcaggaaaaaaaatattcctacttaaattttaagtctataattcaatttaaatatgtgtgtgtctcatccaggataggataggttgtcttctattttccattttacctatttactttttttgtaagaaaagagaaaaatgaattctaaagatgttccccatgggttttgattgtgtctaagctatgatgaccttcatataatcagcataaacataaaacaaattttttacttaacatgagtgcactttactaatcctcatggcacagtggctcacgcctgtaatcccagcacttgggaggacaatgtgggtggatcacgaggtcaggagttcgagaacagcctggccaacatggtgaaaccccgtctccactaaaaatacaaaaattagccaggcatggtggcgtacacttgtaattccagctactcaagaggctgaggcaggaggattgcttgaaccctgaaggcagaggttacagagccaagatagcgccactgcactccagcctggatgacagagcaagactccgtctcaaaaaaaaaaaaaaaaaaaagcaagagagttcaactaagaaaggtcacatatgtgaaagcccaaggacactgtttgatatacagcaggtattcaatcagtgttatttgaaaccaaatctgaatttgaagtttgaatcttctgagttggaatgaatttttttctagctgagggaaactgtatttttctttccccaaagaggaatgtaatgtaaagtgaaataaaactataagctatgttaaatacatttt

SEQ ID NO: 78581 - DNA, 3769 bp, Homo sapiens
gtgaggctgccgagcggacagcgactcccggggaagcccgcgctccgggagcgggagcgggagcaggagcaggagcagcgccgtcccaggccagaggcgagcgccgggcgccgggagagcggagagcccgggcagctgccggagcgcgggggcgcggcccgaggaaaccacagagcgagccctcccgccgcagccgcagtggctggcgccgcagccaggagccatgggcaacatctcctctaacatctcggccttccagtccctgcatatcgtcatgttgggcttggactcggccggcaagaccacggtgctctaccggctcaagttcaacgagttcgtgaacacggtgcccaccatcggcttcaacaccgagaagatcaagctgagcaacggcacggccaagggcatcagctgccacttctgggacgtgggcggccaggagaagctgcggccgctgtggaagtcctacagccgctgcacggacggcatcatctacgtggtggactcggtggacgtggaccggctggaggaggccaagacggagctgcacaaggtgaccaagttcgccgagaaccagggcacgccgctgctggtcatcgccaacaagcaggacctgcccaagtcgctgccggtggcagagattgagaagcagctggcgctgcacgagcttatcccggccaccacctatcacgtccagccggcgtgcgccatcatcggcgagggcctcaccgagggcatggacaagctctatgagatgatcctgaaacgcaggaagtccctcaagcagaagaagaagcggtaatgcgcccggagcgaccggggagcgagcgagtgcgtcaagaaagaatgaatggatggatggatggttggatggatggatggatggatgagcgagaacccgcgcccgcgaacaaagagcgaaccaaagcgatgcttcgaatttttaaaacggaatctctgcacccaaatgcaggactggtgacttaaggagctgcgaagtctgatttaccggcctactctcgacctgccccccacccccagctcaggggaccttttgtctgaacgccagagctactgaccaggtcggggggccgcggtggggagtggaagagccggtcctgctgtccgccctcccagccccaggtggaaggctcagttgtcggaaagacaaaagcgatttcttcccactcctgcagggccagaagttcaggctgccccgcctccactgggggatcgcacctgtgaattacctgaggtatgcatttcccagaaccgtgggcgtacccaccttggggggcatgttggttctggggggaccacctctccttgcattcaggggctgtgaagctgagtaattttcggtcacagggcaggcccctgttgaaatttcatttgtcctgctctgggcccaaaggtggtggtggtttgggtcatcagaggactgcctgggacggttcagcgggcacggagcgctgtgctggcctggctggggatggccgcggaggtgcccttttcctggtgctttgtggtggctgcagaagaccagttttgttgagaactgcttttcagcctggaatcagacatcttccagatggtttggaccctgtccatgtgtaggtcattatcacacaaagagaccaataaaaataaaaaaaataaaaaaaaaaaaagacgaactattggaggtggtggccaatgatgcatttactgtttgcaggatagttaaaggtgtttaaagggtaaggcttttggtgtaaatgctggatggggtgtgtgtgtgtgtggatatagggacctccctctgtactgtgtactgtgtaatcggcattaatacctagactcatatgtatggaattttaaattctcttagcctactgattggtttggatgagcacaccagctgcaggtgtgtgctgaattgcaagatggtatttttttttttaaccaagggatgtctcttgtaatactaaccgcgtgataatgggttttcagacatgatgaaaaaaaaaaacttttacaaatgaatacttaccttagaaatattcaccttaggaaaaaagactttgctctgcccttttatattcctttatgctgcaagtggtgacatgttcagatttctaatttggttcattgtggcctatctggtttaagtctttcattaaaaatgtctcgttagagtatttgatgtcatgcaccaaaaaaataaaaccccaccttgttgcaaaagctgacctcgttgcatggaattaaaagagaaggaaaaacacaaggatgaagtctttccgaattcattcttgtgggaactggccttcggagccagccagcactttgggcaaatgcaaacaacaatgagtgcttgagataaaagaaagtgtgacgtcatggtcactggtactcaggcacttcacagtttacttgaaagaggctttggaaaatagataaagtgaaagaagaataaatacatatttttaataatgtaattttaaaaatcctttataatcaggactgagtcttggtttgcagaagctgtcacttaccctgaaacacagtatcaaaagggaaacttaaaacatactgtttgatttttttatttcctcttacaatccatgttttcaggtagaattatgactttccccccattgttacacatttctttacaaaggaggcctgtagaaattggacacgatcatgcttgagcatgtgagttagtcaaattatgagtccctgcctattgtccattacacaccgaatgttaatttaagaaccagaggcagaagttctggcttcctgcttgaaacccaattcttatatgaaattttttaaaagcagaaacctagcagcccatctgctttttctcttttgtcggtgtatttggtacccctccaatgctggtctttttgtagaaactcagtagagaaagtctagctaagcagtgttgaaaagcctgcaagatttcagtttacatatcgacagcatatccactgatttctaaatgggctggtcccatcatctgaagattctgtatagaattattaaaaaaaaaatccatctttctttattttcttcacatgcgacaatttcttaagcactttgacattttggtagttccacactattgagagaataatatatttattttgtgacattgcagatgccaaatactgtaaccttctcatgataacaatacttaggttcaagatcactgttcaaaccctgtcatgctttaaaactgatgcgagatgattttgttttttgcataatcaatacttaagggtgcaatcaactgttagtaattgtgcagtaaagtaaagccctgtggtgtatcaactactagttaagagtctcagttgatttctgtaatgtttgacctaataatagcccgtttcgtctctgacccaacagaggaagcacagatcaaatcaccttggagtggtcaccagggggacagggagccccccaccaatgtatcaatgggtgatttatgatgccttctgccctttggcgagtgaatgggtttcccataggggaagttggcctccctccgtgagctttggaaatgttttctaatagacacagggaggccagttctgtttcagagcaattatcttcccaaattctctgttctggtgttggaactgtgtgccctggtttctgttttcctttctactgctgtaattctctgtctcatcatccttctcttttgtttccatagccttttataatgcatatatgatgctgtgaacagaaataaattatttatacaatcaaa

SEQ ID NO: 78582 - DNA, 3552 bp, Homo sapiens
tagctagtagaggccccgtgttgatcggacgaggccttccagtccctgcatatcgtcatgttgggcttggactcggccggcaagaccacggtgctctaccggctcaagttcaacgagttcgtgaacacggtgcccaccatcggcttcaacaccgagaagatcaagctgagcaacggcacggccaagggcatcagctgccacttctgggacgtgggcggccaggagaagctgcggccgctgtggaagtcctacagccgctgcacggacggcatcatctacgtggtggactcggtggacgtggaccggctggaggaggccaagacggagctgcacaaggtgaccaagttcgccgagaaccagggcacgccgctgctggtcatcgccaacaagcaggacctgcccaagtcgctgccggtggcagagattgagaagcagctggcgctgcacgagcttatcccggccaccacctatcacgtccagccggcgtgcgccatcatcggcgagggcctcaccgagggcatggacaagctctatgagatgatcctgaaacgcaggaagtccctcaagcagaagaagaagcggtaatgcgcccggagcgaccggggagcgagcgagtgcgtcaagaaagaatgaatggatggatggatggttggatggatggatggatggatgagcgagaacccgcgcccgcgaacaaagagcgaaccaaagcgatgcttcgaatttttaaaacggaatctctgcacccaaatgcaggactggtgacttaaggagctgcgaagtctgatttaccggcctactctcgacctgccccccacccccagctcaggggaccttttgtctgaacgccagagctactgaccaggtcggggggccgcggtggggagtggaagagccggtcctgctgtccgccctcccagccccaggtggaaggctcagttgtcggaaagacaaaagcgatttcttcccactcctgcagggccagaagttcaggctgccccgcctccactgggggatcgcacctgtgaattacctgaggtatgcatttcccagaaccgtgggcgtacccaccttggggggcatgttggttctggggggaccacctctccttgcattcaggggctgtgaagctgagtaattttcggtcacagggcaggcccctgttgaaatttcatttgtcctgctctgggcccaaaggtggtggtggtttgggtcatcagaggactgcctgggacggttcagcgggcacggagcgctgtgctggcctggctggggatggccgcggaggtgcccttttcctggtgctttgtggtggctgcagaagaccagttttgttgagaactgcttttcagcctggaatcagacatcttccagatggtttggaccctgtccatgtgtaggtcattatcacacaaagagaccaataaaaataaaaaaaataaaaaaaaaaaaagacgaactattggaggtggtggccaatgatgcatttactgtttgcaggatagttaaaggtgtttaaagggtaaggcttttggtgtaaatgctggatggggtgtgtgtgtgtgtggatatagggacctccctctgtactgtgtactgtgtaatcggcattaatacctagactcatatgtatggaattttaaattctcttagcctactgattggtttggatgagcacaccagctgcaggtgtgtgctgaattgcaagatggtatttttttttttaaccaagggatgtctcttgtaatactaaccgcgtgataatgggttttcagacatgatgaaaaaaaaaaacttttacaaatgaatacttaccttagaaatattcaccttaggaaaaaagactttgctctgcccttttatattcctttatgctgcaagtggtgacatgttcagatttctaatttggttcattgtggcctatctggtttaagtctttcattaaaaatgtctcgttagagtatttgatgtcatgcaccaaaaaaataaaaccccaccttgttgcaaaagctgacctcgttgcatggaattaaaagagaaggaaaaacacaaggatgaagtctttccgaattcattcttgtgggaactggccttcggagccagccagcactttgggcaaatgcaaacaacaatgagtgcttgagataaaagaaagtgtgacgtcatggtcactggtactcaggcacttcacagtttacttgaaagaggctttggaaaatagataaagtgaaagaagaataaatacatatttttaataatgtaattttaaaaatcctttataatcaggactgagtcttggtttgcagaagctgtcacttaccctgaaacacagtatcaaaagggaaacttaaaacatactgtttgatttttttatttcctcttacaatccatgttttcaggtagaattatgactttccccccattgttacacatttctttacaaaggaggcctgtagaaattggacacgatcatgcttgagcatgtgagttagtcaaattatgagtccctgcctattgtccattacacaccgaatgttaatttaagaaccagaggcagaagttctggcttcctgcttgaaacccaattcttatatgaaattttttaaaagcagaaacctagcagcccatctgctttttctcttttgtcggtgtatttggtacccctccaatgctggtctttttgtagaaactcagtagagaaagtctagctaagcagtgttgaaaagcctgcaagatttcagtttacatatcgacagcatatccactgatttctaaatgggctggtcccatcatctgaagattctgtatagaattattaaaaaaaaaatccatctttctttattttcttcacatgcgacaatttcttaagcactttgacattttggtagttccacactattgagagaataatatatttattttgtgacattgcagatgccaaatactgtaaccttctcatgataacaatacttaggttcaagatcactgttcaaaccctgtcatgctttaaaactgatgcgagatgattttgttttttgcataatcaatacttaagggtgcaatcaactgttagtaattgtgcagtaaagtaaagccctgtggtgtatcaactactagttaagagtctcagttgatttctgtaatgtttgacctaataatagcccgtttcgtctctgacccaacagaggaagcacagatcaaatcaccttggagtggtcaccagggggacagggagccccccaccaatgtatcaatgggtgatttatgatgccttctgccctttggcgagtgaatgggtttcccataggggaagttggcctccctccgtgagctttggaaatgttttctaatagacacagggaggccagttctgtttcagagcaattatcttcccaaattctctgttctggtgttggaactgtgtgccctggtttctgttttcctttctactgctgtaattctctgtctcatcatccttctcttttgtttccatagccttttataatgcatatatgatgctgtgaacagaaataaattatttatacaatcaaa

SEQ ID NO: 78583 - DNA, 4610 bp, Homo sapiens
gtgaggctgccgagcggacagcgactcccggggaagcccgcgctccgggagcgggagcgggagcaggagcaggagcagcgccgtcccaggccagaggcgagcgccgggcgccgggagagcggagagcccgggcagctgccggagcgcgggggcgcggcccgaggaaaccacagagcgagcccaggcctggggagggcgccgaacatctgaggcggcttcgcgggagacaaagccgcgcgtagagacgcgatgcccgccgatcgcgagcccggccggcgagggcgcggggactgcggcgtctgagcgcgccaagccgtgcgcccgcggggacgccgagccccggggccggtgcgggcggcggcgggcggggcccaggtgcgcccggccgcgtcgggcccgtgactgctcggggggcggcgccctcccgccgcagccgcagtggctggcgccgcagccaggagccatgggcaacatctcctctaacatctcggccttccagtccctgcatatcgtcatgttgggcttggactcggccggcaagaccacggtgctctaccggctcaagttcaacgagttcgtgaacacggtgcccaccatcggcttcaacaccgagaagatcaagctgagcaacggcacggccaagggcatcagctgccacttctgggacgtgggcggccaggagaagctgcggccgctgtggaagtcctacagccgctgcacggacggcatcatctacgtggtggactcggtggacgtggaccggctggaggaggccaagacggagctgcacaaggtgaccaagttcgccgagaaccagggcacgccgctgctggtcatcgccaacaagcaggacctgcccaagtcgctgccggtggcagagattgagaagcagctggcgctgcacgagcttatcccggccaccacctatcacgtccagccggcgtgcgccatcatcggcgagggcctcaccgagggcatggacaagctctatgagatgatcctgaaacgcaggaagtccctcaagcagaagaagaagcggtaatgcgcccggagcgaccggggagcgagcgagtgcgtcaagaaagaatgaatggatggatggatggttggatggatggatggatggatgagcgagaacccgcgcccgcgaacaaagagcgaaccaaagcgatgcttcgaatttttaaaacggaatctctgcacccaaatgcaggactggtgacttaaggagctgcgaagtctgatttaccggcctactctcgacctgccccccacccccagctcaggggaccttttgtctgaacgccagagctactgaccaggtcggggggccgcggtggggagtggaagagccggtcctgctgtccgccctcccagccccaggtggaaggctcagttgtcggaaagacaaaagcgatttcttcccactcctgcagggccagaagttcaggctgccccgcctccactgggggatcgcacctgtgaattacctgaggtatgcatttcccagaaccgtgggcgtacccaccttggggggcatgttggttctggggggaccacctctccttgcattcaggggctgtgaagctgagtaattttcggtcacagggcaggcccctgttgaaatttcatttgtcctgctctgggcccaaaggtggtggtggtttgggtcatcagaggactgcctgggacggttcagcgggcacggagcgctgtgctggcctggctggggatggccgcggaggtgcccttttcctggtgctttgtggtggctgcagaagaccagttttgttgagaactgcttttcagcctggaatcagacatcttccagatggtttggaccctgtccatgtgtaggtcattatcacacaaagagaccaataaaaataaaaaaaataaaaaaaaaaaaagacgaactattggaggtggtggccaatgatgcatttactgtttgcaggatagttaaaggtgtttaaagggtaaggcttttggtgtaaatgctggatggggtgtgtgtgtgtgtggatatagggacctccctctgtactgtgtactgtgtaatcggcattaatacctagactcatatgtatggaattttaaattctcttagcctactgattggtttggatgagcacaccagctgcaggtgtgtgctgaattgcaagatggtatttttttttttaaccaagggatgtctcttgtaatactaaccgcgtgataatgggttttcagacatgatgaaaaaaaaaaacttttacaaatgaatacttaccttagaaatattcaccttaggaaaaaagactttgctctgcccttttatattcctttatgctgcaagtggtgacatgttcagatttctaatttggttcattgtggcctatctggtttaagtctttcattaaaaatgtctcgttagagtatttgatgtcatgcaccaaaaaaataaaaccccaccttgttgcaaaagctgacctcgttgcatggaattaaaagagaaggaaaaacacaaggatgaagtctttccgaattcattcttgtgggaactggccttcggagccagccagcactttgggcaaatgcaaacaacaatgagtgcttgagataaaagaaagtgtgacgtcatggtcactggtactcaggcacttcacagtttacttgaaagaggctttggaaaatagataaagtgaaagaagaataaatacatatttttaataatgtaattttaaaaatcctttataatcaggactgagtcttggtttgcagaagctgtcacttaccctgaaacacagtatcaaaagggaaacttaaaacatactgtttgatttttttatttcctcttacaatccatgttttcaggtagaattatgactttccccccattgttacacatttctttacaaaggaggcctgtagaaattggacacgatcatgcttgagcatgtgagttagtcaaattatgagtccctgcctattgtccattacacaccgaatgttaatttaagaaccagaggcagaagttctggcttcctgcttgaaacccaattcttatatgaaattttttaaaagcagaaacctagcagcccatctgctttttctcttttgtcggtgtatttggtacccctccaatgctggtctttttgtagaaactcagtagagaaagtctagctaagcagtgttgaaaagcctgcaagatttcagtttacatatcgacagcatatccactgatttctaaatgggctggtcccatcatctgaagattctgtatagaattattaaaaaaaaaatccatctttctttattttcttcacatgcgacaatttcttaagcactttgacattttggtagttccacactattgagagaataatatatttattttgtgacattgcagatgccaaatactgtaaccttctcatgataacaatacttaggttcaagatcactgttcaaaccctgtcatgctttaaaactgatgcgagatgattttgttttttgcataatcaatacttaagggtgcaatcaactgttagtaattgtgcagtaaagtaaagccctgtggtgtatcaactactagttaagagtctcagttgatttctgtaatgtttgacctaataatagcccgtttcgtctctgacccaacagaggaagcacagatcaaatcaccttggagtggtcaccagggggacagggagccccccaccaatgtatcaatgggtgatttatgatgccttctgccctttggcgagtgaatgggtttcccataggggaagttggcctccctccgtgagctttggaaatgttttctaatagacacagggaggccagttctgtttcagagcaattatcttcccaaattctctgttctggtgttggaactgtgtgccctggtttctgttttcctttctactgctgtaattctctgtctcatcatccttctcttttgtttccatagccttttataatgcatatatgatgctgtgaacagaaataaattatttatacaatcaaaaaaacaaaacaaacaaaaacaaaacacacaacaaacaacacaaacaaaacaaaaacaaacaaaacaaacacacaaacacaacaaacaaacaaaagagatgctgtggcgcgccgcgcgcgccgcgcgcgcgcgccgcacagcagaggatcgcgatcttctctatagacacacacaacatgctctgcgtgtgtggcgcgcgcgcgcgcgcgcggcccccccaagcagggagccgtgagtgaagagagagagagacgtggtgccctcactaggggggcgtgctcctgtccgagagagcagagacagcccgcgcgtgcagccgtaaacaaacacagagtggggggcgagtgtagcctctccccccaaccacacaaaaaaacaagaacagccgcgcgcgcgcgggagagagcaccaaagaagcgctggggggaggtgtgcagagagacgcacaaccaccgctctcgcgacggcgcgggggtgtggtatcgagagagagggagtcaactaactcggtgggcgttgcgtactctaatagccaggggaggggacggccacacagcggagcgagcgacggccccgcgatcaaataagaaattatcccgcc

SEQ ID NO: 78584 - DNA, 3377 bp, Homo sapiens
tcagctcggtaccggcttagaagctggcaggtgacgtgggcggccaggagaagctgcggccgctgtggaagtcctacagccgctgcacggacggcatcatctacgtggtggactcggtggacgtggaccggctggaggaggccaagacggagctgcacaaggtgaccaagttcgccgagaaccagggcacgccgctgctggtcatcgccaacaagcaggacctgcccaagtcgctgccggtggcagagattgagaagcagctggcgctgcacgagcttatcccggccaccacctatcacgtccagccggcgtgcgccatcatcggcgagggcctcaccgagggcatggacaagctctatgagatgatcctgaaacgcaggaagtccctcaagcagaagaagaagcggtaatgcgcccggagcgaccggggagcgagcgagtgcgtcaagaaagaatgaatggatggatggatggttggatggatggatggatggatgagcgagaacccgcgcccgcgaacaaagagcgaaccaaagcgatgcttcgaatttttaaaacggaatctctgcacccaaatgcaggactggtgacttaaggagctgcgaagtctgatttaccggcctactctcgacctgccccccacccccagctcaggggaccttttgtctgaacgccagagctactgaccaggtcggggggccgcggtggggagtggaagagccggtcctgctgtccgccctcccagccccaggtggaaggctcagttgtcggaaagacaaaagcgatttcttcccactcctgcagggccagaagttcaggctgccccgcctccactgggggatcgcacctgtgaattacctgaggtatgcatttcccagaaccgtgggcgtacccaccttggggggcatgttggttctggggggaccacctctccttgcattcaggggctgtgaagctgagtaattttcggtcacagggcaggcccctgttgaaatttcatttgtcctgctctgggcccaaaggtggtggtggtttgggtcatcagaggactgcctgggacggttcagcgggcacggagcgctgtgctggcctggctggggatggccgcggaggtgcccttttcctggtgctttgtggtggctgcagaagaccagttttgttgagaactgcttttcagcctggaatcagacatcttccagatggtttggaccctgtccatgtgtaggtcattatcacacaaagagaccaataaaaataaaaaaaataaaaaaaaaaaaagacgaactattggaggtggtggccaatgatgcatttactgtttgcaggatagttaaaggtgtttaaagggtaaggcttttggtgtaaatgctggatggggtgtgtgtgtgtgtggatatagggacctccctctgtactgtgtactgtgtaatcggcattaatacctagactcatatgtatggaattttaaattctcttagcctactgattggtttggatgagcacaccagctgcaggtgtgtgctgaattgcaagatggtatttttttttttaaccaagggatgtctcttgtaatactaaccgcgtgataatgggttttcagacatgatgaaaaaaaaaaacttttacaaatgaatacttaccttagaaatattcaccttaggaaaaaagactttgctctgcccttttatattcctttatgctgcaagtggtgacatgttcagatttctaatttggttcattgtggcctatctggtttaagtctttcattaaaaatgtctcgttagagtatttgatgtcatgcaccaaaaaaataaaaccccaccttgttgcaaaagctgacctcgttgcatggaattaaaagagaaggaaaaacacaaggatgaagtctttccgaattcattcttgtgggaactggccttcggagccagccagcactttgggcaaatgcaaacaacaatgagtgcttgagataaaagaaagtgtgacgtcatggtcactggtactcaggcacttcacagtttacttgaaagaggctttggaaaatagataaagtgaaagaagaataaatacatatttttaataatgtaattttaaaaatcctttataatcaggactgagtcttggtttgcagaagctgtcacttaccctgaaacacagtatcaaaagggaaacttaaaacatactgtttgatttttttatttcctcttacaatccatgttttcaggtagaattatgactttccccccattgttacacatttctttacaaaggaggcctgtagaaattggacacgatcatgcttgagcatgtgagttagtcaaattatgagtccctgcctattgtccattacacaccgaatgttaatttaagaaccagaggcagaagttctggcttcctgcttgaaacccaattcttatatgaaattttttaaaagcagaaacctagcagcccatctgctttttctcttttgtcggtgtatttggtacccctccaatgctggtctttttgtagaaactcagtagagaaagtctagctaagcagtgttgaaaagcctgcaagatttcagtttacatatcgacagcatatccactgatttctaaatgggctggtcccatcatctgaagattctgtatagaattattaaaaaaaaaatccatctttctttattttcttcacatgcgacaatttcttaagcactttgacattttggtagttccacactattgagagaataatatatttattttgtgacattgcagatgccaaatactgtaaccttctcatgataacaatacttaggttcaagatcactgttcaaaccctgtcatgctttaaaactgatgcgagatgattttgttttttgcataatcaatacttaagggtgcaatcaactgttagtaattgtgcagtaaagtaaagccctgtggtgtatcaactactagttaagagtctcagttgatttctgtaatgtttgacctaataatagcccgtttcgtctctgacccaacagaggaagcacagatcaaatcaccttggagtggtcaccagggggacagggagccccccaccaatgtatcaatgggtgatttatgatgccttctgccctttggcgagtgaatgggtttcccataggggaagttggcctccctccgtgagctttggaaatgttttctaatagacacagggaggccagttctgtttcagagcaattatcttcccaaattctctgttctggtgttggaactgtgtgccctggtttctgttttcctttctactgctgtaattctctgtctcatcatccttctcttttgtttccatagccttttataatgcatatatgatgctgtgaacagaaataaattatttatacaatcaaa

SEQ ID NO: 78585 - DNA, 3834 bp, Homo sapiens
gtgaggctgccgagcggacagcgactcccggggaagcccgcgctccgggagcgggagcgggagcaggagcaggagcagcgccgtcccaggccagaggcgagcgccgggcgccgggagagcggagagcccgggcagctgccggagcgcgggggcgcggcccgaggaaaccacagagcgagcccaggcctggggagggcgccgaacatctgaggcggcttcgcgggagacaaagccgcgcgtagagacgcgatgcccgccgatcgcgagcccggccggcgagggcgcggggactgcggcgtctgagcgcgccaagccgtgcgcccgcggggacgccgagccccggggccggtgcgggcggcggcgggcggggcccaggtgcgcccggccgcgtcgggcccgtgactgctcggggggcggcgccctcccgccgcagccgcagtggctggcgccgcagccaggagccatgggcaacatctcctctaacatctcggccttccagtccctgcatatcgtcatgttgggcttggactcggccggcaagaccacggtgctctaccggctcaagttcaacgagttcgtgaacacggtgcccaccatcggcttcaacaccgagaagatcaagctgagcaacggcacggccaagggcatcagctgccacttctgggacgtgggcggccaggagaagctgcggccgctgtggaagtcctacagccgctgcacggacggcatcatctacgtggtggactcggtggacgtggaccggctggaggaggccaagacggagctgcacaaggtgaccaagttcgccgagaaccagggcacgccgctgctggtcatcgccaacaagcaggacctgcccaagtcgctgccggtggcagagattgagaagcagctggcgctgcacgagcttatcccggccaccacctatcacgtccagccggcgtgcgccatcatcggcgagggcctcaccgagggcatggacaagctctatgagatgatcctgaaacgcaggaagtccctcaagcagaagaagaagcggactggtgacttaaggagctgcgaagtctgatttaccggcctactctcgacctgccccccacccccagctcaggggaccttttgtctgaacgccagagctactgaccaggtcggggggccgcggtggggagtggaagagccggtcctgctgtccgccctcccagccccaggtggaaggctcagttgtcggaaagacaaaagcgatttcttcccactcctgcagggccagaagttcaggctgccccgcctccactgggggatcgcacctgtgaattacctgaggtatgcatttcccagaaccgtgggcgtacccaccttggggggcatgttggttctggggggaccacctctccttgcattcaggggctgtgaagctgagtaattttcggtcacagggcaggcccctgttgaaatttcatttgtcctgctctgggcccaaaggtggtggtggtttgggtcatcagaggactgcctgggacggttcagcgggcacggagcgctgtgctggcctggctggggatggccgcggaggtgcccttttcctggtgctttgtggtggctgcagaagaccagttttgttgagaactgcttttcagcctggaatcagacatcttccagatggtttggaccctgtccatgtgtaggtcattatcacacaaagagaccaataaaaataaaaaaaataaaaaaaaaaaaagacgaactattggaggtggtggccaatgatgcatttactgtttgcaggatagttaaaggtgtttaaagggtaaggcttttggtgtaaatgctggatggggtgtgtgtgtgtgtggatatagggacctccctctgtactgtgtactgtgtaatcggcattaatacctagactcatatgtatggaattttaaattctcttagcctactgattggtttggatgagcacaccagctgcaggtgtgtgctgaattgcaagatggtatttttttttttaaccaagggatgtctcttgtaatactaaccgcgtgataatgggttttcagacatgatgaaaaaaaaaaacttttacaaatgaatacttaccttagaaatattcaccttaggaaaaaagactttgctctgcccttttatattcctttatgctgcaagtggtgacatgttcagatttctaatttggttcattgtggcctatctggtttaagtctttcattaaaaatgtctcgttagagtatttgatgtcatgcaccaaaaaaataaaaccccaccttgttgcaaaagctgacctcgttgcatggaattaaaagagaaggaaaaacacaaggatgaagtctttccgaattcattcttgtgggaactggccttcggagccagccagcactttgggcaaatgcaaacaacaatgagtgcttgagataaaagaaagtgtgacgtcatggtcactggtactcaggcacttcacagtttacttgaaagaggctttggaaaatagataaagtgaaagaagaataaatacatatttttaataatgtaattttaaaaatcctttataatcaggactgagtcttggtttgcagaagctgtcacttaccctgaaacacagtatcaaaagggaaacttaaaacatactgtttgatttttttatttcctcttacaatccatgttttcaggtagaattatgactttccccccattgttacacatttctttacaaaggaggcctgtagaaattggacacgatcatgcttgagcatgtgagttagtcaaattatgagtccctgcctattgtccattacacaccgaatgttaatttaagaaccagaggcagaagttctggcttcctgcttgaaacccaattcttatatgaaattttttaaaagcagaaacctagcagcccatctgctttttctcttttgtcggtgtatttggtacccctccaatgctggtctttttgtagaaactcagtagagaaagtctagctaagcagtgttgaaaagcctgcaagatttcagtttacatatcgacagcatatccactgatttctaaatgggctggtcccatcatctgaagattctgtatagaattattaaaaaaaaaatccatctttctttattttcttcacatgcgacaatttcttaagcactttgacattttggtagttccacactattgagagaataatatatttattttgtgacattgcagatgccaaatactgtaaccttctcatgataacaatacttaggttcaagatcactgttcaaaccctgtcatgctttaaaactgatgcgagatgattttgttttttgcataatcaatacttaagggtgcaatcaactgttagtaattgtgcagtaaagtaaagccctgtggtgtatcaactactagttaagagtctcagttgatttctgtaatgtttgacctaataatagcccgtttcgtctctgacccaacagaggaagcacagatcaaatcaccttggagtggtcaccagggggacagggagccccccaccaatgtatcaatgggtgatttatgatgccttctgccctttggcgagtgaatgggtttcccataggggaagttggcctccctccgtgagctttggaaatgttttctaatagacacagggaggccagttctgtttcagagcaattatcttcccaaattctctgttctggtgttggaactgtgtgccctggtttctgttttcctttctactgctgtaattctctgtctcatcatccttctcttttgtttccatagccttttataatgcatatatgatgctgtgaacagaaataaattatttatacaatcaaa

SEQ ID NO: 78586 - DNA, 2799 bp, Homo sapiens
  misc_feature (38)..(38): n is a, c, g, or t
gctgtattttaatatatctcctccacaagagctgagcnctccttaagagcagggacttcccccacccccagctcaggggaccttttgtctgaacgccagagctactgaccaggtcggggggccgcggtggggagtggaagagccggtcctgctgtccgccctcccagccccaggtggaaggctcagttgtcggaaagacaaaagcgatttcttcccactcctgcagggccagaagttcaggctgccccgcctccactgggggatcgcacctgtgaattacctgaggtatgcatttcccagaaccgtgggcgtacccaccttggggggcatgttggttctggggggaccacctctccttgcattcaggggctgtgaagctgagtaattttcggtcacagggcaggcccctgttgaaatttcatttgtcctgctctgggcccaaaggtggtggtggtttgggtcatcagaggactgcctgggacggttcagcgggcacggagcgctgtgctggcctggctggggatggccgcggaggtgcccttttcctggtgctttgtggtggctgcagaagaccagttttgttgagaactgcttttcagcctggaatcagacatcttccagatggtttggaccctgtccatgtgtaggtcattatcacacaaagagaccaataaaaataaaaaaaataaaaaaaaaaaaagacgaactattggaggtggtggccaatgatgcatttactgtttgcaggatagttaaaggtgtttaaagggtaaggcttttggtgtaaatgctggatggggtgtgtgtgtgtgtggatatagggacctccctctgtactgtgtactgtgtaatcggcattaatacctagactcatatgtatggaattttaaattctcttagcctactgattggtttggatgagcacaccagctgcaggtgtgtgctgaattgcaagatggtatttttttttttaaccaagggatgtctcttgtaatactaaccgcgtgataatgggttttcagacatgatgaaaaaaaaaaacttttacaaatgaatacttaccttagaaatattcaccttaggaaaaaagactttgctctgcccttttatattcctttatgctgcaagtggtgacatgttcagatttctaatttggttcattgtggcctatctggtttaagtctttcattaaaaatgtctcgttagagtatttgatgtcatgcaccaaaaaaataaaaccccaccttgttgcaaaagctgacctcgttgcatggaattaaaagagaaggaaaaacacaaggatgaagtctttccgaattcattcttgtgggaactggccttcggagccagccagcactttgggcaaatgcaaacaacaatgagtgcttgagataaaagaaagtgtgacgtcatggtcactggtactcaggcacttcacagtttacttgaaagaggctttggaaaatagataaagtgaaagaagaataaatacatatttttaataatgtaattttaaaaatcctttataatcaggactgagtcttggtttgcagaagctgtcacttaccctgaaacacagtatcaaaagggaaacttaaaacatactgtttgatttttttatttcctcttacaatccatgttttcaggtagaattatgactttccccccattgttacacatttctttacaaaggaggcctgtagaaattggacacgatcatgcttgagcatgtgagttagtcaaattatgagtccctgcctattgtccattacacaccgaatgttaatttaagaaccagaggcagaagttctggcttcctgcttgaaacccaattcttatatgaaattttttaaaagcagaaacctagcagcccatctgctttttctcttttgtcggtgtatttggtacccctccaatgctggtctttttgtagaaactcagtagagaaagtctagctaagcagtgttgaaaagcctgcaagatttcagtttacatatcgacagcatatccactgatttctaaatgggctggtcccatcatctgaagattctgtatagaattattaaaaaaaaaatccatctttctttattttcttcacatgcgacaatttcttaagcactttgacattttggtagttccacactattgagagaataatatatttattttgtgacattgcagatgccaaatactgtaaccttctcatgataacaatacttaggttcaagatcactgttcaaaccctgtcatgctttaaaactgatgcgagatgattttgttttttgcataatcaatacttaagggtgcaatcaactgttagtaattgtgcagtaaagtaaagccctgtggtgtatcaactactagttaagagtctcagttgatttctgtaatgtttgacctaataatagcccgtttcgtctctgacccaacagaggaagcacagatcaaatcaccttggagtggtcaccagggggacagggagccccccaccaatgtatcaatgggtgatttatgatgccttctgccctttggcgagtgaatgggtttcccataggggaagttggcctccctccgtgagctttggaaatgttttctaatagacacagggaggccagttctgtttcagagcaattatcttcccaaattctctgttctggtgttggaactgtgtgccctggtttctgttttcctttctactgctgtaattctctgtctcatcatccttctcttttgtttccatagccttttataatgcatatatgatgctgtgaacagaaataaattatttatacaatcaaa

SEQ ID NO: 78587 - DNA, 1924 bp, Homo sapiens
gtgaggctgccgagcggacagcgactcccggggaagcccgcgctccgggagcgggagcgggagcaggagcaggagcagcgccgtcccaggccagaggcgagcgccgggcgccgggagagcggagagcccgggcagctgccggagcgcgggggcgcggcccgaggaaaccacagagcgagcccaggcctggggagggcgccgaacatctgaggcggcttcgcgggagacaaagccgcgcgtagagacgcgatgcccgccgatcgcgagcccggccggcgagggcgcggggactgcggcgtctgagcgcgccaagccgtgcgcccgcggggacgccgagccccggggccggtgcgggcggcggcgggcggggcccaggtgcgcccggccgcgtcgggcccgtgactgctcggggggcggcgccctcccgccgcagccgcagtggctggcgccgcagccaggagccatgggcaacatctcctctaacatctcggccttccagtccctgcatatcgtcatgttgggcttggactcggccggcaagaccacggtgctctaccggctcaagttcaacgagttcgtgaacacggtgcccaccatcggcttcaacaccgagaagatcaagctgagcaacggcacggccaagggcatcagctgccacttctgggacgtgggcggccaggagaagctgcggccgctgtggaagtcctacagccgctgcacggacggcatcatctacgtggtggactcggtggacgtggaccggctggaggaggccaagacggagctgcacaaggtgaccaagttcgccgagaaccagggcacgccgctgctggtcatcgccaacaagcaggacctgcccaagtcgctgccggtggcagagattgagaagcagctggcgctgcacgagcttatcccggccaccacctatcacgtccagccggcgtgcgccatcatcggcgagggcctcaccgagggcatggacaagctctatgagatgatcctgaaacgcaggaagtccctcaagcagaagaagaagcggtaatgcgcccggagcgaccggggagcgagcgagtgcgtcaagaaagaatgaatggatggatggatggttggatggatggatggatggatgagcgagaacccgcgcccgcgaacaaagagcgaaccaaagcgatgcttcgaatttttaaaacggaatctctgcacccaaatgcaggactggtgacttaaggagctgcgaagtctgatttaccggcctactctcgacctgccccccacccccagctcaggggaccttttgtctgaacgccagagctactgaccaggtcggggggccgcggtggggagtggaagagccggtcctgctgtccgccctcccagccccaggtggaaggctcagttgtcggaaagacaaaagcgatttcttcccactcctgcagggccagaagttcaggctgccccgcctccactgggggatcgcacctgtgaattacctgaggtatgcatttcccagaaccgtgggcgtacccaccttggggggcatgttggttctggggggaccacctctccttgcattcaggggctgtgaagctgagtaattttcggtcacagggcaggcccctgttgaaatttcatttgtcctgctctgggcccaaaggtggtggtggtttgggtcatcagaggactgcctgggacggttcagcgggcacggagcgctgtgctggcctggctggggatggccgcggaggtgcccttttcctggtgctttgtggtggctgcagaagaccagttttgttgagaactgcttttcagcctggaatcagacatcttccagatggtttggaccctgtccatgtgtaggtcattatcacacaaagagaccaataaaaatgcactactccaacaacttacccacaacacaaccgag

SEQ ID NO: 78588 - DNA, 2390 bp, Homo sapiens
attaaatggtttggctaaggttgtctggtagtaaggtggtggtggtttgggtcatcagaggactgcctgggacggttcagcgggcacggagcgctgtgctggcctggctggggatggccgcggaggtgcccttttcctggtgctttgtggtggctgcagaagaccagttttgttgagaactgcttttcagcctggaatcagacatcttccagatggtttggaccctgtccatgtgtaggtcattatcacacaaagagaccaataaaaataaaaaaaataaaaaaaaaaaaagacgaactattggaggtggtggccaatgatgcatttactgtttgcaggatagttaaaggtgtttaaagggtaaggcttttggtgtaaatgctggatggggtgtgtgtgtgtgtggatatagggacctccctctgtactgtgtactgtgtaatcggcattaatacctagactcatatgtatggaattttaaattctcttagcctactgattggtttggatgagcacaccagctgcaggtgtgtgctgaattgcaagatggtatttttttttttaaccaagggatgtctcttgtaatactaaccgcgtgataatgggttttcagacatgatgaaaaaaaaaaacttttacaaatgaatacttaccttagaaatattcaccttaggaaaaaagactttgctctgcccttttatattcctttatgctgcaagtggtgacatgttcagatttctaatttggttcattgtggcctatctggtttaagtctttcattaaaaatgtctcgttagagtatttgatgtcatgcaccaaaaaaataaaaccccaccttgttgcaaaagctgacctcgttgcatggaattaaaagagaaggaaaaacacaaggatgaagtctttccgaattcattcttgtgggaactggccttcggagccagccagcactttgggcaaatgcaaacaacaatgagtgcttgagataaaagaaagtgtgacgtcatggtcactggtactcaggcacttcacagtttacttgaaagaggctttggaaaatagataaagtgaaagaagaataaatacatatttttaataatgtaattttaaaaatcctttataatcaggactgagtcttggtttgcagaagctgtcacttaccctgaaacacagtatcaaaagggaaacttaaaacatactgtttgatttttttatttcctcttacaatccatgttttcaggtagaattatgactttccccccattgttacacatttctttacaaaggaggcctgtagaaattggacacgatcatgcttgagcatgtgagttagtcaaattatgagtccctgcctattgtccattacacaccgaatgttaatttaagaaccagaggcagaagttctggcttcctgcttgaaacccaattcttatatgaaattttttaaaagcagaaacctagcagcccatctgctttttctcttttgtcggtgtatttggtacccctccaatgctggtctttttgtagaaactcagtagagaaagtctagctaagcagtgttgaaaagcctgcaagatttcagtttacatatcgacagcatatccactgatttctaaatgggctggtcccatcatctgaagattctgtatagaattattaaaaaaaaaatccatctttctttattttcttcacatgcgacaatttcttaagcactttgacattttggtagttccacactattgagagaataatatatttattttgtgacattgcagatgccaaatactgtaaccttctcatgataacaatacttaggttcaagatcactgttcaaaccctgtcatgctttaaaactgatgcgagatgattttgttttttgcataatcaatacttaagggtgcaatcaactgttagtaattgtgcagtaaagtaaagccctgtggtgtatcaactactagttaagagtctcagttgatttctgtaatgtttgacctaataatagcccgtttcgtctctgacccaacagaggaagcacagatcaaatcaccttggagtggtcaccagggggacagggagccccccaccaatgtatcaatgggtgatttatgatgccttctgccctttggcgagtgaatgggtttcccataggggaagttggcctccctccgtgagctttggaaatgttttctaatagacacagggaggccagttctgtttcagagcaattatcttcccaaattctctgttctggtgttggaactgtgtgccctggtttctgttttcctttctactgctgtaattctctgtctcatcatccttctcttttgtttccatagccttttataatgcatatatgatgctgtgaacagaaataaattatttatacaatcaaa

SEQ ID NO: 78589 - DNA, 2517 bp, Homo sapiens
  misc_feature (116)..(116): n is a, c, g, or t
  misc_feature (170)..(170): n is a, c, g, or t
  misc_feature (191)..(192): n is a, c, g, or t
gaatcccagcactttgggagcccaagggaagagtatcccttgagcccaggagtttgagactagcctgggaaatacagggagaccttgtctcaaaaaaacatcccacaaaaccatgnccgggcacggtggttcatgcctgtaatcccagcactttgggaggccaagggagncagatcacttgaggtcagganntcgagaccagcctggccaacatggcaaaccccgtctttaccaaaaatacaaaaattagctgggcatggtggtgtgcacctgtagtcctggttactcaggagtctaaggcgggaggattgcttgtgcctgggaggtcaaggctgcagtgagccatgattgcgccactgcacttcagcctgggcaacaagagtgaaactccgtctcaaaaaaaataaaaaaaaaaaaagacgaactattggaggtggtggccaatgatgcatttactgtttgcaggatagttaaaggtgtttaaagggtaaggcttttggtgtaaatgctggatggggtgtgtgtgtgtgtggatatagggacctccctctgtactgtgtactgtgtaatcggcattaatacctagactcatatgtatggaattttaaattctcttagcctactgattggtttggatgagcacaccagctgcaggtgtgtgctgaattgcaagatggtatttttttttttaaccaagggatgtctcttgtaatactaaccgcgtgataatgggttttcagacatgatgaaaaaaaaaaacttttacaaatgaatacttaccttagaaatattcaccttaggaaaaaagactttgctctgcccttttatattcctttatgctgcaagtggtgacatgttcagatttctaatttggttcattgtggcctatctggtttaagtctttcattaaaaatgtctcgttagagtatttgatgtcatgcaccaaaaaaataaaaccccaccttgttgcaaaagctgacctcgttgcatggaattaaaagagaaggaaaaacacaaggatgaagtctttccgaattcattcttgtgggaactggccttcggagccagccagcactttgggcaaatgcaaacaacaatgagtgcttgagataaaagaaagtgtgacgtcatggtcactggtactcaggcacttcacagtttacttgaaagaggctttggaaaatagataaagtgaaagaagaataaatacatatttttaataatgtaattttaaaaatcctttataatcaggactgagtcttggtttgcagaagctgtcacttaccctgaaacacagtatcaaaagggaaacttaaaacatactgtttgatttttttatttcctcttacaatccatgttttcaggtagaattatgactttccccccattgttacacatttctttacaaaggaggcctgtagaaattggacacgatcatgcttgagcatgtgagttagtcaaattatgagtccctgcctattgtccattacacaccgaatgttaatttaagaaccagaggcagaagttctggcttcctgcttgaaacccaattcttatatgaaattttttaaaagcagaaacctagcagcccatctgctttttctcttttgtcggtgtatttggtacccctccaatgctggtctttttgtagaaactcagtagagaaagtctagctaagcagtgttgaaaagcctgcaagatttcagtttacatatcgacagcatatccactgatttctaaatgggctggtcccatcatctgaagattctgtatagaattattaaaaaaaaaatccatctttctttattttcttcacatgcgacaatttcttaagcactttgacattttggtagttccacactattgagagaataatatatttattttgtgacattgcagatgccaaatactgtaaccttctcatgataacaatacttaggttcaagatcactgttcaaaccctgtcatgctttaaaactgatgcgagatgattttgttttttgcataatcaatacttaagggtgcaatcaactgttagtaattgtgcagtaaagtaaagccctgtggtgtatcaactactagttaagagtctcagttgatttctgtaatgtttgacctaataatagcccgtttcgtctctgacccaacagaggaagcacagatcaaatcaccttggagtggtcaccagggggacagggagccccccaccaatgtatcaatgggtgatttatgatgccttctgccctttggcgagtgaatgggtttcccataggggaagttggcctccctccgtgagctttggaaatgttttctaatagacacagggaggccagttctgtttcagagcaattatcttcccaaattctctgttctggtgttggaactgtgtgccctggtttctgttttcctttctactgctgtaattctctgtctcatcatccttctcttttgtttccatagccttttataatgcatatatgatgctgtgaacagaaataaattatttatacaatcaaa

SEQ ID NO: 78590 - DNA, 1270 bp, Homo sapiens
gtgaggctgccgagcggacagcgactcccggggaagcccgcgctccgggagcgggagcgggagcaggagcaggagcagcgccgtcccaggccagaggcgagcgccgggcgccgggagagcggagagcccgggcagctgccggagcgcgggggcgcggcccgaggaaaccacagagcgagcccaggcctggggagggcgccgaacatctgaggcggcttcgcgggagacaaagccgcgcgtagagacgcgatgcccgccgatcgcgagcccggccggcgagggcgcggggactgcggcgtctgagcgcgccaagccgtgcgcccgcggggacgccgagccccggggccggtgcgggcggcggcgggcggggcccaggtgcgcccggccgcgtcgggcccgtgactgctcggggggcggcgccctcccgccgcagccgcagtggctggcgccgcagccaggagccatgggcaacatctcctctaacatctcggccttccagtccctgcatatcgtcatgttgggcttggactcggccggcaagaccacggtgctctaccggctcaagttcaacgagttcgtgaacacggtgcccaccatcggcttcaacaccgagaagatcaagctgagcaacggcacggccaagggcatcagctgccacttctgggacgtgggcggccaggagaagctgcggccgctgtggaagtcctacagccgctgcacggacggcatcatctacgtggtggactcggtggacgtggaccggctggaggaggccaagacggagctgcacaaggtgaccaagttcgccgagaaccagggcacgccgctgctggtcatcgccaacaagcaggacctgcccaagtcgctgccggtggcagagattgagaagcagctggcgctgcacgagcttatcccggccaccacctatcacgtccagccggcgtgcgccatcatcggcgagggcctcaccgagggcatggacaagctctatgagatgatcctgaaacgcaggaagtccctcaagcagaagaagaagcggtaatgcgcccggagcgaccggggagcgagcgagtgcgtcaagaaagaatgaatggatggatggatggttggatggatggatggatggataatcgtatatttttgccttgttatctagatcttactatatggatattctattttatataatagatttattacattctaattcttgatttgttgtatttgtgtcatgtatattattaattatctttatttatttttgaggtta

SEQ ID NO: 78591 - DNA, 4009 bp, Homo sapiens
gtgaggctgccgagcggacagcgactcccggggaagcccgcgctccgggagcgggagcgggagcaggagcaggagcagcgccgtcccaggccagaggcgagcgccgggcgccgggagagcggagagcccgggcagctgccggagcgcgggggcgcggcccgaggaaaccacagagcgagcccaggcctggggagggcgccgaacatctgaggcggcttcgcgggagacaaagccgcgcgtagagacgcgatgcccgccgatcgcgagcccggccggcgagggcgcggggactgcggcgtctgagcgcgccaagccgtgcgcccgcggggacgccgagccccggggccggtgcgggcggcggcgggcggggcccaggtgcgcccggccgcgtcgggcccgtgactgctcggggggcggcgccctcccgccgcagccgcagtggctggcgccgcagccaggagccatgggcaacatctcctctaacatctcggccttccagtccctgcatatcgtcatgttgggcttggactcggccggcaagaccacggtgctctaccggctcaagttcaacgagttcgtgaacacggtgcccaccatcggcttcaacaccgagaagatcaagctgagcaacggcacggccaagggcatcagctgccacttctgggacgtgggcggccaggagaagctgcggccgctgtggaagtcctacagccgctgcacggacggcatcatctacgtggtggactcggtggacgtggaccggctggaggaggccaagacggagctgcacaaggtgaccaagttcgccgagaaccagggcacgccgctgctggtcatcgccaacaagcaggacctgcccaagtcgctgccggtggcagagattgagaagcagctggcgctgcacgagcttatcccggccaccacctatcacgtccagccggcgtgcgccatcatcggcgagggcctcaccgagggcatggacaagctctatgagatgatcctgaaacgcaggaagtccctcaagcagaagaagaagcggtaatgcgcccggagcgaccggggagcgagcgagtgcgtcaagaaagaatgaatggatggatggatggttggatggatggatggatggatgagcgagaacccgcgcccgcgaacaaagagcgaaccaaagcgatgcttcgaatttttaaaacggaatctctgcacccaaatgcaggactggtgacttaaggagctgcgaagtctgatttaccggcctactctcgacctgccccccacccccagctcaggggaccttttgtctgaacgccagagctactgaccaggtcggggggccgcggtggggagtggaagagccggtcctgctgtccgccctcccagccccaggtggaaggctcagttgtcggaaagacaaaagcgatttcttcccactcctgcagggccagaagttcaggctgccccgcctccactgggggatcgcacctgtgaattacctgaggtatgcatttcccagaaccgtgggcgtacccaccttggggggcatgttggttctggggggaccacctctccttgcattcaggggctgtgaagctgagtaattttcggtcacagggcaggcccctgttgaaatttcatttgtcctgctctgggcccaaaggtggtggtggtttgggtcatcagaggactgcctgggacggttcagcgggcacggagcgctgtgctggcctggctggggatggccgcggaggtgcccttttcctggtgctttgtggtggctgcagaagaccagttttgttgagaactgcttttcagcctggaatcagacatcttccagatggtttggaccctgtccatgtgtaggtcattatcacacaaagagaccaataaaaataaaaaaaataaaaaaaaaaaaagacgaactattggaggtggtggccaatgatgcatttactgtttgcaggatagttaaaggtgtttaaagggtaaggcttttggtgtaaatgctggatggggtgtgtgtgtgtgtggatatagggacctccctctgtactgtgtactgtgtaatcggcattaatacctagactcatatgtatggaattttaaattctcttagcctactgattggtttggatgagcacaccagctgcaggtgtgtgctgaattgcaagatggtatttttttttttaaccaagggatgtctcttgtaatactaaccgcgtgataatgggttttcagacatgatgaaaaaaaaaaacttttacaaatgaatacttaccttagaaatattcaccttaggaaaaaagactttgctctgcccttttatattcctttatgctgcaagtggtgacatgttcagatttctaatttggttcattgtggcctatctggtttaagtctttcattaaaaatgtctcgttagagtatttgatgtcatgcaccaaaaaaataaaaccccaccttgttgcaaaagctgacctcgttgcatggaattaaaagagaaggaaaaacacaaggatgaagtctttccgaattcattcttgtgggaactggccttcggagccagccagcactttgggcaaatgcaaacaacaatgagtgcttgagataaaagaaagtgtgacgtcatggtcactggtactcaggcacttcacagtttacttgaaagaggctttggaaaatagataaagtgaaagaagaataaatacatatttttaataatgtaattttaaaaatcctttataatcaggactgagtcttggtttgcagaagctgtcacttaccctgaaacacagtatcaaaagggaaacttaaaacatactgtttgatttttttatttcctcttacaatccatgttttcaggtagaattatgactttccccccattgttacacatttctttacaaaggaggcctgtagaaattggacacgatcatgcttgagcatgtgagttagtcaaattatgagtccctgcctattgtccattacacaccgaatgttaatttaagaaccagaggcagaagttctggcttcctgcttgaaacccaattcttatatgaaattttttaaaagcagaaacctagcagcccatctgctttttctcttttgtcggtgtatttggtacccctccaatgctggtctttttgtagaaactcagtagagaaagtctagctaagcagtgttgaaaagcctgcaagatttcagtttacatatcgacagcatatccactgatttctaaatgggctggtcccatcatctgaagattctgtatagaattattaaaaaaaaaatccatctttctttattttcttcacatgcgacaatttcttaagcactttgacattttggtagttccacactattgagagaataatatatttattttgtgacattgcagatgccaaatactgtaaccttctcatgataacaatacttaggttcaagatcactgttcaaaccctgtcatgctttaaaactgatgcgagatgattttgttttttgcataatcaatacttaagggtgcaatcaactgttagtaattgtgcagtaaagtaaagccctgtggtgtatcaactactagttaagagtctcagttgatttctgtaatgtttgacctaataatagcccgtttcgtctctgacccaacagaggaagcacagatcaaatcaccttggagtggtcaccagggggacagggagccccccaccaatgtatcaatgggtgatttatgatgccttctgccctttggcgagtgaatgggtttcccataggggaagttggcctccctccgtgagctttggaaatgttttctaatagacacagggaggccagttctgtttcagagcaattatcttcccaaattctctgttctggtgttggaactgtgtgccctggtttctgttttcctttctactgctgtaattctctgtctcatcatccttctcttttgtttccatagccttttataatgcatatatgatgctgtgaacagaaataaattatttatacaatcaaa

SEQ ID NO: 78592 - DNA, 3896 bp, Homo sapiens
gtgaggctgccgagcggacagcgactcccggggaagcccgcgctccgggagcgggagcgggagcaggagcaggagcagcgccgtcccaggccagaggcgagcgccgggcgccgggagagcggagagcccgggcagctgccggagcgcgggggcgcggcccgaggaaaccacagagcgagcccaggcctggggagggcgccgaacatctgaggcggcttcgcgggagacaaagccgcgcgtagagacgcgatgcccgccgatcgcgagcccggccggcgagggcccgtgactgctcggggggcggcgccctcccgccgcagccgcagtggctggcgccgcagccaggagccatgggcaacatctcctctaacatctcggccttccagtccctgcatatcgtcatgttgggcttggactcggccggcaagaccacggtgctctaccggctcaagttcaacgagttcgtgaacacggtgcccaccatcggcttcaacaccgagaagatcaagctgagcaacggcacggccaagggcatcagctgccacttctgggacgtgggcggccaggagaagctgcggccgctgtggaagtcctacagccgctgcacggacggcatcatctacgtggtggactcggtggacgtggaccggctggaggaggccaagacggagctgcacaaggtgaccaagttcgccgagaaccagggcacgccgctgctggtcatcgccaacaagcaggacctgcccaagtcgctgccggtggcagagattgagaagcagctggcgctgcacgagcttatcccggccaccacctatcacgtccagccggcgtgcgccatcatcggcgagggcctcaccgagggcatggacaagctctatgagatgatcctgaaacgcaggaagtccctcaagcagaagaagaagcggtaatgcgcccggagcgaccggggagcgagcgagtgcgtcaagaaagaatgaatggatggatggatggttggatggatggatggatggatgagcgagaacccgcgcccgcgaacaaagagcgaaccaaagcgatgcttcgaatttttaaaacggaatctctgcacccaaatgcaggactggtgacttaaggagctgcgaagtctgatttaccggcctactctcgacctgccccccacccccagctcaggggaccttttgtctgaacgccagagctactgaccaggtcggggggccgcggtggggagtggaagagccggtcctgctgtccgccctcccagccccaggtggaaggctcagttgtcggaaagacaaaagcgatttcttcccactcctgcagggccagaagttcaggctgccccgcctccactgggggatcgcacctgtgaattacctgaggtatgcatttcccagaaccgtgggcgtacccaccttggggggcatgttggttctggggggaccacctctccttgcattcaggggctgtgaagctgagtaattttcggtcacagggcaggcccctgttgaaatttcatttgtcctgctctgggcccaaaggtggtggtggtttgggtcatcagaggactgcctgggacggttcagcgggcacggagcgctgtgctggcctggctggggatggccgcggaggtgcccttttcctggtgctttgtggtggctgcagaagaccagttttgttgagaactgcttttcagcctggaatcagacatcttccagatggtttggaccctgtccatgtgtaggtcattatcacacaaagagaccaataaaaataaaaaaaataaaaaaaaaaaaagacgaactattggaggtggtggccaatgatgcatttactgtttgcaggatagttaaaggtgtttaaagggtaaggcttttggtgtaaatgctggatggggtgtgtgtgtgtgtggatatagggacctccctctgtactgtgtactgtgtaatcggcattaatacctagactcatatgtatggaattttaaattctcttagcctactgattggtttggatgagcacaccagctgcaggtgtgtgctgaattgcaagatggtatttttttttttaaccaagggatgtctcttgtaatactaaccgcgtgataatgggttttcagacatgatgaaaaaaaaaaacttttacaaatgaatacttaccttagaaatattcaccttaggaaaaaagactttgctctgcccttttatattcctttatgctgcaagtggtgacatgttcagatttctaatttggttcattgtggcctatctggtttaagtctttcattaaaaatgtctcgttagagtatttgatgtcatgcaccaaaaaaataaaaccccaccttgttgcaaaagctgacctcgttgcatggaattaaaagagaaggaaaaacacaaggatgaagtctttccgaattcattcttgtgggaactggccttcggagccagccagcactttgggcaaatgcaaacaacaatgagtgcttgagataaaagaaagtgtgacgtcatggtcactggtactcaggcacttcacagtttacttgaaagaggctttggaaaatagataaagtgaaagaagaataaatacatatttttaataatgtaattttaaaaatcctttataatcaggactgagtcttggtttgcagaagctgtcacttaccctgaaacacagtatcaaaagggaaacttaaaacatactgtttgatttttttatttcctcttacaatccatgttttcaggtagaattatgactttccccccattgttacacatttctttacaaaggaggcctgtagaaattggacacgatcatgcttgagcatgtgagttagtcaaattatgagtccctgcctattgtccattacacaccgaatgttaatttaagaaccagaggcagaagttctggcttcctgcttgaaacccaattcttatatgaaattttttaaaagcagaaacctagcagcccatctgctttttctcttttgtcggtgtatttggtacccctccaatgctggtctttttgtagaaactcagtagagaaagtctagctaagcagtgttgaaaagcctgcaagatttcagtttacatatcgacagcatatccactgatttctaaatgggctggtcccatcatctgaagattctgtatagaattattaaaaaaaaaatccatctttctttattttcttcacatgcgacaatttcttaagcactttgacattttggtagttccacactattgagagaataatatatttattttgtgacattgcagatgccaaatactgtaaccttctcatgataacaatacttaggttcaagatcactgttcaaaccctgtcatgctttaaaactgatgcgagatgattttgttttttgcataatcaatacttaagggtgcaatcaactgttagtaattgtgcagtaaagtaaagccctgtggtgtatcaactactagttaagagtctcagttgatttctgtaatgtttgacctaataatagcccgtttcgtctctgacccaacagaggaagcacagatcaaatcaccttggagtggtcaccagggggacagggagccccccaccaatgtatcaatgggtgatttatgatgccttctgccctttggcgagtgaatgggtttcccataggggaagttggcctccctccgtgagctttggaaatgttttctaatagacacagggaggccagttctgtttcagagcaattatcttcccaaattctctgttctggtgttggaactgtgtgccctggtttctgttttcctttctactgctgtaattctctgtctcatcatccttctcttttgtttccatagccttttataatgcatatatgatgctgtgaacagaaataaattatttatacaatcaaa

SEQ ID NO: 78593 - DNA, 3558 bp, Homo sapiens
aaggcatacggacgaggacgggggttaatcaggagaggggccttccagtccctgcatatcgtcatgttgggcttggactcggccggcaagaccacggtgctctaccggctcaagttcaacgagttcgtgaacacggtgcccaccatcggcttcaacaccgagaagatcaagctgagcaacggcacggccaagggcatcagctgccacttctgggacgtgggcggccaggagaagctgcggccgctgtggaagtcctacagccgctgcacggacggcatcatctacgtggtggactcggtggacgtggaccggctggaggaggccaagacggagctgcacaaggtgaccaagttcgccgagaaccagggcacgccgctgctggtcatcgccaacaagcaggacctgcccaagtcgctgccggtggcagagattgagaagcagctggcgctgcacgagcttatcccggccaccacctatcacgtccagccggcgtgcgccatcatcggcgagggcctcaccgagggcatggacaagctctatgagatgatcctgaaacgcaggaagtccctcaagcagaagaagaagcggtaatgcgcccggagcgaccggggagcgagcgagtgcgtcaagaaagaatgaatggatggatggatggttggatggatggatggatggatgagcgagaacccgcgcccgcgaacaaagagcgaaccaaagcgatgcttcgaatttttaaaacggaatctctgcacccaaatgcaggactggtgacttaaggagctgcgaagtctgatttaccggcctactctcgacctgccccccacccccagctcaggggaccttttgtctgaacgccagagctactgaccaggtcggggggccgcggtggggagtggaagagccggtcctgctgtccgccctcccagccccaggtggaaggctcagttgtcggaaagacaaaagcgatttcttcccactcctgcagggccagaagttcaggctgccccgcctccactgggggatcgcacctgtgaattacctgaggtatgcatttcccagaaccgtgggcgtacccaccttggggggcatgttggttctggggggaccacctctccttgcattcaggggctgtgaagctgagtaattttcggtcacagggcaggcccctgttgaaatttcatttgtcctgctctgggcccaaaggtggtggtggtttgggtcatcagaggactgcctgggacggttcagcgggcacggagcgctgtgctggcctggctggggatggccgcggaggtgcccttttcctggtgctttgtggtggctgcagaagaccagttttgttgagaactgcttttcagcctggaatcagacatcttccagatggtttggaccctgtccatgtgtaggtcattatcacacaaagagaccaataaaaataaaaaaaataaaaaaaaaaaaagacgaactattggaggtggtggccaatgatgcatttactgtttgcaggatagttaaaggtgtttaaagggtaaggcttttggtgtaaatgctggatggggtgtgtgtgtgtgtggatatagggacctccctctgtactgtgtactgtgtaatcggcattaatacctagactcatatgtatggaattttaaattctcttagcctactgattggtttggatgagcacaccagctgcaggtgtgtgctgaattgcaagatggtatttttttttttaaccaagggatgtctcttgtaatactaaccgcgtgataatgggttttcagacatgatgaaaaaaaaaaacttttacaaatgaatacttaccttagaaatattcaccttaggaaaaaagactttgctctgcccttttatattcctttatgctgcaagtggtgacatgttcagatttctaatttggttcattgtggcctatctggtttaagtctttcattaaaaatgtctcgttagagtatttgatgtcatgcaccaaaaaaataaaaccccaccttgttgcaaaagctgacctcgttgcatggaattaaaagagaaggaaaaacacaaggatgaagtctttccgaattcattcttgtgggaactggccttcggagccagccagcactttgggcaaatgcaaacaacaatgagtgcttgagataaaagaaagtgtgacgtcatggtcactggtactcaggcacttcacagtttacttgaaagaggctttggaaaatagataaagtgaaagaagaataaatacatatttttaataatgtaattttaaaaatcctttataatcaggactgagtcttggtttgcagaagctgtcacttaccctgaaacacagtatcaaaagggaaacttaaaacatactgtttgatttttttatttcctcttacaatccatgttttcaggtagaattatgactttccccccattgttacacatttctttacaaaggaggcctgtagaaattggacacgatcatgcttgagcatgtgagttagtcaaattatgagtccctgcctattgtccattacacaccgaatgttaatttaagaaccagaggcagaagttctggcttcctgcttgaaacccaattcttatatgaaattttttaaaagcagaaacctagcagcccatctgctttttctcttttgtcggtgtatttggtacccctccaatgctggtctttttgtagaaactcagtagagaaagtctagctaagcagtgttgaaaagcctgcaagatttcagtttacatatcgacagcatatccactgatttctaaatgggctggtcccatcatctgaagattctgtatagaattattaaaaaaaaaatccatctttctttattttcttcacatgcgacaatttcttaagcactttgacattttggtagttccacactattgagagaataatatatttattttgtgacattgcagatgccaaatactgtaaccttctcatgataacaatacttaggttcaagatcactgttcaaaccctgtcatgctttaaaactgatgcgagatgattttgttttttgcataatcaatacttaagggtgcaatcaactgttagtaattgtgcagtaaagtaaagccctgtggtgtatcaactactagttaagagtctcagttgatttctgtaatgtttgacctaataatagcccgtttcgtctctgacccaacagaggaagcacagatcaaatcaccttggagtggtcaccagggggacagggagccccccaccaatgtatcaatgggtgatttatgatgccttctgccctttggcgagtgaatgggtttcccataggggaagttggcctccctccgtgagctttggaaatgttttctaatagacacagggaggccagttctgtttcagagcaattatcttcccaaattctctgttctggtgttggaactgtgtgccctggtttctgttttcctttctactgctgtaattctctgtctcatcatccttctcttttgtttccatagccttttataatgcatatatgatgctgtgaacagaaataaattatttatacaatcaaa

SEQ ID NO: 78594 - DNA, 3866 bp, Homo sapiens
gtgaggctgccgagcggacagcgactcccggggaagcccgcgctccgggagcgggagcgggagcaggagcaggagcagcgccgtcccaggccagaggcgagcgccgggcgccgggagagcggagagcccgggcagctgccggagcgcgggggcgcggcccgaggaaaccacagagcgagcccaggcctggggagggcgccgaacatctgaggcggcttcgcgggagacaaagccgcgcgtagagacgcgatgcccgccgatcgcgagcccggccggcgagggcgcggggactgcggcgtctgagcgcgccaagccgtgcgcccgcggggacgccgagccccggggccggtgcgggcggcggcgggcggggcccaggtgcgcccggccgcgtcgggcccgtgactgctcggggggcggcgccctcccgccgcagccgcagtggctggcgccgcagccaggagccatgggcaacatctcctctaacatctcggccttccagtccctgcatatcgtcatgttgggcttggactcggccggcaagaccacggtgctctaccggctcaagttcaacgagttcgtgaacacggtgcccaccatcggcttcaacaccgagaagatcaagctgagcaacggcacggccaagggcatcagctgccacttctgggacgtgggcggccaggagaagctgcggccgctgtggaagtcctacagccgctgcacggacggcatcatctacgtggtggactcggtggacgtggaccggctggaggaggccaagacggagctgcacaaggtgaccaagttcgccgagaaccagggcacgccgctgctggtcatcgccaacaagcaggacctgcccaagtcgctgccggtggcagagattgagaagcagctggcgctgcacgagcttatcccggccaccacctatcacgtccagccggcgtgcgccatcatcggcgagggcctcaccgagggcatggacaagctctatgagatgatcctgaaacgcaggaagtccctcaagcagaagaagaagcggtaatgcgcccggagcgaccggggagcgagcgagtgcgtcaagaaagaatgaatggatggatggatggttggatggatggatggatggatgagcgagaacccgcgcccgcgaacaaagagcgaaccaaagcgatgcttcgaatttttaaaacggaatctctgcacccaaatgcaggactggtgacttaaggagctgcgaagtctgatttaccggcctactctcgacctgccccccacccccagctcaggggaccttttgtctgaacgccagagctactgaccaggtcggggggccgcggtggggagtggaagagccggtcctgctgtccgccctcccagccccaggtggaaggctcagttgtcggaaagacaaaagcgatttcttcccactcctgcagggccagaagttcaggctgccccgcctccactgggggatcgcacctgtgaattacctgaggtatgcatttcccagaaccgtgggcgtacccaccttggggggcatgttggttctggggggaccacctctccttgcattcaggggctgtgaagctgagtaattttcggtcacagggcaggcccctgttgaaatttcatttgtcctgctctgggcccaaaggtggtggtggtttgggtcatcagaggactgcctgggacggttcagcgggcacggagcgctgtgctggcctggctggggatggccgcggaggtgcccttttcctggtgctttgtggtggctgcagaagaccagttttgttgagaactgcttttcagcctggaatcagacatcttccagatggtttggaccctgtccatgtgtaggtcattatcacacaaagagaccaataaaaataaaaaaaataaaaaaaaaaaaagacgaactattggaggtggtggccaatgatgcatttactgtttgcaggatagttaaaggtgtttaaagggtaaggcttttggtgtaaatgctggatggggtgtgtgtgtgtgtggatatagggacctccctctgtactgtgtactgtgtaatcggcattaatacctagactcatatgtatggaattttaaattctcttagcctactgattggtttggatgagcacaccagctgcaggtgtgtgctgaattgcaagatggtatttttttttttaaccaagggatgtctcttgtaatactaaccgcgtgataatgggttttcagacatgatgaaaaaaaaaaacttttacaaatgaatacttaccttagaaatattcaccttaggaaaaaagactttgctctgcccttttatattcctttatgctgcaagtggtgacatgttcagatttctaatttggttcattgtggcctatctggtttaagtctttcattaaaaatgtctcgttagagtatttgatgtcatgcaccaaaaaaataaaaccccaccttgttgcaaaagctgacctcgttgcatggaattaaaagagaaggaaaaacacaaggatgaagtctttccgaattcattcttgtgggaactggccttcggagccagccagcactttgggcaaatgcaaacaacaatgagtgcttgagataaaagaaagtgtgacgtcatggtcactggtactcaggcacttcacagtttacttgaaagaggctttggaaaatagataaagtgaaagaagaataaatacatatttttaataatgtaattttaaaaatcctttataatcaggactgagtcttggtttgcagaagctgtcacttaccctgaaacacagtatcaaaagggaaacttaaaacatactgtttgatttttttatttcctcttacaatccatgttttcaggtagaattatgactttccccccattgttacacatttctttacaaaggaggcctgtagaaattggacacgatcatgcttgagcatgtgagttagtcaaattatgagtccctgcctattgtccattacacaccgaatgttaatttaagaaccagaggcagaagttctggcttcctgcttgaaacccaattcttatatgaaattttttaaaagcagaaacctagcagcccatctgctttttctcttttgtcggtgtatttggtacccctccaatgctggtctttttgtagaaactcagtagagaaagtctagctaagcagtgttgaaaagcctgcaagatttcagtttacatatcgacagcatatccactgatttctaaatgggctggtcccatcatctgaagattctgtatagaattattaaaaaaaaaatccatctttctttattttcttcacatgcgacaatttcttaagcactttgacattttggtagttccacactattgagagaataatatatttattttgtgacattgcagatgccaaatactgtaaccttctcatgataacaatacttaggttcaagatcactgttcaaaccctgtcatgctttaaaactgatgcgagatgattttgttttttgcataatcaatacttaagggtgcaatcaactgttagtaattgtgcagtaaagtaaagccctgtggtgtatcaactactagttaagagtctcagttgatttctgtaatgtttgacctaataatagcccgtttcgtctctgacccaacagaggaagcacagatgttttctaatagacacagggaggccagttctgtttcagagcaattatcttcccaaattctctgttctggtgttggaactgtgtgccctggtttctgttttcctttctactgctgtaattctctgtctcatcatccttctcttttgtttccatagccttttataatgcatatatgatgctgtgaacagaaataaattatttatacaatcaaa

SEQ ID NO: 78595 - DNA, 2928 bp, Homo sapiens
agagcatccccccgtgagacaactttagaatggatggatggatggatgagcgagaacccgcgcccgcgaacaaagagcgaaccaaagcgatgcttcgaatttttaaaacggaatctctgcacccaaatgcaggactggtgacttaaggagctgcgaagtctgatttaccggcctactctcgacctgccccccacccccagctcaggggaccttttgtctgaacgccagagctactgaccaggtcggggggccgcggtggggagtggaagagccggtcctgctgtccgccctcccagccccaggtggaaggctcagttgtcggaaagacaaaagcgatttcttcccactcctgcagggccagaagttcaggctgccccgcctccactgggggatcgcacctgtgaattacctgaggtatgcatttcccagaaccgtgggcgtacccaccttggggggcatgttggttctggggggaccacctctccttgcattcaggggctgtgaagctgagtaattttcggtcacagggcaggcccctgttgaaatttcatttgtcctgctctgggcccaaaggtggtggtggtttgggtcatcagaggactgcctgggacggttcagcgggcacggagcgctgtgctggcctggctggggatggccgcggaggtgcccttttcctggtgctttgtggtggctgcagaagaccagttttgttgagaactgcttttcagcctggaatcagacatcttccagatggtttggaccctgtccatgtgtaggtcattatcacacaaagagaccaataaaaataaaaaaaataaaaaaaaaaaaagacgaactattggaggtggtggccaatgatgcatttactgtttgcaggatagttaaaggtgtttaaagggtaaggcttttggtgtaaatgctggatggggtgtgtgtgtgtgtggatatagggacctccctctgtactgtgtactgtgtaatcggcattaatacctagactcatatgtatggaattttaaattctcttagcctactgattggtttggatgagcacaccagctgcaggtgtgtgctgaattgcaagatggtatttttttttttaaccaagggatgtctcttgtaatactaaccgcgtgataatgggttttcagacatgatgaaaaaaaaaaacttttacaaatgaatacttaccttagaaatattcaccttaggaaaaaagactttgctctgcccttttatattcctttatgctgcaagtggtgacatgttcagatttctaatttggttcattgtggcctatctggtttaagtctttcattaaaaatgtctcgttagagtatttgatgtcatgcaccaaaaaaataaaaccccaccttgttgcaaaagctgacctcgttgcatggaattaaaagagaaggaaaaacacaaggatgaagtctttccgaattcattcttgtgggaactggccttcggagccagccagcactttgggcaaatgcaaacaacaatgagtgcttgagataaaagaaagtgtgacgtcatggtcactggtactcaggcacttcacagtttacttgaaagaggctttggaaaatagataaagtgaaagaagaataaatacatatttttaataatgtaattttaaaaatcctttataatcaggactgagtcttggtttgcagaagctgtcacttaccctgaaacacagtatcaaaagggaaacttaaaacatactgtttgatttttttatttcctcttacaatccatgttttcaggtagaattatgactttccccccattgttacacatttctttacaaaggaggcctgtagaaattggacacgatcatgcttgagcatgtgagttagtcaaattatgagtccctgcctattgtccattacacaccgaatgttaatttaagaaccagaggcagaagttctggcttcctgcttgaaacccaattcttatatgaaattttttaaaagcagaaacctagcagcccatctgctttttctcttttgtcggtgtatttggtacccctccaatgctggtctttttgtagaaactcagtagagaaagtctagctaagcagtgttgaaaagcctgcaagatttcagtttacatatcgacagcatatccactgatttctaaatgggctggtcccatcatctgaagattctgtatagaattattaaaaaaaaaatccatctttctttattttcttcacatgcgacaatttcttaagcactttgacattttggtagttccacactattgagagaataatatatttattttgtgacattgcagatgccaaatactgtaaccttctcatgataacaatacttaggttcaagatcactgttcaaaccctgtcatgctttaaaactgatgcgagatgattttgttttttgcataatcaatacttaagggtgcaatcaactgttagtaattgtgcagtaaagtaaagccctgtggtgtatcaactactagttaagagtctcagttgatttctgtaatgtttgacctaataatagcccgtttcgtctctgacccaacagaggaagcacagatcaaatcaccttggagtggtcaccagggggacagggagccccccaccaatgtatcaatgggtgatttatgatgccttctgccctttggcgagtgaatgggtttcccataggggaagttggcctccctccgtgagctttggaaatgttttctaatagacacagggaggccagttctgtttcagagcaattatcttcccaaattctctgttctggtgttggaactgtgtgccctggtttctgttttcctttctactgctgtaattctctgtctcatcatccttctcttttgtttccatagccttttataatgcatatatgatgctgtgaacagaaataaattatttatacaatcaaa

SEQ ID NO: 78596 - DNA, 2729 bp, Homo sapiens
gtgaggctgccgagcggacagcgactcccggggaagcccgcgctccgggagcgggagcgggagcaggagcaggagcagcgccgtcccaggccagaggcgagcgccgggcgccgggagagcggagagcccgggcagctgccggagcgcgggggcgcggcccgaggaaaccacagagcgagcccaggcctggggagggcgccgaacatctgaggcggcttcgcgggagacaaagccgcgcgtagagacgcgatgcccgccgatcgcgagcccggccggcgagggcgcggggactgcggcgtctgagcgcgccaagccgtgcgcccgcggggacgccgagccccggggccggtgcgggcggcggcgggcggggcccaggtgcgcccggccgcgtcgggcccgtgactgctcggggggcggcgccctcccgccgcagccgcagtggctggcgccgcagccaggagccatgggcaacatctcctctaacatctcggccttccagtccctgcatatcgtcatgttgggcttggactcggccggcaagaccacggtgctctaccggctcaagttcaacgagttcgtgaacacggtgcccaccatcggcttcaacaccgagaagatcaagctgagcaacggcacggccaagggcatcagctgccacttctgggacgtgggcggccaggagaagctgcggccgctgtggaagtcctacagccgctgcacggacggcatcatctacgtggtggactcggtggacgtggaccggctggaggaggccaagacggagctgcacaaggtgaccaagttcgccgagaaccagggcacgccgctgctggtcatcgccaacaagcaggacctgcccaagtcgctgccggtggcagagattgagaagcagctggcgctgcacgagcttatcccggccaccacctatcacgtccagccggcgtgcgccatcatcggcgagggcctcaccgagggcatggacaagctctatgagatgatcctgaaacgcaggaagtccctcaagcagaagaagaagcggtaatgcgcccggagcgaccggggagcgagcgagtgcgtcaagaaagaatgaatggatggatggatggttggatggatggatggatggatgagcgagaacccgcgcccgcgaacaaagagcgaaccaaagcgatgcttcgaatttttaaaacggaatctctgcacccaaatgcaggactggtgacttaaggagctgcgaagtctgatttaccggcctactctcgacctgccccccacccccagctcaggggaccttttgtctgaacgccagagctactgaccaggtcggggggccgcggtggggagtggaagagccggtcctgctgtccgccctcccagccccaggtggaaggctcagttgtcggaaagacaaaagcgatttcttcccactcctgcagggccagaagttcaggctgccccgcctccactgggggatcgcacctgtgaattacctgaggtatgcatttcccagaaccgtgggcgtacccaccttggggggcatgttggttctggggggaccacctctccttgcattcaggggctgtgaagctgagtaattttcggtcacagggcaggcccctgttgaaatttcatttgtcctgctctgggcccaaaggtggtggtggtttgggtcatcagaggactgcctgggacggttcagcgggcacggagcgctgtgctggcctggctggggatggccgcggaggtgcccttttcctggtgctttgtggtggctgcagaagaccagttttgttgagaactgcttttcagcctggaatcagacatcttccagatggtttggaccctgtccatgtgtaggtcattatcacacaaagagaccaataaaaataaaaaaaataaaaaaaaaaaaagacgaactattggaggtggtggccaatgatgcatttactgtttgcaggatagttaaaggtgtttaaagggtaaggcttttggtgtaaatgctggatggggtgtgtgtgtgtgtggatatagggacctccctctgtactgtgtactgtgtaatcggcattaatacctagactcatatgtatggaattttaaattctcttagcctactgattggtttggatgagcacaccagctgcaggtgtgtgctgaattgcaagatggtatttttttttttaaccaagggatgtctcttgtaatactaaccgcgtgataatgggttttcagacatgatgaaaaaaaaaaacttttacaaatgaatacttaccttagaaatattcaccttaggaaaaaagactttgctctgccctttttaattaattcctttaatggctggcacaggtggggtgggactatgggtcccagagatttcctaaaattcggggggtcccatttggtgggcggccaataaatctggggttcaaaagggtcctctccacattctcaaccaaaattgggtgcctccggttaacaggagaagggctaaaatctgcggggcaaatgggctcccctatggggccgaaccccataatagtaacataatcagatttttaatataaataccgccccccaaaaacctccttttttgtgtctttttggggcccaaaaaaaaaaggcggctgtgtggagacccccttcttcccgggtttgcgcggccccactctgtggggcggaacaaatctttctcacaaaacaccaatgcgcgcacagcaaaccagcggggg

SEQ ID NO: 78597 - DNA, 242 bp, Homo sapiens
gctgcagtgaaaaacatgtcccagttcatcggtgaacagggagtagaatatggacagtattgaataatgccagatactaaaggaagaaaacgtgcgagaaaccctcttgtttatacaggatagtaacattttcttagccccatcttcgtatggtgccgtacacctgaaatgaaactagatatgtctttaatttgaagtcaacgattatgttacaaaatagaaaatcgagtcgcttaaaaatc

SEQ ID NO: 78598 - DNA, 86 bp, Homo sapiens
aggtgcctcgttagcgcagtaggtagcgcgtcagtctcataatctgaaggtcgtgagttcgatcctcacacggggcacaataattt

SEQ ID NO: 78599 - DNA, 305 bp, Homo sapiens
attcgcggccgagtagacttttatttttattttctctgggaatactaacatttatgtaactctgcacaatggtcttctatcttgagttagaatattggtcaaaaggaattgaactttagctttcagcaggtcagggccatcacgtggcccatcgccttcatctcctgctgttcacattgatggagtacaggtgattgcagggagaaaaatatcttgttttcttcctctgctgggaacacacagaacccccaaaacattgaaagtcaccttttactttggattcttgcaatacaatccgtcgacgc

SEQ ID NO: 78600 - DNA, 628 bp, Homo sapiens
agcggaacatgggacttccacagcaatgggatttccttccgcattcagtttgtgcctttcccatgagcgagagactcctaggggagccgcagcccgttaggaagccatgtgggaactcatccacagactggactctgaaacgggcatgtacagagaagaggagaccccaacacgcttcaagctttgagtggagaggacacagcctctgctgggacagggaacagagggatgcggagaccctgaagatgcttttggacagtggtctgaggttgggacagtggcaggagataccattcacccaggatctccaggacaagagatcagcctggcagttacatgtgttttttttcaaactggttgccaggttggcatgagcgatgacatcagagattccgaccttcctgattggagggaccggactctgtcggcacctgggagttcagttggacaacagtaacttctcagagctgttctccactcctgacttctcccagcctcgagaattgataacacactcttctggatcccagcagtgtccagaagaagaccaaggacagaacagagactaggttggtgagatgggacagatttcgggaaagatcatgatgagccatcaaccgcagccgca

SEQ ID NO: 78601 - DNA, 453 bp, Homo sapiens
gagaccatgactttcaaggatgtggaggtgaccttctcccaggacgagtgggggtggctggactctgctcagaggaacctgtacagggatgtgatgctggagaattataggaacatggcttccctgggtaagtaatcgatatcctcatgcttctatccatctttatttctgccttcttgggttgttctgtgctgcatagaaaggtacctgacctggttttagatcctggctctgtaactgctgaccagatcacttaatctagcaccttggtagcctcttttgaaaaatggggagaataatgcctgccattctggattattgtaaagattaaaggtggctgggtgtggtagctcacacctgtaatcccaccacttcgggaggcccaggtgggaagattgcttgagctcaggagtttgagaccagtctgggcaacatagtgaaaccccatctcta

SEQ ID NO: 78602 - DNA, 1705 bp, Homo sapiens
gggagccgccgggaggtaggcgcgggacgggcggctgcggtggcggcgggtggaccgattgtcgctcggcggcgggagtcggtggagtctcgctctttcgcaaggctggagtgcaatggcatgatctcggctcactgcagcctccgcctcctgggttcaagtgattcttctgcctcagcctcccgagtagctgggactacagaaatgctggtaatttcagtcacttgctgatgacttctgatgtcccagcaaatgttggcattgttgactgctgagaagatacttctgaggacccacgtctaaggtggacttggttcgcactcttctggttagtccctgaacaggagtgatgcctccaggcaggtggcatgctgcctatccagctcaggcccagtcttcgagggagcgagggcggcttcagacagtaaagaaggaagaagaggatgaaagctatactccagtgcaggctgccaggccacagactctcaaccgccctggccaggagctgttccgccagctcttcagacagcttcgctaccatgagtcttcagggcccctagaaactctgagccggctccgggaactctgtcgctggtggctgaggcctgacgttctctccaaggcacagatcctagagctgctggtgctggaacagttcctgagcatcctgcctggggagctccgggtttgggtgcagcttcataaccctgagagtggcgaggaggctgtggccttgctggaggagctgcagagggaccttgatgggacatcctggagggacccgggccctgcccagagcccagatgtgcattggatgggtacaggagccctgcgatctgcacagatatggtcccttgcttcacctctcaggagcagctctgctctgggggaccacctggagcctccctatgaaatagaagcacgtgacttcctggctgggcaatccgatactcctgctgcccagatgcctgcccttttcccgagagaggggtgcccgggagaccaggtaacaccaaccaggtccctgacagcccagctccaggagaccatgactttcaaggatgtggaggtgaccttctcccaggacgagtgggggtggctggactctgctcagaggaacctgtacagggatgtgatgctggagaattataggaacatggcttccctggtgggaccattcaccaaacctgctctgatctcctggttggaagcaagggagccatggggcctgaacatgcaggcagctcagcctaaggggaatccagttgctgctcctacaggagatgacctccagagtaaaacaaacaaattcatcttaaatcaggaacctttggaagaagcagaaaccttagctgtgtcatcaggatgtcctgcgacaagtgtttctgagggaattgatcgatcgatcctcagagaatcttttcaacagaatcagagcagggacaagatgagggacctcagggagggacagatggagccccccaagtctgaactcataggctggggaggaggagaaacttctaggtgggttcgagggggtgcgagcccacctccagccctcagccctcttttccgcataacttggtcagggcacaaggacttgaaggacttgaaagtcagggggttgagaggactggaggcgcctcgagtcaatgtctgggaaacagaggctaaccaggcagcctccacccctggacccccagcc

SEQ ID NO: 78603 - DNA, 823 bp, Homo sapiens
ggaatgcagtggtgcaatctcagctcactacaatctccacctcctgggttcaagtgattattggtccttagcctcccaagtagctgggaatataggcgcacaccaccacacctggctacttttttgtattttttagcagaaacgaggttttgccatgttacccaggctagtctcgaacttctgagctcaagtgatctgccctcctcagcctcccaaagtgccaggattacagacgtgagccagcatgcccagctgctactgattttagtacattgacgatgtatcctgaaattttactaaagtcatttattagttctaggagccttttgtcagagtctttagggtttataggtatagaatcacacagtcctcaaagagagatagtttgacttcatcttttcctatctggataccttttatttctttcttttgcctgattagtctgtgtaggacttacagtactgtgttgaataggaatggtgaaagtggtcatctttgtcttgttccacttctcagggggaatgattctagcttttgcccattcagtacaatgttgaccatgagtttgtcatagatgacttttattttgaggtgttccttcagtgcctagtttgtagagagtttttatcatgaagggatgttgtattttattggaagttttctatgtttatttcgatgatcatatggattttaaattatgtttatgtggtaaatcacatttattgatttgtttatgttgatccagtctttgttgcggatttttgcattgatattcttcagagatattcatcagagatattcatcagagatatttatcagaaat

SEQ ID NO: 78604 - DNA, 415 bp, Homo sapiens
tacccagattagaccaactcctcagggtgcagacaaggtgacgtcaaaggacacagttggactgggattcattcttacaatgggataaggcagggcttaggcccctgtgagaaagaaccaagtactggttcctaaaggaaaggtatgaaagacgggaatgcaaaccctcatggagccccagggccccttgatagagaattctcacatgcccagctccaccactgtgccacaaagccttccagaagcccaaccatcaaggctgctgagagattcctctccccggcgtggctgacaggggtgttttccccggcatggctgacggggttgttttcacaccaggagccaccagcccactgctcagtgataaggagcactcatgaactctgcacacgagcaccctgaaaaaacccagagg

SEQ ID NO: 78605 - DNA, 440 bp, Homo sapiens
gtcttagaatgaatgagtgagacagaaacacaagtctgtctgattctagagtcctgtttttttctttcattctttccttttgaaaaaattccctttactacttctgcatttgatacaaagtggtatctggtaaatgggcctgaaaactttctaaataactagttttaaataatctctgtggaaatttatacaaacaaaaaacttccttgaaaaagtataaactccctcttccagtaggctacgacagactctcaaatcatccgcttcaatcatttagagctgccatgtgcctttggcctcctggttaaaactacatagtcagaattggaaatacaggtagctattagtaggaacaaagacagtgaatgtccaggacagaactgagctgcatttctaggtttgaatggaaccagtaataaaagtccaaaataaatgatcac

SEQ ID NO: 78606 - DNA, 470 bp, Homo sapiens
ggactcgaaatgcgtggccaccctaatttcagctaaatctgagggtggggagattgccaactcaaaaagctgtctgagcctaatcaaggttcttaaaggactcagtcactaggcagagaccgtaccaatttcattcactgctggggccccatgccccagcactagcactgcctgatacacagccagcacttaacatatgaatgagtctgtcaggaaaggaataaaccagatgggtagggtggactgcagcagtgagctactactgacttaactagtcagtacagttaagctttactatttcattcacccagtctggctaactgctctccctttttagtaactgttcctcaatacacacatactcctcctttggttctctgttaaacaagactcagatattcaaagagccaagtaaacctctaagggcttcttttgcaaaataaaagctcagttctggcgttgaactttca

SEQ ID NO: 78607 - DNA, 694 bp, Homo sapiens
  misc_feature (665)..(665): n is a, c, g, or t
gtggagggtcgcggcaggaacaagtgcgggggcctcaaagccccgccccaggcccagcggaaccctgaagaggagggggagggtgagccgggcgcggctgtgtcagctgagtgacagtcacgggaccgcgaccaactctgtctggcttcctagaggagcaggagggatgagcaagggtctcccagcgcgacaggacatggagaaagagcgagagactctgcaggcctggaaggagcgcgtggggcaggagctggaccgcgtggtggctttctggatggagcactcccacgaccaggagcacgggggcttcttcacgtgccttggccgcgaggggcgggtgtatgatgacctcaagtatgtgtggctgcaggggaggcaggtatggatgtattgtcgcctgtaccgcactttcgagcgcttccgccatgctcagcttctggacgcagcaaaagcaggtggtgagttcttgctgcggtatgcccgggtggcacctcctggcaagaagtgtgcctttgtgctgactcgggacggccgcccggtcaaggtgcagcgaaccatcttcagtgagtgtttctacaccatggccatgaacgagctgtggagagccacaggggaagtgcggtaccagacggaagctgtgtgtgagatgatgtgacatgacctgnccacattgtgttgcattgattgactgctg

SEQ ID NO: 78608 - DNA, 1399 bp, Homo sapiens
  misc_feature (1361)..(1361): n is a, c, g, or t
  misc_feature (1381)..(1382): n is a, c, g, or t
gtggagggtcgcggcaggaacaagtgcgggggcctcaaagccccgccccaggcccagcggaaccctgaagaggagggggagggtgagccgggcgcggctgtgtcagctgagtgacagtcacgggaccgcgaccaactctgtctggcttcctagaggagcaggagggatgagcaagggtctcccagcgcgacaggacatggagaaagagcgagagactctgcaggcctggaaggagcgcgtggggcaggagctggaccgcgtggtggctttctggatggagcactcccacgaccaggagcacgggggcttcttcacgtgccttggccgcgaggggcgggtgtatgatgacctcaagtatgtgtggctgcaggggaggcaggtatggatgtattgtcgcctgtaccgcactttcgagcgcttccgccatgctcagcttctggacgcagcaaaagcaggtggtgagttcttgctgcggtatgcccgggtggcacctcctggcaagaagtgtgcctttgtgctgactcgggacggccgcccggtcaaggtgcagcgaaccatcttcagtgagtgtttctacaccatggccatgaacgagctgtggagagccacaggggaagtgcggtaccagacggaagcggtggagatgatggatcagatcgtccactgggtgcaggaggacgcgtcgggactgggccggccccagctccagggggccccggctgcggagcccatggcggtgcccatgatgctactgaacctggtggagcagctcggggaggcagatgaggagctggcgggcaaatacgcagagctgggggactggtgcgcccggaggattctgcagcacgtgcagagggatggacaagctgtgctggagaatgtgtcagagggtggcaaggaacttcctggctgcctggggagacagcagaacccaggccacacgctggaagccggctggtttctgctccgtcattgcattcggaaaggcgaccccgaacttcgagcccacgtgattgacaagttcctattgttgcccttccactccggatgggaccctgaccacggaggcctcttttacttccaggatgctgataacttctgccccacccagctggagtgggccatgaagctctggtggccacacagtgaagccatgattgccttcctcatgggttacagtgacagtggggaccctgtgctgctgcgcctcttctaccaagtggctgagtacaccttccgccagtttcgcgatcccgagtacggggaatggtttggctacctgagccgagagggcaaggtggccctctccatcaagggaggtcctttcaaaggctgcttccacgtgccgcgtgcctagccanggaagccatggagtaaatgnngggatcctctagacagc

SEQ ID NO: 78609 - DNA, 1568 bp, Homo sapiens
gtggagggtcgcggcaggaacaagtgcgggggcctcaaagccccgccccaggcccagcggaaccctgaagaggagggggagggtgagccgggcgcggctgtgtcagctgagtgacagtcacgggaccgcgaccaactctgtctggcttcctagaggagcaggagggatgagcaagggtctcccagcgcgacaggacatggagaaagagcgagagactctgcaggcctggaaggagcgcgtggggcaggagctggaccgcgtggtggctttctggatggagcactcccacgaccaggagcacgggggcttcttcacgtgccttggccgcgaggggcgggtgtatgatgacctcaagtatgtgtggctgcaggggaggcaggtatggatgtattgtcgcctgtaccgcactttcgagcgcttccgccatgctcagcttctggacgcagcaaaagcaggtggtgagttcttgctgcggtatgcccgggtggcacctcctggcaagaagtgtgcctttgtgctgactcgggacggccgcccggtcaaggtgcagcgaaccatcttcagtgagtgtttctacaccatggccatgaacgagctgtggagagccacaggggaagtgcggtaccagacggaagcggtggagatgatggatcagatcgtccactgggtgcaggaggacgcgtcgggactgggccggccccagctccagggggccccggctgcggagcccatggcggtgcccatgatgctactgaacctggtggagcagctcggggaggcagatgaggagctggcgggcaaatacgcagagctgggggactggtgcgcccggaggattctgcagcacgtgcagagggatggacaagctgtgctggagaatgtgtcagagggtggcaaggaacttcctggctgcctggggagacagcagaacccaggccacacgctggaagccggctggtttctgctccgtcattgcattcggaaaggcgaccccgaacttcgagcccacgtgattgacaagttcctattgttgcccttccactccggatgggaccctgaccacggaggcctcttttacttccaggatgctgataacttctgccccacccagctggagtgggccatgaagctctggtggccacacagtgaagccatgattgccttcctcatgggttacagtgacagtggggaccctgtgctgctgcgcctcttctaccaagtggctgagtacaccttccgccaggctggagcgcaatggcgtgatctcagctcactgcaacctccgcctcctgtgttcaagctattctcccgcctcagcctcccgagtatactgctgggattacaatttcgcgatcccgagtacggggaatggtttggctacctgagccgagagggcaaggtggccctctccatcaagggaggtcctttcaaaggctgcttccacgtgccgcggtgcctagccatgtgcgaggagatgctgggcgccctgctgagccgccccgcccccgccccctcccccgcccccacccccgcctgccgaggcgcggaataaaggctgagtccgctcc

SEQ ID NO: 78610 - DNA, 1466 bp, Homo sapiens
gtggagggtcgcggcaggaacaagtgcgggggcctcaaagccccgccccaggcccagcggaaccctgaagaggagggggagggtgagccgggcgcggctgtgtcagctgagtgacagtcacgggaccgcgaccaactctgtctggcttcctagaggagcaggagggatgagcaagggtctcccagcgcgacaggacatggagaaagagcgagagactctgcaggcctggaaggagcgcgtggggcaggagctggaccgcgtggtggctttctggatggagcactcccacgaccaggagcacgggggcttcttcacgtgccttggccgcgaggggcgggtgtatgatgacctcaagtatgtgtggctgcaggggaggcaggtatggatgtattgtcgcctgtaccgcactttcgagcgcttccgccatgctcagcttctggacgcagcaaaagcaggtggtgagttcttgctgcggtatgcccgggtggcacctcctggcaagaagtgtgcctttgtgctgactcgggacggccgcccggtcaaggtgcagcgaaccatcttcagtgagtgtttctacaccatggccatgaacgagctgtggagagccacaggggaagtgcggtaccagacggaagcggtggagatgatggatcagatcgtccactgggtgcaggaggacgcgtcgggactgggccggccccagctccagggggccccggctgcggagcccatggcggtgcccatgatgctactgaacctggtggagcagctcggggaggcagatgaggagctggcgggcaaatacgcagagctgggggactggtgcgcccggaggattctgcagcacgtgcagagggatggacaagctgtgctggagaatgtgtcagagggtggcaaggaacttcctggctgcctggggagacagcagaacccaggccacacgctggaagccggctggtttctgctccgtcattgcattcggaaaggcgaccccgaacttcgagcccacgtgattgacaagttcctattgttgcccttccactccggatgggaccctgaccacggaggcctcttttacttccaggatgctgataacttctgccccacccagctggagtgggccatgaagctctggtggccacacagtgaagccatgattgccttcctcatgggttacagtgacagtggggaccctgtgctgctgcgcctcttctaccaagtggctgagtacaccttccgccagtttcgcgatcccgagtacggggaatggtttggctacctgagccgagagggcaaggtggccctctccatcaagggaggtcctttcaaaggctgcttccacgtgccgcggtgcctagccatgtgcgaggagatgctgggcgccctgctgagccgccccgcccccgccccctcccccgcccccacccccgcctgccgaggcgcggaataaaggctgagtccgctcc

SEQ ID NO: 78611 - DNA, 442 bp, Homo sapiens
  misc_feature (404)..(404): n is a, c, g, or t
  misc_feature (424)..(425): n is a, c, g, or t
cagatttgctggccccagaggggcaggaggggctggcaaggcccgttccagactttgctaaccctgccttcccacaggggcttcttcacgtgccttggccgcgaggggcgggtgtatgatgacctcaagtatgtgtggctgcaggggaggcaggtatggatgtattgtcgcctgtaccgcactttcgagcgcttccgccatgctcagcttctggacgcagcaaaagcaggtggtgagttcttgctgcggtatgcccgggtggcacctcctggcaagaagtgtgcctttgtgctgactcgggacggccgcccggtcaaggtgcagcgaaccatcttcagtgagtgtttctacaccatggccatgaacgagctgtggagagccacaggggaagtgcggtaccaganggaagccatggagtaaatgnngggatcctctagacagc

SEQ ID NO: 78612 - DNA, 397 bp, Homo sapiens
ctttgcctcccttgtactccagggttgagatgaagtcaggggataaactgctgggttctcttttcaatcactcactgattaatcatgtaagctcgggagagctctttactactcctaacttgctcttctaggtattgaggaagtcattgtaccagaagttgatgctccggcttggattcaaacacctatcactaaaattgtttgagcacataccatatgtatatatacatacacacacacacacacacacacacagacacacatacacacacacataaattatgtgtgtacttctgtactaaatattttatgtatactgtaatataatgaaacaaattttaataagatggaataaacataaatataaatacaagccctaatatgctttttaaaaaat

SEQ ID NO: 78613 - DNA, 384 bp, Homo sapiens
aaaaaaagaaaaagaaaaaaaaatgggcagagcctaagagacctgtcagacatcatcaagtagaccaacatgcattgtggaaactttaggagaagagagagagaaaggtgcagagagattatttgaagaaataatggctaaaaacttcctagatttgatgaaagataggaatataaacatccaagaagttcagtgaactccaggtaggataaactcaagtgagatcttgccaagaaagacacattataatcaaactgtagaaagccatagacagtgagagaatcttaaaaggagcaagagagaaacatcttgtcacatacaaaggatcctcgtaagattttagaagatttctcatccgaaacattagaggccagaaagcagtgg

SEQ ID NO: 78614 - DNA, 748 bp, Homo sapiens
gagtaaactgctctcttgcttaagccactattatgttaggattttttcaacccatagtcagagatagtcctaactgattcaccaccctcagagagtttacagccaattatgtttctcatgaaaaagttagccagtggttgtaagtgatcccggactggagcgccagtctgcactaaagcagttcgtctgtgggatggctctgtccttgtcaaggagaggacccctcctacacactggcttgttaccacaagtacagtggtaactaagcaggtcggcataggtgcccacagagcagactgaacaccccgtttgcttccctctcctctccgaactccctggacatggccaagtagcataagccaagcagaggtgagaaggagagtggggcacaggcaagttaccagtgggcccgcggctatcatggacttccagaaaataaaaaacaggcatgatggtgttggtttataaaccaaagcagagggcactggagccccgtaagtgtgcaggagtgaatgtatgtggcagggagaagggtagaagggaggaggtcgggtagaaggctacctctaccagctggaaatgagtggtgaagtcagctggacttctgggtggggcggggacttggagaacttttctgtcttacaaagggatcgtaaaatgcacaaatcagcactctgtagataggatcgtaacaacgcaccaatcagctctctgttggctagctagaggtttctaaaatggaccaatc

SEQ ID NO: 78615 - DNA, 463 bp, Homo sapiens
gcctccctggcatgagcttctcgggcacgtgcctcctgggcctcaagctgctcccgccgaagctcccaatacaacaactgtttctggatggtcactagccgttcttcctctgtctccattgccccaggtggccgggaggacaaaaagggctcaaagtttaagaaggggtcaaacatctcagagcttcgaccatggaggtcataaaggcagtcatctccaggtggagagttctcaaggctgtcatctggctcatagaactcatatagggcatctccactgtagctgtctcggggtagacaatccctgcggacaagccccagggcctcacctgaatcatcctcaaatccaggtgtggtggagtcataataaccttcatcactattgggggcggattcttgctggtcactctgaggagtcaaaagttccccaggggctaggccaggataagacctaactgggtcaa

SEQ ID NO: 78616 - DNA, 5485 bp, Homo sapiens
atttatattcattttttactcttttccatcaaaacataattttactaagtacgcatgttctgtgtccgtgttttgtcatcactgaagccacttttggagtcacctagtaatagcctttccactctatctagttctgtagcttttatgtgtgtaaattacttcaaatctgtttatgatcctattgctggaaactttatcccaagacacaaaaatcttttctattagaagttattaactttaaaacaattatttattttattttattttattttttgagacagagtctcgctttgtcacccaggctggagtgcagtggcacgatctcggctcactgcaagctccacctcccgagttcatgccattctcctgcctcagcctcccgagtagctgggactacgggcgtccgccaccatgcccagctaattttttttgtatttttggtagagacaaggtttcaccgtgttagccaggatggtcttgatctcctgacctcgtggtccacctgcctcggcctcccaaagcgctgggattataggcgtgagccaccgcacctggcctaaaacaattatttctttaaaaaaacataccctctattctattttgtgtcttcacaacacaatcacttactgtattgctttttaaagtgatctttaaagagtcttgcagaagagactacacagcaggcccgagaccatcctgagaggcctgtgtgcaaggctggccccccgctgtgtcaggacggtgcccaccaccctcaatgaagaggggctccctgtgcttagctgcttgtgtggggaacaagggcactgtttgaagaagcaaacatggtagcatcaagcattccttgaaatatggctccaagggaacaatgagacgtgctcttggtcttggaagctcatcagaatgtttagagctggggaggcctccaaacgcccattgcctgggccgtcgcccccaagggtgcggagtgtggaggttgcccgggggagggccggctacggattcacgctttcgggacaggcaccctgtgtgctcagctgcgtcatgagagggagccctgcggatttcgtgggcctccgagctggagaccagatacttgctgtcaatgaaatcaacgtgaaaaaagcatctcatgaagatgtagtgaaattaattgggaagtgctctggtgtccttcacatggtgattgctgaaggcgtcggccgcttcgaatcctgttccagtgatgaagaagggggactctatgaaggaaaaggctggctgaagcccaagctggattctaaagcactaggtataaacagagcagagcgagtcgtggaggaaatgcagtctggtggaattttcaatatgatttttgaaaacccgagcctttgtgcgagcaattcagagcccttgaaattgaaacaaagatccctttcggagtcggccgcaactcgatttgatgttggacatgaaagtataaataatccaaatcccaacatgctttctaaggaggaaatatcaaaagttattcatgatgattcggttttcagcattggactagaaagtcatgacgattttgcattggatgcaagtattttaaacgtggcgatgatcgtgggctacttaggctccattgagcttccttccacgagctccaacctggagtccgacagcttgcaagccatccgcggctgcatgcggcgcctgcgggcagagcagaaaatccactcgctggtgaccatgaagatcatgcacgactgtgtgcagctgagcactgacaaggctggagtcgtggccgagtacccggccgagaagctggccttcagcgccgtgtgcccggacgaccggcgatttttcgggttggttaccatgcagacgaatgacgacgggagcctggcccaggaggaggagggcgccctgcggacttcctgccacgtgttcatggtggacccagacttgtttaatcacaagatccaccaaggcattgctcggcggtttgggtttgagtgcacggccgacccagacaccaatggctgtctggaattcccggcgtcctccctccccgtcctgcagttcatctctgtcctgtaccgagacatgggtgagctgattgagggcatgcgggcccgcgcctttctggacggggacgccgatgcccaccagaacaacagcaccagcagcaacagtgacagcggcattgggaacttccaccaggaggagaagagcaaccgggtccttgtggtggacctgggtgggagctcgagcagacacggccccggaggcagcgcgtgggacggtgtgggtgggaggggtgcccagccctggggtgctccctggactgggcccttctgtccggaccccgaagggagccccccatttgaggccgctcatcagactgacaggttctgggacctaaacaagcacctagggccagcctctcctgtggaggtgcccccagcttccttgaggagctcagtccccccttccaagaggggcaccgtgggtgctggctgtggtttcaaccagcgctggctcccggtccacgtgctccgggagtggcagtgcggacacaccagcgaccaggactcttacacagattccaccgatggctggtccagcatcaactgcggcacactgccccctcctatgagcaagatccccgcagaccgctacagggtggagggcagcttcgcgcagcccccgctgaatgccccgaagagggagtggtccaggaaggcctttggaatgcaaagcatttttggtccccatcgaaatgttcgaaagactaaggaagataaaaagggctcaaaatttgggcggggaactggactcactcagccttctcaacgcacgtctgctcggagatcatttgggagatccaagagattcagtatcactcgctcccttgatgatcttgagtctgcaactgtgtctgatggcgagttgacgggcgccgacctgaaggactgcgtcagcaacaacagcctgagcagcaatgccagcctccccagcgtgcagagctgccggcgcctgcgtgagaggagggtcgccagctgggccgtgtcctttgagcgcctgctgcaggaccccgtcggtgtccgctacttctctgattttctaaggaaagaattcagtgaagaaaacattttattctggcaggcctgtgaatattttaatcatgttcctgcacatgacaaaaaggagctttcctacagggcccgggagattttcagtaagtttctctgcagcaaagccaccaccccggtcaacatcgacagccaggcccagctagcagacgacgtcctccgcgcacctcacccagacatgttcaaggagcagcagctgcagatcttcaatctcatgaagtttgatagctacactcgctttctgaagtccccgctgtaccaggaatgcatcctggcggaagtggagggccgtgcactcccggactcgcagcaggtccccagcagcccggcttccaagcacagcctcggttcagaccactccagtgtgtccacgccaaaaaagttaagtggaaaatcaaaatccggccgatccctgaatgaagagctgggggatgaggacagcgagaagaagcggaaaggcgcgtttttctcgtggtcgcggaccaggagcaccgggaggtcccagaaaaagagggagcacggggaccacgcagacgacgccctgcatgccaatggaggcctgtgtcgccgagagtcgcagggctctgtgtcctctgcggggagcctggacctgtcggaggcctgcaggactttggcacccgagaaggacaaggccaccaagcactgctgcattcatctcccggatgggacatcctgcgtggtggctgtcaaggcgggcttctccatcaaagacatcctgtccggactctgtgagcggcatggcatcaacggggcggccgcggacctcttcctggtgggcggggacaagcctctggtgctgcaccaagacagtagcatcttggagtcaagggacctgcgcctagaaaagcgcaccttgtttcggctggatcttgttccgattaaccggtcagtgggactcaaggccaagcccaccaagcccgtcacggaggtgctgcggcccgtggtggccagatacggcctggacctcagtggcctgctggtgaggctgagtggagagaaggagcccctggaccttggcgcccctatatcgagtctggacggacagcgggttgtcttggaggagaaggatccttccagaggaaaggcatccgcagataaacagaaaggtgtgccagtgaaacagaacacagctgtaaattccagctccagaaaccactcggctacgggagaggaaagaacactaggcaagtctaattctattaaaataaaaggagaaaatggaaaaaatgctagggatccccggctttcaaagagagaagaatctattgcaaagattgggaaaaaaaaatatcagaaaattaatttggacgaagcagaggagttttttgagcttatttccaaagctcagagcaacagagcagatgaccaacgtgggctgctaaggaaggaagacctggtgttgccagagttcctccgtttacctcctggttccacagaactcaccctccccactccagctgctgtggccaagggctttagcaagagaagcgccacaggcaacggccgggagagcgcctcccagcctggcgagcagtgggagccagtccaggagagcagcgacagtccgtccaccagcccgggctcagcctccagcccccctggacctcctgggacgaccccccccgggcagaagtctcccagcgggcccttctgcactccccagtcccccgtctccctcgcgcaggagggcaccgcccagatctggaagaggcagtctcaggaagtggaggccgggggcatccagacggtggaggatgagcacgtggccgagctgaccctgatgggggagggggacatcagcagccccaacagcaccttgctgccgccgccctccaccccccaggaagtgccaggaccttccagaccaggaagtgggacccatggcagccgagacctcccagtcaacagaatcatcgatgtggatcttgtaactggctcggcgcccgggcgggatggtggcatagcgggggcacaggctggccctgggaggtcgcaggccagtggtgggcctcctacatcagacctccctggcttgggccccgtcccgggtgagcctgctaagcccaagaccagcgctcaccacgccaccttcgtctgagctgccctggcctggccaactctcctgtggacatgtcggggtggggcagcccaggtggattctgtgggcctcaggggggccaccctggccaccacaccctcaggagcccagccaggagggcagggggtgacctcgctggaggcactggccccggacattcgccatgctggccatggggctccctggccctggcctcctgctgcccaataaagcatttctgaggacccaaaaaaaagcc

SEQ ID NO: 78617 - DNA, 2909 bp, Homo sapiens
attcttctgatttggtagaggaaatagtttaaaaatgatctcacagcgtgatttatgtaaacggcgcttctttctttggatgagacaattgagatagagtctgaaaccctggcaagccacagcttcctgcagtgtcctgttgccatgggttacgaagggagcgagagggaacttcatcggaaatgcctttaaacttttctcacacgcacaagctgcggtgttgaatggtgtgtcttagacccgggtgcctagtgtggctcggtgccttacaatgaatttggggaaagagttgtcaaacgaaacccatgtttctaatgaccagcagtctgcaactgtgtctgatggcgagttgacgggcgccgacctgaaggactgcgtcagcaacaacagcctgagcagcaatgccagcctccccagcgtgcagagctgccggcgcctgcgtgagaggagggtcgccagctgggccgtgtcctttgagcgcctgctgcaggaccccgtcggtgtccgctacttctctgattttctaaggaaagaattcagtgaagaaaacattttattctggcaggcctgtgaatattttaatcatgttcctgcacatgacaaaaaggagctttcctacagggcccgggagattttcagtaagtttctctgcagcaaagccaccaccccggtcaacatcgacagccaggcccagctagcagacgacgtcctccgcgcacctcacccagacatgttcaaggagcagcagctgcagatcttcaatctcatgaagtttgatagctacactcgctttctgaagtccccgctgtaccaggaatgcatcctggcggaagtggagggccgtgcactcccggactcgcagcaggtccccagcagcccggcttccaagcacagcctcggttcagaccactccagtgtgtccacgccaaaaaagttaagtggaaaatcaaaatccggccgatccctgaatgaagagctgggggatgaggacagcgagaagaagcggaaaggcgcgtttttctcgtggtcgcggaccaggagcaccgggaggtcccagaaaaagagggagcacggggaccacgcagacgacgccctgcatgccaatggaggcctgtgtcgccgagagtcgcagggctctgtgtcctctgcggggagcctggacctgtcggaggcctgcaggactttggcacccgagaaggacaaggccaccaagcactgctgcattcatctcccggatgggacatcctgcgtggtggctgtcaaggcgggcttctccatcaaagacatcctgtccggactctgtgagcggcatggcatcaacggggcggccgcggacctcttcctggtgggcggggacaagcctctggtgctgcaccaagacagtagcatcttggagtcaagggacctgcgcctagaaaagcgcaccttgtttcggctggatcttgttccgattaaccggtcagtgggactcaaggccaagcccaccaagcccgtcacggaggtgctgcggcccgtggtggccagatacggcctggacctcagtggcctgctggtgaggctgagtggagagaaggagcccctggaccttggcgcccctatatcgagtctggacggacagcgggttgtcttggaggagaaggatccttccagaggaaaggcatccgcagataaacagaaaggtgtgccagtgaaacagaacacagctgtaaattccagctccagaaaccactcggctacgggagaggaaagaacactaggcaagtctaattctattaaaataaaaggagaaaatggaaaaaatgctagggatccccggctttcaaagagagaagaatctattgcaaagattgggaaaaaaaaatatcagaaaattaatttggacgaagcagaggagttttttgagcttatttccaaagctcagagcaacagagcagatgaccaacgtgggctgctaaggaaggaagacctggtgttgccagagttcctccgtttacctcctggttccacagaactcaccctccccactccagctgctgtggccaagggctttagcaagagaagcgccacaggcaacggccgggagagcgcctcccagcctggcgagcagtgggagccagtccaggagagcagcgacagtccgtccaccagcccgggctcagcctccagcccccctggacctcctgggacgaccccccccgggcagaagtctcccagcgggcccttctgcactccccagtcccccgtctccctcgcgcaggagggcaccgcccagatctggaagaggcagtctcaggaagtggaggccgggggcatccagacggtggaggatgagcacgtggccgagctgaccctgatgggggagggggacatcagcagccccaacagcaccttgctgccgccgccctccaccccccaggaagtgccaggaccttccagaccaggaagtgggacccatggcagccgagacctcccagtcaacagaatcatcgatgtggatcttgtaactggctcggcgcccgggcgggatggtggcatagcgggggcacaggctggccctgggaggtcgcaggccagtggtgggcctcctacatcagacctccctggcttgggccccgtcccgggtgagcctgctaagcccaagaccagcgctcaccacgccaccttcgtctgagctgccctggcctggccaactctcctgtggacatgtcggggtggggcagcccaggtggattctgtgggcctcaggggggccaccctggccaccacaccctcaggagcccagccaggagggcagggggtgacctcgctggaggcactggccccggacattcgccatgctggccatggggctccctggccctggcctcctgctgcccaataaagcatttctgaggacccaaaaaaaagcc

SEQ ID NO: 78618 - DNA, 2692 bp, Homo sapiens
tcagggctcccgttggggccgccgtggcttcctgttcttttcggcttcctcctggctcagctgactgtctcgagttctcggcctcctcctggtcacgctggccttccgtctgcaactgtgtctgatggcgagttgacgggcgccgacctgaaggactgcgtcagcaacaacagcctgagcagcaatgccagcctccccagcgtgcagagctgccggcgcctgcgtgagaggagggtcgccagctgggccgtgtcctttgagcgcctgctgcaggaccccgtcggtgtccgctacttctctgattttctaaggaaagaattcagtgaagaaaacattttattctggcaggcctgtgaatattttaatcatgttcctgcacatgacaaaaaggagctttcctacagggcccgggagattttcagtaagtttctctgcagcaaagccaccaccccggtcaacatcgacagccaggcccagctagcagacgacgtcctccgcgcacctcacccagacatgttcaaggagcagcagctgcagatcttcaatctcatgaagtttgatagctacactcgctttctgaagtccccgctgtaccaggaatgcatcctggcggaagtggagggccgtgcactcccggactcgcagcaggtccccagcagcccggcttccaagcacagcctcggttcagaccactccagtgtgtccacgccaaaaaagttaagtggaaaatcaaaatccggccgatccctgaatgaagagctgggggatgaggacagcgagaagaagcggaaaggcgcgtttttctcgtggtcgcggaccaggagcaccgggaggtcccagaaaaagagggagcacggggaccacgcagacgacgccctgcatgccaatggaggcctgtgtcgccgagagtcgcagggctctgtgtcctctgcggggagcctggacctgtcggaggcctgcaggactttggcacccgagaaggacaaggccaccaagcactgctgcattcatctcccggatgggacatcctgcgtggtggctgtcaaggcgggcttctccatcaaagacatcctgtccggactctgtgagcggcatggcatcaacggggcggccgcggacctcttcctggtgggcggggacaagcctctggtgctgcaccaagacagtagcatcttggagtcaagggacctgcgcctagaaaagcgcaccttgtttcggctggatcttgttccgattaaccggtcagtgggactcaaggccaagcccaccaagcccgtcacggaggtgctgcggcccgtggtggccagatacggcctggacctcagtggcctgctggtgaggctgagtggagagaaggagcccctggaccttggcgcccctatatcgagtctggacggacagcgggttgtcttggaggagaaggatccttccagaggaaaggcatccgcagataaacagaaaggtgtgccagtgaaacagaacacagctgtaaattccagctccagaaaccactcggctacgggagaggaaagaacactaggcaagtctaattctattaaaataaaaggagaaaatggaaaaaatgctagggatccccggctttcaaagagagaagaatctattgcaaagattgggaaaaaaaaatatcagaaaattaatttggacgaagcagaggagttttttgagcttatttccaaagctcagagcaacagagcagatgaccaacgtgggctgctaaggaaggaagacctggtgttgccagagttcctccgtttacctcctggttccacagaactcaccctccccactccagctgctgtggccaagggctttagcaagagaagcgccacaggcaacggccgggagagcgcctcccagcctggcgagcagtgggagccagtccaggagagcagcgacagtccgtccaccagcccgggctcagcctccagcccccctggacctcctgggacgaccccccccgggcagaagtctcccagcgggcccttctgcactccccagtcccccgtctccctcgcgcaggagggcaccgcccagatctggaagaggcagtctcaggaagtggaggccgggggcatccagacggtggaggatgagcacgtggccgagctgaccctgatgggggagggggacatcagcagccccaacagcaccttgctgccgccgccctccaccccccaggaagtgccaggaccttccagaccaggaagtgggacccatggcagccgagacctcccagtcaacagaatcatcgatgtggatcttgtaactggctcggcgcccgggcgggatggtggcatagcgggggcacaggctggccctgggaggtcgcaggccagtggtgggcctcctacatcagacctccctggcttgggccccgtcccgggtgagcctgctaagcccaagaccagcgctcaccacgccaccttcgtctgagctgccctggcctggccaactctcctgtggacatgtcggggtggggcagcccaggtggattctgtgggcctcaggggggccaccctggccaccacaccctcaggagcccagccaggagggcagggggtgacctcgctggaggcactggccccggacattcgccatgctggccatggggctccctggccctggcctcctgctgcccaataaagcatttctgaggacccaaaaaaaagcc

SEQ ID NO: 78619 - DNA, 5573 bp, Homo sapiens
ccgttgcgcgcgcgggcggtggcgcgggccgaagcgcccggagcgggagcgagcggcgcggcccgggcactgtttgaagaagcaaacatggtagcatcaagcattccttgaaatatggctccaagggaacaatgagacgtgctcttggtcttggaagctcatcagaatgtttagagctggggaggcctccaaacgcccattgcctgggccgtcgcccccaagggtgcggagtgtggaggttgcccgggggagggccggctacggattcacgctttcgggacaggcaccctgtgtgctcagctgcgtcatgagagggagccctgcggatttcgtgggcctccgagctggagaccagatacttgctgtcaatgaaatcaacgtgaaaaaagcatctcatgaagatgtagtgaaattaattgggaagtgctctggtgtccttcacatggtgattgctgaaggcgtcggccgcttcgaatcctgttccagtgatgaagaagggggactctatgaaggaaaaggctggctgaagcccaagctggattctaaagcactaggtataaacagagcagagcgagtcgtggaggaaatgcagtctggtggaattttcaatatgatttttgaaaacccgagcctttgtgcgagcaattcagagcccttgaaattgaaacaaagatccctttcggagtcggccgcaactcgatttgatgttggacatgaaagtataaataatccaaatcccaacatgctttctaaggaggaaatatcaaaagttattcatgatgattcggttttcagcattggactagaaagtcatgacgattttgcattggatgcaagtattttaaacgtggcgatgatcgtgggctacttaggctccattgagcttccttccacgagctccaacctggagtccgacagcttgcaagccatccgcggctgcatgcggcgcctgcgggcagagcagaaaatccactcgctggtgaccatgaagatcatgcacgactgtgtgcagctgagcactgacaaggctggagtcgtggccgagtacccggccgagaagctggccttcagcgccgtgtgcccggacgaccggcgatttttcgggttggttaccatgcagacgaatgacgacgggagcctggcccaggaggaggagggcgccctgcggacttcctgccacgtgttcatggtggacccagacttgtttaatcacaagatccaccaaggcattgctcggcggtttgggtttgagtgcacggccgacccagacaccaatggctgtctggaattcccggcgtcctccctccccgtcctgcagttcatctctgtcctgtaccgagacatgggtgagctgattgagggcatgcgggcccgcgcctttctggacggggacgccgatgcccaccagaacaacagcaccagcagcaacagtgacagcggcattgggaacttccaccaggaggagaagagcaaccgggtccttgtggtggacctgggtgggagctcgagcagacacggccccggaggcagcgcgtgggacggtgtgggtgggaggggtgcccagccctggggtgctccctggactgggcccttctgtccggaccccgaagggagccccccatttgaggccgctcatcagactgacaggttctgggacctaaacaagcacctagggccagcctctcctgtggaggtgcccccagcttccttgaggagctcagtccccccttccaagaggggcaccgtgggtgctggctgtggtttcaaccagcgctggctcccggtccacgtgctccgggagtggcagtgcggacacaccagcgaccaggactcttacacagattccaccgatggctggtccagcatcaactgcggcacactgccccctcctatgagcaagatccccgcagaccgctacagggtggagggcagcttcgcgcagcccccgctgaatgccccgaagagggagtggtccaggaaggcctttggaatgcaaagcatttttggtccccatcgaaatgttcgaaagactaaggaagataaaaagggctcaaaatttgggcggggaactggactcactcagccttctcaacgcacgtctgctcggagatcatttgggagatccaagagattcagtatcactcgctcccttgatgatcttgagtctgcaactgtgtctgatggcgagttgacgggcgccgacctgaaggactgcgtcagcaacaacagcctgagcagcaatgccagcctccccagcgtgcagagctgccggcgcctgcgtgagaggagggtcgccagctgggccgtgtcctttgagcgcctgctgcaggaccccgtcggtgtccgctacttctctgattttctaaggaaagaattcagtgaagaaaacattttattctggcaggcctgtgaatattttaatcatgttcctgcacatgacaaaaaggagctttcctacagggcccgggagattttcagtaagtttctctgcagcaaagccaccaccccggtcaacatcgacagccaggcccagctagcagacgacgtcctccgcgcacctcacccagacatgttcaaggagcagcagctgcagatcttcaatctcatgaagtttgatagctacactcgctttctgaagtccccgctgtaccaggaatgcatcctggcggaagtggagggccgtgcactcccggactcgcagcaggtccccagcagcccggcttccaagcacagcctcggttcagaccactccagtgtgtccacgccaaaaaagttaagtggaaaatcaaaatccggccgatccctgaatgaagagctgggggatgaggacagcgagaagaagcggaaaggcgcgtttttctcgtggtcgcggaccaggagcaccgggaggtcccagaaaaagagggagcacggggaccacgcagacgacgccctgcatgccaatggaggcctgtgtcgccgagagtcgcagggctctgtgtcctctgcggggagcctggacctgtcggaggcctgcaggactttggcacccgagaaggacaaggccaccaagcactgctgcattcatctcccggatgggacatcctgcgtggtggctgtcaaggcgggcttctccatcaaagacatcctgtccggactctgtgagcggcatggcatcaacggggcggccgcggacctcttcctggtgggcggggacaagcctctggtgctgcaccaagacagtagcatcttggagtcaagggacctgcgcctagaaaagcgcaccttgtttcggctggatcttgttccgattaaccggtcagtgggactcaaggccaagcccaccaagcccgtcacggaggtgctgcggcccgtggtggccagatacggcctggacctcagtggcctgctggtgaggctgagtggagagaaggagcccctggaccttggcgcccctatatcgagtctggacggacagcgggttgtcttggaggagaaggatccttccagaggaaaggcatccgcagataaacagaaaggtgtgccagtgaaacagaacacagctgtaaattccagctccagaaaccactcggctacgggagaggaaagaacactaggcaagtctaattctattaaaataaaaggagaaaatggaaaaaatgctagggatccccggctttcaaagagagaagaatctattgcaaagattgggaaaaaaaaatatcagaaaattaatttggacgaagcagaggagttttttgagcttatttccaaagctcagagcaacagagcagatgaccaacgtgggctgctaaggaaggaagacctggtgttgccagagttcctccgtttacctcctggttccacagaactcaccctccccactccagctgctgtggccaagggctttagcaagagaagcgccacaggcaacggccgggagagcgcctcccagcctggcgagcagtgggagccagtccaggagagcagcgacagtccgtccaccagcccgggctcagcctccagcccccctggacctcctgggacgaccccccccgggcagaagtctcccagcgggcccttctgcactccccagtcccccgtctccctcgcgcaggagggcaccgcccagatctggaagaggcagtctcaggaagtggaggccgggggcatccagacggtggaggatgagcacgtggccgagctgaccctgatgggggagggggacatcagcagccccaacagcaccttgctgccgccgccctccaccccccaggaagtgccaggaccttccagaccaggtacctccaggttctgatccctccaccttggccccgtaagcgtggtctgctcagcttccagtcagaaaggacagtgggcccccggctgccactgtttgctggtggtctccgtgaccccctcctcacctgctggttgggggcttccttggccctcttggaaaggaggggctcgtgtggccccaggccagtgtctgtcaggatggtccccccgaggcgctctgggcaggcatcctggtgtcctgagaggctcttgcaggaatgatacgtggcagtgcctgcagcgaggtctgggaacaccctgggtgaggcctgggggtttccgaaaatggaggcattcctttccaaatctggacagcgatcgtttttagtgtttctgtctcaagactggaaaacaatagcatttgtcttgagtgaggaagtgaagcccgctgtgttcatagcaggagagggctcccagacacaggcccgtcctcggaagagccttgagagtgcagctcggacccaccggcggcccccgtagcaggtggtgtgggtgctcgggagtggaggtgacgtcagcagcgctctctgaccgcgggtgtcacgggcatttctcaaaggaagcaggggattcagtgagtgtgaaggtgaacaggatggcctggcagcagggatgtttccgtgagccacaaataccagaaactgaggcgaggctcccagcagccggtagggaaaggtgtttccaggggtccgagggccgtggcctgcgtggccatcccctggagagaggagccgctcagggtgcgcgtcatggagtgtgctcaggggtgcgtggacacctctgctgtggtttgctgctgggggcgatgggagcgcctctccgtcctgtgccctggtccaggatgctgacagcagtgagaggcctgccgtgaggtttggtcttgtcagacctgtagcctggacctcgccgggggaccagggagtgcacgtctgtagatctgtacatatctgggcctttggaggccacgtgtggcatgggaggggctacctggtccctttcacagccaggacacgcctggatgagaaagcctgaggtgcctggcatgcccaccggtgccactctgcagcctccacccctggcctgagtccccctccatccgtcttggtggacacctgtgtggctctcacctgcgttttgagtctgttcttccaggagtaataaattctggacatcatcactggactggcttacaacttttctttctcatttgaaactttgtttccactttagaaaataataaaagtattttaatc

SEQ ID NO: 78620 - DNA, 3469 bp, Homo sapiens
tgacttgtctgttcttgtccctggtgcctttaagccagccaccctgctctcctccagccccttccactgttccaagccccttcctcggaggcgtctccccaaccctcctgctggtggccgctcttgcactgcttggtctgcaactgtgtctgatggcgagttgacgggcgccgacctgaaggactgcgtcagcaacaacagcctgagcagcaatgccagcctccccagcgtgcagagctgccggcgcctgcgtgagaggagggtcgccagctgggccgtgtcctttgagcgcctgctgcaggaccccgtcggtgtccgctacttctctgattttctaaggaaagaattcagtgaagaaaacattttattctggcaggcctgtgaatattttaatcatgttcctgcacatgacaaaaaggagctttcctacagggcccgggagattttcagtaagtttctctgcagcaaagccaccaccccggtcaacatcgacagccaggcccagctagcagacgacgtcctccgcgcacctcacccagacatgttcaaggagcagcagctgcagatcttcaatctcatgaagtttgatagctacactcgctttctgaagtccccgctgtaccaggaatgcatcctggcggaagtggagggccgtgcactcccggactcgcagcaggtccccagcagcccggcttccaagcacagcctcggttcagaccactccagtgtgtccacgccaaaaaagttaagtggaaaatcaaaatccggccgatccctgaatgaagagctgggggatgaggacagcgagaagaagcggaaaggcgcgtttttctcgtggtcgcggaccaggagcaccgggaggtcccagaaaaagagggagcacggggaccacgcagacgacgccctgcatgccaatggaggcctgtgtcgccgagagtcgcagggctctgtgtcctctgcggggagcctggacctgtcggaggcctgcaggactttggcacccgagaaggacaaggccaccaagcactgctgcattcatctcccggatgggacatcctgcgtggtggctgtcaaggcgggcttctccatcaaagacatcctgtccggactctgtgagcggcatggcatcaacggggcggccgcggacctcttcctggtgggcggggacaagcctctggtgctgcaccaagacagtagcatcttggagtcaagggacctgcgcctagaaaagcgcaccttgtttcggctggatcttgttccgattaaccggtcagtgggactcaaggccaagcccaccaagcccgtcacggaggtgctgcggcccgtggtggccagatacggcctggacctcagtggcctgctggtgaggctgagtggagagaaggagcccctggaccttggcgcccctatatcgagtctggacggacagcgggttgtcttggaggagaaggatccttccagaggaaaggcatccgcagataaacagaaaggtgtgccagtgaaacagaacacagctgtaaattccagctccagaaaccactcggctacgggagaggaaagaacactaggcaagtctaattctattaaaataaaaggagaaaatggaaaaaatgctagggatccccggctttcaaagagagaagaatctattgcaaagattgggaaaaaaaaatatcagaaaattaatttggacgaagcagaggagttttttgagcttatttccaaagctcagagcaacagagcagatgaccaacgtgggctgctaaggaaggaagacctggtgttgccagagttcctccgtttacctcctggttccacagaactcaccctccccactccagctgctgtggccaagggctttagcaagagaagcgccacaggcaacggccgggagagcgcctcccagcctggcgagcagtgggagccagtccaggagagcagcgacagtccgtccaccagcccgggctcagcctccagcccccctggacctcctgggacgaccccccccgggcagaagtctcccagcgggcccttctgcactccccagtcccccgtctccctcgcgcaggagggcaccgcccagatctggaagaggcagtctcaggaagtggaggccgggggcatccagacggtggaggatgagcacgtggccgagctgaccctgatgggggagggggacatcagcagccccaacagcaccttgctgccgccgccctccaccccccaggaagtgccaggaccttccagaccaggtacctccaggttctgatccctccaccttggccccgtaagcgtggtctgctcagcttccagtcagaaaggacagtgggcccccggctgccactgtttgctggtggtctccgtgaccccctcctcacctgctggttgggggcttccttggccctcttggaaaggaggggctcgtgtggccccaggccagtgtctgtcaggatggtccccccgaggcgctctgggcaggcatcctggtgtcctgagaggctcttgcaggaatgatacgtggcagtgcctgcagcgaggtctgggaacaccctgggtgaggcctgggggtttccgaaaatggaggcattcctttccaaatctggacagcgatcgtttttagtgtttctgtctcaagactggaaaacaatagcatttgtcttgagtgaggaagtgaagcccgctgtgttcatagcaggagagggctcccagacacaggcccgtcctcggaagagccttgagagtgcagctcggacccaccggcggcccccgtagcaggtggtgtgggtgctcgggagtggaggtgacgtcagcagcgctctctgaccgcgggtgtcacgggcatttctcaaaggaagcaggggattcagtgagtgtgaaggtgaacaggatggcctggcagcagggatgtttccgtgagccacaaataccagaaactgaggcgaggctcccagcagccggtagggaaaggtgtttccaggggtccgagggccgtggcctgcgtggccatcccctggagagaggagccgctcagggtgcgcgtcatggagtgtgctcaggggtgcgtggacacctctgctgtggtttgctgctgggggcgatgggagcgcctctccgtcctgtgccctggtccaggatgctgacagcagtgagaggcctgccgtgaggtttggtcttgtcagacctgtagcctggacctcgccgggggaccagggagtgcacgtctgtagatctgtacatatctgggcctttggaggccacgtgtggcatgggaggggctacctggtccctttcacagccaggacacgcctggatgagaaagcctgaggtgcctggcatgcccaccggtgccactctgcagcctccacccctggcctgagtccccctccatccgtcttggtggacacctgtgtggctctcacctgcgttttgagtctgttcttccaggagtaataaattctggacatcatca

SEQ ID NO: 78621 - DNA, 3363 bp, Homo sapiens
cttttggggtctttgctcttttggggtctttgctcttttggggtctttgctcagttgacgggcgccgacctgaaggactgcgtcagcaacaacagcctgagcagcaatgccagcctccccagcgtgcagagctgccggcgcctgcgtgagaggagggtcgccagctgggccgtgtcctttgagcgcctgctgcaggaccccgtcggtgtccgctacttctctgattttctaaggaaagaattcagtgaagaaaacattttattctggcaggcctgtgaatattttaatcatgttcctgcacatgacaaaaaggagctttcctacagggcccgggagattttcagtaagtttctctgcagcaaagccaccaccccggtcaacatcgacagccaggcccagctagcagacgacgtcctccgcgcacctcacccagacatgttcaaggagcagcagctgcagatcttcaatctcatgaagtttgatagctacactcgctttctgaagtccccgctgtaccaggaatgcatcctggcggaagtggagggccgtgcactcccggactcgcagcaggtccccagcagcccggcttccaagcacagcctcggttcagaccactccagtgtgtccacgccaaaaaagttaagtggaaaatcaaaatccggccgatccctgaatgaagagctgggggatgaggacagcgagaagaagcggaaaggcgcgtttttctcgtggtcgcggaccaggagcaccgggaggtcccagaaaaagagggagcacggggaccacgcagacgacgccctgcatgccaatggaggcctgtgtcgccgagagtcgcagggctctgtgtcctctgcggggagcctggacctgtcggaggcctgcaggactttggcacccgagaaggacaaggccaccaagcactgctgcattcatctcccggatgggacatcctgcgtggtggctgtcaaggcgggcttctccatcaaagacatcctgtccggactctgtgagcggcatggcatcaacggggcggccgcggacctcttcctggtgggcggggacaagcctctggtgctgcaccaagacagtagcatcttggagtcaagggacctgcgcctagaaaagcgcaccttgtttcggctggatcttgttccgattaaccggtcagtgggactcaaggccaagcccaccaagcccgtcacggaggtgctgcggcccgtggtggccagatacggcctggacctcagtggcctgctggtgaggctgagtggagagaaggagcccctggaccttggcgcccctatatcgagtctggacggacagcgggttgtcttggaggagaaggatccttccagaggaaaggcatccgcagataaacagaaaggtgtgccagtgaaacagaacacagctgtaaattccagctccagaaaccactcggctacgggagaggaaagaacactaggcaagtctaattctattaaaataaaaggagaaaatggaaaaaatgctagggatccccggctttcaaagagagaagaatctattgcaaagattgggaaaaaaaaatatcagaaaattaatttggacgaagcagaggagttttttgagcttatttccaaagctcagagcaacagagcagatgaccaacgtgggctgctaaggaaggaagacctggtgttgccagagttcctccgtttacctcctggttccacagaactcaccctccccactccagctgctgtggccaagggctttagcaagagaagcgccacaggcaacggccgggagagcgcctcccagcctggcgagcagtgggagccagtccaggagagcagcgacagtccgtccaccagcccgggctcagcctccagcccccctggacctcctgggacgaccccccccgggcagaagtctcccagcgggcccttctgcactccccagtcccccgtctccctcgcgcaggagggcaccgcccagatctggaagaggcagtctcaggaagtggaggccgggggcatccagacggtggaggatgagcacgtggccgagctgaccctgatgggggagggggacatcagcagccccaacagcaccttgctgccgccgccctccaccccccaggaagtgccaggaccttccagaccaggtacctccaggttctgatccctccaccttggccccgtaagcgtggtctgctcagcttccagtcagaaaggacagtgggcccccggctgccactgtttgctggtggtctccgtgaccccctcctcacctgctggttgggggcttccttggccctcttggaaaggaggggctcgtgtggccccaggccagtgtctgtcaggatggtccccccgaggcgctctgggcaggcatcctggtgtcctgagaggctcttgcaggaatgatacgtggcagtgcctgcagcgaggtctgggaacaccctgggtgaggcctgggggtttccgaaaatggaggcattcctttccaaatctggacagcgatcgtttttagtgtttctgtctcaagactggaaaacaatagcatttgtcttgagtgaggaagtgaagcccgctgtgttcatagcaggagagggctcccagacacaggcccgtcctcggaagagccttgagagtgcagctcggacccaccggcggcccccgtagcaggtggtgtgggtgctcgggagtggaggtgacgtcagcagcgctctctgaccgcgggtgtcacgggcatttctcaaaggaagcaggggattcagtgagtgtgaaggtgaacaggatggcctggcagcagggatgtttccgtgagccacaaataccagaaactgaggcgaggctcccagcagccggtagggaaaggtgtttccaggggtccgagggccgtggcctgcgtggccatcccctggagagaggagccgctcagggtgcgcgtcatggagtgtgctcaggggtgcgtggacacctctgctgtggtttgctgctgggggcgatgggagcgcctctccgtcctgtgccctggtccaggatgctgacagcagtgagaggcctgccgtgaggtttggtcttgtcagacctgtagcctggacctcgccgggggaccagggagtgcacgtctgtagatctgtacatatctgggcctttggaggccacgtgtggcatgggaggggctacctggtccctttcacagccaggacacgcctggatgagaaagcctgaggtgcctggcatgcccaccggtgccactctgcagcctccacccctggcctgagtccccctccatccgtcttggtggacacctgtgtggctctcacctgcgttttgagtctgttcttccaggagtaataaattctggacatcatca

SEQ ID NO: 78622 - DNA, 5343 bp, Homo sapiens
ccgttgcgcgcgcgggcggtggcgcgggccgaagcgcccggagcgggagcgagcggcgcggcccgggcactgtttgaagaagcaaacatggtagcatcaagcattccttgaaatatggctccaagggaacaatgagacgtgctcttggtcttggaagctcatcagaatgtttagagctggggaggcctccaaacgcccattgcctgggccgtcgcccccaagggtgcggagtgtggaggttgcccgggggagggccggctacggattcacgctttcgggacaggcaccctgtgtgctcagctgcgtcatgagagggagccctgcggatttcgtgggcctccgagctggagaccagatacttgctgtcaatgaaatcaacgtgaaaaaagcatctcatgaagatgtagtgaaattaattgggaagtgctctggtgtccttcacatggtgattgctgaaggcgtcggccgcttcgaatcctgttccagtgatgaagaagggggactctatgaaggaaaaggctggctgaagcccaagctggattctaaagcactaggtataaacagagcagagcgagtcgtggaggaaatgcagtctggtggaattttcaatatgatttttgaaaacccgagcctttgtgcgagcaattcagagcccttgaaattgaaacaaagatccctttcggagtcggccgcaactcgatttgatgttggacatgaaagtataaataatccaaatcccaacatgctttctaaggaggaaatatcaaaagttattcatgatgattcggttttcagcattggactagaaagtcatgacgattttgcattggatgcaagtattttaaacgtggcgatgatcgtgggctacttaggctccattgagcttccttccacgagctccaacctggagtccgacagcttgcaagccatccgcggctgcatgcggcgcctgcgggcagagcagaaaatccactcgctggtgaccatgaagatcatgcacgactgtgtgcagctgagcactgacaaggctggagtcgtggccgagtacccggccgagaagctggccttcagcgccgtgtgcccggacgaccggcgatttttcgggttggttaccatgcagacgaatgacgacgggagcctggcccaggaggaggagggcgccctgcggacttcctgccacgtgttcatggtggacccagacttgtttaatcacaagatccaccaaggcattgctcggcggtttgggtttgagtgcacggccgacccagacaccaatggctgtctggaattcccggcgtcctccctccccgtcctgcagttcatctctgtcctgtaccgagacatgggtgagctgattgagggcatgcgggcccgcgcctttctggacggggacgccgatgcccaccagaacaacagcaccagcagcaacagtgacagcggcattgggaacttccaccaggaggagaagagcaaccgggtccttgtggtggacctgggtgggagctcgagcagacacggccccggaggcagcgcgtgggacggtgtgggtgggaggggtgcccagccctggggtgctccctggactgggcccttctgtccggaccccgaagggagccccccatttgaggccgctcatcagactgacaggttctgggacctaaacaagcacctagggccagcctctcctgtggaggtgcccccagcttccttgaggagctcagtccccccttccaagaggggcaccgtgggtgctggctgtggtttcaaccagcgctggctcccggtccacgtgctccgggagtggcagtgcggacacaccagcgaccaggactcttacacagattccaccgatggctggtccagcatcaactgcggcacactgccccctcctatgagcaagatccccgcagaccgctacagggtggagggcagcttcgcgcagcccccgctgaatgccccgaagagggagtggtccaggaaggcctttggaatgcaaagcatttttggtccccatcgaaatgttcgaaagactaaggaagataaaaagggctcaaaatttgggcggggaactggactcactcagccttctcaacgcacgtctgctcggagatcatttgggagatccaagagattcagtatcactcgctcccttgatgatcttgagtctgcaactgtgtctgatggcgagttgacgggcgccgacctgaaggactgcgtcagcaacaacagcctgagcagcaatgccagcctccccagcgtgcagagctgccggcgcctgcgtgagaggagggtcgccagctgggccgtgtcctttgagcgcctgctgcaggaccccgtcggtgtccgctacttctctgattttctaaggaaagaattcagtgaagaaaacattttattctggcaggcctgtgaatattttaatcatgttcctgcacatgacaaaaaggagctttcctacagggcccgggagattttcagtaagtttctctgcagcaaagccaccaccccggtcaacatcgacagccaggcccagctagcagacgacgtcctccgcgcacctcacccagacatgttcaaggagcagcagctgcagatcttcaatctcatgaagtttgatagctacactcgctttctgaagtccccgctgtaccaggaatgcatcctggcggaagtggagggccgtgcactcccggactcgcagcaggtccccagcagcccggcttccaagcacagcctcggttcagaccactccagtgtgtccacgccaaaaaagttaagtggaaaatcaaaatccggccgatccctgaatgaagagctgggggatgaggacagcgagaagaagcggaaaggcgcgtttttctcgtggtcgcggaccaggagcaccgggaggtcccagaaaaagagggagcacggggaccacgcagacgacgccctgcatgccaatggaggcctgtgtcgccgagagtcgcagggctctgtgtcctctgcggggagcctggacctgtcggaggcctgcaggactttggcacccgagaaggacaaggccaccaagcactgctgcattcatctcccggatgggacatcctgcgtggtggctgtcaaggcgggcttctccatcaaagacatcctgtccggactctgtgagcggcatggcatcaacggggcggccgcggacctcttcctggtgggcggggacaagcctctggtgctgcaccaagacagtagcatcttggagtcaagggacctgcgcctagaaaagcgcaccttgtttcggctggatcttgttccgattaaccggtcagtgggactcaaggccaagcccaccaagcccgtcacggaggtgctgcggcccgtggtggccagatacggcctggacctcagtggcctgctggtgaggctgagtggagagaaggagcccctggaccttggcgcccctatatcgagtctggacggacagcgggttgtcttggaggagaaggatccttccagaggaaaggcatccgcagataaacagaaaggtgtgccagtgaaacagaacacagctgtaaattccagctccagaaaccactcggctacgagttttttgagcttatttccaaagctcagagcaacagagcagatgaccaacgtgggctgctaaggaaggaagacctggtgttgccagagttcctccgtttacctcctggttccacagaactcaccctccccactccagctgctgtggccaagggctttagcaagagaagcgccacaggcaacggccgggagagcgcctcccagcctggcgagcagtgggagccagtccaggagagcagcgacagtccgtccaccagcccgggctcagcctccagcccccctggacctcctgggacgaccccccccgggcagaagtctcccagcgggcccttctgcactccccagtcccccgtctccctcgcgcaggagggcaccgcccagatctggaagaggcagtctcaggaagtggaggccgggggcatccagacggtggaggatgagcacgtggccgagctgaccctgatgggggagggggacatcagcagccccaacagcaccttgctgccgccgccctccaccccccaggaagtgccaggaccttccagaccaggtacctccaggttctgatccctccaccttggccccgtaagcgtggtctgctcagcttccagtcagaaaggacagtgggcccccggctgccactgtttgctggtggtctccgtgaccccctcctcacctgctggttgggggcttccttggccctcttggaaaggaggggctcgtgtggccccaggccagtgtctgtcaggatggtccccccgaggcgctctgggcaggcatcctggtgtcctgagaggctcttgcaggaatgatacgtggcagtgcctgcagcgaggtctgggaacaccctgggtgaggcctgggggtttccgaaaatggaggcattcctttccaaatctggacagcgatcgtttttagtgtttctgtctcaagactggaaaacaatagcatttgtcttgagtgaggaagtgaagcccgctgtgttcatagcaggagagggctcccagacacaggcccgtcctcggaagagccttgagagtgcagctcggacccaccggcggcccccgtagcaggtggtgtgggtgctcgggagtggaggtgacgtcagcagcgctctctgaccgcgggtgtcacgggcatttctcaaaggaagcaggggattcagtgagtgtgaaggtgaacaggatggcctggcagcagggatgtttccgtgagccacaaataccagaaactgaggcgaggctcccagcagccggtagggaaaggtgtttccaggggtccgagggccgtggcctgcgtggccatcccctggagagaggagccgctcagggtgcgcgtcatggagtgtgctcaggggtgcgtggacacctctgctgtggtttgctgctgggggcgatgggagcgcctctccgtcctgtgccctggtccaggatgctgacagcagtgagaggcctgccgtgaggtttggtcttgtcagacctgtagcctggacctcgccgggggaccagggagtgcacgtctgtagatctgtacatatctgggcctttggaggccacgtgtggcatgggaggggctacctggtccctttcacagccaggacacgcctggatgagaaagcctgaggtgcctggcatgcccaccggtgccactctgcagcctccacccctggcctgagtccccctccatccgtcttggtggacacctgtgtggctctcacctgcgttttgagtctgttcttccaggagtaataaattctggacatcatca

SEQ ID NO: 78623 - DNA, 2963 bp, Homo sapiens
cccggtccagatgctccagctcacgccgaggacattgttcaaaggagcagcggctccagatcttcaatctcatgaagtttgatagctacactcgctttctgaagtccccgctgtaccaggaatgcatcctggcggaagtggagggccgtgcactcccggactcgcagcaggtccccagcagcccggcttccaagcacagcctcggttcagaccactccagtgtgtccacgccaaaaaagttaagtggaaaatcaaaatccggccgatccctgaatgaagagctgggggatgaggacagcgagaagaagcggaaaggcgcgtttttctcgtggtcgcggaccaggagcaccgggaggtcccagaaaaagagggagcacggggaccacgcagacgacgccctgcatgccaatggaggcctgtgtcgccgagagtcgcagggctctgtgtcctctgcggggagcctggacctgtcggaggcctgcaggactttggcacccgagaaggacaaggccaccaagcactgctgcattcatctcccggatgggacatcctgcgtggtggctgtcaaggcgggcttctccatcaaagacatcctgtccggactctgtgagcggcatggcatcaacggggcggccgcggacctcttcctggtgggcggggacaagcctctggtgctgcaccaagacagtagcatcttggagtcaagggacctgcgcctagaaaagcgcaccttgtttcggctggatcttgttccgattaaccggtcagtgggactcaaggccaagcccaccaagcccgtcacggaggtgctgcggcccgtggtggccagatacggcctggacctcagtggcctgctggtgaggctgagtggagagaaggagcccctggaccttggcgcccctatatcgagtctggacggacagcgggttgtcttggaggagaaggatccttccagaggaaaggcatccgcagataaacagaaaggtgtgccagtgaaacagaacacagctgtaaattccagctccagaaaccactcggctacgggagaggaaagaacactaggcaagtctaattctattaaaataaaaggagaaaatggaaaaaatgctagggatccccggctttcaaagagagaagaatctattgcaaagattgggaaaaaaaaatatcagaaaattaatttggacgaagcagaggagttttttgagcttatttccaaagctcagagcaacagagcagatgaccaacgtgggctgctaaggaaggaagacctggtgttgccagagttcctccgtttacctcctggttccacagaactcaccctccccactccagctgctgtggccaagggctttagcaagagaagcgccacaggcaacggccgggagagcgcctcccagcctggcgagcagtgggagccagtccaggagagcagcgacagtccgtccaccagcccgggctcagcctccagcccccctggacctcctgggacgaccccccccgggcagaagtctcccagcgggcccttctgcactccccagtcccccgtctccctcgcgcaggagggcaccgcccagatctggaagaggcagtctcaggaagtggaggccgggggcatccagacggtggaggatgagcacgtggccgagctgaccctgatgggggagggggacatcagcagccccaacagcaccttgctgccgccgccctccaccccccaggaagtgccaggaccttccagaccaggtacctccaggttctgatccctccaccttggccccgtaagcgtggtctgctcagcttccagtcagaaaggacagtgggcccccggctgccactgtttgctggtggtctccgtgaccccctcctcacctgctggttgggggcttccttggccctcttggaaaggaggggctcgtgtggccccaggccagtgtctgtcaggatggtccccccgaggcgctctgggcaggcatcctggtgtcctgagaggctcttgcaggaatgatacgtggcagtgcctgcagcgaggtctgggaacaccctgggtgaggcctgggggtttccgaaaatggaggcattcctttccaaatctggacagcgatcgtttttagtgtttctgtctcaagactggaaaacaatagcatttgtcttgagtgaggaagtgaagcccgctgtgttcatagcaggagagggctcccagacacaggcccgtcctcggaagagccttgagagtgcagctcggacccaccggcggcccccgtagcaggtggtgtgggtgctcgggagtggaggtgacgtcagcagcgctctctgaccgcgggtgtcacgggcatttctcaaaggaagcaggggattcagtgagtgtgaaggtgaacaggatggcctggcagcagggatgtttccgtgagccacaaataccagaaactgaggcgaggctcccagcagccggtagggaaaggtgtttccaggggtccgagggccgtggcctgcgtggccatcccctggagagaggagccgctcagggtgcgcgtcatggagtgtgctcaggggtgcgtggacacctctgctgtggtttgctgctgggggcgatgggagcgcctctccgtcctgtgccctggtccaggatgctgacagcagtgagaggcctgccgtgaggtttggtcttgtcagacctgtagcctggacctcgccgggggaccagggagtgcacgtctgtagatctgtacatatctgggcctttggaggccacgtgtggcatgggaggggctacctggtccctttcacagccaggacacgcctggatgagaaagcctgaggtgcctggcatgcccaccggtgccactctgcagcctccacccctggcctgagtccccctccatccgtcttggtggacacctgtgtggctctcacctgcgttttgagtctgttcttccaggagtaataaattctggacatcatca

SEQ ID NO: 78624 - DNA, 4045 bp, Homo sapiens
ccgttgcgcgcgcgggcggtggcgcgggccgaagcgcccggagcgggagcgagcggcgcggcccgggcactgtttgaagaagcaaacatggtagcatcaagcattccttgaaatatggctccaagggaacaatgagacgtgctcttggtcttggaagctcatcagaatgtttagagctggggaggcctccaaacgcccattgcctgggccgtcgcccccaagggtgcggagtgtggaggttgcccgggggagggccggctacggattcacgctttcgggacaggcaccctgtgtgctcagctgcgtcatgagagggagccctgcggatttcgtgggcctccgagctggagaccagatacttgctgtcaatgaaatcaacgtgaaaaaagcatctcatgaagatgtagtgaaattaattgggaagtgctctggtgtccttcacatggtgattgctgaaggcgtcggccgcttcgaatcctgttccagtgatgaagaagggggactctatgaaggaaaaggctggctgaagcccaagctggattctaaagcactaggtataaacagagcagagcgagtcgtggaggaaatgcagtctggtggaattttcaatatgatttttgaaaacccgagcctttgtgcgagcaattcagagcccttgaaattgaaacaaagatccctttcggagtcggccgcaactcgatttgatgttggacatgaaagtataaataatccaaatcccaacatgctttctaaggaggaaatatcaaaagttattcatgatgattcggttttcagcattggactagaaagtcatgacgattttgcattggatgcaagtattttaaacgtggcgatgatcgtgggctacttaggctccattgagcttccttccacgagctccaacctggagtccgacagcttgcaagccatccgcggctgcatgcggcgcctgcgggcagagcagaaaatccactcgctggtgaccatgaagatcatgcacgactgtgtgcagctgagcactgacaaggctggagtcgtggccgagtacccggccgagaagctggccttcagcgccgtgtgcccggacgaccggcgatttttcgggttggttaccatgcagacgaatgacgacgggagcctggcccaggaggaggagggcgccctgcggacttcctgccacgtgttcatggtggacccagacttgtttaatcacaagatccaccaaggcattgctcggcggtttgggtttgagtgcacggccgacccagacaccaatggctgtctggaattcccggcgtcctccctccccgtcctgcagttcatctctgtcctgtaccgagacatgggtgagctgattgagggcatgcgggcccgcgcctttctggacggggacgccgatgcccaccagaacaacagcaccagcagcaacagtgacagcggcattgggaacttccaccaggaggagaagagcaaccgggtccttgtggtggacctgggtgggagctcgagcagacacggccccggaggcagcgcgtgggacggtgtgggtgggaggggtgcccagccctggggtgctccctggactgggcccttctgtccggaccccgaagggagccccccatttgaggccgctcatcagactgacaggttctgggacctaaacaagcacctagggccagcctctcctgtggaggtgcccccagcttccttgaggagctcagtccccccttccaagaggggcaccgtgggtgctggctgtggtttcaaccagcgctggctcccggtccacgtgctccgggagtggcagtgcggacacaccagcgaccaggactcttacacagattccaccgatggctggtccagcatcaactgcggcacactgccccctcctatgagcaagatccccgcagaccgctacagggtggagggcagcttcgcgcagcccccgctgaatgccccgaagagggagtggtccaggaaggcctttggaatgcaaagcatttttggtccccatcgaaatgttcgaaagactaaggaagataaaaagggctcaaaatttgggcggggaactggactcactcagccttctcaacgcacgtctgctcggagatcatttgggagatccaagagattcagtatcactcgctcccttgatgatcttgagtctgcaactgtgtctgatggcgagttgacgggcgccgacctgaaggactgcgtcagcaacaacagcctgagcagcaatgccagcctccccagcgtgcagagctgccggcgcctgcgtgagaggagggtcgccagctgggccgtgtcctttgagcgcctgctgcaggaccccgtcggtgtccgctacttctctgattttctaaggaaagaattcagtgaagaaaacattttattctggcaggcctgtgaatattttaatcatgttcctgcacatgacaaaaaggagctttcctacagggcccgggagattttcagtaagtttctctgcagcaaagccaccaccccggtcaacatcgacagccaggcccagctagcagacgacgtcctccgcgcacctcacccagacatgttcaaggagcagcagctgcagatcttcaatctcatgaagtttgatagctacactcgctttctgaagtccccgctgtaccaggaatgcatcctggcggaagtggagggccgtgcactcccggactcgcagcaggtccccagcagcccggcttccaagcacagcctcggttcagaccactccagtgtgtccacgccaaaaaagttaagtggaaaatcaaaatccggccgatccctgaatgaagagctgggggatgaggacagcgagaagaagcggaaaggcgcgtttttctcgtggtcgcggaccaggagcaccgggaggtcccagaaaaagagggagcacggggaccacgcagacgacgccctgcatgccaatggaggcctgtgtcgccgagagtcgcagggctctgtgtcctctgcggggagcctggacctgtcggaggcctgcaggactttggcacccgagaaggacaaggccaccaagcactgctgcattcatctcccggatgggacatcctgcgtggtggctgtcaaggcgggcttctccatcaaagacatcctgtccggactctgtgagcggcatggcatcaacggggcggccgcggacctcttcctggtgggcggggacaagcctctggtgctgcaccaagacagtagcatcttggagtcaagggacctgcgcctagaaaagcgcaccttgtttcggctggatcttgttccgattaaccggtcagtgggactcaaggccaagcccaccaagcccgtcacggaggtgctgcggcccgtggtggccagatacggcctggacctcagtggcctgctggtgaggctgagtggagagaaggagcccctggaccttggcgcccctatatcgagtctggacggacagcgggttgtcttggaggagaaggatccttccagaggaaaggcatccgcagataaacagaaaggtgtgccagtgaaacagaacacagctgtaaattccagctccagaaaccactcggctacggaagtgggacccatggcagccgagacctcccagtcaacagaatcatcgatgtggatcttgtaactggctcggcgcccgggcgggatggtggcatagcgggggcacaggctggccctgggaggtcgcaggccagtggtgggcctcctacatcagacctccctggcttgggccccgtcccgggtgagcctgctaagcccaagaccagcgctcaccacgccaccttcgtctgagctgccctggcctggccaactctcctgtggacatgtcggggtggggcagcccaggtggattctgtgggcctcaggggggccaccctggccaccacaccctcaggagcccagccaggagggcagggggtgacctcgctggaggcactggccccggacattcgccatgctggccatggggctccctggccctggcctcctgctgcccaataaagcatttctgaggacccaaaaaaaagcc

SEQ ID NO: 78625 - DNA, 3542 bp, Homo sapiens
ccgttgcgcgcgcgggcggtggcgcgggccgaagcgcccggagcgggagcgagcggcgcggcccgggcactgtttgaagaagcaaacatggtagcatcaagcattccttgaaatatggctccaagggaacaatgagacgtgctcttggtcttggaagctcatcagaatgtttagagctggggaggcctccaaacgcccattgcctgggccgtcgcccccaagggtgcggagtgtggaggttgcccgggggagggccggctacggattcacgctttcgggacaggcaccctgtgtgctcagctgcgtcatgagagggagccctgcggatttcgtgggcctccgagctggagaccagatacttgctgtcaatgaaatcaacgtgaaaaaagcatctcatgaagatgtagtgaaattaattgggaagtgctctggtgtccttcacatggtgattgctgaaggcgtcggccgcttcgaatcctgttccagtgatgaagaagggggactctatgaaggaaaaggctggctgaagcccaagctggattctaaagcactaggtataaacagagcagagcgagtcgtggaggaaatgcagtctggtggaattttcaatatgatttttgaaaacccgagcctttgtgcgagcaattcagagcccttgaaattgaaacaaagatccctttcggagtcggccgcaactcgatttgatgttggacatgaaagtataaataatccaaatcccaacatgctttctaaggaggaaatatcaaaagttattcatgatgattcggttttcagcattggactagaaagtcatgacgattttgcattggatgcaagtattttaaacgtggcgatgatcgtgggctacttaggctccattgagcttccttccacgagctccaacctggagtccgacagcttgcaagccatccgcggctgcatgcggcgcctgcgggcagagcagaaaatccactcgctggtgaccatgaagatcatgcacgactgtgtgcagctgagcactgacaaggctggagtcgtggccgagtacccggccgagaagctggccttcagcgccgtgtgcccggacgaccggcgatttttcgggttggttaccatgcagacgaatgacgacgggagcctggcccaggaggaggagggcgccctgcggacttcctgccacgtgttcatggtggacccagacttgtttaatcacaagatccaccaaggcattgctcggcggtttgggtttgagtgcacggccgacccagacaccaatggctgtctggaattcccggcgtcctccctccccgtcctgcagttcatctctgtcctgtaccgagacatgggtgagctgattgagggcatgcgggcccgcgcctttctggacggggacgccgatgcccaccagaacaacagcaccagcagcaacagtgacagcggcattgggaacttccaccaggaggagaagagcaaccgggtccttgtggtggacctgggtgggagctcgagcagacacggccccggaggcagcgcgtgggacggtgtgggtgggaggggtgcccagccctggggtgctccctggactgggcccttctgtccggaccccgaagggagccccccatttgaggccgctcatcagactgacaggttctgggacctaaacaagcacctagggccagcctctcctgtggaggtgcccccagcttccttgaggagctcagtccccccttccaagaggggcaccgtgggtgctggctgtggtttcaaccagcgctggctcccggtccacgtgctccgggagtggcagtgcggacacaccagcgaccaggactcttacacagattccaccgatggctggtccagcatcaactgcggcacactgccccctcctatgagcaagatccccgcagaccgctacagggtggagggcagcttcgcgcagcccccgctgaatgccccgaagagggagtggtccaggaaggcctttggaatgcaaagcatttttggtccccatcgaaatgttcgaaagactaaggaagataaaaagggctcaaaatttgggcggggaactggactcactcagccttctcaacgcacgtctgctcggagatcatttgggagatccaagagattcagtatcactcgctcccttgatgatcttgagtctgcaactgtgtctgatggcgagttgacgggcgccgacctgaaggactgcgtcagcaacaacagcctgagcagcaatgccagcctccccagcgtgcagagctgccggcgcctgcgtgagaggagggtcgccagctgggccgtgtcctttgagcgcctgctgcaggaccccgtcggtgtccgctacttctctgattttctaaggaaagaattcagtgaagaaaacattttattctggcaggcctgtgaatattttaatcatgttcctgcacatgacaaaaaggagctttcctacagggcccgggagattttcagtaagtttctctgcagcaaagccaccaccccggtcaacatcgacagccaggcccagctagcagacgacgtcctccgcgcacctcacccagacatgttcaaggagcagcagctgcagatcttcaatctcatgaagtttgatagctacactcgctttctgaagtccccgctgtaccaggaatgcatcctggcggaagtggagggccgtgcactcccggactcgcagcaggtccccagcagcccggcttccaagcacagcctcggttcagaccactccagtgtgtccacgccaaaaaagttaagtggaaaatcaaaatccggccgatccctgaatgaagagctgggggatgaggacagcgagaagaagcggaaaggcgcgtttttctcgtggtcgcggaccaggagcaccgggaggtcccagaaaaagagggagcacggggaccacgcagacgacgccctgcatgccaatggaggcctgtgtcgccgagagtcgcagggctctgtgtcctctgcggggagcctggacctgtcggaggcctgcaggactttggcacccgagaaggacaaggccaccaagcactgctgcattcatctcccggatgggacatcctgcgtggtggctgtcaaggcgggcttctccatcaaagacatcctgtccggactctgtgagcggcatggcatcaacggggcggccgcggacctcttcctggtgggcggggacaagcctctggtgctgcaccaagacagtagcatcttggagtcaagggacctgcgcctagaaaagcgcaccttgtttcggctggatcttgttccgattaaccggtcagtgggactcaaggccaagcccaccaagcccgtcacggaggtgctgcggcccgtggtggccagatacggcctggacctcagtggcctgctggtgaggctgagtggagagaaggagcccctggaccttggcgcccctatatcgagtctggacggacagcgggttgtcttggaggagaaggatccttccagaggaaaggtcctgccctggggaagctgggtccggccagcagccttcggagatg

SEQ ID NO: 78626 - DNA, 2904 bp, Homo sapiens
gacgtttccattggaacgatgtgcatggggagctgtgtatagagaggacagggtgctggaacccagagccctgggagggagtggtcctcacagggcagcttcagtgggccccgcaggacagccctgcttctgggtggagaagcccagatgtgccttctgagcacgatggcccttgaggcccagagctgagagaatgatgaccgctctctcgtgttaattcacaaaacccagcacctcaggcagtgtggactgagcctgagatgtgtgcacctggggagctgcaggtgggaccgtggcagggcgccagcctccccagcacgtgcggcctgggccagctgggctgctctgggaggtgccccgcacccctgtgacgctggttccctcacggctgcttgtctcgctgctccccagtcggaggcctgcaggactttggcacccgagaaggacaaggccaccaagcactgctgcattcatctcccggatgggacatcctgcgtggtggctgtcaaggcgggcttctccatcaaagacatcctgtccggactctgtgagcggcatggcatcaacggggcggccgcggacctcttcctggtgggcggggacaagcctctggtgctgcaccaagacagtagcatcttggagtcaagggacctgcgcctagaaaagcgcaccttgtttcggctggatcttgttccgattaaccggtcagtgggactcaaggccaagcccaccaagcccgtcacggaggtgctgcggcccgtggtggccagatacggcctggacctcagtggcctgctggtgaggctgagtggagagaaggagcccctggaccttggcgcccctatatcgagtctggacggacagcgggttgtcttggaggagaaggatccttccagaggaaaggcatccgcagataaacagaaaggtgtgccagtgaaacagaacacagctgtaaattccagctccagaaaccactcggctacgggagaggaaagaacactaggcaagtctaattctattaaaataaaaggagaaaatggaaaaaatgctagggatccccggctttcaaagagagaagaatctattgcaaagattgggaaaaaaaaatatcagaaaattaatttggacgaagcagaggagttttttgagcttatttccaaagctcagagcaacagagcagatgaccaacgtgggctgctaaggaaggaagacctggtgttgccagagttcctccgtttacctcctggttccacagaactcaccctccccactccagctgctgtggccaagggctttagcaagagaagcgccacaggcaacggccgggagagcgcctcccagcctggcgagcagtgggagccagtccaggagagcagcgacagtccgtccaccagcccgggctcagcctccagcccccctggacctcctgggacgaccccccccgggcagaagtctcccagcgggcccttctgcactccccagtcccccgtctccctcgcgcaggagggcaccgcccagatctggaagaggcagtctcaggaagtggaggccgggggcatccagacggtggaggatgagcacgtggccgagctgaccctgatgggggagggggacatcagcagccccaacagcaccttgctgccgccgccctccaccccccaggaagtgccaggaccttccagaccaggtacctccaggttctgatccctccaccttggccccgtaagcgtggtctgctcagcttccagtcagaaaggacagtgggcccccggctgccactgtttgctggtggtctccgtgaccccctcctcacctgctggttgggggcttccttggccctcttggaaaggaggggctcgtgtggccccaggccagtgtctgtcaggatggtccccccgaggcgctctgggcaggcatcctggtgtcctgagaggctcttgcaggaatgatacgtggcagtgcctgcagcgaggtctgggaacaccctgggtgaggcctgggggtttccgaaaatggaggcattcctttccaaatctggacagcgatcgtttttagtgtttctgtctcaagactggaaaacaatagcatttgtcttgagtgaggaagtgaagcccgctgtgttcatagcaggagagggctcccagacacaggcccgtcctcggaagagccttgagagtgcagctcggacccaccggcggcccccgtagcaggtggtgtgggtgctcgggagtggaggtgacgtcagcagcgctctctgaccgcgggtgtcacgggcatttctcaaaggaagcaggggattcagtgagtgtgaaggtgaacaggatggcctggcagcagggatgtttccgtgagccacaaataccagaaactgaggcgaggctcccagcagccggtagggaaaggtgtttccaggggtccgagggccgtggcctgcgtggccatcccctggagagaggagccgctcagggtgcgcgtcatggagtgtgctcaggggtgcgtggacacctctgctgtggtttgctgctgggggcgatgggagcgcctctccgtcctgtgccctggtccaggatgctgacagcagtgagaggcctgccgtgaggtttggtcttgtcagacctgtagcctggacctcgccgggggaccagggagtgcacgtctgtagatctgtacatatctgggcctttggaggccacgtgtggcatgggaggggctacctggtccctttcacagccaggacacgcctggatgagaaagcctgaggtgcctggcatgcccaccggtgccactctgcagcctccacccctggcctgagtccccctccatccgtcttggtggacacctgtgtggctctcacctgcgttttgagtctgttcttccaggagtaataaattctggacatcatca

SEQ ID NO: 78627 - DNA, 2119 bp, Homo sapiens
ttaaattgaaagcccaggccagagagtcccacagtttcctactcagacggcatcagcgcgtaaccgtgttgagtcaagcgtctcgtttgttcaagtctggacctcacacagcgtggtttttagggagtacacagctttttcagactcctgaagacagagtatgctagaagccccagggctgtcccttccgctgtctgtgggaagatagtgtggacggaaaagggctcttgttgacccacagctgatagggtgttaggacagcccaggatgagagctttctagaatgttctgcggtgacagtcattaatgtgaaactctctaaaacacggtcactctgggttttcttccaatagagttttttgagcttatttccaaagctcagagcaacagagcagatgaccaacgtgggctgctaaggaaggaagacctggtgttgccagagttcctccgtttacctcctggttccacagaactcaccctccccactccagctgctgtggccaagggctttagcaagagaagcgccacaggcaacggccgggagagcgcctcccagcctggcgagcagtgggagccagtccaggagagcagcgacagtccgtccaccagcccgggctcagcctccagcccccctggacctcctgggacgaccccccccgggcagaagtctcccagcgggcccttctgcactccccagtcccccgtctccctcgcgcaggagggcaccgcccagatctggaagaggcagtctcaggaagtggaggccgggggcatccagacggtggaggatgagcacgtggccgagctgaccctgatgggggagggggacatcagcagccccaacagcaccttgctgccgccgccctccaccccccaggaagtgccaggaccttccagaccaggtacctccaggttctgatccctccaccttggccccgtaagcgtggtctgctcagcttccagtcagaaaggacagtgggcccccggctgccactgtttgctggtggtctccgtgaccccctcctcacctgctggttgggggcttccttggccctcttggaaaggaggggctcgtgtggccccaggccagtgtctgtcaggatggtccccccgaggcgctctgggcaggcatcctggtgtcctgagaggctcttgcaggaatgatacgtggcagtgcctgcagcgaggtctgggaacaccctgggtgaggcctgggggtttccgaaaatggaggcattcctttccaaatctggacagcgatcgtttttagtgtttctgtctcaagactggaaaacaatagcatttgtcttgagtgaggaagtgaagcccgctgtgttcatagcaggagagggctcccagacacaggcccgtcctcggaagagccttgagagtgcagctcggacccaccggcggcccccgtagcaggtggtgtgggtgctcgggagtggaggtgacgtcagcagcgctctctgaccgcgggtgtcacgggcatttctcaaaggaagcaggggattcagtgagtgtgaaggtgaacaggatggcctggcagcagggatgtttccgtgagccacaaataccagaaactgaggcgaggctcccagcagccggtagggaaaggtgtttccaggggtccgagggccgtggcctgcgtggccatcccctggagagaggagccgctcagggtgcgcgtcatggagtgtgctcaggggtgcgtggacacctctgctgtggtttgctgctgggggcgatgggagcgcctctccgtcctgtgccctggtccaggatgctgacagcagtgagaggcctgccgtgaggtttggtcttgtcagacctgtagcctggacctcgccgggggaccagggagtgcacgtctgtagatctgtacatatctgggcctttggaggccacgtgtggcatgggaggggctacctggtccctttcacagccaggacacgcctggatgagaaagcctgaggtgcctggcatgcccaccggtgccactctgcagcctccacccctggcctgagtccccctccatccgtcttggtggacacctgtgtggctctcacctgcgttttgagtctgttcttccaggagtaataaattctggacatcatca

SEQ ID NO: 78628 - DNA, 1305 bp, Homo sapiens
  misc_feature (25)..(27): n is a, c, g, or t
  misc_feature (29)..(29): n is a, c, g, or t
aaacaaggctaggtacgaggctggnnntncagcaccttgctgccgccgccctccaccccccaggaagtgccaggaccttccagaccaggtacctccaggttctgatccctccaccttggccccgtaagcgtggtctgctcagcttccagtcagaaaggacagtgggcccccggctgccactgtttgctggtggtctccgtgaccccctcctcacctgctggttgggggcttccttggccctcttggaaaggaggggctcgtgtggccccaggccagtgtctgtcaggatggtccccccgaggcgctctgggcaggcatcctggtgtcctgagaggctcttgcaggaatgatacgtggcagtgcctgcagcgaggtctgggaacaccctgggtgaggcctgggggtttccgaaaatggaggcattcctttccaaatctggacagcgatcgtttttagtgtttctgtctcaagactggaaaacaatagcatttgtcttgagtgaggaagtgaagcccgctgtgttcatagcaggagagggctcccagacacaggcccgtcctcggaagagccttgagagtgcagctcggacccaccggcggcccccgtagcaggtggtgtgggtgctcgggagtggaggtgacgtcagcagcgctctctgaccgcgggtgtcacgggcatttctcaaaggaagcaggggattcagtgagtgtgaaggtgaacaggatggcctggcagcagggatgtttccgtgagccacaaataccagaaactgaggcgaggctcccagcagccggtagggaaaggtgtttccaggggtccgagggccgtggcctgcgtggccatcccctggagagaggagccgctcagggtgcgcgtcatggagtgtgctcaggggtgcgtggacacctctgctgtggtttgctgctgggggcgatgggagcgcctctccgtcctgtgccctggtccaggatgctgacagcagtgagaggcctgccgtgaggtttggtcttgtcagacctgtagcctggacctcgccgggggaccagggagtgcacgtctgtagatctgtacatatctgggcctttggaggccacgtgtggcatgggaggggctacctggtccctttcacagccaggacacgcctggatgagaaagcctgaggtgcctggcatgcccaccggtgccactctgcagcctccacccctggcctgagtccccctccatccgtcttggtggacacctgtgtggctctcacctgcgttttgagtctgttcttccaggagtaataaattctggacatcatca

SEQ ID NO: 78629 - DNA, 2805 bp, Homo sapiens
ccgttgcgcgcgcgggcggtggcgcgggccgaagcgcccggagcgggagcgagcggcgcggcccgggcactgtttgaagaagcaaacatggtagcatcaagcattccttgaaatatggctccaagggaacaatgagacgtgctcttggtcttggaagctcatcagaatgtttagagctggggaggcctccaaacgcccattgcctgggccgtcgcccccaagggtgcggagtgtggaggttgcccgggggagggccggctacggattcacgctttcgggacaggcaccctgtgtgctcagctgcgtcatgagagggagccctgcggatttcgtgggcctccgagctggagaccagatacttgctgtcaatgaaatcaacgtgaaaaaagcatctcatgaagatgtagtgaaattaattgggaagtgctctggtgtccttcacatggtgattgctgaaggcgtcggccgcttcgaatcctgttccagtgatgaagaagggggactctatgaaggaaaaggctggctgaagcccaagctggattctaaagcactaggtataaacagagcagagcgagtcgtggaggaaatgcagtctggtggaattttcaatatgatttttgaaaacccgagcctttgtgcgagcaattcagagcccttgaaattgaaacaaagatccctttcggagtcggccgcaactcgatttgatgttggacatgaaagtataaataatccaaatcccaacatgctttctaaggaggaaatatcaaaagttattcatgatgattcggttttcagcattggactagaaagtcatgacgattttgcattggatgcaagtattttaaacgtggcgatgatcgtgggctacttaggctccattgagcttccttccacgagctccaacctggagtccgacagcttgcaagccatccgcggctgcatgcggcgcctgcgggcagagcagaaaatccactcgctggtgaccatgaagatcatgcacgactgtgtgcagctgagcactgacaaggctggagtcgtggccgagtacccggccgagaagctggccttcagcgccgtgtgcccggacgaccggcgatttttcgggttggttaccatgcagacgaatgacgacgggagcctggcccaggaggaggagggcgccctgcggacttcctgccacgtgttcatggtggacccagacttgtttaatcacaagatccaccaaggcattgctcggcggtttgggtttgagtgcacggccgacccagacaccaatggctgtctggaattcccggcgtcctccctccccgtcctgcagttcatctctgtcctgtaccgagacatgggtgagctgattgagggcatgcgggcccgcgcctttctggacggggacgccgatgcccaccagaacaacagcaccagcagcaacagtgacagcggcattgggaacttccaccaggaggagaagagcaaccgggtccttgtggtggacctgggtgggagctcgagcagacacggccccggaggcagcgcgtgggacggtgtgggtgggaggggtgcccagccctggggtgctccctggactgggcccttctgtccggaccccgaagggagccccccatttgaggccgctcatcagactgacaggttctgggacctaaacaagcacctagggccagcctctcctgtggaggtgcccccagcttccttgaggagctcagtccccccttccaagaggggcaccgtgggtgctggctgtggtttcaaccagcgctggctcccggtccacgtgctccgggagtggcagtgcggacacaccagcgaccaggactcttacacagattccaccgatggctggtccagcatcaactgcggcacactgccccctcctatgagcaagatccccgcagaccgctacagggtggagggcagcttcgcgcagcccccgctgaatgccccgaagagggagtggtccaggaaggcctttggaatgcaaagcatttttggtccccatcgaaatgttcgaaagactaaggaagataaaaagggctcaaaatttgggcggggaactggactcactcagccttctcaacgcacgtctgctcggagatcatttgggagatccaagagattcagtatcactcgctcccttgatgatcttgagtctgcaactgtgtctgatggcgagttgacgggcgccgacctgaaggactgcgtcagcaacaacagcctgagcagcaatgccagcctccccagcgtgcagagctgccggcgcctgcgtgagaggagggtcgccagctgggccgtgtcctttgagcgcctgctgcaggaccccgtcggtgtccgctacttctctgattttctaaggaaagaattcagtgaagaaaacattttattctggcaggcctgtgaatattttaatcatgttcctgcacatgacaaaaaggagctttcctacagggcccgggagattttcagtaagtttctctgcagcaaagccaccaccccggtcaacatcgacagccaggcccagctagcagacgacgtcctccgcgcacctcacccagacatgttcaaggagcagcagctgcagatcttcaatctcatgaagtttgatagctacactcgctttctgaatccccctccatccgtcttggtggacacctgtgtggctctcacctgcgttttgagtctgttcttccaggagtaataaattctggacatcatcactggactggcttacaacttttctttctcatttgaaactttgtttccactttagaaaataataaaagtattttaatc

SEQ ID NO: 78630 - DNA, 407 bp, Homo sapiens
ggcggggaactggactcactcagccttctcaacgcacgtctgctcggagatcatttgggagatccaagagattcagtatcactcgctcccttgatgatcttgaggtaatttaattttcatttttcttcttttctccttcaagttttaaaaaatgcaagtccaccttgcagatacgtctggctgttttttgagtccctgtggtcccctcccctcctcctctgtagtggtaacccctgttttctgggggacagcgtcccatgcacatttgggaacctttctaccctgcaatgtgtctgagctgtcacagggctttctggggtgctcttctgtgtgccagactccagtgaacacttctagaaatgagctggtttaatccccacaaatactctacgaggtagggcctgtca

SEQ ID NO: 78631 - DNA, 3559 bp, Homo sapiens
cgagtatggccctgggtggcgtcatggcacacaggcactgagtggactgttggtggctgcccccgagtgtggtcctgggtggcgtcacggcacgtgggcactgagtgggctgttggtggctgcccccagtgtgtgtgtcacttacagggcatgatgctactgaagtttgtgaagttggtttcattgacgctgttactaagactgtaatgtcagacatgttgggatctgttcttttcacatgaaaaggatgacttcctcttgttgggtgtcacctagtttgggcggagtgggagccgtgactcttgactcattgggccgtctggctttcccgggacacctccacctggagagtgcctctgagaacctcccagagtctgccccttgtgttcctcagatggacttttcgtttcctggagttttgtcatgaggcttaattaactcatgtctctctctcttttctttcagtctgcaactgtgtctgatggcgagttgacgggcgccgacctgaaggactgcgtcagcaacaacagcctgagcagcaatgccagcctccccagcgtgcagagctgccggcgcctgcgtgagaggagggtcgccagctgggccgtgtcctttgagcgcctgctgcaggaccccgtcggtgtccgctacttctctgtgagtagggaagggcccaggagcagcggagcggtctgtgctctgcagagactaccgagcaggatctgtgggccgccctagagacagcggcaccctgcgggccctgagcagccccgtggcaggggtctcccctccctggaccgccaccctctcaagagctcagaggagggtgggttgaatcctgcccctggttctgcccccagggagcgtccctggccctcccgctctctactggggtctctctgcagcccgcagcactggagcttcctatctgtgttaagaagccaggtgcctgttgccagctcttcaaagagatgttttgcttttggggaaacagctggaagcagcagtgcggttccctaaagtgctgggcagcgatgaggtttctctctccaggccctcgggcagctcactgagcagccagtgaccccgtggtttctgtagaaggggaagtaggaaaaaggaggaccctgtgtcagtgttaataaatggtgtctttgtctttcttaggattttctaaggaaagaattcagtgaagaaaacattttattctggcaggcctgtgaatattttaatcatgttcctgcacatgacaaaaaggagctttcctacagggcccgggagattttcagtaagtttctctgcagcaaagccaccaccccggtcaacatcgacagccaggcccagctagcagacgacgtcctccgcgcacctcacccagacatgttcaaggagcagcagctgcagatcttcaatctcatgaagtttgatagctacactcgctttctgaagtccccgctgtaccaggaatgcatcctggcggaagtggagggccgtgcactcccggactcgcagcaggtccccagcagcccggcttccaagcacagcctcggttcagaccactccagtgtgtccacgccaaaaaagttaagtggaaaatcaaaatccggccgatccctgaatgaagagctgggggatgaggacagcgagaagaagcggaaaggcgcgtttttctcgtggtcgcggaccaggagcaccgggaggtcccagaaaaagagggagcacggggaccacgcagacgacgccctgcatgccaatggaggcctgtgtcgccgagagtcgcagggctctgtgtcctctgcggggagcctggacctgtcggaggcctgcaggactttggcacccgagaaggacaaggccaccaagcactgctgcattcatctcccggatgggacatcctgcgtggtggctgtcaaggcgggcttctccatcaaagacatcctgtccggactctgtgagcggcatggcatcaacggggcggccgcggacctcttcctggtgggcggggacaagcctctggtgctgcaccaagacagtagcatcttggagtcaagggacctgcgcctagaaaagcgcaccttgtttcggctggatcttgttccgattaaccggtcagtgggactcaaggccaagcccaccaagcccgtcacggaggtgctgcggcccgtggtggccagatacggcctggacctcagtggcctgctggtgaggctgagtggagagaaggagcccctggaccttggcgcccctatatcgagtctggacggacagcgggttgtcttggaggagaaggatccttccagaggaaaggcatccgcagataaacagaaaggtgtgccagtgaaacagaacacagctgtaaattccagctccagaaaccactcggctacgggagaggaaagaacactaggcaagtctaattctattaaaataaaaggagaaaatggaaaaaatgctagggatccccggctttcaaagagagaagaatctattgcaaagattgggaaaaaaaaatatcagaaaattaatttggacgaagcagaggagttttttgagcttatttccaaagctcagagcaacagagcagatgaccaacgtgggctgctaaggaaggaagacctggtgttgccagagttcctccgtttacctcctggttccacagaactcaccctccccactccagctgctgtggccaagggctttagcaagagaagcgccacaggcaacggccgggagagcgcctcccagcctggcgagcagtgggagccagtccaggagagcagcgacagtccgtccaccagcccgggctcagcctccagcccccctggacctcctgggacgaccccccccgggcagaagtctcccagcgggcccttctgcactccccagtcccccgtctccctcgcgcaggagggcaccgcccagatctggaagaggcagtctcaggaagtggaggccgggggcatccagacggtggaggatgagcacgtggccgagctgaccctgatgggggagggggacatcagcagccccaacagcaccttgctgccgccgccctccaccccccaggaagtgccaggaccttccagaccaggaagtgggacccatggcagccgagacctcccagtcaacagaatcatcgatgtggatcttgtaactggctcggcgcccgggcgggatggtggcatagcgggggcacaggctggccctgggaggtcgcaggccagtggtgggcctcctacatcagacctccctggcttgggccccgtcccgggtgagcctgctaagcccaagaccagcgctcaccacgccaccttcgtctgagctgccctggcctggccaactctcctgtggacatgtcggggtggggcagcccaggtggattctgtgggcctcaggggggccaccctggccaccacaccctcaggagcccagccaggagggcagggggtgacctcgctggaggcactggccccggacattcgccatgctggccatggggctccctggccctggcctcctgctgcccaataaagcatttctgaggacccaaaaaaaagcc

SEQ ID NO: 78632 - DNA, 5497 bp, Homo sapiens
ccgttgcgcgcgcgggcggtggcgcgggccgaagcgcccggagcgggagcgagcggcgcggcccgggcactgtttgaagaagcaaacatggtagcatcaagcattccttgaaatatggctccaagggaacaatgagacgtgctcttggtcttggaagctcatcagaatgtttagagctggggaggcctccaaacgcccattgcctgggccgtcgcccccaagggtgcggagtgtggaggttgcccgggggagggccggctacggattcacgctttcgggacaggcaccctgtgtgctcagctgcgtcatgagagggagccctgcggatttcgtgggcctccgagctggagaccagatacttgctgtcaatgaaatcaacgtgaaaaaagcatctcatgaagatgtagtgaaattaattgggaagtgctctggtgtccttcacatggtgattgctgaaggcgtcggccgcttcgaatcctgttccagtgatgaagaagggggactctatgaaggaaaaggctggctgaagcccaagctggattctaaagcactaggtataaacagagcagagcgagtcgtggaggaaatgcagtctggtggaattttcaatatgatttttgaaaacccgagcctttgtgcgagcaattcagagcccttgaaattgaaacaaagatccctttcggagtcggccgcaactcgatttgatgttggacatgaaagtataaataatccaaatcccaacatgctttctaaggaggaaatatcaaaagttattcatgatgattcggttttcagcattggactagaaagtcatgacgattttgcattggatgcaagtattttaaacgtggcgatgatcgtgggctacttaggctccattgagcttccttccacgagctccaacctggagtccgacagcttgcaagccatccgcggctgcatgcggcgcctgcgggcagagcagaaaatccactcgctggtgaccatgaagatcatgcacgactgtgtgcagctgagcactgacaaggctggagtcgtggccgagtacccggccgagaagctggccttcagcgccgtgtgcccggacgaccggcgatttttcgggttggttaccatgcagacgaatgacgacgggagcctggcccaggaggaggagggcgccctgcggacttcctgccacgtgttcatggtggacccagacttgtttaatcacaagatccaccaaggcattgctcggcggtttgggtttgagtgcacggccgacccagacaccaatggctgtctggaattcccggcgtcctccctccccgtcctgcagttcatctctgtcctgtaccgagacatgggtgagctgattgagggcatgcgggcccgcgcctttctggacggggacgccgatgcccaccagaacaacagcaccagcagcaacagtgacagcggcattgggaacttccaccaggaggagaagagcaaccgggtccttgtggtggacctgggtgggagctcgagcagacacggccccggaggcagcgcgtgggacggtgtgggtgggaggggtgcccagccctggggtgctccctggactgggcccttctgtccggaccccgaagggagccccccatttgaggccgctcatcagactgacaggttctgggacctaaacaagcacctagggccagcctctcctgtggaggtgcccccagcttccttgaggagctcagtccccccttccaagaggggcaccgtgggtgctggctgtggtttcaaccagcgctggctcccggtccacgtgctccgggagtggcagtgcggacacaccagcgaccaggactcttacacagattccaccgatggctggtccagcatcaactgcggcacactgccccctcctatgagcaagatccccgcagaccgctacagggtggagggcagcttcgcgcagcccccgctgaatgccccgaagagggagtggtccaggaaggcctttggaatgcaaagcatttttggtccccatcgaaatgttcgaaagactaaggaagataaaaagggctcaaaatttgggcggggaactggactcactcagccttctcaacgcacgtctgctcggagatcatttgggagatccaagagattcagtatcactcgctcccttgatgatcttgagtctgcaactgtgtctgatggcgagttgacgggcgccgacctgaaggactgcgtcagcaacaacagcctgagcagcaatgccagcctccccagcgtgcagagctgccggcgcctgcgtgagaggagggtcgccagctgggccgtgtcctttgagcgcctgctgcaggaccccgtcggtgtccgctacttctctgattttctaaggaaagaattcagtgaagaaaacattttattctggcaggcctgtgaatattttaatcatgttcctgcacatgacaaaaaggagctttcctacagggcccgggagattttcagtaagtttctctgcagcaaagccaccaccccggtcaacatcgacagccaggcccagctagcagacgacgtcctccgcgcacctcacccagacatgttcaaggagcagcagctgcagatcttcaatctcatgaagtttgatagctacactcgctttctgaagtccccgctgtaccaggaatgcatcctggcggaagtggagggccgtgcactcccggactcgcagcaggtccccagcagcccggcttccaagcacagcctcggttcagaccactccagtgtgtccacgccaaaaaagttaagtggaaaatcaaaatccggccgatccctgaatgaagagctgggggatgaggacagcgagaagaagcggaaaggcgcgtttttctcgtggtcgcggaccaggagcaccgggaggtcccagaaaaagagggagcacggggaccacgcagacgacgccctgcatgccaatggaggcctgtgtcgccgagagtcgcagggctctgtgtcctctgcggggagcctggacctgtcggaggcctgcaggactttggcacccgagaaggacaaggccaccaagcactgctgcattcatctcccggatgggacatcctgcgtggtggctgtcaaggcgggcttctccatcaaagacatcctgtccggactctgtgagcggcatggcatcaacggggcggccgcggacctcttcctggtgggcggggacaagcctctggtgctgcaccaagacagtagcatcttggagtcaagggacctgcgcctagaaaagcgcaccttgtttcggctggatcttgttccgattaaccggtcagtgggactcaaggccaagcccaccaagcccgtcacggaggtgctgcggcccgtggtggccagatacggcctggacctcagtggcctgctggtgaggctgagtggagagaaggagcccctggaccttggcgcccctatatcgagtctggacggacagcgggttgtcttggaggagaaggatccttccagaggaaaggcatccgcagataaacagaaaggtgtgccagtgaaacagaacacagctgtaaattccagctccagaaaccactcggctacgggagaggaaagaacactaggcaagtctaattctattaaaataaaaggagaaaatggaaaaaatgctagggatccccggctttcaaagagagaagaatctattgcaaagattgggaaaaaaaaatatcagaaaattaatttggacgaagcagaggagttttttgagcttatttccaaagctcagagcaacagagcagatgaccaacgtgggctgctaaggaaggaagacctggtgttgccagagttcctccgtttacctcctggttccacagaactcaccctccccactccagctgctgtggccaagggctttagcaagagaagcgccacaggcaacggccgggagagcgcctcccagcctggcgagcagtgggagccagtccaggagagcagcgacagtccgtccaccagcccgggctcagcctccagcccccctggacctcctgggacgaccccccccgggcagaagtctcccagcgggcccttctgcactccccagtcccccgtctccctcgcgcaggagggcaccgcccagatctggaagaggcagtctcaggaagtggaggccgggggcatccagacggtggaggatgagcacgtggccgagctgaccctgatgggggagggggacatcagcagccccaacagcaccttgctgccgccgccctccaccccccaggaagtgccaggaccttccagaccaggtacctccaggttctgatccctccaccttggccccgtaagcgtggtctgctcagcttccagtcagaaaggacagtgggcccccggctgccactgtttgctggtggtctccgtgaccccctcctcacctgctggttgggggcttccttggccctcttggaaaggaggggctcgtgtggccccaggccagtgtctgtcaggatggtccccccgaggcgctctgggcaggcatcctggtgtcctgagaggctcttgcaggaatgatacgtggcagtgcctgcagcgaggtctgggaacaccctgggtgaggcctgggggtttccgaaaatggaggcattcctttccaaatctggacagcgatcgtttttagtgtttctgtctcaagactggaaaacaatagcatttgtcttgagtgaggaagtgaagcccgctgtgttcatagcaggagagggctcccagacacaggcccgtcctcggaagagccttgagagtgcagctcggacccaccggcggcccccgtagcaggtggtgtgggtgctcgggagtggaggtgacgtcagcagcgctctctgaccgcgggtgtcacgggcatttctcaaaggaagcaggggattcagtgagtgtgaaggtgaacaggatggcctggcagcagggatgtttccgtgagccacaaataccagaaactgaggcgaggctcccagcagccggtagggaaaggtgtttccaggggtccgagggccgtggcctgcgtggccatcccctggagagaggagccgctcagggtgcgcgtcatggagtgtgctcaggggtgcgtggacacctctgctgtggtttgctgctgggggcgatgggagcgcctctccgtcctgtgccctggtccaggatgctgacagcagtgagaggcctgccgtgaggtttggtcttgtcagacctgtagcctggacctcgccgggggaccagggagtgcacgtctgtagatctgtacatatctgggcctttggaggccacgtgtggcatgggaggggctacctggtccctttcacagccaggacacgcctggatgagaaagcctgaggtgcctggcatgcccaccggtgccactctgcagcctccacccctggcctgagtccccctccatccgtcttggtggacacctgtgtggctctcacctgcgttttgagtctgttcttccaggagtaataaattctggacatcatca

SEQ ID NO: 78633 - DNA, 5358 bp, Homo sapiens
ccgttgcgcgcgcgggcggtggcgcgggccgaagcgcccggagcgggagcgagcggcgcggcccgggcactgtttgaagaagcaaacatggtagcatcaagcattccttgaaatatggctccaagggaacaatgagacgtgctcttggtcttggaagctcatcagaatgtttagagctggggaggcctccaaacgcccattgcctgggccgtcgcccccaagggtgcggagtgtggaggttgcccgggggagggccggctacggattcacgctttcgggacaggcaccctgtgtgctcagctgcgtcatgagagggagccctgcggatttcgtgggcctccgagctggagaccagatacttgctgtcaatgaaatcaacgtgaaaaaagcatctcatgaagatgtagtgaaattaattgggaagtgctctggtgtccttcacatggtgattgctgaaggcgtcggccgcttcgaatcctgttccagtgatgaagaagggggactctatgaaggaaaaggctggctgaagcccaagctggattctaaagcactaggtataaacagagcagagcgagtcgtggaggaaatgcagtctggtggaattttcaatatgatttttgaaaacccgagcctttgtgcgagcaattcagagcccttgaaattgaaacaaagatccctttcggagtcggccgcaactcgatttgatgttggacatgaaagtataaataatccaaatcccaacatgctttctaaggaggaaatatcaaaagttattcatgatgattcggttttcagcattggactagaaagtcatgacgattttgcattggatgcaagtattttaaacgtggcgatgatcgtgggctacttaggctccattgagcttccttccacgagctccaacctggagtccgacagcttgcaagccatccgcggctgcatgcggcgcctgcgggcagagcagaaaatccactcgctggtgaccatgaagatcatgcacgactgtgtgcagctgagcactgacaaggctggagtcgtggccgagtacccggccgagaagctggccttcagcgccgtgtgcccggacgaccggcgatttttcgggttggttaccatgcagacgaatgacgacgggagcctggcccaggaggaggagggcgccctgcggacttcctgccacgtgttcatggtggacccagacttgtttaatcacaagatccaccaaggcattgctcggcggtttgggtttgagtgcacggccgacccagacaccaatggctgtctggaattcccggcgtcctccctccccgtcctgcagttcatctctgtcctgtaccgagacatgggtgagctgattgagggcatgcgggcccgcgcctttctggacggggacgccgatgcccaccagaacaacagcaccagcagcaacagtgacagcggcattgggaacttccaccaggaggagaagagcaaccgggtccttgtggtggacctgggtgggagctcgagcagacacggccccggaggcagcgcgtgggacggtgtgggtgggaggggtgcccagccctggggtgctccctggactgggcccttctgtccggaccccgaagggagccccccatttgaggccgctcatcagactgacaggttctgggacctaaacaagcacctagggccagcctctcctgtggaggtgcccccagcttccttgaggagctcagtccccccttccaagaggggcaccgtgggtgctggctgtggtttcaaccagcgctggctcccggtccacgtgctccgggagtggcagtgcggacacaccagcgaccaggactcttacacagattccaccgatggctggtccagcatcaactgcggcacactgccccctcctatgagcaagatccccgcagaccgctacagggtggagggcagcttcgcgcagcccccgctgaatgccccgaagagggagtggtccaggaaggcctttggaatgcaaagcatttttggtccccatcgaaatgttcgaaagactaaggaagataaaaagagttgacgggcgccgacctgaaggactgcgtcagcaacaacagcctgagcagcaatgccagcctccccagcgtgcagagctgccggcgcctgcgtgagaggagggtcgccagctgggccgtgtcctttgagcgcctgctgcaggaccccgtcggtgtccgctacttctctgattttctaaggaaagaattcagtgaagaaaacattttattctggcaggcctgtgaatattttaatcatgttcctgcacatgacaaaaaggagctttcctacagggcccgggagattttcagtaagtttctctgcagcaaagccaccaccccggtcaacatcgacagccaggcccagctagcagacgacgtcctccgcgcacctcacccagacatgttcaaggagcagcagctgcagatcttcaatctcatgaagtttgatagctacactcgctttctgaagtccccgctgtaccaggaatgcatcctggcggaagtggagggccgtgcactcccggactcgcagcaggtccccagcagcccggcttccaagcacagcctcggttcagaccactccagtgtgtccacgccaaaaaagttaagtggaaaatcaaaatccggccgatccctgaatgaagagctgggggatgaggacagcgagaagaagcggaaaggcgcgtttttctcgtggtcgcggaccaggagcaccgggaggtcccagaaaaagagggagcacggggaccacgcagacgacgccctgcatgccaatggaggcctgtgtcgccgagagtcgcagggctctgtgtcctctgcggggagcctggacctgtcggaggcctgcaggactttggcacccgagaaggacaaggccaccaagcactgctgcattcatctcccggatgggacatcctgcgtggtggctgtcaaggcgggcttctccatcaaagacatcctgtccggactctgtgagcggcatggcatcaacggggcggccgcggacctcttcctggtgggcggggacaagcctctggtgctgcaccaagacagtagcatcttggagtcaagggacctgcgcctagaaaagcgcaccttgtttcggctggatcttgttccgattaaccggtcagtgggactcaaggccaagcccaccaagcccgtcacggaggtgctgcggcccgtggtggccagatacggcctggacctcagtggcctgctggtgaggctgagtggagagaaggagcccctggaccttggcgcccctatatcgagtctggacggacagcgggttgtcttggaggagaaggatccttccagaggaaaggcatccgcagataaacagaaaggtgtgccagtgaaacagaacacagctgtaaattccagctccagaaaccactcggctacgggagaggaaagaacactaggcaagtctaattctattaaaataaaaggagaaaatggaaaaaatgctagggatccccggctttcaaagagagaagaatctattgcaaagattgggaaaaaaaaatatcagaaaattaatttggacgaagcagaggagttttttgagcttatttccaaagctcagagcaacagagcagatgaccaacgtgggctgctaaggaaggaagacctggtgttgccagagttcctccgtttacctcctggttccacagaactcaccctccccactccagctgctgtggccaagggctttagcaagagaagcgccacaggcaacggccgggagagcgcctcccagcctggcgagcagtgggagccagtccaggagagcagcgacagtccgtccaccagcccgggctcagcctccagcccccctggacctcctgggacgaccccccccgggcagaagtctcccagcgggcccttctgcactccccagtcccccgtctccctcgcgcaggagggcaccgcccagatctggaagaggcagtctcaggaagtggaggccgggggcatccagacggtggaggatgagcacgtggccgagctgaccctgatgggggagggggacatcagcagccccaacagcaccttgctgccgccgccctccaccccccaggaagtgccaggaccttccagaccaggtacctccaggttctgatccctccaccttggccccgtaagcgtggtctgctcagcttccagtcagaaaggacagtgggcccccggctgccactgtttgctggtggtctccgtgaccccctcctcacctgctggttgggggcttccttggccctcttggaaaggaggggctcgtgtggccccaggccagtgtctgtcaggatggtccccccgaggcgctctgggcaggcatcctggtgtcctgagaggctcttgcaggaatgatacgtggcagtgcctgcagcgaggtctgggaacaccctgggtgaggcctgggggtttccgaaaatggaggcattcctttccaaatctggacagcgatcgtttttagtgtttctgtctcaagactggaaaacaatagcatttgtcttgagtgaggaagtgaagcccgctgtgttcatagcaggagagggctcccagacacaggcccgtcctcggaagagccttgagagtgcagctcggacccaccggcggcccccgtagcaggtggtgtgggtgctcgggagtggaggtgacgtcagcagcgctctctgaccgcgggtgtcacgggcatttctcaaaggaagcaggggattcagtgagtgtgaaggtgaacaggatggcctggcagcagggatgtttccgtgagccacaaataccagaaactgaggcgaggctcccagcagccggtagggaaaggtgtttccaggggtccgagggccgtggcctgcgtggccatcccctggagagaggagccgctcagggtgcgcgtcatggagtgtgctcaggggtgcgtggacacctctgctgtggtttgctgctgggggcgatgggagcgcctctccgtcctgtgccctggtccaggatgctgacagcagtgagaggcctgccgtgaggtttggtcttgtcagacctgtagcctggacctcgccgggggaccagggagtgcacgtctgtagatctgtacatatctgggcctttggaggccacgtgtggcatgggaggggctacctggtccctttcacagccaggacacgcctggatgagaaagcctgaggtgcctggcatgcccaccggtgccactctgcagcctccacccctggcctgagtccccctccatccgtcttggtggacacctgtgtggctctcacctgcgttttgagtctgttcttccaggagtaataaattctggacatcatca

SEQ ID NO: 78634 - DNA, 3619 bp, Homo sapiens
agcggagtcatttcctgcgccggagttggttgggtcttcagacaccagctgaatgcttagggattctttcatttcctaaagtgcttacaaaattatgaaaaagcacgactttgctgaaaacctgccttcatctttactaatcatcatactagtcatctttactctcagtggctcaaaatttgggcggggaactggactcactcagccttctcaacgcacgtctgctcggagatcatttgggagatccaagagattcagtatcactcgctcccttgatgatcttgagtctgcaactgtgtctgatggcgagttgacgggcgccgacctgaaggactgcgtcagcaacaacagcctgagcagcaatgccagcctccccagcgtgcagagctgccggcgcctgcgtgagaggagggtcgccagctgggccgtgtcctttgagcgcctgctgcaggaccccgtcggtgtccgctacttctctgattttctaaggaaagaattcagtgaagaaaacattttattctggcaggcctgtgaatattttaatcatgttcctgcacatgacaaaaaggagctttcctacagggcccgggagattttcagtaagtttctctgcagcaaagccaccaccccggtcaacatcgacagccaggcccagctagcagacgacgtcctccgcgcacctcacccagacatgttcaaggagcagcagctgcagatcttcaatctcatgaagtttgatagctacactcgctttctgaagtccccgctgtaccaggaatgcatcctggcggaagtggagggccgtgcactcccggactcgcagcaggtccccagcagcccggcttccaagcacagcctcggttcagaccactccagtgtgtccacgccaaaaaagttaagtggaaaatcaaaatccggccgatccctgaatgaagagctgggggatgaggacagcgagaagaagcggaaaggcgcgtttttctcgtggtcgcggaccaggagcaccgggaggtcccagaaaaagagggagcacggggaccacgcagacgacgccctgcatgccaatggaggcctgtgtcgccgagagtcgcagggctctgtgtcctctgcggggagcctggacctgtcggaggcctgcaggactttggcacccgagaaggacaaggccaccaagcactgctgcattcatctcccggatgggacatcctgcgtggtggctgtcaaggcgggcttctccatcaaagacatcctgtccggactctgtgagcggcatggcatcaacggggcggccgcggacctcttcctggtgggcggggacaagcctctggtgctgcaccaagacagtagcatcttggagtcaagggacctgcgcctagaaaagcgcaccttgtttcggctggatcttgttccgattaaccggtcagtgggactcaaggccaagcccaccaagcccgtcacggaggtgctgcggcccgtggtggccagatacggcctggacctcagtggcctgctggtgaggctgagtggagagaaggagcccctggaccttggcgcccctatatcgagtctggacggacagcgggttgtcttggaggagaaggatccttccagaggaaaggcatccgcagataaacagaaaggtgtgccagtgaaacagaacacagctgtaaattccagctccagaaaccactcggctacgggagaggaaagaacactaggcaagtctaattctattaaaataaaaggagaaaatggaaaaaatgctagggatccccggctttcaaagagagaagaatctattgcaaagattgggaaaaaaaaatatcagaaaattaatttggacgaagcagaggagttttttgagcttatttccaaagctcagagcaacagagcagatgaccaacgtgggctgctaaggaaggaagacctggtgttgccagagttcctccgtttacctcctggttccacagaactcaccctccccactccagctgctgtggccaagggctttagcaagagaagcgccacaggcaacggccgggagagcgcctcccagcctggcgagcagtgggagccagtccaggagagcagcgacagtccgtccaccagcccgggctcagcctccagcccccctggacctcctgggacgaccccccccgggcagaagtctcccagcgggcccttctgcactccccagtcccccgtctccctcgcgcaggagggcaccgcccagatctggaagaggcagtctcaggaagtggaggccgggggcatccagacggtggaggatgagcacgtggccgagctgaccctgatgggggagggggacatcagcagccccaacagcaccttgctgccgccgccctccaccccccaggaagtgccaggaccttccagaccaggtacctccaggttctgatccctccaccttggccccgtaagcgtggtctgctcagcttccagtcagaaaggacagtgggcccccggctgccactgtttgctggtggtctccgtgaccccctcctcacctgctggttgggggcttccttggccctcttggaaaggaggggctcgtgtggccccaggccagtgtctgtcaggatggtccccccgaggcgctctgggcaggcatcctggtgtcctgagaggctcttgcaggaatgatacgtggcagtgcctgcagcgaggtctgggaacaccctgggtgaggcctgggggtttccgaaaatggaggcattcctttccaaatctggacagcgatcgtttttagtgtttctgtctcaagactggaaaacaatagcatttgtcttgagtgaggaagtgaagcccgctgtgttcatagcaggagagggctcccagacacaggcccgtcctcggaagagccttgagagtgcagctcggacccaccggcggcccccgtagcaggtggtgtgggtgctcgggagtggaggtgacgtcagcagcgctctctgaccgcgggtgtcacgggcatttctcaaaggaagcaggggattcagtgagtgtgaaggtgaacaggatggcctggcagcagggatgtttccgtgagccacaaataccagaaactgaggcgaggctcccagcagccggtagggaaaggtgtttccaggggtccgagggccgtggcctgcgtggccatcccctggagagaggagccgctcagggtgcgcgtcatggagtgtgctcaggggtgcgtggacacctctgctgtggtttgctgctgggggcgatgggagcgcctctccgtcctgtgccctggtccaggatgctgacagcagtgagaggcctgccgtgaggtttggtcttgtcagacctgtagcctggacctcgccgggggaccagggagtgcacgtctgtagatctgtacatatctgggcctttggaggccacgtgtggcatgggaggggctacctggtccctttcacagccaggacacgcctggatgagaaagcctgaggtgcctggcatgcccaccggtgccactctgcagcctccacccctggcctgagtccccctccatccgtcttggtggacacctgtgtggctctcacctgcgttttgagtctgttcttccaggagtaataaattctggacatcatca

SEQ ID NO: 78635 - DNA, 3341 bp, Homo sapiens
gtgctctgtgtgcacatgctcctgtgtaagagttgacgggcgccgacctgaaggactgcgtcagcaacaacagcctgagcagcaatgccagcctccccagcgtgcagagctgccggcgcctgcgtgagaggagggtcgccagctgggccgtgtcctttgagcgcctgctgcaggaccccgtcggtgtccgctacttctctgattttctaaggaaagaattcagtgaagaaaacattttattctggcaggcctgtgaatattttaatcatgttcctgcacatgacaaaaaggagctttcctacagggcccgggagattttcagtaagtttctctgcagcaaagccaccaccccggtcaacatcgacagccaggcccagctagcagacgacgtcctccgcgcacctcacccagacatgttcaaggagcagcagctgcagatcttcaatctcatgaagtttgatagctacactcgctttctgaagtccccgctgtaccaggaatgcatcctggcggaagtggagggccgtgcactcccggactcgcagcaggtccccagcagcccggcttccaagcacagcctcggttcagaccactccagtgtgtccacgccaaaaaagttaagtggaaaatcaaaatccggccgatccctgaatgaagagctgggggatgaggacagcgagaagaagcggaaaggcgcgtttttctcgtggtcgcggaccaggagcaccgggaggtcccagaaaaagagggagcacggggaccacgcagacgacgccctgcatgccaatggaggcctgtgtcgccgagagtcgcagggctctgtgtcctctgcggggagcctggacctgtcggaggcctgcaggactttggcacccgagaaggacaaggccaccaagcactgctgcattcatctcccggatgggacatcctgcgtggtggctgtcaaggcgggcttctccatcaaagacatcctgtccggactctgtgagcggcatggcatcaacggggcggccgcggacctcttcctggtgggcggggacaagcctctggtgctgcaccaagacagtagcatcttggagtcaagggacctgcgcctagaaaagcgcaccttgtttcggctggatcttgttccgattaaccggtcagtgggactcaaggccaagcccaccaagcccgtcacggaggtgctgcggcccgtggtggccagatacggcctggacctcagtggcctgctggtgaggctgagtggagagaaggagcccctggaccttggcgcccctatatcgagtctggacggacagcgggttgtcttggaggagaaggatccttccagaggaaaggcatccgcagataaacagaaaggtgtgccagtgaaacagaacacagctgtaaattccagctccagaaaccactcggctacgggagaggaaagaacactaggcaagtctaattctattaaaataaaaggagaaaatggaaaaaatgctagggatccccggctttcaaagagagaagaatctattgcaaagattgggaaaaaaaaatatcagaaaattaatttggacgaagcagaggagttttttgagcttatttccaaagctcagagcaacagagcagatgaccaacgtgggctgctaaggaaggaagacctggtgttgccagagttcctccgtttacctcctggttccacagaactcaccctccccactccagctgctgtggccaagggctttagcaagagaagcgccacaggcaacggccgggagagcgcctcccagcctggcgagcagtgggagccagtccaggagagcagcgacagtccgtccaccagcccgggctcagcctccagcccccctggacctcctgggacgaccccccccgggcagaagtctcccagcgggcccttctgcactccccagtcccccgtctccctcgcgcaggagggcaccgcccagatctggaagaggcagtctcaggaagtggaggccgggggcatccagacggtggaggatgagcacgtggccgagctgaccctgatgggggagggggacatcagcagccccaacagcaccttgctgccgccgccctccaccccccaggaagtgccaggaccttccagaccaggtacctccaggttctgatccctccaccttggccccgtaagcgtggtctgctcagcttccagtcagaaaggacagtgggcccccggctgccactgtttgctggtggtctccgtgaccccctcctcacctgctggttgggggcttccttggccctcttggaaaggaggggctcgtgtggccccaggccagtgtctgtcaggatggtccccccgaggcgctctgggcaggcatcctggtgtcctgagaggctcttgcaggaatgatacgtggcagtgcctgcagcgaggtctgggaacaccctgggtgaggcctgggggtttccgaaaatggaggcattcctttccaaatctggacagcgatcgtttttagtgtttctgtctcaagactggaaaacaatagcatttgtcttgagtgaggaagtgaagcccgctgtgttcatagcaggagagggctcccagacacaggcccgtcctcggaagagccttgagagtgcagctcggacccaccggcggcccccgtagcaggtggtgtgggtgctcgggagtggaggtgacgtcagcagcgctctctgaccgcgggtgtcacgggcatttctcaaaggaagcaggggattcagtgagtgtgaaggtgaacaggatggcctggcagcagggatgtttccgtgagccacaaataccagaaactgaggcgaggctcccagcagccggtagggaaaggtgtttccaggggtccgagggccgtggcctgcgtggccatcccctggagagaggagccgctcagggtgcgcgtcatggagtgtgctcaggggtgcgtggacacctctgctgtggtttgctgctgggggcgatgggagcgcctctccgtcctgtgccctggtccaggatgctgacagcagtgagaggcctgccgtgaggtttggtcttgtcagacctgtagcctggacctcgccgggggaccagggagtgcacgtctgtagatctgtacatatctgggcctttggaggccacgtgtggcatgggaggggctacctggtccctttcacagccaggacacgcctggatgagaaagcctgaggtgcctggcatgcccaccggtgccactctgcagcctccacccctggcctgagtccccctccatccgtcttggtggacacctgtgtggctctcacctgcgttttgagtctgttcttccaggagtaataaattctggacatcatca

SEQ ID NO: 78636 - DNA, 3798 bp, Homo sapiens
cgagtatggccctgggtggcgtcatggcacacaggcactgagtggactgttggtggctgcccccgagtgtggtcctgggtggcgtcacggcacgtgggcactgagtgggctgttggtggctgcccccagtgtgtgtgtcacttacagggcatgatgctactgaagtttgtgaagttggtttcattgacgctgttactaagactgtaatgtcagacatgttgggatctgttcttttcacatgaaaaggatgacttcctcttgttgggtgtcacctagtttgggcggagtgggagccgtgactcttgactcattgggccgtctggctttcccgggacacctccacctggagagtgcctctgagaacctcccagagtctgccccttgtgttcctcagatggacttttcgtttcctggagttttgtcatgaggcttaattaactcatgtctctctctcttttctttcagtctgcaactgtgtctgatggcgagttgacgggcgccgacctgaaggactgcgtcagcaacaacagcctgagcagcaatgccagcctccccagcgtgcagagctgccggcgcctgcgtgagaggagggtcgccagctgggccgtgtcctttgagcgcctgctgcaggaccccgtcggtgtccgctacttctctgattttctaaggaaagaattcagtgaagaaaacattttattctggcaggcctgtgaatattttaatcatgttcctgcacatgacaaaaaggagctttcctacagggcccgggagattttcagtaagtttctctgcagcaaagccaccaccccggtcaacatcgacagccaggcccagctagcagacgacgtcctccgcgcacctcacccagacatgttcaaggagcagcagctgcagatcttcaatctcatgaagtttgatagctacactcgctttctgaagtccccgctgtaccaggaatgcatcctggcggaagtggagggccgtgcactcccggactcgcagcaggtccccagcagcccggcttccaagcacagcctcggttcagaccactccagtgtgtccacgccaaaaaagttaagtggaaaatcaaaatccggccgatccctgaatgaagagctgggggatgaggacagcgagaagaagcggaaaggcgcgtttttctcgtggtcgcggaccaggagcaccgggaggtcccagaaaaagagggagcacggggaccacgcagacgacgccctgcatgccaatggaggcctgtgtcgccgagagtcgcagggctctgtgtcctctgcggggagcctggacctgtcggaggcctgcaggactttggcacccgagaaggacaaggccaccaagcactgctgcattcatctcccggatgggacatcctgcgtggtggctgtcaaggcgggcttctccatcaaagacatcctgtccggactctgtgagcggcatggcatcaacggggcggccgcggacctcttcctggtgggcggggacaagcctctggtgctgcaccaagacagtagcatcttggagtcaagggacctgcgcctagaaaagcgcaccttgtttcggctggatcttgttccgattaaccggtcagtgggactcaaggccaagcccaccaagcccgtcacggaggtgctgcggcccgtggtggccagatacggcctggacctcagtggcctgctggtgaggctgagtggagagaaggagcccctggaccttggcgcccctatatcgagtctggacggacagcgggttgtcttggaggagaaggatccttccagaggaaaggcatccgcagataaacagaaaggtgtgccagtgaaacagaacacagctgtaaattccagctccagaaaccactcggctacgggagaggaaagaacactaggcaagtctaattctattaaaataaaaggagaaaatggaaaaaatgctagggatccccggctttcaaagagagaagaatctattgcaaagattgggaaaaaaaaatatcagaaaattaatttggacgaagcagaggagttttttgagcttatttccaaagctcagagcaacagagcagatgaccaacgtgggctgctaaggaaggaagacctggtgttgccagagttcctccgtttacctcctggttccacagaactcaccctccccactccagctgctgtggccaagggctttagcaagagaagcgccacaggcaacggccgggagagcgcctcccagcctggcgagcagtgggagccagtccaggagagcagcgacagtccgtccaccagcccgggctcagcctccagcccccctggacctcctgggacgaccccccccgggcagaagtctcccagcgggcccttctgcactccccagtcccccgtctccctcgcgcaggagggcaccgcccagatctggaagaggcagtctcaggaagtggaggccgggggcatccagacggtggaggatgagcacgtggccgagctgaccctgatgggggagggggacatcagcagccccaacagcaccttgctgccgccgccctccaccccccaggaagtgccaggaccttccagaccaggtacctccaggttctgatccctccaccttggccccgtaagcgtggtctgctcagcttccagtcagaaaggacagtgggcccccggctgccactgtttgctggtggtctccgtgaccccctcctcacctgctggttgggggcttccttggccctcttggaaaggaggggctcgtgtggccccaggccagtgtctgtcaggatggtccccccgaggcgctctgggcaggcatcctggtgtcctgagaggctcttgcaggaatgatacgtggcagtgcctgcagcgaggtctgggaacaccctgggtgaggcctgggggtttccgaaaatggaggcattcctttccaaatctggacagcgatcgtttttagtgtttctgtctcaagactggaaaacaatagcatttgtcttgagtgaggaagtgaagcccgctgtgttcatagcaggagagggctcccagacacaggcccgtcctcggaagagccttgagagtgcagctcggacccaccggcggcccccgtagcaggtggtgtgggtgctcgggagtggaggtgacgtcagcagcgctctctgaccgcgggtgtcacgggcatttctcaaaggaagcaggggattcagtgagtgtgaaggtgaacaggatggcctggcagcagggatgtttccgtgagccacaaataccagaaactgaggcgaggctcccagcagccggtagggaaaggtgtttccaggggtccgagggccgtggcctgcgtggccatcccctggagagaggagccgctcagggtgcgcgtcatggagtgtgctcaggggtgcgtggacacctctgctgtggtttgctgctgggggcgatgggagcgcctctccgtcctgtgccctggtccaggatgctgacagcagtgagaggcctgccgtgaggtttggtcttgtcagacctgtagcctggacctcgccgggggaccagggagtgcacgtctgtagatctgtacatatctgggcctttggaggccacgtgtggcatgggaggggctacctggtccctttcacagccaggacacgcctggatgagaaagcctgaggtgcctggcatgcccaccggtgccactctgcagcctccacccctggcctgagtccccctccatccgtcttggtggacacctgtgtggctctcacctgcgttttgagtctgttcttccaggagtaataaattctggacatcatca

SEQ ID NO: 78637 - DNA, 3708 bp, Homo sapiens
cgaccccacactgctcgcgtcaggagggacgggggcgcccccccacactgctcgcgtcaggagggacgggggcgcccccacactgctcgcatccagtggacaagggtgatgaacggggatttcctggggacctcccttctctttattcgagagctcaggagatactgggaaccaaaggctactgagggccgttttgcagacacgtcaggcaggatccggtgtcctgggagcgcgctgtgccatatcccacatcgggtctcctgtaaatgagccgccgagccgacatgcgtggctgagggcttagctctggacactgtgcctgagagtttcgtgttgagaaggagcccacatgcagagcagtgtgcagtcacgggtgtgtgggcttcgcatccggaagagttgacgggcgccgacctgaaggactgcgtcagcaacaacagcctgagcagcaatgccagcctccccagcgtgcagagctgccggcgcctgcgtgagaggagggtcgccagctgggccgtgtcctttgagcgcctgctgcaggaccccgtcggtgtccgctacttctctgattttctaaggaaagaattcagtgaagaaaacattttattctggcaggcctgtgaatattttaatcatgttcctgcacatgacaaaaaggagctttcctacagggcccgggagattttcagtaagtttctctgcagcaaagccaccaccccggtcaacatcgacagccaggcccagctagcagacgacgtcctccgcgcacctcacccagacatgttcaaggagcagcagctgcagatcttcaatctcatgaagtttgatagctacactcgctttctgaagtccccgctgtaccaggaatgcatcctggcggaagtggagggccgtgcactcccggactcgcagcaggtccccagcagcccggcttccaagcacagcctcggttcagaccactccagtgtgtccacgccaaaaaagttaagtggaaaatcaaaatccggccgatccctgaatgaagagctgggggatgaggacagcgagaagaagcggaaaggcgcgtttttctcgtggtcgcggaccaggagcaccgggaggtcccagaaaaagagggagcacggggaccacgcagacgacgccctgcatgccaatggaggcctgtgtcgccgagagtcgcagggctctgtgtcctctgcggggagcctggacctgtcggaggcctgcaggactttggcacccgagaaggacaaggccaccaagcactgctgcattcatctcccggatgggacatcctgcgtggtggctgtcaaggcgggcttctccatcaaagacatcctgtccggactctgtgagcggcatggcatcaacggggcggccgcggacctcttcctggtgggcggggacaagcctctggtgctgcaccaagacagtagcatcttggagtcaagggacctgcgcctagaaaagcgcaccttgtttcggctggatcttgttccgattaaccggtcagtgggactcaaggccaagcccaccaagcccgtcacggaggtgctgcggcccgtggtggccagatacggcctggacctcagtggcctgctggtgaggctgagtggagagaaggagcccctggaccttggcgcccctatatcgagtctggacggacagcgggttgtcttggaggagaaggatccttccagaggaaaggcatccgcagataaacagaaaggtgtgccagtgaaacagaacacagctgtaaattccagctccagaaaccactcggctacgggagaggaaagaacactaggcaagtctaattctattaaaataaaaggagaaaatggaaaaaatgctagggatccccggctttcaaagagagaagaatctattgcaaagattgggaaaaaaaaatatcagaaaattaatttggacgaagcagaggagttttttgagcttatttccaaagctcagagcaacagagcagatgaccaacgtgggctgctaaggaaggaagacctggtgttgccagagttcctccgtttacctcctggttccacagaactcaccctccccactccagctgctgtggccaagggctttagcaagagaagcgccacaggcaacggccgggagagcgcctcccagcctggcgagcagtgggagccagtccaggagagcagcgacagtccgtccaccagcccgggctcagcctccagcccccctggacctcctgggacgaccccccccgggcagaagtctcccagcgggcccttctgcactccccagtcccccgtctccctcgcgcaggagggcaccgcccagatctggaagaggcagtctcaggaagtggaggccgggggcatccagacggtggaggatgagcacgtggccgagctgaccctgatgggggagggggacatcagcagccccaacagcaccttgctgccgccgccctccaccccccaggaagtgccaggaccttccagaccaggtacctccaggttctgatccctccaccttggccccgtaagcgtggtctgctcagcttccagtcagaaaggacagtgggcccccggctgccactgtttgctggtggtctccgtgaccccctcctcacctgctggttgggggcttccttggccctcttggaaaggaggggctcgtgtggccccaggccagtgtctgtcaggatggtccccccgaggcgctctgggcaggcatcctggtgtcctgagaggctcttgcaggaatgatacgtggcagtgcctgcagcgaggtctgggaacaccctgggtgaggcctgggggtttccgaaaatggaggcattcctttccaaatctggacagcgatcgtttttagtgtttctgtctcaagactggaaaacaatagcatttgtcttgagtgaggaagtgaagcccgctgtgttcatagcaggagagggctcccagacacaggcccgtcctcggaagagccttgagagtgcagctcggacccaccggcggcccccgtagcaggtggtgtgggtgctcgggagtggaggtgacgtcagcagcgctctctgaccgcgggtgtcacgggcatttctcaaaggaagcaggggattcagtgagtgtgaaggtgaacaggatggcctggcagcagggatgtttccgtgagccacaaataccagaaactgaggcgaggctcccagcagccggtagggaaaggtgtttccaggggtccgagggccgtggcctgcgtggccatcccctggagagaggagccgctcagggtgcgcgtcatggagtgtgctcaggggtgcgtggacacctctgctgtggtttgctgctgggggcgatgggagcgcctctccgtcctgtgccctggtccaggatgctgacagcagtgagaggcctgccgtgaggtttggtcttgtcagacctgtagcctggacctcgccgggggaccagggagtgcacgtctgtagatctgtacatatctgggcctttggaggccacgtgtggcatgggaggggctacctggtccctttcacagccaggacacgcctggatgagaaagcctgaggtgcctggcatgcccaccggtgccactctgcagcctccacccctggcctgagtccccctccatccgtcttggtggacacctgtgtggctctcacctgcgttttgagtctgttcttccaggagtaataaattctggacatcatca

SEQ ID NO: 78638 - DNA, 4002 bp, Homo sapiens
ccgttgcgcgcgcgggcggtggcgcgggccgaagcgcccggagcgggagcgagcggcgcggcccgggcactgtttgaagaagcaaacatggtagcatcaagcattccttgaaatatggctccaagggaacaatgagacgtgctcttggtcttggaagctcatcagaatgtttagagctggggaggcctccaaacgcccattgcctgggccgtcgcccccaagggtgcggagtgtggaggttgcccgggggagggccggctacggattcacgctttcgggacaggcaccctgtgtgctcagctgcgtcatgagagggagccctgcggatttcgtgggcctccgagctggagaccagatacttgctgtcaatgaaatcaacgtgaaaaaagcatctcatgaagatgtagtgaaattaattgggaagtgctctggtgtccttcacatggtgattgctgaaggcgtcggccgcttcgaatcctgttccagtgatgaagaagggggactctatgaaggaaaaggctggctgaagcccaagctggattctaaagcactaggtataaacagagcagagcgagtcgtggaggaaatgcagtctggtggaattttcaatatgatttttgaaaacccgagcctttgtgcgagcaattcagagcccttgaaattgaaacaaagatccctttcggagtcggccgcaactcgatttgatgttggacatgaaagtataaataatccaaatcccaacatgctttctaaggaggaaatatcaaaagttattcatgatgattcggttttcagcattggactagaaagtcatgacgattttgcattggatgcaagtattttaaacgtggcgatgatcgtgggctacttaggctccattgagcttccttccacgagctccaacctggagtccgacagcttgcaagccatccgcggctgcatgcggcgcctgcgggcagagcagaaaatccactcgctggtgaccatgaagatcatgcacgactgtgtgcagctgagcactgacaaggctggagtcgtggccgagtacccggccgagaagctggccttcagcgccgtgtgcccggacgaccggcgatttttcgggttggttaccatgcagacgaatgacgacgggagcctggcccaggaggaggagggcgccctgcggacttcctgccacgtgttcatggtggacccagacttgtttaatcacaagatccaccaaggcattgctcggcggtttgggtttgagtgcacggccgacccagacaccaatggctgtctggaattcccggcgtcctccctccccgtcctgcagttcatctctgtcctgtaccgagacatgggtgagctgattgagggcatgcgggcccgcgcctttctggacggggacgccgatgcccaccagaacaacagcaccagcagcaacagtgacagcggcattgggaacttccaccaggaggagaagagcaaccgggtccttgtggtggacctgggtgggagctcgagcagacacggccccggaggcagcgcgtgggacggtgtgggtgggaggggtgcccagccctggggtgctccctggactgggcccttctgtccggaccccgaagggagccccccatttgaggccgctcatcagactgacaggttctgggacctaaacaagcacctagggccagcctctcctgtggaggtgcccccagcttccttgaggagctcagtccccccttccaagaggggcaccgtgggtgctggctgtggtttcaaccagcgctggctcccggtccacgtgctccgggagtggcagtgcggacacaccagcgaccaggactcttacacagattccaccgatggctggtccagcatcaactgcggcacactgccccctcctatgagcaagatccccgcagaccgctacagggtggagggcagcttcgcgcagcccccgctgaatgccccgaagagggagtggtccaggaaggcctttggaatgcaaagcatttttggtccccatcgaaatgttcgaaagactaaggaagataaaaagggctcaaaatttgggcggggaactggactcactcagccttctcaacgcacgtctgctcggagatcatttgggagatccaagagattcagtatcactcgctcccttgatgatcttgagtctgcaactgtgtctgatggcgagttgacgggcgccgacctgaaggactgcgtcagcaacaacagcctgagcagcaatgccagcctccccagcgtgcagagctgccggcgcctgcgtgagaggagggtcgccagctgggccgtgtcctttgagcgcctgctgcaggaccccgtcggtgtccgctacttctctgattttctaaggaaagaattcagtgaagaaaacattttattctggcaggcctgtgaatattttaatcatgttcctgcacatgacaaaaaggagctttcctacagggcccgggagattttcagtaagtttctctgcagcaaagccaccaccccggtcaacatcgacagccaggcccagctagcagacgacgtcctccgcgcacctcacccagacatgttcaaggagcagcagctgcagatcttcaatctcatgaagtttgatagctacactcgctttctgaagtccccgctgtaccaggaatgcatcctggcggaagtggagggccgtgcactcccggactcgcagcaggtccccagcagcccggcttccaagcacagcctcggttcagaccactccagtgtgtccacgccaaaaaagttaagtggaaaatcaaaatccggccgatccctgaatgaagagctgggggatgaggacagcgagaagaagcggaaaggcgcgtttttctcgtggtcgcggaccaggagcaccgggaggtcccagaaaaagagggagcacggggaccacgcagacgacgccctgcatgccaatggaggcctgtgtcgccgagagtcgcagggctctgtgtcctctgcggggagcctggacctgtcggaggcctgcaggactttggcacccgagaaggacaaggccaccaagcactgctgcattcatctcccggatgggacatcctgcgtggtggctgtcaaggcgggcttctccatcaaagacatcctgtccggactctgtgagcggcatggcatcaacggggcggccgcggacctcttcctggtgggcggggacaagcctctggtgctgcaccaagacagtagcatcttggagtcaagggacctgcgcctagaaaagcgcaccttgtttcggctggatcttgttccgattaaccggtcagtgggactcaaggccaagcccaccaagcccgtcacggaggtgctgcggcccgtggtggccagatacggcctggacctcagtggcctgctggtgaggctgagtggagagaaggagcccctggaccttggcgcccctatatcgagtctggacggacagcgggttgtcttggaggagaaggatccttccagaggaaaggcatccgcagataaacagaaaggtgtgccagtgaaacagaacacagctgtaaattccagctccagaaaccactcggctacgggagaggaaagaacactaggcaagtctaattctattaaaataaaaggagaaaatggaaaaaatgctagggatccccggctttcaaagagagaagaatctattgcaaagattgggaaaaaaaaatatcagaaaattaatttggacgaagcagagggtatgtgaactttttaaaacttccacgtttttagtaaatgcacagttagtttccagtatagtcagtagatctgctttgagctgtcagcatctgggtgactgcggtccgtccctgtggcctggaagacatgtttctcccgggggcagtctgtgggctgttgggatcactccaccgaaaccccagttttgagactgagtgccaggcctcctagggcatcaggggcagccgatgtgagcagcactgtctgccctgagatgccagagcccccgca

SEQ ID NO: 78639 - DNA, 5515 bp, Homo sapiens
ccgttgcgcgcgcgggcggtggcgcgggccgaagcgcccggagcgggagcgagcggcgcggcccgggcactgtttgaagaagcaaacatggtagcatcaagcattccttgaaatatggctccaagggaacaatgagacgtgctcttggtcttggaagctcatcagaatgtttagagctggggaggcctccaaacgcccattgcctgggccgtcgcccccaagggtgcggagtgtggaggttgcccgggggagggccggctacggattcacgctttcgggacaggcaccctgtgtgctcagctgcgtcatgagagggagccctgcggatttcgtgggcctccgagctggagaccagatacttgctgtcaatgaaatcaacgtgaaaaaagcatctcatgaagatgtagtgaaattaattgggaagtgctctggtgtccttcacatggtgattgctgaaggcgtcggccgcttcgaatcctgttccagtgatgaagaagggggactctatgaaggaaaaggctggctgaagcccaagctggattctaaagcactaggtataaacagagcagagcgagtcgtggaggaaatgcagtctggtggaattttcaatatgatttttgaaaacccgagcctttgtgcgagcaattcagagcccttgaaattgaaacaaagatccctttcggagtcggccgcaactcgatttgatgttggacatgaaagtataaataatccaaatcccaacatgctttctaaggaggaaatatcaaaagttattcatgatgattcggttttcagcattggactagaaagtcatgacgattttgcattggatgcaagtattttaaacgtggcgatgatcgtgggctacttaggctccattgagcttccttccacgagctccaacctggagtccgacagcttgcaagccatccgcggctgcatgcggcgcctgcgggcagagcagaaaatccactcgctggtgaccatgaagatcatgcacgactgtgtgcagctgagcactgacaaggctggagtcgtggccgagtacccggccgagaagctggccttcagcgccgtgtgcccggacgaccggcgatttttcgggttggttaccatgcagacgaatgacgacgggagcctggcccaggaggaggagggcgccctgcggacttcctgccacgtgttcatggtggacccagacttgtttaatcacaagatccaccaaggcattgctcggcggtttgggtttgagtgcacggccgacccagacaccaatggctgtctggaattcccggcgtcctccctccccgtcctgcagttcatctctgtcctgtaccgagacatgggtgagctgattgagggcatgcgggcccgcgcctttctggacggggacgccgatgcccaccagaacaacagcaccagcagcaacagtgacagcggcattgggaacttccaccaggaggagaagagcaaccgggtccttgtggtggacctgggtgggagctcgagcagacacggccccggaggcagcgcgtgggacggtgtgggtgggaggggtgcccagccctggggtgctccctggactgggcccttctgtccggaccccgaagggagccccccatttgaggccgctcatcagactgacaggttctgggacctaaacaagcacctagggccagcctctcctgtggaggtgcccccagcttccttgaggagctcagtccccccttccaagaggggcaccgtgggtgctggctgtggtttcaaccagcgctggctcccggtccacgtgctccgggagtggcagtgcggacacaccagcgaccaggactcttacacagattccaccgatggctggtccagcatcaactgcggcacactgccccctcctatgagcaagatccccgcagaccgctacagggtggagggcagcttcgcgcagcccccgctgaatgccccgaagagggagtggtccaggaaggcctttggaatgcaaagcatttttggtccccatcgaaatgttcgaaagactaaggaagataaaaagggctcaaaatttgggcggggaactggactcactcagccttctcaacgcacgtctgctcggagatcatttgggagatccaagagattcagtatcactcgctcccttgatgatcttgagtctgcaactgtgtctgatggcgagttgacgggcgccgacctgaaggactgcgtcagcaacaacagcctgagcagcaatgccagcctccccagcgtgcagagctgccggcgcctgcgtgagaggagggtcgccagctgggccgtgtcctttgagcgcctgctgcaggaccccgtcggtgtccgctacttctctgattttctaaggaaagaattcagtgaagaaaacattttattctggcaggcctgtgaatattttaatcatgttcctgcacatgacaaaaaggagctttcctacagggcccgggagattttcagtaagtttctctgcagcaaagccaccaccccggtcaacatcgacagccaggcccagctagcagacgacgtcctccgcgcacctcacccagacatgttcaaggagcagcagctgcagatcttcaatctcatgaagtttgatagctacactcgctttctgaagtccccgctgtaccaggaatgcatcctggcggaagtggagggccgtgcactcccggactcgcagcaggtccccagcagcccggcttccaagcacagcctcggttcagaccactccagtgtgtccacgccaaaaaagttaagtggaaaatcaaaatccggccgatccctgaatgaagagctgggggatgaggacagcgagaagaagcggaaaggcgcgtttttctcgtggtcgcggaccaggagcaccgggaggtcccagaaaaagagggagcacggggaccacgcagacgacgccctgcatgccaatggaggcctgtgtcgccgagagtcgcagggctctgtgtcctctgcggggagcctggacctgtcggaggcctgcaggactttggcacccgagaaggacaaggccaccaagcactgctgcattcatctcccggatgggacatcctgcgtggtggctgtcaaggcgggcttctccatcaaagacatcctgtccggactctgtgagcggcatggcatcaacggggcggccgcggacctcttcctggtgggcggggacaagcctctggtgctgcaccaagacagtagcatcttggagtcaagggacctgcgcctagaaaagcgcaccttgtttcggctggatcttgttccgattaaccggtcagtgggactcaaggccaagcccaccaagcccgtcacggaggtgctgcggcccgtggtggccagatacggcctggacctcagtggcctgctggtgaggctgtgctgatctctgccctagagtggagagaaggagcccctggaccttggcgcccctatatcgagtctggacggacagcgggttgtcttggaggagaaggatccttccagaggaaaggcatccgcagataaacagaaaggtgtgccagtgaaacagaacacagctgtaaattccagctccagaaaccactcggctacgggagaggaaagaacactaggcaagtctaattctattaaaataaaaggagaaaatggaaaaaatgctagggatccccggctttcaaagagagaagaatctattgcaaagattgggaaaaaaaaatatcagaaaattaatttggacgaagcagaggagttttttgagcttatttccaaagctcagagcaacagagcagatgaccaacgtgggctgctaaggaaggaagacctggtgttgccagagttcctccgtttacctcctggttccacagaactcaccctccccactccagctgctgtggccaagggctttagcaagagaagcgccacaggcaacggccgggagagcgcctcccagcctggcgagcagtgggagccagtccaggagagcagcgacagtccgtccaccagcccgggctcagcctccagcccccctggacctcctgggacgaccccccccgggcagaagtctcccagcgggcccttctgcactccccagtcccccgtctccctcgcgcaggagggcaccgcccagatctggaagaggcagtctcaggaagtggaggccgggggcatccagacggtggaggatgagcacgtggccgagctgaccctgatgggggagggggacatcagcagccccaacagcaccttgctgccgccgccctccaccccccaggaagtgccaggaccttccagaccaggtacctccaggttctgatccctccaccttggccccgtaagcgtggtctgctcagcttccagtcagaaaggacagtgggcccccggctgccactgtttgctggtggtctccgtgaccccctcctcacctgctggttgggggcttccttggccctcttggaaaggaggggctcgtgtggccccaggccagtgtctgtcaggatggtccccccgaggcgctctgggcaggcatcctggtgtcctgagaggctcttgcaggaatgatacgtggcagtgcctgcagcgaggtctgggaacaccctgggtgaggcctgggggtttccgaaaatggaggcattcctttccaaatctggacagcgatcgtttttagtgtttctgtctcaagactggaaaacaatagcatttgtcttgagtgaggaagtgaagcccgctgtgttcatagcaggagagggctcccagacacaggcccgtcctcggaagagccttgagagtgcagctcggacccaccggcggcccccgtagcaggtggtgtgggtgctcgggagtggaggtgacgtcagcagcgctctctgaccgcgggtgtcacgggcatttctcaaaggaagcaggggattcagtgagtgtgaaggtgaacaggatggcctggcagcagggatgtttccgtgagccacaaataccagaaactgaggcgaggctcccagcagccggtagggaaaggtgtttccaggggtccgagggccgtggcctgcgtggccatcccctggagagaggagccgctcagggtgcgcgtcatggagtgtgctcaggggtgcgtggacacctctgctgtggtttgctgctgggggcgatgggagcgcctctccgtcctgtgccctggtccaggatgctgacagcagtgagaggcctgccgtgaggtttggtcttgtcagacctgtagcctggacctcgccgggggaccagggagtgcacgtctgtagatctgtacatatctgggcctttggaggccacgtgtggcatgggaggggctacctggtccctttcacagccaggacacgcctggatgagaaagcctgaggtgcctggcatgcccaccggtgccactctgcagcctccacccctggcctgagtccccctccatccgtcttggtggacacctgtgtggctctcacctgcgttttgagtctgttcttccaggagtaataaattctggacatcatca

SEQ ID NO: 78640 - DNA, 4217 bp, Homo sapiens
ccgttgcgcgcgcgggcggtggcgcgggccgaagcgcccggagcgggagcgagcggcgcggcccgggcactgtttgaagaagcaaacatggtagcatcaagcattccttgaaatatggctccaagggaacaatgagacgtgctcttggtcttggaagctcatcagaatgtttagagctggggaggcctccaaacgcccattgcctgggccgtcgcccccaagggtgcggagtgtggaggttgcccgggggagggccggctacggattcacgctttcgggacaggcaccctgtgtgctcagctgcgtcatgagagggagccctgcggatttcgtgggcctccgagctggagaccagatacttgctgtcaatgaaatcaacgtgaaaaaagcatctcatgaagatgtagtgaaattaattgggaagtgctctggtgtccttcacatggtgattgctgaaggcgtcggccgcttcgaatcctgttccagtgatgaagaagggggactctatgaaggaaaaggctggctgaagcccaagctggattctaaagcactaggtataaacagagcagagcgagtcgtggaggaaatgcagtctggtggaattttcaatatgatttttgaaaacccgagcctttgtgcgagcaattcagagcccttgaaattgaaacaaagatccctttcggagtcggccgcaactcgatttgatgttggacatgaaagtataaataatccaaatcccaacatgctttctaaggaggaaatatcaaaagttattcatgatgattcggttttcagcattggactagaaagtcatgacgattttgcattggatgcaagtattttaaacgtggcgatgatcgtgggctacttaggctccattgagcttccttccacgagctccaacctggagtccgacagcttgcaagccatccgcggctgcatgcggcgcctgcgggcagagcagaaaatccactcgctggtgaccatgaagatcatgcacgactgtgtgcagctgagcactgacaaggctggagtcgtggccgagtacccggccgagaagctggccttcagcgccgtgtgcccggacgaccggcgatttttcgggttggttaccatgcagacgaatgacgacgggagcctggcccaggaggaggagggcgccctgcggacttcctgccacgtgttcatggtggacccagacttgtttaatcacaagatccaccaaggcattgctcggcggtttgggtttgagtgcacggccgacccagacaccaatggctgtctggaattcccggcgtcctccctccccgtcctgcagttcatctctgtcctgtaccgagacatgggtgagctgattgagggcatgcgggcccgcgcctttctggacggggacgccgatgcccaccagaacaacagcaccacaggtccccagcagcccggcttccaagcacagcctcggttcagaccactccagtgtgtccacgccaaaaaagttaagtggaaaatcaaaatccggccgatccctgaatgaagagctgggggatgaggacagcgagaagaagcggaaaggcgcgtttttctcgtggtcgcggaccaggagcaccgggaggtcccagaaaaagagggagcacggggaccacgcagacgacgccctgcatgccaatggaggcctgtgtcgccgagagtcgcagggctctgtgtcctctgcggggagcctggacctgtcggaggcctgcaggactttggcacccgagaaggacaaggccaccaagcactgctgcattcatctcccggatgggacatcctgcgtggtggctgtcaaggcgggcttctccatcaaagacatcctgtccggactctgtgagcggcatggcatcaacggggcggccgcggacctcttcctggtgggcggggacaagcctctggtgctgcaccaagacagtagcatcttggagtcaagggacctgcgcctagaaaagcgcaccttgtttcggctggatcttgttccgattaaccggtcagtgggactcaaggccaagcccaccaagcccgtcacggaggtgctgcggcccgtggtggccagatacggcctggacctcagtggcctgctggtgaggctgagtggagagaaggagcccctggaccttggcgcccctatatcgagtctggacggacagcgggttgtcttggaggagaaggatccttccagaggaaaggcatccgcagataaacagaaaggtgtgccagtgaaacagaacacagctgtaaattccagctccagaaaccactcggctacgggagaggaaagaacactaggcaagtctaattctattaaaataaaaggagaaaatggaaaaaatgctagggatccccggctttcaaagagagaagaatctattgcaaagattgggaaaaaaaaatatcagaaaattaatttggacgaagcagaggagttttttgagcttatttccaaagctcagagcaacagagcagatgaccaacgtgggctgctaaggaaggaagacctggtgttgccagagttcctccgtttacctcctggttccacagaactcaccctccccactccagctgctgtggccaagggctttagcaagagaagcgccacaggcaacggccgggagagcgcctcccagcctggcgagcagtgggagccagtccaggagagcagcgacagtccgtccaccagcccgggctcagcctccagcccccctggacctcctgggacgaccccccccgggcagaagtctcccagcgggcccttctgcactccccagtcccccgtctccctcgcgcaggagggcaccgcccagatctggaagaggcagtctcaggaagtggaggccgggggcatccagacggtggaggatgagcacgtggccgagctgaccctgatgggggagggggacatcagcagccccaacagcaccttgctgccgccgccctccaccccccaggaagtgccaggaccttccagaccaggtacctccaggttctgatccctccaccttggccccgtaagcgtggtctgctcagcttccagtcagaaaggacagtgggcccccggctgccactgtttgctggtggtctccgtgaccccctcctcacctgctggttgggggcttccttggccctcttggaaaggaggggctcgtgtggccccaggccagtgtctgtcaggatggtccccccgaggcgctctgggcaggcatcctggtgtcctgagaggctcttgcaggaatgatacgtggcagtgcctgcagcgaggtctgggaacaccctgggtgaggcctgggggtttccgaaaatggaggcattcctttccaaatctggacagcgatcgtttttagtgtttctgtctcaagactggaaaacaatagcatttgtcttgagtgaggaagtgaagcccgctgtgttcatagcaggagagggctcccagacacaggcccgtcctcggaagagccttgagagtgcagctcggacccaccggcggcccccgtagcaggtggtgtgggtgctcgggagtggaggtgacgtcagcagcgctctctgaccgcgggtgtcacgggcatttctcaaaggaagcaggggattcagtgagtgtgaaggtgaacaggatggcctggcagcagggatgtttccgtgagccacaaataccagaaactgaggcgaggctcccagcagccggtagggaaaggtgtttccaggggtccgagggccgtggcctgcgtggccatcccctggagagaggagccgctcagggtgcgcgtcatggagtgtgctcaggggtgcgtggacacctctgctgtggtttgctgctgggggcgatgggagcgcctctccgtcctgtgccctggtccaggatgctgacagcagtgagaggcctgccgtgaggtttggtcttgtcagacctgtagcctggacctcgccgggggaccagggagtgcacgtctgtagatctgtacatatctgggcctttggaggccacgtgtggcatgggaggggctacctggtccctttcacagccaggacacgcctggatgagaaagcctgaggtgcctggcatgcccaccggtgccactctgcagcctccacccctggcctgagtccccctccatccgtcttggtggacacctgtgtggctctcacctgcgttttgagtctgttcttccaggagtaataaattctggacatcatca

SEQ ID NO: 78641 - DNA, 2920 bp, Homo sapiens
acatgcacctgggtctgtgctgtgtaactgcacgtactgatgtgatttgttgggcacctgccatgagccaagcatgttttggagccaggatgtggcagtagacagggcagagagtagcatctctgctgcatggtgggtagagccttgttggtccctgactggcttccagggttaggaagacacatgtgactcgtctccaccagagacggcaaagtgatgcctggtgggggatgggtggggggggcttcctggcgtctgtctgctcagcctaaagggggcagagggttgggagatgtgaccgaataaacagggttctgattgacgtgagtcactgtgtttcccctgtcaagacgccctgcatgccaatggaggcctgtgtcgccgagagtcgcagggctctgtgtcctctgcggggagcctggacctgtcggaggcctgcaggactttggcacccgagaaggacaaggccaccaagcactgctgcattcatctcccggatgggacatcctgcgtggtggctgtcaaggcgggcttctccatcaaagacatcctgtccggactctgtgagcggcatggcatcaacggggcggccgcggacctcttcctggtgggcggggacaagcctctggtgctgcaccaagacagtagcatcttggagtcaagggacctgcgcctagaaaagcgcaccttgtttcggctggatcttgttccgattaaccggtcagtgggactcaaggccaagcccaccaagcccgtcacggaggtgctgcggcccgtggtggccagatacggcctggacctcagtggcctgctggtgaggctgagtggagagaaggagcccctggaccttggcgcccctatatcgagtctggacggacagcgggttgtcttggaggagaaggatccttccagaggaaaggcatccgcagataaacagaaaggtgtgccagtgaaacagaacacagctgtaaattccagctccagaaaccactcggctacgggagaggaaagaacactaggcaagtctaattctattaaaataaaaggagaaaatggaaaaaatgctagggatccccggctttcaaagagagaagaatctattgcaaagattgggaaaaaaaaatatcagaaaattaatttggacgaagcagaggagttttttgagcttatttccaaagctcagagcaacagagcagatgaccaacgtgggctgctaaggaaggaagacctggtgttgccagagttcctccgtttacctcctggttccacagaactcaccctccccactccagctgctgtggccaagggctttagcaagagaagcgccacaggcaacggccgggagagcgcctcccagcctggcgagcagtgggagccagtccaggagagcagcgacagtccgtccaccagcccgggctcagcctccagcccccctggacctcctgggacgaccccccccgggcagaagtctcccagcgggcccttctgcactccccagtcccccgtctccctcgcgcaggagggcaccgcccagatctggaagaggcagtctcaggaagtggaggccgggggcatccagacggtggaggatgagcacgtggccgagctgaccctgatgggggagggggacatcagcagccccaacagcaccttgctgccgccgccctccaccccccaggaagtgccaggaccttccagaccaggtacctccaggttctgatccctccaccttggccccgtaagcgtggtctgctcagcttccagtcagaaaggacagtgggcccccggctgccactgtttgctggtggtctccgtgaccccctcctcacctgctggttgggggcttccttggccctcttggaaaggaggggctcgtgtggccccaggccagtgtctgtcaggatggtccccccgaggcgctctgggcaggcatcctggtgtcctgagaggctcttgcaggaatgatacgtggcagtgcctgcagcgaggtctgggaacaccctgggtgaggcctgggggtttccgaaaatggaggcattcctttccaaatctggacagcgatcgtttttagtgtttctgtctcaagactggaaaacaatagcatttgtcttgagtgaggaagtgaagcccgctgtgttcatagcaggagagggctcccagacacaggcccgtcctcggaagagccttgagagtgcagctcggacccaccggcggcccccgtagcaggtggtgtgggtgctcgggagtggaggtgacgtcagcagcgctctctgaccgcgggtgtcacgggcatttctcaaaggaagcaggggattcagtgagtgtgaaggtgaacaggatggcctggcagcagggatgtttccgtgagccacaaataccagaaactgaggcgaggctcccagcagccggtagggaaaggtgtttccaggggtccgagggccgtggcctgcgtggccatcccctggagagaggagccgctcagggtgcgcgtcatggagtgtgctcaggggtgcgtggacacctctgctgtggtttgctgctgggggcgatgggagcgcctctccgtcctgtgccctggtccaggatgctgacagcagtgagaggcctgccgtgaggtttggtcttgtcagacctgtagcctggacctcgccgggggaccagggagtgcacgtctgtagatctgtacatatctgggcctttggaggccacgtgtggcatgggaggggctacctggtccctttcacagccaggacacgcctggatgagaaagcctgaggtgcctggcatgcccaccggtgccactctgcagcctccacccctggcctgagtccccctccatccgtcttggtggacacctgtgtggctctcacctgcgttttgagtctgttcttccaggagtaataaattctggacatcatca

SEQ ID NO: 78642 - DNA, 2864 bp, Homo sapiens
gagaaagaaaatatgtcataaatgtaagactctgactttctagagaatatttatgccaaatagtatatgaaatgagcttttcaatttcaacatcactcctccagcaagtccctggttaggaagacacatgtgactcgtctccaccagagacggcaaagtgatgcctggtgggggatgggtggggggggcttcctggcgtctgtctgctcagcctaaagggggcagagggttgggagatgtgaccgaataaacagggttctgattgacgtgagtcactgtgtttcccctgtcaagacgccctgcatgccaatggaggcctgtgtcgccgagagtcgcagggctctgtgtcctctgcggggagcctggacctgtcggaggcctgcaggactttggcacccgagaaggacaaggccaccaagcactgctgcattcatctcccggatgggacatcctgcgtggtggctgtcaaggcgggcttctccatcaaagacatcctgtccggactctgtgagcggcatggcatcaacggggcggccgcggacctcttcctggtgggcggggacaagcctctggtgctgcaccaagacagtagcatcttggagtcaagggacctgcgcctagaaaagcgcaccttgtttcggctggatcttgttccgattaaccggtcagtgggactcaaggccaagcccaccaagcccgtcacggaggtgctgcggcccgtggtggccagatacggcctggacctcagtggcctgctggtgaggctgagtggagagaaggagcccctggaccttggcgcccctatatcgagtctggacggacagcgggttgtcttggaggagaaggatccttccagaggaaaggcatccgcagataaacagaaaggtgtgccagtgaaacagaacacagctgtaaattccagctccagaaaccactcggctacgggagaggaaagaacactaggcaagtctaattctattaaaataaaaggagaaaatggaaaaaatgctagggatccccggctttcaaagagagaagaatctattgcaaagattgggaaaaaaaaatatcagaaaattaatttggacgaagcagaggagttttttgagcttatttccaaagctcagagcaacagagcagatgaccaacgtgggctgctaaggaaggaagacctggtgttgccagagttcctccgtttacctcctggttccacagaactcaccctccccactccagctgctgtggccaagggctttagcaagagaagcgccacaggcaacggccgggagagcgcctcccagcctggcgagcagtgggagccagtccaggagagcagcgacagtccgtccaccagcccgggctcagcctccagcccccctggacctcctgggacgaccccccccgggcagaagtctcccagcgggcccttctgcactccccagtcccccgtctccctcgcgcaggagggcaccgcccagatctggaagaggcagtctcaggaagtggaggccgggggcatccagacggtggaggatgagcacgtggccgagctgaccctgatgggggagggggacatcagcagccccaacagcaccttgctgccgccgccctccaccccccaggaagtgccaggaccttccagaccaggtacctccaggttctgatccctccaccttggccccgtaagcgtggtctgctcagcttccagtcagaaaggacagtgggcccccggctgccactgtttgctggtggtctccgtgaccccctcctcacctgctggttgggggcttccttggccctcttggaaaggaggggctcgtgtggccccaggccagtgtctgtcaggatggtccccccgaggcgctctgggcaggcatcctggtgtcctgagaggctcttgcaggaatgatacgtggcagtgcctgcagcgaggtctgggaacaccctgggtgaggcctgggggtttccgaaaatggaggcattcctttccaaatctggacagcgatcgtttttagtgtttctgtctcaagactggaaaacaatagcatttgtcttgagtgaggaagtgaagcccgctgtgttcatagcaggagagggctcccagacacaggcccgtcctcggaagagccttgagagtgcagctcggacccaccggcggcccccgtagcaggtggtgtgggtgctcgggagtggaggtgacgtcagcagcgctctctgaccgcgggtgtcacgggcatttctcaaaggaagcaggggattcagtgagtgtgaaggtgaacaggatggcctggcagcagggatgtttccgtgagccacaaataccagaaactgaggcgaggctcccagcagccggtagggaaaggtgtttccaggggtccgagggccgtggcctgcgtggccatcccctggagagaggagccgctcagggtgcgcgtcatggagtgtgctcaggggtgcgtggacacctctgctgtggtttgctgctgggggcgatgggagcgcctctccgtcctgtgccctggtccaggatgctgacagcagtgagaggcctgccgtgaggtttggtcttgtcagacctgtagcctggacctcgccgggggaccagggagtgcacgtctgtagatctgtacatatctgggcctttggaggccacgtgtggcatgggaggggctacctggtccctttcacagccaggacacgcctggatgagaaagcctgaggtgcctggcatgcccaccggtgccactctgcagcctccacccctggcctgagtccccctccatccgtcttggtggacacctgtgtggctctcacctgcgttttgagtctgttcttccaggagtaataaattctggacatcatca

SEQ ID NO: 78643 - DNA, 2996 bp, Homo sapiens
ccgttgcgcgcgcgggcggtggcgcgggccgaagcgcccggagcgggagcgagcggcgcggcccgggcactgtttgaagaagcaaacatggtagcatcaagcattccttgaaatatggctccaagggaacaatgagacgtgctcttggtcttggaagctcatcagaatgtttagagctggggaggcctccaaacgcccattgcctgggccgtcgcccccaagggtgcggagtgtggaggttgcccgggggagggccggctacggattcacgctttcgggacaggcaccctgtgtgctcagctgcgtcatgagagggagccctgcggatttcgtgggcctccgagctggagaccagatacttgctgtcaatgaaatcaacgtgaaaaaagcatctcatgaagatgtagtgaaattaattgggaagtgctctggtgtccttcacatggtgattgctgaaggcgtcggccgcttcgaatcctgttccagtgatgaagaagggggactctatgaaggaaaaggctggctgaagcccaagctggattctaaagcactaggtataaacagagcagagcgagtcgtggaggaaatgcagtctggtggaattttcaatatgatttttgaaaacccgagcctttgtgcgagcaattcagagcccttgaaattgaaacaaagatccctttcggagtcggccgcaactcgatttgatgttggacatgaaagtataaataatccaaatcccaacatgctttctaaggaggaaatatcaaaagttattcatgatgattcggttttcagcattggactagaaagtcatgacgattttgcattggatgcaagtattttaaacgtggcgatgatcgtgggctacttaggctccattgagcttccttccacgagctccaacctggagtccgacagcttgcaagccatccgcggctgcatgcggcgcctgcgggcagagcagaaaatccactcgctggtgaccatgaagatcatgcacgactgtgtgcagctgagcactgacaaggctggagtcgtggccgagtacccggccgagaagctggccttcagcgccgtgtgcccggacgaccggcgatttttcgggttggttaccatgcagacgaatgacgacgggagcctggcccaggaggaggagggcgccctgcggacttcctgccacgtgttcatggtggacccagacttgtttaatcacaagatccaccaaggcattgctcggcggtttgggtttgagtgcacggccgacccagacaccaatggctgtctggaattcccggcgtcctccctccccgtcctgcagttcatctctgtcctgtaccgagacatgggtgagctgattgagggcatgcgggcccgcgcctttctggacggggacgccgatgcccaccagaacaacagcaccagcagcaacagtgacagcggcattgggaacttccaccaggaggagaagagcaaccgggtccttgtggtggacctgggtgggagctcgagcagacacggccccggaggcagcgcgtgggacggtgtgggtgggaggggtgcccagccctggggtgctccctggactgggcccttctgtccggaccccgaagggagccccccatttgaggccgctcatcagactgacaggttctgggacctaaacaagcacctagggccagcctctcctgtggaggtgcccccagcttccttgaggagctcagtccccccttccaagaggggcaccgtgggtgctggctgtggtttcaaccagcgctggctcccggtccacgtgctccgggagtggcagtgcggacacaccagcgaccaggactcttacacagattccaccgatggctggtccagcatcaactgcggcacactgccccctcctatgagcaagatccccgcagaccgctacagggtggagggcagcttcgcgcagcccccgctgaatgccccgaagagggagtggtccaggaaggcctttggaatgcaaagcatttttggtccccatcgaaatgttcgaaagactaaggaagataaaaagggctcaaaatttgggcggggaactggactcactcagccttctcaacgcacgtctgctcggagatcatttgggagatccaagagattcagtatcactcgctcccttgatgatcttgagtctgcaactgtgtctgatggcgagttgacgggcgccgacctgaaggactgcgtcagcaacaacagcctgagcagcaatgccagcctccccagcgtgcagagctgccggcgcctgcgtgagaggagggtcgccagctgggccgtgtcctttgagcgcctgctgcaggaccccgtcggtgtccgctacttctctgattttctaaggaaagaattcagtgaagaaaacattttattctggcaggcctgtgaatattttaatcatgttcctgcacatgacaaaaaggagctttcctacagggcccgggagattttcagtaagtttctctgcagcaaagccaccaccccggtcaacatcgacagccaggcccagctagcagacgacgtcctccgcgcacctcacccagacatgttcaaggagcagcagctgcagatcttcaatctcatgaagtttgatagctacactcgctttctgaagtccccgctgtaccaggaatgcatcctggcggaagtggagggccgtgcactcccggactcgcagcaggtccccagcagcccggcttccaagcacagcctcggttcagaccactccagtgtgtccacgccaaaaaagttaagtggaaaatcaaaatccggccgatccctgaatgaagagctgggggatgaggacagcgagaagaagcggaaaggcgcgtttttctcgtggtcgcggaccaggagcaccgggaggtcccagaaaaagagggagcacggggaccacgcagacggtttgtggggtggctcctgggctgtggtgtccaggccaggcagccgcgtccccgtcctggcgtcgctct

SEQ ID NO: 78644 - DNA, 2722 bp, Homo sapiens
ccgttgcgcgcgcgggcggtggcgcgggccgaagcgcccggagcgggagcgagcggcgcggcccgggcactgtttgaagaagcaaacatggtagcatcaagcattccttgaaatatggctccaagggaacaatgagacgtgctcttggtcttggaagctcatcagaatgtttagagctggggaggcctccaaacgcccattgcctgggccgtcgcccccaagggtgcggagtgtggaggttgcccgggggagggccggctacggattcacgctttcgggacaggcaccctgtgtgctcagctgcgtcatgagagggagccctgcggatttcgtgggcctccgagctggagaccagatacttgctgtcaatgaaatcaacgtgaaaaaagcatctcatgaagatgtagtgaaattaattgggaagtgctctggtgtccttcacatggtgattgctgaaggcgtcggccgcttcgaatcctgttccagtgatgaagaagggggactctatgaaggaaaaggctggctgaagcccaagctggattctaaagcactaggtataaacagagcagagcgagtcgtggaggaaatgcagtctggtggaattttcaatatgatttttgaaaacccgagcctttgtgcgagcaattcagagcccttgaaattgaaacaaagatccctttcggagtcggccgcaactcgatttgatgttggacatgaaagtataaataatccaaatcccaacatgctttctaaggaggaaatatcaaaagttattcatgatgattcggttttcagcattggactagaaagtcatgacgattttgcattggatgcaagtattttaaacgtggcgatgatcgtgggctacttaggctccattgagcttccttccacgagctccaacctggagtccgacagcttgcaagccatccgcggctgcatgcggcgcctgcgggcagagcagaaaatccactcgctggtgaccatgaagatcatgcacgactgtgtgcagctgagcactgacaaggctggagtcgtggccgagtacccggccgagaagctggccttcagcgccgtgtgcccggacgaccggcgatttttcgggttggttaccatgcagacgaatgacgacgggagcctggcccaggaggaggagggcgccctgcggacttcctgccacgtgttcatggtggacccagacttgtttaatcacaagatccaccaaggcattgctcggcggtttgggtttgagtgcacggccgacccagacaccaatggctgtctggaattcccggcgtcctccctccccgtcctgcagttcatctctgtcctgtaccgagacatgggtgagctgattgagggcatgcgggcccgcgcctttctggacggggacgccgatgcccaccagaacaacagcaccagcagcaacagtgacagcggcattgggaacttccaccaggaggagaagagcaaccgggtccttgtggtggacctgggtgggagctcgagcagacacggccccggaggcagcgcgtgggacggtgtgggtgggaggggtgcccagccctggggtgctccctggactgggcccttctgtccggaccccgaagggagccccccatttgaggccgctcatcagactgacaggttctgggacctaaacaagcacctagggccagcctctcctgtggaggtgcccccagcttccttgaggagctcagtccccccttccaagaggggcaccgtgggtgctggctgtggtttcaaccagcgctggctcccggtccacgtgctccgggagtggcagtgcggacacaccagcgaccaggactcttacacagattccaccgatggctggtccagcatcaactgcggcacactgccccctcctatgagcaagatccccgcagaccgctacagggtggagggcagcttcgcgcagcccccgctgaatgccccgaagagggagtggtccaggaaggcctttggaatgcaaagcatttttggtccccatcgaaatgttcgaaagactaaggaagataaaaagggctcaaaatttgggcggggaactggactcactcagccttctcaacgcacgtctgctcggagatcatttgggagatccaagagattcagtatcactcgctcccttgatgatcttgagtggtccacatgtgccaggagatgtgggaatggctacccctgaagtcatatggagaaatggggtcctcatcgcacaccatacacaaacatcatctcacaaatggattaaagacacttaagacctgaaaccaaaaaaactcctaggagaaaacacaggggaaagctccatgacatcagtttcggcaatgatttttttttggacatgacactaaaagaacaagcaacaaaactaaaagtaaacaggtgggattacattgaagtaaaaagtttctgcacaacaaaggaaacaaccaacaaaatgaaaaacgaacctgtgaatgggagaaaatacttgcaaactgtatatccagtaaggggttaatatccaaatacataaggaactcatacaactcagtggcaaaaaccaaataacccaattgaaaaatggcaaagagccatagtagacatttttccagagaagctctacagatggccaacaggtatatgcagaggtctcagcatcacccatcaccagagaaatgcagtcacaacagtgagctgtcactgcatgtctgtagaa

SEQ ID NO: 78645 - DNA, 1693 bp, Homo sapiens
atccggggcgggtccgcggccgcggcgggaacatggaggagctgctgaggcgcgagctgggctgcagctctgtcagggccacgggccactcggggggcgggtgcatcagccagggccggagctacgacacggatcaaggacgagtgttcgtgaaagtgaaccccaaggcggaggccagaagaatgtttgaaggtgagatggcaagtttaactgccatcctgaaaacaaacacggtgaaagtgcccaagcccatcaaggttctggatgccccaggcggcgggagcgtgctggtgatggagcacatggacatgaggcatctgagcagtcatgctgcaaagcttggagcccagctggccgatttacaccttgataacaagaagcttggagagatgcgcctgaaggaggcgggcacagtggggagaggaggtgggcaggaggaacggccctttgtggcccggtttggatttgacgtggtgacgtgctgtggatacctcccccaggtgaatgactggcaggaggactgggtcgtgttctatgcccggcagcgcattcagccccagatggacatggtggagaaggagtctggggacagggaggccctccagctttggtctgctctgcagttaaagatccctgacctgttccgtgacctggagatcatcccagccttactccacggggacctctggggtggaaacgtagcagaggattcctctgggccggtgatttttgacccagcttctttctacggccactcggaatatgagctggcaatagctggcatgtttgggggctttagcagctccttttactccgcctaccacggcaaaatccccaaggccccaggattcgagaagcgccttcagttgtatcagctctttcactacttgaaccactggaatcattttggatcggggtacagaggatcctccctgaacatcatgaggaatctggtcaagtgagcgggccttactctggaaggaggcctcagaggtttctccacagtcctcttctgggcaaattcttgtttcttcacatgccggactagcttaagaccaatgcagtagcttatttccaagccttgcaaagtatataatatctaagaggaaaggttttgtcatcccagcgttgtccactttgtggggctttgtaggtagacggagccacactacaggcagggtatgagcagagggatgtatggagtgtgggtgactctgagcctcactgctgctgcaaggtggggaaactgtaagtgaacccctgtgggtgcgggggagggtatccggtgcgcagggaggtggccagcgcccccgggcactgctgctcataggtacctttccgctgcctcctccctgctctcctgtgcaggaatgtctctgagctgttcacgttgatgcttcttggttggcaagacttgggtgtagacatgaaaccatcttactaaaagcgtcttaaaatgaccaattccagaatcaagcgtattccgttttcttcctgcatgatccctgggccctcccgcaggctgagcaagtctgtaaactgattctgggagaaaccaagctgctggccgtagggtgtccttgggtacatccaggagtcttcattgcttctgttattaccccgtctcctctgccattttctacagcttgctgagttgtcattcctttgcaacattaaaatacatgctgaactc

SEQ ID NO: 78646 - DNA, 247 bp, Homo sapiens
ccgagatcgtgccactgccctccagcctgggtgacagagcgagactccatctcaaaaaaataaaaaagtttgaccctctttatgtgccctgagactgagcagtgggtgtgttgccattctgtgtgtcatctgtttagttgctgtcgtttgatttgacagtcatgctgcaaagcttggagcccagctggccgatttacaccttgataacaagaagcttggaggggaaaagacctggggtaactctaga

SEQ ID NO: 78647 - DNA, 625 bp, Homo sapiens
gattgggaagtcaggactggtctcgacctgcacagtgaagtgggccactcggggggcgggtgcatcagccagggccggagctacgacacggatcaaggacgagtgttcgtgaaagtgaaccccaaggcggaggccagaagaatgtttgaaggtgagatggcaagtttaactgccatcctgaaaacaaacacggtgaaagtgcccaagcccatcaaggttctggatgccccaggcggcgggagcgtgctggtgatggagcacatggacatgaggcatctgagcagtcatgctgcaaagcttggagcccagctggccgatttacaccttgataacaagaagcttggagagatgcgcctgaaggaggcgggcacagtgggtatggcactgcgcgggccacgggtgctcccgcctagaggaggacgttcagccggtgtgggctcagagcgggggccgtgcagcagccgtgggagggtcggacgtgggctgatggcagagcaagggaatgtcggccttgagccgcatctcacggtgcactgaacacagtgactgtgatgcgtctgttgtgtcctaaatgcatttgaaagatgaaaacatttgctggacacaagacacccctagtgttaca

SEQ ID NO: 78648 - DNA, 424 bp, Homo sapiens
ggatccccttacaaccccacgatcacctttccaagatacaggtcttccccaccccgagatggagtcttgctctgtcacccaggctggagtatagtggtgcgatctcagctcactgcaacctctgcctcctgggttcaaggattctcctgtctcagcctcccgatgtagctgggattacaggtgtgtgccaccacacctggctaatttttgtatttctagtagagatgggattttgccatcttggccaggctggtcttgaactcctggcctcaagcgaatctgcctgccttggcctcccaaagtgctgggattacaggcctgacccaccatccctgacccaactattgtttcttaaaaaaaactctttttaaccttgccttttgagcatgcctgtgttgggttgacagtgagggtgtcgtgggta

SEQ ID NO: 78649 - DNA, 1884 bp, Homo sapiens
atccggggcgggtccgcggccgcggcgggaacatggaggagctgctgaggcgcgagctgggctgcagctctgtcagggccacgggccactcggggggcgggtgcatcagccagggccggagctacgacacggatcaaggacgagtgttcgtgaaagtgaaccccaaggcggaggccagaagaatgtttgaaggtgagatggcaagtttaactgccatcctgaaaacaaacacggtgaaagtgcccaagcccatcaaggttctggatgccccaggcggcgggagcgtgctggtgatggagcacatggacatgaggcatctgagcagtcatgctgcaaagcttggagcccagctggccgatttacaccttgataacaagaagcttggagagatgcgcctgaaggaggcgggcacagtggggagaggaggtgggcaggaggaacggccctttgtggcccggtttggatttgacgtggtgacgtgctgtggatacctcccccaggtgaatgactggcaggaggactgggtcgtgttctatgcccggcagcgcattcagccccagatggacatggtggagaaggagtctggggacagggaggccctccagctttggtctgctctgcagttaaagatccctgacctgttccgtgacctggagatcatcccagccttactccacggggacctctggggtggaaacgtagcagaggattcctctgggccggtgatttttgacccagcttctttctacggccactcggaatatgagctggcaatagctggcatgtttgggggctttagcagctccttttactccgcctaccacggcaaaatccccaaggccccaggattcgagaagcgccttcagttgtatcagctctttcactacttgaaccactggaatcattttggatcggggtacagaggatcctccctgaacatcatgaggaatctggtcaagtgagcgggccttactctggaaggaggcctcagaggtttctccacagtcctcttctgggcaaattcttgtttcttcacatgccggactagcttaagaccaatgcagtagcttatttccaagccttgcaaagtatataatatctaagaggaaaggttttgtcatcccagcgttgtccactttgtggggctttgtaggtagacggagccacactacaggcagggtatgagcagagggatgtatggagtgtgggtgactctgagcctcactgctgctgcaaggtggggaaactgtaagtgaacccctgtgggtgcgggggagggtatccggtgcgcagggaggtggccagcgcccccgggcactgctgctcataggtacctttccgctgcctcctccctgctctcctgtgcaggaatgtctctgagctgttcacgttgatgcttcttggttggcaagacttgggtgtagacatgaaaccatcttactaaaagcgtcttaaaatgaccaattccagaatcaagcgtattccgttttcttcctgcatgatccctgggccctcccgcaggctgagcaagtctgtaaactgattctgggagaaaccaagctgctggccgtagggtgtccttgggtacatccaggagtcttcattgcttctgttattaccccgtctcctctgccattttctacagcttgctgagttgtcattcctttgcaacattaaaatacatgctgaactcatatttttccttccttcactgttgtagtaaagagacatatttcatgaatggcattgatgctaataaatcctttgcacaaaaatttgaataaacttccagtggtttcgataatgtaaaaagaaaaaatatttccctcatttattgtaattcaatatcttagttgtttgctgaaaaacttgtaatattttgtg

SEQ ID NO: 78650 - DNA, 2166 bp, Homo sapiens
cggcatctcaagatgaggtggtttccagtgctgggcaggaggtggcatggaacttggtggtctcttcaggtgaaaagtgaccccaggtcactggcataggcagccagggtgccgcctgcacctgagaggtcgggtgagtctgtgtcctgtaggtggaacaggactgcagttgaggtgtcgtctgaggacactgacaggtaacccatgttcacagtcccactgttgccggatcttagtggaatattagtgccttcgattttcctctctccagagaacctcccaattcaaccacagcacacaagtgtagtccaacactggaaagctcaagccctcttcttccagtacagcctctgaacctgtagcctaccctgttggcaagtgtgtttgaaaacactgtccatgtgtatggaatcctcagtcaggatagtcttggtttgaagttgtaatgctagaggaaaacatatctacagaaccttccggaagtaaccttgcctccctgtatttccacttcctctcgtatttttctgacaggccagaagaatgtttgaaggtgagatggcaagtttaactgccatcctgaaaacaaacacggtgaaagtgcccaagcccatcaaggttctggatgccccaggcggcgggagcgtgctggtgatggagcacatggacatgaggcatctgagcagtcatgctgcaaagcttggagcccagctggccgatttacaccttgataacaagaagcttggagagatgcgcctgaaggaggcgggcacagtggggagaggaggtgggcaggaggaacggccctttgtggcccggtttggatttgacgtggtgacgtgctgtggatacctcccccaggtgaatgactggcaggaggactgggtcgtgttctatgcccggcagcgcattcagccccagatggacatggtggagaaggagtctggggacagggaggccctccagctttggtctgctctgcagttaaagatccctgacctgttccgtgacctggagatcatcccagccttactccacggggacctctggggtggaaacgtagcagaggattcctctgggccggtgatttttgacccagcttctttctacggccactcggaatatgagctggcaatagctggcatgtttgggggctttagcagctccttttactccgcctaccacggcaaaatccccaaggccccaggattcgagaagcgccttcagttgtatcagctctttcactacttgaaccactggaatcattttggatcggggtacagaggatcctccctgaacatcatgaggaatctggtcaagtgagcgggccttactctggaaggaggcctcagaggtttctccacagtcctcttctgggcaaattcttgtttcttcacatgccggactagcttaagaccaatgcagtagcttatttccaagccttgcaaagtatataatatctaagaggaaaggttttgtcatcccagcgttgtccactttgtggggctttgtaggtagacggagccacactacaggcagggtatgagcagagggatgtatggagtgtgggtgactctgagcctcactgctgctgcaaggtggggaaactgtaagtgaacccctgtgggtgcgggggagggtatccggtgcgcagggaggtggccagcgcccccgggcactgctgctcataggtacctttccgctgcctcctccctgctctcctgtgcaggaatgtctctgagctgttcacgttgatgcttcttggttggcaagacttgggtgtagacatgaaaccatcttactaaaagcgtcttaaaatgaccaattccagaatcaagcgtattccgttttcttcctgcatgatccctgggccctcccgcaggctgagcaagtctgtaaactgattctgggagaaaccaagctgctggccgtagggtgtccttgggtacatccaggagtcttcattgcttctgttattaccccgtctcctctgccattttctacagcttgctgagttgtcattcctttgcaacattaaaatacatgctgaactcatatttttccttccttcactgttgtagtaaagagacatatttcatgaatggcattgatgctaataaatcctttgcacaaaaatttgaataaacttccagtggtttcgataatgta

SEQ ID NO: 78651 - DNA, 1889 bp, Homo sapiens
atccggggcgggtccgcggccgcggcgggaacatggaggagctgctgaggcgcgagctgggctgcagctctgtcagggccacgggccactcggggggcgggtgcatcagccagggccggagctacgacacggatcaaggacgagtgttcgtgaaagtgaaccccaaggcggaggccagaagaatgtttgaaggtgagatggcaagtttaactgccatcctgaaaacaaacacggtgaaagtgcccaagcccatcaaggttctggatgccccaggcggcgggagcgtgctggtgatggagcacatggacatgaggcatctgagcagtcatgctgcaaagcttggagcccagctggccgatttacaccttgataacaagaagcttggagagatgcgcctgaaggaggcgggcacagtggagcataacgcgctgtcaggatcgagggaattttccggtattttaatctgctgacatttggaatccgtgtgcagcccacatgggagaggaggtgggcaggaggaacggccctttgtggcccggtttggatttgacgtggtgacgtgctgtggatacctcccccaggtgaatgactggcaggaggactgggtcgtgttctatgcccggcagcgcattcagccccagatggacatggtggagaaggagtctggggacagggaggccctccagctttggtctgctctgcagttaaagatccctgacctgttccgtgacctggagatcatcccagccttactccacggggacctctggggtggaaacgtagcagaggattcctctgggccggtgatttttgacccagcttctttctacggccactcggaatatgagctggcaatagctggcatgtttgggggctttagcagctccttttactccgcctaccacggcaaaatccccaaggccccaggattcgagaagcgccttcagttgtatcagctctttcactacttgaaccactggaatcattttggatcggggtacagaggatcctccctgaacatcatgaggaatctggtcaagtgagcgggccttactctggaaggaggcctcagaggtttctccacagtcctcttctgggcaaattcttgtttcttcacatgccggactagcttaagaccaatgcagtagcttatttccaagccttgcaaagtatataatatctaagaggaaaggttttgtcatcccagcgttgtccactttgtggggctttgtaggtagacggagccacactacaggcagggtatgagcagagggatgtatggagtgtgggtgactctgagcctcactgctgctgcaaggtggggaaactgtaagtgaacccctgtgggtgcgggggagggtatccggtgcgcagggaggtggccagcgcccccgggcactgctgctcataggtacctttccgctgcctcctccctgctctcctgtgcaggaatgtctctgagctgttcacgttgatgcttcttggttggcaagacttgggtgtagacatgaaaccatcttactaaaagcgtcttaaaatgaccaattccagaatcaagcgtattccgttttcttcctgcatgatccctgggccctcccgcaggctgagcaagtctgtaaactgattctgggagaaaccaagctgctggccgtagggtgtccttgggtacatccaggagtcttcattgcttctgttattaccccgtctcctctgccattttctacagcttgctgagttgtcattcctttgcaacattaaaatacatgctgaactcatatttttccttccttcactgttgtagtaaagagacatatttcatgaatggcattgatgctaataaatcctttgcacaaaaatttgaataaacttccagtggtttcgataatgta

SEQ ID NO: 78652 - DNA, 1642 bp, Homo sapiens
ccgagatcgtgccactgccctccagcctgggtgacagagcgagactccatctcaaaaaaataaaaaagtttgaccctctttatgtgccctgagactgagcagtgggtgtgttgccattctgtgtgtcatctgtttagttgctgtcgtttgatttgacagtcatgctgcaaagcttggagcccagctggccgatttacaccttgataacaagaagcttggagagatgcgcctgaaggaggcgggcacagtggggagaggaggtgggcaggaggaacggccctttgtggcccggtttggatttgacgtggtgacgtgctgtggatacctcccccaggtgaatgactggcaggaggactgggtcgtgttctatgcccggcagcgcattcagccccagatggacatggtggagaaggagtctggggacagggaggccctccagctttggtctgctctgcagttaaagatccctgacctgttccgtgacctggagatcatcccagccttactccacggggacctctggggtggaaacgtagcagaggattcctctgggccggtgatttttgacccagcttctttctacggccactcggaatatgagctggcaatagctggcatgtttgggggctttagcagctccttttactccgcctaccacggcaaaatccccaaggccccaggattcgagaagcgccttcagttgtatcagctctttcactacttgaaccactggaatcattttggatcggggtacagaggatcctccctgaacatcatgaggaatctggtcaagtgagcgggccttactctggaaggaggcctcagaggtttctccacagtcctcttctgggcaaattcttgtttcttcacatgccggactagcttaagaccaatgcagtagcttatttccaagccttgcaaagtatataatatctaagaggaaaggttttgtcatcccagcgttgtccactttgtggggctttgtaggtagacggagccacactacaggcagggtatgagcagagggatgtatggagtgtgggtgactctgagcctcactgctgctgcaaggtggggaaactgtaagtgaacccctgtgggtgcgggggagggtatccggtgcgcagggaggtggccagcgcccccgggcactgctgctcataggtacctttccgctgcctcctccctgctctcctgtgcaggaatgtctctgagctgttcacgttgatgcttcttggttggcaagacttgggtgtagacatgaaaccatcttactaaaagcgtcttaaaatgaccaattccagaatcaagcgtattccgttttcttcctgcatgatccctgggccctcccgcaggctgagcaagtctgtaaactgattctgggagaaaccaagctgctggccgtagggtgtccttgggtacatccaggagtcttcattgcttctgttattaccccgtctcctctgccattttctacagcttgctgagttgtcattcctttgcaacattaaaatacatgctgaactcatatttttccttccttcactgttgtagtaaagagacatatttcatgaatggcattgatgctaataaatcctttgcacaaaaatttgaataaacttccagtggtttcgataatgta

SEQ ID NO: 78653 - DNA, 1345 bp, Homo sapiens
catactgctgcaggtgtcccaggtactggtctcgctgctgctgcagactttgagcctcttggctcttcagctccaccgtttccttcagctcgctcagcttctcctgcagctcgcccagcttctttcccagctccctcttgacgtgctgctccgactgcagttaaagatccctgacctgttccgtgacctggagatcatcccagccttactccacggggacctctggggtggaaacgtagcagaggattcctctgggccggtgatttttgacccagcttctttctacggccactcggaatatgagctggcaatagctggcatgtttgggggctttagcagctccttttactccgcctaccacggcaaaatccccaaggccccaggattcgagaagcgccttcagttgtatcagctctttcactacttgaaccactggaatcattttggatcggggtacagaggatcctccctgaacatcatgaggaatctggtcaagtgagcgggccttactctggaaggaggcctcagaggtttctccacagtcctcttctgggcaaattcttgtttcttcacatgccggactagcttaagaccaatgcagtagcttatttccaagccttgcaaagtatataatatctaagaggaaaggttttgtcatcccagcgttgtccactttgtggggctttgtaggtagacggagccacactacaggcagggtatgagcagagggatgtatggagtgtgggtgactctgagcctcactgctgctgcaaggtggggaaactgtaagtgaacccctgtgggtgcgggggagggtatccggtgcgcagggaggtggccagcgcccccgggcactgctgctcataggtacctttccgctgcctcctccctgctctcctgtgcaggaatgtctctgagctgttcacgttgatgcttcttggttggcaagacttgggtgtagacatgaaaccatcttactaaaagcgtcttaaaatgaccaattccagaatcaagcgtattccgttttcttcctgcatgatccctgggccctcccgcaggctgagcaagtctgtaaactgattctgggagaaaccaagctgctggccgtagggtgtccttgggtacatccaggagtcttcattgcttctgttattaccccgtctcctctgccattttctacagcttgctgagttgtcattcctttgcaacattaaaatacatgctgaactcatatttttccttccttcactgttgtagtaaagagacatatttcatgaatggcattgatgctaataaatcctttgcacaaaaatttgaataaacttccagtggtttcgataatgta

SEQ ID NO: 78654 - DNA, 2004 bp, Homo sapiens
atccggggcgggtccgcggccgcggcgggaacatggaggagctgctgaggcgcgagctgggctgcagctctgtcagggccacgggccactcggggggcgggtgcatcagccagggccggagctacgacacggatcaaggacgagtgttcgtgaaagtgaaccccaaggcggaggccagaagaatgtttgaaggtgagatggcaagtttaactgccatcctgaaaacaaacacggtgaaagtgcccaagcccatcaaggttctggatgccccaggcggcgggagcgtgctggtgatggagcacatggacatgaggcatctgagcagtcatgctgcaaagcttggagcccagctggccgatttacaccttgataacaagaagcttggagagatgcgcctgaaggaggcgggcacagtggggagaggaggtgggcaggaggaacggccctttgtggcccggtttggatttgacgtggtgacgtgctgtggatacctcccccaggtgaatgactggcaggaggactgggtcgtgttctatgcccggcagcgcattcagccccagatggacatggtggagaaggagtctggggacagggaggccctccagctttggtctgctctgcagttaaagatccctgacctgttccgtgacctggagatcatcccagccttactccacggggacctctggggtggaaacgtagcagaggattcctctgggccggtgatttttgacccagcttctttctacggccactcggaatatgagctggcaatagctggcatgtttgggggctttagcagctccttttactccgcctaccacggcaaaatccccaaggccccaggattcgagaagcgccttcagttgtatcagctctttcactacttgaaccactggaatcattttggatcggggtacagaggatcctccctgaacatcatgaggaatctggtcaaggcccctcagcagaaggcagaacagaaccgagttcctttagaatgctggtttttgtgtggagtgaggaaggaccgtgagtgtggtcagtttccaacctgacaggacctgctcccgttggccaggactgcagcttgttactttgaccctgggaagaaggtccatcccgacggcgcgtgtgccgcttggctcaaggccctgacatcgttccactcagcacagcatcaggtgcccgggaccctggacatcatcgttctgtgtcagcacatcaggtgcccggggcccggacatcatcgttccactcagcacagcatcaggtgcctgggaccctggacatcatcgttccactcagcacagcatcaggtgcctgggaccctggacatcatcgttctgctcagcacagcatcaggtgcccgggaccctggacgtcattctgcatcagcacaacatcaccagtgacgagagcctccccaagtggttgacgggaaggatggttcggtcctccagaggcggtggccttctcttcctcgatgacattgccgggctgcaccttgtgagaggccgtcgctgagagtgcagccaaatggaaccatcaggaggggtgtctcgggggtgtcgaaatggtaaacagtagtgggtagttttcagattttgcaatgctgcggtatgtgtcagcttttaattttttattttcttttttatttaattttaatttttcttagacagtctcactctgtcacccaggctggagtgcagtgacatgatctcggctcactgcagtctccgcctcccaggttcaagggattctcctgcctcagactccccagtagctgagattacaggcacctgccaccatacctggctaatttttatatttttagtagaaatggggtttcaccatgttgatcaggctggtctcgaactcctgacctcaagtgatccgcccacctcggcctcccaaagttctgggattacaggtgtgagccgccgcgtctggccccgtgtcagcattttaaatttgtaagttgatgcaatgcttattctaaaa

SEQ ID NO: 78655 - DNA, 1628 bp, Homo sapiens
atccggggcgggtccgcggccgcggcgggaacatggaggagctgctgaggcgcgagctgggctgcagctctgtcagggccacgggccactcggggggcgggtgcatcagccagggccggagctacgacacggatcaaggacgagtgttcgtgaaagtgaaccccaaggcggaggccagaagaatgtttgaaggtgagatggcaagtttaactgccatcctgaaaacaaacacggtgaaagtgcccaagcccatcaaggttctggatgccccaggcggcgggagcgtgctggtgatggagcacatggacatgaggcatctgagcagtcatgctgcaaagcttggagcccagctggccgatttacaccttgataacaagaagcttggagagatgcgcctgaaggaggcgggcacagtggggagaggaggtgggcaggaggaacggccctttgtggcccggtttggatttgacgtggtgacgtgctgtggatacctcccccaggtgaatgactggcaggaggactgggtcgtgttctatgcccggcagcgcattcagccccagatggacatggtggagaaggagtctggggacagggaggccctccagctttggtctgctctgcagttaaagatccctgacctgttccgtgacctggagatcatcccagccttactccacggggacctctggggtggaaacgtagcagaggattcctctgggccggtgatttttgacccagcttctttctacggccactcggaatatgagctggcaatagctggcatgtttgggggctttagcagctccttttactccgcctaccacggcaaaatccccaaggccccaggattcgagaagcgccttcagttgtatcagctctttcactacttgaaccactggaatcattttggatcggggtacagaggatcctccctgaacatcatgaggaatctggtcaaggcccctcagcagaaggcagaacagaaccgagttcctttagaatgctggtttttgtgtggagtgaggaaggaccgtgagtgtggtcagtttccaacctgacaggacctgctcccgttggccaggactgcagcttgttactttgaccctgggaagaaggtccatcccgacggcgcgtgtgccgcttggctcaaggccctgacatcgttccactcagcacagcatcaggtgcccgggaccctggacatcatcgttctgtgtcagcacatcaggtgcccggggcccggacatcatcgttccactcagcacagcatcaggtgcctgggaccctggacatcatcgttccactcagcacagcatcaggtgcctgggaccctggacatcatcgttctgctcagcacagcatcaggtgcccgggaccctggacgtcattctgcatcagcacaacatcaccagtgacgagagcctccccaagtggttgacgggaaggatggttcggtcctccagaggcggtggccttctcttcctcgatgacattgccgggctgcaccttgtgagaggccgtcgctgagagtgcagccaaatggaaaacaatgggttcgaatgtaaacagtactgttaccaccggcaccccgagacaccatcctgatgtcgagcggttgggaatatagt

SEQ ID NO: 78656 - DNA, 1713 bp, Homo sapiens
ggatccccttacaaccccacgatcacctttccaagatacaggtcttccccaccccgagatggagtcttgctctgtcacccaggctggagtatagtggtgcgatctcagctcactgcaacctctgcctcctgggttcaaggattctcctgtctcagcctcccgatgtagctgggattacaggtgtgtgccaccacacctggctaatttttgtatttctagtagagatgggattttgccatcttggccaggctggtcttgaactcctggcctcaagcgaatctgcctgccttggcctcccaaagtgctgggattacaggcctgacccaccatccctgacccaactattgtttcttaaaaaaaactctttttaaccttgcctttttgttagggtagaaggatagctcagagcttcaaagagcaggactagcctaagaactgtctgtgatatttgaccagaggtgcagcctagctgccattcttcctcaccctgtggaagacattaaagggagaatgaaagtagctgtagaattacctttgggggaagaagccacttggtgaacttggcaaacacccgtgtttgaggggtcaagacctgggatgtcatgagctgggccggaggggatggattgattacttgtcttgtttgcttgtttctgttgtaagtcagggcccctcagcagaaggcagaacagaaccgagttcctttagaatgctggtttttgtgtggagtgaggaaggaccgtgagtgtggtcagtttccaacctgacaggacctgctcccgttggccaggactgcagcttgttactttgaccctgggaagaaggtccatcccgacggcgcgtgtgccgcttggctcaaggccctgacatcgttccactcagcacagcatcaggtgcccgggaccctggacatcatcgttctgtgtcagcacatcaggtgcccggggcccggacatcatcgttccactcagcacagcatcaggtgcctgggaccctggacatcatcgttccactcagcacagcatcaggtgcctgggaccctggacatcatcgttctgctcagcacagcatcaggtgcccgggaccctggacgtcattctgcatcagcacaacatcaccagtgacgagagcctccccaagtggttgacgggaaggatggttcggtcctccagaggcggtggccttctcttcctcgatgacattgccgggctgcaccttgtgagaggccgtcgctgagagtgcagccaaatggaaccatcaggaggggtgtctcgggggtgtcgaaatggtaaacagtagtgggtagttttcagattttgcaatgctgcggtatgtgtcagcttttaattttttattttcttttttatttaattttaatttttcttagacagtctcactctgtcacccaggctggagtgcagtgacatgatctcggctcactgcagtctccgcctcccaggttcaagggattctcctgcctcagactccccagtagctgagattacaggcacctgccaccatacctggctaatttttatatttttagtagaaatggggtttcaccatgttgatcaggctggtctcgaactcctgacctcaagtgatccgcccacctcggcctcccaaagttctgggattacaggtgtgagccgccgcgtctggccccgtgtcagcattttaaatttgtaagttgatgcaatgcttattctaaaa

SEQ ID NO: 78657 - DNA, 1652 bp, Homo sapiens
tttcccaagttgtatagtgtaatcggcagctggtcagctgacatgatgtcaataacgacagcataacagatgaacacagatgcacacaccactgtcagtctcagcacataagaggtcaacttttttttttgagatggagtctcgctctgtcacccaggctggagtgcagtggtgcgatcttggctcactgcaagttccgcctcccaggttcacgccattcttctgcctcagcctcctgagtagctgggattacaggcctgacccaccatccctgacccaactattgtttcttaaaaaaaactctttttaaccttgcctttttgttagggtagaaggatagctcagagcttcaaagagcaggactagcctaagaactgtctgtgatatttgaccagaggtgcagcctagctgccattcttcctcaccctgtggaagacattaaagggagaatgaaagtagctgtagaattacctttgggggaagaagccacttggtgaacttggcaaacacccgtgtttgaggggtcaagacctgggatgtcatgagctgggccggaggggatggattgattacttgtcttgtttgcttgtttctgttgtaagtcagggcccctcagcagaaggcagaacagaaccgagttcctttagaatgctggtttttgtgtggagtgaggaaggaccgtgagtgtggtcagtttccaacctgacaggacctgctcccgttggccaggactgcagcttgttactttgaccctgggaagaaggtccatcccgacggcgcgtgtgccgcttggctcaaggccctgacatcgttccactcagcacagcatcaggtgcccgggaccctggacatcatcgttctgtgtcagcacatcaggtgcccggggcccggacatcatcgttccactcagcacagcatcaggtgcctgggaccctggacatcatcgttccactcagcacagcatcaggtgcctgggaccctggacatcatcgttctgctcagcacagcatcaggtgcccgggaccctggacgtcattctgcatcagcacaacatcaccagtgacgagagcctccccaagtggttgacgggaaggatggttcggtcctccagaggcggtggccttctcttcctcgatgacattgccgggctgcaccttgtgagaggccgtcgctgagagtgcagccaaatggaaccatcaggaggggtgtctcgggggtgtcgaaatggtaaacagtagtgggtagttttcagattttgcaatgctgcggtatgtgtcagcttttaattttttattttcttttttatttaattttaatttttcttagacagtctcactctgtcacccaggctggagtgcagtgacatgatctcggctcactgcagtctccgcctcccaggttcaagggattctcctgcctcagactccccagtagctgagattacaggcacctgccaccatacctggctaatttttatatttttagtagaaatggggtttcaccatgttgatcaggctggtctcgaactcctgacctcaagtgatccgcccacctcggcctcccaaagttctgggattacaggtgtgagccgccgcgtctggccccgtgtcagcattttaaatttgtaagttgatgcaatgcttattctaaaa

SEQ ID NO: 78658 - DNA, 905 bp, Homo sapiens
atccggggcgggtccgcggccgcggcgggaacatggaggagctgctgaggcgcgagctgggctgcagctctgtcagggccacgggccactcggggggcgggtgcatcagccagggccggagctacgacacggatcaaggacgagtgttcgtgaaagtgaaccccaaggcggaggccagaagaatgtttgaaggtgagatggcaagtttaactgccatcctgaaaacaaacacggtgaaagtgcccaagcccatcaaggttctggatgccccaggcggcgggagcgtgctggtgatggagcacatggacatgaggcatctgagcagtcatgctgcaaagcttggagcccagctggccgatttacaccttgataacaagaagcttggagagatgcgcctgaaggaggcgggcacagtggggagaggaggtgggcaggaggaacggccctttgtggcccggtttggatttgacgtggtgacgtgctgtggatacctcccccaggtgaatgactggcaggaggactgggtcgtgttctatgcccggcaaattcttgtttcttcacatgccggactagcttaagaccaatgcagtagcttatttccaagccttgcaaagtatataatatctaagaggaaaggttttgtcatcccagcgttgtccactttgtggggctttgtaggtagacggagccacactacaggcagggtatgagcagagggatgtatggagtgtgggtgactctgagcctcactgctgctgcaaggtggggaaactgtaagtgaacccctgtgggtgcgggggagggtatccggtgcgcagtttcgtttaatagtgaatattaatgtctctcttgtttctagtatcttttatcttcctgtgatcattttttttttatgtggagtattc

SEQ ID NO: 78659 - DNA, 1808 bp, Homo sapiens
atccggggcgggtccgcggccgcggcgggaacatggaggagctgctgaggcgcgagctgggctgcagctctgtcagggccacgggccactcggggggcgggtgcatcagccagggccggagctacgacacggatcaaggacgagtgttcgtgaaagtgaaccccaaggcggaggccagaagaatgtttgaaggtgagatggcaagtttaactgccatcctgaaaacaaacacggtgaaagtgcccaagcccatcaaggttctggatgccccaggcggcgggagcgtgctggtgatggagcacatggacatgaggcatctgagcagtcatgctgcaaagcttggagcccagctggccgatttacaccttgataacaagaagcttggagagatgcgcctgaaggaggcgggcacagtggggagaggaggtgggcaggaggaacggccctttgtggcccggtttggatttgacgtggtgacgtgctgtggatacctcccccaggtgaatgactggcaggaggactgggtcgtgttctatgcccggcagcgcattcagccccagatggacatggtggagaaggagtctggggacagggaggccctccagctttggtctgctctgcagttaaagatccctgacctgttccgtgacctggagatcatcccagccttactccacggggacctctggggtggaaacgtagcagaggattcctctgggccggtgatttttgacccagcttctttctacggccactcggaatatgagctggcaatagctggcatgtttgggggctttagcagctccttttactccgcctaccacggcaaaatccccaaggccccaggattcgagaagcgccttcagttgtatcagctctttcactacttgaaccactggaatcattttggatcggggtacagaggatcctccctgaacatcatgaggaatctggtcaagtgagcgggccttactctggaaggaggcctcagaggtttctccacagtcctcttctgggcaaattcttgtttcttcacatgccggactagcttaagaccaatgcagtagcttatttccaagccttgcaaagtatataatatctaagaggaaaggttttgtcatcccagcgttgtccactttgtggggctttgtaggtagacggagccacactacaggcagggtatgagcagagggatgtatggagtgtgggtgactctgagcctcactgctgctgcaaggtggggaaactgtaagtgaacccctgtgggtgcgggggagggtatccggtgcgcagggaggtggccagcgcccccgggcactgctgctcataggtacctttccgctgcctcctccctgctctcctgtgcaggaatgtctctgagctgttcacgttgatgcttcttggttggcaagacttgggtgtagacatgaaaccatcttactaaaagcgtcttaaaatgaccaattccagaatcaagcgtattccgttttcttcctgcatgatccctgggccctcccgcaggctgagcaagtctgtaaactgattctgggagaaaccaagctgctggccgtagggtgtccttgggtacatccaggagtcttcattgcttctgttattaccccgtctcctctgccattttctacagcttgctgagttgtcattcctttgcaacattaaaatacatgctgaactcatatttttccttccttcactgttgtagtaaagagacatatttcatgaatggcattgatgctaataaatcctttgcacaaaaatttgaataaacttccagtggtttcgataatgta

SEQ ID NO: 78660 - DNA, 1247 bp, Homo sapiens
ggtaggtccatcccgacagcacctgtgctgctcgactccccccactgggtgggtccatcccgacagcacctgtgccgctcgactccccccactgggtaggtccatcctgacagcacctgtgctgctcgactccccccactgggtaggtccatcccgacagcacctgtgctgctcagactacccgccgggtaggtccatcccgacagcacctgtgcccctcacctccctgccagacggtgcgtgtgccgcttggctccccaccaggtaggtccatcccgacagcacctgtgccgctcacctccccaccgggtaggtccatcccgacaacacctgtgccgctcacctccctgccgggtaggtccatcccgacggcgcgtgtgccgcttggctcaaggccctgacatcgttccactcagcacagcatcaggtgcccgggaccctggacatcatcgttctgtgtcagcacatcaggtgcccggggcccggacatcatcgttccactcagcacagcatcaggtgcctgggaccctggacatcatcgttccactcagcacagcatcaggtgcctgggaccctggacatcatcgttctgctcagcacagcatcaggtgcccgggaccctggacgtcattctgcatcagcacaacatcaccagtgacgagagcctccccaagtggttgacgggaaggatggttcggtcctccagaggcggtggccttctcttcctcgatgacattgccgggctgcaccttgtgagaggccgtcgctgagagtgcagccaaatggaaccatcaggaggggtgtctcgggggtgtcgaaatggtaaacagtagtgggtagttttcagattttgcaatgctgcggtatgtgtcagcttttaattttttattttcttttttatttaattttaatttttcttagacagtctcactctgtcacccaggctggagtgcagtgacatgatctcggctcactgcagtctccgcctcccaggttcaagggattctcctgcctcagactccccagtagctgagattacaggcacctgccaccatacctggctaatttttatatttttagtagaaatggggtttcaccatgttgatcaggctggtctcgaactcctgacctcaagtgatccgcccacctcggcctcccaaagttctgggattacaggtgtgagccgccgcgtctggccccgtgtcagcattttaaatttgtaagttgatgcaatgcttattctaaaa

SEQ ID NO: 78661 - DNA, 611 bp, Homo sapiens
atccggggcgggtccgcggccgcggcgggaacatggaggagctgctgaggcgcgagctgggctgcagctctgtcagggccacgggccactcggggggcgggtgcatcagccagggccggagctacgacacggatcaaggacgagtgttcgtgaaagtgaaccccaaggcggaggccagaagaatgtttgaaggtgagatggcaagtttaactgccatcgcggcgggagcgtgctggtgatggagcacatggacatgaggcatctgagcagtcatgctgcaaagcttggagcccagctggccgatttacaccttgataacaagaagcttggagagatgcgcctgaaggaggcgggcacagtgggtatggcactgcgcgggccacgggtgctcccgcctagaggaggacgttcagccggtgtgggctcagagcgggggccgtgcagcagccgtgggagggtcggacgtgggctgatggcagagcaagggaatgtcggccttgagccgcatctcacggtgcactgaacacagtgactgtgatgcgtctgttgtgtcctaaatgcatttgaaagatgaaaacatttgctggacacaagacacccctagtgttaca

SEQ ID NO: 78662 - DNA, 666 bp, Homo sapiens
atccggggcgggtccgcggccgcggcgggaacatggaggagctgctgaggcgcgagctgggctgcagctctgtcagggccacgggccactcggggggcgggtgcatcagccagggccggagctacgacacggatcaaggacgagtgttcgtgaaagtgaaccccaaggcggaggccagaagaatgtttgaaggtgagatggcaagtttaactgccatcctgaaaacaaacacggtgaaagtgcccaagcccatcaaggttctggatgccccaggcggcgggagcgtgctggtgatggagcacatggacatgaggcatctgagcagtcatgctgcaaagcttggagcccagctggccgatttacaccttgataacaagaagcttggagagatgcgcctgaaggaggcgggcacagtgggtatggcactgcgcgggccacgggtgctcccgcctagaggaggacgttcagccggtgtgggctcagagcgggggccgtgcagcagccgtgggagggtcggacgtgggctgatggcagagcaagggaatgtcggccttgagccgcatctcacggtgcactgaacacagtgactgtgatgcgtctgttgtgtcctaaatgcatttgaaagatgaaaacatttgctggacacaagacacccctagtgttaca

SEQ ID NO: 78663 - DNA, 371 bp, Homo sapiens
tttgggaaataaactcctttgtggagccagttgttctattggatgaagtcaatgtccctttttaggaacttgagctaccactttatgtactctaagacacagtttgcaaaggaccagtctgccataccccatgcaggaggaggactgtgttggctcccaccacagggtgtgttctgtggtaatggaaggctgtgctgagtcacttacactgtgtccctgggtcttccttaaggacagtgtatggttttagaagataatagtagcaaacatttatctaccacctctctagatcagctaggcattcttttttttttttttttgacatagagtctcactctgccggccaggctcgagtgcagtggcatgatgaa

SEQ ID NO: 78664 - DNA, 566 bp, Homo sapiens
aagggccagatctagaagtgatttttgtctaaattccacaaagactgactttttttgctcttttaggacttgtatatcttctataggttcttaagcataattattaatgggcatttgtgtgtttttggggtaaatatgaactattaaattatttgattacctgccagaactcgtagtgccacattttgccaaattaccaacctcaaaaaaaaaaatggaaataatttttattgaggtgaactctataataccctgtttaactttatagaagttgccttggagtttaaatgttccattttctccctgattaaaaaaggaagagatagaaaagttagaggtttttatttttttagtttgatgtttcatattagactacagtgtgatatattatagtttctataagcagtagaaactataaagatagatataaactgtccagaattaagtactgagagaaaaatattaaaagcaaaattaatagaaccttgatattgtgggacaatatcaagcagtttaacatacctgtaactagagttccagaaggaaaggagttaggtacaggccag

SEQ ID NO: 78665 - DNA, 361 bp, Homo sapiens
cagcttctccacttccaaaaaataaatatgaaaactataacacttgcccaaggtctaaaagaaaccaggaagcgggcaggttaagggctaacaggtaacttttctctgcttctgtctgttgaatgttaaggaactgttcgtttcatagccgagcattttaagggtgctatgctagaggcagctctgtgattttcattctttggctacaacccctggggaggtgaggtcatgaggaaattccaagggggtcaaggagaccagaaacctagctggtcacataactgctcagtggcactgccggagaccagccccagcccccgtgccaacccccatgacgccctattttcagagccttgctgat

SEQ ID NO: 78666 - DNA, 385 bp, Homo sapiens
atgtaatcatgtgaagtcatacgttttcctctaggatagttgtgtttagattataccaaaacagctcttagttgaagtgattcaagtgtttcttttttccctatctgccatcaattggccaagtttttgatactagacaagaattcaatatattaattaaaaagtcatttcagacttggcttaactgaaaagcagaagagaaaaatcctttagagaatggattggcatactttatttctagagtcgatttagataaatactttggaatccgatgtgagtaaatgatatgtttcacatttcttctcacttgccaaacagttatttgagaataaactctggcttagctttaagaaacttcttggacattgaggattgagattaattg

SEQ ID NO: 78667 - DNA, 422 bp, Homo sapiens
gctgtcgcctactactactaaattcgcggccggtcgacgataatgatagtatttcagtatgtttccaatatgtagagataaaagaaaaaagaacagcagatgtgttatataaatagaactatgattagttaagattcattacaaactccgaatctctgattcgtgtctccatactcatggagtcatttcacctttgtagtcagtattattctctctgatgagatcttctcttcagaaaataatgttaatttcttatcgtttcttcttttaataagaaacaacaagcttttatatcttaaaataattaccaaatttaggtgtatgaatttttcaaccagcaaaattattttaaaaatgtaactatataaaattatgcttatgttcatttcaaaataaaaccaattatttccctattaaggtaa

SEQ ID NO: 78668 - DNA, 309 bp, Homo sapiens
gttttcactaaaccataactatcttctttggccacctagataattaattctgacattcacatttaatgtagcgtaggttaccaagttcctgtgtagaaagggagctcacttttttagagaattaagtgctatcactataaagacaatgctgcacctaaggtgtttgttattgccctaactactgttcctgagttgtgtggactataagcgagctgtttagtgagttcactttgatctatcctactgctaagaccggaaaaggaagtggaaactgagatttgaaattaagtcatgagataaatctgtgtt

SEQ ID NO: 78669 - DNA, 732 bp, Homo sapiens
cttcccaaaggtggaagcaagaagcaagttttctcaggtatttgccacaggagcctggtggagctccaggaggtttgatctctcttgtgaactctggaactgtattcccaattgtcaattggacatccctacgtatgggacctcagatatttcaaacatgatgtgtccaagtctgtatcacttctggccatcatattgttcttttatttttccaaatttcacatcaccagtaacaaactagctgtgatcatggcagatagcctggaaataaaactcccctttttaccctttgcacagcaaattgacatcaaatcctgtttctactttttttttttttaactattgcttccctattctgtattctcactgctccatctcctgatgtaggaggtcatctgttttcctcttttcctctcctctgactcttaagccctttcccattctctttctcaggaatggctgttaaaatgccaatatggtcttgtaactttcctgtacttagtgaacctccttatttacaccctgtttgtgaagtggctgtgttcaccctgggtggacacggaatgtttttgtcatgtacaaagagaattttatgctgcctgtgtacagttattaatttgtaagtacactcagctttttgtatctgtaggtttaatatctgtgtatgtaagcaaacttggatgcaaaatatttgaaataaaatcagatgcttgcatctgtagtgaacatatt

SEQ ID NO: 78670 - DNA, 228 bp, Homo sapiens
tccaatagatgtagaaaattattaaaatttaatatcgtgattaaaaacaagtcttaacatactctaagtagaagataatttatttaacctaaccaagtatgtctaataaaaacctgcagcaatcatacttgatagtgtaacattgaaagcctttcatttaaaattagtaaaagatgtctgctctcactacttccattcaatactgtatcatggctctacccattgcat

SEQ ID NO: 78671 - DNA, 340 bp, Homo sapiens
ttcctttgcatatgcagcactgaccaatggaaatataagaagaaatctctaaccttacagactcctcaattaaagaaatcgatgcaggaggaaaggccttgtacttcctggtttggatactgtccagtgaaggcgtgatgtctagagccaccacaactattttgcagccatgacatgacaagtctaaaaacaaaaagcaacaggctatggacggcagagctgaagaacaaaaagatgctggcttcttgatgacaaggttgagccataaaccaatcccaacacacctactccagacttcttgttattgaagagaataaaggtatttgataattaaactact

SEQ ID NO: 78672 - DNA, 381 bp, Homo sapiens
aaaggacagaataacaaatcaatatgagttaatggaaaatttcctatagcataaactcaatggagccactaactgtatactggtgggaagtagctcagttaatatacacaggccttattctctctatccctgaaaaaaggggggattggattatattattgtacattttttcagctttgagaattgaagaatttagataattttccttttgtagattgaagcaatagcttaaattcagtaagatgaaatatagtaggaacaaatagaaccatatttgtctttaaaattttaaattatatgtcagaagaaagagtctagaaatccttgaaaatctctaggaagttgcaactaattttaggtttcagaaaaataacatgatca

SEQ ID NO: 78673 - DNA, 833 bp, Homo sapiens
tgcaccatccctcccttctcccccacccctgaccgtttaaaacaaaatgtctcaaccagtcagtgatactcacttggagaaggaaatgtttctttaggatgttaggttgacccatgagaacatggacaatttttggtcacttaagcaagttgccacaattaagggatggactggtttcccagttctctgtttgcatgattttgttggactggtggaagaaatggcctcgtgtctcctcgtatgttgtctggagagttcagagatggaaaatcttgagacagcaagaaaagcatgattgtagaatcagcatccctgattacattagacctggcaaatggacgcctggatcccagggagtcaggctatgtcattagatggaagatgcccttgagatgcaggctgagggccctgatgattgcactgcggggctaatgcacatagagatctgggtcatgaggagtggcactcactgcggcatccgctttgtgacactacatgttctcagttcctctgtctctgaccatgccaggctcacttgtcagttcctcttctttcctctaataagccctttgttacatttatttctttacatttctccttggagatccactgcagtggcttctaacctgttgcacgcgtcagaatcaccaaggaacgcctgggaaaaaaatctggatgcttgagcgtgacccaggaggttctatctcagcaggttctggaatgaggcctgggattcagacatcgttgaaactccacctttgatcctacccctagtttgtatctgagtgtccttcctgccccagcccacagccccatggctggtgtgttgaagg

SEQ ID NO: 78674 - DNA, 434 bp, Homo sapiens
actgaatacttaggcaatttgaacacaaaggtaagtaattgtgtatctaaacatttcttaacatagaaaaggtacaattcaaatacaatattataaccttatgctaccactatcatattatgtggcctgttattgacagatacattgttattctgttcatgactgtattagtaccaggttgtggctgtttctaatatatcctctcccactcctctcattccttactgaagtcaccagggtagtagcaaatcactggaaccagacctataatatatctgacttggtatctgtaactgttctgagaaacatgtgttgaaaggcagccaggctgcctgatgattatttagtagctgtctttctttactgaacaacagtgaataatatctttgatctctgccactgagaaataaacagaacccatcaggaatttaatc

SEQ ID NO: 78675 - DNA, 841 bp, Homo sapiens
gttcccaatactatgtagaccctgggaatacacaggctgagctggtgaggagtctgcctgcctggagtttagagaagttcaaggacagttaagttgacaatggactagagctactttgcgtaagaggtgcgctgaaggcaggattttgtcctgccctcaattccaggagatatttggtaaagtctggagacatttttaatgtcacagttggatcggaggcgctcttgtatctagtgggtagaggccagggatgccactaaacaccctcaaatgcacaggtcagctcccacgaaaaacaatgattcagtcccaaatgtcaaaagcactgcatttcggaaaaccgtcctagtggtagagaaagaagatgggagaaggactttttgcaggaaaattctcttactgtaatgtttcttactccaacacaaaacacatacacacacatatatacatgcacacccacacagataaaacagacaaatcagtgcattgctttgtgggcctcacatcagcctctgaggagacttgcatctctcagtggtgggggacacattcagggtttctagacgtgtcccaaaccactcactttccctgaattttcagcatttaggagaaatttccatggagaagaagaatcgctgtctggtcatccatgcaatttcctgctcagttttaatagcagctgggcttctccctgtctaaggttgaaaccaaaaggctgtattttcctgtgggggcgagagagagagagagagagagcgagagagagcaagagtgagagagcgcttacaaacgcctccctggacatttagaatttctaaatagaattttggctcaagtcttg

SEQ ID NO: 78676 - DNA, 482 bp, Homo sapiens
atagattcatatttgaccataattatttatttcaacatttctctgcactaccagactttgagttccctggaactaaaaatattgcttggacctcacgctgtacctgaatacctgagagggaacaaattctaccagttgctgttggaagcaaaagatctttttcattcttggatgctttatatttggacagagaaagaatcagaatccatccttctttttcctaaccggaatttgagagacatgagaagggaactaaacacacaggcttcaggatctggtggaaagagataaggtgtctcaacgactgttggcctcatcaagagatactacccctgatcttttcatttcactttcctcgggtctgcctaaactcagtgtctctcctagaaaaccacccaactcatgaaaaactgtttgtaagaaaatgttctcaacacaaagaaataataaaggtttgagatgataaatatgctaattaccct

SEQ ID NO: 78677 - DNA, 569 bp, Homo sapiens
aaatgagtaacatcagggtataaaatgccagctggaagagtattcgcaaccatatacaatgaagagtcacacttccaagaagaaagccgatgtcccacttcagcatcaaatctaagacactgcatttcactttttctgtacaaatatcataatctgtttgttaatctcttggttttatttcaaaaatgaaactatatttagagagggaacaaattctaccagttgctgttggaagcaaaagatctttttcattcttggatgctttatatttggacagagaaagaatcagaatccatccttctttttcctaaccggaatttgagagacatgagaagggaactaaacacacaggcttcaggatctggtggaaagagataaggtgtctcaacgactgttggcctcatcaagagatactacccctgatcttttcatttcactttcctcgggtctgcctaaactcagtgtctctcctagaaaaccacccaactcatgaaaaactgtttgtaagaaaatgttctcaacacaaagaaataataaaggtttgagatgataaatatgctaattaccct

SEQ ID NO: 78678 - DNA, 501 bp, Homo sapiens
tgcaagccaccaatgccaggctaatttctttgtatttttgtagagatggggtttcgccatgccgcccaggctgatcttgaactcctgggctcaaagggaccctcctaccttgccctcccaaagtgctgggattataggcctgagtcaccactctgagccactttttaatacatacagtttgaagtgtctgaacgttgaagcggaggatttgagaaggtcgttgggtatctagttctcaggcttagtagagaagcttgacctggagataagagcatttcctctgagtatttgaaaaattgtgttaggcaatatcattcactaaaaagggcttctgggtgaaataaaagttaggaacagactctcaaaaacctgtgcaactttataagcagagcatcaagaaaagtaataattttcaaaaacagcatttgggagaccaaggcaggcagatcacctgaggtcaggagttcgaaaccagcctggccaacatggcgaaacctgtct

SEQ ID NO: 78679 - DNA, 192 bp, Homo sapiens
ttttgtatttttaggagagatggggtttcaccatgttggctaggctggtatccaactcttgacctcaggtgatcctcctaaaggctgggattacaggcgtgagccaccatgcctggctggtcttggtatttttctatagctaaaataagacaaattttaaatctggcattgaaactcaaattagccttattt

SEQ ID NO: 78680 - DNA, 231 bp, Homo sapiens
acacccagttaaagatcatgtctgaatgtttttacaacctccttgctattgtgtgcttaattactgtaaagcagactttacacaggattccagaaaaactaattcagctgggcaaacaacagagctagttgccgttttgttcttctgttgcatttcaattatctgaatttgtaaaataaagttcataaatatttaagaaatgcttttttgagctgccactcttaaaaggca

SEQ ID NO: 78681 - DNA, 560 bp, Homo sapiens
gcatctaggccttgattttgagttcttagtatggtaccgtgaaaatcactagtgttgaaaggaataggatcagagggggaataaaaaggcatttgatgaggctcttagtgtaacagtatgtctcactcatctttttttttccttagcctttgaaatagacaatggccttgagccttctcggcagatggaccatgtttgtgccttagccacttaacagccattagcctaattccatcctctacagccaaattaaataataagtaaaggcctatgaaaagctggtttggaggcagtgttactgcctttcacttgacagccttctctgaagcagatgctccctctccaccctattaacctgctcctctgaataaggagctgtccacacagaagcaaagatagaggcctgcaggagagtggtctggattctggagatagggggaaaatcctgatgatgaaagtccagcttctttggaaggctgaggcgggaggatcatgaggtcaggagttcaagaccagcctgaccaatatggtgaaaccccgtttctactaaaaatacaaaa

SEQ ID NO: 78682 - DNA, 364 bp, Homo sapiens
tcaggctgtgccttataccctttaggatggaatagcccggagataatgcaaacatgtgggaatgtctccaatcaatttcagttaggtacctgtcggcttggctgggcctattactgtgctggaggtggagcagctgcagccatgttgatctgcacctggctctcttgctttgctggaagaaaccccaagcctgtcatattggtggagagcatcatgaggaataccaattcttatgctatggagcttgaccattgcctcaaaccttgagctttgaaagaagattggagagggtgggaaaggggaggagggagccctgaaaagaggtactaaggattaggccatttgtcatctgactgtcattagc

SEQ ID NO: 78683 - DNA, 12756 bp, Homo sapiens
  misc_feature (7731)..(7731): n is a, c, g, or t
  misc_feature (8088)..(8088): n is a, c, g, or t
atgaatacattctggcctggcagagaattgattgttcaatggtatccatttgatgaaaacagaaatcacccatctgtttcatggcttaagatggtttggaaaaatctttatatacatttttcagaggatttgactttatttgatgagatgccacttatccccagaactatactagaggaaggtcagacatgtgtggaactcattagactcaggattccatcgttagtcattttagacgatgaatctgaagcacagcttccagaatttttagcagacattgtacaaaaacttggagggtttgtccttaaaaaattagatgcatctatacaacatccgcttattaaaaaatatattcattcaccattaccaagtgctgttttgcagataatggagaagatgccattgcagaaattgtgtaatcaaataacttcgctacttccaacacacaaagatgccctgaggaagttcttggctagtttaaccgatagcagtgagaaagagaaaagaattattcaagaattggcaatattcaagcgcattaaccattcttctgatcagggaatttcctcttatacaaaattgaaaggttgtaaagtcttacaccatactgccaaactcccagcagatctgcgactttctatttcagtaatagacagtagtgatgaagctactattcgtctggcaaacatgttgaaaatagaacagttaaagaccactagctgcttaaagcttgttttaaaagatattgaaaatgcattttattcacatgaagaggtaacacagcttatgttatgggtccttgagaatctatcttctcttaaaaatgagaatccaaatgtgcttgagtggttaacaccattaaaattcatccagatatcacaggaacagatggtatcagctggtgaactctttgaccctgatatagaagtactaaaggatctcttttgtaatgaagaaggaacctatttcccaccctcagtttttacctcaccagatattcttcactccttaagacagattggtttaaaaaacgaagccagtctcaaagaaaaggatgttgtgcaagtggcaaaaaaaattgaagccttacaggtcggtgcttgtcctgatcaagatgttcttctgaagaaagccaaaaccctcttactggttttaaataagaatcacacactgttgcaatcatctgaaggaaagatgacattgaagaaaataaaatgggttccagcctgcaaggaaaggcctccaaattatccaggctctttggtctggaaaggagatctctgtaatctctgtgcaccaccagatatgtgtgatgtaggccatgcaattctcattggctcctcacttcctcttgttgaaagtatccatgtaaacctggaaaaagcattagggatcttcacaaaacctagccttagtgctgtcttaaaacactttaaaattgttgttgattggtattcttcaaaaacctttagtgatgaagactactatcaattccagcatattttgcttgagatttacggattcatgcatgatcatctaaatgaagggaaagattcttttagagccttaaaatttccatgggtttggactggcaaaaagttttgtccacttgcccaggctgtgattaaaccaatccatgatcttgaccttcagccttatttgcataatgtacctaaaaccatggcaaaattccaccaactatttaaggtctgtggttcaatagaggagttgacatcagatcatatttccatggttattcagaagatatatctcaaaagtgaccaagatctcagtgaacaagaaagcaaacaaaatcttcatcttatgttgaatattatcagatggctgtatagcaatcagattccagcaagccccaacacaccagttcctatacatcatagcaaaaatccttctaaacttatcatgaagccaattcacgaatgctgttattgtgacattaaagttgatgaccttaatgacttacttgaagattctgtggaaccaatcattttggtgcatgaggacatacccatgaaaactgcagaatggctaaaagttccatgccttagtacaagactgataaatcctgaaaacatgggatttgagcagtcaggacaaagagagccacttactgtaagaattaaaaatattctggaagaatacccttcagtgtcagatatttttaaagaactacttcaaaacgctgatgatgcaaatgcaacagaatgcagtttcttgattgatatgagaagaaatatggacataagagagaatctcctagacccagggatggcagcttgtcatggacctgctttgtggtcattcaacaattctcaattctcagattcagattttgtgaacataactaggttaggagaatctttaaaaaggggagaagttgacaaagttggaaaatttggtcttggatttaattctgtgtaccatatcactgacattcccatcattatgagtcgggaattcatgataatgttcgatccaaacataaatcatatcagtaaacacattaaagacaaatccaatcctgggatcaaaattaattggagtaaacaacagaaaagacttagaaaatttcctaatcagttcaaaccatttatagatgtatttggctgtcagttacctttgactgtagaagcaccttacagctataatggaacccttttccgactgtcctttagaactcaacaggaagcaaaagtgagtgaagttagtagtacgtgctacaatacagcagatatttattctcttgtggatgaatttagtctctgtggacacaggcttatcattttcactcagagtgtaaagtcaatgtatttgaagtacttgaaaattgaggaaaccaaccccagtttagcacaagatacagtaataattaaaaaaaaatcctgctcttccaaagcattgaacacacctgtcttaagtgttttaaaagaggctgctaagctcatgaagacttgcagcagcagtaataaaaagcttcccagtgatgaaccaaagtcatcttgcattcttcagatcacagtggaagaatttcaccatgtgttcagaaggattgctgatttacagtcgccactttttagaggtccagatgatgacccagctgctctctttgaaatggctaagtctggccaatcaaaaaagccatcagatgagttgtcacagaaaacagtagagtgtaccacgtggcttctgtgtacttgcatggacacaggagaggctctgaagttttccctgagtgagagtggaagaagactaggactggttccatgtggggcagtaggagttcagctgtcagaaatccaggaccagaagtggacagtgaaaccacacattggagaggtgttttgctatttacctttacgaataaaaacaggcttgccagttcatatcaatgggtgctttgctgttacatcaaataggaaagaaatctggaaaacagatacaaaaggacgatggaataccacgttcatgagacatgttattgtgaaagcttacttacaggtactgagtgtcttacgggacctggccactagtggggagctaatggattatacttactatgcagtatggcccgatcctgatttagttcatgatgatttttctgtaatttgccaaggattttatgaagatatagctcatggaaaagggaaagaactgaccaaagtcttctctgatggatctacttgggtttccatgaagaacgtaagatttctagatgactctatacttaaaagaagagatgttggttcagcagccttcaagatatttttgaaatacctcaagaagactgggtccaaaaacctttgtgctgttgaacttccttcttcggtaaaattaggatttgaagaagctggctgcaaacagatactacttgaaaacacattttcagagaaacagtttttttctgaagtgttttttccaaatattcaagaaattgaagcagaacttagagatcctttaatgatctttgttctaaatgaaaaagttgatgagttctcgggagttcttcgtgttactccatgtattccttgttccttggaggggcatcctttggttttgccatcaagattgatccaccccgaaggacgagttgcaaagttatttgatattaaagatgggagattcccttatggttctactcaggattatctcaatcctattattttgattaaactagttcagttaggtatggcaaaagatgatattttatgggatgatatgctagaacgtgcagtgtcagtagctgaaattaataaaagtgatcatgttgctgcatgcctaagaagtagtatcttattgagtcttatcgatgagaaactaaaaataagggatcctagagcaaaggattttgctgcaaaatatcaaacaatccgcttccttccatttctgacaaaaccagcaggtttttctttggactggaaaggcaacagttttaagcctgaaaccatgtttgcagcaactgacctttatacagctgaacatcaagatatagtttgtcttttgcaaccaattctaaatgaaaattcccattcttttagaggttgtggttcagtgtcattggctgttaaagagtttttgggattactcaagaagccaacagttgatctggttataaaccaattgaaagaagtagcaaaatcagttgatgatggaattacactgtaccaggagaatatcaccaatgcttgctacaaataccttcatgaagccttgatgcaaaatgaaatcactaagatgtcaattattgataagttaaaaccctttagcttcattctagttgagaatgcatatgttgactcagaaaaggtttcttttcatttaaattttgaggcggcaccatacctttatcagttgcctaataagtataaaaataatttccgcgaactttttgaaaccgtgggtgtgaggcagtcatgcactgttgaagattttgctcttgttttggaatctattgatcaagaaagaggaacaaagcaaataacagaagagaattttcagctttgccgacgaataatcagtgaaggaatatggagtctcattagagaaaagaaacaagaattttgtgagaaaaattatggcaagatattattgccagatactaatcttatgcttctccctgctaaatcgttatgctacaatgattgcccttggataaaagtaaaggataccactgtaaaatattgtcatgctgacatacccagggaagtagcagtaaaactaggagcagtcccaaagcgacacaaagccttagaaagatatgcatccaatgtctgttttacaacacttggcacagaatttgggcagaaagaaaaattgaccagcagaattaagagcatccttaatgcatatccttctgaaaaggaaatgttgaaagagcttcttcaaaatgctgatgatgcaaaggcgacagaaatctgttttgtgtttgatcctagacagcatccagttgatagaatatttgatgataagtgggccccattgcaagggccagcactttgtgtgtacaacaaccagccatttacagaagatgatgttagaggaattcagaatcttggaaaaggcacgaaagagggaaatccttataaaactggacagtatggaataggattcaattctgtgtatcatatcacagactgcccatcttttatttctggcaatgacatcctgtgtatttttgatcctcatgccagatatgcaccaggggccacatccattagtcccggacgcatgtttagagatttggatgcagattttaggacacagttctcagatgttctggatctttatctgggaacccattttaaactggataattgcacaatgttcagatttcctcttcgtaatgcagaaatggcaaaagtttcggaaatttcgtctgttccagcatcagacagaatggtccagaatcttttggacaaactgcgctcagatggggcagaacttctaatgtttcttaatcacatggaaaaaatttctatttgtgaaatagataagagtactggagctctaaatgtgctgtattcagtaaagggcaaaatcacagatggagacagattgaaaaggaaacaatttcatgcatctgtaattgatagtgttactaaaaagaggcagctcaaagacataccagttcaacaaataacctatactatggatactgaggactctgaaggaaatcttactacgtggctaatttgtaatagatcaggcttttcaagtatggagaaagtatctaaaagtgtcatatcagctcacaagaaccaagatattactcttttcccacgtggtggagtagctgcctgcattactcacaactataaaaaaccccatagggccttctgttttttgcctctttctttggagactgggctgccatttcatgtgaatggccactttgcactggattcagccagaaggaacctgtggcgtgatgataatggagttggtgttcgaagtgactggaataacagtttaatgacagcattaatagctcctgcatatgttgaattgctaatacagttaaaaaaacggtatttccctggttctgatccaacattatcagtgttacagaacacccctattcatgttgtaaaggacactttaaagaagtttttatcgtttttcccagttaaccgtcttgatctacagccagatttatattgtctagtgaaagcactttacaattgcattcacgaagacatgaaacgtcttttacctgttgtgcgggctccaaatattgatggctctgacttgcactctgcagttataattacttggatcaatatgtctacttctaataaaactagaccattttttgacaatttactacaggatgaattacaacaccttaaaaatgcagattataatatcaccacacgcaaaacagtagcagagaatgtctataggctgaaacatctccttttagaaattggtttcaacttggtttataactgtgatgaaactgctaatctttaccactgtcttatagatgcagatattcctgttagttatgtgacccctgctgatatcagatcttttttaatgacattttcctctcctgacactaattgccatattgggaagctgccttgtcgtctgcagcagactaatctaaaactttttcatagtttaaaacttttagttgattattgttttaaagatgcagaagaaaatgagattgaagttgagggattgccccttctcatcacactggacagtgttttgcaaacttttgatgcaaaacgacccaagtttctaacaacatatcatgaattgattccatcccgcaaagacttgtttatgaatacattatatttgaaatatagtaatattttattgaactgtaaagttgcaaaagtgtttgacatttccagctttgctgatttgttatcctctgtgttgcctcgagaatataagaccaaaagttgcacaaagtggaaagacaattttgcaagtgagtcttggcttaagaatgcatggcattttattagtgaatctgtaagtgtgaaagaagatcaggaagaaacaaaaccaacatttgacattgttgttgatactctaaaagactgggcattgcttccaggaacaaagtttactgtttcagccaaccagcttgtggttcctgaaggagatgttctgcttcctctcagccttatgcacattgcagtttttccaaatgcccagagtgataaagtttttcatgctctaatgaaagcnggctgtattcagcttgctttgaacaaaatctgttccaaagacagtgcatttgttcctttgttgtcatgtcacacagcaaatatagagagccccacaagcatcttgaaggctctacattatatggtccaaacttcaacatttagagcagaaaaattagtagaaaatgattttgaggcacttttgatgtatttcaactgcaatttgaatcatttgatgtcccaagatgatataaaaattctaaagtcacttccgtgctataaatccatcagtggccgctatgtaagcattggaaaatttggaacatgctacgtacttacaaaaagtatcccttcagctgaagtggagaaatggacacantcatcatcatctgcatttcttgaagaaaaaatacacttaaaagaactatatgaggtgattggttgtgtacctgtagatgatcttgaggtatatttgaaacacctcttaccaaaaattgaaaatctctcttatgatgcaaaattagagcacttgatctaccttaagaatagattatcaagtgctgaggaattatcagagattaaggaacaactttttgaaaaactggaaagtttattgataatccatgatgctaacagtagactaaagcaagcaaagcatttctatgatagaactgtgagagtttttgaagttatgcttcctgaaaaattgtttattcctaatgatttctttaagaaattggaacaacttataaaacccaaaaatcatgttacatttatgacatcctgggtggaattcttaagaaatattggactaaaatacatactttctcagcagcagttgttacagtttgctaaggaaatcagtgtgagggctaatacagaaaactggtccaaagaaacattgcaaaatacagttgatatccttctgcatcatatattccaagaacgaatggatttgttatctggaaattttctgaaagaactatctttaataccattcttatgtcctgagcgggcccccgcggaattcattagatttcatcctcaatatcaagaggtaaatggaacacttcctcttataaagttcaatggagcacaggtaaatccaaaattcaagcaatgtgatgtactccagctgttatggacatcctgccctattcttccagagaaagctacacccttaagcattaaagaacaagaaggtagtgaccttggtccacaagaacagcttgaacaagttttaaatatgcttaatgttaacctggatcctcctcttgataaggtaatcaataactgcagaaacatatgcaacataacgacgttggatgaagaaatggtaaaaactagagcaaaagtcttaaggagcatatatgaattcctcagtgcagaaaaaagggaatttcgttttcagttgcgaggggttgcttttgtgatggtagaagatggttggaaacttctgaagcctgaggaggtagtcataaacctagaatatgaatctgattttaaaccttatttgtacaagctacctttagaacttggcacatttcaccagttgttcaaacacttaggtactgaagatattatttcaactaagcaatatgttgaagtgttgagccgcatatttaaaaattctgagggcaaacaattagatcctaatgaaatgcgtacagttaagagagtagtttctggtctgttcaggagtctacagaatgattcagtcaaggtgaggagtgatctcgagaatgtacgagaccttgcgctttacctcccaagccaggatggtagattggtaaagtcaagcatcttagtgtttgacgatgcgccacattataaaagtagaatccaggggaatattggtgtgcaaatgttagttgatctcagccagtgctacttagggaaagaccatggatttcacactaagttgataatgctctttcctcaaaaacttagacctcgattattgagcagtatacttgaagaacaattagatgaagagactcccaaagtttgtcagtttggagcgttgtgttctcttcaaggaagattgcagttactcttgtcttctgaacagttcattacaggactgattagaattatgaagcatgaaaatgataatgcttttctggccaatgaagaaaaagccataagactttgcaaagccctaagagaaggattgaaagtatcctgctttgaaaagcttcaaacaacattaagagttaaaggttttaatcctattccccacagcagaagtgaaacttttgcttttttgaagcgatttggtaatgcagtcatcttgctctacattcaacattcagacagtaaagacattaatttcctgttagcactggcaatgactcttaaatcagcaactgacaatttgatttctgacacttcatatttaattgctatgctaggatgcaatgatatttacaggattggtgagaaacttgacagtttaggagtgaaatatgactcttcggagccatcaaaactggaacttccaatgcctggcacaccaattcctgctgaaattcattacactctgcttatggacccaatgaatgttttttacccgggagaatatgttgggtaccttgttgatgctgaaggtggtgatatctatggatcataccagccaacatacacatatgcaattattgtacaagaagttgaaagagaagatgctgacaattctagttttctaggaaagatatatcagatagatattggttatagtgaatataaaatagttagctctcttgatctgtataagttttcaagacctgaggaaagctctcaaagcagggacagtgctccttctacaccaaccagccccactgagttcctcacccctggcctgagaagcattcctcctcttttctctggtagagagagccacaagacttcttccaaacatcagtcccccaaaaagcttaaggttaattctttaccagaaatcttaaaagaagtgacatctgtggtggagcaagcatggaagcttccagaatcggaacgaaaaaagattattaggcggttgtatttgaaatggcatcctgacaaaaatccagagaaccatgacattgccaatgaagtttttaaacatttgcagaatgaaatcaacagattagaaaaacaggcttttctagatcaaaatgcagacagggcctccagacgaacattttcaacctcagcatcccgatttcagtcagacaaatactcatttcagagattctatacttcatggaatcaagaagcaacgagccataaatctgaaagacagcaacagaacaaagaaaaatgccccccttcagccggacagacttactctcaaaggttctttgttcctcccactttcaagtcggttggcaatccagtggaagcacgcagatggctaagacaagccagagcaaacttctcagctgccaggaatgaccttcataaaaatgccaatgagtgggtgtgctttaaatgttacctttctaccaagttagctttgattgcagctgactatgctgtgaggggaaagtctgataaagatgtaaaaccaactgcacttgctcagaaaatagaggaatatagtcagcaacttgaaggactgacaaatgatgttcacacattggaagcttatggtgtagacagtttaaaaacaagataccctgatttgcttccctttcctcagatcccaaatgacaggttcacttctgaggttgctatgagggtgatggaatgtactgcctgtatcataataaaacttgaaaattttatgcaacaaaaagtgtgaagatatttaacgaaaaaaaaggtagatcttgaatgtgttgtagcacgaataaattgctgtacttcattaagcttcattgccaattagctaggaattgttaagcacattgcagattgttcttggagaattctggagttgttatgaacatgaataccaacggaaaaccttaactgaatctaaaagaaaactattttgaagatggtggtgagctgcaaaatagctggatggatttgaatgattgggatgatacatcattgaactgcactttatataaccaaagcttagcagtttgttagataagagtctatgtatgtctctggttaggatgaagttaattttatgtttttaacatggtatttttgaaggagctaatgaaacactggacatataattggtttaaacataaggggaattaagtctttgtagtctgtcatttttttaagtggatcctcttggatgcgttattttctcatcagctggctctgatcatgaatttgttgtaattttatgttgtactcagtgcatttaagaaatggtagagtattttaatcctattacttgactaagagtgtgaaggtagtactttttagagtgcactgagtgcactttacatctttatttaaatttttttttaacatcttatgtttacaggcttcctgtttgatgaagatagcaacggtgcttgccaagacaacatttattaactgttagaacacttgctttatgtttgtgtgtacatattttccacaaatgttataatttatatagtgtggttgaacaggatgcaatcttttgttgtctaaaggtgctgcagttaaaaaaaaaacaaccttttctttcaatatggcatgtagtggagtttttttaactttaaaaacatcaaaaattgttaaaatcattgtgttatctagtagtttataattatcggcttatatttccccatgaatgatcagaactgacatttaattcatgtttgtctcgccatgcttctttactttaacatatttcttttgcagaatgtaaaaggtaatgataattagtttatataagtgtactggctgtaaatgatgctaaatatactttatgcaattaagggcttacagaacatgttgaaactttttttacttttattgggaataaggaatgtttgcacctccacattttattgcttctggatgtgaaatcatgtaattatttctgctgttatataaagtgccatacttttaataaaggaaaatgtacatatgaaatcatcgtaatgggtgt

SEQ ID NO: 78684 - DNA, 12812 bp, Homo sapiens
  misc_feature (7731)..(7731): n is a, c, g, or t
  misc_feature (8088)..(8088): n is a, c, g, or t
atgaatacattctggcctggcagagaattgattgttcaatggtatccatttgatgaaaacagaaatcacccatctgtttcatggcttaagatggtttggaaaaatctttatatacatttttcagaggatttgactttatttgatgagatgccacttatccccagaactatactagaggaaggtcagacatgtgtggaactcattagactcaggattccatcgttagtcattttagacgatgaatctgaagcacagcttccagaatttttagcagacattgtacaaaaacttggagggtttgtccttaaaaaattagatgcatctatacaacatccgcttattaaaaaatatattcattcaccattaccaagtgctgttttgcagataatggagaagatgccattgcagaaattgtgtaatcaaataacttcgctacttccaacacacaaagatgccctgaggaagttcttggctagtttaaccgatagcagtgagaaagagaaaagaattattcaagaattggcaatattcaagcgcattaaccattcttctgatcagggaatttcctcttatacaaaattgaaaggttgtaaagtcttacaccatactgccaaactcccagcagatctgcgactttctatttcagtaatagacagtagtgatgaagctactattcgtctggcaaacatgttgaaaatagaacagttaaagaccactagctgcttaaagcttgttttaaaagatattgaaaatgcattttattcacatgaagaggtaacacagcttatgttatgggtccttgagaatctatcttctcttaaaaatgagaatccaaatgtgcttgagtggttaacaccattaaaattcatccagatatcacaggaacagatggtatcagctggtgaactctttgaccctgatatagaagtactaaaggatctcttttgtaatgaagaaggaacctatttcccaccctcagtttttacctcaccagatattcttcactccttaagacagattggtttaaaaaacgaagccagtctcaaagaaaaggatgttgtgcaagtggcaaaaaaaattgaagccttacaggtcggtgcttgtcctgatcaagatgttcttctgaagaaagccaaaaccctcttactggttttaaataagaatcacacactgttgcaatcatctgaaggaaagatgacattgaagaaaataaaatgggttccagcctgcaaggaaaggcctccaaattatccaggctctttggtctggaaaggagatctctgtaatctctgtgcaccaccagatatgtgtgatgtaggccatgcaattctcattggctcctcacttcctcttgttgaaagtatccatgtaaacctggaaaaagcattagggatcttcacaaaacctagccttagtgctgtcttaaaacactttaaaattgttgttgattggtattcttcaaaaacctttagtgatgaagactactatcaattccagcatattttgcttgagatttacggattcatgcatgatcatctaaatgaagggaaagattcttttagagccttaaaatttccatgggtttggactggcaaaaagttttgtccacttgcccaggctgtgattaaaccaatccatgatcttgaccttcagccttatttgcataatgtacctaaaaccatggcaaaattccaccaactatttaaggtctgtggttcaatagaggagttgacatcagatcatatttccatggttattcagaagatatatctcaaaagtgaccaagatctcagtgaacaagaaagcaaacaaaatcttcatcttatgttgaatattatcagatggctgtatagcaatcagattccagcaagccccaacacaccagttcctatacatcatagcaaaaatccttctaaacttatcatgaagccaattcacgaatgctgttattgtgacattaaagttgatgaccttaatgacttacttgaagattctgtggaaccaatcattttggtgcatgaggacatacccatgaaaactgcagaatggctaaaagttccatgccttagtacaagactgataaatcctgaaaacatgggatttgagcagtcaggacaaagagagccacttactgtaagaattaaaaatattctggaagaatacccttcagtgtcagatatttttaaagaactacttcaaaacgctgatgatgcaaatgcaacagaatgcagtttcttgattgatatgagaagaaatatggacataagagagaatctcctagacccagggatggcagcttgtcatggacctgctttgtggtcattcaacaattctcaattctcagattcagattttgtgaacataactaggttaggagaatctttaaaaaggggagaagttgacaaagttggaaaatttggtcttggatttaattctgtgtaccatatcactgacattcccatcattatgagtcgggaattcatgataatgttcgatccaaacataaatcatatcagtaaacacattaaagacaaatccaatcctgggatcaaaattaattggagtaaacaacagaaaagacttagaaaatttcctaatcagttcaaaccatttatagatgtatttggctgtcagttacctttgactgtagaagcaccttacagctataatggaacccttttccgactgtcctttagaactcaacaggaagcaaaagtgagtgaagttagtagtacgtgctacaatacagcagatatttattctcttgtggatgaatttagtctctgtggacacaggcttatcattttcactcagagtgtaaagtcaatgtatttgaagtacttgaaaattgaggaaaccaaccccagtttagcacaagatacagtaataattaaaaaaaaatcctgctcttccaaagcattgaacacacctgtcttaagtgttttaaaagaggctgctaagctcatgaagacttgcagcagcagtaataaaaagcttcccagtgatgaaccaaagtcatcttgcattcttcagatcacagtggaagaatttcaccatgtgttcagaaggattgctgatttacagtcgccactttttagaggtccagatgatgacccagctgctctctttgaaatggctaagtctggccaatcaaaaaagccatcagatgagttgtcacagaaaacagtagagtgtaccacgtggcttctgtgtacttgcatggacacaggagaggctctgaagttttccctgagtgagagtggaagaagactaggactggttccatgtggggcagtaggagttcagctgtcagaaatccaggaccagaagtggacagtgaaaccacacattggagaggtgttttgctatttacctttacgaataaaaacaggcttgccagttcatatcaatgggtgctttgctgttacatcaaataggaaagaaatctggaaaacagatacaaaaggacgatggaataccacgttcatgagacatgttattgtgaaagcttacttacaggtactgagtgtcttacgggacctggccactagtggggagctaatggattatacttactatgcagtatggcccgatcctgatttagttcatgatgatttttctgtaatttgccaaggattttatgaagatatagctcatggaaaagggaaagaactgaccaaagtcttctctgatggatctacttgggtttccatgaagaacgtaagatttctagatgactctatacttaaaagaagagatgttggttcagcagccttcaagatatttttgaaatacctcaagaagactgggtccaaaaacctttgtgctgttgaacttccttcttcggtaaaattaggatttgaagaagctggctgcaaacagatactacttgaaaacacattttcagagaaacagtttttttctgaagtgttttttccaaatattcaagaaattgaagcagaacttagagatcctttaatgatctttgttctaaatgaaaaagttgatgagttctcgggagttcttcgtgttactccatgtattccttgttccttggaggggcatcctttggttttgccatcaagattgatccaccccgaaggacgagttgcaaagttatttgatattaaagatgggagattcccttatggttctactcaggattatctcaatcctattattttgattaaactagttcagttaggtatggcaaaagatgatattttatgggatgatatgctagaacgtgcagtgtcagtagctgaaattaataaaagtgatcatgttgctgcatgcctaagaagtagtatcttattgagtcttatcgatgagaaactaaaaataagggatcctagagcaaaggattttgctgcaaaatatcaaacaatccgcttccttccatttctgacaaaaccagcaggtttttctttggactggaaaggcaacagttttaagcctgaaaccatgtttgcagcaactgacctttatacagctgaacatcaagatatagtttgtcttttgcaaccaattctaaatgaaaattcccattcttttagaggttgtggttcagtgtcattggctgttaaagagtttttgggattactcaagaagccaacagttgatctggttataaaccaattgaaagaagtagcaaaatcagttgatgatggaattacactgtaccaggagaatatcaccaatgcttgctacaaataccttcatgaagccttgatgcaaaatgaaatcactaagatgtcaattattgataagttaaaaccctttagcttcattctagttgagaatgcatatgttgactcagaaaaggtttcttttcatttaaattttgaggcggcaccatacctttatcagttgcctaataagtataaaaataatttccgcgaactttttgaaaccgtgggtgtgaggcagtcatgcactgttgaagattttgctcttgttttggaatctattgatcaagaaagaggaacaaagcaaataacagaagagaattttcagctttgccgacgaataatcagtgaaggaatatggagtctcattagagaaaagaaacaagaattttgtgagaaaaattatggcaagatattattgccagatactaatcttatgcttctccctgctaaatcgttatgctacaatgattgcccttggataaaagtaaaggataccactgtaaaatattgtcatgctgacatacccagggaagtagcagtaaaactaggagcagtcccaaagcgacacaaagccttagaaagatatgcatccaatgtctgttttacaacacttggcacagaatttgggcagaaagaaaaattgaccagcagaattaagagcatccttaatgcatatccttctgaaaaggaaatgttgaaagagcttcttcaaaatgctgatgatgcaaaggcgacagaaatctgttttgtgtttgatcctagacagcatccagttgatagaatatttgatgataagtgggccccattgcaagggccagcactttgtgtgtacaacaaccagccatttacagaagatgatgttagaggaattcagaatcttggaaaaggcacgaaagagggaaatccttataaaactggacagtatggaataggattcaattctgtgtatcatatcacagactgcccatcttttatttctggcaatgacatcctgtgtatttttgatcctcatgccagatatgcaccaggggccacatccattagtcccggacgcatgtttagagatttggatgcagattttaggacacagttctcagatgttctggatctttatctgggaacccattttaaactggataattgcacaatgttcagatttcctcttcgtaatgcagaaatggcaaaagtttcggaaatttcgtctgttccagcatcagacagaatggtccagaatcttttggacaaactgcgctcagatggggcagaacttctaatgtttcttaatcacatggaaaaaatttctatttgtgaaatagataagagtactggagctctaaatgtgctgtattcagtaaagggcaaaatcacagatggagacagattgaaaaggaaacaatttcatgcatctgtaattgatagtgttactaaaaagaggcagctcaaagacataccagttcaacaaataacctatactatggatactgaggactctgaaggaaatcttactacgtggctaatttgtaatagatcaggcttttcaagtatggagaaagtatctaaaagtgtcatatcagctcacaagaaccaagatattactcttttcccacgtggtggagtagctgcctgcattactcacaactataaaaaaccccatagggccttctgttttttgcctctttctttggagactgggctgccatttcatgtgaatggccactttgcactggattcagccagaaggaacctgtggcgtgatgataatggagttggtgttcgaagtgactggaataacagtttaatgacagcattaatagctcctgcatatgttgaattgctaatacagttaaaaaaacggtatttccctggttctgatccaacattatcagtgttacagaacacccctattcatgttgtaaaggacactttaaagaagtttttatcgtttttcccagttaaccgtcttgatctacagccagatttatattgtctagtgaaagcactttacaattgcattcacgaagacatgaaacgtcttttacctgttgtgcgggctccaaatattgatggctctgacttgcactctgcagttataattacttggatcaatatgtctacttctaataaaactagaccattttttgacaatttactacaggatgaattacaacaccttaaaaatgcagattataatatcaccacacgcaaaacagtagcagagaatgtctataggctgaaacatctccttttagaaattggtttcaacttggtttataactgtgatgaaactgctaatctttaccactgtcttatagatgcagatattcctgttagttatgtgacccctgctgatatcagatcttttttaatgacattttcctctcctgacactaattgccatattgggaagctgccttgtcgtctgcagcagactaatctaaaactttttcatagtttaaaacttttagttgattattgttttaaagatgcagaagaaaatgagattgaagttgagggattgccccttctcatcacactggacagtgttttgcaaacttttgatgcaaaacgacccaagtttctaacaacatatcatgaattgattccatcccgcaaagacttgtttatgaatacattatatttgaaatatagtaatattttattgaactgtaaagttgcaaaagtgtttgacatttccagctttgctgatttgttatcctctgtgttgcctcgagaatataagaccaaaagttgcacaaagtggaaagacaattttgcaagtgagtcttggcttaagaatgcatggcattttattagtgaatctgtaagtgtgaaagaagatcaggaagaaacaaaaccaacatttgacattgttgttgatactctaaaagactgggcattgcttccaggaacaaagtttactgtttcagccaaccagcttgtggttcctgaaggagatgttctgcttcctctcagccttatgcacattgcagtttttccaaatgcccagagtgataaagtttttcatgctctaatgaaagcnggctgtattcagcttgctttgaacaaaatctgttccaaagacagtgcatttgttcctttgttgtcatgtcacacagcaaatatagagagccccacaagcatcttgaaggctctacattatatggtccaaacttcaacatttagagcagaaaaattagtagaaaatgattttgaggcacttttgatgtatttcaactgcaatttgaatcatttgatgtcccaagatgatataaaaattctaaagtcacttccgtgctataaatccatcagtggccgctatgtaagcattggaaaatttggaacatgctacgtacttacaaaaagtatcccttcagctgaagtggagaaatggacacantcatcatcatctgcatttcttgaagaaaaaatacacttaaaagaactatatgaggtgattggttgtgtacctgtagatgatcttgaggtatatttgaaacacctcttaccaaaaattgaaaatctctcttatgatgcaaaattagagcacttgatctaccttaagaatagattatcaagtgctgaggaattatcagagattaaggaacaactttttgaaaaactggaaagtttattgataatccatgatgctaacagtagactaaagcaagcaaagcatttctatgatagaactgtgagagtttttgaagttatgcttcctgaaaaattgtttattcctaatgatttctttaagaaattggaacaacttataaaacccaaaaatcatgttacatttatgacatcctgggtggaattcttaagaaatattggactaaaatacatactttctcagcagcagttgttacagtttgctaaggaaatcagtgtgagggctaatacagaaaactggtccaaagaaacattgcaaaatacagttgatatccttctgcatcatatattccaagaacgaatggatttgttatctggaaattttctgaaagaactatctttaataccattcttatgtcctgagcgggcccccgcggaattcattagatttcatcctcaatatcaagaggtaaatggaacacttcctcttataaagttcaatggagcacaggtaaatccaaaattcaagcaatgtgatgtactccagctgttatggacatcctgccctattcttccagagaaagctacacccttaagcattaaagaacaagaaggtagtgaccttggtccacaagaacagcttgaacaagttttaaatatgcttaatgttaacctggatcctcctcttgataaggtaatcaataactgcagaaacatatgcaacataacgacgttggatgaagaaatggtaaaaactagagcaaaagtcttaaggagcatatatgaattcctcagtgcagaaaaaagggaatttcgttttcagttgcgaggggttgcttttgtgatggtagaagatggttggaaacttctgaagcctgaggaggtagtcataaacctagaatatgaatctgattttaaaccttatttgtacaagctacctttagaacttggcacatttcaccagttgttcaaacacttaggtactgaagatattatttcaactaagcaatatgttgaagtgttgagccgcatatttaaaaattctgagggcaaacaattagatcctaatgaaatgcgtacagttaagagagtagtttctggtctgttcaggagtctacagaatgattcagtcaaggtgaggagtgatctcgagaatgtacgagaccttgcgctttacctcccaagccaggatggtagattggtaaagtcaagcatcttagtgtttgacgatgcgccacattataaaagtagaatccaggggaatattggtgtgcaaatgttagttgatctcagccagtgctacttagggaaagaccatggatttcacactaagttgataatgctctttcctcaaaaacttagacctcgattattgagcagtatacttgaagaacaattagatgaagagactcccaaagtttgtcagtttggagcgttgtgttctcttcaaggaagattgcagttactcttgtcttctgaacagttcattacaggactgattagaattatgaagcatgaaaatgataatgcttttctggccaatgaagaaaaagccataagactttgcaaagccctaagagaaggattgaaagtatcctgctttgaaaagcttcaaacaacattaagagttaaaggttttaatcctattccccacagcagaagtgaaacttttgcttttttgaagcgatttggtaatgcagtcatcttgctctacattcaacattcagacagtaaagacattaatttcctgttagcactggcaatgactcttaaatcagcaactgacaatttgatttctgacacttcatatttaattgctatgctaggatgcaatgatatttacaggattggtgagaaacttgacagtttaggagtgaaatatgactcttcggagccatcaaaactggaacttccaatgcctggcacaccaattcctgctgaaattcattacactctgcttatggacccaatgaatgttttttacccgggagaatatgttgggtaccttgttgatgctgaaggtggtgatatctatggatcataccagccaacatacacatatgcaattattgtacaagaagttgaaagagaagatgctgacaattctagttttctaggaaagatatatcagatagatattggttatagtgaatataaaatagttagctctcttgatctgtataagttttcaagacctgaggaaagctctcaaagcagggacagtgctccttctacaccaaccagccccactgagttcctcacccctggcctgagaagcattcctcctcttttctctggtagagagagccacaagacttcttccaaacatcagtcccccaaaaagcttaaggttaattctttaccagaaatcttaaaagaagtgacatctgtggtggagcaagcatggaagcttccagaatcggaacgaaaaaagattattaggcggttgtatttgaaatggcatcctgacaaaaatccagagaaccatgacattgccaatgaagtttttaaacatttgcagaatgaaatcaacagattagaaaaacaggcttttctagatcaaaatgcagacagggcctccagacgaacattttcaacctcagcatcccgatttcagtcagacaaatactcatttcagagattctatacttcatggaatcaagaagcaacgagccataaatctgaaagacagcaacagaacaaagaaaaatgccccccttcagccggacagacttactctcaaaggttctttgttcctcccactttcaagtcggttggcaatccagtggaagcacgcagatggctaagacaagccagagcaaacttctcagctgccaggaatgaccttcataaaaatgccaatgagtgggtgtgctttaaatgttacctttctaccaagttagctttgattgcagctgactatgctgtgaggggaaagtctgataaagatgtaaaaccaactgcacttgctcagaaaatagaggaatatagtcagcaacttgaaggactgacaaatgatgttcacacattggaagcttatggtgtagacagtttaaaaacaagataccctgatttgcttccctttcctcagatcccaaatgacaggttcacttctgaggttgctatgagggtgatggaatgtactgcctgtatcataataaaacttgaaaattttatgcaacaaaaagtgtgaagatatttaacgaaaaaaaaggtagatcttgaatgtgttgtagcacgaataaattgctgtacttcattaagcttcattgccaattagctaggaattgttaagcacattgcagattgttcttggagaattctggagttgttatgaacatgaataccaacggaaaaccttaactgaatctaaaagaaaactattttgaagatggtggtgagctgcaaaatagctggatggatttgaatgattgggatgatacatcattgaactgcactttatataaccaaagcttagcagtttgttagataagagtctatgtatgtctctggttaggatgaagttaattttatgtttttaacatggtatttttgaaggagctaatgaaacactggacatataattggtttaaacataaggggaattaagtctttgtagtctgtcatttttttaagtggatcctcttggatgcgttattttctcatcagctggctctgatcatgaatttgttgtaattttatgttgtactcagtgcatttaagaaatggtagagtattttaatcctattacttgactaagagtgtgaaggtagtactttttagagtgcactgagtgcactttacatctttatttaaatttttttttaacatcttatgtttacaggcttcctgtttgatgaagatagcaacggaaaactcaaaatggtggcagttcttattaccagttgttagtattgtttctggaaactgcttgccaagacaacatttattaactgttagaacacttgctttatgtttgtgtgtacatattttccacaaatgttataatttatatagtgtggttgaacaggatgcaatcttttgttgtctaaaggtgctgcagttaaaaaaaaaacaaccttttctttcaatatggcatgtagtggagtttttttaactttaaaaacatcaaaaattgttaaaatcattgtgttatctagtagtttataattatcggcttatatttccccatgaatgatcagaactgacatttaattcatgtttgtctcgccatgcttctttactttaacatatttcttttgcagaatgtaaaaggtaatgataattagtttatataagtgtactggctgtaaatgatgctaaatatactttatgcaattaagggcttacagaacatgttgaaactttttttacttttattgggaataaggaatgtttgcacctccacattttattgcttctggatgtgaaatcatgtaattatttctgctgttatataaagtgccatacttttaataaaggaaaatgtacatatgaaatcatcgtaatgggtgt

SEQ ID NO: 78685 - DNA, 10990 bp, Homo sapiens
  misc_feature (7731)..(7731): n is a, c, g, or t
  misc_feature (8088)..(8088): n is a, c, g, or t
atgaatacattctggcctggcagagaattgattgttcaatggtatccatttgatgaaaacagaaatcacccatctgtttcatggcttaagatggtttggaaaaatctttatatacatttttcagaggatttgactttatttgatgagatgccacttatccccagaactatactagaggaaggtcagacatgtgtggaactcattagactcaggattccatcgttagtcattttagacgatgaatctgaagcacagcttccagaatttttagcagacattgtacaaaaacttggagggtttgtccttaaaaaattagatgcatctatacaacatccgcttattaaaaaatatattcattcaccattaccaagtgctgttttgcagataatggagaagatgccattgcagaaattgtgtaatcaaataacttcgctacttccaacacacaaagatgccctgaggaagttcttggctagtttaaccgatagcagtgagaaagagaaaagaattattcaagaattggcaatattcaagcgcattaaccattcttctgatcagggaatttcctcttatacaaaattgaaaggttgtaaagtcttacaccatactgccaaactcccagcagatctgcgactttctatttcagtaatagacagtagtgatgaagctactattcgtctggcaaacatgttgaaaatagaacagttaaagaccactagctgcttaaagcttgttttaaaagatattgaaaatgcattttattcacatgaagaggtaacacagcttatgttatgggtccttgagaatctatcttctcttaaaaatgagaatccaaatgtgcttgagtggttaacaccattaaaattcatccagatatcacaggaacagatggtatcagctggtgaactctttgaccctgatatagaagtactaaaggatctcttttgtaatgaagaaggaacctatttcccaccctcagtttttacctcaccagatattcttcactccttaagacagattggtttaaaaaacgaagccagtctcaaagaaaaggatgttgtgcaagtggcaaaaaaaattgaagccttacaggtcggtgcttgtcctgatcaagatgttcttctgaagaaagccaaaaccctcttactggttttaaataagaatcacacactgttgcaatcatctgaaggaaagatgacattgaagaaaataaaatgggttccagcctgcaaggaaaggcctccaaattatccaggctctttggtctggaaaggagatctctgtaatctctgtgcaccaccagatatgtgtgatgtaggccatgcaattctcattggctcctcacttcctcttgttgaaagtatccatgtaaacctggaaaaagcattagggatcttcacaaaacctagccttagtgctgtcttaaaacactttaaaattgttgttgattggtattcttcaaaaacctttagtgatgaagactactatcaattccagcatattttgcttgagatttacggattcatgcatgatcatctaaatgaagggaaagattcttttagagccttaaaatttccatgggtttggactggcaaaaagttttgtccacttgcccaggctgtgattaaaccaatccatgatcttgaccttcagccttatttgcataatgtacctaaaaccatggcaaaattccaccaactatttaaggtctgtggttcaatagaggagttgacatcagatcatatttccatggttattcagaagatatatctcaaaagtgaccaagatctcagtgaacaagaaagcaaacaaaatcttcatcttatgttgaatattatcagatggctgtatagcaatcagattccagcaagccccaacacaccagttcctatacatcatagcaaaaatccttctaaacttatcatgaagccaattcacgaatgctgttattgtgacattaaagttgatgaccttaatgacttacttgaagattctgtggaaccaatcattttggtgcatgaggacatacccatgaaaactgcagaatggctaaaagttccatgccttagtacaagactgataaatcctgaaaacatgggatttgagcagtcaggacaaagagagccacttactgtaagaattaaaaatattctggaagaatacccttcagtgtcagatatttttaaagaactacttcaaaacgctgatgatgcaaatgcaacagaatgcagtttcttgattgatatgagaagaaatatggacataagagagaatctcctagacccagggatggcagcttgtcatggacctgctttgtggtcattcaacaattctcaattctcagattcagattttgtgaacataactaggttaggagaatctttaaaaaggggagaagttgacaaagttggaaaatttggtcttggatttaattctgtgtaccatatcactgacattcccatcattatgagtcgggaattcatgataatgttcgatccaaacataaatcatatcagtaaacacattaaagacaaatccaatcctgggatcaaaattaattggagtaaacaacagaaaagacttagaaaatttcctaatcagttcaaaccatttatagatgtatttggctgtcagttacctttgactgtagaagcaccttacagctataatggaacccttttccgactgtcctttagaactcaacaggaagcaaaagtgagtgaagttagtagtacgtgctacaatacagcagatatttattctcttgtggatgaatttagtctctgtggacacaggcttatcattttcactcagagtgtaaagtcaatgtatttgaagtacttgaaaattgaggaaaccaaccccagtttagcacaagatacagtaataattaaaaaaaaatcctgctcttccaaagcattgaacacacctgtcttaagtgttttaaaagaggctgctaagctcatgaagacttgcagcagcagtaataaaaagcttcccagtgatgaaccaaagtcatcttgcattcttcagatcacagtggaagaatttcaccatgtgttcagaaggattgctgatttacagtcgccactttttagaggtccagatgatgacccagctgctctctttgaaatggctaagtctggccaatcaaaaaagccatcagatgagttgtcacagaaaacagtagagtgtaccacgtggcttctgtgtacttgcatggacacaggagaggctctgaagttttccctgagtgagagtggaagaagactaggactggttccatgtggggcagtaggagttcagctgtcagaaatccaggaccagaagtggacagtgaaaccacacattggagaggtgttttgctatttacctttacgaataaaaacaggcttgccagttcatatcaatgggtgctttgctgttacatcaaataggaaagaaatctggaaaacagatacaaaaggacgatggaataccacgttcatgagacatgttattgtgaaagcttacttacaggtactgagtgtcttacgggacctggccactagtggggagctaatggattatacttactatgcagtatggcccgatcctgatttagttcatgatgatttttctgtaatttgccaaggattttatgaagatatagctcatggaaaagggaaagaactgaccaaagtcttctctgatggatctacttgggtttccatgaagaacgtaagatttctagatgactctatacttaaaagaagagatgttggttcagcagccttcaagatatttttgaaatacctcaagaagactgggtccaaaaacctttgtgctgttgaacttccttcttcggtaaaattaggatttgaagaagctggctgcaaacagatactacttgaaaacacattttcagagaaacagtttttttctgaagtgttttttccaaatattcaagaaattgaagcagaacttagagatcctttaatgatctttgttctaaatgaaaaagttgatgagttctcgggagttcttcgtgttactccatgtattccttgttccttggaggggcatcctttggttttgccatcaagattgatccaccccgaaggacgagttgcaaagttatttgatattaaagatgggagattcccttatggttctactcaggattatctcaatcctattattttgattaaactagttcagttaggtatggcaaaagatgatattttatgggatgatatgctagaacgtgcagtgtcagtagctgaaattaataaaagtgatcatgttgctgcatgcctaagaagtagtatcttattgagtcttatcgatgagaaactaaaaataagggatcctagagcaaaggattttgctgcaaaatatcaaacaatccgcttccttccatttctgacaaaaccagcaggtttttctttggactggaaaggcaacagttttaagcctgaaaccatgtttgcagcaactgacctttatacagctgaacatcaagatatagtttgtcttttgcaaccaattctaaatgaaaattcccattcttttagaggttgtggttcagtgtcattggctgttaaagagtttttgggattactcaagaagccaacagttgatctggttataaaccaattgaaagaagtagcaaaatcagttgatgatggaattacactgtaccaggagaatatcaccaatgcttgctacaaataccttcatgaagccttgatgcaaaatgaaatcactaagatgtcaattattgataagttaaaaccctttagcttcattctagttgagaatgcatatgttgactcagaaaaggtttcttttcatttaaattttgaggcggcaccatacctttatcagttgcctaataagtataaaaataatttccgcgaactttttgaaaccgtgggtgtgaggcagtcatgcactgttgaagattttgctcttgttttggaatctattgatcaagaaagaggaacaaagcaaataacagaagagaattttcagctttgccgacgaataatcagtgaaggaatatggagtctcattagagaaaagaaacaagaattttgtgagaaaaattatggcaagatattattgccagatactaatcttatgcttctccctgctaaatcgttatgctacaatgattgcccttggataaaagtaaaggataccactgtaaaatattgtcatgctgacatacccagggaagtagcagtaaaactaggagcagtcccaaagcgacacaaagccttagaaagatatgcatccaatgtctgttttacaacacttggcacagaatttgggcagaaagaaaaattgaccagcagaattaagagcatccttaatgcatatccttctgaaaaggaaatgttgaaagagcttcttcaaaatgctgatgatgcaaaggcgacagaaatctgttttgtgtttgatcctagacagcatccagttgatagaatatttgatgataagtgggccccattgcaagggccagcactttgtgtgtacaacaaccagccatttacagaagatgatgttagaggaattcagaatcttggaaaaggcacgaaagagggaaatccttataaaactggacagtatggaataggattcaattctgtgtatcatatcacagactgcccatcttttatttctggcaatgacatcctgtgtatttttgatcctcatgccagatatgcaccaggggccacatccattagtcccggacgcatgtttagagatttggatgcagattttaggacacagttctcagatgttctggatctttatctgggaacccattttaaactggataattgcacaatgttcagatttcctcttcgtaatgcagaaatggcaaaagtttcggaaatttcgtctgttccagcatcagacagaatggtccagaatcttttggacaaactgcgctcagatggggcagaacttctaatgtttcttaatcacatggaaaaaatttctatttgtgaaatagataagagtactggagctctaaatgtgctgtattcagtaaagggcaaaatcacagatggagacagattgaaaaggaaacaatttcatgcatctgtaattgatagtgttactaaaaagaggcagctcaaagacataccagttcaacaaataacctatactatggatactgaggactctgaaggaaatcttactacgtggctaatttgtaatagatcaggcttttcaagtatggagaaagtatctaaaagtgtcatatcagctcacaagaaccaagatattactcttttcccacgtggtggagtagctgcctgcattactcacaactataaaaaaccccatagggccttctgttttttgcctctttctttggagactgggctgccatttcatgtgaatggccactttgcactggattcagccagaaggaacctgtggcgtgatgataatggagttggtgttcgaagtgactggaataacagtttaatgacagcattaatagctcctgcatatgttgaattgctaatacagttaaaaaaacggtatttccctggttctgatccaacattatcagtgttacagaacacccctattcatgttgtaaaggacactttaaagaagtttttatcgtttttcccagttaaccgtcttgatctacagccagatttatattgtctagtgaaagcactttacaattgcattcacgaagacatgaaacgtcttttacctgttgtgcgggctccaaatattgatggctctgacttgcactctgcagttataattacttggatcaatatgtctacttctaataaaactagaccattttttgacaatttactacaggatgaattacaacaccttaaaaatgcagattataatatcaccacacgcaaaacagtagcagagaatgtctataggctgaaacatctccttttagaaattggtttcaacttggtttataactgtgatgaaactgctaatctttaccactgtcttatagatgcagatattcctgttagttatgtgacccctgctgatatcagatcttttttaatgacattttcctctcctgacactaattgccatattgggaagctgccttgtcgtctgcagcagactaatctaaaactttttcatagtttaaaacttttagttgattattgttttaaagatgcagaagaaaatgagattgaagttgagggattgccccttctcatcacactggacagtgttttgcaaacttttgatgcaaaacgacccaagtttctaacaacatatcatgaattgattccatcccgcaaagacttgtttatgaatacattatatttgaaatatagtaatattttattgaactgtaaagttgcaaaagtgtttgacatttccagctttgctgatttgttatcctctgtgttgcctcgagaatataagaccaaaagttgcacaaagtggaaagacaattttgcaagtgagtcttggcttaagaatgcatggcattttattagtgaatctgtaagtgtgaaagaagatcaggaagaaacaaaaccaacatttgacattgttgttgatactctaaaagactgggcattgcttccaggaacaaagtttactgtttcagccaaccagcttgtggttcctgaaggagatgttctgcttcctctcagccttatgcacattgcagtttttccaaatgcccagagtgataaagtttttcatgctctaatgaaagcnggctgtattcagcttgctttgaacaaaatctgttccaaagacagtgcatttgttcctttgttgtcatgtcacacagcaaatatagagagccccacaagcatcttgaaggctctacattatatggtccaaacttcaacatttagagcagaaaaattagtagaaaatgattttgaggcacttttgatgtatttcaactgcaatttgaatcatttgatgtcccaagatgatataaaaattctaaagtcacttccgtgctataaatccatcagtggccgctatgtaagcattggaaaatttggaacatgctacgtacttacaaaaagtatcccttcagctgaagtggagaaatggacacantcatcatcatctgcatttcttgaagaaaaaatacacttaaaagaactatatgaggtgattggttgtgtacctgtagatgatcttgaggtatatttgaaacacctcttaccaaaaattgaaaatctctcttatgatgcaaaattagagcacttgatctaccttaagaatagattatcaagtgctgaggaattatcagagattaaggaacaactttttgaaaaactggaaagtttattgataatccatgatgctaacagtagactaaagcaagcaaagcatttctatgatagaactgtgagagtttttgaagttatgcttcctgaaaaattgtttattcctaatgatttctttaagaaattggaacaacttataaaacccaaaaatcatgttacatttatgacatcctgggtggaattcttaagaaatattggactaaaatacatactttctcagcagcagttgttacagtttgctaaggaaatcagtgtgagggctaatacagaaaactggtccaaagaaacattgcaaaatacagttgatatccttctgcatcatatattccaagaacgaatggatttgttatctggaaattttctgaaagaactatctttaataccattcttatgtcctgagcgggcccccgcggaattcattagatttcatcctcaatatcaagaggtaaatggaacacttcctcttataaagttcaatggagcacaggtaaatccaaaattcaagcaatgtgatgtactccagctgttatggacatcctgccctattcttccagagaaagctacacccttaagcattaaagaacaagaaggtagtgaccttggtccacaagaacagcttgaacaagttttaaatatgcttaatgttaacctggatcctcctcttgataaggtaatcaataactgcagaaacatatgcaacataacgacgttggatgaagaaatggtaaaaactagagcaaaagtcttaaggagcatatatgaattcctcagtgcagaaaaaagggaatttcgttttcagttgcgaggggttgcttttgtgatggtagaagatggttggaaacttctgaagcctgaggaggtagtcataaacctagaatatgaatctgattttaaaccttatttgtacaagctacctttagaacttggcacatttcaccagttgttcaaacacttaggtactgaagatattatttcaactaagcaatatgttgaagtgttgagccgcatatttaaaaattctgagggcaaacaattagatcctaatgaaatgcgtacagttaagagagtagtttctggtctgttcaggagtctacagaatgattcagtcaaggtgaggagtgatctcgagaatgtacgagaccttgcgctttacctcccaagccaggatggtagattggtaaagtcaagcatcttagtgtttgacgatgcgccacattataaaagtagaatccaggggaatattggtgtgcaaatgttagttgatctcagccagtgctacttagggaaagaccatggatttcacactaagttgataatgctctttcctcaaaaacttagacctcgattattgagcagtatacttgaagaacaattagatgaagagactcccaaagtttgtcagtttggagcgttgtgttctcttcaaggaagattgcagttactcttgtcttctgaacagttcattacaggactgattagaattatgaagcatgaaaatgataatgcttttctggccaatgaagaaaaagccataagactttgcaaagccctaagagaaggattgaaagtatcctgctttgaaaagcttcaaacaacattaagagttaaaggttttaatcctattccccacagcagaagtgaaacttttgcttttttgaagcgatttggtaatgcagtcatcttgctctacattcaacattcagacagtaaagacattaatttcctgttagcactggcaatgactcttaaatcagcaactgacaatttgatttctgacacttcatatttaattgctatgctaggatgcaatgatatttacaggattggtgagaaacttgacagtttaggagtgaaatatgactcttcggagccatcaaaactggaacttccaatgcctggcacaccaattcctgctgaaattcattacactctgcttatggacccaatgaatgttttttacccgggagaatatgttgggtaccttgttgatgctgaaggtggtgatatctatggatcataccagccaacatacacatatgcaattattgtacaagaagttgaaagagaagatgctgacaattctagttttctaggaaagatatatcagatagatattggttatagtgaatataaaatagttagctctcttgatctgtataagttttcaagacctgaggaaagctctcaaagcagggacagtgctccttctacaccaaccagccccactgagttcctcacccctggcctgagaagcattcctcctcttttctctggtagagagagccacaagacttcttccaaacatcagtcccccaaaaagcttaaggttaattctttaccagaaatcttaaaagaagtgacatctgtggtggagcaagcatggaagcttccagaatcggaacgaaaaaagattattaggcggttgtatttgaaatggcatcctgacaaaaatccagagaaccatgacattgccaatgaagtttttaaacatttgcagaatgaaatcaacagattagaaaaacaggcttttctagatcaaaatgcagacagggcctccagacgaacattttcaacctcagcatcccgatttcagtcagacaaatactcatttcagagattctatacttcatggaatcaagaagcaacgagccataaatctgaaagacagc

SEQ ID NO: 78686 - DNA, 704 bp, Homo sapiens
aactgctctcagagaagcttccagtggaaccaaaggaatacagatggagggcctggggagagatggcctgaggggacctgcagaagggatttacctgctgcccctcccccaggggagccaggagactgagctgggctgtaaacactccgtgcctggtgcagcctggtctgcacaggctgagaggatgctctacttctaaaccccataaggaaaaggcccaggagggacggggatgttgctgctgatagctaaaaatgatcaaattcttaccatatgccagaccttatgctggacaattcactgacattatcccacgtagtaggcagaattctaacgtgacccccaagattctccaccttctgtgtaatccccaggattgtgaatgtgatggatttcattctggtaaacaggttttgttatatggcacagatgactttaagacagggaggctttaaatctgtgactagcagaagacatatggaaggcagagattcaaaatataagagggatctgacgcaccactactggcttgaaaatggaggggaccacatggcagaggacgcacgcagcctctagttgctgagggtggtctccagttgacagcggcaaggtaacaggggcctcagtcctacaaccacaaggaactgaactctgccaacatactgaaagagcttgaaggaggagcataagcctcaggggtgaga

SEQ ID NO: 78687 - DNA, 335 bp, Homo sapiens
taaatctaacatttactaagtgattagcatatgttatgaaataactatacaggaggtttaatccttatccccatttttatagatagaaaaactgaggcacagaaagttaagtgagtttcccagtgccatacaggaactaagtgactcaaatttttccaaaatagtggcaagggtcccagaaagactgattctccagttctaggaatattgaacttgggttttctttctgtgttgtcaatcctgaacaacatgcatgttgtatccttcttctcagcattctttgctcatttgcatagattcaattttttaacgttttttttttctttctgttgaag

SEQ ID NO: 78688 - DNA, 743 bp, Homo sapiens
ccagatgcgggaaagaactacccacttcaggtctctttgactcaccaggactaccagcagcaggagggagctacccatgtcgggtctccttgactcatcaggacaacctgcctatggaaaggagctatccactgtcagtctcctctgctgagagctggacactcgggatgacatgcctgcggtacccactttgggtctcctgagagctgtcgctcaatgaagcttctctccaccttactcactctccagttgtctgtgtacgtcattcttcctggatgcaggacaagaacatgggacctgctgaatggcgtgactgaaaaggctgtaacacaaacagggctgaaactttgccctcaaccccctggcccaacacactgtgggcaatgagaaggagagaagagctgctgcccttcaagggacctcagacctaggggctccccaagacagggctgtgacatcctctttgtggctctgtcgttcctggcatctccaagcttctgggtgccactgcattcccctcatccagacgtggatgcccacagtggaagcctcgtgtagtacatctggttcagctgcagcctctgtcagcagctgtgcgggtgcctggaactgcccaccctgttgcagctggcacacctggctttgcacagtggctggaccctgagcttgtgcacacacccctcactgttctgtgcctggcttgccattgggaggcatgggatctgggccagcagcacaagcca

SEQ ID NO: 78689 - DNA, 416 bp, Homo sapiens
cctgatacttcctacactagataatggaacttcaacattagcctattgattgcccaagaacaaacatttttttctaaatgtcaggtgttatggggaggattgatgctgacagcagaggtctagttaaaaactgatgcagaggttcaaatacgttgtgcagtaatcactagaactcaccttctaaagtgtcatgagagctctgattctgcaattagagattttttaatgtgtttttgaaattaccttgtaaaccacaaatctgtgtctctgcattgccccttattgtttcctaccacaaattctacatcaagaagaaagttttaaagttagactggatttatttgtgattttatggagcacaataaggtacattgagatagcatactaaaggaggccaaatacaggaagcatcatct

SEQ ID NO: 78690 - DNA, 380 bp, Homo sapiens
gcctactactactaaattcgcggcgctcgactcttgtttacaaaaaattttgtaccacaccatagcagtaggaaattattgaattgtaaacttttgcaactaacaaaactgtagacagcatttaaagttagctgaggcccctagagtaaattttgaaagatcatagtgagagtgtcagaattagaattcagatgtcctgctttctgtcttagtatgtattcattctaaagtgaatttactccataattctcctctcactgggaaaatgaaacattatcgttagtctctgtactttttattcacaatgcccaagtaaaacaaaaaacattataagattctcaagaaagaaagaaaaaaaagtcgacgcaaactcaaaaata

SEQ ID NO: 78691 - DNA, 324 bp, Homo sapiens
cctgggatgagaatgataggaggtgtagcggggttgagctggataatataaggttccttacagctctagacatttatgatttaacattttttatggattgctaatgctgcttttttttttgttttaaatgtcaaattcttgcatgtataaggccttgattctttcaggcctgggttgtgttgatttatgggcatgagctaattccagatgactcattctagaagtgattgtgtaagtatcctttacttagctaaacatatgcaacataaattcatctactataacatatgttctctcagaacatgctactggccagagttatta

SEQ ID NO: 78692 - DNA, 538 bp, Homo sapiens
agaggaagtatggtcacctgcgcttgcgggccagcaaagcagtggagaggaccttgggcgagtgcatgacagcaaagtgaggtggaggaaggctgtaagggagtggaggctgtaggtaggcaggtgcgcatccatggtggctggtcagcgggagctctctgacggtgaggcatggtctgctagtgaaggagctatgagaagggcccctgggaagcaccctggttaggcatgcgaggctgtgccacaagcgggcatgccatgctggggccccaggagaggctggcagatgaggacactcagatcggactggacatatctcatggacaagactgccctactctgtccaggtcctacagttacccaaaagctaaagccacctagaagagtatggcgagccttggaggatgggcatccctggccatcctgctccacctgtgtttcgaactattttgtctttcagcagattttttaacttaaatgtgtgacgttatttttttccagaaaatcatttatttctaagtttaaatctttttttcaa

SEQ ID NO: 78693 - DNA, 446 bp, Homo sapiens
agttcaagaccagcctgggcaacatagtgagactccgcctctacaaaaaaaatttaaaaattagccagatatggtggcatgtgcctgtagtcccagctacttgggatgctgaggtgggatgatcacttgagcccaggaggttgagattgcagtgagctgtgactgtgccactgcactccagcctgggcaacagagtgagaccctgtctcaacaaagaaagatgaaaagttatttgttggagtaattgtaaaggtccatgaatgtttaatcatggacagcttatactggataaagccagtttagtttttgtttcatagttcaaaaatactttaaggctcaaattgaaagcttttattggtcagttgatactaaaagtgcagtgttaagagaacttaaaaaccatgcacattttcagtttcataacaggttttctctttgtttttatt

SEQ ID NO: 78694 - DNA, 491 bp, Homo sapiens
atctccctgcttccgctggccccgccttactctgttgcaccgcccagtcgcccggctttccactgagggacgccccctgctctggactgcttagcctactccagctggccccacctcacctcatcggccccgcctcctccgctcgcccactccgggcgcccactcctgaggagctatcccagagtccgcgcggcctcgccttcccggcccgctcaccaccccgcctcgtcccacctcgcctcgccctccccgggctctagccacttggtgcggcaggtgtcctgcaggccggctcgagattcccgagctcgccctcgtggtgttccaggaacacggtactttgcgctagcctggcctgtcctgagagactgcgggaggcgaagagaacgcgctgttgctgtgggaagcgccggggacgggacagctacaccgccaaacacttcgctagggaaagggctggctggtttcgtgcgtaaacaaccgaaaagggg

SEQ ID NO: 78695 - DNA, 252 bp, Homo sapiens
atacaatatttctaagactcagtacaataaaaaaatgcaaaatacaaatgattttttatactgatgacatgtaatgatcatattttggatatattgggtttacaatatttttaaaattaatttcacctgtttctttttattgtttttaatgtggctactagaaaacttcaaattataatcatgtttggctgtcactgtatttctaccggttagtgccgctccatatcataaaaacagtaaagatatttatgg

SEQ ID NO: 78696 - DNA, 363 bp, Homo sapiens
ttttttggtggagtacccccaggacttttcactgatctcattccacccagctcaggcccctttccatttcataatagtttctctccatatcttcccagaaatcttggcttggtcattttcaggaataaggaaagctgagacatggaaaaagagtaaaattgtttgaatgagaatgaaatatctgctccaaaatcacctctaggtcaatttatacaggatatctcatctccatcctcattctgtttgccaagattttcaggattcataatcatggcactttaaaactactatttctgccattgccacatttgtactagtatggtgcacaaatgggtgatacctcataatggaaacattactggg

SEQ ID NO: 78697 - DNA, 834 bp, Homo sapiens
agggagggaaaaagaaaagcaaagaaaaattacatgaagattcccggaagtcagaggggcggaggctgaagggaggcagtgtgcacagtgcggatgccatgggcaccaaggattgtcatcatttacccatggggctctctcccccaagactcccacattcttaaatgtgtgtgttcaaggccagcccccaagctgggtacagctaaagagattcaccaggtaaagttcttgcccttggggaaggcagaaacgaatacacacaataccacgtgagcgagcaatgagagagttgcctcgttgtcgtgtgggagcccagagctgaggacactatcctctaccagggagtcagggaagacccaaggaagtgacagtggcctagaatcagaaagggtgagcttgggcagttccagtttctttggaaactgaagcttactcagtggtgtgcacgtgtgcgtgtgtgcacgtgcgctggcaagaggaagtagaagcctctctaaacaaaaggatacaaaaccaaaatcgagtacaaaatctaatattaatttagaatgagaaaagaaatcagaacaaattactttttttttttttttgagacagagtctcactctgtcgcccaggctggaatgcaatggtgtgatcttggctcactgcagcctccgcctctcgggttcaagcaattctcctgccccagcctctgaggagctgggattacaggtgctgaccaccatgcccaggtaatttttctgtatttttagtagacacatggtttcaccatgttggccaagctggcttcgaactcctgacttcaagtgatccgcctgcctcggcctccca

SEQ ID NO: 78698 - DNA, 1819 bp, Homo sapiens
ctctgcagtcacacaacctcacccagttacgaagagctagtcacctcaactgcattgtcccaagacaggcagagtaggtaaaaatagtcatatgttaaaattcaaggtttagataaaaagacaactagttcttgcttgctttgattaacttttattatgcagatgcatttgaactggagaagcttgtcatgtttctctctaaaagatgtttttaaatgttattgctcaaaatggaaaaaaaaaaaaagaatcagtaagtattcctgacatgtaggattgttgcctggctgatcacaatgaaaatgttagctatgactaatgaaggaattatcacaacttacattggtattaataataaacaaatataagccaaagctatatataaccaatttagtgctatgtattggtgaaaaaaacagaaagttacagaaattactcacaatgaaacatagaacaagttagaaagggccttttttttttttgaaataaaggacttttgtctgataagtagcagtcatttgacctcaaatcattaaatggggaaagtctaaacaagaaaaggtaatgtttacctgaatgttggggaaagcattaggatttatggcccagacttaaagattgtagaagattgtatataattacagcaataagcatttgtgtaagaagtagctattatgctgaagaaagatgggcacacaaaatctctaggcaaatccttggaacaggggaaagtgatactgctcatagaattattggttcgagaggcagcaaatatgatgcaataagtatatcaaactcaattaaaaatagaggacagaggtatgtggtgggggaaaacaaatgcaatagggctaagtcagcttacagggggtgaatataatttgaacatggcacccccaatttacttgatcataaagttagccaaagacatgagtggtcgatctttgacaatactctagtgatctccatgagagatggcctgatagatgttggatagaatgaagggccatttgatgaacaagttttgtagatttacatgtgacttggcactgtgctgacattagagccttctaagaatcagataaattaattaggtgaaacattttttcccaaagcacttgcatttcagaaagtttctcatttctgactcagcttagaacccatcccttgttacaggtcatttctcctccttataagccatgtctgtttcttttttccatcatgtcatacaccctatccacaaaagatggtagctcacgttttctaactagagacgtgcaggcaagttgagagcatgaagaatcccttgggaataccaattctgtagcaaatgctaaggtaaaagaaaaactatgcattatttttcaactatagttggcttaaattcttagtttcaccctggagaccatgttgccagtggacaattgagcatgctgtgatttataaaatgcaagctagtttatatgataatgtttgccatctcactttaccagtactgttgaccttttcatatgattctaaaatcacttacttgtaaataaatactcctagttctgtagatgaaacaatttggaaaagtcgttactgtttactcactgacattttattttagcacccattataatcagtcacacatcgcatctgtgtttgtgatgcttatcaactgttaattttcacagttttcatgctaatttggatccataaaatgatacagtttgttcacaacttccatagctcatgtaatgtaattcaaaacgtttccacgtgcagactaacatttcccataacaaaacaaacttttctaccatagggataagag

SEQ ID NO: 78699 - DNA, 332 bp, Homo sapiens
ggcatatttaacatggtgccaggatccagaaaccagggaggggagacacttggaggatgctcgatgtcttctcctccactctgggtcatacagaaaggaaggagactaagaggaagcttctattctcacttctatcctgcctcagcctccagagtagctgggactaaaggcgcccaccaccatgcctggctaatttttgtatttttggtagagacggggtttcaccatgttggccaggatggtctcgacctcctgacctcgtgatccgcccgcctcagcctcccaaagtgctgggatcacaggtgtgagccaccacgcctgacccaaaattt

SEQ ID NO: 78700 - DNA, 1009 bp, Homo sapiens
gctaggctcctttggttagagaagccagtccttcagcctccaattggtgtcagtacttaggaagaccacagctagatggacaaacagcattgggaggccttagccctgctcctctcgattccatcctgtagagaacaggagtcaggagccgctggcaggagacagcatgtcacccaggactctgccggtgcagaatatgaacaacgccatgttcttgcagaaaacgcttagcctgagtttcataggaggtaattaccagacaactgcagaatgtagaacactgagcaggacaactgacctgtctccttcacatagtccatatcaccacaaatcacacaacaaaaaggagaagagatattttgggttcaaaaaaagtaaaaagataatatagctgcatttctttagttattttgaaccccaaatatttcctcatctttttgttgttgtcattgatggtggtgacatggacttgtttatagaggacaggtcagctgtctggctcaatgatctacattctgaagttgtctgaaaatgtcttcatgattaaattcagcctaaacgttttgccgggaacactgcagagacaatgctgtgagtttccaaccttagcccatctgcgggcagagaaggtctagtttgtccatcagcattatcatgatatcaggactgggtacttgggttaaggaggggtctaggagatctgtcccttttagagacaccttacttataatgaagtatttgggagggtggttttcaaaattagaaatgtcctgtattccgatgatcatcctgtaaacattttatcatttattaatcatccctgcctgtgtctattattatattcatatctctacgctggaaactttctgcctcaatgtttactgtgcctttgtttttgctagtgtgtgttgttgaaaaaaaaaacattctctgcctgagttttaatttttgtccaaagttattttaatctatacaattaaaagcttttgcctatcactctggactgttg

SEQ ID NO: 78701 - DNA, 4752 bp, Homo sapiens
  misc_feature (789)..(789): n is a, c, g, or t
taggattaaagaaagtgcagtaaagagaaagcatgaagacaccatcacaaacagattcccacaactccatgctgtgtgctgcaggctggtcctgaacccagatctctggctgagaggatgggggcagatggggaaacagtggttctgaagaacatgctcattggcgtcaacctgatccttctgggctccatgatcaagccttcagagtgtcagctggaggtcaccacagaaagggtccagagacagtcagtggaggaggagggaggcattgccaactacaacacgtccagcaaagagcagcctgtggtcttcaaccacgtgtacaacattaacgtgcccttggacaacctctgctcctcagggctagaggcctctgctgagcaggaggtgagtgcagaagacgagactctggcagagtacatgggccagacctcagaccacgagagccaggtcacctttacacacaggatcaacttccccaaaaaggcctgtccatgtgccagttcagcccaggtgctgcaggagctgctgagccggatcgagatgctggagagggaggtgtcggtgctgcgagaccagtgcaacgccaactgctgccaagaaagtgctgccacaggacaactggactatatccctcactgcagtggccacggcaactttagctttgagtcctgtggctgcatctgcaacgaaggctggtttggcaagaattgctcggagccctactgcccgctgggttgctccagccggggggtgtgtgtggatggccagtgcatctgtgacagcgantacagcggggatgactgttccgaactccggtgcccaacagactgcagctcccgggggctctgcgtggacggggagtgtgtctgtgaagagccctacactggcgaggactgcagggaactgaggtgccctggggactgttcggggaaggggagatgtgccaacggtacctgtttatgcgaggagggctacgttggtgaggactgcggccagcggcagtgtctgaatgcctgcagtgggcgaggacaatgtgaggaggggctctgcgtctgtgaagagggctaccagggccctgactgctcagcagttgcccctccagaggacttgcgagtggctggtatcagcgacaggtccattgagctggaatgggacgggccgatggcagtgacggaatatgtgatctcttaccagccgacggccctggggggcctccagctccagcagcgggtgcctggagattggagtggtgtcaccatcacggagctggagccaggtctcacctacaacatcagcgtctacgctgtcattagcaacatcctcagccttcccatcactgccaaggtggccacccatctctccactcctcaagggctacaatttaagacgatcacagagaccaccgtggaggtgcagtgggagcccttctcattttccttcgatgggtgggaaatcagcttcattccaaagaacaatgaagggggagtgattgctcaggtccccagcgatgttacgtcctttaaccagacaggactaaagcctggggaggaatacattgtcaatgtggtggctctgaaagaacaggcccgcagcccccctacctcggccagcgtctccacagtcattgacggccccacgcagatcctggttcgcgatgtctcggacaccgtggcttttgtggagtggattccccctcgagccaaagtcgatttcattcttttgaaatatggcctggtgggcggggaaggtgggaggaccaccttccggctgcagcctcccctgagccaatactcagtgcaggccctgcggcctggctcccgatacgaggtgtcagtcagtgccgtccgagggaccaacgagagcgattctgccaccactcagttcacaacagagatcgatgcccccaagaacttgcgagttggttctcgcacagcaaccagccttgacctcgagtgggataacagtgaagccgaagttcaggagtacaaggttgtgtacagcaccctggcgggtgagcaatatcatgaggtactggtccccaggggcattggtccaaccaccagggccaccctgacagatctggtacctggcactgagtatggagttggaatatctgccgtcatgaactcacagcaaagcgtgccagccaccatgaatgccaggactgaacttgacagtccccgagacctcatggtgacagcctcctcggagacctccatctccctcatctggaccaaggccagtggccccattgaccactaccgaattacctttaccccatcctctgggattgcctcagaagtcaccgtacccaaggacaggacctcatacacactaacagatctagagcctggggcagagtacatcatttccgtcactgctgagaggggtcggcagcagagcttggagtccactgtggatgctttcacaggcttccgtcccatctctcatctgcacttttctcatgtgacctcctccagtgtgaacatcacttggagtgatccatctcccccagcagacagactcattcttaactacagccccagggatgaggaggaagagatgatggaggtctccctggatgccaccaagaggcatgctgtcctgatgggcctgcaaccagccacagagtatattgtgaaccttgtggctgtccatggcacagtgacctctgagcccattgtgggctccatcaccacaggaattgatcccccaaaagacatcacaattagcaatgtgaccaaggactcagtgatggtctcctggagccctcctgttgcatctttcgattactaccgagtatcatatcgacccacccaagtgggacgactagacagctcagtggtgcccaacactgtgacagaattcaccatcaccagactgaacccagctaccgaatacgaaatcagcctcaacagcgtgcggggcagggaggaaagcgagcgcatctgtactcttgtgcacacagccatggacaaccctgtggatctgattgctaccaatatcactccaacagaagccctgctgcagtggaaggcaccagtgggtgaggtggagaactacgtcattgttcttacacactttgcagtcgctggagagaccatccttgttgacggagtcagtgaggaatttcggcttgttgacctgcttcctagcacccactatactgccaccatgtatgccaccaatggacctctcaccagtggcaccatcagcaccaacttttctactctcctggaccctccggcaaacctgacagccagtgaagtcaccagacaaagtgccctgatctcctggcagcctcccagggcagagattgaaaattatgtcttgacctacaaatccaccgacggaagccgcaaggagctgattgtggatgcagaagacacctggattcgactggagggcctgttggagaacacagactacacggtgctcctgcaggcagcacaggacaccacgtggagcagcatcacctccaccgctttcaccacaggaggccgggtgttccctcatccccaagactgtgcccagcatttgatgaatggagacactttgagtggggtttaccccatcttcctcaatggggagctgagccagaaattacaagtgtactgtgatatgaccaccgacgggggcggctggattgtattccagaggcggcagaatggccaaactgattttttccggaaatgggctgattaccgtgttggcttcgggaacgtggaggatgagttctggctggggctggacaatatacacaggatcacatcccagggccgctatgagctgcgcgtggacatgcgggatggccaggaggccgccttcgcctcctacgacaggttctctgtcgaggacagcagaaacctgtacaaactccgcataggaagctacaacggcactgcgggggactccctcagctatcatcaaggacgccctttctccacagaggatagagacaatgatgttgcagtgactaactgtgccatgtcgtacaagggagcatggtggtataagaactgccaccggaccaacctcaatgggaagtacggggagtccaggcacagtcagggcatcaactggtaccattggaaaggccatgagttctccatcccctttgtggaaatgaagatgcgcccctacaaccaccgtctcatggcagggagaaaacggcagtccttacagttctgagcagtgggcggctgcaagccaaccaatattttctgtcatttgtttgtattttataatatgaaacaaggggggagggtaatagcaatgtgttttgcaacatattaagagtatgtgaaggaagcagggatgtcgcaggaatccgctggctaacatctgctcttggtttctgctgccctggagcctgaccctcagtctccattctccctcctacccaggcctcctcaaccttcacctcctttcccaccaaggaggagaagtaggaagttttcttaaagggccaattcaaagccaagtcgtggggtgcagattgttatggtgacaggcacacacatttttctacccttcttctgagatgtcctctgccttccaggtatttgtgattttgtcacagcctgacatggccaggttctcacactggcccagagaaaagagcctcagcaagagagttttgccaacaattccccttaaaaggaaacagatcaactacaccgcatcccaacaacccaggttcttttccttccttccttccttcctcccttccttctttcctgccttccc

SEQ ID NO: 78702 - DNA, 878 bp, Homo sapiens
ttaatttcttggtttcttcccagaattatattttaatgactccataaatacattccaaatattcagagattcatgagaaaggattcttaacaaatgtttaaaaataacatttctttttggtgttttaacacttaattttataaactgcagaacagcatctctaaatggctttttttttttttttaaagacaaagtagtattatgttgcttcagtttctttaaatacctcgtttcttttgagaccaaaaattcccatcaaggaaataaatcagcctgattttaacattttacatattacattgcctttaagcactatgattggatggctttttttctatttgtttaataatccttggctaaattcacatgtatctaaagtaaaatagctgagttactgaattctataaggggaagaaaaagcatttattttcacatgattaactgaaatggaaaagtaagacatttagcagaataattcatttaaaaataattttaaaaaatcagacatatttaaaaatctaggttgtctatccagtatgtgaatgcttaattataattgttacatgttgaatgggtattaagagtaagtcaccaggtacacaaaactgccatcatagcaaaatgagacagtgttgaaaagacaaaatattttctggaatgaaaatatattcaagttgatccatattcagatgttttctgtttaatacttcagattggtcctttgtccacatttgtttaaaacttattgtaatgttaatttatacttttggattgtgcctttgtcatgagttgagaaaagtagtcctacaaataatgtgaaagttgttaccaccacagcatgaatgtataattgtattaaaattgatcatccacagaag

SEQ ID NO: 78703 - DNA, 869 bp, Homo sapiens
ttaatttcttggtttcttcccagaattatattttaatgactccataaatacattccaaatattcagagattcatgagaaaggattcttaacaaatgtttaaaaataacatttctttttggtgttttaacacttaattttataaactgcagaacagcatctctaaatggctttttttttttttttaaagacaaagtagtattatgttgcttcagtttctttaaatacctcgtttcttttgagaccaaaaattcccatcaaggaaataaatcagcctgattttaacattttacatattacattgcctttaagcactatgattggatggctttttttctatttgtttaataatccttggctaaattcacatgtatctaaagtaaaatagctgagttactgaattctataaggggaagaaaaagcatttattttcacatgattaactgaaatggaaaagtaagacatttagcagaataattcatttaaaaataattttaaaaaatcagacatatttaaaaatctaggttgtctatccagtatgtgaatgcttaattataattgttacatgttgaatgggtattaagagtaagtcaccaggtacacaaaactgccatcatagcaaaatgagacagtgttgaaaagacaaaatattttctggaatgaaaatatattcaagttgatccatattcagatgttttctgtttaatacttcagattggtcctttgtccacatttgtttaaaacttattgtaatgttaatttatacttttggattgtgcctttgtcatgagttgagaaaagtagtcctacaaataatgtgaaagtgaccacaccttactcgacacacgggatcatctagagtcgccgcagc

SEQ ID NO: 78704 - DNA, 754 bp, Homo sapiens
aatatgtatttaatacttatttcatctttcttacctttcagaattaccatgaaattatgactcgtcatcctgagaattatcaatgggaaaactggagtctagaaaatgttgctaccattttagcccaccggttccccaatagttatatttgggtgataaaatgttcccgaatgcatttgcacaaattcagctgctatgacaattttgtgaaaagtaacatgtttggtgccccagaacacaatactgactttggagcttttaagcacctttatatgttattagttaatgcttttaatttaagtcagaatagtttatcaaagaaaagtttgaatgtttggaataaggactccatagcatctaactgtagatccagtccttctcatactacgaatggttgccagggagaaaaagtgaggacctgtgaaaaatctgatgagtctgccatgagtttttatccaccatcactaaatgacgcatcttttactttgattggattcagtaaaggttgtgttgttttgaatcagttgctttttgaattgaaagaagccaagaaagacaagaacatagatgcttttatcaaaagcataagaacaatgtattggctggatggtggtcattctggaggaagcaatacttgggttacttatccagaagtcttgaaagaatttgcacaaacaggaattatcgttcacactcatgtaacaccttaccaagtacgtgatccaatgagatcttggattggaaaggagcacaa

SEQ ID NO: 78705 - DNA, 2889 bp, Homo sapiens
  misc_feature (2889)..(2889): n is a, c, g, or t
gctgcgcgcggacgtcggcctctgacgtcgtcgcctcagcgccggctcccggccgggccgcggccgccgaccgttgagccgccggctgagccgcctgctgaagtccctccctcaggaacccctccgccaccctccacctccgaaccgctctcgcggcggcgacccatgtgggggttcaggctcctgcggtcgccgccgttgctgctcctgctgccgcagctcggaatcggaaacgcctcgtcctgctctcaggccagaaccatgaacccgggcggcagcggcggcgcgcgatgctccctctcggccgaggtgcgccgccgtcagtgcctgcagctttccaccgtgcctggagccgatccgcagcgcagcaacgaattgctcctgttggcggcggccggggagggactggagcggcaggacctccccggggacccagcgaaggaggagccgcagccgccgccccagcatcacgtcctctatttccctggggatgtgcagaattaccatgaaattatgactcgtcatcctgagaattatcaatgggaaaactggagtctagaaaatgttgctaccattttagcccaccggttccccaatagttatatttgggtgataaaatgttcccgaatgcatttgcacaaattcagctgctatgacaattttgtgaaaagtaacatgtttggtgccccagaacacaatactgactttggagcttttaagcacctttatatgttattagttaatgcttttaatttaagtcagaatagtttatcaaagaaaagtttgaatgtttggaataaggactccatagcatctaactgtagatccagtccttctcatactacgaatggttgccagggagaaaaagtgaggacctgtgaaaaatctgatgagtctgccatgagtttttatccaccatcactaaatgacgcatcttttactttgattggattcagtaaaggttgtgttgttttgaatcagttgctttttgaattgaaagaagccaagaaagacaagaacatagatgcttttatcaaaagcataagaacaatgtattggctggatggtggtcattctggaggaagcaatacttgggttacttatccagaagtcttgaaagaatttgcacaaacaggaattatcgttcacactcatgtaacaccttaccaagtacgtgatccaatgagatcttggattggaaaggagcacaagaaatttgttcagatacttggggatcttggtatgcaggtgactagccaaattcattttacaaaggaagctccttccatagagaatcacttcagggttcatgaagtattttgagattacaggtatattaatgaacttgttcagtggaagaacataagcacttttgagtgttataaattcagataatgggatgtaattcatagctgcattgtcagttttggggtatggggggaagcacacattcctaaaatgtgagtgtaatgtgcaatagtattttttgcttgtgaatgtgagcagttattaatttggattgagttagaattagttaatttgaaatctaacaaggtggtttgtaataatgctgaggagatataagacccttaaaatgaaagttacaacattgttcttataaaaggtaactaaaattgttactgttggaaataactgattttctgagtaatgttttaaactaatttggtgacattttaacagtaattagctattttgagtggaaatattttcatttctcttcaaacaaaagcaaaggtacgatgctgttttctatcattttggaataactgcaccctgccttttgtgtttttgtaaactccttgactcattctttcatgtgtcaccaagtacttttctcatgagagtcaacatatatttgtttccaaatgtccacaagtgtacaatagtgtaaaggtggtttttaaaaacatagccaggtgtggtggcacgtgcctttagttccagctactcaggaggctaaggcaggaggattgcttgagcccaggctgtgtggttcaccataattgtgtttgtgactagctactgcactccaacctgggcaacatagtgggacttcatctctaaaacaaaacaaaacaaaattacacttaagcactattgtttaatttttaattgtcagtttatcattattttgggtaagacattctggggtttcttgaatcttgtccaaaaaccagttgttttggaaaattgctttaaattgagcatatttatgtatattggataaaaatgtactacagagcaaatttcaaatttttcattatatcagtctttttgaaaggatcaacttggataaaataaatatataatgctctatttgttagagctctattaaaaaggaaacagattccatagatctaagtcaatgtttctccagaagcatgattttgtctgccaaaagaaaatagctctctttggccaaaatgcaaaattacattgctataagaaaagttacaagggaaagtttgaagacacaaatgatttaattttggctcaaaaactgaatttgcttaacactgctacataatttgggtgaagtttccttctgcccgtttttcttgacctagataaatacactttgagaaatccagatctaataaatgtcaaccaacattgacattgtaattgggtgattacaataaaaggtgagcagtttgttgtttattaataattagcttttgcaggtaatgaaatagcagggaagtaacatgctgctttaggactaaaaaaaaaaaaaaaaaaaaaattttgggcgctcggccgaaatttaaacatttttgggggccaggaaataaagggacaggtccaagaccggaaaggggtcaccaaaaacgggcggtaacaaggtgggctggttagatacccggn

SEQ ID NO: 78706 - DNA, 430 bp, Homo sapiens
tattattgaattgactagaatccctaatacaatagtgaattgaagtggtgaaagaaaagacctttgccttattcctgatcttagggtgagagcagtcagtcagtcttctgctattaagtgtgatgttagctataaacattttgtaaacgctttttgtgaggttgaggaggtacccttcgatttctagtttgctgagatttttttattaggaatagatgctgtattttgtcaaatgctatttctgtacctactgagatgatcacttggtttcttttgtaatctattaatatcacaaattacattaattgggtttcagttgttacactagccctgcatccttaagataaaccccatatggtcatgttgtattatccattttctgtgttgctggatttcatttgctaatataatattttgttaagaatttttt

SEQ ID NO: 78707 - DNA, 370 bp, Homo sapiens
tggtttataaggggagatgagattctcatctgtctgcaatggtttatctgaaattatctgaaagcgaaggaccagataaattctacactcttctcaaggcctgtgtaacgggctggatgttctcaggtttctgcatcaccacactcccagcacagtcacgcacggctgaaacctaaggctatagttaatgcctcttgcttcttgacctcacctggccagggagctccaagctcactgtgtggagagaggaaggaggattattaatcaaaattcattgaataaataaatgtcctaatctaatcaggttcaaatacacatcagcttagtcccaaaatacttcttacacataacttacacattactttctgcc

SEQ ID NO: 78708 - DNA, 782 bp, Homo sapiens
tgaactcctgatgtcatgatctccccacctcatgcctgtaatccctaaactttgggagaccaggatgggaggactgcttgagcccaggaatttgagaccaacctgggcaagatagtgagaccctatctctattaaaaaaaattaaaaaaattagccaggcgtaatggggcacacctgtaattccagctactcaggaggctgaggcaagaggttcacttgagcccaggagatcgaggctgtaatgagctatgattgggccactgcaccctagcctgggcgatagagtgagaccctgtcaaaaaaaaaaaacaaaaaaacgacagtgtccccagttctcagatctctggtttatgagtgacgctgcagcctctctctgatgagctgcaggctggggactgactcctcggcaggtctgcagtgggaacctgtggagacaaaagtgactccatcttggatgccactcccctgtgttgacttccgattcgccccagtcttgtgaatgccttctgatttctactttatttactgcccctagtgtaagaacatgtcaaccttgatgttactccacaaatcgtaggctgtgactcacgtagcgttcttgcctgttctggagggctgcctttggttgtcttgctggagcacgaataccctttccctatggtatctaagccttgcatctggggtgtgagaatgcagagctccacctgtcttgtggccacccaagatcccacttcggtctgtaaattccctcaataaatcacccaatattgacaaactggatt

SEQ ID NO: 78709 - DNA, 361 bp, Homo sapiens
tacacagttatcaaaaatgcagacacttcacttggcatctccagcaccttcagctttctgggcctggtcttttttggcaactccattttctgtagggttattcccctccttgccagcatcagcttttccctttttccctttgggtaccttctcaggggcctttttaggcttgctctggctttggaggagcaggtttagcagacaactttgtggatcttctctgtggttcatccttcaccttggcttcatctccttcagcatccccctcagcctttctcttgggcatgctggcaacaacagcgacgggacgtaggtgctgggcacaggatgtggtggtgtgcgggctttggtcggtccgggg

SEQ ID NO: 78710 - DNA, 976 bp, Homo sapiens
atgaaaagtcggctatgacctgtccttgacaagcagatgtaactccttgattgaggctagtaggtttttaagacctgaataattgagtttgcagaaacctactgtgtgccttcaggtaaatggagagtggggtttggtctagcaacgaagcatctagaaggtccctttggccttaccggctctgttttaggtaagtccacgtctgagtaccagtgactgcagctcttccagttgtgctgtcatgcttatatgttagaaatgatcatcaaaggactcaaaagttttgccactaattgtattaccggggactgtcacaaccaagatttctcttaatttattcaccttacttatctcctggaagggcatattgaagtgctcttggagttctctaaaagggtttttgttggttgtgtatattcacttgggtgccagcgattgattccaaataagtaaatcttttttcccaaaaggatgtaagatggcttatggttataagtacaacaggctaacaaagtacaagtagatgagaaagtaaaatgaagaaataaagtcataggagccacagaattaacccaggaatgaataagtgtgtagtttggtgctgatgttatcatcctttatttgtacattgcttgtacagttgctctgagaaggtaagtcttaaattttcaaaagtgaaatgtcaccgagcatggtggcttatgcctctaatctcagcactttgggaggctgaggcaggcggatcacttgaggtcaggagttcgaaaccagcctgacttatgtgatgaaaccctgtctctactaaaaaaaaaaaaaaatccaaaagttagttgggcatggtggcaggtgcctgtaatcccagctacttgggaggctgaggcaggagaatcacatgaacctgggaagtggaggctgcagtgagccaagattgcaccactgcactctagcctgggtgacagagcgagacaccatctta

SEQ ID NO: 78711 - DNA, 532 bp, Homo sapiens
aaagaacatgtaaggaaatgtgatatgagactctgaataggatgacatcagcccagcatgagggtcttgcatcactgttctgcaggattaaaagactaattaaattggcctatctaatttaaacataagcatgcatgaaaataggaaacattcatagagggtacatattaactcaagatgcttggccagacttctacaagagaaaagtaatgtatagaatttgtttgattagtgtttaaacaaagggggagaacctcatttcaatgtgctatcatgaaaggaatcttatacaaggaaacaattactgtcaagaaatgcaagtacttattgcatgctcttgtaggccctttagggattgttaaactgtttagaaccgaggatagcttttattttgtgaaaagacattttaatcatgtatgcaagaaaaaacacagtgattgtgagctgttaagtggatgaattacagtgtgtttggtaccccattgcttctcctacctactattgtcaatactttagtatttcatttaattaa

SEQ ID NO: 78712 - DNA, 520 bp, Homo sapiens
caaggacaattcttgagcccacggaaaacacaaaaggagatgtttagggaatagaccagagttaggagaccccagcatctgtcagcatctccactggaactcccaccctccactctgagtccttggagacttcatccctgctcggaatttctgtatttccactgttctgtaggacccctataaaagtcaaaggaaaccactcagagcctctgctcccaagggtctgaaaatcaaggaaatatggaatggggtgcccggaacacaagagggagatttgctgttcctggaacctgaagatgatactcagaaagtgttttctcataggcatgttgtaaataattgaatcatcctccaaggaaagtatatcgtgttaagtaagcatttgtgtaatcattattaagactttagaaacattggcttatgttaatgaatgcttaattcaaattgcaaaatactaagtagactgtatactcatgaatgttattgtaaaaagatataaatattaaagggcttggaagta

SEQ ID NO: 78713 - DNA, 1190 bp, Homo sapiens
tgataattaaatatatataaaggctttctgagagattatttactatatgaatatattttcagctggctgatcaaaagtatttttaaaattttgtttttagccattcaaaatgtatttgtattttcagaattgaatgcaagtcatacttagagctcaattaaaatactcttgcaagaaaaagcattaaattctctttgagaattccgtgaaatgcaaattaagggaaaaataggttttaagcagtagcaaaaacacaccgctaaaaatggcctttgaattctcagagctatggaaaaatgtgagaaactaaattgtctcgagatgtcaagatttttctatctccagttgctattggcctgtcctactgttgtctttgaatatttcctgtattccaccccaaaagatttcaacttttagtttttctatcactgggcaaggtcagactgggtttataaaacaatatattggcatattgtgattctttgtaattgactataaattggttttgaaatgtccaaacatacgttgtgtgtctttatattgtactgtgtgttttaagtaactggcagaaaaagaattggaaatgaaatttccaatcagacaatgtagtattaaagaaaactttgttttaaatatgcggtaccatgtaaaattactcgtgttaggaataaagtccactgttgaagttgaatgtcactaagcttattatgttaaaaggaaccagtgtgattaggaaaacctaccagaagccagatacagtgtggtacgtgcaacatttcatgcacattttgattttgtttgtcattcaaaattgtgcttgtaaaaatgtatacaatttctgagttttataatttctaggtacttgttttttcttgctggtaaatagcttttttttaaaaaaaaatctaatataaaagaaaccatgtttatattttgttagtgatcaatgactttgtttatatggaaatttgtatattgttggcacacattttgttgaggtttacgtgcatgaaggcctgcaataattagcacaatgaaaactgctttttcttacatgttcatttttttgaaagattgtggtgcaaaggcttactctaataagtaaccttctggactatggaatgaatataaatgaatggcactttgagtgttaataaagctaatatttatttccactgtgaaaaaaaaaa

SEQ ID NO: 78714 - DNA, 621 bp, Homo sapiens
ttgtactgtgtgttttaagtaactgtcagaaaaagaattggaaatgtaagttccgatcagacgatgtagtattaaagataactttgttttatatatgctgtaccatgtataattactcgtgttaggaataaagtccactgttgaagttgaatgtcactaagcttattatgttaaaaggaaccagtgtgattaggaaaacctaccagaagccagatacagtatggttgggctagactggctatggtcagccgtggggtctatttcacaactagattggcacttattgtccatcatttgcgaattgacgactcagtgccttcggctaggtccaaacatacgttgtgtgtctttatattgtactgtgtgttttaagtaactggcagaaaaagaattggaaatgaaatttccaatcagacaatgtagtattaaagaaaactttgttttaaatatgcggtaccatgtaaaattactcgtgttaggaataaagtccactgttgaagttgaatgtcactaagcttattatgttaaaaggaaccagtgtgattaggaaaacctaccagaagccagatacagtatgttgggctacggtatggttggcactattcggggatactctagaac

SEQ ID NO: 78715 - DNA, 1135 bp, Homo sapiens
tgataattaaatatatataaaggctttctgagagattatttactatatgaatatattttcagctggctgatcaaaagtatttttaaaattttgtttttagccattcaaaatgtatttgtattttcagaattgaatgcaagtcatacttagagctcaattaaaatactcttgcaagaaaaagcattaaattctctttgagaattccgtgaaatgcaaattaagggaaaaataggttttaagcagtagcaaaaacacaccgctaaaaatggcctttgaattctcagagctatggaaaaatgtgagaaactaaattgtctcgagatgtcaagatttttctatctccagttgctattggcctgtcctactgttgtctttgaatatttcctgtattccaccccaaaagatttcaacttttagtttttctatcactgggcaaggtcagactgggtttataaaacaatatattggcatattgtgattctttgtaattgactataaattggttttgaaatgtccaaacatacgttgtgtgtctttatattgtactgtgtgttttaagtaactggcagaaaaagaattggaaatgaaatttccaatcagacaatgtagtattaaagaaaactttgttttaaatatgcggtaccatcttattatgttaaaaggaaccagtgtgattaggaaaacctaccagaagccagatacagtgtggtacgtgcaacatttcatgcacattttgattttgtttgtcattcaaaattgtgcttgtaaaaatgtatacaatttctgagttttataatttctaggtacttgttttttcttgctggtaaatagcttttttttaaaaaaaaatctaatataaaagaaaccatgtttatattttgttagtgatcaatgactttgtttatatggaaatttgtatattgttggcacacattttgttgaggtttacgtgcatgaaggcctgcaataattagcacaatgaaaactgctttttcttacatgttcatttttttgaaagattgtggtgcaaaggcttactctaataagtaaccttctggactatggaatgaatataaatgaatggcactttgagtgttaataaagctaatatttatttccactgtgaaaaaaaaaa

SEQ ID NO: 78716 - DNA, 684 bp, Homo sapiens
  misc_feature (562)..(562): n is a, c, g, or t
  misc_feature (566)..(566): n is a, c, g, or t
ggtgttgcccgccccgcactcggagcccagagccgccgcccaggaaggggatgcggaaacccctggctcggtggagcggagaggcaggcggggcccctgtcccagctggccctgccccaggtactggggctgatcctgaacctgccctcgcccgtgtcgctggggctgctgtcactgccgctgcgccggcggcactgggtggccctgcgccaggtggacggtgtctactacaacctggactccaagctgcgggcgcccgaggccctgggggatgaggacggagtcagggccttcctggcggctgcgctggcccagggcctgtgcgaggtgctgctggtagtgaccaaggaggtggaggagaagggcagctggctgcggacagactgaccatggctgaccatcggcgcccacagcgcagtccctgcgcatccccctccggctgcgcacactgcatgcctgggaaaggccagcacttcatggaccctggggaggccccgccccctccccacacccctgctccccactgccgctgctgcctcaataaatctgctgatttgcaaanacancaccaacacacaaacaaaaagaaacaacccagcacctggaggggactgaaaaaactacaaaaaggacaaggcccgcagccagaaaacgaaaagacggacactggacaaaggccaagaa

SEQ ID NO: 78717 - DNA, 794 bp, Homo sapiens
  misc_feature (672)..(672): n is a, c, g, or t
  misc_feature (676)..(676): n is a, c, g, or t
gatcatttgctgaagatggtgtcaagtgaacctagattaacagccctccactccagatggatatccagtgattcctagaatgggatatagccagagaacaattctatgcaccctacactgacagactcccttaagcaacaccagatgctctactggtacttgaagtacatgactttgaagtcttgaccctccatgaatacctgaattatcagcaagcgggttttgaagctggtgcctcattgaggccatattagagcaacttgtacatttgacctcttgttatcagccatggtactctacttcgtgtgcaagagataactatgaaagccaaattcaaatactggcaacatttcctaaaggggctcaatatcttatcattcgtcttcttttccaaactacacatcactgtatgactcaaccagtagcagttatattgccccttggtttttattcagtttaactactgtttccaagataaatgagctaataagctttaaaaaaaaaaaaaaaaaggctgaattcttttttcttcatcactggcatatctgcctattctccagaattattatgactattcagctcactttaacagttgaacttcaagcgacaatctttgaacacccctgctccccactgccgctgctgcctcaataaatctgctgatttgcaaanacancaccaacacacaaacaaaaagaaacaacccagcacctggaggggactgaaaaaactacaaaaaggacaaggcccgcagccagaaaacgaaaagacggacactggacaaaggccaagaa

SEQ ID NO: 78718 - DNA, 329 bp, Homo sapiens
gcagcagcagctctttagccaggaggctgccgatgagatctgcaagaggtgaccgtcacccaccccagcccctggagcagcagagctctggcggagtgacccacctgggtctcgccgccaggcaggcgctgagccttgggggctttcttctgctccgcgctcacttgcctaagctagacgctgggactctggggagatgttgcctcctgtgcctgtctgtccctgtggcctcagccccagccagacctcaatccagtggttctttcttttttttttttttttgagactgagtctcactctgttgcccaggctggagtgcagttgcgcga

SEQ ID NO: 78719 - DNA, 973 bp, Homo sapiens
  misc_feature (851)..(851): n is a, c, g, or t
  misc_feature (855)..(855): n is a, c, g, or t
ggtgttgcccgccccgcactcggagcccagagccgccgcccaggaaggggatgcggaaacccctggctcggtggagcggagaggcaggcgggcaggagccgaggacggcatgtcccaggccccgggagcacagccgagcccacccaccgtgtaccacgaacggcagcgcctggagctgtgtgctgtccacgccctcaacaacgttctgcagcagcagctctttagccaggaggctgccgatgagatctgcaagaggttggccccagactcccggctgaaccctcatcgcagcctcctgggcaccggcaactatgatgtcaatgtgatcatggccgctctgcaggggctgggcctggccgccgtgtggtgggacaggaggaggcccctgtcccagctggccctgccccaggtactggggctgatcctgaacctgccctcgcccgtgtcgctggggctgctgtcactgccgctgcgccggcggcactgggtggccctgcgccaggtggacggtgtctactacaacctggactccaagctgcgggcgcccgaggccctgggggatgaggacggagtcagggccttcctggcggctgcgctggcccagggcctgtgcgaggtgctgctggtagtgaccaaggaggtggaggagaagggcagctggctgcggacagactgaccatggctgaccatcggcgcccacagcgcagtccctgcgcatccccctccggctgcgcacactgcatgcctgggaaaggccagcacttcatggaccctggggaggccccgccccctccccacacccctgctccccactgccgctgctgcctcaataaatctgctgatttgcaaanacancaccaacacacaaacaaaaagaaacaacccagcacctggaggggactgaaaaaactacaaaaaggacaaggcccgcagccagaaaacgaaaagacggacactggacaaaggccaagaa

SEQ ID NO: 78720 - DNA, 338 bp, Homo sapiens
atgaaatatggtagcacaggcatgaatagagttgaaattatcagagtgattataaaatacataggaataaacttaacagaaattgggcaagacctttatgaagaactcttccaaacttaactaaggcacataaaagaacacttgaataaatagagaaacatgttcattggtgaaacgagtcaatgtagtaaatacgtcaatatcactttttgtccatattaacctaaaatttaatacagttccagcataagctgtaatgttatttttattctatgaaatttgataaaatacggtaaagttcagaaaaacattgcctgagactagtgaagaatgaaaaa

SEQ ID NO: 78721 - DNA, 665 bp, Homo sapiens
ataggaaaataatgtagttcaaaaaagtatacagtgacagtgcctctttgctacttctgattcccaatctcccagctttcctcagaagtaaccactcttacgtgtatacctgtttgttgtatgttattatttgtgtgtatccttttttcctgcccaaacctatacttaacgtgttaagagtatattagcatttatggcatatgatcttataattctttttttcctatattctgtgatgtgttaactaatttaatctattattactaaattagcactttcggcataatcaaatttttagctttaaacaactaatttaaccttgagatttttgaattatatatgcctaggattctggagccacgtacactgttaaatattccaagaaaagtccactgttcctataatgtgtcattgtatgtggctccagaatactaggttctggttggtttttaccatcatttacttggatttcaacaaggtatagcatttgtgttttaccatccacgttaagaaattaaatttcccctgtatttgaaacatcttttcctctcagagttaattgctgttatatatcatttcctatgcactgggaactgatgaatatattttttgatagaatacattatctgataaccaaggatttgagtcttctaagcccatgacaa

SEQ ID NO: 78722 - DNA, 374 bp, Homo sapiens
atgccccacgcctatcacttctctttccatccttccctcccacagtggctaaagaagggaagggagaaggaagggtattggaaagtccacacctgactggatgttttcagctctcagggtctggaagatatttgaagatgactatctcatgggcactctcacaggctctacgaaggttgtctgcattgggaacctccactgaagatcccagtaagtcggcaatgcatcaactttggggaccactccccaccaggctcccaccactgccattcgtttgctctgattctggctactggagtcatgccattctccaggagttcctgcggatcgagagcagaatttaacattagcctggaaatctcacaccagagagt

SEQ ID NO: 78723 - DNA, 619 bp, Homo sapiens
ggcacagggaggggaacatcacacaccagggcctgtcaggggatggcgggcaaggggagggatagcattaggacatatacttaatgcatgtggggcttaaaacctagacgacaagtcgataggtgcagcaaaccaccatggcacatgtatacccatgtaacaaacctgcacgttctgcacatgtatcccagaacttaaagtataattttaaaaaatttaaaaaataaaaaataaaataaagtcttgtttcagggtaatattaatttgcgttaccacctatttcaacacggcagacaattgtaccatctgagacaaatggagctttgacatgaaatcttaaaataccccataaatggtggccgggcgcggtggctcacacctgtaatcccagcactttgggaggccgaggcgggcagatcacagggtcagtagatcgagaccatcctggctaacacggtgaaaacccgtctctactaaaagtacaaaaaattatcggggcgtggtggcaggagcctgtagtcccatctactcctgaggctgaggcaggagaatggcgtgaacccgggaggtggagcttgcagtgagccagatcgggccactgcactccaccctggtcaac

SEQ ID NO: 78724 - DNA, 512 bp, Homo sapiens
aagaaaatgatgctaacaaagttcaaagttgctccgtgttgcagtgatcttttaaaagggaagttttgaggtagttttgaagcagatttctggaatcatcttcaggactttcgtgagctcattgtaatgtgttatgtgaaatgcatgtcctcaaaacatgggtggttgtataaatgaggaagctggcctcatggagccaaagcagcatggaaaggcccaaataacttgctgtggggaagactgactgcctctggggtttttaatcagcatgaaaagccacccagggccccaaatcattagtagcattttaattggcagcagagtaatactgtgtctactttggcttacagatataaatttcctgctctctcataacagatggtgatgaggtgcatggtaggaagcatggcaagaactgtgttactcaaaatgtagacttaattgcaaatttgaaatggaaataaagtgaaggttctgtctttatttacaataaatttcatgtgttaaatgga

SEQ ID NO: 78725 - DNA, 618 bp, Homo sapiens
cagtgcgggggggatagctagttattgtactaacttcttgcaacagtttcttaattgacgtatcaggtgacaggtctcacagagtcaccaaggccccactgtgatacttctccatgtatttattggcttgtaaatgaatgttcaaatatatcacttaggttcatttgattaacgaaagcaagggctggctgtaataaataaacgctcacagaatggcttagtgaaggaatttgaatattcctagcctcccagacttcgcttggcagggctgggggtcgggggagtcaaatgtgtggctaataaaagtgacttttgactttgagctctattcagaagtaattctgcaacatgaagccttccagtattctcccttcaccttgaacatttctctcctgctgctcttcatttgctgcctggtagtcagtctggagctgctttcatctctgttgctgccggtgctcttggcctagtacaagcttgacctcttagcagctggagttgacttagttattctcctagcattctctgagtgacttggttgctcttacagcacttcagattagctttgctgatgtgaaaggtcacttttcaccaatattaaaacttattaatcttcaa

SEQ ID NO: 78726 - DNA, 279 bp, Homo sapiens
gctcagaagccagcacacgaaggcctgcaactgcagacccctaagaaaccttggagatgctctcagacagtgcccacctcactttgcagatggagtgactcacagctgggacaaaggtccactcgctcttgcccctgcagtctacccacaaagcagccaggagagcttctaaaaatgcaaagcaggtggcgttcttctgaataagccctcccatggctccctatcttagtacaaaagctgaaatctcatgacctgtgaggccctccagctggctcgcag

SEQ ID NO: 78727 - DNA, 304 bp, Homo sapiens
  misc_feature (9)..(9): n is a, c, g, or t
  misc_feature (31)..(31): n is a, c, g, or t
ccttgccangacaaccattctactgttgctngagctcgtcgcgaagggaaagacctaaacaagagggaagaaatggacatttcatgccaagatttcttcccttcacctcacactcgagttcctgggttctgacggccttttttgaggcacagaggaaaggctatgggagcacaaagcaagaaagtggacttctgcaagccaggaagaaaggcctccccagaaaccaactctgtgagcacatcgatctttgacttttggcctccagaatattgagaaaataaaagtctgttgttaaaccacccaa

SEQ ID NO: 78728 - DNA, 710 bp, Homo sapiens
gtgcagcaaaccaccatggcacacatttacctatgagacaaacctgcacatactgcacatgtacccctgaacttaaagtaaaagttggaaataaaaaattttttaaagtcaagaaaacaaacaacaaaaagagtagtgcaaatctgtaccatgctcatttgtaccactcttttgtttgtaccaccaaacaaaagaatgagagtgaaaacatgaatatctgacaaaagtaaacagcaaaagaacactttatgttaggagtaataccctagcatctacctagaatgaaatgaaactgtttttccctgaactggcctcccaagctgaactcttgggactgtgcctgggatgctccaggagaccagggtgataattgaacttccctcctcctacacctctatcgagttcctggaaaacgccagcgatcagatcttgcttttaacttcttatactttacagagacctaaacaagagggaagaaatggacatttcatgccaagatttcttcccttcacctcacactcgagttcctgggttctgacggccttttttgaggcacagaggaaaggctatgggagcacaaagcaagaaagtggacttctgcaagccaggaagaaaggcctccccagaaaccaactctgtgagcacatcgatctttgacttttggcctccagaatattgagaaaataaaagtctgttgttaaaccacccaa

SEQ ID NO: 78729 - DNA, 612 bp, Homo sapiens
aataaataatcattcattcttttattcagttggtaataatgtgaatgtttagtgagtactaagctcttactgtgtaccctagtatgaagagaataaaaggatgcacaataaatatacatcccctaatcagagacagtttcaaattttagtttataatttgtaggtgttcctcctcacagctatatattagaatcatatgagaatgagtgaggaaagccaaaaaaacaaaaggatcatcgagaagcataaaacaaaaagattaggagcggtgagaggcaggacccaggcttggtattgttatgttttaaataattttctaaagttttgaattgtaaaaaaagcatgcatggaactgaccatcatagccatgttaagtgtacagttcagcagtattgagcacctccacattgtcgtgcagcggaactccagaaattctccgtcttgcaaaactcagcctctgggccgttaaactaggtgtccccacctcccctcccccaggccctggtgaccaccgttctgctttctctgtctgtgattttgaccactttagatacgtcatttcagtggactcatcctgtgtcgttttgtggcggaatcacgttctgttgtgtg

SEQ ID NO: 78730 - DNA, 411 bp, Homo sapiens
tgtcattatttaagatgggggacatccaagcacctggaacaaaaaggacactaagaatgggagaagaatacacaaagggaggtagtacagggccaataacagatttttggaatttttcaaatttctctttgaagtaattttacagtcagtaaatggaagtggaaaagaggaatagaagagcatttcattgattttttttttctcttgtacttacacatctcatgacctcatgttcccagaacttaacacttagttgggttctagtagatattttgggttgaaaagatgtttgctgttttgcattttgttctgttttgttggctagcctgtgaatctagcattgtacgtgagaaagtgcatttcagattgaaagcaactggtttggaaatgaacttcaataacatatcccag

SEQ ID NO: 78731 - DNA, 216 bp, Homo sapiens
tttcttaccagcctccccccaatgaggtaagaccgttttcaacaatttgctaatgctcttgtggcgcccggtgggggtcggaacctgagatcccgaatcgctgtgtgtgtgtgtgtgtgtgtgtgtgtgtgtgtgttgccactggacagttgatttattttccaagctgctctctctgcctgccgtgcaagggacgcgcaaagggctagagaggtt

SEQ ID NO: 78732 - DNA, 281 bp, Homo sapiens
ggaccatgcagctctagaattatttcttagaggacaagaaccagccttctgcagtttgaagaaatccagataccaggaaatattcatagcatgaatttaaaatgagataataagggagggaagtttagggtcagactgaccctgtgcccaggagctggcaaggaagacctttccttggctttgtcactggagaggggctggtgaaggccagggtttactgagggggcatagagaaataaatcctctagaagtagcttgaagcaggcctcgaaagactgttg

SEQ ID NO: 78733 - DNA, 323 bp, Homo sapiens
gactaccggcacgccaccacgcccagctaatttttttattttcagtggagacgaattccaccatgttggccagaatggtctcgatctcttgacctcttgatctgcctgcctcggcctcccaaagtgctgggattacaggcatgagctaccgcacctggcccaaagcattttcagtagccataaagttgctttttaaagacacagcaaagcggtattagacttttttttttctttttttgagacggagtcttgctctgttgcccaggctggagtgcagtggtacgatctcggttcactgcaacctctgcctcccgggttcaagc

SEQ ID NO: 78734 - DNA, 365 bp, Homo sapiens
gttgtaaattcccaaggctccgtactaataaaaagtttctggctgccttttgggccccagccctatgccctgggtctggctcccaaatttgcagaaatgtgtgatttcttggggtgagacagggtggatcttaaaactcacggtctccaccccagggaacttgatgcagggtcctggagtctgcaggatctagtactgcagttaaaattcacagtctggttttagctcactttttaactgaactgtatgtgatgctgttggaaaagcttgaacttgggcattagaacctttcccctctctggaaatcttctttcacagagagagaattttagagccaagctaggttgggggactagacagatggt

SEQ ID NO: 78735 - DNA, 4682 bp, Homo sapiens
cacaaattccctctgtctcctccagaatccagaaaagaataattacgatattttcaaaatggaaagttcccatgccaaagactttgccttcttcaccaaactatgatttcgtgatgttcttaaaggtagtgtacaccaggtttttacattcttattttgaatgtagttttagtgtttgtgtgatttgtttttcagcctggcctgcagactagcaacccaagacttatactgcccaatttgacagctcatttttattttagtttcaccatatacatgaattggacttacaattccagaaaaattaaaggctcaagaatggggcatgagtacacactgtgtgctaaggaaagaatatttggattgaattgaacccctgcagaacgtggactatttagagacctgaatttggccttgggtgaatacctgccttgggttggccaactagcagtcaacagcaatgagccaaaagagacaaaccaagtttcaaaatggcaaatcaaagacttcagaaaatagctcagctaaacgtgagaaaggaatggttgtcaatagcaaagagatttctgatgcagtcgggcaatcaaaatttgttctagagaaccttcggcattacacagtccatccaaatttggcccagtactataagcctttgaaggccactgccctgcagaaattcctggctcaaaacaggaaaaacaccagcttcatgttaaaagtaacacagtatgaccaggataagacgttactgattatgaccaacaacccacctccctgctcaatcacccagcaagacaaggagagtgcatcaaaatatttttccaaggagttactgctcaaggtcatggaaagtcatcatcagcacaaacccactgagaacctctggctgccccgcatgcctcagaaaaaaaagttaagatctaagctgaaaccaatcttccctttgatactgtcggatgatcccacatccaagcgagaacaatggtttaggttttccactgacaatgatttcaagagcgaagggaagtattcaaaagtctacgctttgaggacacagaagaaaatgtaccctcagctcacctttgctccagtccatgagagagatatgaggaaagatgcttccaagaagtcagcgagtgaaaggccaatttccaaagtgattcgggaaccactgacactcgcatcgctcttggaagacatgcccaccagaaccgcgcccggggagagcgccttccgcaacgggagggccccgcagtggattatcaaaaaggccacggtcatcgggtgaacacagacccctcagtcctcccgcctcgctctcttgagactgaggggtccgcagaagtcgccacccaaataaaaccacattcctgctgctgcgggcgtgggctcccgggtcgcaagccgggagggtcgagccgaagtctccggcgggccgcaagaggagaagggggcgtggctgcgtcccgggggccgagggcggccggggagggcgggccttggccccgagtgaaggcgcggcggcccaaccggcgtgagagcgcggggccggccttcctgcagcctcttccgctcgccggctgcggcgcctgggacggttgcggtgggtctgggcgctgggaagtcgtccaagatgattaaaaaattcgacaagaaggacgaggagtctggtagtggctccaatcctttccagcatctggagaagagtgctgttttacaggaggctcgtatattcaatgaaactccaatcaatccaagaagatgtttgcatattcttacaaagattctttacttactgaaccagggtgaacactttggaacaacggaagctacagaagccttctttgcaatgacgcgattgtttcaatctaatgatcaaacattgaggagaatgtgctaccttaccatcaaagaaatggctaccatctctgaggatgtgataattgtcacaagcagtctgactaaagacatgactggaaaagaagatgtataccgaggcccggccatcagagctctctgcaggatcaccgatggaacaatgttgcaagccattgaaagatacatgaagcaggccattgtggataaagtttccagtgtatccagttcagcactggtatcttccctgcacatgatgaagataagctatgatgtggttaagcgctggatcaatgaagcccaagaagctgcatcaagtgataatattatggtccagtaccatgcattgggagtcctgtatcaccttagaaagaatgatcgacttgctgtttccaagatgttgaataagtttactaaatctggtctcaagtcacagtttgcttactgcatgctgatccgaattgccagtcgcttactaaaagaaactgaggatggccatgaaagtccactgtttgatttcattgagagctgcttgcgaaataaacatgaaatggttatttatgaagctgcttcagctatcatccatcttcctaactgcactgcaagagagttggcacctgctgtttcagttcttcagcttttctgtagttctcctaagccagccttgagatatgcagctgtgaggaccttgaacaaggtggcaatgaagcacccctctgctgttactgcctgcaatctggacttagaaaacttaatcacagactcaaacagaagcattgctaccttagccattactacactcctcaaaacaggaagtgagagcagtgtggaccggctcatgaagcagatatcttcttttgtgtctgaaatctcagatgagttcaaggtggtggttgtacaggcaattagtgctctctgtcagaaataccctcgaaagcacagtgtcatgatgactttcctctccaacatgctccgagatgatggaggctttgagtacaagcgggccattgtggactgtataatcagcattgtggaagagaaccctgagagtaaagaagcaggcctagcccacctttgtgaattcattgaggactgtgaacacactgttctggctactaagattctacacttgttgggcaaagagggccctagaacgcctgtcccctccaaatatatccgttttatttttaatagggttgtcctggagaatgaggctgtcagagctgctgctgtgagtgctttggctaaatttggggctcagaatgagagtcttctcccaagcatccttgtactcttacagaggtgtatgatggatactgatgacgaggtacgagacagagctaccttctatctgaatgtgctgcagcagaggcagatggcactaaatgccacatatatctttaatggtttgacagtctctgtaccagggatgggaaaagccttacaccagtacacgttggagccttcagaaaaaccgtttgacatgaaatcaattcctcttgctatggctcctgtctttgaacagaaagcagaaatcacacttgtggctactaagccagagaagttggctccttccaggcaagacattttccaagaacaattggctgccattcctgagtttctgaatataggacccttgttcaagtcttctgagcctgttcaacttacagaagcagagacagaatattttgttcgatgtatcaagcacatgtttaccaatcacatcgtgttccagtttgactgcaccaacactctcaatgaccagctgctggaaaaagtgacagtgcagatggagccatcagattcctatgaagtgctgtcttgtatcccagcccccagccttccttataaccaaccaggaatatgttacactcttgttcgtttgcctgatgatgaccctacagcagttgcaggctcctttagctgcaccatgaagtttacagtccgggactgtgaccctaacactggagttccagatgaggatgggtatgatgatgagtatgtgctggaagatctcgaagtgactgtgtctgaccatattcagaaagtactgaagcctaactttgctgctgcttgggaagaggtgggagatgcctttgagaaagaggaaacctttgccctcagttctaccaaaacccttgtagaggctgtcaacaatatcatcacatttctgggcatgcagccatgtgagaggtccgataaagtacctgagaacaagaattcccattcgctctatctggcaggtatattcagaggtggctatgatttattggtgaggtccaggctggccttagccgatggagtgaccatgcaggtgactgtcagaagtaaagagagaacacctgtagatgttatcttagcttctgttggataaatgcttactggacaagaggaaactgatgcacactacatggtcagtgggcttttaggctagtggcatcagtttcccagaatcagacttttgaagatgaacgactttggagaagcaaattaaacatttggccctgagccagcagatcaagcaaatgtctatctttgcgcatgggttgttttttttttttttttctttttattctacttggtcagctttgggacggtagtgcagctttgggtgatcttgaaaatcaaatactatcctatactccagctgcttaacttcattttattctttaatgtgtacctgaaagctcctggcaatgctggaaaatttttatcccagaggggtgggggggaggggggaggggaagccagagtccacttttgtcacaattcatttttattaatagaaaataaacacttattccagtttc

SEQ ID NO: 78736 - DNA, 3099 bp, Homo sapiens
ccctccgagccgcctcctcccctgcgcgcgggcctccggcgggggccgagggcgtgcgcgcgtctccgcgtccaggggtgctggtagggtcggacccctagtgggagcaccctgttcccggggctggggtcgacggcacagggtgtgtgtggaggaacgttcaggtagtggctccaatcctttccagcatctggagaagagtgctgttttacaggaggctcgtatattcaatgaaactccaatcaatccaagaagatgtttgcatattcttacaaagattctttacttactgaaccagggtgaacactttggaacaacggaagctacagaagccttctttgcaatgacgcgattgtttcaatctaatgattctgactaaagacatgactggaaaagaagatgtataccgaggcccggccatcagagctctctgcaggatcaccgatggaacaatgttgcaagccattgaaagatacatgaagcaggccattgtggataaagtttccagtgtatccagttcagcactggtatcttccctgcacatgatgaagataagctatgatgtggttaagcgctggatcaatgaagcccaagaagctgcatcaagtgataatattatggtccagtaccatgcattgggagtcctgtatcaccttagaaagaatgatcgacttgctgtttccaagatgttgaataagtttactaaatctggtctcaagtcacagtttgcttactgcatgctgatccgaattgccagtcgcttactaaaagaaactgaggatggccatgaaagtccactgtttgatttcattgagagctgcttgcgaaataaacatgaaatggttatttatgaagctgcttcagctatcatccatcttcctaactgcactgcaagagagttggcacctgctgtttcagttcttcagcttttctgtagttctcctaagccagccttgagatatgcagctgtgaggaccttgaacaaggtggcaatgaagcacccctctgctgttactgcctgcaatctggacttagaaaacttaatcacagactcaaacagaagcattgctaccttagccattactacactcctcaaaacaggaagtgagagcagtgtggaccggctcatgaagcagatatcttcttttgtgtctgaaatctcagatgagttcaaggtggtggttgtacaggcaattagtgctctctgtcagaaataccctcgaaagcacagtgtcatgatgactttcctctccaacatgctccgagatgatggaggctttgagtacaagcgggccattgtggactgtataatcagcattgtggaagagaaccctgagagtaaagaagcaggcctagcccacctttgtgaattcattgaggactgtgaacacactgttctggctactaagattctacacttgttgggcaaagagggccctagaacgcctgtcccctccaaatatatccgttttatttttaatagggttgtcctggagaatgaggctgtcagagctgctgctgtgagtgctttggctaaatttggggctcagaatgagagtcttctcccaagcatccttgtactcttacagaggtgtatgatggatactgatgacgaggtacgagacagagctaccttctatctgaatgtgctgcagcagaggcagatggcactaaatgccacatatatctttaatggtttgacagtctctgtaccagggatgggaaaagccttacaccagtacacgttggagccttcagaaaaaccgtttgacatgaaatcaattcctcttgctatggctcctgtctttgaacagaaagcagaaatcacacttgtggctactaagccagagaagttggctccttccaggcaagacattttccaagaacaattggctgccattcctgagtttctgaatataggacccttgttcaagtcttctgagcctgttcaacttacagaagcagagacagaatattttgttcgatgtatcaagcacatgtttaccaatcacatcgtgttccagtttgactgcaccaacactctcaatgaccagctgctggaaaaagtgacagtgcagatggagccatcagattcctatgaagtgctgtcttgtatcccagcccccagccttccttataaccaaccaggaatatgttacactcttgttcgtttgcctgatgatgaccctacagcagttgcaggctcctttagctgcaccatgaagtttacagtccgggactgtgaccctaacactggagttccagatgaggatgggtatgatgatgagtatgtgctggaagatctcgaagtgactgtgtctgaccatattcagaaagtactgaagcctaactttgctgctgcttgggaagaggtgggagatgcctttgagaaagaggaaacctttgccctcagttctaccaaaacccttgtagaggctgtcaacaatatcatcacatttctgggcatgcagccatgtgagaggtccgataaagtacctgagaacaagaattcccattcgctctatctggcaggtatattcagaggtggctatgatttattggtgaggtccaggctggccttagccgatggagtgaccatgcaggtgactgtcagaagtaaagagagaacacctgtagatgttatcttagcttctgttggataaatgcttactggacaagaggaaactgatgcacactacatggtcagtgggcttttaggctagtggcatcagtttcccagaatcagacttttgaagatgaacgactttggagaagcaaattaaacatttggccctgagccagcagatcaagcaaatgtctatctttgcgcatgggttgttttttttttttttttctttttattctacttggtcagctttgggacggtagtgcagctttgggtgatcttgaaaatcaaatactatcctatactccagctgcttaacttcattttattctttaatgtgtacctgaaagctcctggcaatgctggaaaatttttatcccagaggggtgggggggaggggggaggggaagccagagtccacttttgtcacaattcatttttattaatagaaaataaacacttattccagtttc

SEQ ID NO: 78737 - DNA, 465 bp, Homo sapiens
tccagtccatgagagagatatgaggaaagatggtaagctcctctctttcaaagcaaaggcttactggactgagatttgggctggagatacaatccatgaggattatagatgtggcaaactggcttctctcgtggtagtcctggagactatttttccctatagcatggaagttaacaacaaatagaggctcaaaaggtgcaaagctctggaccctgtttaaatcctcaaatttcaagaaagctctagcagtgtttactaagctatatcacccagcactttaatagtttttgccatattgatgtattatttgctgttaatttacttagcattttttaaaaggatttttaaaaaatcttgtcctaattaatactatatcattgatatcatggttttgatgtacaaattatatgcttttctgaaacacttatatcaaatttataataatgaaattttaaaatgtttatc

SEQ ID NO: 78738 - DNA, 678 bp, Homo sapiens
  misc_feature (22)..(22): n is a, c, g, or t
  misc_feature (46)..(46): n is a, c, g, or t
  misc_feature (587)..(587): n is a, c, g, or t
  misc_feature (620)..(620): n is a, c, g, or t
gggggcggggcgcggggggggngcggggaggggtgggcggcgggtngcgtgacgtggattttaaaaaatggtatataagcataggacaagggctatgtttgtttgtttttcaaaagtgctttgaagataacagcctttaggtttgagttatttcacttttcataatttttaagtagcttatatataatggtggtaccataggattttcttttttcaaatgactgtcggcagaaacagtgggcactgactcaccttttgagttttagcagagaattatttatttctttacaatgcactttctaacccattgtagctatattagcattatcttttaaaaaagacatgcttttgtatttaaatattgtaggatttaagtgtctttctcaaaatagcttattcctttctgaaagaaaattgctattttataacactgcatcagttttaggagttgcatctctcctgctggctcttttatatttgagcaagatcagtgtagaatatgtgtttagaaacttgtctgttgtctcagtttagtgaaaaggaggtgctgcatgtgcctgaattaaaaccaagaatttatgctagtnttctgaggtgctgattgaactatgactaactanaacagatctcaaacttgctgtgtgttacattaagacagtgtgatactaggtgactgaa

SEQ ID NO: 78739 - DNA, 5636 bp, Homo sapiens
agaggagaccagcaagcagagccctcagatgctcggagctttctcggcgcgaagctgcccgtcgccctctcctgccgccctcgcccgccgccctcctgctcctgctccggctgcggctcttggtaccccggctccgggagcccagctccccgccaccgccgccgcctgggtgtgggggctgctgaggctgagccgggcctcggcgccggctctgaggacggacgcctgaggagctgcgcggcgcggcgccgccggctggcggagaacgcccacaggcgcggggctcggcggcttgacccgggcttgtccccgtgcggccgcgggggcccctcagcggtttcccgaacggcccgactcgggcgctcctccgtgtcgcggtcgccgaccctccgcgtcccgccaacgccgccgctgcaccagtctccgggccgggctcggcgggccccgcagccgcagccatggggtgttggggtcggaaccggggccggctgctgtgcatgctggcgctgaccttcatgttcatggtgctggaggtggtggtgagccgggtgacctcgtcgctggcgatgctctccgactccttccacatgctgtcggacgtgctggcgctggtggtggcgctggtggccgagcgcttcgcccggcggacccacgccacccagaagaacacgttcggctggatccgagccgaggtaatgggggctctggtgaacgccatcgagcgcttcatcgagccgcacgagatgcagcagccgctggtggtcctccccaaggggcctcgcgttaagagcacccgccccgggagcagcgacatcaacgtggccccgggcgagcagggtcccgaccaggaggagaccaacaccctggtggccaataccagcaactccaacgggctgaaattggaccccgcagacccagaaaaccccagaagtggtgatacagtggaagtacaagtgaatggaaatcttgtcagagaacctgaccatatggaactggaagaagatagggctggacaacttaacatgcgtggagtttttctgcatgtccttggagatgccttgggttcagtgattgtagtagtaaatgccttagtcttttacttttcttggaaaggttgttctgaaggggatttttgtgtgaatccatgtttccctgacccctgcaaagcatttgtagaaataattaatagtactcatgcatcagtttatgaggctggtccttgctgggtgctatatttagatccaactctttgtgttgtaatggtttgtatacttctttacacaacctatccattacttaaggaatctgctcttattcttctacaaactgttcctaaacaaattgatatcagaaatttgataaaagaacttcgaaatgttgaaggagttgaggaagttcatgaattacatgtttggcaacttgctggaagcagaatcattgccactgctcacataaaatgtgaagatccaacatcatacatggagggtggctaaaaccattaaagacgtttttcataatcacggaattcacgctactaccattcagcctgaatttgctagtgtaggctctaaatcaagtgtagttccgtgtgaacttgcctgcagaacccagtgtgctttgaagcaatgttgtgggacactaccacaagccccttctggaaaggatgcagaaaagaccccagcagttagcatttcttgtttagaacttagtaacaatctagagaagaagcccaggaggactaaagctgaaaacatccctgctgttgtgatagagattaaaaacatgccaaacaaacaacctgaatcatctttgtgagtcttgaaaaagatgtgatatttgacttttgctttaaactgcaagaggaaaaagactccactgaaattctaagtttgccaagtagtgtaattgaagtccttgtctggtcacacagtttaattctatttttgtaagaacataatgggactgcataacagagttctatattacaattttgtgattattagtacagagtacagctatgctgtgactgttttggaaagccagttttaacactatgttacatttttgtttaaagtaagttaaaccttatataacataatgacatttgatttctggatttttcccatgataaaaattagggggataaataaaattgttactggaatttctctgcttttcttttcccccagtgttatactttattagaattataattgatagaactttaaaatcatcaacagtttgtttcctttgacattttaggtgatattgccctttgagatcattacatagcataatggcagcatattttaagagtgactcatggctattagtaggaaataagatcagttactatcctgtattctgtattgctggctattaaacagtaagataattaacaaattgaactacagtttacacacaatggggcaaatggggtagtaagagcaaggaagaaagtttaccaaactaaatatttaggttattgtatgataatattgagactacatttctaaattattttgagaatttcaactttttattctaccaaagttaatctgaaacttggacatgttcaccagcattactttctttgaaagattggtataaaaacattgagctgcaagtttatttacaaaatatataagtatttttaaggatgttgacacctaataattacatgctaaacgcaaacgattaatgtaatcttttaaaccgggcgtttgaacaaaaaattttcaaggtcatttcatgataaccaatcatgaatggatttaaatggagctttttgagcacaaccagcaatgtttgtgctttctaagagtcactgacttgagaggaaagaaaaccagaaggttaatgcagtttggatattaaattcttagcaaaattaataattaaagcaaaattaattaagattttgtaagtcatcctgtcttcacatactcagatcttccaatagtggcttattttgcaagatgccacaatatctacacagaaaattgtggctatttcattattgctatagatttcaaatccaacacaaatatttaagggtgtttaagttatatttttcttgatagagggtatgctttgtgacaaaattagatttttgtccttgaaaggattaatattagcatcagttatgtatagctctatttttctagaaacaaggtattctgactacttttatagctgactacttttgggatggctacgttttgggatttaaaatagttcattgtttaatgggttgtaagaggaaaaagtgttaggatttgacagttactttttaaagggatgatcttttgtggtgtgtgtttttcctagtataagcctattgctggcgatgggcctatttaagaacagctgattttttccagtgaaaatatggtaattttaggaacacagtttgtaagttcacatttactataatgggccaaaaccataacctgccagtttgcaatacatcttgatcttttaatattcttatctgatattgtgtaattcaattcctaaactgatagttaccttgaattttgcgaaaaggtttgggtggttttttttaaacatgaaattgagggatctcatctgggcgaacaagaagagaaagctgtgaattgtactgtatcatgtacattcctgatttaatactttacagaacattttattcagatatcaatttgttacataaacatttcagcaatgatacaaagataactgataaaatatattacattcaatgaggttttctttacaaatgctctacttgaggtctgtgtcttaaagatggcatgacacctaagtacaagacatcaactgaatgaggattttaaaaaatggtatataagcataggacaagggctatgtttgtttgtttttcaaaagtgctttgaagataacagcctttaggtttgagttatttcacttttcataatttttaagtagcttatatataatggtggtaccataggattttcttttttcaaatgactgtcggcagaaacagtgggcactgactcaccttttgagttttagcagagaattatttatttctttacaatgcactttctaacccattgtagctatattagcattatcttttaaaaaagacatgcttttgtatttaaatattgtaggatttaagtgtctttctcaaaatagcttattcctttctgaaagaaaatgagggaaatactctgaattattaggagacttaaacccaatatttaaatatgctattttataacactgcatcagttttaggagttgcatctctcctgctggctcttttatatttgagcaagatcagtgtagaatatgtgtttagaaacttgtctgttgtctcagtttagtgaaaaggaggtgctgcatgtgcctgaattaaaaccaagaaatttttccaagccaaatgcagccttagtgatgagagatttaattctccattgtcaccttttagcttttatgattgcttagttttttctgaaggatgtctgcattgtaaaactatggactaaaacctaaaaaacagaatcctcaaaaactttgctgtatgtgttttaacattttagagaacagtatgttgaataactaaggtatgtaacttgaataggaaaaatgtccatcaaatgcaccttggaaaatcacagtaggtagaaggctgtgttaaccgtttgtgtcttattaacatccttaagttaattttgaatttttgacagttttgagggaaaagacctatggaacctaatgtgaagtatttcgtatgttaactggtgttgagttgaagatttttactgtgtataagcagatatcatttgaatgataaaaatgtcattaacctgctgtcttaagatgttcacacaaatatggagagtaattctacaatataaaaatatttattttaatactgagtttcagttaagtcataaacagtgttaaaactcttgggaaggtgtaggggttttttgtttgtcatttttaaaattgaaactgtgtcatacagtgtttcacgtctctgaaattgggattataatagcactattttgatgtagctctaccgatactatgtggtaatgctattttgttttactaacaagctctggaatatttagcagtcattttcactggcacaagagccttttgtatgttattcaatttaaacttttaaaccaaaaattttatggtccagtgtctttggcaaaaagatgctggagggaatgtaacatacaattaatatgtggttatatatatatataaaaagacacaaattgccatgttatggttctgccttgaaacagcacaatgaagtgtatcagtatattctgtgattatgaaacttatatgttgtgttgttttgtgtcttctgttgcctgtcctttgggccagatgtgggccagttaaatgcagttatcatctcattaaatacagatgcagataaaatatctttagtgctgcaacattttacctaactttttgtatgttttcatgactgtgtgttattttccaaagctgttcctacctcaccatgaggctttatggattgttatgtattataaatgttctatatgagacagactactgtgtttcttctcatttattaaaagttaagtagaaaaataaactaattttaatatcta

SEQ ID NO: 78740 - DNA, 3550 bp, Homo sapiens
  misc_feature (26)..(27): n is a, c, g, or t
  misc_feature (31)..(31): n is a, c, g, or t
  misc_feature (35)..(35): n is a, c, g, or t
gaagccttgagaataatccccccccnncggngtantgggctataaaaattagggggataaataaaattgttactggaatttctctgcttttcttttcccccagtgttatactttattagaattataattgatagaactttaaaatcatcaacagtttgtttcctttgacattttaggtgatattgccctttgagatcattacatagcataatggcagcatattttaagagtgactcatggctattagtaggaaataagatcagttactatcctgtattctgtattgctggctattaaacagtaagataattaacaaattgaactacagtttacacacaatggggcaaatggggtagtaagagcaaggaagaaagtttaccaaactaaatatttaggttattgtatgataatattgagactacatttctaaattattttgagaatttcaactttttattctaccaaagttaatctgaaacttggacatgttcaccagcattactttctttgaaagattggtataaaaacattgagctgcaagtttatttacaaaatatataagtatttttaaggatgttgacacctaataattacatgctaaacgcaaacgattaatgtaatcttttaaaccgggcgtttgaacaaaaaattttcaaggtcatttcatgataaccaatcatgaatggatttaaatggagctttttgagcacaaccagcaatgtttgtgctttctaagagtcactgacttgagaggaaagaaaaccagaaggttaatgcagtttggatattaaattcttagcaaaattaataattaaagcaaaattaattaagattttgtaagtcatcctgtcttcacatactcagatcttccaatagtggcttattttgcaagatgccacaatatctacacagaaaattgtggctatttcattattgctatagatttcaaatccaacacaaatatttaagggtgtttaagttatatttttcttgatagagggtatgctttgtgacaaaattagatttttgtccttgaaaggattaatattagcatcagttatgtatagctctatttttctagaaacaaggtattctgactacttttatagctgactacttttgggatggctacgttttgggatttaaaatagttcattgtttaatgggttgtaagaggaaaaagtgttaggatttgacagttactttttaaagggatgatcttttgtggtgtgtgtttttcctagtataagcctattgctggcgatgggcctatttaagaacagctgattttttccagtgaaaatatggtaattttaggaacacagtttgtaagttcacatttactataatgggccaaaaccataacctgccagtttgcaatacatcttgatcttttaatattcttatctgatattgtgtaattcaattcctaaactgatagttaccttgaattttgcgaaaaggtttgggtggttttttttaaacatgaaattgagggatctcatctgggcgaacaagaagagaaagctgtgaattgtactgtatcatgtacattcctgatttaatactttacagaacattttattcagatatcaatttgttacataaacatttcagcaatgatacaaagataactgataaaatatattacattcaatgaggttttctttacaaatgctctacttgaggtctgtgtcttaaagatggcatgacacctaagtacaagacatcaactgaatgaggattttaaaaaatggtatataagcataggacaagggctatgtttgtttgtttttcaaaagtgctttgaagataacagcctttaggtttgagttatttcacttttcataatttttaagtagcttatatataatggtggtaccataggattttcttttttcaaatgactgtcggcagaaacagtgggcactgactcaccttttgagttttagcagagaattatttatttctttacaatgcactttctaacccattgtagctatattagcattatcttttaaaaaagacatgcttttgtatttaaatattgtaggatttaagtgtctttctcaaaatagcttattcctttctgaaagaaaatgagggaaatactctgaattattaggagacttaaacccaatatttaaatatgctattttataacactgcatcagttttaggagttgcatctctcctgctggctcttttatatttgagcaagatcagtgtagaatatgtgtttagaaacttgtctgttgtctcagtttagtgaaaaggaggtgctgcatgtgcctgaattaaaaccaagaaatttttccaagccaaatgcagccttagtgatgagagatttaattctccattgtcaccttttagcttttatgattgcttagttttttctgaaggatgtctgcattgtaaaactatggactaaaacctaaaaaacagaatcctcaaaaactttgctgtatgtgttttaacattttagagaacagtatgttgaataactaaggtatgtaacttgaataggaaaaatgtccatcaaatgcaccttggaaaatcacagtaggtagaaggctgtgttaaccgtttgtgtcttattaacatccttaagttaattttgaatttttgacagttttgagggaaaagacctatggaacctaatgtgaagtatttcgtatgttaactggtgttgagttgaagatttttactgtgtataagcagatatcatttgaatgataaaaatgtcattaacctgctgtcttaagatgttcacacaaatatggagagtaattctacaatataaaaatatttattttaatactgagtttcagttaagtcataaacagtgttaaaactcttgggaaggtgtaggggttttttgtttgtcatttttaaaattgaaactgtgtcatacagtgtttcacgtctctgaaattgggattataatagcactattttgatgtagctctaccgatactatgtggtaatgctattttgttttactaacaagctctggaatatttagcagtcattttcactggcacaagagccttttgtatgttattcaatttaaacttttaaaccaaaaattttatggtccagtgtctttggcaaaaagatgctggagggaatgtaacatacaattaatatgtggttatatatatatataaaaagacacaaattgccatgttatggttctgccttgaaacagcacaatgaagtgtatcagtatattctgtgattatgaaacttatatgttgtgttgttttgtgtcttctgttgcctgtcctttgggccagatgtgggccagttaaatgcagttatcatctcattaaatacagatgcagataaaatatctttagtgctgcaacattttacctaactttttgtatgttttcatgactgtgtgttattttccaaagctgttcctacctcaccatgaggctttatggattgttatgtattataaatgttctatatgagacagactactgtgtttcttctcatttattaaaagttaagtagaaaaataaactaattttaatatcta

SEQ ID NO: 78741 - DNA, 2969 bp, Homo sapiens
  misc_feature (24)..(24): n is a, c, g, or t
ccagtctggtccgccccggggtanggcatatagtcggacccacgccctcgcccatgcgtcagggagaaatttcaatgtcatttcatgataaccaatcatgaatggatttaaatggagctttttgagcacaaccagcaatgtttgtgctttctaagagtcactgacttgagaggaaagaaaaccagaaggttaatgcagtttggatattaaattcttagcaaaattaataattaaagcaaaattaattaagattttgtaagtcatcctgtcttcacatactcagatcttccaatagtggcttattttgcaagatgccacaatatctacacagaaaattgtggctatttcattattgctatagatttcaaatccaacacaaatatttaagggtgtttaagttatatttttcttgatagagggtatgctttgtgacaaaattagatttttgtccttgaaaggattaatattagcatcagttatgtatagctctatttttctagaaacaaggtattctgactacttttatagctgactacttttgggatggctacgttttgggatttaaaatagttcattgtttaatgggttgtaagaggaaaaagtgttaggatttgacagttactttttaaagggatgatcttttgtggtgtgtgtttttcctagtataagcctattgctggcgatgggcctatttaagaacagctgattttttccagtgaaaatatggtaattttaggaacacagtttgtaagttcacatttactataatgggccaaaaccataacctgccagtttgcaatacatcttgatcttttaatattcttatctgatattgtgtaattcaattcctaaactgatagttaccttgaattttgcgaaaaggtttgggtggttttttttaaacatgaaattgagggatctcatctgggcgaacaagaagagaaagctgtgaattgtactgtatcatgtacattcctgatttaatactttacagaacattttattcagatatcaatttgttacataaacatttcagcaatgatacaaagataactgataaaatatattacattcaatgaggttttctttacaaatgctctacttgaggtctgtgtcttaaagatggcatgacacctaagtacaagacatcaactgaatgaggattttaaaaaatggtatataagcataggacaagggctatgtttgtttgtttttcaaaagtgctttgaagataacagcctttaggtttgagttatttcacttttcataatttttaagtagcttatatataatggtggtaccataggattttcttttttcaaatgactgtcggcagaaacagtgggcactgactcaccttttgagttttagcagagaattatttatttctttacaatgcactttctaacccattgtagctatattagcattatcttttaaaaaagacatgcttttgtatttaaatattgtaggatttaagtgtctttctcaaaatagcttattcctttctgaaagaaaatgagggaaatactctgaattattaggagacttaaacccaatatttaaatatgctattttataacactgcatcagttttaggagttgcatctctcctgctggctcttttatatttgagcaagatcagtgtagaatatgtgtttagaaacttgtctgttgtctcagtttagtgaaaaggaggtgctgcatgtgcctgaattaaaaccaagaaatttttccaagccaaatgcagccttagtgatgagagatttaattctccattgtcaccttttagcttttatgattgcttagttttttctgaaggatgtctgcattgtaaaactatggactaaaacctaaaaaacagaatcctcaaaaactttgctgtatgtgttttaacattttagagaacagtatgttgaataactaaggtatgtaacttgaataggaaaaatgtccatcaaatgcaccttggaaaatcacagtaggtagaaggctgtgttaaccgtttgtgtcttattaacatccttaagttaattttgaatttttgacagttttgagggaaaagacctatggaacctaatgtgaagtatttcgtatgttaactggtgttgagttgaagatttttactgtgtataagcagatatcatttgaatgataaaaatgtcattaacctgctgtcttaagatgttcacacaaatatggagagtaattctacaatataaaaatatttattttaatactgagtttcagttaagtcataaacagtgttaaaactcttgggaaggtgtaggggttttttgtttgtcatttttaaaattgaaactgtgtcatacagtgtttcacgtctctgaaattgggattataatagcactattttgatgtagctctaccgatactatgtggtaatgctattttgttttactaacaagctctggaatatttagcagtcattttcactggcacaagagccttttgtatgttattcaatttaaacttttaaaccaaaaattttatggtccagtgtctttggcaaaaagatgctggagggaatgtaacatacaattaatatgtggttatatatatatataaaaagacacaaattgccatgttatggttctgccttgaaacagcacaatgaagtgtatcagtatattctgtgattatgaaacttatatgttgtgttgttttgtgtcttctgttgcctgtcctttgggccagatgtgggccagttaaatgcagttatcatctcattaaatacagatgcagataaaatatctttagtgctgcaacattttacctaactttttgtatgttttcatgactgtgtgttattttccaaagctgttcctacctcaccatgaggctttatggattgttatgtattataaatgttctatatgagacagactactgtgtttcttctcatttattaaaagttaagtagaaaaataaactaattttaatatcta

SEQ ID NO: 78742 - DNA, 1815 bp, Homo sapiens
  misc_feature (22)..(22): n is a, c, g, or t
  misc_feature (46)..(46): n is a, c, g, or t
gggggcggggcgcggggggggngcggggaggggtgggcggcgggtngcgtgacgtggattttaaaaaatggtatataagcataggacaagggctatgtttgtttgtttttcaaaagtgctttgaagataacagcctttaggtttgagttatttcacttttcataatttttaagtagcttatatataatggtggtaccataggattttcttttttcaaatgactgtcggcagaaacagtgggcactgactcaccttttgagttttagcagagaattatttatttctttacaatgcactttctaacccattgtagctatattagcattatcttttaaaaaagacatgcttttgtatttaaatattgtaggatttaagtgtctttctcaaaatagcttattcctttctgaaagaaaattgctattttataacactgcatcagttttaggagttgcatctctcctgctggctcttttatatttgagcaagatcagtgtagaatatgtgtttagaaacttgtctgttgtctcagtttagtgaaaaggaggtgctgcatgtgcctgaattaaaaccaagaaatttttccaagccaaatgcagccttagtgatgagagatttaattctccattgtcaccttttagcttttatgattgcttagttttttctgaaggatgtctgcattgtaaaactatggactaaaacctaaaaaacagaatcctcaaaaactttgctgtatgtgttttaacattttagagaacagtatgttgaataactaaggtatgtaacttgaataggaaaaatgtccatcaaatgcaccttggaaaatcacagtaggtagaaggctgtgttaaccgtttgtgtcttattaacatccttaagttaattttgaatttttgacagttttgagggaaaagacctatggaacctaatgtgaagtatttcgtatgttaactggtgttgagttgaagatttttactgtgtataagcagatatcatttgaatgataaaaatgtcattaacctgctgtcttaagatgttcacacaaatatggagagtaattctacaatataaaaatatttattttaatactgagtttcagttaagtcataaacagtgttaaaactcttgggaaggtgtaggggttttttgtttgtcatttttaaaattgaaactgtgtcatacagtgtttcacgtctctgaaattgggattataatagcactattttgatgtagctctaccgatactatgtggtaatgctattttgttttactaacaagctctggaatatttagcagtcattttcactggcacaagagccttttgtatgttattcaatttaaacttttaaaccaaaaattttatggtccagtgtctttggcaaaaagatgctggagggaatgtaacatacaattaatatgtggttatatatatatataaaaagacacaaattgccatgttatggttctgccttgaaacagcacaatgaagtgtatcagtatattctgtgattatgaaacttatatgttgtgttgttttgtgtcttctgttgcctgtcctttgggccagatgtgggccagttaaatgcagttatcatctcattaaatacagatgcagataaaatatctttagtgctgcaacattttacctaactttttgtatgttttcatgactgtgtgttattttccaaagctgttcctacctcaccatgaggctttatggattgttatgtattataaatgttctatatgagacagactactgtgtttcttctcatttattaaaagttaagtagaaaaataaactaattttaatatcta

SEQ ID NO: 78743 - DNA, 1540 bp, Homo sapiens
agaatatgtgtttagaaacttgtctgttgtctcagtttagtgaaaaggaggtgctgcatgtgcctgaattaaaactgatgcagtgttataagagggaaatactctgaattattaggagacttaaacccaatatttaaatatgctattttataacactgcatcagttttaggagttgcatctctcctgctggctcttttatatttgagcaagatcagtgtagaatatgtgtttagaaacttgtctgttgtctcagtttagtgaaaaggaggtgctgcatgtgcctgaattaaaaccaagaaatttttccaagccaaatgcagccttagtgatgagagatttaattctccattgtcaccttttagcttttatgattgcttagttttttctgaaggatgtctgcattgtaaaactatggactaaaacctaaaaaacagaatcctcaaaaactttgctgtatgtgttttaacattttagagaacagtatgttgaataactaaggtatgtaacttgaataggaaaaatgtccatcaaatgcaccttggaaaatcacagtaggtagaaggctgtgttaaccgtttgtgtcttattaacatccttaagttaattttgaatttttgacagttttgagggaaaagacctatggaacctaatgtgaagtatttcgtatgttaactggtgttgagttgaagatttttactgtgtataagcagatatcatttgaatgataaaaatgtcattaacctgctgtcttaagatgttcacacaaatatggagagtaattctacaatataaaaatatttattttaatactgagtttcagttaagtcataaacagtgttaaaactcttgggaaggtgtaggggttttttgtttgtcatttttaaaattgaaactgtgtcatacagtgtttcacgtctctgaaattgggattataatagcactattttgatgtagctctaccgatactatgtggtaatgctattttgttttactaacaagctctggaatatttagcagtcattttcactggcacaagagccttttgtatgttattcaatttaaacttttaaaccaaaaattttatggtccagtgtctttggcaaaaagatgctggagggaatgtaacatacaattaatatgtggttatatatatatataaaaagacacaaattgccatgttatggttctgccttgaaacagcacaatgaagtgtatcagtatattctgtgattatgaaacttatatgttgtgttgttttgtgtcttctgttgcctgtcctttgggccagatgtgggccagttaaatgcagttatcatctcattaaatacagatgcagataaaatatctttagtgctgcaacattttacctaactttttgtatgttttcatgactgtgtgttattttccaaagctgttcctacctcaccatgaggctttatggattgttatgtattataaatgttctatatgagacagactactgtgtttcttctcatttattaaaagttaagtagaaaaataaactaattttaatatcta

SEQ ID NO: 78744 - DNA, 2331 bp, Homo sapiens
agaggagaccagcaagcagagccctcagatgctcggagctttctcggcgcgaagctgcccgtcgccctctcctgccgccctcgcccgccgccctcctgctcctgctccggctgcggctcttggtaccccggctccgggagcccagctccccgccaccgccgccgcctgggtgtgggggctgctgaggctgagccgggcctcggcgccggctctgaggacggacgcctgaggagctgcgcggcgcggcgccgccggctggcggagaacgcccacaggcgcggggctcggcggcttgacccgggcttgtccccgtgcggccgcgggggcccctcagcggtttcccgaacggcccgactcgggcgctcctccgtgtcgcggtcgccgaccctccgcgtcccgccaacgccgccgctgcaccagtctccgggccgggctcggcgggccccgcagccgcagccatggggtgttggggtcggaaccggggccggctgctgtgcatgctggcgctgaccttcatgttcatggtgctggaggtggtggtgagccgggtgacctcgtcgctggcgatgctctccgactccttccacatgctgtcggacgtgctggcgctggtggtggcgctggtggccgagcgcttcgcccggcggacccacgccacccagaagaacacgttcggctggatccgagccgaggtaatgggggctctggtgaacgccatcttcctgactggcctctgtttcgccatcctgctggaggccatcgagcgcttcatcgagccgcacgagatgcagcagccgctggtggtccttggggtcggcgtggccgggctgctggtcaacgtgctggggctctgcctcttccaccatcacagcggcttcagccaggactccggccacggccactcgcacgggggtcacggccacggccacggcctccccaaggggcctcgcgttaagagcacccgccccgggagcagcgacatcaacgtggccccgggcgagcagggtcccgaccaggaggagaccaacaccctggtggccaataccagcaactccaacgggctgaaattggaccccgcagacccagaaaaccccagaagtggtgatacagtggaagtacaagtgaatggaaatcttgtcagagaacctgaccatatggaactggaagaagatagggctggacaacttaacatgcgtggagtttttctgcatgtccttggagatgccttgggttcagtgattgtagtagtaaatgccttagtcttttacttttcttggaaaggttgttctgaaggggatttttgtgtgaatccatgtttccctgacccctgcaaagcatttgtagaaataattaatagtactcatgcatcagtttatgaggctggtccttgctgggtgctatatttagatccaactctttgtgttgtaatggtttgtatacttctttacacaacctatccattacttaaggaatctgctcttattcttctacaaactgttcctaaacaaattgatatcagaaatttgataaaagaacttcgaaatgttgaaggagttgaggaagttcatgaattacatgtttggcaacttgctggaagcagaatcattgccactgctcacataaaatgtgaagatccaacatcatacatggagggtggctaaaaccattaaagacgtttttcataatcacggaattcacgctactaccattcagcctgaatttgctagtgtaggctctaaatcaagtgtagttccgtgtgaacttgcctgcagaacccagtgtgctttgaagcaatgttgtgggacactaccacaagccccttctggaaaggatgcagaaaagaccccagcagttagcatttcttgtttagaacttagtaacaatctagagaagaagcccaggaggactaaagctgaaaacatccctgctgttgtgatagagattaaaaacatgccaaacaaacaacctgaatcatctttgtgagtcttgaaaaagatgtgatatttgacttttgctttaaactgcaagaggaaaaagactccactgaaattctaagtttgccaagtagtgtaattgaagtccttgtctggtcacacagtttaattctatttttgtaagaacataatgggactgcataacagagttctatattacaattttgtgattattagtacagagtacagctatgctgtgactgttttggaaagccagttttaacactatgttacatttttgtttaaagtaagttaaaccttatataacataatgacatttgatttctggatttttcccatgataaaaattagggggataaataaaattgttactgga

SEQ ID NO: 78745 - DNA, 546 bp, Homo sapiens
ccagttacaacagctccagttttaacagctcagctacaacagctgccttttgtatgttattcaatttaaacttttaaaccaaaaattttatggtccagtgtctttggcaaaaagatgctggagggaatgtaacatacaattaatatgtggttatatatatatataaaaagacacaaattgccatgttatggttctgccttgaaacagcacaatgaagtgtatcagtatattctgtgattatgaaacttatatgttgtgttgttttgtgtcttctgttgcctgtcctttgggccagatgtgggccagttaaatgcagttatcatctcattaaatacagatgcagataaaatatctttagtgctgcaacattttacctaactttttgtatgttttcatgactgtgtgttattttccaaagctgttcctacctcaccatgaggctttatggattgttatgtattataaatgttctatatgagacagactactgtgtttcttctcatttattaaaagttaagtagaaaaataaactaattttaatatcta

SEQ ID NO: 78746 - DNA, 5804 bp, Homo sapiens
agaggagaccagcaagcagagccctcagatgctcggagctttctcggcgcgaagctgcccgtcgccctctcctgccgccctcgcccgccgccctcctgctcctgctccggctgcggctcttggtaccccggctccgggagcccagctccccgccaccgccgccgcctgggtgtgggggctgctgaggctgagccgggcctcggcgccggctctgaggacggacgcctgaggagctgcgcggcgcggcgccgccggctggcggagaacgcccacaggcgcggggctcggcggcttgacccgggcttgtccccgtgcggccgcgggggcccctcagcggtttcccgaacggcccgactcgggcgctcctccgtgtcgcggtcgccgaccctccgcgtcccgccaacgccgccgctgcaccagtctccgggccgggctcggcgggccccgcagccgcagccatggggtgttggggtcggaaccggggccggctgctgtgcatgctggcgctgaccttcatgttcatggtgctggaggtggtggtgagccgggtgacctcgtcgctggcgatgctctccgactccttccacatgctgtcggacgtgctggcgctggtggtggcgctggtggccgagcgcttcgcccggcggacccacgccacccagaagaacacgttcggctggatccgagccgaggtaatgggggctctggtgaacgccatcttcctgactggcctctgtttcgccatcctgctggaggccatcgagcgcttcatcgagccgcacgagatgcagcagccgctggtggtccttggggtcggcgtggccgggctgctggtcaacgtgctggggctctgcctcttccaccatcacagcggcttcagccaggactccggccacggccactcgcacgggggtcacggccacggccacggcctccccaaggggcctcgcgttaagagcacccgccccgggagcagcgacatcaacgtggccccgggcgagcagggtcccgaccaggaggagaccaacaccctggtggccaataccagcaactccaacgggctgaaattggaccccgcagacccagaaaaccccagaagtggtgatacagtggaagtacaagtgaatggaaatcttgtcagagaacctgaccatatggaactggaagaagatagggctggacaacttaacatgcgtggagtttttctgcatgtccttggagatgccttgggttcagtgattgtagtagtaaatgccttagtcttttacttttcttggaaaggttgttctgaaggggatttttgtgtgaatccatgtttccctgacccctgcaaagcatttgtagaaataattaatagtactcatgcatcagtttatgaggctggtccttgctgggtgctatatttagatccaactctttgtgttgtaatggtttgtatacttctttacacaacctatccattacttaaggaatctgctcttattcttctacaaactgttcctaaacaaattgatatcagaaatttgataaaagaacttcgaaatgttgaaggagttgaggaagttcatgaattacatgtttggcaacttgctggaagcagaatcattgccactgctcacataaaatgtgaagatccaacatcatacatggagggtggctaaaaccattaaagacgtttttcataatcacggaattcacgctactaccattcagcctgaatttgctagtgtaggctctaaatcaagtgtagttccgtgtgaacttgcctgcagaacccagtgtgctttgaagcaatgttgtgggacactaccacaagccccttctggaaaggatgcagaaaagaccccagcagttagcatttcttgtttagaacttagtaacaatctagagaagaagcccaggaggactaaagctgaaaacatccctgctgttgtgatagagattaaaaacatgccaaacaaacaacctgaatcatctttgtgagtcttgaaaaagatgtgatatttgacttttgctttaaactgcaagaggaaaaagactccactgaaattctaagtttgccaagtagtgtaattgaagtccttgtctggtcacacagtttaattctatttttgtaagaacataatgggactgcataacagagttctatattacaattttgtgattattagtacagagtacagctatgctgtgactgttttggaaagccagttttaacactatgttacatttttgtttaaagtaagttaaaccttatataacataatgacatttgatttctggatttttcccatgataaaaattagggggataaataaaattgttactggaatttctctgcttttcttttcccccagtgttatactttattagaattataattgatagaactttaaaatcatcaacagtttgtttcctttgacattttaggtgatattgccctttgagatcattacatagcataatggcagcatattttaagagtgactcatggctattagtaggaaataagatcagttactatcctgtattctgtattgctggctattaaacagtaagataattaacaaattgaactacagtttacacacaatggggcaaatggggtagtaagagcaaggaagaaagtttaccaaactaaatatttaggttattgtatgataatattgagactacatttctaaattattttgagaatttcaactttttattctaccaaagttaatctgaaacttggacatgttcaccagcattactttctttgaaagattggtataaaaacattgagctgcaagtttatttacaaaatatataagtatttttaaggatgttgacacctaataattacatgctaaacgcaaacgattaatgtaatcttttaaaccgggcgtttgaacaaaaaattttcaaggtcatttcatgataaccaatcatgaatggatttaaatggagctttttgagcacaaccagcaatgtttgtgctttctaagagtcactgacttgagaggaaagaaaaccagaaggttaatgcagtttggatattaaattcttagcaaaattaataattaaagcaaaattaattaagattttgtaagtcatcctgtcttcacatactcagatcttccaatagtggcttattttgcaagatgccacaatatctacacagaaaattgtggctatttcattattgctatagatttcaaatccaacacaaatatttaagggtgtttaagttatatttttcttgatagagggtatgctttgtgacaaaattagatttttgtccttgaaaggattaatattagcatcagttatgtatagctctatttttctagaaacaaggtattctgactacttttatagctgactacttttgggatggctacgttttgggatttaaaatagttcattgtttaatgggttgtaagaggaaaaagtgttaggatttgacagttactttttaaagggatgatcttttgtggtgtgtgtttttcctagtataagcctattgctggcgatgggcctatttaagaacagctgattttttccagtgaaaatatggtaattttaggaacacagtttgtaagttcacatttactataatgggccaaaaccataacctgccagtttgcaatacatcttgatcttttaatattcttatctgatattgtgtaattcaattcctaaactgatagttaccttgaattttgcgaaaaggtttgggtggttttttttaaacatgaaattgagggatctcatctgggcgaacaagaagagaaagctgtgaattgtactgtatcatgtacattcctgatttaatactttacagaacattttattcagatatcaatttgttacataaacatttcagcaatgatacaaagataactgataaaatatattacattcaatgaggttttctttacaaatgctctacttgaggtctgtgtcttaaagatggcatgacacctaagtacaagacatcaactgaatgaggattttaaaaaatggtatataagcataggacaagggctatgtttgtttgtttttcaaaagtgctttgaagataacagcctttaggtttgagttatttcacttttcataatttttaagtagcttatatataatggtggtaccataggattttcttttttcaaatgactgtcggcagaaacagtgggcactgactcaccttttgagttttagcagagaattatttatttctttacaatgcactttctaacccattgtagctatattagcattatcttttaaaaaagacatgcttttgtatttaaatattgtaggatttaagtgtctttctcaaaatagcttattcctttctgaaagaaaatgagggaaatactctgaattattaggagacttaaacccaatatttaaatatgctattttataacactgcatcagttttaggagttgcatctctcctgctggctcttttatatttgagcaagatcagtgtagaatatgtgtttagaaacttgtctgttgtctcagtttagtgaaaaggaggtgctgcatgtgcctgaattaaaaccaagaaatttttccaagccaaatgcagccttagtgatgagagatttaattctccattgtcaccttttagcttttatgattgcttagttttttctgaaggatgtctgcattgtaaaactatggactaaaacctaaaaaacagaatcctcaaaaactttgctgtatgtgttttaacattttagagaacagtatgttgaataactaaggtatgtaacttgaataggaaaaatgtccatcaaatgcaccttggaaaatcacagtaggtagaaggctgtgttaaccgtttgtgtcttattaacatccttaagttaattttgaatttttgacagttttgagggaaaagacctatggaacctaatgtgaagtatttcgtatgttaactggtgttgagttgaagatttttactgtgtataagcagatatcatttgaatgataaaaatgtcattaacctgctgtcttaagatgttcacacaaatatggagagtaattctacaatataaaaatatttattttaatactgagtttcagttaagtcataaacagtgttaaaactcttgggaaggtgtaggggttttttgtttgtcatttttaaaattgaaactgtgtcatacagtgtttcacgtctctgaaattgggattataatagcactattttgatgtagctctaccgatactatgtggtaatgctattttgttttactaacaagctctggaatatttagcagtcattttcactggcacaagagccttttgtatgttattcaatttaaacttttaaaccaaaaattttatggtccagtgtctttggcaaaaagatgctggagggaatgtaacatacaattaatatgtggttatatatatatataaaaagacacaaattgccatgttatggttctgccttgaaacagcacaatgaagtgtatcagtatattctgtgattatgaaacttatatgttgtgttgttttgtgtcttctgttgcctgtcctttgggccagatgtgggccagttaaatgcagttatcatctcattaaatacagatgcagataaaatatctttagtgctgcaacattttacctaactttttgtatgttttcatgactgtgtgttattttccaaagctgttcctacctcaccatgaggctttatggattgttatgtattataaatgttctatatgagacagactactgtgtttcttctcatttattaaaagttaagtagaaaaataaactaattttaatatcta

SEQ ID NO: 78747 - DNA, 5742 bp, Homo sapiens
agaggagaccagcaagcagagccctcagatgctcggagctttctcggcgcgaagctgcccgtcgccctctcctgccgccctcgcccgccgccctcctgctcctgctccggctgcggctcttggtaccccggctccgggagcccagctccccgccaccgccgccgcctgggtgtgggggctgctgaggctgagccgggcctcggcgccggctctgaggacggacgcctgaggagctgcgcggcgcggcgccgccggctggcggagaacgcccacaggcgcggggctcggcggcttgacccgggcttgtccccgtgcggccgcgggggcccctcagcggtttcccgaacggcccgactcgggcgctcctccgtgtcgcggtcgccgaccctccgcgtcccgccaacgccgccgctgcaccagtctccgggccgggctcggcgggccccgcagccgcagccatggggtgttggggtcggaaccggggccggctgctgtgcatgctggcgctgaccttcatgttcatggtgctggaggtggtggtgagccgggtgacctcgtcgctggcgatgctctccgactccttccacatgctgtcggacgtgctggcgctggtggtggcgctggtggccgagcgcttcgcccggcggacccacgccacccagaagaacacgttcggctggatccgagccgaggtaatgggggctctggtgaacgccatcttcctgactggcctctgtttcgccatcctgctggaggccatcgagcgcttcatcgagccgcacgagatgcagcagccgctggtggtccttggggtcggcgtggccgggctgctggtcaacgtgctggggctctgcctcttccaccatcacagcggcttcagccaggactccggccacggccactcgcacgggggtcacggccacggccacggcctccccaaggggcctcgcgttaagagcacccgccccgggagcagcgacatcaacgtggccccgggcgagcagggtcccgaccaggaggagaccaacaccctggtggccaataccagcaactccaacgggctgaaattggaccccgcagacccagaaaaccccagaagtggtgatacagtggaagtacaagtgaatggaaatcttgtcagagaacctgaccatatggaactggaagaagatagggctggacaacttaacatgcgtggagtttttctgcatgtccttggagatgccttgggttcagtgattgtagtagtaaatgccttagtcttttacttttcttggaaaggttgttctgaaggggatttttgtgtgaatccatgtttccctgacccctgcaaagcatttgtagaaataattaatagtactcatgcatcagtttatgaggctggtccttgctgggtgctatatttagatccaactctttgtgttgtaatggtttgtatacttctttacacaacctatccattacttaaggaatctgctcttattcttctacaaactgttcctaaacaaattgatatcagaaatttgataaaagaacttcgaaatgttgaaggagttgaggaagttcatgaattacatgtttggcaacttgctggaagcagaatcattgccactgctcacataaaatgtgaagatccaacatcatacatggagggtggctaaaaccattaaagacgtttttcataatcacggaattcacgctactaccattcagcctgaatttgctagtgtaggctctaaatcaagtgtagttccgtgtgaacttgcctgcagaacccagtgtgctttgaagcaatgttgtgggacactaccacaagccccttctggaaaggatgcagaaaagaccccagcagttagcatttcttgtttagaacttagtaacaatctagagaagaagcccaggaggactaaagctgaaaacatccctgctgttgtgatagagattaaaaacatgccaaacaaacaacctgaatcatctttgtgagtcttgaaaaagatgtgatatttgacttttgctttaaactgcaagaggaaaaagactccactgaaattctaagtttgccaagtagtgtaattgaagtccttgtctggtcacacagtttaattctatttttgtaagaacataatgggactgcataacagagttctatattacaattttgtgattattagtacagagtacagctatgctgtgactgttttggaaagccagttttaacactatgttacatttttgtttaaagtaagttaaaccttatataacataatgacatttgatttctggatttttcccatgataaaaattagggggataaataaaattgttactggaatttctctgcttttcttttcccccagtgttatactttattagaattataattgatagaactttaaaatcatcaacagtttgtttcctttgacattttaggtgatattgccctttgagatcattacatagcataatggcagcatattttaagagtgactcatggctattagtaggaaataagatcagttactatcctgtattctgtattgctggctattaaacagtaagataattaacaaattgaactacagtttacacacaatggggcaaatggggtagtaagagcaaggaagaaagtttaccaaactaaatatttaggttattgtatgataatattgagactacatttctaaattattttgagaatttcaactttttattctaccaaagttaatctgaaacttggacatgttcaccagcattactttctttgaaagattggtataaaaacattgagctgcaagtttatttacaaaatatataagtatttttaaggatgttgacacctaataattacatgctaaacgcaaacgattaatgtaatcttttaaaccgggcgtttgaacaaaaaattttcaaggtcatttcatgataaccaatcatgaatggatttaaatggagctttttgagcacaaccagcaatgtttgtgctttctaagagtcactgacttgagaggaaagaaaaccagaaggttaatgcagtttggatattaaattcttagcaaaattaataattaaagcaaaattaattaagattttgtaagtcatcctgtcttcacatactcagatcttccaatagtggcttattttgcaagatgccacaatatctacacagaaaattgtggctatttcattattgctatagatttcaaatccaacacaaatatttaagggtgtttaagttatatttttcttgatagagggtatgctttgtgacaaaattagatttttgtccttgaaaggattaatattagcatcagttatgtatagctctatttttctagaaacaaggtattctgactacttttatagctgactacttttgggatggctacgttttgggatttaaaatagttcattgtttaatgggttgtaagaggaaaaagtgttaggatttgacagttactttttaaagggatgatcttttgtggtgtgtgtttttcctagtataagcctattgctggcgatgggcctatttaagaacagctgattttttccagtgaaaatatggtaattttaggaacacagtttgtaagttcacatttactataatgggccaaaaccataacctgccagtttgcaatacatcttgatcttttaatattcttatctgatattgtgtaattcaattcctaaactgatagttaccttgaattttgcgaaaaggtttgggtggttttttttaaacatgaaattgagggatctcatctgggcgaacaagaagagaaagctgtgaattgtactgtatcatgtacattcctgatttaatactttacagaacattttattcagatatcaatttgttacataaacatttcagcaatgatacaaagataactgataaaatatattacattcaatgaggttttctttacaaatgctctacttgaggtctgtgtcttaaagatggcatgacacctaagtacaagacatcaactgaatgaggattttaaaaaatggtatataagcataggacaagggctatgtttgtttgtttttcaaaagtgctttgaagataacagcctttaggtttgagttatttcacttttcataatttttaagtagcttatatataatggtggtaccataggattttcttttttcaaatgactgtcggcagaaacagtgggcactgactcaccttttgagttttagcagagaattatttatttctttacaatgcactttctaacccattgtagctatattagcattatcttttaaaaaagacatgcttttgtatttaaatattgtaggatttaagtgtctttctcaaaatagcttattcctttctgaaagaaaatgagggaaatactctgaattattaggagacttaaacccaatatttaaatatgctattttataacactgcatcagttttaggagttgcatctctcctgctggctcttttatatttgagcaagatcagtgtagaatatgtgtttagaaacttgtctgttgtctcagtttagtgaaaaggaggtgctgcatgtgcctgaattaaaaccaagaaatttttccaagccaaatgcagccttagtgatgagagatttaattctccattgtcaccttttagcttttatgattgcttagttttttctgaaggatgtctgcattgtaaaactatggactaaaacctaaaaaacagaatcctcaaaaactttgctgtatgtgttttaacattttagagaacagtatgttgaataactaaggtatgtaacttgaataggaaaaatgtccatcaaatgcaccttggaaaatcacagtaggtagaaggctgtgttaaccgtttgtgtcttattaacatccttaagttaattttgaatttttgacagttttgagggaaaagacctatggaacctaatgtgaagtatttcgtatgttaactggtgttgagttgaagatttttactgtgtataagcagatatcatttgaatgataaaaatgtcattaacctgctgtcttaagatgttcacacaaatatggagagtaattctacaatataaaaatatttattttaatactgagtttcagttaagtcataaacagtgttaaaactcttgggaaggtgtaggggttttttgtttgtcatttttaaaattgaaactgtgtcatacagtgtttcacgtctctgaaattgggattataatagcactattttgatgtagctctaccgatactatgtggtaatgctattttgttttactaacaagctctggaatatttagcagtcattttcactggcacaagagccttttgtatgttattcaatttaaacttttaaaccaaaaattttatggtccagtgtctttggcaaaaagatgctggagggaatgtaacatacaattaatatgtggttatatatatatataaaaagacacaaattgccatgttatggttctgccttgaaacagcacaatgaagtgtatcagtatattctgtgattatgaaacttatatgttgtgttgttttgtgtcttctgttgcctgtcctttgggccagatgtgggccagttaaatgcagttatcatctcattaaatacagatgcagataaaatatctttagtgctgcaacattttacctaactttttgtatgttttcatgactgtgtgttattttccaaagctgttcctacctcaccatgaggctttatggattgttatgtattataaatgttctatatgagacaga

SEQ ID NO: 78748 - DNA, 710 bp, Homo sapiens
cgagcccggagacttgccttgcaatgccatgtttgtgtatgtgctctaactcccggagagcaatcagggagacggctccccggccagacttggctgatgttttcttgtttctgtttcagccttcaggataattccttcagcagcaccactgtaacagagtgtgacgaagatccagtctctctacatgaagaccagactgattgctccagtctcagagatgaaaacaataaagagaactaccccgacgcaggggctctggtagaagagcacgcgccgccctcttgggagccgcagcagcagaatgtagaggcgaccgtgctggtggacagcgtattgcgacccagcatgggcaacttcaagtccaggaagcccaagtccatcttcaaagcggagagcgggaggagccacggagaaagtcaggagacagagcatgtggtatccagccagtcagagtgtcaggtgagagcaggaacaccagctcatgagagtccacaaaacaatgccttcaagtgccaagaaacagtgcgacttcaaccaagaatagaccagaggactgccatttcgccaaaggatgcttttgaaactcggcaggacttaaatgaggaagaagctgctcaggtgcatggagtcaaggaccggcgccagatcaacccagagcgtgcttgccgatgggacagattctgcagaccctcacagtccacaaagatggg

SEQ ID NO: 78749 - DNA, 895 bp, Homo sapiens
gcaccatgaagaatggtgtttcctaaatgaaaagttcagatactgctggtaaagaaactggaaaaactgaaggaaggaataaaatatgttggtggtattaacacctccagtaagataagtcattggtacggtttttctaagggccgcagtgagatgtagcagaagaaatatgtttattttgggcaaagatttgcttattggcctgggattgcacattttctctgatgtttgcaacagagaaattttcattttaatgatactcttcctttcttgaaagttacatgtcctcatttctgtttctgcttctcccttggccagtgtcattgatgcagatcattgcatacaacagcacagcaaattgtgccaagtcagtgtgtgaatgggaattagcaatgcacgcttgcaggctctttttccaggaaccaggctgtaacattgaccggggaacctcttcattccctgacatactaaattggtcaattttgtagtactcacctccatccacaaaaacaacaaagataaaatcaatttggagctttatatgacaaaaaggaagaagtccaaaaatatatagccttcccccctcccacatatctgatccaaatattaaatatctgattttataaaacagtttaaattgtctttttaaattgctaacaagcatcagttatatttgagcttcatttttcttttatcctgtctgtcctaataaaaacaaaaatggccaaaaggtggagaggaaagaaaaagcttccactttttaaaatttgttttgtattagttattttacctttagggaccctacaactgaagagagtggagagaataaagaagtgaactttcattcatgtctgctactttgtcctcataaagaaatctgcaacacagatgaaac

SEQ ID NO: 78750 - DNA, 823 bp, Homo sapiens
agtgtccagttgtgttgctgctgctgttgttaatctttagtaccagtactatgtatgaagtagtactaaagaatctgtctttagtaccagtactatgtagtagtactaaagaatctgtctttagtaccagtactatgtagtagtactaaagaatctgtctttagtaccagtactatgtagtagtgctaaagaatctgtctttagtaccagtactatgtagtagtactaaagaatctgtctttagtaccagtactatgtagtagtactaaagaatctgtcttagtatacacagtactggtactaaaggcactatgaagaaggccaggcatggtggctcatgcctgtaatcccagcactttgggaggccgaggtaggtggaccacctggggtcaggagtttgagaccagcctggccaacgtggcagaaccccgtctctactagaaattcaaaaattagccaggcgtggtgccgcgagcctgtaatcccagctactcgggaggctgaggtgggagaattgcttgaagccgggaggcggaggttgcagtgatccgagatcgcgccactgcactccagcctggacaacacagcgagactctgtctcagaaaaataaataaataaataaataagatactatgaagagacactgggattcttcaatgaagagcaaggcaaggacagcaacgataacttgggggatttgccagtcggcaagagccacttctagagcttttatccattttgaaatcaagagattactggctttgttataactttaaaagcctttgaaattgcctcacataataaatgtagttcgaaaaaaaa

SEQ ID NO: 78751 - DNA, 515 bp, Homo sapiens
  misc_feature (307)..(307): n is a, c, g, or t
  misc_feature (386)..(386): n is a, c, g, or t
aaaaataaaggaaatattatatagtcttttgtccacaaaggggtagtcaactccttttgagcataaggaatctttctgagaatctagttcatggtagggaaactgccattgcagcaacagagctcattaaagctaaggtagtagtcttaaaatttaagagaatctcaattataaagtgatggtaaagatcagtagtaagagtttctttcctctgatcataggttctctagagaagacaaataactaagtgttctgcattgtgtacactagtgtacagagtgtctaaatggtgttatttttgggaagngaccctgtagcagtcagtgtctgaaatgtggataagggctgaaagaataaaagaaccactgttgttgacgagggtattnctagtgccactttggtatgctgctgacatttggtctcagctgataagtttcaggaacattttattgaatgatctgtgtaggaatgttttggtatcacgcttaagggaatacatgcatttatagccatca

SEQ ID NO: 78752 - DNA, 796 bp, Homo sapiens
tctgaagggccaagtcctgcaagaaatgtctaatattctaataatgaaaggaagattgtcattcacataatatagatacatgttatagcgtataagagctagaagggttccaacctcattttacagataagcaggtgtccaaattttatagcttttggttacagaattggactggaaacccttgccctttatattactgtctcccatcattctctgttgtaaatctgtttggccttgggttgatggcacagatgggcccaagctgcagatgaccttcagataacatatgaaaatttaactggcgatgtcctagtatcagcaggagtaatagcttaccttggtgctttcacttctggctttcgacaaacatgtacaaaagattggagcatgttgtgcaaggtaatggtttatatttggtaagtcttgttttagaacatccaaagtatgtttggggatatttgggggaaaaggatgataataatggcagaagagaagaaataactgaaaacatggggtctttcttttttggcttcttgtttcatcagtaaaatacttccactattcaacttttaatttcttttctttctgttccttagagttattaaataaatgcctagtgacaattaaacccaatattttaatttaaaaaaatatttcagttaacaaggggaaggaaaatagatttggggataattcttacagaagaaaaaaatcccgtgttcagaggagttcctggtggagtaaacccctgggtgatccagtaaaaattagagcttggaatattgctggtttacca

SEQ ID NO: 78753 - DNA, 490 bp, Homo sapiens
ttgatcaaaagtatttactaagtgagtgacaaaaggcactagcaactttaaggattttgcctattagtatcatatggcatgtagctatcaagccagtttcgtttagttattttgtgttgccaagcatatgatacgtggtgtcacactgagcctttgggatcctttccctggatacataaccctagtagataatgttactgcaagatgtaatgaccaaatccaacctactgcaaatgttactatggaaatctcaatgcaaaagtagcctttgtgattttttttttaaaccgtctccataacagaacacttagaattattagccatttgctgcaaagtatttgttttaaaatgtctggcatatacaccactaacatttaaatgcccaacattcggtctatatgtgaaaaaactagaagaaaagccctgttggagttttgatgtagagtgcaataatacatcaataaaggtattttaaaatgaaaaaaaaaat

SEQ ID NO: 78754 - DNA, 3775 bp, Homo sapiens
atggagcggctgcgggacgtgcgggagcggctgcaggcgtgggagcgcgcgttccgacggcagcgcgggcggcgaccgagccaggacgacgtggaggcggcgccggaggagacccgcgcgctctaccgggagtaccgcactctgaagcgtaccacgggccaggccggcggcgggctccgcagctccgagtcgctccccgcggcggccgaagaggcgccagagccccgctgctgggggccccatctgaatcgggctgcgaccaagagtccacagcctacgccagggcggagccgccagggctcggtgccggactacgggcagcggctcaaggccaatctgaaaggcaccctgcaggccggaccagccctgggccgcagaccgtggcctctaggaagagcctcatctaaggcatccaccccaaagcccccaggtacagggcctgtcccctcctttgcagaaaaagtcagtgatgagcctccacagctccctgagccccagccaaggccaggccggctccagcatctgcaggcatccctgagccagcggctgggctccctagatcctggctggttacagcgatgtcacagtgaggtcccagattttctgggggcccccaaagcctgcaggcctgatctaggctcagaggaatcacaacttctgatccctggtgagtcggctgtccttggtcctggtgctggctcccagggcccagaggcttcagccttccaagaagtcagcatccgtgtggggagcccccagcccagcagcagtggaggcgagaagcggagatggaacgaggagccctgggagagccccgcacaggtccagcaggagagcagccaagctggacccccatcggagggggctggggctgtagcagttgaggaagaccctccaggggaacctgtacaggcacagccacctcagccctgcagcagcccatcgaaccccaggtaccacggactcagcccctccagtcaagctagggctgggaaggctgagggcacagcccccctgcacatcttccctcggctggcccgccatgacaggggcaattacgtacggctcaacatgaagcagaaacactacgtgcggggccgggcactccgtagcaggctcctccgcaagcaggcatggaagcagaagtggcggaagaaaggggagtgttttgggggtggtggtgccacagtcacaaccaaggagtcttgtttcctgaacgagcagttcgatcactgggcagcccagtgtccccggccagcaagtgaggaagacacagatgctgttgggcctgagccactggttccttcaccacaacctgtacctgaggtgcccagcctggaccccaccgtgctgccactctactccctggggccctcagggcagttggcagagacgccggctgaggtgttccaggccctggagcagctggggcaccaagcctttcgccctgggcaggagcgtgcagtcatgcggatcctgtctggcatctccacgctgctggtgctgcctacaggtgccggcaagtccctgtgctaccagctcccagcgctgctctacagccggcgcagcccctgcctcacgttggtcgtctctcccctgctgtcactcatggatgaccaggtgtctggcctgccaccgtgtctcaaggcggcctgcatacactcgggcatgaccaggaagcaacgggaatctgtcctgcagaagattcgggcagcccaggtacacgtgctgatgctgacacctgaggcactggtgggggcgggaggcctccctccagccgcacagctgcctccagttgcttttgcctgcattgatgaggcccactgcctctcccagtggtcccacaacttccggccctgctacctgcgcgtctgcaaggtgcttcgggagcgcatgggcgtgcactgcttcctgggcctcacagccacagccacacgccgcactgccagtgacgtggcacagcacctggctgtggctgaagagcctgacctccacgggccagccccagttcccaccaacctgcacctttccgtgtccatggacagggacacagaccaggcactgttgacgctgctgcaaggcaaacgttttcaaaacctcgattccattatcatttactgcaaccggcgcgaggacacagagcggatcgctgcgctcctccgaacctgcctgcacgcagcctgggtcccagggtctggaggtcgtgcccccaaaaccacagccgaggcctaccacgcgggcatgtgcagccgggaacggcggcgggtacagcgagccttcatgcagggccagttgcgggtggtggtggccacggtggcctttgggatggggctggaccggccagatgtgcgggctgtgctgcatctggggctgcccccaagcttcgagagctacgtgcaggccgtgggccgggccgggcgtgacgggcagcctgcccactgccacctcttcctgcagccccagggcgaagacctgcgagagctgcgcagacatgtgcacgccgacagcacggacttcctggctgtgaagaggctggtacagcgcgtgttcccagcctgcacctgcacctgcaccaggccgccctcggagcaggaaggggccgtgggtggggagaggcctgtgcccaagtacccccctcaagaggctgagcagcttagccaccaagcagccccaggacccagaagggtctgcatgggccatgagcgggcactcccaatacagcttaccgtacaggctttggacatgccggaggaggccatcgagactttgctgtgctacctggagctgcacccacaccactggctggagctgctggcgaccacctatacccattgccgtctgaactgccctgggggccctgcccagctccaggccctggcccacaggtgtccccctttggctgtgtgcttggcccagcagctgcctgaggacccagggcaaggcagcagctccgtggagtttgacatggtcaagctggtggactccatgggctgggagctggcctctgtgcggcgggctctctgccagctgcagtgggaccacgagcccaggacaggtgtgcggcgtgggacaggggtgcttgtggagttcagtgagctggccttccaccttcgcagcccgggggacctgaccgctgaggagaaggaccagatatgtgacttcctctatggccgtgtgcaggcccgggagcgccaggccctggcccgtctgcgcagaaccttccaggcctttcacagcgtagccttccccagctgcgggccctgcctggagcagcaggatgaggagcgcagcaccaggctcaaggacctgctcggccgctactttgaggaagaggaagggcaggagccgggaggcatggaggacgcacagggccccgagccagggcaggccagactccaggattgggaggaccaggtccgctgcgacatccgccagttcctgtccctgaggccagaggagaagttctccagcagggctgtggcccgcatcttccacggcatcggaagcccctgctacccggcccaggtgtacgggcaggaccgacgcttctggagaaaatacctgcacctgagcttccatgccctggtgggcctggccacggaagagctcctgcaggtggcccgctgactgcactgcattgggggatgtcgggtagagctggggttgtcagaggctagggcagtgactgaggacctgggcaaaacctgccacagggtgtgggaacgaggaggctccaaaatgcagaataaaaaatgctcactttgtttttatgggc

SEQ ID NO: 78755 - DNA, 3923 bp, Homo sapiens
gattgcgcgggcacatttctgtcttggtagcgattcgtcaatgtcgtctggtagtgccgtgtgcgggcgcgcgcgccgatggatgctgtgcttgcgggggagcggatgctggtgatgctggcgtgctaggcgatgaggacgcgcggctgtttccggacgggtcagccgcggtgtctgtgtcgacgcggaggcctatggtgcgggctgcccaggggccgaggggctgagggcgcggcccgcggctgacgcgttccctttacaggacgacgtggaggcggcgccggaggagacccgcgcgctctaccgggagtaccgcactctgaagcgtaccacgggccaggccggcggcgggctccgcagctccgagtcgctccccgcggcggccgaagaggcgccagagccccgctgctgggggccccatctgaatcgggctgcgaccaagagtccacagcctacgccagggcggagccgccagggctcggtgccggactacgggcagcggctcaaggccaatctgaaaggcaccctgcaggccggaccagccctgggccgcagaccgtggcctctaggaagagcctcatctaaggcatccaccccaaagcccccaggtacagggcctgtcccctcctttgcagaaaaagtcagtgatgagcctccacagctccctgagccccagccaaggccaggccggctccagcatctgcaggcatccctgagccagcggctgggctccctagatcctggctggttacagcgatgtcacagtgaggtcccagattttctgggggcccccaaagcctgcaggcctgatctaggctcagaggaatcacaacttctgatccctggtgagtcggctgtccttggtcctggtgctggctcccagggcccagaggcttcagccttccaagaagtcagcatccgtgtggggagcccccagcccagcagcagtggaggcgagaagcggagatggaacgaggagccctgggagagccccgcacaggtccagcaggagagcagccaagctggacccccatcggagggggctggggctgtagcagttgaggaagaccctccaggggaacctgtacaggcacagccacctcagccctgcagcagcccatcgaaccccaggtaccacggactcagcccctccagtcaagctagggctgggaaggctgagggcacagcccccctgcacatcttccctcggctggcccgccatgacaggggcaattacgtacggctcaacatgaagcagaaacactacgtgcggggccgggcactccgtagcaggctcctccgcaagcaggcatggaagcagaagtggcggaagaaaggggagtgttttgggggtggtggtgccacagtcacaaccaaggagtcttgtttcctgaacgagcagttcgatcactgggcagcccagtgtccccggccagcaagtgaggaagacacagatgctgttgggcctgagccactggttccttcaccacaacctgtacctgaggtgcccagcctggaccccaccgtgctgccactctactccctggggccctcagggcagttggcagagacgccggctgaggtgttccaggccctggagcagctggggcaccaagcctttcgccctgggcaggagcgtgcagtcatgcggatcctgtctggtgccggcaagtccctgtgctaccagctcccagcgctgctctacagccggcgcagcccctgcctcacgttggtcgtctctcccctgctgtcactcatggatgaccaggtgtctggcctgccaccgtgtctcaaggcggcctgcatacactcgggcatgaccaggaagcaacgggaatctgtcctgcagaagattcgggcagcccaggtacacgtgctgatgctgacacctgaggcactggtgggggcgggaggcctccctccagccgcacagctgcctccagttgcttttgcctgcattgatgaggcccactgcctctcccagtggtcccacaacttccggccctgctacctgcgcgtctgcaaggtgcttcgggagcgcatgggcgtgcactgcttcctgggcctcacagccacagccacacgccgcactgccagtgacgtggcacagcacctggctgtggctgaagagcctgacctccacgggccagccccagttcccaccaacctgcacctttccgtgtccatggacagggacacagaccaggcactgttgacgctgctgcaaggcaaacgttttcaaaacctcgattccattatcatttactgcaaccggcgcgaggacacagagcggatcgctgcgctcctccgaacctgcctgcacgcagcctgggtcccagggtctggaggtcgtgcccccaaaaccacagccgaggcctaccacgcgggcatgtgcagccgggaacggcggcgggtacagcgagccttcatgcagggccagttgcgggtggtggtggccacggtggcctttgggatggggctggaccggccagatgtgcgggctgtgctgcatctggggctgcccccaagcttcgagagctacgtgcaggccgtgggccgggccgggcgtgacgggcagcctgcccactgccacctcttcctgcagccccagggcgaagacctgcgagagctgcgcagacatgtgcacgccgacagcacggacttcctggctgtgaagaggctggtacagcgcgtgttcccagcctgcacctgcacctgcaccaggccgccctcggagcaggaaggggccgtgggtggggagaggcctgtgcccaagtacccccctcaagaggctgagcagcttagccaccaagcagccccaggacccagaagggtctgcatgggccatgagcgggcactcccaatacagcttaccgtacaggctttggacatgccggaggaggccatcgagactttgctgtgctacctggagctgcacccacaccactggctggagctgctggcgaccacctatacccattgccgtctgaactgccctgggggccctgcccagctccaggccctggcccacaggtgtccccctttggctgtgtgcttggcccagcagctgcctgaggacccagggcaaggcagcagctccgtggagtttgacatggtcaagctggtggactccatgggctgggagctggcctctgtgcggcgggctctctgccagctgcagtgggaccacgagcccaggacaggtgtgcggcgtgggacaggggtgcttgtggagttcagtgagctggccttccaccttcgcagcccgggggacctgaccgctgaggagaaggaccagatatgtgacttcctctatggccgtgtgcaggcccgggagcgccaggccctggcccgtctgcgcagaaccttccaggcctttcacagcgtagccttccccagctgcgggccctgcctggagcagcaggatgaggagcgcagcaccaggctcaaggacctgctcggccgctactttgaggaagaggaagggcaggagccgggaggcatggaggacgcacagggccccgagccagggcaggccagactccaggattgggaggaccaggtccgctgcgacatccgccagttcctgtccctgaggccagaggagaagttctccagcagggctgtggcccgcatcttccacggcatcggaagcccctgctacccggcccaggtgtacgggcaggaccgacgcttctggagaaaatacctgcacctgagcttccatgccctggtgggcctggccacggaagagctcctgcaggtggcccgctgactgcactgcattgggggatgtcgggtagagctggggttgtcagaggctagggcagtgactgaggacctgggcaaaacctgccacagggtgtgggaacgaggaggctccaaaatgcagaataaaaaatgctcactttgtttttatgggc

SEQ ID NO: 78756 - DNA, 4104 bp, Homo sapiens
gattgcgcgggcacatttctgtcttggtagcgattcgtcaatgtcgtctggtagtgccgtgtgcgggcgcgcgcgccgatggatgctgtgcttgcgggggagcggatgctggtgatgctggcgtgctaggcgatgaggacgcgcggctgtttccggacgggtcagccgcggtgtctgtgtcgacgcggaggcctatggtgcgggctgcccaggggccgaggggctgagggcgcggcccgcggctgacgcgttccctttacaggacgacgtggaggcggcgccggaggagacccgcgcgctctaccgggagtaccgcactctgaagcgtaccacgggccaggccggcggcgggctccgcagctccgagtcgctccccgcggcggccgaagaggcgccagagccccgctgctgggggccccatctgaatcgggctgcgaccaagagtccacagcctacgccagggcggagccgccagggctcggtgccggactacgggcagcggctcaaggccaatctgaaaggcaccctgcaggccggaccagccctgggccgcagaccgtggcctctaggaagagcctcatctaaggcatccaccccaaagcccccaggtacagggcctgtcccctcctttgcagaaaaagtcagtgatgagcctccacagctccctgagccccagccaaggccaggccggctccagcatctgcaggcatccctgagccagcggctgggctccctagatcctggctggttacagcgatgtcacagtgaggtcccagattttctgggggcccccaaagcctgcaggcctgatctaggctcagaggaatcacaacttctgatccctggtgagtcggctgtccttggtcctggtgctggctcccagggcccagaggcttcagccttccaagaagtcagcatccgtgtggggagcccccagcccagcagcagtggaggcgagaagcggagatggaacgaggagccctgggagagccccgcacaggtccagcaggagagcagccaagctggacccccatcggagggggctggggctgtagcagttgaggaagaccctccaggggaacctgtacaggcacagccacctcagccctgcagcagcccatcgaaccccaggtaccacggactcagcccctccagtcaagctagggctgggaaggctgagggcacagcccccctgcacatcttccctcggctggcccgccatgacaggggcaattacgtacggctcaacatgaagcagaaacactacgtgcggggccgggcactccgtagcaggctcctccgcaagcaggcatggaagcagaagtggcggaagaaaggggagtgttttgggggtggtggtgccacagtcacaaccaaggagtcttgtttcctgaacgagcagttcgatcactgggcagcccagtgtccccggccagcaagtgaggaagacacagatgctgttgggcctgagccactggttccttcaccacaacctgtacctgaggtgcccagcctggaccccaccgtgctgccactctactccctggggccctcagggcagttggcagagacgccggctgaggtgttccaggccctggagcagctggggcaccaagcctttcgccctgggcaggagcgtgcagtcatgcggatcctgtctggcatctccacgctgctggtgctgcctacaggtgccggcaagtccctgtgctaccagctcccagcgctgctctacagccggcgcagcccctgcctcacgttggtcgtctctcccctgctgtcactcatggatgaccaggtgtctggcctgccaccgtgtctcaaggcggcctgcatacactcgggcatgaccaggaagcaacgggaatctgtcctgcagaagattcgggcagcccaggtacacgtgctgatgctgacacctgaggcactggtgggggcgggaggcctccctccagccgcacagctgcctccagttgcttttgcctgcattgatgaggcccactgcctctcccagtggtcccacaacttccggccctgctacctgcgcgtctgcaaggtgcttcgggagcgcatgggcgtgcactgcttcctgggcctcacagccacagccacacgccgcactgccagtgacgtggcacagcacctggctgtggctgaagagcctgacctccacgggccagccccagttcccaccaacctgcacctttccgtgtccatggacagggacacagaccaggcactgttgacgctgctgcaaggcaaacgttttcaaaacctcgattccattatcatttactgcaaccggcgcgaggacacagagcggatcgctgcgctcctccgaacctgcctgcacgcagcctgggtcccagggtctggaggtcgtgcccccaaaaccacagccgaggcctaccacgcgggcatgtgcagccgggaacggcggcgggtacagcgagccttcatgcagggccagttgcgggtggtggtggccacggtggcctttgggatggggctggaccggccagatgtgcgggctgtgctgcatctggggctgcccccaagcttcgagagctacgtgcaggccgtgggccgggccgggcgtgacgggcagcctgcccactgccacctcttcctgcagccccagggcgaagacctgcgagagctgcgcagacatgtgcacgccgacagcacggacttcctggctgtgaagaggctggtacagcgcgtgttcccagcctgcacctgcacctgcaccaggccgccctcggagcaggaaggggccgtgggtggggagaggcctgtgcccaagtacccccctcaagaggctgagcagcttagccaccaagcagccccaggacccagaagggtctgcatgggccatgagcgggcactcccaatacagcttaccgtacaggctttggacatgccggaggaggggaacctggggtaagccacaggggtgtggaggggctgtccccgcgtccgctgagccctgctctgcccccagccatcgagactttgctgtgctacctggagctgcacccacaccactggctggagctgctggcgaccacctatacccattgccgtctgaactgccctgggggccctgcccagctccaggccctggcccacaggtaagcacgccctgcccagttggagacgaggttggagaatcagggctgttggccacatgtccctttttccctgggcacaggtgtccccctttggctgtgtgcttggcccagcagctgcctgaggacccagggcaaggcagcagctccgtggagtttgacatggtcaagctggtggactccatgggctgggagctggcctctgtgcggcgggctctctgccagctgcagtgggaccacgagcccaggacaggtgtgcggcgtgggacaggggtgcttgtggagttcagtgagctggccttccaccttcgcagcccgggggacctgaccgctgaggagaaggaccagatatgtgacttcctctatggccgtgtgcaggcccgggagcgccaggccctggcccgtctgcgcagaaccttccaggcctttcacagcgtagccttccccagctgcgggccctgcctggagcagcaggatgaggagcgcagcaccaggctcaaggacctgctcggccgctactttgaggaagaggaagggcaggagccgggaggcatggaggacgcacagggccccgagccagggcaggccagactccaggattgggaggaccaggtccgctgcgacatccgccagttcctgtccctgaggccagaggagaagttctccagcagggctgtggcccgcatcttccacggcatcggaagcccctgctacccggcccaggtgtacgggcaggaccgacgcttctggagaaaatacctgcacctgagcttccatgccctggtgggcctggccacggaagagctcctgcaggtggcccgctgactgcactgcattgggggatgtcgggtagagctggggttgtcagaggctagggcagtgactgaggacctgggcaaaacctgccacagggtgtgggaacgaggaggctccaaaatgcagaataaaaaatgctcactttgtttttatgggc

SEQ ID NO: 78757 - DNA, 4043 bp, Homo sapiens
gattgcgcgggcacatttctgtcttggtagcgattcgtcaatgtcgtctggtagtgccgtgtgcgggcgcgcgcgccgatggatgctgtgcttgcgggggagcggatgctggtgatgctggcgtgctaggcgatgaggacgcgcggctgtttccggacgggtcagccgcggtgtctgtgtcgacgcggaggcctatggtgcgggctgcccaggggccgaggggctgagggcgcggcccgcggctgacgcgttccctttacaggacgacgtggaggcggcgccggaggagacccgcgcgctctaccgggagtaccgcactctgaagcgtaccacgggccaggccggcggcgggctccgcagctccgagtcgctccccgcggcggccgaagaggcgccagagccccgctgctgggggccccatctgaatcgggctgcgaccaagagtccacagcctacgccagggcggagccgccagggctcggtgccggactacgggcagcggctcaaggccaatctgaaaggcaccctgcaggccggaccagccctgggccgcagaccgtggcctctaggaagagcctcatctaaggcatccaccccaaagcccccaggtacagggcctgtcccctcctttgcagaaaaagtcagtgatgagcctccacagctccctgagccccagccaaggccaggccggctccagcatctgcaggcatccctgagccagcggctgggctccctagatcctggctggttacagcgatgtcacagtgaggtcccagattttctgggggcccccaaagcctgcaggcctgatctaggctcagaggaatcacaacttctgatccctggtgagtcggctgtccttggtcctggtgctggctcccagggcccagaggcttcagccttccaagaagtcagcatccgtgtggggagcccccagcccagcagcagtggaggcgagaagcggagatggaacgaggagccctgggagagccccgcacaggtccagcaggagagcagccaagctggacccccatcggagggggctggggctgtagcagttgaggaagaccctccaggggaacctgtacaggcacagccacctcagccctgcagcagcccatcgaaccccaggtaccacggactcagcccctccagtcaagctagggctgggaaggctgagggcacagcccccctgcacatcttccctcggctggcccgccatgacaggggcaattacgtacggctcaacatgaagcagaaacactacgtgcggggccgggcactccgtagcaggctcctccgcaagcaggcatggaagcagaagtggcggaagaaaggggagtgttttgggggtggtggtgccacagtcacaaccaaggagtcttgtttcctgaacgagcagttcgatcactgggcagcccagtgtccccggccagcaagtgaggaagacacagatgctgttgggcctgagccactggttccttcaccacaacctgtacctgaggtgcccagcctggaccccaccgtgctgccactctactccctggggccctcagggcagttggcagagacgccggctgaggtgttccaggccctggagcagctggggcaccaagcctttcgccctgggcaggagcgtgcagtcatgcggatcctgtctggcatctccacgctgctggtgctgcctacaggtgccggcaagtccctgtgctaccagctcccagcgctgctctacagccggcgcagcccctgcctcacgttggtcgtctctcccctgctgtcactcatggatgaccaggtgtctggcctgccaccgtgtctcaaggcggcctgcatacactcgggcatgaccaggaagcaacgggaatctgtcctgcagaagattcgggcagcccaggtacacgtgctgatgctgacacctgaggcactggtgggggcgggaggcctccctccagccgcacagctgcctccagttgcttttgcctgcattgatgaggcccactgcctctcccagtggtcccacaacttccggccctgctacctgcgcgtctgcaaggtgcttcgggagcgcatgggcgtgcactgcttcctgggcctcacagccacagccacacgccgcactgccagtgacgtggcacagcacctggctgtggctgaagagcctgacctccacgggccagccccagttcccaccaacctgcacctttccgtgtccatggacagggacacagaccaggcactgttgacgctgctgcaaggcaaacgttttcaaaacctcgattccattatcatttactgcaaccggcgcgaggacacagagcggatcgctgcgctcctccgaacctgcctgcacgcagcctgggtcccagggtctggaggtgcggcatggacagagctggtgtccccgtggacccaccttgggcacacatggtcccatcccactgaccatctgcctgtcttccccaaaggtcgtgcccccaaaaccacagccgaggcctaccacgcgggcatgtgcagccgggaacggcggcgggtacagcgagccttcatgcagggccagttgcgggtggtggtggccacggtggcctttgggatggggctggaccggccagatgtgcgggctgtgctgcatctggggctgcccccaagcttcgagagctacgtgcaggccgtgggccgggccgggcgtgacgggcagcctgcccactgccacctcttcctgcagccccagggcgaagacctgcgagagctgcgcagacatgtgcacgccgacagcacggacttcctggctgtgaagaggctggtacagcgcgtgttcccagcctgcacctgcacctgcaccaggccgccctcggagcaggaaggggccgtgggtggggagaggcctgtgcccaagtacccccctcaagaggctgagcagcttagccaccaagcagccccaggacccagaagggtctgcatgggccatgagcgggcactcccaatacagcttaccgtacaggctttggacatgccggaggaggccatcgagactttgctgtgctacctggagctgcacccacaccactggctggagctgctggcgaccacctatacccattgccgtctgaactgccctgggggccctgcccagctccaggccctggcccacaggtgtccccctttggctgtgtgcttggcccagcagctgcctgaggacccagggcaaggcagcagctccgtggagtttgacatggtcaagctggtggactccatgggctgggagctggcctctgtgcggcgggctctctgccagctgcagtgggaccacgagcccaggacaggtgtgcggcgtgggacaggggtgcttgtggagttcagtgagctggccttccaccttcgcagcccgggggacctgaccgctgaggagaaggaccagatatgtgacttcctctatggccgtgtgcaggcccgggagcgccaggccctggcccgtctgcgcagaaccttccaggcctttcacagcgtagccttccccagctgcgggccctgcctggagcagcaggatgaggagcgcagcaccaggctcaaggacctgctcggccgctactttgaggaagaggaagggcaggagccgggaggcatggaggacgcacagggccccgagccagggcaggccagactccaggattgggaggaccaggtccgctgcgacatccgccagttcctgtccctgaggccagaggagaagttctccagcagggctgtggcccgcatcttccacggcatcggaagcccctgctacccggcccaggtgtacgggcaggaccgacgcttctggagaaaatacctgcacctgagcttccatgccctggtgggcctggccacggaagagctcctgcaggtggcccgctgactgcactgcattgggggatgtcgggtagagctggggttgtcagaggctagggcagtgactgaggacctgggcaaaacctgccacagggtgtgggaacgaggaggctccaaaatgcagaataaaaaatgctcactttgtttttatgggc

SEQ ID NO: 78758 - DNA, 3085 bp, Homo sapiens
gattgcgcgggcacatttctgtcttggtagcgattcgtcaatgtcgtctggtagtgccgtgtgcgggcgcgcgcgccgatggatgctgtgcttgcgggggagcggatgctggtgatgctggcgtgctaggcgatgaggacgcgcggctgtttccggacgggtcagccgcggtgtctgtgtcgacgcggaggcctatggtgcgggctgcccaggggccgaggggctgagggcgcggcccgcggctgacgcgttccctttacaggacgacgtggaggcggcgccggaggagacccgcgcgctctaccgggagtaccgcactctgaagcgtaccacgggccaggccggcggcgggctccgcagctccgagtcgctccccgcggcggccgaagaggcgccagagccccgctgctgggggccccatctgaatcgggctgcgaccaagagtccacagcctacgccagggcggagccgccagggctcggtgccggactacgggcagcggctcaaggccaatctgaaaggcaccctgcaggccggaccagccctgggccgcagaccgtggcctctaggaagagcctcatctaaggcatccaccccaaagcccccaggtacagggcctgtcccctcctttgcagaaaaagtcagtgatgagcctccacagctccctgagccccagccaaggccaggccggctccagcatctgcaggcatccctgagccagcggctgggctccctagatcctggctggttacagcgatgtcacagtgaggtcccagattttctgggggcccccaaagcctgcaggcctgatctaggctcagaggaatcacaacttctgatccctggtgagtcggctgtccttggtcctggtgctggctcccagggcccagaggcttcagccttccaagaagtcagcatccgtgtggggagcccccagcccagcagcagtggaggcgagaagcggagatggaacgaggagccctgggagagccccgcacaggtccagcaggagagcagccaagctggacccccatcggagggggctggggctgtagcagttgaggaagaccctccaggggaacctgtacaggcacagccacctcagccctgcagcagcccatcgaaccccaggtaccacggactcagcccctccagtcaagctagggctgggaaggctgagggcacagcccccctgcacatcttccctcggctggcccgccatgacaggggcaattacgtacggctcaacatgaagcagaaacactacgtgcggggccgggcactccgtagcaggctcctccgcaagcaggcatggaagcagaagtggcggaagaaaggggagtgttttgggggtggtggtgccacagtcacaaccaaggagtcttgtttcctgaacgagcagttcgatcactgggcagcccagtgtccccggccagcaagtgaggaagacacagatgctgttgggcctgagccactggttccttcaccacaacctgtacctgaggtgcccagcctggaccccaccgtgctgccactctactccctggggccctcagggcagttggcagagacgccggctgaggtgttccaggccctggagcagctggggcaccaagcctttcgccctgggcaggagcgtgcagtcatgcggatcctgtctggcatctccacgctgctggtgctgcctacaggtgccggcaagtccctgtgctaccagctcccagcgctgctctacagccggcgcagcccctgcctcacgttggtcgtctctcccctgctgtcactcatggatgaccaggtgtctggcctgccaccgtgtctcaaggcggcctgcatacactcgggcatgaccaggaagcaacgggaatctgtcctgcagaagattcgggcagcccaggtacacgtgctgatgctgacacctgaggcactggtgggggcgggaggcctccctccagccgcacagctgcctccagttgcttttgcctgcattgatgaggcccactgcctctcccagtggtcccacaacttccggccctgctacctgcgcgtctgcaaggtgcttcgggagcgcatgggcgtgcactgcttcctgggcctcacagccacagccacacgccgcactgccagtgacgtggcacagcacctggctgtggctgaagagcctgacctccacgggccagccccagttcccaccaacctgcacctttccgtgtccatggacagggacacagaccaggcactgttgacgctgctgcaaggcaaacgttttcaaaacctcgattccattatcatttactgcaaccggcgcgaggacacagagcggatcgctgcgctcctccgaacctgcctgcacgcagcctgggtcccagggtctggaggtcgtgcccccaaaaccacagccgaggcctaccacgcgggcatgtgcagccgggaacggcggcgggtacagcgagccttcatgcagggccagttgcgggtggtggtggccacggtggcctttgggatggggctggaccggccagatgtgcgggctgtgctgcatctggggctgcccccaagcttcgagagctacgtgcaggccgtgggccgggccgggcgtgacgggcagcctgcccactgccacctcttcctgcagccccagggcgaagacctgcgagagctgcgcagacatgtgcacgccgacagcacggacttcctggctgtgaagaggctggtacagcgcgtgttcccagcctgcacctgcacctgcaccaggccgccctcggagcaggaaggggccgtgggtggggagaggcctgtgcccaagtacccccctcaagaggctgagcagcttagccaccaagcagccccaggacccagaagggtctgcatgggccatgagcgggcactcccaatacagcttaccgtacaggctttggacatgccggaggaggggaacctggggtaagccacaggggtgtggaggggctgtccccgcgtccgctgagccctgctctgcccccagccatcgagactttgctgtgctacctggaacgaggaggctccaaaatgcagaataaaaaatgctcactttgtttttatgggc

SEQ ID NO: 78759 - DNA, 392 bp, Homo sapiens
gcgggccctgcctggagcagcaggatgaggagcgcagcaccaggctcaaggacctgctcggccgctactttgaggaagaggaagggcaggagccgggaggcatggaggacgcacagggccccgagccagggcaggccagagtgagtgcagtaaggccaggcagctcatcggggttgcaggttccctgggctgcatggggcttgctctgtggatgcagtgccacgggagctcagaggaagcctgatgtgcctgtccacacagctccaggattgggaggaccaggtccgctgcgacatccgccagttcctgtccctgaggccagaggagaagttctccagcagggctgtggcccgcatcttccacggcatcggtgaggcctgggaggccccacc

SEQ ID NO: 78760 - DNA, 741 bp, Homo sapiens
acataggctggtagaggcgggtggtaaatcagacgccggctgaggtgttccaggccctggagcagctggggcaccaagcctttcgccctgggcaggagcgtgcagtcatgcggatcctgtctggcatctccacgctgctggtgctgcctacaggtgccggcaagtccctgtgctaccagctcccagcgctgctctacagccggcgcagcccctgcctcacgttggtcgtctctcccctgctgtcactcatggatgaccaggtgtctggcctgccaccgtgtctcaaggcggcctgcatacactcgggcatgaccaggaagcaacgggaatctgtcctgcagaagattcgggcagcccaggtacacgtgctgatgctgacacctgaggcactggtgggggcgggaggcctccctccagccgcacagctgcctccagttgcttttgcctgcattgatgaggcccactgcctctcccagtggtcccacaacttccggccctgctacctgcgcgtctgcaaggtgcttcgggagcgcatgggcgtgcactgcttcctgggcctcacagccacagccacacgccgcactgccagtgacgtggcacagcacctggctgtggctgaagagcctgacctccacgggccagccccagttcccaccaacctgcacctttccgtgtccatggacagggacacagaccaggcctgttgagctgtgaagaaacgtttcaaaacctcaatcctat

SEQ ID NO: 78761 - DNA, 3953 bp, Homo sapiens
gattgcgcgggcacatttctgtcttggtagcgattcgtcaatgtcgtctggtagtgccgtgtgcgggcgcgcgcgccgatggatgctgtgcttgcgggggagcggatgctggtgatgctggcgtgctaggcgatgaggacgcgcggctgtttccggacgggtcagccgcggtgtctgtgtcgacgcggaggcctatggtgcgggctgcccaggggccgaggggctgagggcgcggcccgcggctgacgcgttccctttacaggacgacgtggaggcggcgccggaggagacccgcgcgctctaccgggagtaccgcactctgaagcgtaccacgggccaggccggcggcgggctccgcagctccgagtcgctccccgcggcggccgaagaggcgccagagccccgctgctgggggccccatctgaatcgggctgcgaccaagagtccacagcctacgccagggcggagccgccagggctcggtgccggactacgggcagcggctcaaggccaatctgaaaggcaccctgcaggccggaccagccctgggccgcagaccgtggcctctaggaagagcctcatctaaggcatccaccccaaagcccccaggtacagggcctgtcccctcctttgcagaaaaagtcagtgatgagcctccacagctccctgagccccagccaaggccaggccggctccagcatctgcaggcatccctgagccagcggctgggctccctagatcctggctggttacagcgatgtcacagtgaggtcccagattttctgggggcccccaaagcctgcaggcctgatctaggctcagaggaatcacaacttctgatccctggtgagtcggctgtccttggtcctggtgctggctcccagggcccagaggcttcagccttccaagaagtcagcatccgtgtggggagcccccagcccagcagcagtggaggcgagaagcggagatggaacgaggagccctgggagagccccgcacaggtccagcaggagagcagccaagctggacccccatcggagggggctggggctgtagcagttgaggaagaccctccaggggaacctgtacaggcacagccacctcagccctgcagcagcccatcgaaccccaggtaccacggactcagcccctccagtcaagctagggctgggaaggctgagggcacagcccccctgcacatcttccctcggctggcccgccatgacaggggcaattacgtacggctcaacatgaagcagaaacactacgtgcggggccgggcactccgtagcaggctcctccgcaagcaggcatggaagcagaagtggcggaagaaaggggagtgttttgggggtggtggtgccacagtcacaaccaaggagtcttgtttcctgaacgagcagttcgatcactgggcagcccagtgtccccggccagcaagtgaggaagacacagatgctgttgggcctgagccactggttccttcaccacaacctgtacctgaggtgcccagcctggaccccaccgtgctgccactctactccctggggccctcagggcagttggcagagacgccggctgaggtgttccaggccctggagcagctggggcaccaagcctttcgccctgggcaggagcgtgcagtcatgcggatcctgtctggcatctccacgctgctggtgctgcctacaggtgccggcaagtccctgtgctaccagctcccagcgctgctctacagccggcgcagcccctgcctcacgttggtcgtctctcccctgctgtcactcatggatgaccaggtgtctggcctgccaccgtgtctcaaggcggcctgcatacactcgggcatgaccaggaagcaacgggaatctgtcctgcagaagattcgggcagcccaggtacacgtgctgatgctgacacctgaggcactggtgggggcgggaggcctccctccagccgcacagctgcctccagttgcttttgcctgcattgatgaggcccactgcctctcccagtggtcccacaacttccggccctgctacctgcgcgtctgcaaggtgcttcgggagcgcatgggcgtgcactgcttcctgggcctcacagccacagccacacgccgcactgccagtgacgtggcacagcacctggctgtggctgaagagcctgacctccacgggccagccccagttcccaccaacctgcacctttccgtgtccatggacagggacacagaccaggcactgttgacgctgctgcaaggcaaacgttttcaaaacctcgattccattatcatttactgcaaccggcgcgaggacacagagcggatcgctgcgctcctccgaacctgcctgcacgcagcctgggtcccagggtctggaggtcgtgcccccaaaaccacagccgaggcctaccacgcgggcatgtgcagccgggaacggcggcgggtacagcgagccttcatgcagggccagttgcgggtggtggtggccacggtggcctttgggatggggctggaccggccagatgtgcgggctgtgctgcatctggggctgcccccaagcttcgagagctacgtgcaggccgtgggccgggccgggcgtgacgggcagcctgcccactgccacctcttcctgcagccccagggcgaagacctgcgagagctgcgcagacatgtgcacgccgacagcacggacttcctggctgtgaagaggctggtacagcgcgtgttcccagcctgcacctgcacctgcaccaggccgccctcggagcaggaaggggccgtgggtggggagaggcctgtgcccaagtacccccctcaagaggctgagcagcttagccaccaagcagccccaggacccagaagggtctgcatgggccatgagcgggcactcccaatacagcttaccgtacaggctttggacatgccggaggaggccatcgagactttgctgtgctacctggagctgcacccacaccactggctggagctgctggcgaccacctatacccattgccgtctgaactgccctgggggccctgcccagctccaggccctggcccacaggtgtccccctttggctgtgtgcttggcccagcagctgcctgaggacccagggcaaggcagcagctccgtggagtttgacatggtcaagctggtggactccatgggctgggagctggcctctgtgcggcgggctctctgccagctgcagtgggaccacgagcccaggacaggtgtgcggcgtgggacaggggtgcttgtggagttcagtgagctggccttccaccttcgcagcccgggggacctgaccgctgaggagaaggaccagatatgtgacttcctctatggccgtgtgcaggcccgggagcgccaggccctggcccgtctgcgcagaaccttccaggcctttcacagcgtagccttccccagctgcgggccctgcctggagcagcaggatgaggagcgcagcaccaggctcaaggacctgctcggccgctactttgaggaagaggaagggcaggagccgggaggcatggaggacgcacagggccccgagccagggcaggccagactccaggattgggaggaccaggtccgctgcgacatccgccagttcctgtccctgaggccagaggagaagttctccagcagggctgtggcccgcatcttccacggcatcggaagcccctgctacccggcccaggtgtacgggcaggaccgacgcttctggagaaaatacctgcacctgagcttccatgccctggtgggcctggccacggaagagctcctgcaggtggcccgctgactgcactgcattgggggatgtcgggtagagctggggttgtcagaggctagggcagtgactgaggacctgggcaaaacctgccacagggtgtgggaacgaggaggctccaaaatgcagaataaaaaatgctcactttgtttttatgggc

SEQ ID NO: 78762 - DNA, 2220 bp, Homo sapiens
aaggctagtacgagactggtgtgaatcggccgagcttcccctgctgttaatcatggcatgaccaggtgtctggcctgccaccgtgtctcaaggcggcctgcatacactcgggcatgaccaggaagcaacgggaatctgtcctgcagaagattcgggcagcccaggtacacgtgctgatgctgacacctgaggcactggtgggggcgggaggcctccctccagccgcacagctgcctccagttgcttttgcctgcattgatgaggcccactgcctctcccagtggtcccacaacttccggccctgctacctgcgcgtctgcaaggtgcttcgggagcgcatgggcgtgcactgcttcctgggcctcacagccacagccacacgccgcactgccagtgacgtggcacagcacctggctgtggctgaagagcctgacctccacgggccagccccagttcccaccaacctgcacctttccgtgtccatggacagggacacagaccaggcactgttgacgctgctgcaaggcaaacgttttcaaaacctcgattccattatcatttactgcaaccggcgcgaggacacagagcggatcgctgcgctcctccgaacctgcctgcacgcagcctgggtcccagggtctggaggtcgtgcccccaaaaccacagccgaggcctaccacgcgggcatgtgcagccgggaacggcggcgggtacagcgagccttcatgcagggccagttgcgggtggtggtggccacggtggcctttgggatggggctggaccggccagatgtgcgggctgtgctgcatctggggctgcccccaagcttcgagagctacgtgcaggccgtgggccgggccgggcgtgacgggcagcctgcccactgccacctcttcctgcagccccagggcgaagacctgcgagagctgcgcagacatgtgcacgccgacagcacggacttcctggctgtgaagaggctggtacagcgcgtgttcccagcctgcacctgcacctgcaccaggccgccctcggagcaggaaggggccgtgggtggggagaggcctgtgcccaagtacccccctcaagaggctgagcagcttagccaccaagcagccccaggacccagaagggtctgcatgggccatgagcgggcactcccaatacagcttaccgtacaggctttggacatgccggaggaggccatcgagactttgctgtgctacctggagctgcacccacaccactggctggagctgctggcgaccacctatacccattgccgtctgaactgccctgggggccctgcccagctccaggccctggcccacaggtgtccccctttggctgtgtgcttggcccagcagctgcctgaggacccagggcaaggcagcagctccgtggagtttgacatggtcaagctggtggactccatgggctgggagctggcctctgtgcggcgggctctctgccagctgcagtgggaccacgagcccaggacaggtgtgcggcgtgggacaggggtgcttgtggagttcagtgagctggccttccaccttcgcagcccgggggacctgaccgctgaggagaaggaccagatatgtgacttcctctatggccgtgtgcaggcccgggagcgccaggccctggcccgtctgcgcagaaccttccaggcctttcacagcgtagccttccccagctgcgggccctgcctggagcagcaggatgaggagcgcagcaccaggctcaaggacctgctcggccgctactttgaggaagaggaagggcaggagccgggaggcatggaggacgcacagggccccgagccagggcaggccagactccaggattgggaggaccaggtccgctgcgacatccgccagttcctgtccctgaggccagaggagaagttctccagcagggctgtggcccgcatcttccacggcatcggaagcccctgctacccggcccaggtgtacgggcaggaccgacgcttctggagaaaatacctgcacctgagcttccatgccctggtgggcctggccacggaagagctcctgcaggtggcccgctgactgcactgcattgggggatgtcgggtagagctggggttgtcagaggctagggcagtgactgaggacctgggcaaaacctgccacagggtgtgggaacgaggaggctccaaaatgcagaataaaaaatgctcactttgtttttatgggc

SEQ ID NO: 78763 - DNA, 3514 bp, Homo sapiens
gattgcgcgggcacatttctgtcttggtagcgattcgtcaatgtcgtctggtagtgccgtgtgcgggcgcgcgcgccgatggatgctgtgcttgcgggggagcggatgctggtgatgctggcgtgctaggcgatgaggacgcgcggctgtttccggacgggtcagccgcggtgtctgtgtcgacgcggaggcctatggtgcgggctgcccaggggccgaggggctgagggcgcggcccgcggctgacgcgttccctttacaggacgacgtggaggcggcgccggaggagacccgcgcgctctaccgggagtaccgcactctgaagcgtaccacgggccaggccggcggcgggctccgcagctccgagtcgctccccgcggcggccgaagaggcgccagagccccgctgctgggggccccatctgaatcgggctgcgaccaagagtccacagcctacgccagggcggagccgccagggctcggtgccggactacgggcagcggctcaaggccaatctgaaaggcaccctgcaggccggaccagccctgggccgcagaccgtggcctctaggaagagcctcatctaaggcatccaccccaaagcccccaggtacagggcctgtcccctcctttgcagaaaaagtcagtgatgagcctccacagctccctgagccccagccaaggccaggccggctccagcatctgcaggcatccctgagccagcggctgggctccctagatcctggctggttacagcgatgtcacagtgaggtcccagattttctgggggcccccaaagcctgcaggcctgatctaggctcagaggaatcacaacttctgatccctggtgagtcggctgtccttggtcctggtgctggctcccagggcccagaggcttcagccttccaagaagtcagcatccgtgtggggagcccccagcccagcagcagtggaggcgagaagcggagatggaacgaggagccctgggagagccccgcacaggtccagcaggagagcagccaagctggacccccatcggagggggctggggctgtagcagttgaggaagaccctccaggggaacctgtacaggcacagccacctcagccctgcagcagcccatcgaaccccaggtaccacggactcagcccctccagtcaagctagggctgggaaggctgagggcacagcccccctgcacatcttccctcggctggcccgccatgacaggggcaattacgtacggctcaacatgaagcagaaacactacgtgcggggccgggcactccgtagcaggctcctccgcaagcaggcatggaagcagaagtggcggaagaaaggggagtgttttgggggtggtggtgccacagtcacaaccaaggagtcttgtttcctgaacgagcagttcgatcactgggcagcccagtgtccccggccagcaagtgaggaagacacagatgctgttgggcctgagccactggttccttcaccacaacctgtacctgaggtgcccagcctggaccccaccgtgctgccactctactccctggggccctcagggcagttggcagagacgccggctgaggtgttccaggccctggagcagctggggcaccaagcctttcgccctgggcaggagcgtgcagtcatgcggatcctgtctggcatctccacgctgctggtgctgcctacaggtgccggcaagtccctgtgctaccagctcccagcgctgctctacagccggcgcagcccctgcctcacgttggtcgtctctcccctgctgtcactcatggatgaccaggtgtctggcctgccaccgtgtctcaaggcggcctgcatacactcgggcatgaccaggaagcaacgggaatctgtcctgcagaagattcgggcagcccaggtacacgtgctgatgctgacacctgaggcactggtgggggcgggaggcctccctccagccgcacagctgcctccagttgcttttgcctgcattgatgaggcccactgcctctcccagtggtcccacaacttccggccctgctacctgcgcgtctgcaaggtgcttcgggagcgcatgggcgtgcactgcttcctgggcctcacagccacagccacacgccgcactgccagtgacgtggcacagcacctggctgtggctgaagagcctgacctccacgggccagccccagttcccaccaacctgcacctttccgtgtccatggacagggacacagaccaggcactgttgacgctgctgcaaggcaaacgttttcaaaacctcgattccattatcatttactgcaaccggcgcgaggacacagagcggatcgctgcgctcctccgaacggaacctggggtaagccacaggggtgtggaggggctgtccccgcgtccgctgagccctgctctgcccccagccatcgagactttgctgtgctacctggagctgcacccacaccactggctggagctgctggcgaccacctatacccattgccgtctgaactgccctgggggccctgcccagctccaggccctggcccacaggtaagcacgccctgcccagttggagacgaggttggagaatcagggctgttggccacatgtccctttttccctgggcacaggtgtccccctttggctgtgtgcttggcccagcagctgcctgaggacccagggcaaggcagcagctccgtggagtttgacatggtcaagctggtggactccatgggctgggagctggcctctgtgcggcgggctctctgccagctgcagtgggaccacgagcccaggacaggtgtgcggcgtgggacaggggtgcttgtggagttcagtgagctggccttccaccttcgcagcccgggggacctgaccgctgaggagaaggaccagatatgtgacttcctctatggccgtgtgcaggcccgggagcgccaggccctggcccgtctgcgcagaaccttccaggcctttcacagcgtagccttccccagctgcgggccctgcctggagcagcaggatgaggagcgcagcaccaggctcaaggacctgctcggccgctactttgaggaagaggaagggcaggagccgggaggcatggaggacgcacagggccccgagccagggcaggccagactccaggattgggaggaccaggtccgctgcgacatccgccagttcctgtccctgaggccagaggagaagttctccagcagggctgtggcccgcatcttccacggcatcggaagcccctgctacccggcccaggtgtacgggcaggaccgacgcttctggagaaaatacctgcacctgagcttccatgccctggtgggcctggccacggaagagctcctgcaggtggcccgctgactgcactgcattgggggatgtcgggtagagctggggttgtcagaggctagggcagtgactgaggacctgggcaaaacctgccacagggtgtgggaacgaggaggctccaaaatgcagaataaaaaatgctcactttgtttttatgggc

SEQ ID NO: 78764 - DNA, 831 bp, Homo sapiens
gattgcgcgggcacatttctgtcttggtagcgattcgtcaatgtcgtctggtagtgccgtgtgcgggcgcgcgcgccgatggatgctgtgcttgcgggggagcggatgctggtgatgctggcgtgctaggcgatgaggacgcgcggctgtttccggacgggtcagccgcggtgtctgtgtcgacgcggaggcctatggtgcgggctgcccaggggccgaggggctgagggcgcggcccgcggctgacgcgttccctttacaggacgacgtggaggcggcgccggaggagacccgcgcgctctaccgggagtaccgcactctgaagcgtaccacgggccaggccggcggcgggctccgcagctccgagtcgctccccgcggcggccgaagaggcgccagagccccgctgctgggggccccatctgaatcgggctgcgaccaagagtccacagcctacgccagggcggagccgccagggctcggtgccggactacgggcagcggctcaaggccaatctgaaaggcaccctgcaggccggaccagccctgggccgcagaccgtggcctctaggaagagcctcatctaaggcatccaccccaaagcccccaggtacagggcctgtcccctcctttgcagaaaaagtcagtgatgagcctccacaagctcctgcaggtggcccgctgactgcactgcattgggggatgtcgggtagagctggggttgtcagaggctagggcagtgactgaggacctgggcaaaacctgccacagggtgtgggaacgaggaggctccaaaatgcagaataaaaaatgctcactttgtttttatgggc

SEQ ID NO: 78765 - DNA, 611 bp, Homo sapiens
agaggatccccgtctgtgactacccatttgagtgaaagaaaatcttgttaacgtctgttagtcattatgggttctcttaacttttacatggtcaaagtaagcttgtagtaatattgttttacaatttagatagatgagtaacaaccaaagttagcaaaaatatctctatgtcatttgtaaaagttgaagtttatagagactgtgacttcaataaatcatgtaaaaataaaaacattgacctatgatttttaaagatactaggataattatattgattactaatgaatctctgatgaaaataaattatattgcatatgtaatctcttgacattaatgaattattttctgttctattatatgattatttgtgcttcttttctaggaatggaaagaacgttatggacacaatagagaagattccactaggaacagaaatattcatactgaccccaaagagtcaaacttctcagatgttaataccaaccgttgtaagtagtttatcttctagttcacttggaaattgttttcttatgctttcttgcatagagattgagtgttagaatacacacatccagaaatgcctctgtagcattatacaatggtatatctgc

SEQ ID NO: 78766 - DNA, 1582 bp, Homo sapiens
tggtcagagtgcacattctttagcactactcctgtcttatccctctttgcggtcttcatacagctggcagaaaaaacatataattatatttatatcgagattgcctgcttcctttccatcttcttcctaagtatctgtgtttattctactgtgttcaggattcgtgtatttaactattattatttggcctcacatcaccagactgatgcttatagccttcttttcagtggcatgctattttgccgtttgacacctcctttatgtcttaatttcttgggtttgacccatatggattcatctatctctcacaagaatactcaaccaactgcttatacatctatggattctatatatattatcctatgttggtggtaattctctgcattgctacttattttagtttgggaacccgttgtttgaatctgctcggtttccagcagtttatgggagatgatgatatgacatcagacttagttaatgaaggaaaagaattaatcagaaaagagaagagaaaaaggcaaaggcaagaagaaggtgaaaatcgaagaagagaatggaaagaacgttatggacacaatagagaagattccactaggaacagaaatattcatactgaccccaaagagtcaaacttctcagatgttaataccaaccgttctgcattcaaatataccagggctaataacaggactgaaagggaccggatagaacttctccaagatgcagaacctttggattttaatgcagaaacattcactgatgatcctcttgaatctgaatcaggaaggtatcagcctggtggacgatatctctcgatgtctcgcagtgacatatttaatgatgtttaaagtctgaaaaagtttgtgggaccactaaccaaggtcaacacatcagttcagtcttgatgaacatctgtgtaccctagaatttcctctatacacagtgaaaagtgtcaagataacaaaaaaggcactgagaattaattatatcttaggaataatagtttaatgtgcattgaatagagtatcacctttttcaacaagatttattacatatcatttcctaagcatctgccttagaaatacagttacagtggaaggactttaagaaagatcaacatatgttaagaacatgcagttcagtttgtttcagattaattttttttcaagagagttattttaaagattcaaggaagccataagtcatactaaataatattatatacagttttgttattgtgacttacatttttgttacttctaaaaagtatattcaacctgtatttcccaaagaaatgtaagtgaatggagacctcaaataataactgtattcataaaactcgtgtcttaaaacaaggcttacttactagacataactgaatgtaaaaagtgctttttcaaatctgtttgcaaactcgtgggggatttttgcatgtataagattaagattatacttcaagtgatgcgtgtctgtgtatttagcatgtgtactataatcaggtgatatagtattccttcagtctttgtagtaactggatttttttatgcttctggtattgctttataaaagattttcatttcag

SEQ ID NO: 78767 - DNA, 1619 bp, Homo sapiens
tggtcagagtgcacattctttagcactactcctgtcttatccctctttgcggtcttcatacagctggcagaaaaaacatataattatatttatatcgagattgcctgcttcctttccatcttcttcctaagtatctgtgtttattctactgtgttcaggattcgtgtatttaactattattatttggcctcacatcaccagactgatgcttatagccttcttttcagtggcatgctattttgccgtttgacacctcctttatgtcttaatttcttgggtttgacccatatggattcatctatctctcacaagaatactcaaccaactgcttatacatctattatgggttccatgaaagttttatcctttattgcagatggattctatatatattatcctatgttggtggtaattctctgcattgctacttattttagtttgggaacccgttgtttgaatctgctcggtttccagcagtttatgggagatgatgatatgacatcagacttagttaatgaaggaaaagaattaatcagaaaagagaagagaaaaaggcaaaggcaagaagaaggtgaaaatcgaagaagagaatggaaagaacgttatggacacaatagagaagattccactaggaacagaaatattcatactgaccccaaagagtcaaacttctcagatgttaataccaaccgttctgcattcaaatataccagggctaataacaggactgaaagggaccggatagaacttctccaagatgcagaacctttggattttaatgcagaaacattcactgatgatcctcttgaatctgaatcaggaaggtatcagcctggtggacgatatctctcgatgtctcgcagtgacatatttaatgatgtttaaagtctgaaaaagtttgtgggaccactaaccaaggtcaacacatcagttcagtcttgatgaacatctgtgtaccctagaatttcctctatacacagtgaaaagtgtcaagataacaaaaaaggcactgagaattaattatatcttaggaataatagtttaatgtgcattgaatagagtatcacctttttcaacaagatttattacatatcatttcctaagcatctgccttagaaatacagttacagtggaaggactttaagaaagatcaacatatgttaagaacatgcagttcagtttgtttcagattaattttttttcaagagagttattttaaagattcaaggaagccataagtcatactaaataatattatatacagttttgttattgtgacttacatttttgttacttctaaaaagtatattcaacctgtatttcccaaagaaatgtaagtgaatggagacctcaaataataactgtattcataaaactcgtgtcttaaaacaaggcttacttactagacataactgaatgtaaaaagtgctttttcaaatctgtttgcaaactcgtgggggatttttgcatgtataagattaagattatacttcaagtgatgcgtgtctgtgtatttagcatgtgtactataatcaggtgatatagtattccttcagtctttgtagtaactggatttttttatgcttctggtattgctttataaaagattttcatttcag

SEQ ID NO: 78768 - DNA, 237 bp, Homo sapiens
aagttttacatattatcatccttgccatgtgttatatatcctgatactttcttttctattcgattcctttgttaaaaaaaatactggttgtggcctactaaatttatttcaaaacccattggtgggtcgtaactttcatcttgaaaaccacatcctatagtgaaggtagaacttgaagagcatcaaactgaagttcttgggaactagactgattccaaatacaagaattatggctcc

SEQ ID NO: 78769 - DNA, 307 bp, Homo sapiens
agatacagtgagtcaaagaagcagtatacaaaccagtctgatcccatgcatggatgcacacctgtgtgtacaaaatattctgaaagaaaatacgctgtaacatcaactatggttatcgctgagaggtgagatcaagagtaatttttattttcttctttatgcttatctttaacacatttcacacaataatcatgtattattttatcaaggaaaacataattaaaataaatttgtgtttggtgctaggatatttggaatcttaagaaattccaggaaaccagaacaggtgaaactttattagataaag

SEQ ID NO: 78770 - DNA, 613 bp, Homo sapiens
caagaatacaatttttggggggaaattagagttactaatttaactgggtcatagagatgtattattactgtgatttctaaagaagattatgttttctttgaattgtgctcttttcagattttgagatttttaataattcactggaagtgtgacatagatgtatcaaagggagcattgctagaagggcagctagtgatttccatagaaggattaaattctaagcaccaggcaaatgctcttcattgtgtaacaactagtaagtagagaaagaaaaaatattttctatctcttttgtcatggtttatgtcgtagcttatttaaaaatttcaattagaatcttttatcatgttattccaggattgttccataattataaaatgaaatgattatgtaataagtgtctggtggtagatttacaaatgtatcatacaggaaaggtgagtagttgaatgactcttaccatagattatttattttactggtttaagttaaaattgctcagaaacaatcttatttttctcttgattttaatctactttgtcacagctaaattatattacattgagctttacctactttttttttcccaagtctaaattttggcagtagcaaa

SEQ ID NO: 78771 - DNA, 1016 bp, Homo sapiens
  misc_feature (84)..(84): n is a, c, g, or t
gcaggctgtactccccgggatttatgggatggaagggatgggctcgcgctgccgggcgtgggcgtggctcgggcgtgggcactngcggagttccaagcccgggctgaggagggggcggcggcggcggcggcggcggcggcgggcgggtacccttcgactgggcgttgccgctgttccctgcgcggcatggaggggacggccgtggccgtgttcgaggtgatgctgggaagggagagaagggggaggacactttctgaggagacgggctttgtgaggagaccgcgaagtttgggcagaggggtcgggcgtcgcctaagattttgagatttttaataattcactggaagtgtgacatagatgtatcaaagggagcattgctagaagggcagctagtgatttccatagaaggattaaattctaagcaccaggcaaatgctcttcattgtgtaacaactagatggagtctcactctgttacccaggccggagtgcagtggcgcagtctcggctcactgcaacctccacctcccaggttcaagtgattctcatgcctcagtcccccgagtagctgggattacagatgcccaccaccatgcctggctaattatggagttgcttctgcaggaagcctttttggtggcatggtcctcaagaagttcctaaaaggtcagatttcatttcagtgtaaaggtaaatggaatcctctccacagagatctttggggtggagaatgaacccactttgaaccttgggaatggaattgctcttttggtcgactcccagcattatgtgagagaccaaattttggtacaattgaatcacactgcagcagaattcaccctgtgctaggacatccagtaatgcttttcatccctgaagacgtggctggcatggacttgttgggagaactgatactgactccagcagctgcactgtgccccagcccaaaggtttcttccaaccagcttaacaggatttcttcagtttccatatccttttgatgaaaagttccatcca

SEQ ID NO: 78772 - DNA, 2065 bp, Homo sapiens
  misc_feature (84)..(84): n is a, c, g, or t
  misc_feature (2057)..(2057): n is a, c, g, or t
gcaggctgtactccccgggatttatgggatggaagggatgggctcgcgctgccgggcgtgggcgtggctcgggcgtgggcactngcggagttccaagcccgggctgaggagggggcggcggcggcggcggcggcggcggcgggcgggtacccttcgactgggcgttgccgctgttccctgcgcggcatggaggggacggccgtggccgtgttcgattttgagatttttaataattcactggaagtgtgacatagatgtatcaaagggagcattgctagaagggcagctagtgatttccatagaaggattaaattctaagcaccaggcaaatgctcttcattgtgtaacaactagatggagtctcactctgttacccaggccggagtgcagtggcgcagtctcggctcactgcaacctccacctcccaggttcaagtgattctcatgcctcagtcccccgagtagctgggattacagatgcccaccaccatgcctggctaattatggagttgcttctgcaggaagcctttttggtggcatggtcctcaagaagttcctaaaagaaatacagtccatactgcccggaatctctgcaaagctgacttggacttcagaggaaggcagctattctcaggatatgacaggggtaacacccttccagatgatttttgaggttgatgaaaagcccagaaccttgatgacagattgtctggttataaagcattttttacgtaaaatcatcatggtgcaccctaaggtcagatttcatttcagtgtaaaggtaaatggaatcctctccacagagatctttggggtggagaatgaacccactttgaaccttgggaatggaattgctcttttggtcgactcccagcattatgtgagagaccaaattttggtacaattgaatcacactgcagcagaattcaccctgtgctaggacatccagtaatgcttttcatccctgaagacgtggctggcatggacttgttgggagaactgatactgactccagcagctgcactgtgccccagcccaaaggtttcttccaaccagcttaacaggatttcttcagtttccatatttctatatggacctttgggtctgcctctgatattgtcaacttgggagcagccgatgactactttcttcaaagatacctcttctttagttgactggaaaaaataccatttgtgtatgatacccaatttggatctcaatttggatagagatttggtgcttccagatgtgagttatcaggtggaatccagtgaggaggatcagtctcagactatggatcctcaaggacaaactctgctgctttttctctttgtggatttccacagtgcatttccagtccagcaaatggaaatctggggagtctatactttgctcacaactcatctcaatgccatccttgtggagagccacagtgtagtgcaaggttccatccaattcactgtggacaaggtcttggagcaacatcaccaggctgccaaggcagctgacacacaagagttcaggaccaaactgcacaaagtatttcgtgagatcacccaacaccaatttcttcaccactgctcatgtgaggtgaagcagcagctaaccctagaaaaaaaggactcagcccagggcactgaggacgcacctgataacagcagcctggagctcctagcagataccagcgggcaagcagaaaacaagaggctcaagaggggcagcccccgcatagaggagatgcgagctctgcgctctgccagggccccgagcccgtcagaggccgccccgcgccgcccggaagccaccgcggcccccctcactcctagaggaagggagcaccgcgaggctcacggcagggccctggcgccgggcagggcgagcctcggaagccgcctggaggacgtgctgtggctgcaggaggtctccaacctgtcagagtggctgagtcccagccctgggccctgagccgggtccccttccgcaagcgcccaccgatccggaggctgcgggcagccgttatcccgtggtttaataaagctgccgcgcgctcaccaagtnaaaaaaaa

SEQ ID NO: 78773 - DNA, 2023 bp, Homo sapiens
  misc_feature (84)..(84): n is a, c, g, or t
  misc_feature (2015)..(2015): n is a, c, g, or t
gcaggctgtactccccgggatttatgggatggaagggatgggctcgcgctgccgggcgtgggcgtggctcgggcgtgggcactngcggagttccaagcccgggctgaggagggggcggcggcggcggcggcggcggcggcgggcgggtacccttcgactgggcgttgccgctgttccctgcgcggcatggaggggacggccgtggccgtgttcgattttgagatttttaataattcactggaagtgtgacatagatgtatcaaagggagcattgctagaagggcagctagtgatttccatagaaggattaaattctaagcaccaggcaaatgctcttcattgtgtaacaactaagttgcttctgcaggaagcctttttggtggcatggtcctcaagaagttcctaaaagaaatacagtccatactgcccggaatctctgcaaagctgacttggacttcagaggaaggcagctattctcaggatatgacaggggtaacacccttccagatgatttttgaggttgatgaaaagcccagaaccttgatgacagattgtctggttataaagcattttttacgtaaaatcatcatggtgcaccctaaggtcagatttcatttcagtgtaaaggtaaatggaatcctctccacagagatctttggggtggagaatgaacccactttgaaccttgggaatggaattgctcttttggtcgactcccagcattatgtgagagaccaaattttggtacaattgaatcacactgcagcagaattcaccctgtgctaggacatccagtaatgcttttcatccctgaagacgtggctggcatggacttgttgggagaactgatactgactccagcagctgcactgtgccccagcccaaaggtttcttccaaccagcttaacaggatttcttcagtttccatatttctatatggacctttgggtctgcctctgatattgtcaacttgggagcagccgatgactactttcttcaaagatacctcttctttagttgactggaaaaaataccatttgtgtatgatacccaatttggatctcaatttggatagagatttggtgcttccagatgtgagttatcaggtggaatccagtgaggaggatcagtctcagactatggatcctcaaggacaaactctgctgctttttctctttgtggatttccacagtgcatttccagtccagcaaatggaaatctggggagtctatactttgctcacaactcatctcaatgccatccttgtggagagccacagtgtagtgcaaggttccatccaattcactgtggacaaggtcttggagcaacatcaccaggctgccaaggctcagcagaaactacaggcctcactctcagtggctgtgaactccatcatgagtattctgactggaagcactaggagcagcttccgaaagatgtgtctccagacccttcaagcagctgacacacaagagttcaggaccaaactgcacaaagtatttcgtgagatcacccaacaccaatttcttcaccactgctcatgtgaggtgaagcagcagctaaccctagaaaaaaaggactcagcccagggcactgaggacgcacctgataacagcagcctggagctcctagcagataccagcgggcaagcagaaaacaagaggctcaagaggggcagcccccgcatagaggagatgcgagctctgcgctctgccagggccccgagcccgtcagaggccgccccgcgccgcccggaagccaccgcggcccccctcactcctagaggaagggagcaccgcgaggctcacggcagggccctggcgccgggcagggcgagcctcggaagccgcctggaggacgtgctgtggctgcaggaggtctccaacctgtcagagtggctgagtcccagccctgggccctgagccgggtccccttccgcaagcgcccaccgatccggaggctgcgggcagccgttatcccgtggtttaataaagctgccgcgcgctcaccaagtnaaaaaaaa

SEQ ID NO: 78774 - DNA, 2143 bp, Homo sapiens
  misc_feature (84)..(84): n is a, c, g, or t
  misc_feature (2135)..(2135): n is a, c, g, or t
gcaggctgtactccccgggatttatgggatggaagggatgggctcgcgctgccgggcgtgggcgtggctcgggcgtgggcactngcggagttccaagcccgggctgaggagggggcggcggcggcggcggcggcggcggcgggcgggtacccttcgactgggcgttgccgctgttccctgcgcggcatggaggggacggccgtggccgtgttcgattttgagatttttaataattcactggaagtgtgacatagatgtatcaaagggagcattgctagaagggcagctagtgatttccatagaaggattaaattctaagcaccaggcaaatgctcttcattgtgtaacaactaagatagggtttcatcatgttggctcggctggtctcgaactcctgacctcaagcgatccacccacctcagcctcccaaagtgctgcgattacaagcatgagccaccgttcccggcctctctagttgcttctgcaggaagcctttttggtggcatggtcctcaagaagttcctaaaagaaatacagtccatactgcccggaatctctgcaaagctgacttggacttcagaggaaggcagctattctcaggatatgacaggggtaacacccttccagatgatttttgaggttgatgaaaagcccagaaccttgatgacagattgtctggttataaagcattttttacgtaaaatcatcatggtgcaccctaaggtcagatttcatttcagtgtaaaggtaaatggaatcctctccacagagatctttggggtggagaatgaacccactttgaaccttgggaatggaattgctcttttggtcgactcccagcattatgtgagagaccaaattttggtacaattgaatcacactgcagcagaattcaccctgtgctaggacatccagtaatgcttttcatccctgaagacgtggctggcatggacttgttgggagaactgatactgactccagcagctgcactgtgccccagcccaaaggtttcttccaaccagcttaacaggatttcttcagtttccatatttctatatggacctttgggtctgcctctgatattgtcaacttgggagcagccgatgactactttcttcaaagatacctcttctttagttgactggaaaaaataccatttgtgtatgatacccaatttggatctcaatttggatagagatttggtgcttccagatgtgagttatcaggtggaatccagtgaggaggatcagtctcagactatggatcctcaaggacaaactctgctgctttttctctttgtggatttccacagtgcatttccagtccagcaaatggaaatctggggagtctatactttgctcacaactcatctcaatgccatccttgtggagagccacagtgtagtgcaaggttccatccaattcactgtggacaaggtcttggagcaacatcaccaggctgccaaggctcagcagaaactacaggcctcactctcagtggctgtgaactccatcatgagtattctgactggaagcactaggagcagcttccgaaagatgtgtctccagacccttcaagcagctgacacacaagagttcaggaccaaactgcacaaagtatttcgtgagatcacccaacaccaatttcttcaccactgctcatgtgaggtgaagcagcagctaaccctagaaaaaaaggactcagcccagggcactgaggacgcacctgataacagcagcctggagctcctagcagataccagcgggcaagcagaaaacaagaggctcaagaggggcagcccccgcatagaggagatgcgagctctgcgctctgccagggccccgagcccgtcagaggccgccccgcgccgcccggaagccaccgcggcccccctcactcctagaggaagggagcaccgcgaggctcacggcagggccctggcgccgggcagggcgagcctcggaagccgcctggaggacgtgctgtggctgcaggaggtctccaacctgtcagagtggctgagtcccagccctgggccctgagccgggtccccttccgcaagcgcccaccgatccggaggctgcgggcagccgttatcccgtggtttaataaagctgccgcgcgctcaccaagtnaaaaaaaa

SEQ ID NO: 78775 - DNA, 1774 bp, Homo sapiens
  misc_feature (84)..(84): n is a, c, g, or t
  misc_feature (1766)..(1766): n is a, c, g, or t
gcaggctgtactccccgggatttatgggatggaagggatgggctcgcgctgccgggcgtgggcgtggctcgggcgtgggcactngcggagttccaagcccgggctgaggagggggcggcggcggcggcggcggcggcggcgggcgggtacccttcgactgggcgttgccgctgttccctgcgcggcatggaggggacggccgtggccgtgttcgagttgcttctgcaggaagcctttttggtggcatggtcctcaagaagttcctaaaaggttgatgaaaagcccagaaccttgatgacagattgtctggttataaagcattttttacgtaaaatcatcatggtgcaccctaaggtcagatttcatttcagtgtaaaggtaaatggaatcctctccacagagatctttggggtggagaatgaacccactttgaaccttgggaatggaattgctcttttggtcgactcccagcattatgtgagagaccaaattttggtacaattgaatcacactgcagcagaattcaccctgtgctaggacatccagtaatgcttttcatccctgaagacgtggctggcatggacttgttgggagaactgatactgactccagcagctgcactgtgccccagcccaaaggtttcttccaaccagcttaacaggatttcttcagtttccatatttctatatggacctttgggtctgcctctgatattgtcaacttgggagcagccgatgactactttcttcaaagatacctcttctttagttgactggaaaaaataccatttgtgtatgatacccaatttggatctcaatttggatagagatttggtgcttccagatgtgagttatcaggtggaatccagtgaggaggatcagtctcagactatggatcctcaaggacaaactctgctgctttttctctttgtggatttccacagtgcatttccagtccagcaaatggaaatctggggagtctatactttgctcacaactcatctcaatgccatccttgtggagagccacagtgtagtgcaaggttccatccaattcactgtggacaaggtcttggagcaacatcaccaggctgccaaggctcagcagaaactacaggcctcactctcagtggctgtgaactccatcatgagtattctgactggaagcactaggagcagcttccgaaagatgtgtctccagacccttcaagcagctgacacacaagagttcaggaccaaactgcacaaagtatttcgtgagatcacccaacaccaatttcttcaccactgctcatgtgaggtgaagcagcagctaaccctagaaaaaaaggactcagcccagggcactgaggacgcacctgataacagcagcctggagctcctagcagataccagcgggcaagcagaaaacaagaggctcaagaggggcagcccccgcatagaggagatgcgagctctgcgctctgccagggccccgagcccgtcagaggccgccccgcgccgcccggaagccaccgcggcccccctcactcctagaggaagggagcaccgcgaggctcacggcagggccctggcgccgggcagggcgagcctcggaagccgcctggaggacgtgctgtggctgcaggaggtctccaacctgtcagagtggctgagtcccagccctgggccctgagccgggtccccttccgcaagcgcccaccgatccggaggctgcgggcagccgttatcccgtggtttaataaagctgccgcgcgctcaccaagtnaaaaaaaa

SEQ ID NO: 78776 - DNA, 2376 bp, Homo sapiens
  misc_feature (2368)..(2368): n is a, c, g, or t
tggtccgcaaggaaatccattaggtggatataaggcccagtccagggaatctgtgttgagtgtatagttagtatccttccattcaaactcgctggtggaccaaaagctaacttccctgatagagaagatgtcactcagcctcctcttcttgtccagcttcatcctctggataatgacagtccagcacaagggccttcttgccatcattctttatagcttcaaccacgaaatggggagttgatatcaattcagggtcttcaaccttctgcccttgcgagggttcctcctcaccatcaaatgttggtgggatgctgttgttaatattgaaagtgacagtgattttttccccccagcaactttccgcactaatttagcttctgtcccattcagttccagctcccaaactccagacatcttaggaagggttttatgcttctggattttcctttcctcctgaatttcatcactcaggaaatcaatcaaagctttgtctccttcgcacgccacacccacagccggaggtgcagggcccgcgaggccgcagggggcccggccgcagaacacgcgcgcaaactgagcagcctgaagggcgggcgcacagccggggcgccggccaggagctgccggaaaggcggggcgggccccgggggtgtggaagccggcgacgcagaagcccagcatatggggcactcagcgcagcagtggcagcatggcggagaggactgcgaacatgtgcggatgcaaaggacaacccaggcctagaaatacagtccatactgcccggaatctctgcaaagctgacttggacttcagaggaaggcagctattctcaggatatgacaggggtaacacccttccagatgatttttgaggttgatgaaaagcccagaaccttgatgacagattgtctggttataaagcattttttacgtaaaatcatcatggtgcaccctaaggtcagatttcatttcagtgtaaaggtaaatggaatcctctccacagagatctttggggtggagaatgaacccactttgaaccttgggaatggaattgctcttttggtcgactcccagcattatgtgagagaccaaattttggtacaattgaatcacactgcagcagaattcaccctgtgctaggacatccagtaatgcttttcatccctgaagacgtggctggcatggacttgttgggagaactgatactgactccagcagctgcactgtgccccagcccaaaggtttcttccaaccagcttaacaggatttcttcagtttccatatttctatatggacctttgggtctgcctctgatattgtcaacttgggagcagccgatgactactttcttcaaagatacctcttctttagttgactggaaaaaataccatttgtgtatgatacccaatttggatctcaatttggatagagatttggtgcttccagatgtgagttatcaggtggaatccagtgaggaggatcagtctcagactatggatcctcaaggacaaactctgctgctttttctctttgtggatttccacagtgcatttccagtccagcaaatggaaatctggggagtctatactttgctcacaactcatctcaatgccatccttgtggagagccacagtgtagtgcaaggttccatccaattcactgtggacaaggtcttggagcaacatcaccaggctgccaaggctcagcagaaactacaggcctcactctcagtggctgtgaactccatcatgagtattctgactggaagcactaggagcagcttccgaaagatgtgtctccagacccttcaagcagctgacacacaagagttcaggaccaaactgcacaaagtatttcgtgagatcacccaacaccaatttcttcaccactgctcatgtgaggtgaagcagcagctaaccctagaaaaaaaggactcagcccagggcactgaggacgcacctgataacagcagcctggagctcctagcagataccagcgggcaagcagaaaacaagaggctcaagaggggcagcccccgcatagaggagatgcgagctctgcgctctgccagggccccgagcccgtcagaggccgccccgcgccgcccggaagccaccgcggcccccctcactcctagaggaagggagcaccgcgaggctcacggcagggccctggcgccgggcagggcgagcctcggaagccgcctggaggacgtgctgtggctgcaggaggtctccaacctgtcagagtggctgagtcccagccctgggccctgagccgggtccccttccgcaagcgcccaccgatccggaggctgcgggcagccgttatcccgtggtttaataaagctgccgcgcgctcaccaagtnaaaaaaaa

SEQ ID NO: 78777 - DNA, 1341 bp, Homo sapiens
  misc_feature (1333)..(1333): n is a, c, g, or t
ttcttaagaggaaaaaatgttaaatttgacttgtctgttttctgacagtagaccaaattttggtacaattgaatcacactgcagcagaattcaccctgtgctaggacatccagtaatgcttttcatccctgaagacgtggctggcatggacttgttgggagaactgatactgactccagcagctgcactgtgccccagcccaaaggtttcttccaaccagcttaacaggatttcttcagtttccatatttctatatggacctttgggtctgcctctgatattgtcaacttgggagcagccgatgactactttcttcaaagatacctcttctttagttgactggaaaaaataccatttgtgtatgatacccaatttggatctcaatttggatagagatttggtgcttccagatgtgagttatcaggtggaatccagtgaggaggatcagtctcagactatggatcctcaaggacaaactctgctgctttttctctttgtggatttccacagtgcatttccagtccagcaaatggaaatctggggagtctatactttgctcacaactcatctcaatgccatccttgtggagagccacagtgtagtgcaaggttccatccaattcactgtggacaaggtcttggagcaacatcaccaggctgccaaggctcagcagaaactacaggcctcactctcagtggctgtgaactccatcatgagtattctgactggaagcactaggagcagcttccgaaagatgtgtctccagacccttcaagcagctgacacacaagagttcaggaccaaactgcacaaagtatttcgtgagatcacccaacaccaatttcttcaccactgctcatgtgaggtgaagcagcagctaaccctagaaaaaaaggactcagcccagggcactgaggacgcacctgataacagcagcctggagctcctagcagataccagcgggcaagcagaaaacaagaggctcaagaggggcagcccccgcatagaggagatgcgagctctgcgctctgccagggccccgagcccgtcagaggccgccccgcgccgcccggaagccaccgcggcccccctcactcctagaggaagggagcaccgcgaggctcacggcagggccctggcgccgggcagggcgagcctcggaagccgcctggaggacgtgctgtggctgcaggaggtctccaacctgtcagagtggctgagtcccagccctgggccctgagccgggtccccttccgcaagcgcccaccgatccggaggctgcgggcagccgttatcccgtggtttaataaagctgccgcgcgctcaccaagtnaaaaaaaa

SEQ ID NO: 78778 - DNA, 1790 bp, Homo sapiens
  misc_feature (1782)..(1782): n is a, c, g, or t
cactgtctaccctgaataattattgctctaaaatttctaatatttatagttagaactctagagttgcttctgcaggaagcctttttggtggcatggtcctcaagaagttcctaaaagaaatacagtccatactgcccggaatctctgcaaagctgacttggacttcagaggaaggcagctattctcaggatatgacaggggtaacacccttccagatgatttttgaggttgatgaaaagcccagaaccttgatgacagattgtctggttataaagcattttttacgtaaaatcatcatggtgcaccctaaggtcagatttcatttcagtgtaaaggtaaatggaatcctctccacagagatctttggggtggagaatgaacccactttgaaccttgggaatggaattgctcttttggtcgactcccagcattatgtgaggtgaaggcgtaaagccttgttgtccctctgcatgttttactctcctctcgagtacgaatagaccaaattttggtacaattgaatcacactgcagcagaattcaccctgtgctaggacatccagtaatgcttttcatccctgaagacgtggctggcatggacttgttgggagaactgatactgactccagcagctgcactgtgccccagcccaaaggtttcttccaaccagcttaacaggatttcttcagtttccatatttctatatggacctttgggtctgcctctgatattgtcaacttgggagcagccgatgactactttcttcaaagatacctcttctttagttgactggaaaaaataccatttgtgtatgatacccaatttggatctcaatttggatagagatttggtgcttccagatgtgagttatcaggtggaatccagtgaggaggatcagtctcagactatggatcctcaaggacaaactctgctgctttttctctttgtggatttccacagtgcatttccagtccagcaaatggaaatctggggagtctatactttgctcacaactcatctcaatgccatccttgtggagagccacagtgtagtgcaaggttccatccaattcactgtggacaaggtcttggagcaacatcaccaggctgccaaggctcagcagaaactacaggcctcactctcagtggctgtgaactccatcatgagtattctgactggaagcactaggagcagcttccgaaagatgtgtctccagacccttcaagcagctgacacacaagagttcaggaccaaactgcacaaagtatttcgtgagatcacccaacaccaatttcttcaccactgctcatgtgaggtgaagcagcagctaaccctagaaaaaaaggactcagcccagggcactgaggacgcacctgataacagcagcctggagctcctagcagataccagcgggcaagcagaaaacaagaggctcaagaggggcagcccccgcatagaggagatgcgagctctgcgctctgccagggccccgagcccgtcagaggccgccccgcgccgcccggaagccaccgcggcccccctcactcctagaggaagggagcaccgcgaggctcacggcagggccctggcgccgggcagggcgagcctcggaagccgcctggaggacgtgctgtggctgcaggaggtctccaacctgtcagagtggctgagtcccagccctgggccctgagccgggtccccttccgcaagcgcccaccgatccggaggctgcgggcagccgttatcccgtggtttaataaagctgccgcgcgctcaccaagtnaaaaaaaa

SEQ ID NO: 78779 - DNA, 1369 bp, Homo sapiens
  misc_feature (84)..(84): n is a, c, g, or t
  misc_feature (1361)..(1361): n is a, c, g, or t
gcaggctgtactccccgggatttatgggatggaagggatgggctcgcgctgccgggcgtgggcgtggctcgggcgtgggcactngcggagttccaagcccgggctgaggagggggcggcggcggcggcggcggcggcggcgggcgggtacccttcgactgggcgttgccgctgttccctgcgcggcatggaggggacggccgtggccgtgttcggatggagtctcactctgttacccaggccggagtgcagtggcgcagtctcggctcactgcaacctccacctcccaggttcaagtgattctcatgcctcagtcccccgagtagctgggattacagatgcccaccaccatgcctggctaattatggagttgcttctgcaggaagcctttttggtggcatggtcctcaagaagttcctaaaagatttggtgcttccagatgtgagttatcaggtggaatccagtgaggaggatcagtctcagactatggatcctcaaggacaaactctgctgctttttctctttgtggatttccacagtgcatttccagtccagcaaatggaaatctggggagtctatactttgctcacaactcatctcaatgccatccttgtggagagccacagtgtagtgcaaggttccatccaattcactgtggacaaggtcttggagcaacatcaccaggctgccaaggctcagcagaaactacaggcctcactctcagtggctgtgaactccatcatgagtattctgactggaagcactaggagcagcttccgaaagatgtgtctccagacccttcaagcagctgacacacaagagttcaggaccaaactgcacaaagtatttcgtgagatcacccaacaccaatttcttcaccactgctcatgtgaggtgaagcagcagctaaccctagaaaaaaaggactcagcccagggcactgaggacgcacctgataacagcagcctggagctcctagcagataccagcgggcaagcagaaaacaagaggctcaagaggggcagcccccgcatagaggagatgcgagctctgcgctctgccagggccccgagcccgtcagaggccgccccgcgccgcccggaagccaccgcggcccccctcactcctagaggaagggagcaccgcgaggctcacggcagggccctggcgccgggcagggcgagcctcggaagccgcctggaggacgtgctgtggctgcaggaggtctccaacctgtcagagtggctgagtcccagccctgggccctgagccgggtccccttccgcaagcgcccaccgatccggaggctgcgggcagccgttatcccgtggtttaataaagctgccgcgcgctcaccaagtnaaaaaaaa

SEQ ID NO: 78780 - DNA, 1964 bp, Homo sapiens
  misc_feature (84)..(84): n is a, c, g, or t
  misc_feature (1956)..(1956): n is a, c, g, or t
gcaggctgtactccccgggatttatgggatggaagggatgggctcgcgctgccgggcgtgggcgtggctcgggcgtgggcactngcggagttccaagcccgggctgaggagggggcggcggcggcggcggcggcggcggcgggcgggtacccttcgactgggcgttgccgctgttccctgcgcggcatggaggggacggccgtggccgtgttcgagttgcttctgcaggaagcctttttggtggcatggtcctcaagaagttcctaaaagaaatacagtccatactgcccggaatctctgcaaagctgacttggacttcagaggaaggcagctattctcaggatatgacaggggtaacacccttccagatgatttttgaggttgatgaaaagcccagaaccttgatgacagattgtctggttataaagcattttttacgtaaaatcatcatggtgcaccctaaggtcagatttcatttcagtgtaaaggtaaatggaatcctctccacagagatctttggggtggagaatgaacccactttgaaccttgggaatggaattgctcttttggtcgactcccagcattatgtgagagaccaaattttggtacaattgaatcacactgcagcagaattcaccctgtgctaggacatccagtaatgcttttcatccctgaagacgtggctggcatggacttgttgggagaactgatactgactccagcagctgcactgtgccccagcccaaaggtttcttccaaccagcttaacaggatttcttcagtttccatatttctatatggacctttgggtctgcctctgatattgtcaacttgggagcagccgatgactactttcttcaaagatacctcttctttagttgactggaaaaaataccatttgtgtatgatacccaatttggatctcaatttggatagagatttggtgcttccagatgtgagttatcaggtggaatccagtgaggaggatcagtctcagactatggatcctcaaggacaaactctgctgctttttctctttgtggatttccacagtgcatttccagtccagcaaatggaaatctggggagtctatactttgctcacaactcatctcaatgccatccttgtggagagccacagtgtagtgcaaggttccatccaattcactgtggacaaggtcttggagcaacatcaccaggctgccaaggctcagcagaaactacaggcctcactctcagtggctgtgaactccatcatgagtattctgactggaagcactaggagcagcttccgaaagatgtgtctccagacccttcaagcagctgacacacaagagttcaggaccaaactgcacaaagtatttcgtgagatcacccaacaccaatttcttcaccactgctcatgtgaggtgaagcagcagctaaccctagaaaaaaaggactcagcccagggcactgaggacgcacctgataacagcagcctggagctcctagcagtgcttaaacagccttcccagcccacagcagcaggggtacagcagctctcacattcagtcactagcagagatgccaggtacataccagcgggcaagcagaaaacaagaggctcaagaggggcagcccccgcatagaggagatgcgagctctgcgctctgccagggccccgagcccgtcagaggccgccccgcgccgcccggaagccaccgcggcccccctcactcctagaggaagggagcaccgcgaggctcacggcagggccctggcgccgggcagggcgagcctcggaagccgcctggaggacgtgctgtggctgcaggaggtctccaacctgtcagagtggctgagtcccagccctgggccctgagccgggtccccttccgcaagcgcccaccgatccggaggctgcgggcagccgttatcccgtggtttaataaagctgccgcgcgctcaccaagtnaaaaaaaa

SEQ ID NO: 78781 - DNA, 1674 bp, Homo sapiens
  misc_feature (84)..(84): n is a, c, g, or t
  misc_feature (1666)..(1666): n is a, c, g, or t
gcaggctgtactccccgggatttatgggatggaagggatgggctcgcgctgccgggcgtgggcgtggctcgggcgtgggcactngcggagttccaagcccgggctgaggagggggcggcggcggcggcggcggcggcggcgggcgggtacccttcgactgggcgttgccgctgttccctgcgcggcatggaggggacggccgtggccgtgttcgagttgcttctgcaggaagcctttttggtggcatggtcctcaagaagttcctaaaagaaatacagtccatactgcccggaatctctgcaaagctgacttggacttcagaggaaggcagctattctcaggatatgacaggggtaacacccttccagatgatttttgaggttgatgaaaagcccagaaccttgatgacagattgtctggttataaagcattttttacgtaaaatcatcatggtgcaccctaaggtcagatttcatttcagtgtaaaggtaaatggaatcctctccacagagatctttggggtggagaatgaacccactttgaaccttgggaatggaattgctcttttggtcgactcccagcattatgtgagagaccaaattttggtacaattgaatcacactgcagcagaattcaccctgtgctaggacatccagtaatgcttttcatccctgaagacgtggctggcatggacttgttgggagaactgatactgactccagcagctgcactgtgccccagcccaaaggtttcttccaaccagcttaacaggatttcttcagtttccatatttctatatggacctttgggtctgcctctgatattgtcaacttgggagcagccgatgactactttcttcaaagatacctcttctttagttgactggaaaaaataccatttgtgtatgatacccaatttggatctcaatttggatagagatttggtgcttccagatgtgagttatcaggtggaatccagtgaggaggatcagtctcagactatggatcctcaaggacaaactctgctgctttttctctttgtggatttccacagtgcatttccagtccagcaaatggaaatctggggagtctatactttgctcacaactcatctcaatgccatccttgtggagagccacagtgtagtgcaaggttccatccaattcactgtggacaaggtcttggagcaacatcaccaggctgccaagcagctaaccctagaaaaaaaggactcagcccagggcactgaggacgcacctgataacagcagcctggagctcctagcagataccagcgggcaagcagaaaacaagaggctcaagaggggcagcccccgcatagaggagatgcgagctctgcgctctgccagggccccgagcccgtcagaggccgccccgcgccgcccggaagccaccgcggcccccctcactcctagaggaagggagcaccgcgaggctcacggcagggccctggcgccgggcagggcgagcctcggaagccgcctggaggacgtgctgtggctgcaggaggtctccaacctgtcagagtggctgagtcccagccctgggccctgagccgggtccccttccgcaagcgcccaccgatccggaggctgcgggcagccgttatcccgtggtttaataaagctgccgcgcgctcaccaagtnaaaaaaaa

SEQ ID NO: 78782 - DNA, 474 bp, Homo sapiens
actagcttttgcagatgcacagtgaggggaggtagatatagtgataattttaccttctccctccccttaggagtctatactttgctcacaactcatctcaatgccatccttgtggagagccacagtgtagtgcaaggttccatccaattcactgtggacaaggtcttggagcaacatcaccaggctgccaaggtaataaggaattcacagcctcttttctcctattctctaagaaaaagatagcaagcatatatggcaggcagggcccaggagcccttcctcccttaatgccccttcctctcctcttctgtcacctgggtgatcttgtaacactgcatctagcctacaactcaaactttagcttagatggatcactgtaaccagcttgcttagtcttacctcctagtaggtgtgtttgggtaaatagggaaatagttaatagggaaaaatggctgataacacacctcttcctta

SEQ ID NO: 78783 - DNA, 438 bp, Homo sapiens
tatagttacttttagaagaggaaataccgttttaattcatttgtgctcttgagattgtgtatgtgtggtaggtgtttttgttgtattattacaggttgatgaaaagcccagaaccttgatgacagattgtctggttataaagcattttttacgtaaaatcatcatggtgcaccctaaggtaagctgttcctttgtacaataatgattctcttatttaagtcattgttttccagagacctttactgtgtaggacatggacagatgtgattggttctttttctttcaatgaagatgattaaaacgtttaatatttgaggtcatggtggctcatacctgtaatcccaacattttgggaggccgaggcgggaggatcgcttgagtccaggagtttaagaccagccaaggcaacatggtgagactctgtctctacaaaaaaaa

SEQ ID NO: 78784 - DNA, 1061 bp, Homo sapiens
  misc_feature (84)..(84): n is a, c, g, or t
gcaggctgtactccccgggatttatgggatggaagggatgggctcgcgctgccgggcgtgggcgtggctcgggcgtgggcactngcggagttccaagcccgggctgaggagggggcggcggcggcggcggcggcggcggcgggcgggtacccttcgactgggcgttgccgctgttccctgcgcggcatggaggggacggccgtggccgtgttcgagttgcttctgcaggaagcctttttggtggcatggtcctcaagaagttcctaaaagaaatacagtccatactgcccggaatctctgcaaagctgacttggacttcagaggaaggcagctattctcaggatatgacaggggtaacacccttccagatgatttttgagagacctttactgtgtaggacatggacagatgtgattggttctttttctttcaatgaagatgattaaaacgtttaatatttgaggtcatggtggctcatacctgtaatcccaacattttgggaggccgaggcgggaggatcgcttgagtccaggagtttaagaccagccaaggcaacatggtcagatttcatttcagtgtaaaggtaaatggaatcctctccacagagatctttggggtggagaatgaacccactttgaaccttgggaatggaattgctcttttggtcgactcccagcattatgtgagagaccaaattttggtacaattgaatcacactgcagcagaattcaccctgtgctaggacatccagtaatgcttttcatccctgaagacgtggctggcatggacttgttgggagaactgatactgactccagcagctgcactgtgccccagcccaaaggtttcttccaaccagcttaacaggatttcttcagtttccatatttctatatggacctttgggtctgcctctgatattgtcaacttgggagcagccgatgactactttcttcaaagatacctcttctttagttgactggaaaaaataccatttgtgtatgatacccaatttggatctcaatttggatagaggtatatcctccctctttctgcacaggaa

SEQ ID NO: 78785 - DNA, 1884 bp, Homo sapiens
  misc_feature (84)..(84): n is a, c, g, or t
  misc_feature (1876)..(1876): n is a, c, g, or t
gcaggctgtactccccgggatttatgggatggaagggatgggctcgcgctgccgggcgtgggcgtggctcgggcgtgggcactngcggagttccaagcccgggctgaggagggggcggcggcggcggcggcggcggcggcgggcgggtacccttcgactgggcgttgccgctgttccctgcgcggcatggaggggacggccgtggccgtgttcgagttgcttctgcaggaagcctttttggtggcatggtcctcaagaagttcctaaaagaaatacagtccatactgcccggaatctctgcaaagctgacttggacttcagaggaaggcagctattctcaggatatgacaggggtaacacccttccagatgatttttgaggttgatgaaaagcccagaaccttgatgacagattgtctggttataaagcattttttacgtaaaatcatcatggtgcaccctaaggtcagatttcatttcagtgtaaaggtaaatggaatcctctccacagagatctttggggtggagaatgaacccactttgaaccttgggaatggaattgctcttttggtcgactcccagcattatgtgagagaccaaattttggtacaattgaatcacactgcagcagaattcaccctgtgctaggacatccagtaatgcttttcatccctgaagacgtggctggcatggacttgttgggagaactgatactgactccagcagctgcactgtgccccagcccaaaggtttcttccaaccagcttaacaggatttcttcagtttccatatttctatatggacctttgggtctgcctctgatattgtcaacttgggagcagccgatgactactttcttcaaagatacctcttctttagttgactggaaaaaataccatttgtgtatgatacccaatttggatctcaatttggatagagatttggtgcttccagatgtgagttatcaggtggaatccagtgaggaggatcagtctcagactatggatcctcaaggacaaactctgctgctttttctctttgtggatttccacagtgcatttccagtccagcaaatggaaatctggggagtctatactttgctcacaactcatctcaatgccatccttgtggagagccacagtgtagtgcaaggttccatccaattcactgtggacaaggtcttggagcaacatcaccaggctgccaaggctcagcagaaactacaggcctcactctcagtggctgtgaactccatcatgagtattctgactggaagcactaggagcagcttccgaaagatgtgtctccagacccttcaagcagctgacacacaagagttcaggaccaaactgcacaaagtatttcgtgagatcacccaacaccaatttcttcaccactgctcatgtgaggtgaagcagcagctaaccctagaaaaaaaggactcagcccagggcactgaggacgcacctgataacagcagcctggagctcctagcagataccagcgggcaagcagaaaacaagaggctcaagaggggcagcccccgcatagaggagatgcgagctctgcgctctgccagggccccgagcccgtcagaggccgccccgcgccgcccggaagccaccgcggcccccctcactcctagaggaagggagcaccgcgaggctcacggcagggccctggcgccgggcagggcgagcctcggaagccgcctggaggacgtgctgtggctgcaggaggtctccaacctgtcagagtggctgagtcccagccctgggccctgagccgggtccccttccgcaagcgcccaccgatccggaggctgcgggcagccgttatcccgtggtttaataaagctgccgcgcgctcaccaagtnaaaaaaaa

SEQ ID NO: 78786 - DNA, 1705 bp, Homo sapiens
  misc_feature (1697)..(1697): n is a, c, g, or t
agggcatattcaatttgaaaataaaaagcctctagagttgcttctgcaggaagcctttttggtggcatggtcctcaagaagttcctaaaagaaatacagtccatactgcccggaatctctgcaaagctgacttggacttcagaggaaggcagctattctcaggatatgacaggggtaacacccttccagatgatttttgaggttgatgaaaagcccagaaccttgatgacagattgtctggttataaagcattttttacgtaaaatcatcatggtgcaccctaaggtcagatttcatttcagtgtaaaggtaaatggaatcctctccacagagatctttggggtggagaatgaacccactttgaaccttgggaatggaattgctcttttggtcgactcccagcattatgtgagagaccaaattttggtacaattgaatcacactgcagcagaattcaccctgtgctaggacatccagtaatgcttttcatccctgaagacgtggctggcatggacttgttgggagaactgatactgactccagcagctgcactgtgccccagcccaaaggtttcttccaaccagcttaacaggatttcttcagtttccatatttctatatggacctttgggtctgcctctgatattgtcaacttgggagcagccgatgactactttcttcaaagatacctcttctttagttgactggaaaaaataccatttgtgtatgatacccaatttggatctcaatttggatagagatttggtgcttccagatgtgagttatcaggtggaatccagtgaggaggatcagtctcagactatggatcctcaaggacaaactctgctgctttttctctttgtggatttccacagtgcatttccagtccagcaaatggaaatctggggagtctatactttgctcacaactcatctcaatgccatccttgtggagagccacagtgtagtgcaaggttccatccaattcactgtggacaaggtcttggagcaacatcaccaggctgccaaggctcagcagaaactacaggcctcactctcagtggctgtgaactccatcatgagtattctgactggaagcactaggagcagcttccgaaagatgtgtctccagacccttcaagcagctgacacacaagagttcaggaccaaactgcacaaagtatttcgtgagatcacccaacaccaatttcttcaccactgctcatgtgaggtgaagcagcagctaaccctagaaaaaaaggactcagcccagggcactgaggacgcacctgataacagcagcctggagctcctagcagataccagcgggcaagcagaaaacaagaggctcaagaggggcagcccccgcatagaggagatgcgagctctgcgctctgccagggccccgagcccgtcagaggccgccccgcgccgcccggaagccaccgcggcccccctcactcctagaggaagggagcaccgcgaggctcacggcagggccctggcgccgggcagggcgagcctcggaagccgcctggaggacgtgctgtggctgcaggaggtctccaacctgtcagagtggctgagtcccagccctgggccctgagccgggtccccttccgcaagcgcccaccgatccggaggctgcgggcagccgttatcccgtggtttaataaagctgccgcgcgctcaccaagtnaaaaaaaa

SEQ ID NO: 78787 - DNA, 2256 bp, Homo sapiens
  misc_feature (84)..(84): n is a, c, g, or t
  misc_feature (2248)..(2248): n is a, c, g, or t
gcaggctgtactccccgggatttatgggatggaagggatgggctcgcgctgccgggcgtgggcgtggctcgggcgtgggcactngcggagttccaagcccgggctgaggagggggcggcggcggcggcggcggcggcggcgggcgggtacccttcgactgggcgttgccgctgttccctgcgcggcatggaggggacggccgtggccgtgttcgagttgcttctgcaggaagcctttttggtggcatggtcctcaagaagttcctaaaagttccagctcccaaactccagacatcttaggaagggttttatgcttctggattttcctttcctcctgaatttcatcactcaggaaatcaatcaaagctttgtctccttcgcacgccacacccacagccggaggtgcagggcccgcgaggccgcagggggcccggccgcagaacacgcgcgcaaactgagcagcctgaagggcgggcgcacagccggggcgccggccaggagctgccggaaaggcggggcgggccccgggggtgtggaagccggcgacgcagaagcccagcatatggggcactcagcgcagcagtggcagcatggcggagaggactgcgaacatgtgcggatgcaaaggacaacccaggcctagaaatacagtccatactgcccggaatctctgcaaagctgacttggacttcagaggaaggcagctattctcaggatatgacaggggtaacacccttccagatgatttttgaggttgatgaaaagcccagaaccttgatgacagattgtctggttataaagcattttttacgtaaaatcatcatggtgcaccctaaggtcagatttcatttcagtgtaaaggtaaatggaatcctctccacagagatctttggggtggagaatgaacccactttgaaccttgggaatggaattgctcttttggtcgactcccagcattatgtgagagaccaaattttggtacaattgaatcacactgcagcagaattcaccctgtgctaggacatccagtaatgcttttcatccctgaagacgtggctggcatggacttgttgggagaactgatactgactccagcagctgcactgtgccccagcccaaaggtttcttccaaccagcttaacaggatttcttcagtttccatatttctatatggacctttgggtctgcctctgatattgtcaacttgggagcagccgatgactactttcttcaaagatacctcttctttagttgactggaaaaaataccatttgtgtatgatacccaatttggatctcaatttggatagagatttggtgcttccagatgtgagttatcaggtggaatccagtgaggaggatcagtctcagactatggatcctcaaggacaaactctgctgctttttctctttgtggatttccacagtgcatttccagtccagcaaatggaaatctggggagtctatactttgctcacaactcatctcaatgccatccttgtggagagccacagtgtagtgcaaggttccatccaattcactgtggacaaggtcttggagcaacatcaccaggctgccaaggctcagcagaaactacaggcctcactctcagtggctgtgaactccatcatgagtattctgactggaagcactaggagcagcttccgaaagatgtgtctccagacccttcaagcagctgacacacaagagttcaggaccaaactgcacaaagtatttcgtgagatcacccaacaccaatttcttcaccactgctcatgtgaggtgaagcagcagctaaccctagaaaaaaaggactcagcccagggcactgaggacgcacctgataacagcagcctggagctcctagcagataccagcgggcaagcagaaaacaagaggctcaagaggggcagcccccgcatagaggagatgcgagctctgcgctctgccagggccccgagcccgtcagaggccgccccgcgccgcccggaagccaccgcggcccccctcactcctagaggaagggagcaccgcgaggctcacggcagggccctggcgccgggcagggcgagcctcggaagccgcctggaggacgtgctgtggctgcaggaggtctccaacctgtcagagtggctgagtcccagccctgggccctgagccgggtccccttccgcaagcgcccaccgatccggaggctgcgggcagccgttatcccgtggtttaataaagctgccgcgcgctcaccaagtnaaaaaaaa

SEQ ID NO: 78788 - DNA, 1759 bp, Homo sapiens
  misc_feature (1751)..(1751): n is a, c, g, or t
tgacattatgggttttactctgatctttattctcgtgtcttctgaagttccgtgtaatagatactctaacccaagaagtgatggctatttagattttcttttgcatacaattctcattcccaaagatgtctccctttggttgtccaaaaagctttctgaggtatagttacttttagaagaggaaataccgttttaattcatttgtgctcttgagattgtgtatgtgtggtaggtgtttttgttgtattattacaggttgatgaaaagcccagaaccttgatgacagattgtctggttataaagcattttttacgtaaaatcatcatggtgcaccctaaggtcagatttcatttcagtgtaaaggtaaatggaatcctctccacagagatctttggggtggagaatgaacccactttgaaccttgggaatggaattgctcttttggtcgactcccagcattatgtgagagaccaaattttggtacaattgaatcacactgcagcagaattcaccctgtgctaggacatccagtaatgcttttcatccctgaagacgtggctggcatggacttgttgggagaactgatactgactccagcagctgcactgtgccccagcccaaaggtttcttccaaccagcttaacaggatttcttcagtttccatatttctatatggacctttgggtctgcctctgatattgtcaacttgggagcagccgatgactactttcttcaaagatacctcttctttagttgactggaaaaaataccatttgtgtatgatacccaatttggatctcaatttggatagagatttggtgcttccagatgtgagttatcaggtggaatccagtgaggaggatcagtctcagactatggatcctcaaggacaaactctgctgctttttctctttgtggatttccacagtgcatttccagtccagcaaatggaaatctggggagtctatactttgctcacaactcatctcaatgccatccttgtggagagccacagtgtagtgcaaggttccatccaattcactgtggacaaggtcttggagcaacatcaccaggctgccaaggctcagcagaaactacaggcctcactctcagtggctgtgaactccatcatgagtattctgactggaagcactaggagcagcttccgaaagatgtgtctccagacccttcaagcagctgacacacaagagttcaggaccaaactgcacaaagtatttcgtgagatcacccaacaccaatttcttcaccactgctcatgtgaggtgaagcagcagctaaccctagaaaaaaaggactcagcccagggcactgaggacgcacctgataacagcagcctggagctcctagcagataccagcgggcaagcagaaaacaagaggctcaagaggggcagcccccgcatagaggagatgcgagctctgcgctctgccagggccccgagcccgtcagaggccgccccgcgccgcccggaagccaccgcggcccccctcactcctagaggaagggagcaccgcgaggctcacggcagggccctggcgccgggcagggcgagcctcggaagccgcctggaggacgtgctgtggctgcaggaggtctccaacctgtcagagtggctgagtcccagccctgggccctgagccgggtccccttccgcaagcgcccaccgatccggaggctgcgggcagccgttatcccgtggtttaataaagctgccgcgcgctcaccaagtnaaaaaaaa

SEQ ID NO: 78789 - DNA, 2018 bp, Homo sapiens
  misc_feature (84)..(84): n is a, c, g, or t
  misc_feature (511)..(511): n is a, c, g, or t
  misc_feature (520)..(520): n is a, c, g, or t
  misc_feature (532)..(532): n is a, c, g, or t
  misc_feature (540)..(540): n is a, c, g, or t
  misc_feature (552)..(552): n is a, c, g, or t
  misc_feature (2010)..(2010): n is a, c, g, or t
gcaggctgtactccccgggatttatgggatggaagggatgggctcgcgctgccgggcgtgggcgtggctcgggcgtgggcactngcggagttccaagcccgggctgaggagggggcggcggcggcggcggcggcggcggcgggcgggtacccttcgactgggcgttgccgctgttccctgcgcggcatggaggggacggccgtggccgtgttcgattttgagatttttaataattcactggaagtgtgacatagatgtatcaaagggagcattgctagaagggcagctagtgatttccatagaaggattaaattctaagcaccaggcaaatgctcttcattgtgtaacaactagatggagtctcactctgttacccaggccggagtgcagtggcgcagtctcggctcactgcaacctccacctcccaggttcaagtgattctcatgcctcagtcccccgagtagctgggattacagatgcccaccaccatgcctggctaattatggtgttncttcttcangaagcctttttngtggcatngtcctcaagaanttcctaaaaaatacagtccatactgcccggaatctctgcaaagctgacttggacttcagaggaaggcagctattctcaggatatgacaggggtaacacccttccagatgatttttgaggtcagatttcatttcagtgtaaaggtaaatggaatcctctccacagagatctttggagaccaaattttggtacaattgaatcacactgcagcagaattcaccctgtgctaggacatccagtaatgcttttcatccctgaagacgtggctggcatggacttgttgggagaactgatactgactccagcagctgcactgtgccccagcccaaaggtttcttccaaccagcttaacaggatttcttcagtttccatatttctatatggacctttgggtctgcctctgatattgtcaacttgggagcagccgatgactactttcttcaaagatacctcttctttagttgactggaaaaaataccatttgtgtatgatacccaatttggatctcaatttggatagagatttggtgcttccagatgtgagttatcaggtggaatccagtgaggaggatcagtctcagactatggatcctcaaggacaaactctgctgctttttctctttgtggatttccacagtgcatttccagtccagcaaatggaaatctggggagtctatactttgctcacaactcatctcaatgccatccttgtggagagccacagtgtagtgcaaggttccatccaattcactgtggacaaggtcttggagcaacatcaccaggctgccaaggctcagcagaaactacaggcctcactctcagtggctgtgaactccatcatgagtattctgactggaagcactaggagcagcttccgaaagatgtgtctccagacccttcaagcagctgacacacaagagttcaggaccaaactgcacaaagtatttcgtgagatcacccaacaccaatttcttcaccactgctcatgtgaggtgaagcagcagctaaccctagaaaaaaaggactcagcccagggcactgaggacgcacctgataacagcagcctggagctcctagcagataccagcgggcaagcagaaaacaagaggctcaagaggggcagcccccgcatagaggagatgcgagctctgcgctctgccagggccccgagcccgtcagaggccgccccgcgccgcccggaagccaccgcggcccccctcactcctagaggaagggagcaccgcgaggctcacggcagggccctggcgccgggcagggcgagcctcggaagccgcctggaggacgtgctgtggctgcaggaggtctccaacctgtcagagtggctgagtcccagccctgggccctgagccgggtccccttccgcaagcgcccaccgatccggaggctgcgggcagccgttatcccgtggtttaataaagctgccgcgcgctcaccaagtnaaaaaaaa

SEQ ID NO: 78790 - DNA, 1526 bp, Homo sapiens
  misc_feature (84)..(84): n is a, c, g, or t
  misc_feature (1505)..(1505): n is a, c, g, or t
gcaggctgtactccccgggatttatgggatggaagggatgggctcgcgctgccgggcgtgggcgtggctcgggcgtgggcactngcggagttccaagcccgggctgaggagggggcggcggcggcggcggcggcggcggcgggcgggtacccttcgactgggcgttgccgctgttccctgcgcggcatggaggggacggccgtggccgtgttcgagttgcttctgcaggaagcctttttggtggcatggtcctcaagaagttcctaaaagaaatacagtccatactgcccggaatctctgcaaagctgacttggacttcagaggaaggcagctattctcaggatatgacaggggtaacacccttccagatgatttttgaggttgatgaaaagcccagaaccttgatgacagattgtctggttataaagcattttttacgtaaaatcatcatggtgcaccctaaggtcagatttcatttcagtgtaaaggtaaatggaatcctctccacagagatctttggggtggagaatgaacccactttgaaccttgggaatggaattgctcttttggtcgactcccagcattatgtgagagaccaaattttggtacaattgaatcacactgcagcagaattcaccctgtgctaggacatccagtaatgcttttcatccctgaagacgtggctggcatggacttgttgggagaactgatactgactccagcagctgcactgtgccccagcccaaaggtttcttccaaccagcttaacaggatttcttcagtttccatatttctatatggacctttgggtctgcctctgatattgtcaacttgggagcagccgatgactactttcttcaaagatacctcttctttagttgactggaaaaaataccatttgtgtatgatacccaatttggatctcaatttggatagagatttggtgcttccagatgtgagttatcaggtggaatccagtgaggaggatcagtctcagactatggatcctcaaggacaaactctgctgctttttctctttgtggatttccacagtgcatttccagtccagcaaatggaaatctggggagtctatactttgctcacaactcatctcaatgccatccttgtggagagccacagtgtagtgcaaggttccatccaattcactgtggacaaggtcttggagcaacatcaccaggctgccaaggctcagcagaaactacaggcctcactctcagtggctgtgaactccatcatgagtattctgactggaagcactaggagcagcttccgaaagatgtgtctccagacccttcaagcagctgacacacaagagttcaggaccaaactgcacaaagtatttcgtgagatcacccaacaccaatttcttcaccactgctcatgtgaggtgaagcagcagctaaccctagaaaaaaaggactcagcccagggcactgaggacgcacctgataacagcagcctggagctcctagcagataccacgncccgggggggggggggcccca

SEQ ID NO: 78791 - DNA, 277 bp, Homo sapiens
taaaaacatgggttgtcacttaagtttggagtgcagtggcatgatcatcagtgagcgtgagatcactgtaacctcaaattctaggctgaagtaatctttctgcctcagtctcctgagtatctaggactacaggcccgcacaacaatatctggctaatttttaaattattctgtagatacaggggtcatgctacgttttctagtctggtcttgaactgctggcctcaagcgatccattctcaccttggcctcccaaagtgctgggattacaggcatga

SEQ ID NO: 78792 - DNA, 405 bp, Homo sapiens
ctgcttgatgtggttcagtattataaaagctgtttatggtgaaaaagcagtagatgttttatagtaatgatgatgccatgtagagaaagtacttagattacttgagtagttttacagaaaacttttcagcatcccattcaattttctgtctttccttttaattttcttctagttcatcattcttgttgttgatagcattgacagggaacgactagctattacaaaagaagaattatacagaatgttggctcatgaggtaaatttttaaagtaaatctttaaaaaacagtgtagtaaagtatctgtacgttgcctttgcttttttgcaaagattaatgtgatatgatgttggctattttatgattaacacaactttatgtactaaactgatgaaagtcttgaggta

SEQ ID NO: 78793 - DNA, 1843 bp, Homo sapiens
  misc_feature (1810)..(1810): n is a, c, g, or t
agcggaggtgggtacagaccgaggggactacgggtcggcgttgggctcagtgggctcgaaacaaagggctgtccggtggggattcgtcgcggcgccttctgagtggtcgggtcgaggcttctcggcctagcagtgccctcgctgcgcgatctcaggcgggttctcctcggctccgcgcagcccgcgccgcggtgggggacccggcgcagcggcacctgctgccgagggaccccgcggcccgccccggtgctcgtgatggggctgatcttcgccaaactgtggagcctcttctgtaaccaagaacacaaagtaattatagtgggactggataatgcagggaaaaccaccattctttaccaattcttaatgaatgaagtggttcatacttctccaaccataggaagcaatgttgaagaaatagttgtgaagaacactcattttcttatgtgggatattggtggtcaggagtctctgcgatcatcctggaacacatattactcaaatacagagttcatcattcttgttgttgatagcattgacagggaacgactagctattacaaaagaagaattatacagaatgttggctcatgaggatttacggaaggctgcagtccttatctttgcaaataaacaggatatgaaagggtgtatgacagcagctgaaatctcgaaatacctcacccttagttcaattaaggatcatccatggcacattcaatcctgctgtgctctcacaggagaagggttatgccaaggtctagagtggatgacctcccggattggtgtgagataacttttttgcttgaaagagactgctctatttattctgtgacatgaacattttttcctagtacctttggctgctaaggcagcagcatgtttaatttataacaacacaaacctctgagagcaacacttgaatcaagtgcagctgaactggaacataaaagattttttcttaactttttttttttaacacactaatcttcagttggatgaatgtaatgtataactatgttttcagcaacaattcttctgtttattctaattaatcagtgactgccttgtaagaaatgtttgtcatatgcgtgatgtcttctgaaatattcttataaccttaatgaccaattgctttcaattcttgaccagcactccctcccaaccagagaattactggtttgatagagtagtcttggaaaccatcaggtactgcctgcagacttctccagcactaaatatatttgttccctctataaaccattcatctttcggacagaacttactgtaaagaaagaaatctgcctagaggatatatgtaaggaagattccacatcatgagtacttgccttttaactttcccccacattactgttgagtcatggaataatgtttaagttgttatttgcatggaaattaagtaggctgtttatttatctaaaggaatcaagtccactcttctgcctgcaacatttgttcaaaaactaaccgaggtaaaatatttatttgaaagcccaactttgatgttaaatattcttgaataaatctgttattttaagaatatcacattattcaatgcatataaaactatcagaagttagtaaatcataccagcactaaaaataagacaattggaatatattttagcatcagtttacaaacaactttattatcaacagaaattttagctcttttctttgcaagatatatcacagctgctttgggcagtagctgaagccgaagtatgaacagtccattttgtttcttaaaatttgaagtcgtgtctgtcatagcatttttactaccagcantatgttacttaaaaaactacatggctttccttg

SEQ ID NO: 78794 - DNA, 289 bp, Homo sapiens
ttagtgtcattgggttggtgtcggccttgaacttggcaagtagctctacatacagaatgctgggtgccccacagccccacctgctgggaaacccatgtcagagctctgcgttcctctcctcacagctcagcgctcccattagcatttttcagccatcctggggactgtggcctctgtctgccttccttggatacacactcaattttaaacgcactcagagccaagagccacggctatagtttgagagtgcttgagagtgcgtgtcccacctggggtgcttggcttggtc

SEQ ID NO: 78795 - DNA, 601 bp, Homo sapiens
tgttattatcataacttataattatccttttacccatgtttatttgtgtggtttctatctctccctttacactgtgaaatctatggagatatgggtcatgacaatttattactgtatgcttcctgtccagcaaagatcctgcaactaatattcaataattatttgctgaatcgaaaatatatggaggaaacaatgaatgaccaatagctatcactgttattatggtcattgtcagtatcagaaaacaagttctcatttgataatgagagagttaaggacagaacaaagaatgcaccatttaacaatgcttgaaatgaagtcagaggtagttactagaaagggggagcatcaggtagttgccatttagttgtgaatccccagtgaaaaatttaatgcaatagaaggtgctgatatttctcattatctaccttgcatatatacacaaatgttttccttgattttgctaataatgagcgccctctgctgtctttaatctgcctcaatagcctgcgagctcttcatctggttgctttctaaaataaaaaataatgtagcaaataaattgtacttacctgtctggttgtactgcctatcttagaca

SEQ ID NO: 78796 - DNA, 297 bp, Homo sapiens
catggcccgctctagaggatccactcgcgttttgatggggagcatcaggtagttgccatttagttgtgaatccccagtgaaaaatttaatgcaatagaaggtgctgatatttctcattatctaccttgcatatatacacaaatgttttccttgattttgctaataatgagcgccctctgctgtctttaatctgcctcaatagcctgcgagctcttcatctggttgctttctaaaataaaaaataatgtagcaaataaattgtacttacctgtctggttgtactgcctatcttagaca

SEQ ID NO: 78797 - DNA, 470 bp, Homo sapiens
tgcctcccaaacccggttccaaatggcactccaccgcccgtggactgtgctggctgaagttggattttcctccttaaagtcaccaggatcaggagccctgattctgatgaatagaagctatgtttgggacgagtggtcactggctcacaggacgactctgattttagagggacggaacgaggacaggacgattgtgattttagaggggctgaacaagtacttattagcttagtgcagaaataaaagaacacaactatcccccctaatagtcaaccaccggtgactgcagcccctgaggatggccgcctgacagcttgggagcgcctcgggagtgctgtgcaacgtggagaagagcatcacacgtgtaatttgtgttccgcgattgaaatgggcagagaagcaacacgttagggtgcaggaacctctccccgtgtgcccccacccccagaatttggctgcagctcccatgc

SEQ ID NO: 78798 - DNA, 265 bp, Homo sapiens
gagtgcagtggtgcagtcttggctcactgcaacctccgcctcctgggttcaagcgattctcctgcttcaggctcccaggtagctgggactacacacagggtttcactgttttagtcagcctgatcttgaacttctgacctcaagtgatccgcccacctcagcctcccaaaatgctgggataacaggcatgagccactgctcccggcctagaaagataatttataaagaaacactaaattatggagttagcctaatcctctatttt

SEQ ID NO: 78799 - DNA, 435 bp, Homo sapiens
catcccccacagccattactcttctgacttctatcagtagaggttaaaactcaagtctcttttgagtaagtctttaatttaggctcattcctctcccttgttttcttcttctctggggacgatctaattttcaggggccttattaccatcctgccatcaggggagagttcttcttcaagaatgactgattctttaatctgtgtatacgcaataaaccatcccaaaccagagtgactaaatccaagacattattctctcatattttgttggttgactggattcagtggttcggcttatcctgcttgagctgtcttatgcagctgtgggcagatggcagctaaagccggatcctctggaggacagcactgggctggaaggcctgagttgcctgccttcttcactctgagaaaataaaaatgagcttgggctaagaat

SEQ ID NO: 78800 - DNA, 168 bp, Homo sapiens
cacctgcctcggcctcccaaagtgctgggattacaggtgtgagccaccacgcccggcctcattactattttaatttggattttaaaacattttaattgcagtaagacatgtaatataaaatttaccatcttcaccatttttaagtgtatagttcagtagtgttaagtc

SEQ ID NO: 78801 - DNA, 600 bp, Homo sapiens
gcaggccttctggaaacacctggctggaaagggccttggccaccagtgacctgtaagggggagatgaggttggtgagggagctgtgggcatcaccagtggcagccagatgcttgtccatcaacagctcccatcctgctgctcctcctacccacctatgcaccaggcatggccccaagaaagcgcctggcagcacagagtggttgggtgaatttctatactccctattgacttgggtcttggattaccgtctacctcaaggtcgaggaaggcaggggcatttattcatttttttgtcttcagcgcctagaacagtgactggcacgtagcgggcgcacagcaaatatataccaagtgtgcgagtgaatgactattctaggtttccagaggcaggggttgggaggaagtggcccctgttgagaagcccgggaagcccatctccagctgtctgtttccctttaagtcgaatcaagagcaacgtggatgggcggtacctggtggacggcgtccctttcagctgctgcaatcctagctcgccacggccctgcatccagtatcagatcaccaacaactcagcacactacagttacgaccaccagacg

SEQ ID NO: 78802 - DNA, 2992 bp, Homo sapiens
gaattcttcagcgcccaggaccaggactatcccctgctcaagctgtgattccgagacccctgccaccactactgcattcacggggatcccaggctagtgggactcgacatgggtagcccccagggcagctccctacagcttgggccatctgcacttttcccaaggccctaagtctccgcctctgggctcgttaaggtttggggtgggagctgtgctgtgggaagcaacccggactacacttggcaagcatggcgctactgaaagtcaagtttgaccagaagaagcgggtcaagttggcccaagggctctggctcatgaactggttctccgtgttggctggcatcatcatcttcagcctaggactgttcctgaagattgaactccgaaagaggagcgatgtgatgaataattctgagagccattttgtgcccaactcattgatagggatgggggtgctatcctgtgtcttcaactcgctggctgggaagatctgctacgacgccctggacccagccaagtatgccagatggaagccctggctgaagccgtacctggctatctgtgtcctcttcaacatcatcctcttccttgtggctctctgctgctttctgcttcggggctcgctggagaacaccctgggccaagggctcaagaacggcatgaagtactaccgggacacagacacccctggcaggtgtttcatgaagaagaccatcgacatgctgcagatcgagttcaaatgctgcggcaacaacggttttcgggactggtttgagattcagtggatcagcaatcgctacctggacttttcctccaaagaagtcaaagatcgaatcaagagcaacgtggatgggcggtacctggtggacggcgtccctttcagctgctgcaatcctagctcgccacggccctgcatccagtatcagatcaccaacaactcagcacactacagttacgaccaccagacggaggagctcaacctgtgggtgcgtggctgcagggctgccctgctgagctactacagcagcctcatgaactccatgggtgtcgtcacgctcctcatttggctcttcgaggtgaccattacaattgggctgcgctacctacagacgtcgctggatggtgtgtccaaccccgaggaatctgagagcgagagcgagggctggctgctggagaagagcgtgccggagacctggaaggcctttctggagagtgtgaagaagctgggcaagggcaaccaggtggaagccgagggcgcaggcgcaggccaggccccagaggctggctgagggccctggggcccctcccctcccgaacactgagaaatagtgcactccaagaaacgtggatctccccctcatccaactccgaaagtctgaatctcccaaggagggcaccatcttacagagactctccctgacggtggaatttaagtttagggtccctaaaagcatttgacacacagttgttgaatgactgacccaaaatgtgaatgaagctaatgtgaatgtgagtgaagctcccttcaggcccgctgccctaggatatgccctcctggtgactcgggggctgtctcagacgactagcccaggacccatctttctcacacggatttagtcccaccctatggccactggccgtatctgagggctgctccccttttagaatttacctcttatgagctccatgttgcttcactctatccaaagtgtcacttggtgcataagcacagaaatctgaaaaatggccatgttgtctttttttttttttttttttaatgccaagattgacaggttggccgtttgcttaatgccagaagttgggggaaagttacacttttctaagaataatggactcttaaggcattgagggctctaaacaggattctttaatcatggagcaagagaatttcaaggcaggggattttatcccccaccaaaaacacagtgaaaggcctgcttttgtgtcccattcacatgccctcggtcactgagtctggagtgaaccacgggttgaggaagtcaggctgttggcgtgtcccagcaccacaccatccctaaagtgccaggtgatctcctgtggctcatcggtggaagcagtggggtaggctgctgccctgctgtggaagaggagcaacaatcagacatgagtccaccctttggagaccaggcctcagctcttggtgggcccagggacacccacacaggtggccatcacagccccatggacaacactaattgtccacagcaaagggcaaggaatcctctgggagcttcttccgtttcttcccccaagatacccatcttgaaaaacactatttctggaatgcttctgcatcaaaggagattctttgagatagcccatcttcctgagctagcaaatacaggagttttcactttctttaggaaagagaagctttcaggggaaggagagaatgattttgctgacttcccaagccctggtgaccagaccaaggcagggcccagcataattcctccagttggatgaacattcaagagagctcgttcctacctggctggagaccgaggccagaaggcaaaaaccagaaagggaacagtccataacttacctctgcttctgaccgatggtgtttgggaataggttactttggactgagtttgggttctttgctgtcctaagaactttagtgtagagaaaataagacttctggtgctgctggggtatgttctgggcttaattcccccaagcagaagaccagatccaagatgtttggacaccctgtcagacgttggtcccaagtttaattagatttctgaatctcgttgaggccaaggaatgatccatactgaaaaaatgctgagccagccatctttggcaaaggtccctgagctcttgctatctctcaagagtgctgagaaccacggtgaaagtgctgctctaggcccacaagtgtaactatgctgttaacagctgtcaatagataattaaaattcatactgtatgaaaatca

SEQ ID NO: 78803 - DNA, 848 bp, Homo sapiens
caagatttctgaacaaagcaggggtgtgaagcagattgatgcaggtgctaggtgccctcctgcgtccctgagcctgtttctggccaaagctcacagagtacactgaaaacaaatggcacagctcacccatcacgtctgcttcccactaacaagcaagagtgccatgggatgaggtctcctaggccatgggcagaggcccctcaggggttcccaccatgcatggtcccctggagaagagcctgcaaggtggccgcgcccctgccctggctctcccagcccctgggctttgctgttctgcccactccaggacactgaggcctgctggagaggggggtaaaccctacctggggcaggcctcggggaagcctggcctcaggcttctcatgttgattgattcagagcaagtcaaatgcagcaggctcatccttgcttcagcttcaggtaggcctctttcttttccttttttgcaagaaatagattagatcccagtttgggtgcggatagcttgcgcctgtactcccaaaatgttgggattacaggcgtgaaacaccgcatccagctggaagttctttcctctaaatatctgcatggctcaccccctcaccaccttcaagtcgacacagctgtcagtcctcaatgagacctatcctgaccaccctttaaaatcttgcaacctccagcactcctactcctgtttgctatgtatttttctgtcaattacttatcaccatgagacttactacacatttttcttgtgtctttcctctttgtttcctctcttagaatttaagctcccctggggcaaaaatgtcagtctgtttgttcacgattgcatctccaggtgccca

SEQ ID NO: 78804 - DNA, 662 bp, Homo sapiens
agaccatcctggacaacatggtgaaaccccatctctactaaaaatacaaaaattagctgggcgcagtggtgcatgtctgtaatcccagctactcgggaggctgaggcaggagaattgcttgaaaaagggagtcggaggttgcaatgggccgagagatcatgccactgcactccagcctggcgacagagcgagactccatctcaaaaaaaatagataaataaaataaaataacaggtcctgatttgccgtgttgaccaatttctgtggtgtaaatacttccacagtgggaagaggcgcacacaggcagctgtcatgagctcttgtgagctaggaggggctggtcttgggctggatcttggcaggtcgcttaatcgctctagcctccagagactgagcaaaaggcaggtacctccctcaaaggttgttaggcagattaataacaaaacatggtaaagcagttagtgccgaacctagcactgtggtagacgtttgctaaatggcttgatttactagttgagattccattaggtaaagtcctaatgtcttatgcctcaaatgttttaatcttaaaaatagtcataaaatactttccccacctcttgctcaggataattggaatgattgagtgagatcatctgcatcaactgctttggaagtccaca

SEQ ID NO: 78805 - DNA, 692 bp, Homo sapiens
ttgtggaaatgttgaagcaaggctgtgccattactcaggtggagatctttggagaaggccacatagctagccgcctccacagggagacctaacaggtggcttagaccttgaataaagaaggaactgctttgtcgtgtagcaattttaaaaaagaaagaaaaaaataaggaggaaacatttagcaaactattttttgttgttgtagagacggggtttcaacatattgcccaggcgggtagtgaattcatgagctcaagtgatgcacctgcctcagcctcccaaagtgctgggattacaggcatgagtcactgctcccagccccaaactattttttttttaatttctcatgtgacatgtaggatagcctagggaaccctgctactcatcctctatcaccagaagccctgcttttttctctttgtctttcttagcatttgtgctgagtgatatggcccactctgtgattaaagtattgtgtttagtattacctttagcccaatacgcacaggtccctggctggttccttgggtgaagtgtgagaagcagcttgtctttttctctcacaatagtcatcttgagctttagggattttaacaaaggtctagctttaacagcagagtagagatagcgtatttacaagtgggtggatttccaggagaagttgatagtatagttgttatcagatgtgagaa

SEQ ID NO: 78806 - DNA, 479 bp, Homo sapiens
ttgattttgttcaaagatatctggggattggattggggaatgcttaatctgactattgaaagaaacatggatccctggagtatttcagatacggggttaccgccccagactgcctcccgccagtccacattagttctcattttccctcatgatggtgaaaaacagtggagagctagtaaagggtttatgcagaaaacaaggagaagagaatgtgaagtttgaagtgcctatggaacatccagctgataatcttgcctagtaagagcaaaagaagccaagagaacaccaacgtttaaggagcaggtagagaaaacccagcaaaaggacagaggaataagaggaccaaagaacaatgttaagaatcaaggagagaggtcaggcacgctggctcatgcctgtaatcccagcactttgggaggctgaggcaggtggatcacttgaggccaggagtatgagaccagcctgggcaatgtggtgaa

SEQ ID NO: 78807 - DNA, 198 bp, Homo sapiens
tttatattgttattttatatttagaggcagggtctctctctgtccaggctgaagtacagtggtgtgctctctgctcactgcagacttggcctcccaggttcacgcaattctcccaaagtgctgggattacaggcataagctgctgcgcctggcctaactacgtcatttttaaagtctatttaaaaatgtgtagtgaaa

SEQ ID NO: 78808 - DNA, 653 bp, Homo sapiens
tttttttatttttagtagagacgaggtttcactgtgttagacaggatggtctcgatctcctgacctcgtgatccacccacctcggtctcccaaagtgctgggattacaggcgtgacaccacgcccggcctaaaaattaatttttaaataataaatacttacaagaattgatagttttctctttctttttcttagtagtcctttttttttcttttattgcctaactcaatttaaacagcaaattttacttgtaacattccatgtctttcttagaataacaaattgattttgctgtctcatttgattcatattcttgttttcatttctgcacataatacccagcctaatctcagtattcagtggccttcctttatgttttaacttttgaaactactcaactcattagggctcaatttttagtcaattgttgtattttggcaactggcagaggatgtgattaaccagcattttgttttcctcttgcttatttcctttttcattttatgtaacgatttagtaaccattaggtaagttaatttgtacttttcttaaaaaaaaaactttcacaaaggcgtcctttctttctccctctttttaatatatacgagacccatcttaaaagggtgtacgttctgaatctgagtagggaatctc

SEQ ID NO: 78809 - DNA, 1001 bp, Homo sapiens
acaaagacttctacggacgcattcagaaccttgtgatgattacaaatctgagaaacacattgactttgcccaaaggtaagagcacaaaatgaagcaaattcctgactcctttggcagtgatctaatggttagattactaaatacggcatctttttttttttttaaggaatgtcactattactcatggagagaaacacatttctacagaatttttacaaactaaaaagaaattctaattaaaaacaattatctaacagtttttcctagcaccgaacatagtacttggtacatagaagatactgactaaatgtttgttgaatgagtgaatgaataaagggaaaaaaatcacatgtaatttgaagacacaagagaaaaatagtttgctcaggacataatgtagataaggcttactgtgtccagaatgtatttttgttttgttttgagataaggccttgctgtgttgctcagattagagtacagtggcaggatcagcttgctataaccacagactcctgggctccagggatcctcctgcttcagcctcccgagagtagctgggaatacagacatgcaccaccttgctcagcacattttttaactttttgtagagatactgtcttgctttgttacccagactggtctcaaaccagggtatgattcctcttcataacttttattgcaagacctgggataatttggttaattaaaaatttttctaaaatgaggatactgttcacctagcgagcatgtgatgaaagtaatattacaagatattctaggattcttagatgaattttattttttttactatctataaaaatttattgacatctactttctatttactgaattataatagtgtgtgtgtgtttcagtgttttaaaatggtctaccttcaaaagaaaaggtaccataaagtttttcaggttgtccaaattttgtatgtaaatcaagaacttctaaaagattagccatacaaaatggaggaagttaaaaaaaat

SEQ ID NO: 78810 - DNA, 335 bp, Homo sapiens
tgtttcaagcaagggacagacagactgtattgcaagctactgagatggaagacaatggacacagaacacaggtggcctttatcccaggtcagccacaatctaagccccacaggactctgcacatccttgattctgaccctatctcccacccatcctgtgttccagaaaccaccaccagcaccaaccgccctgtcattagactcttcttctccaagcatacttctagctgcactctcatgaaaacctggcttcccctggagctttcgggtgtagagatatcttttcgcaggatccctctacctctgggtctgtaggtggggttggggccctcctgg

SEQ ID NO: 78811 - DNA, 352 bp, Homo sapiens
tcaaaaactcagtgtcatagtattggcttgtagtgcattgggcagcaagccccttttgcttgataacattaggaccatgcctacctagccctatcacataccaggctttgtgatcctagataagtaatcacctctctaagcctctctttatctcaatgtaaaataagcaagttgaaacctttcggccaggggcagtggctcacacctgtaatctcagaagtttgggaggccgaggtgggcggattgcttgaggtcaggagtttgagacatccttctgctttggcctcccaaagtgctgcaattacaggtcactgcacccagcctatttttcattcttctcactaaagtctaa

SEQ ID NO: 78812 - DNA, 450 bp, Homo sapiens
attcctcccccgacccccgtttccccccgtaaagaatagccatgcgttattatttcaatgtgccccccaacgtttaagtgttataaacttaatccccagggtaacagcgttgggagatggacctttaagagatgattaggtcacgggggctctgccctcaagaatgcattaatgctgttatcagagaagtggcttcctgattttaaaacaaggatgaatttggccaggcccctttcctcctcactcttgccagggatgccccaacaagaaggccctcaccagatacagccccttgaccttggacttcccaacccccagaactgtaaaaaatcaatctctgttctttataaattacccaggctcaggtattctgttatagctatagcagcacaaaacgaactaagacaccatgtaaattacacttttcatacctcacctgattaacgattc

SEQ ID NO: 78813 - DNA, 650 bp, Homo sapiens
agttctgtgaactttatacatatgtataggttcgtgtagctaccaccgtcaggatacagaacaaacagttccctcaccaccaaaacctccctcatggtattcctttatagtcccatcttatttcaaggcaactcactaatcctgttctcaatcaccataattttgattaaaattatttttagtatacatattgattacatttccagtggacttgaattaattatatagtcttgatttgtaggttggcttaaactaaacagtttgtaaagaagaatatctggcttatttgatttgtataacttttttatggaaatactgaactgtatctgaagttttccatttccccagaacacaagtaaatacgttagaagttttagttaacccccccctttttttttttttgcatttatggtttaatattctgaatagataatagtcaaatgggtcaaaagtataacatataacagttgtaattttttggatttttactagctcggagtgtatatatgtgaattatttcagtaaaatacagattaccttctaaaacatataccagtttatactccacgtaatatgagagtgctcccttagtcttgccaacacaatgttgccaacagtgtgtatgtatacatatatatttttacatatgt

SEQ ID NO: 78814 - DNA, 569 bp, Homo sapiens
tgtccccatcactgatctcagcctttgctagtcatcagatgccaccaaatgaaaaagaagcaactcagagttggaagatgtgctgtgccccagctccgcagagccccacacccattcaaaactccctcaacaggtagctgtctgccatggatttatttcagctcttgcagaagacgttagtatttccaaactgtcgcttctaaaggaataagggacccaaattccctgactagcatgtcaaacaaaatttcctggtttttttcttctaaattcaccaacttttctatttgggctttcaggaatgcctcctccatctagcaatactgactctgagtcaagttcattttcagtgcacccagcccttctgctaattctcatttcgacttcaagctcttctgagcttccatcttttcagatgaagcgcacttgtttatggctgcacagatcccttccaagcccttctgatctctgtatctttgcagttactttctctggttcatttccatcttggtatttgccgaggccgtctgccttgagaaagtgatctcggctgtatttatgaggtgtcc

SEQ ID NO: 78815 - DNA, 536 bp, Homo sapiens
tcagactgtgccttgaaatatattaaagaacaaagcccctagtaatgctcattcctaagccaatcaaaggctctaaaataaaaagtttgttctttctagttttagtgttgtgttgaatttttaggcaatttttcaggtaagctttctaagagaaagagagctggggtgggcatctgtcattctcaggtccccaaatgtgtgggagagggctgtttttcttcctgttacagagtaattttaaagaaatgcagttgtttctgaaaccagcctctagttccatgtcacgaagaccttcagccactgtggttaagaaaatggttagtttgcctgtgtggtctgttgtcctctttcagagtctgcttatattttcctgtttcccacattcttgtttcctaccctcggctacactaatgtatcattttcttgtgttagatctctttactatagcaactaacagtctattatccataattccaaagtccaagaactctgaaaatgaaacccatttggtggcgaaactgccctctcctgatctg

SEQ ID NO: 78816 - DNA, 254 bp, Homo sapiens
gttcaatagtaaaattgttagtcttcaataaattacgcctgtatattttattattggaggagaagggaagggaggagaagggaaaggaatggaaaggaaggaaaggaagggaagggaggaagaaaggaaaacacaagaaaagttctacctccaagtagaatataaatgtgagaaacaaaacttttaaaagaaaaaatagaagaatatatttgtgatgttcaggtagtagcagattcttacataaaatataaagt

SEQ ID NO: 78817 - DNA, 754 bp, Homo sapiens
ggcgggcgcgtggctcacgcctgtaatcccagctctcagggaggctaagaggcgggaggatagcttgagccctggaggtcaagaatacagtgagccatagccatagtcactaggattgtacgtatgagccaccgcatccagcctcaatggcaatctcttaaaaatctaaataaatgaacggctcagtaacactgaggtttacttcacacaaaaacaatccaaaccttggcaagacggtgaaaccctgtctctacaaaaaatacaaaaaattaactgggcaaagtagcctgcacctatagtcccagctacttgggaggctgaggtgggaggatcgattgagccctggaggtcaagaatacagtgagccatagccatgattgtacactgtgccactccagcctgggtgacagagcaagaccctgtccccctctcaaaaaaaaaaaaaaaagaaagaaaaaatttgggggccagcactggaccctagagagaaggattttcaacaagcccctctgtttgtgggcggccgcaggacccaggatagtgttagtgacgacagtggccaatcacgttgcccccaaaaagaacccgctgggcgctaagcaattgttgcgtttgggttttcctcccaaataagaaaagcgcgcggcggacacccggcgtgtttgaaccaactccaagatgggtctgacggccatcgggcctactacagggggtcccagcgaggtagatatatcgaccgacacagtgaggggga

SEQ ID NO: 78818 - DNA, 1788 bp, Homo sapiens
aaatgagggagcttatttggatgatctttaaggtctcttttggcactaataactcggtgtctcttttttttcaccttcaccatttcagttgatccaccaaacaaacctgagagatcaggattggcatccaagagttgtctcggccaactctgatgtcatgcttactctgtactagacattgttccaagcattttacgtgcattaactcatttatcttcccaacatcttgtgagggaggcactatagtgagcctcatttgaagatgaggaaacaaaggtacaaagaggttctagctggacctctaaagtcacataataagtaagtggtagagctggagttcacatccaggcagtaggctccaaggtctgtgctcttaaccacattctgggctgcatcttttatagacaaactatgatccagagagattacgagacttggatcacataccaagagagtgttaaagccacattaggattcaattccagggccatcagattccaagtccactggagaaaagatgtatatctctaatctgttaacaaattgctcaactactcagactaatcccaggtgatggatgtctaatgctcaggaaaggcgagtcagtctctgaggcaacagatcccatgggcctgggtagaaaatgcccagtgcttcccagtcccaagtgctggctttccctgtatctgcctctgccaggcaacacttatcaggctcccaatcagcaggagcctccatgctccactttgaacagcctctatgctccagcaatggggcatttgtgaagagtgacttgattaacttttctgaccatgggtataatacagttgcttcagagggcagtggttctgggtgtgatttttacactgtaacattgtatacagtgtcatggataattactatttttttctggtcattaacactcacctactctagtactaggatttcagaccaaggtcctcatgacgcctggatattttagtatctatatccaataatcttttctctcctactgaatatccagggcaaagatgaaatcgttttctttaaaactgtcaaattctgtaaaactcaggagccagttcaagggaacaagcatcttcacaatagatggaatcaagagttaaatgttatagtgagtcactaggattgtacgtatgagccaccgcatccagcctcaatggcaatctcttaaaaatctaaataaatgaacggctcagtaacactgaggtttacttcacacaaaaacaatccaaaccttggcaagacggtgaaaccctgtctctacaaaaaatacaaaaaattaactgggcaaagtagcctgcacctatagtcccagctacttgggaggctgaggtgggaggatcgattgagccctggaggtcaagaatacagtgagccatagccatgattgtacactgtgccactccagcctgggtgacagagcaagaccctgtccccctctcaaaaaaaaaaaaaaaagaaagaaaaaatttgggggccagcactggaccctagagagaaggattttcaacaagcccctctgtttgtgggcggccgcaggacccaggatagtgttagtgacgacagtggccaatcacgttgcccccaaaaagaacccgctgggcgctaagcaattgttgcgtttgggttttcctcccaaataagaaaagcgcgcggcggacacccggcgtgtttgaaccaactccaagatgggtctgacggccatcgggcctactacagggggtcccagcgaggtagatatatcgaccgacacagtgaggggga

SEQ ID NO: 78819 - DNA, 248 bp, Homo sapiens
gcaaagatgaaatcgttttctttaaaactgtcaaattctgtaaaactcaggagccagttcaagggaacaagcatcttcacaatagatggaatcaagagttaaatgttatagtggcaagcttgtctactgggcaacagacaaccagacctgcttgtgagatggcagctccccagccctgctctgtgacctcatttctgtcaaatgaaaggcagcagcttccagctgattgcagcatagtgttcatcaat

SEQ ID NO: 78820 - DNA, 418 bp, Homo sapiens
gtgacttctgttcaacactatggaagtcctggacagtataataaaccaataaaaagcaagacaagacattaagattcgaaagaaagaagtaaaatgatagtcacaggaaacataattgcaaatttcttagttttctatataaacaaaccactagaagtaataagtgaaacagacttatcagactataaagtcactatacaaaaatcaattgtatatctacatactgacagcaaacaactggaaagtcaaattcaaaagttctactgacagtaatgtaaaattataaaatacttaagaataaatttttaaacaggcatgcaagactgctacattgaaaattatgaaatattgaggcccaatattaagatgttgattctcccccaaatgatctggactcaatacaattctctgagaaaat

SEQ ID NO: 78821 - DNA, 2903 bp, Homo sapiens
tgggtcggcgccgtttccagttgagagatggcggccgccgcaggtagatcgctcctgctgctcctctcctctcggggcggcggcggcgggggcgccggcggctgcggggcgctgactgccggctgcttccctgggctgggcgtcagccgccaccggcagcagcagcaccaccggacggtacaccagaggatcgcttcctggcagaatttgggagctgtttattgcagcactgttgtgccctctgatgatgttacagtggtttatcaaaatgggttacctgtgatatctgtgaggctaccatcccggcgtgaacgctgtcagttcacactcaagcctatctctgactctgttggtgtatttttacgacaactgcaagaagaggatcggggaattgacagagttgctatctattcaccagatggtgttcgcgttgctgcttcaacaggaatagacctcctcctccttgatgactttaagctggtcattaatgacttaacataccacgtacgaccaccaaaaagagtagagatggggttttgccatgttggccagaatggttttgaactcctgacctcaagttatctacctgcctcagcctcccaaagtgccgagattatagccgtacgaattgagattagcagaaaagctgagaagaggaccactttggtgctatggggtggccttgcctacatggccacacagtttggcattttggcccggcttacctggtgggaatattcctgggacatcatggagccagtaacatacttcatcacttatggaagtgccatggcaatgtatgcatattttgtaatgacacgccaggaatatgtttatccagaagccagagacagacaatacttactatttttccataaaggagccaaaaagtcacgttttgacctagagaaatacaatcaactcaaggatgcaattgctcaggcagaaatggaccttaagagactgagagacccattacaagtacatctgcctctccgacaaattggtgaaaaagattgatctgcaaaaagcctctgaatcctggcagaaggaacacctgtttgcctttttaattaaagcattgcaggtggaagctgggagccatgtggggggtagagcgtttttacctttaattataaaacaaaaacagaaaggatctgagggaagaagggaatgttaaaacctgaggatcaggcattgtggaatataagctcaaagggcttagtgaatattgtcttaaccaagtatctcagtttctggatgaaaatgatgcagttatatagttgagagattcataaagagaaaacaatgctgggggtgttcgtttcttgcatcttctttgcagagtcagcaaaagagtaacacaccagcaccccactcgactctatttgtttttaatttaactgtccctatttttgacataggagtaaataaatatactagaaaagcaaattctcatgatatgctaaaatatcattagcatttattttaaattggacccagtctctgcagagttaccaggaatctttccttccagcatccctttactgaccacctacctgtacctcttggttacactcattttttccatttgataattggaaccaacttataactgtttaataattgacactttagattatctcttaataccttcttaaatgtctatatatcccagtgctctggatcagtgtctaaaaatcactggcaacactgcatgaggttgttggtttgttttgttttattaattagtctttcacaggaggaataattgccctcctttatatacttatctattgataatcccctctccctccagaacacaaatcagagggaaagggggtgttcagctgtactaccaaatcaggaagatgtaaggtttacaaattggctaagaatcatggctctgtagccatttcaaccagaataattttattgctaatctgctttgtgtgacagcattccaggccagccagatgggactgccttgtctggaggctttgttcatctcgaaggacacacacttccacactgtttgtgagccctcccacctccacaacttcagttgtaaatcaagtgtgtggatctcaaagggtgcaatttatctttatataggaatacatttctagggcttccttcaagcccactctcttcaccctattttttcttatcttaaattgagagaaagagaattaatcttatactttgtcaaaacattttctaccatatttccagatgacatctgcgcttgaagagtcaaaggaatctgtgtctaatatcctgtttttaactgctgtaggggcaggatggaaaggatgatgggggctgccacaccactgattggccttttctttcacgtgattcatccttcctcattgtggcaaggagtttctttctctttttcttcctcctttgggatcattgtgtatgaaaagaaaaactttaaatgacaaacccagactccaggtgccttgcaaaggttgaaggccagccaggattgctgctgctgctgctactcctgccaacacccctttcattggcatgacggaatgaaaggatgcatgtctccacttcctgaccctccgcccacttccttctccctccaccacccccagtcgtcagctccttccctcatttatttttgttaagttgtgtgaattatttttaacccatttatcctgtttgtgcatagggtttttaagaagaaacagcacagtgcaacgagcaaatctttttggggtgtgtgggaagcaagggagggaggacatggagaaaagttctttaaacaaatagcaaactattgaacatgtgtaaaatcctgtatcatttatgaaatatgtataaaaagcaatgtaccttctggaacaataaatacttattcaatttttgaaaaaacatctcat

SEQ ID NO: 78822 - DNA, 2966 bp, Homo sapiens
tgggtcggcgccgtttccagttgagagatggcggccgccgcaggtagatcgctcctgctgctcctctcctctcggggcggcggcggcgggggcgccggcggctgcggggcgctgactgccggctgcttccctgggctgggcgtcagccgccaccggcagcagcagcaccaccggacggtacaccagaggatcgcttcctggcagaatttgggagctgtttattgcagcactgttgtgccctctgatgatgttacagtggtttatcaaaatgggttacctgtgatatctgtgaggctaccatcccggcgtgaacgctgtcagttcacactcaagcctatctctgactctgttggtgtatttttacgacaactgcaagaagaggatcggggaattgacagagttgctatctattcaccagatggtgttcgcgttgctgcttcaacaggaatagacctcctcctccttgatgactttaagctggtcattaatgacttaacataccacgtacgaccaccaaaaagagacctcttaagtcatgaaaatgcagcaacgctgaatgatgtaaagacattggtccagcaactatacaccacactgtgcattgagcagcaccagttaaacaaggaaagggagcttattgaaagactagaggatctcaaagagcagctggctcccctggaaaaggtacgaattgagattagcagaaaagctgagaagaggaccactttggtgctatggggtggccttgcctacatggccacacagtttggcattttggcccggcttacctggtgggaatattcctgggacatcatggagccagtaacatacttcatcacttatggaagtgccatggcaatgtatgcatattttgtaatgacacgccaggaatatgtttatccagaagccagagacagacaatacttactatttttccataaaggagccaaaaagtcacgttttgacctagagaaatacaatcaactcaaggatgcaattgctcaggcagaaatggaccttaagagactgagagacccattacaagtacatctgcctctccgacaaattggtgaaaaagattgatctgcaaaaagcctctgaatcctggcagaaggaacacctgtttgcctttttaattaaagcattgcaggtggaagctgggagccatgtggggggtagagcgtttttacctttaattataaaacaaaaacagaaaggatctgagggaagaagggaatgttaaaacctgaggatcaggcattgtggaatataagctcaaagggcttagtgaatattgtcttaaccaagtatctcagtttctggatgaaaatgatgcagttatatagttgagagattcataaagagaaaacaatgctgggggtgttcgtttcttgcatcttctttgcagagtcagcaaaagagtaacacaccagcaccccactcgactctatttgtttttaatttaactgtccctatttttgacataggagtaaataaatatactagaaaagcaaattctcatgatatgctaaaatatcattagcatttattttaaattggacccagtctctgcagagttaccaggaatctttccttccagcatccctttactgaccacctacctgtacctcttggttacactcattttttccatttgataattggaaccaacttataactgtttaataattgacactttagattatctcttaataccttcttaaatgtctatatatcccagtgctctggatcagtgtctaaaaatcactggcaacactgcatgaggttgttggtttgttttgttttattaattagtctttcacaggaggaataattgccctcctttatatacttatctattgataatcccctctccctccagaacacaaatcagagggaaagggggtgttcagctgtactaccaaatcaggaagatgtaaggtttacaaattggctaagaatcatggctctgtagccatttcaaccagaataattttattgctaatctgctttgtgtgacagcattccaggccagccagatgggactgccttgtctggaggctttgttcatctcgaaggacacacacttccacactgtttgtgagccctcccacctccacaacttcagttgtaaatcaagtgtgtggatctcaaagggtgcaatttatctttatataggaatacatttctagggcttccttcaagcccactctcttcaccctattttttcttatcttaaattgagagaaagagaattaatcttatactttgtcaaaacattttctaccatatttccagatgacatctgcgcttgaagagtcaaaggaatctgtgtctaatatcctgtttttaactgctgtaggggcaggatggaaaggatgatgggggctgccacaccactgattggccttttctttcacgtgattcatccttcctcattgtggcaaggagtttctttctctttttcttcctcctttgggatcattgtgtatgaaaagaaaaactttaaatgacaaacccagactccaggtgccttgcaaaggttgaaggccagccaggattgctgctgctgctgctactcctgccaacacccctttcattggcatgacggaatgaaaggatgcatgtctccacttcctgaccctccgcccacttccttctccctccaccacccccagtcgtcagctccttccctcatttatttttgttaagttgtgtgaattatttttaacccatttatcctgtttgtgcatagggtttttaagaagaaacagcacagtgcaacgagcaaatctttttggggtgtgtgggaagcaagggagggaggacatggagaaaagttctttaaacaaatagcaaactattgaacatgtgtaaaatcctgtatcatttatgaaatatgtataaaaagcaatgtaccttctggaacaataaatacttattcaatttttgaaaaaacatctcat

SEQ ID NO: 78823 - DNA, 3133 bp, Homo sapiens
cggccgccttgtgtgtgccaggagagtggcagtgccatgctgctgggagctgccccggagagcagcccaggaccccggcggggccgcccctcgtcctctctcgtccccgaggggtcgggcaggaaggaaaatcaaactttattcccctctgtgacttcctctgtgtgtgtgcatggggaaccggctccctcgagatggatgctgcattgcttcaggaggcaagcttcatcctcttgggtccttaaaggtgcttttgggggtcctttcgagggctactgtataagcgtgttcacgcgtgcctgaagcgggaagggtggtcagcaggcacaggagaagcgaatatggtacaccagaggatcgcttcctggcagaatttgggagctgtttattgcagcactgttgtgccctctgatgatgttacagtggtttatcaaaatgggttacctgtgatatctgtgaggctaccatcccggcgtgaacgctgtcagttcacactcaagcctatctctgactctgttggtgtatttttacgacaactgcaagaagaggatcggggaattgacagagttgctatctattcaccagatggtgttcgcgttgctgcttcaacaggaatagacctcctcctccttgatgactttaagctggtcattaatgacttaacataccacgtacgaccaccaaaaagagacctcttaagtcatgaaaatgcagcaacgctgaatgatgtaaagacattggtccagcaactatacaccacactgtgcattgagcagcaccagttaaacaaggaaagggagcttattgaaagactagaggatctcaaagagcagctggctcccctggaaaaggtacgaattgagattagcagaaaagctgagaagaggaccactttggtgctatggggtggccttgcctacatggccacacagtttggcattttggcccggcttacctggtgggaatattcctgggacatcatggagccagtaacatacttcatcacttatggaagtgccatggcaatgtatgcatattttgtaatgacacgccaggaatatgtttatccagaagccagagacagacaatacttactatttttccataaaggagccaaaaagtcacgttttgacctagagaaatacaatcaactcaaggatgcaattgctcaggcagaaatggaccttaagagactgagagacccattacaagtacatctgcctctccgacaaattggtgaaaaagattgatctgcaaaaagcctctgaatcctggcagaaggaacacctgtttgcctttttaattaaagcattgcaggtggaagctgggagccatgtggggggtagagcgtttttacctttaattataaaacaaaaacagaaaggatctgagggaagaagggaatgttaaaacctgaggatcaggcattgtggaatataagctcaaagggcttagtgaatattgtcttaaccaagtatctcagtttctggatgaaaatgatgcagttatatagttgagagattcataaagagaaaacaatgctgggggtgttcgtttcttgcatcttctttgcagagtcagcaaaagagtaacacaccagcaccccactcgactctatttgtttttaatttaactgtccctatttttgacataggagtaaataaatatactagaaaagcaaattctcatgatatgctaaaatatcattagcatttattttaaattggacccagtctctgcagagttaccaggaatctttccttccagcatccctttactgaccacctacctgtacctcttggttacactcattttttccatttgataattggaaccaacttataactgtttaataattgacactttagattatctcttaataccttcttaaatgtctatatatcccagtgctctggatcagtgtctaaaaatcactggcaacactgcatgaggttgttggtttgttttgttttattaattagtctttcacaggaggaataattgccctcctttatatacttatctattgataatcccctctccctccagaacacaaatcagagggaaagggggtgttcagctgtactaccaaatcaggaagatgtaaggtttacaaattggctaagaatcatggctctgtagccatttcaaccagaataattttattgctaatctgctttgtgtgacagcattccaggccagccagatgggactgccttgtctggaggctttgttcatctcgaaggacacacacttccacactgtttgtgagccctcccacctccacaacttcagttgtaaatcaagtgtgtggatctcaaagggtgcaatttatctttatataggaatacatttctagggcttccttcaagcccactctcttcaccctattttttcttatcttaaattgagagaaagagaattaatcttatactttgtcaaaacattttctaccatatttccagatgacatctgcgcttgaagagtcaaaggaatctgtgtctaatatcctgtttttaactgctgtaggggcaggatggaaaggatgatgggggctgccacaccactgattggccttttctttcacgtgattcatccttcctcattgtggcaaggagtttctttctctttttcttcctcctttgggatcattgtgtatgaaaagaaaaactttaaatgacaaacccagactccaggtgccttgcaaaggttgaaggccagccaggattgctgctgctgctgctactcctgccaacacccctttcattggcatgacggaatgaaaggatgcatgtctccacttcctgaccctccgcccacttccttctccctccaccacccccagtcgtcagctccttccctcatttatttttgttaagttgtgtgaattatttttaacccatttatcctgtttgtgcatagggtttttaagaagaaacagcacagtgcaacgagcaaatctttttggggtgtgtgggaagcaagggagggaggacatggagaaaagttctttaaacaaatagcaaactattgaacatgtgtaaaatcctgtatcatttatgaaatatgtataaaaagcaatgtaccttctggaacaataaatacttattcaatttttgaaaaaacatctcat

SEQ ID NO: 78824 - DNA, 2911 bp, Homo sapiens
tgggtcggcgccgtttccagttgagagatggcggccgccgcaggtagatcgctcctgctgctcctctcctctcggggcggcggcggcgggggcgccggcggctgcggggcgctgactgccggctgcttccctgggctgggcgtcagccgccaccggcagcagcagcaccaccggacggtacaccagaggatcgcttcctggcagaatttgggagctgtttattgcagcactgttgtgccctctgatgatgttacagtggtttatcaaaatgggttacctgtgatatctgtgaggctaccatcccggcgtgaacgctgtcagttcacactcaagcctatctctgactctgttggtgtatttttacgacaactgcaagaagaggatcggggaattgacagagttgctatctattcaccagatggtgttcgcgttgctgcttcaacaggaatagacctcctcctccttgatgactttaagctggtcattaatgacttaacataccacgtacgaccaccaaaaagagacctcttaagtcatgaaaatgcagcaacgctgaatgatgtaaagacattggtccagcaactatacaccacactgtgcattgagcagcaccagttaaacaaggaaagggagcttattgaaagactagaggatctcaaagagcagctggctcccctggaaaaggtacgaattgagattagcagaaaagctgagaagaggaccactttggtgctatggggtggccttgcctacatggccacacagtttggcattttggcccggcttacctggtgggaatattcctgggacatcatggagccagtaacatacttcatcacttatggaagtgccatggcaatgtatgcatattttgtaatgacacgccaggaatatgtttatccagaagccagagacagacaatacttactatttttccataaaggagccaaaaagtcacgttttgacctagagaaatacaatcaactcaaggatgcaattgctcaggcagaaatggaccttaagagactgagagacccattacaagtacatctgcctctccgacaaattggtgaaaaagattgatctgcaaaaagcctctgaatcctggcagaaggaacacctgtttgcctttttaattaaagcattgcaggtggaagctgggagccatgtggggggtagagcgtttttacctttaattataaaacaaaaacagaaaggatctgagggaagaagggaatgttaaaacctgaggatcaggcattgtggaatataagctcaaagggcttagtgaatattgtcttaaccaagtatctcagtttctggatgaaaatgatgcagttatatagttgagagattcataaagagaaaacaatgctgggggtgttcgtttcttgcatcttctttgcagagtcagcaaaagagtaacacaccagcaccccactcgactctatttgtttttaatttaactgtccctatttttgacataggagtaaataaatatactagaaaagcaaattctcatgatatgctaaaatatcattagcatttattttaaattggacccagtctctgcagagttaccaggaatctttccttccagcatccctttactgaccacctacctgtacctcttggttacactcattttttccatttgataattggaaccaacttataactgtttaataattgacactttagattatctcttaataccttcttaaatgtctatatatcccagtgctctggatcagtgtctaaaaatcactggcaacactgcatgaggttgttggtttgttttgttttattaattagtctttcacaggaggaataattgccctcctttatatacttatctattgataatcccctctccctccagaacacaaatcagagggaaagggggtgttcagctgtactaccaaatcaggaagatgtaaggtttacaaattggctaagaatcatggctctgtagccatttcaaccagaataattttattgctaatctgctttgtgtgacagcattccaggccagccagatgggactgccttgtctggaggctttgttcatctcgaaggacacacacttccacactgtttgtgagccctcccacctccacaacttcagttgtaaatcaagtgtgtggatctcaaagggtgcaatttatctttatataggaatacatttctagggcttccttcaagcccactctcttcaccctattttttcttatcttaaattgagagaaagagaattaatcttatactttgaatctgtgtctaatatcctgtttttaactgctgtaggggcaggatggaaaggatgatgggggctgccacaccactgattggccttttctttcacgtgattcatccttcctcattgtggcaaggagtttctttctctttttcttcctcctttgggatcattgtgtatgaaaagaaaaactttaaatgacaaacccagactccaggtgccttgcaaaggttgaaggccagccaggattgctgctgctgctgctactcctgccaacacccctttcattggcatgacggaatgaaaggatgcatgtctccacttcctgaccctccgcccacttccttctccctccaccacccccagtcgtcagctccttccctcatttatttttgttaagttgtgtgaattatttttaacccatttatcctgtttgtgcatagggtttttaagaagaaacagcacagtgcaacgagcaaatctttttggggtgtgtgggaagcaagggagggaggacatggagaaaagttctttaaacaaatagcaaactattgaacatgtgtaaaatcctgtatcatttatgaaatatgtataaaaagcaatgtaccttctggaacaataaatacttattcaatttttgaaaaaacatctcat

SEQ ID NO: 78825 - DNA, 4151 bp, Homo sapiens
ttacagcctgcttctgtgctgttccttcttgcctctaacttgtaaacaagacgtactaggacgatgctaatggaaagtcacaaaccgctgggtttttgaaaggatccttgggacctcatgcacatttgtggaaactggatggagagatttggggaagcatggactctttagccagcttagttctctgtggagtcagcttgctcctttctggaactgtggaaggtgccatggacttgatcttgatcaattccctacctcttgtatctgatgctgaaacatctctcacctgcattgcctctgggtggcgcccccatgagcccatcaccataggaagggactttgaagccttaatgaaccagcaccaggatccgctggaagttactcaagatgtgaccagagaatgggctaaaaaagttgtttggaagagagaaaaggctagtaagatcaatggtgcttatttctgtgaagggcgagttcgaggagaggcaatcaggatacgaaccatgaagatgcgtcaacaagcttccttcctaccagctactttaactatgactgtggacaagggagataacgtgaacatatctttcaaaaaggtattgattaaagaagaagatgcagtgatttacaaaaatggttccttcatccattcagtgccccggcatgaagtacctgatattctagaagtacacctgcctcatgctcagccccaggatgctggagtgtactcggccaggtatataggaggaaacctcttcacctcggccttcaccaggctgatagtccggagatgtgaagcccagaagtggggacctgaatgcaaccatctctgtactgcttgtatgaacaatggtgtctgccatgaagatactggagaatgcatttgccctcctgggtttatgggaaggacgtgtgagaaggcttgtgaactgcacacgtttggcagaacttgtaaagaaaggtgcagtggacaagagggatgcaagtcttatgtgttctgtctccctgacccctatgggtgttcctgtgccacaggctggaagggtctgcagtgcaatgaagcatgccaccctggtttttacgggccagattgtaagcttaggtgcagctgcaacaatggggagatgtgtgatcgcttccaaggatgtctctgctctccaggatggcaggggctccagtgtgagagagaaggcataccgaggatgaccccaaagatagtggatttgccagatcatatagaagtaaacagtggtaaatttaatcccatttgcaaagcttctggctggccgctacctactaatgaagaaatgaccctggtgaagccggatgggacagtgctccatccaaaagactttaaccatacggatcatttctcagtagccatattcaccatccaccggatcctcccccctgactcaggagtttgggtctgcagtgtgaacacagtggctgggatggtggaaaagcccttcaacatttctgttaaagttcttccaaagcccctgaatgccccaaacgtgattgacactggacataactttgctgtcatcaacatcagctctgagccttactttggggatggaccaatcaaatccaagaagcttctatacaaacccgttaatcactatgaggcttggcaacatattcaagtgacaaatgagattgttacactcaactatttggaacctcggacagaatatgaactctgtgtgcaactggtccgtcgtggagagggtggggaagggcatcctggacctgtgagacgcttcacaacagcttctatcggactccctcctccaagaggtctaaatctcctgcctaaaagtcagaccactctaaatttgacctggcaaccaatatttccaagctcggaagatgacttttatgttgaagtggagagaaggtctgtgcaaaaaagtgatcagcagaatattaaagttccaggcaacttgacttcggtgctacttaacaacttacatcccagggagcagtacgtggtccgagctagagtcaacaccaaggcccagggggaatggagtgaagatctcactgcttggacccttagtgacattcttcctcctcaaccagaaaacatcaagatttccaacattacacactcctcggctgtgatttcttggacaatattggatggctattctatttcttctattactatccgttacaaggttcaaggcaagaatgaagaccagcacgttgatgtgaagataaagaatgccaccatcattcagtatcagctcaagggcctagagcctgaaacagcataccaggtggacatttttgcagagaacaacatagggtcaagcaacccagccttttctcatgaactggtgaccctcccagaatctcaagcaccagcggacctcggaggggggaagatgctgcttatagccatccttggctctgctggaatgacctgcctgactgtgctgttggcctttctgatcatattgcaattgaagagggcaaatgtgcaaaggagaatggcccaagccttccaaaacgtgagggaagaaccagctgtgcagttcaactcagggactctggccctaaacaggaaggtcaaaaacaacccagatcctacaatttatccagtgcttgactggaatgacatcaaatttcaagatgtgattggggagggcaattttggccaagttcttaaggcgcgcatcaagaaggatgggttacggatggatgctgccatcaaaagaatgaaagaatatgcctccaaagatgatcacagggactttgcaggagaactggaagttctttgtaaacttggacaccatccaaacatcatcaatctcttaggagcatgtgaacatcgaggctacttgtacctggccattgagtacgcgccccatggaaaccttctggacttccttcgcaagagccgtgtgctggagacggacccagcatttgccattgccaatagcaccgcgtccacactgtcctcccagcagctccttcacttcgctgccgacgtggcccggggcatggactacttgagccaaaaacagtttatccacagggatctggctgccagaaacattttagttggtgaaaactatgtggcaaaaatagcagattttggattgtcccgaggtcaagaggtgtacgtgaaaaagacaatgggaaggctcccagtgcgctggatggccatcgagtcactgaattacagtgtgtacacaaccaacagtgatgtatggtcctatggtgtgttactatgggagattgttagcttaggaggcacaccctactgcgggatgacttgtgcagaactctacgagaagctgccccagggctacagactggagaagcccctgaactgtgatgatgaggtgtatgatctaatgagacaatgctggcgggagaagccttatgagaggccatcatttgcccagatattggtgtccttaaacagaatgttagaggagcgaaagacctacgtgaataccacgctttatgagaagtttacttatgcaggaattgactgttctgctgaagaagcggcctaggacagaacatctgtataccctctgtttccctttcactggcatgggagacccttgacacctgctgagaaaacatgcctctgccaaaggatgtgatatataagtgtacatatgtgcttgaattctaacaagtcataggttaatatttaagacactgaaaaatctaagtgatataaatcagattcttctctctcaattttatccctcacctgtagcagccagtcccgtttcatttagtcatgtgaccactctgtcttgtgtttccacagcctgcaagtcagtccaggatgctaacatctaaaaatagacttaaatctcattgcttacaagcctaagaatctttagagaagtatacataagtttaggataaaataatgggattttcttttcttttctctggtaatattgacttgtatattttaagaaataacagaaagcctgggtgacatttgggagacatgtgacatttatatattgaattaatatccctacatgtattgcacattgtaaaaagttttagttttgatgagttgtgagtttaccttgtatactgtaggcacactttgcactgatatatcatgagtgaataaatgtcttgcctactcacgtctcaaaaaaaaa

SEQ ID NO: 78826 - DNA, 4483 bp, Homo sapiens
ttacagcctgcttctgtgctgttccttcttgcctctaacttgtaaacaagacgtactaggacgatgctaatggaaagtcacaaaccgctgggtttttgaaaggatccttgggacctcatgcacatttgtggaaactggatggagagatttggggaagcatggactctttagccagcttagttctctgtggagtcagcttgctcctttctggaactgtggaaggtgccatggacttgatcttgatcaattccctacctcttgtatctgatgctgaaacatctctcacctgcattgcctctgggtggcgcccccatgagcccatcaccataggaagggactttgaagccttaatgaaccagcaccaggatccgctggaagttactcaagatgtgaccagagaatgggctaaaaaagttgtttggaagagagaaaaggctagtaagatcaatggtgcttatttctgtgaagggcgagttcgaggagaggcaatcaggatacgaaccatgaagatgcgtcaacaagcttccttcctaccagctactttaactatgactgtggacaagggagataacgtgaacatatctttcaaaaaggtattgattaaagaagaagatgcagtgatttacaaaaatggttccttcatccattcagtgccccggcatgaagtacctgatattctagaagtacacctgcctcatgctcagccccaggatgctggagtgtactcggccaggtatataggaggaaacctcttcacctcggccttcaccaggctgatagtccggagatgtgaagcccagaagtggggacctgaatgcaaccatctctgtactgcttgtatgaacaatggtgtctgccatgaagatactggagaatgcatttgccctcctgggtttatgggaaggacgtgtgagaaggcttgtgaactgcacacgtttggcagaacttgtaaagaaaggtgcagtggacaagagggatgcaagtcttatgtgttctgtctccctgacccctatgggtgttcctgtgccacaggctggaagggtctgcagtgcaatgaagcatgccaccctggtttttacgggccagattgtaagcttaggtgcagctgcaacaatggggagatgtgtgatcgcttccaaggatgtctctgctctccaggatggcaggggctccagtgtgagagagaaggcataccgaggatgaccccaaagatagtggatttgccagatcatatagaagtaaacagtggtaaatttaatcccatttgcaaagcttctggctggccgctacctactaatgaagaaatgaccctggtgaagccggatgggacagtgctccatccaaaagactttaaccatacggatcatttctcagtagccatattcaccatccaccggatcctcccccctgactcaggagtttgggtctgcagtgtgaacacagtggctgggatggtggaaaagcccttcaacatttctgttaaagttcttccaaagcccctgaatgccccaaacgtgattgacactggacataactttgctgtcatcaacatcagctctgagccttactttggggatggaccaatcaaatccaagaagcttctatacaaacccgttaatcactatgaggcttggcaacatattcaagtgacaaatgagattgttacactcaactatttggaacctcggacagaatatgaactctgtgtgcaactggtccgtcgtggagagggtggggaagggcatcctggacctgtgagacgcttcacaacagcttctatcggactccctcctccaagaggtctaaatctcctgcctaaaagtcagaccactctaaatttgacctggcaaccaatatttccaagctcggaagatgacttttatgttgaagtggagagaaggtctgtgcaaaaaagtgatcagcagaatattaaagttccaggcaacttgacttcggtgctacttaacaacttacatcccagggagcagtacgtggtccgagctagagtcaacaccaaggcccagggggaatggagtgaagatctcactgcttggacccttagtgacattcttcctcctcaaccagaaaacatcaagatttccaacattacacactcctcggctgtgatttcttggacaatattggatggctattctatttcttctattactatccgttacaaggttcaaggcaagaatgaagaccagcacgttgatgtgaagataaagaatgccaccatcattcagtatcagctcaagggcctagagcctgaaacagcataccaggtggacatttttgcagagaacaacatagggtcaagcaacccagccttttctcatgaactggtgaccctcccagaatctcaagcaccagcggacctcggaggggggaagatgctgcttatagccatccttggctctgctggaatgacctgcctgactgtgctgttggcctttctgatcatattgcaattgaagagggcaaatgtgcaaaggagaatggcccaagccttccaaaacgtgagggaagaaccagctgtgcagttcaactcagggactctggccctaaacaggaaggtcaaaaacaacccagatcctacaatttatccagtgcttgactggaatgacatcaaatttcaagatgtgattggggagggcaattttggccaagttcttaaggcgcgcatcaagaaggatgggttacggatggatgctgccatcaaaagaatgaaagaatatgcctccaaagatgatcacagggactttgcaggagaactggaagttctttgtaaacttggacaccatccaaacatcatcaatctcttaggagcatgtgaacatcgaggctacttgtacctggccattgagtacgcgccccatggaaaccttctggacttccttcgcaagagccgtgtgctggagacggacccagcatttgccattgccaatagcaccgcgtccacactgtcctcccagcagctccttcacttcgctgccgacgtggcccggggcatggactacttgagccaaaaacagtttatccacagggatctggctgccagaaacattttagttggtgaaaactatgtggcaaaaatagcagattttggattgtcccgaggtcaagaggtgtacgtgaaaaagacaatgggaaggctcccagtgcgctggatggccatcgagtcactgaattacagtgtgtacacaaccaacagtgatgtatggtcctatggtgtgttactatgggagattgttagcttaggaggcacaccctactgcgggatgacttgtgcagaactctacgagaagctgccccagggctacagactggagaagcccctgaactgtgatgatgaggtgtatgatctaatgagacaatgctggcgggagaagccttatgagaggccatcatttgcccagatattggtgtccttaaacagaatgttagaggagcgaaagacctacgtgaataccacgctttatgagaagtttacttatgcaggaattgactgttctgctgaagaagcggcctaggacagaacatctgtataccctctgtttccctttcactggcatgggagacccttgacacctgctgagaaaacatgcctctgccaaaggatgtgatatataagtgtacatatgtgctgtacacctgggaccttcaccactgtagatcccatgcatggatctatgtagtatgctctgactctaataggactgtatatactgttttaagaatgggctgaaatcagaatgcctgtttgtggtttcatatgcaataatatatttttttaaaaatgtggacttcataggaaggcgtgagtacaattagtataatgcataactcattgttgtcctagatattttgatatttacctttatgttgaatgctattaaatgttttcctgtgtcaaagtaaaatattgttaataaacctaacaatgaccctgatagtacaggttaagtgagagaactatatgaattctaacaagtcataggttaatatttaagacactgaaaaatctaagtgatataaatcagattcttctctctcaattttatccctcacctgtagcagccagtcccgtttcatttagtcatgtgaccactctgtcttgtgtttccacagcctgcaagtcagtccaggatgctaacatctaaaaatagacttaaatctcattgcttacaagcctaagaatctttagagaagtatacataagtttaggataaaataatgggattttcttttcttttctctggtaatattgacttgtatattttaagaaataacagaaagcctgggtgacatttgggagacatgtgacatttatatattgaattaatatccctacatgtattgcacattgtaaaaagttttagttttgatgagttgtgagtttaccttgtatactgtaggcacactttgcactgatatatcatgagtgaataaatgtcttgcctactcacgtctcaaaaaaaaa

SEQ ID NO: 78827 - DNA, 354 bp, Homo sapiens
aaaaagaaaaaaaaagaaaaattagctgggtgtggtattacatgcctgtagtctcagctacccaggaggctgaggtggaaggattgtctgagttcaggaggttgaggctatagtgagccgtgctgtgatcctgccactgcactccagcctgggtaacagagcaagactctgtctccaaaaaaaaaaaaaaaaaaaaaagaaaaggaaaggaaaagaaacaaaacacatgcagatgtagattgcgtgaccagggaaaatctcagtgaggaattgacttttgcgtaaagacctgaaggaattgaggcagctgacaatgaatgtgggtatctgcgcaaagagcattccaagccaagg

SEQ ID NO: 78828 - DNA, 301 bp, Homo sapiens
ctggtctcgaactcctgacctcaggtgatccacctgcctcgccctcccaaagttctgggattacaggcgtgagtcaccgcgccctgaacctctatcttcatatgtagaatgggaccagttaagcgcgttgctcccactgcttaaaagatcaaatagcagcccccactatctttttttttaagtattggcacccgcccacccaacacacacactacacactattgataacttcctgtgctaagccaggggtaggcaaacattttctgtaaatggccaaataataaatattttaggctttctg

SEQ ID NO: 78829 - DNA, 1405 bp, Homo sapiens
taaattagaggattactagttctcttcaattataaaaataaaagaatcttatttcactgcctggtcctggaaacatgtactgcaatatacattgtgacaactttttacctgtcatgtttttagcttttacctgtgaatgtcttatcattgttcttatctgaaggatagatagttgctacaataataatagatggtgtgtatggtttttgagcctaaaaagtgtagttttatctgttgtacctatacaagcaggagaaatataacttgttaataattttagggtatgggcaggctgccatcctaaatatgaagtggtctttgtatttgcactttaatgtgttgaaatcatagctttcagtgatccaggattaggcagactcttttatgcaatctcttgtttccagttagaatagaagtcgtgtacttttgataacattaattataatatattttgagccctgtgaggttggtaacattattcccattttatgaatgaggaatgtgtgttaaggagtttgcccaagagtcacatagcaagtcatagtcatgctctctgaagcagcaataacttggcaataaaataaaaatgaagcatcttctgtatgtgttaacttttcagtgactgtttatgccttccagtattctttgtaaaccttgaattctttttttcacagatgattaaagtttatcaattgtaaaggtggaggaatttgggaactagacagtgcacacataaataataaatatgttcttcaaatattgggtgggctaatgtgggaggagtttgagaccagcctgggcaacatagtgagaccctcgtctctaaaaatatgaaaaataaaaaaaaaattttttaaatgtgtgatatgtttagatggaaatgaaacaatttgtcactgtctaacatgacttttagaaaagatattttaattactaatgggacattcacatgtgtttcagcaaggtgaaaaaattattcaggagttcctgtccaaggtgaaacaaatgccctttactgaaatgtcagaagaaaacatcacaataaagttaaaacagctaaaagctgaagtaatagcaaagaataatagctttgtaaatgaaatcatttcacgaataaaagttactacgtgaaaaatcccagtaatggaatgaaggtaatattgataagctattgtctgtaatagttttatattgttttatattaaccctttttccatagtgttaactgtcagtgcccatgggctatcaacttaataagatatttagtaatattttactttgaggacattttcaaagatttttattttgaaaaatgagagctgtaactgaggactgtttgcaattgacataggcaataataagtgatgtgctgaattttataaataaaatcatgtagtttgtggaa

SEQ ID NO: 78830 - DNA, 324 bp, Homo sapiens
gacagcatgatgttctggaagccaagagaaaagaggagtttgaggataaatggtcagccatgtcaaatgttgctgagatgctgaggacagcgactccaagtgcatcagcataggcattgccaggagctcatgaggaatgcagactgtcaggtcccaccccagacctactcaacagaaactacttggtaagcagattcccaggtggttccaggcaccttacagtttgaaaagcactgctgcatgctatcctaccttcctggtctgtaacatctgttgctgttgagtataaagacactgtgaacattgtaaaatctgcaattacaa

SEQ ID NO: 78831 - DNA, 2580 bp, Homo sapiens
attccatacagaggaaactaggactgtgtgaattccctgataatgatcagttctccaatcttgaggctctcctcatccagattggaccaaaggaatgtgttttacccggaggagagactgctggagacatggggaaactgagacagataattcaaagaggaggaattctgatcacagaaagaaaaaaagctgacttttccacaaaagacatttatcaggacctcaaccggttgttgaaaggcaaaaagggagagcagatgaatagtgctgtattgccagaaatggagaatcaggttgcagtttcatcactgtctgcggtaatcaagtttttagaactcttatcagatgattccaactttggacagtttgaactgactacttttgacttcagccagtatatgaaattggatattgcagcagtcagagcccttaacctttttcagggttctgttgaagataccactggctctcagtctctggctgccttgctgaataagtgtaaaacccctcaaggacaaagacttgttaaccagtggattaagcagcctctcatggataagaacagaatagaggagagattgaatttagtggaagcttttgtagaagatgcagaattgaggcagactttacaagaagatttacttcgtcgattcccagatcttaaccgacttgccaagaagtttcaaagacaagcagcaaacttacaagattgttaccgactctatcagggtataaatcaactacctaatgttatacaggctctggaaaaacatgaaggaaaacaccagaaattattgttggcagtttttgtgactcctcttactgatcttcgttctgacttctccaagtttcaggaaatgatagaaacaactttagatatggatcaggtggaaaaccatgaattccttgtaaaaccttcatttgatcctaatctcagtgaattaagagaaataatgaatgacttggaaaagaagatgcagtcaacattaataagtgcagccagagatcttggcttggaccctggcaaacagattaaactggattccagtgcacagtttggatattactttcgtgtaacctgtaaggaagaaaaagtccttcgtaacaataaaaactttagtactgtagatatccagaagaatggtgttaaatttaccaacagcaaattgacttctttaaatgaagagtataccaaaaataaaacagaatatgaagaagcccaggatgccattgttaaagaaattgtcaatatttcttcaggctatgtagaaccaatgcagacactcaatgatgtgttagctcagctagatgctgttgtcagctttgctcacgtgtcaaatggagcacctgttccatatgtacgaccagccattttggagaaaggacaaggaagaattatattaaaagcatccaggcatgcttgtgttgaagttcaagatgaaattgcatttattcctaatgacgtatactttgaaaaagataaacagatgttccacatcattactggccccaatatgggaggtaaatcaacatatattcgacaaactggggtgatagtactcatggcccaaattgggtgttttgtgccatgtgagtcagcagaagtgtccattgtggactgcatcttagcccgagtaggggctggtgacagtcaattgaaaggagtctccacgttcatggctgaaatgttggaaactgcttctatcctcaggtctgcaaccaaagattcattaataatcatagatgaattgggaagaggaacttctacctacgatggatttgggttagcatgggctatatcagaatacattgcaacaaagattggtgctttttgcatgtttgcaacccattttcatgaacttactgccttggccaatcagataccaactgttaataatctacatgtcacagcactcaccactgaagagaccttaactatgctttatcaggtgaagaaaggtgtctgtgatcaaagttttgggattcatgttgcagagcttgctaatttccctaagcatgtaatagagtgtgctaaacagaaagccctggaacttgaggagtttcagtatattggagaatcgcaaggatatgatatcatggaaccagcagcaaagaagtgctatctggaaagagagcaaggtgaaaaaattattcaggagttcctgtccaaggtgaaacaaatgccctttactgaaatgtcagaagaaaacatcacaataaagttaaaacagctaaaagctgaagtaatagcaaagaataatagctttgtaaatgaaatcatttcacgaataaaagttactacgtgaaaaatcccagtaatggaatgaaggtaatattgataagctattgtctgtaatagttttatattgttttatattaaccctttttccatagtgttaactgtcagtgcccatgggctatcaacttaataagatatttagtaatattttactttgaggacattttcaaagatttttattttgaaaaatgagagctgtaactgaggactgtttgcaattgacataggcaataataagtgatgtgctgaattttataaataaaatcatgtagtttgtggaa

SEQ ID NO: 78832 - DNA, 2823 bp, Homo sapiens
attccatacagaggaaactaggactgtgtgaattccctgataatgatcagttctccaatcttgaggctctcctcatccagattggaccaaaggaatgtgttttacccggaggagagactgctggagacatggggaaactgagacagataattcaaagaggaggaattctgatcacagaaagaaaaaaagctgacttttccacaaaagacatttatcaggacctcaaccggttgttgaaaggcaaaaagggagagcagatgaatagtgctgtattgccagaaatggagaatcaggttgcagtttcatcactgtctgcggtaatcaagtttttagaactcttatcagatgattccaactttggacagtttgaactgactacttttgacttcagccagtatatgaaattggatattgcagcagtcagagcccttaacctttttcagggttctgttgaagataccactggctctcagtctctggctgccttgctgaataagtgtaaaacccctcaaggacaaagacttgttaaccagtggattaagcagcctctcatggataagaacagaatagaggagagattgaatttagtggaagcttttgtagaagatgcagaattgaggcagactttacaagaagatttacttcgtcgattcccagatcttaaccgacttgccaagaagtttcaaagacaagcagcaaacttacaagattgttaccgactctatcagggtataaatcaactacctaatgttatacaggctctggaaaaacatgaaggaaaacaccagaaattattgttggcagtttttgtgactcctcttactgatcttcgttctgacttctccaagtttcaggaaatgatagaaacaactttagatatggatcaggtggaaaaccatgaattccttgtaaaaccttcatttgatcctaatctcagtgaattaagagaaataatgaatgacttggaaaagaagatgcagtcaacattaataagtgcagccagagatcttggcttggaccctggcaaacagattaaactggattccagtgcacagtttggatattactttcgtgtaacctgtaaggaagaaaaagtccttcgtaacaataaaaactttagtactgtagatatccagaagaatggtgttaaatttaccaacagcaaattgacttctttaaatgaagagtataccaaaaataaaacagaatatgaagaagcccaggatgccattgttaaagaaattgtcaatatttcttcaggctatgtagaaccaatgcagacactcaatgatgtgttagctcagctagatgctgttgtcagctttgctcacgtgtcaaatggagcacctgttccatatgtacgaccagccattttggagaaaggacaaggaagaattatattaaaagcatccaggcatgcttgtgttgaagttcaagatgaaattgcatttattcctaatgacgtatactttgaaaaagataaacagatgttccacatcattactggccccaatatgggaggtaaatcaacatatattcgacaaactggggtgatagtactcatggcccaaattgggtgttttgtgccatgtgagtcagcagaagtgtccattgtggactgcatcttagcccgagtaggggctggtgacagtcaattgaaaggagtctccacgttcatggctgaaatgttggaaactgcttctatcctcaggtctgcaaccaaagattcattaataatcatagatgaattgggaagaggaacttctacctacgatggatttgggttagcatgggctatatcagaatacattgcaacaaagattggtgctttttgcatgtttgcaacccattttcatgaacttactgccttggccaatcagataccaactgttaataatctacatgtcacagcactcaccactgaagagaccttaactatgctttatcaggtgaagaaaggtgtctgtgatcaaagttttgggattcatgttgcagagcttgctaatttccctaagcatgtaatagagtgtgctaaacagaaagccctggaacttgaggagtttcagtatattggagaatcgcaaggatatgatatcatggaaccagcagcaaagaagtgctatctggaaagagagcaaggtgaaaaaattattcaggagttcctgtccaaggtgaaacaaatgccctttactgaaatgtcagaagaaaacatcacaataaagttaaaacagctaaaagctgaagtaatagcaaagaataatagctttgtaaatgaaatcatttcacgaataaaagttactacgtgaaaaatcccagtaatggaatgaaggtaatattgataagctattgtctgtaatagttttatattgttttatattaaccctttttccatagtgttaactgtcagtgcccatgggctatcaacttaataagatatttagtaatattttactttgaggacattttcaaagatttttattttgaaaaatgagagctgtaactgaggactgtttgcaattgacataggcaataataagtgatgtgctgaattttataaataaaatcatgtagtttgtggaaaaaaaaaaaaaaaaaaaaaaaaaaaaaaaaaaaaaaaacaaaacaaacaaaaaaaaaagaaagcacacacccaacgacagagaaaacaacagcacacaaacgcgacacaaaagagagaccaagcagccagcgccggccacacagcaaagaaccaagcgaagagcacacgccagacacaacgcccaacgacaagccacccacacgaaccagcggcgaggagaacaacacgacgagccacacgca

SEQ ID NO: 78833 - DNA, 2487 bp, Homo sapiens
attccatacagaggaaactaggactgtgtgaattccctgataatgatcagttctccaatcttgaggctctcctcatccagattggaccaaaggaatgtgttttacccggaggagagactgctggagacatggggaaactgagacagataattcaaagaggaggaattctgatcacagaaagaaaaaaagctgacttttccacaaaagacatttatcaggacctcaaccggttgttgaaaggcaaaaagggagagcagatgaatagtgctgtattgccagaaatggagaatcaggttgcagtttcatcactgtctgcggtaatcaagtttttagaactcttatcagatgattccaactttggacagtttgaactgactacttttgacttcagccagtatatgaaattggatattgcagcagtcagagcccttaacctttttcagggttctgttgaagataccactggctctcagtctctggctgccttgctgaataagtgtaaaacccctcaaggacaaagacttgttaaccagtggattaagcagcctctcatggataagaacagaatagaggagagattgaatttagtggaagcttttgtagaagatgcagaattgaggcagactttacaagaagatttacttcgtcgattcccagatcttaaccgacttgccaagaagtttcaaagacaagcagcaaacttacaagattgttaccgactctatcagggtataaatcaactacctaatgttatacaggctctggaaaaacatgaaggaaaacaccagaaattattgttggcagtttttgtgactcctcttactgatcttcgttctgacttctccaagtttcaggaaatgatagaaacaactttagatatggatcaggtggaaaaccatgaattccttgtaaaaccttcatttgatcctaatctcagtgaattaagagaaataatgaatgacttggaaaagaagatgcagtcaacattaataagtgcagccagagatcttggcttggaccctggcaaacagattaaactggattccagtgcacagtttggatattactttcgtgtaacctgtaaggaagaaaaagtccttcgtaacaataaaaactttagtactgtagatatccagaagaatggtgttaaatttaccaacagcaaattgacttctttaaatgaagagtataccaaaaataaaacagaatatgaagaagcccaggatgccattgttaaagaaattgtcaatatttcttcaggctatgtagaaccaatgcagacactcaatgatgtgttagctcagctagatgctgttgtcagctttgctcacgtgtcaaatggagcacctgttccatatgtacgaccagccattttggagaaaggacaaggaagaattatattaaaagcatccaggcatgcttgtgttgaagttcaagatgaaattgcatttattcctaatgacgtatactttgaaaaagataaacagatgttccacatcattactggccccaatatgggaggtaaatcaacatatattcgacaaactggggtgatagtactcatggcccaaattgggtgttttgtgccatgtgagtcagcagaagtgtccattgtggactgcatcttagcccgagtaggggctggtgacagtcaattgaaaggagtctccacgttcatggctgaaatgttggaaactgcttctatcctcaggtctgcaaccaaagattcattaataatcatagatgaattgggaagaggaacttctacctacgatggatttgggttagcatgggctatatcagaatacattgcaacaaagattggtgctttttgcatgtttgcaacccattttcatgaacttactgccttggccaatcagataccaactgttaataatctacatgtcacagcactcaccactgaagagaccttaactatgctttatcaggtgaagaaaggtgtctgtgatcaaagttttgggattcatgttgcagagcttgctaatttccctaagcatgtaatagagtgtgctaaacagaaagccctggaacttgaggagtttcagtatattggagaatcgcaaggatatgatatcatggaaccagcagcaaagaagtgctatctggaaagagagaacctcagagtgacagagccaaaagaccagtgcctcattttgctgacatggaaaaggaaacttcgtgggggaaagagatctgcttgcagtcggccagagagacagaaccagggcagtgcgactccaagtgcatcagcataggcattgccaggagctcatgaggaatgcagactgtcaggtcccaccccagacctactcaacagaaactacttggtaagcagattcccaggtggttccaggcaccttacagtttgaaaagcactgctgcatgctatcctaccttcctggtctgtaacatctgttgctgttgagtataaagacactgtgaacattgtaaaatctgcaattacaa

SEQ ID NO: 78834 - DNA, 1028 bp, Homo sapiens
attccatacagaggaaactaggactgtgtgaattccctgataatgatcagttctccaatcttgaggctctcctcatccagattggaccaaaggaatgtgttttacccggaggagagactgctggagacatggggaaactgagacagataattcaaagaggaggaattctgatcacagaaagaaaaaaagctgacttttccacaaaagacatttatcaggacctcaaccggttgttgaaaggcaaaaagggagagcagatgaatagtgctgtattgccagaaatggagaatcaggttgcagtttcatcactgtctgcggtaatcaagtttttagaactcttatcagatgattccaactttggacagtttgaactgactacttttgacttcagccagtatatgaaattggatattgcagcagtcagagcccttaacctttttcagggttctgttgaagataccactggctctcagtctctggctgccttgctgaataagtgtaaaacccctcaaggacaaagacttgttaaccagtggattaagcagcctctcatggataagaacagaatagaggagagattgaatttagtggaagcttttgtagaagatgcagaattgaggcagactttacaagaagatttacttcgtcgattcccagatcttaaccgacttgccaagaagtttcaaagacaagcagcaaacttacaagattgttaccgactctatcagggtataaatcaactacctaatgttatacaggctctggaaaaacatgaaggaaaacaccagaaattattgttggcagtttttgtgactcctcttactgatcttcgttctgacttctccaagtttcaggaaatgatagaaacaactttagatatggatcagatcaatgggagacagaaatattgttctgagacatctggaagccgaatgtgttttattcctgcctgtctgaggatgtggtcttgcctttgatagggcaaagttatttgtaaacattgctttaaataaaaacatgtaaaggtg

SEQ ID NO: 78835 - DNA, 387 bp, Homo sapiens
attcatgtagttttcaagtaagtagtatttgaatcttttctggttagataataattgtgagtatgttgtcatataataacagtatgtttttcactatttaaataattttagaattacattgaaaaatggtagtaggtatttatggaatactttttcttttcttcttgattatcaaggcttggaccctggcaaacagattaaactggattccagtgcacagtttggatattactttcgtgtaacctgtaaggaagaaaaagtccttcgtaacaataaaaactttagtactgtagatatccagaagaatggtgttaaatttaccaacaggtttgcaagtcgttattatatttttaaccctttattaattccctaaatgctctaacatga

SEQ ID NO: 78836 - DNA, 88 bp, Homo sapiens
catgacaaacttcaagaagaaatacagaatttaattaaaattcaggctatagctgtttgtatggaaaatggcaactttaaagaagcag

SEQ ID NO: 78837 - DNA, 235 bp, Homo sapiens
tgtgaaaatggggataacagagcttgccctgcaatgagcttatgaaacttgaatgagataatttatataaattataatgtgcataatttatataaaaggccttacttggtactggtgataagagtgatacatgttcatttctttccttcatttccttctccttctttcttagagaaccagtaggatcttagcagagtttgaaaaaggctaaaatctctcctttccccctacccct

SEQ ID NO: 78838 - DNA, 491 bp, Homo sapiens
gaggctgcttttacaggttactttttatttaattagaagaagcagtacactctaaaataaccaatctaaaagtatacataaccctataacatagtcatttattatcaagaatcatgtgctgaacagaattgtgtaatacttttatatgactgacaacacagtaggtttgtttacaccagcatcaccacaaacacaaataatgcgttgtgttacaatcttctgaagactatgatgtcattgggcaataggaagttttcagctccattataattgtatgggattatatgtgtcctcatacatgtggtccactgttgaccaaaacaatgctatgtgacacatgattataccccagcctgtctcctagtctgtatttctcaaacttgaataaagttcagaaaatttttgaagaaaaataattttcaaggacccaaacaatgtcttcttaaagggttctggaggacactggttggagaaacactgacttaatacta

SEQ ID NO: 78839 - DNA, 900 bp, Homo sapiens
ggctttgtgtttgtttcatggacttgctcatcaggtctaaacacagatctgcagctgtctccactgctcttgtagacactgagtgtgacttcaagaaagcaaaagaagggactggtaaatgaagtcacacacagctgaggacttgaaatgtgtttatgtcagacagtcccctatgtcagccccaaagtgtgcctgatcttgcaaccctggatcctagaacctgcctgcacctccctgtggactagaacacacaggtaggcagtttggttgccaatgtacccaaaccaccaggccaggcgtctagcatgagcaagcgccacttctcttgcagaccactgactcccaccctctgctcatgctcacggatggcttcttcccattctgcagggattgggatggaacctgaagccaggtgctgcctgaagcctgtggccccgccaggcacccaaggaaagccggcaaagacttggatgtgtgttgtctttgtttttattttaggctcagaaagaatttgacagaagtcttctttctactgctcacctctcaggattccctctgtgacttaatttactctggaaggctgtcgcccgccctcaattatagatggggaaataggcaaggaaaggcatgactcagattgggggggttagagcagcaccatagttagaacatagatttacatgtgagcctttacatggcatagttgtggttttgttttagccttttatttagaaataattacagactcagagaaagttgcaacagaacgtacagggaggcctgcgtgcccttcagtttccccagtggtagcatcccccatcactgtagagcagcatcacagctgacaaagtaccgttgagcttcccctagccacagaacctattccaattttactgcttt

SEQ ID NO: 78840 - DNA, 1333 bp, Homo sapiens
agcggaagggggagctgcgggccaggcggggccccctagcgtcgcgcagggtcggggactgcgcggcggtgccaggccgggcgtgggcgagagcacgaacgggctgcctgcgggctgagagcgtcgagctgtcaccatgggtgatcacgcttggagcttcctaaaggacttcctggccgggggcgtcgccgctgccgtctccaagaccgcggtcgcccccatcgagagggtcaaactgctgctgcaggtccagcatgccagcaaacagatcagtgctgagaagcagtacaaagggatcattgattgtgtggtgagaatccctaaggagcagggcttcctctccttctggaggggtaacctggccaacgtgatccgttacttccccacccaagctctcaacttcgccttcaaggacaagtacaagcagctcttcttagggggtgtggatcggcataagcagttctggcgctactttgctggtaacctggcgtccggtggggccgctggggccacctccctttgctttgtctacccgctggactttgctaggaccaggttggctgctgatgtgggcaagggcgccgcccagcgtgagttccatggtctgggcgactgtatcatcaagatcttcaagtctgatggcctgagggggctctaccagggtttcaacgtctctgtccaaggcatcattatctatagagctgcctacttcggagtctatgatactgccaaggggatgctgcctgaccccaagaacgtgcacatttttgtgagctggatgattgcccagagtgtgacggcagtcgcagggctggtgtcctacccctttgacactgttcgtcgtagaatgatgatgcagtccggccggaaaggggccgatattatgtacacggggacagttgactgctggaggaagattgcaaaagacgaaggagccaaggccttcttcaaaggtgcctggtccaatgtgctgagaggcatgggcggtgcttttgtattggtgttgtatgatgagatcaaaaaatatgtctaatgtaattaaaacacaagttcacagatttacagtgaacttgatctacaagttcacagatccattgtgtggtttaatagactattcctaggggaagtaaaaagatctgggataaaaccagactgaaaggaatacctcagaagagatgcttcattgagtgttcattaaaccacacatgtattttgtatttattttacatttaaattcccacagcaaatagaaaataatttatcatacttgtacaattaactgaagaattgataataactgaatgtgaaacatcaataaagaccacttaatgca

SEQ ID NO: 78841 - DNA, 1371 bp, Homo sapiens
agcggaagggggagctgcgggccaggcggggccccctagcgtcgcgcagggtcggggactgcgcggcggtgccaggccgggcgtgggcgagagcacgaacgggctgcctgcgggctgagagcgtcgagctgtcaccatgggtgatcacgcttggagcttcctaaaggacttcctggccgggggcgtcgccgctgccgtctccaagaccgcggtcgcccccatcgagagggtcaaactgctgctgcaggtccagcatgccagcaaacagatcagtgctgagaagcagtacaaagggatcattgattgtgtggtgagaatccctaaggagcagggcttcctctccttctggaggggtaacctggccaacgtgatccgttacttccccacccaagctctcaacttcgccttcaaggacaagtacaagcagctcttcttagggggtgtggatcggcataagcagttctggcgctactttgctggtaacctggcgtccggtggggccgctggggccacctccctttgctttgtctacccgctggactttgctaggaccaggttggctgctgatgtgggcaagggcgccgcccagcgtgagttccatggtctgggcgactgtatcatcaagatcttcaagtctgatggcctgagggggctctaccagggtttcaacgtctctgtccaaggcatcattatctatagagctgcctacttcggagtctatgatactgccaaggggatgctgcctgaccccaagaacgtgcacatttttgtgagctggatgattgcccagagtgtgacggcagtcgcagggctggtgtcctacccctttgacactgttcgtcgtagaatgatgatgcagtccggccggaaaggggccgatattatgtacacggggacagttgactgctggaggaagattgcaaaagacgaaggagccaaggccttcttcaaaggtgcctggtccaatgtgctgagaggcatgggcggtgcttttgtattggtgttgtatgatgagatcaaaaaatatgtctaatgtaattaaaacacaagttcacagatttacagtgaacttgatctacaagttcacagatccattgtgtggtttaatagactattcctaggggaagtaaaaagatctgggataaaaccagactgaaaggaatacctcagaagagatgcttcattgagtgttcattaaaccacacatgtattttgtatttattttacatttaaattcccacagcaaatagaaaataatttatcatacttgtacaattaactgaagaattgataataactgaatgtgaaacatcaataaagaccacttaatgcaaaaaagacaaaaacacaaaacacaaacaaaaggggggg

SEQ ID NO: 78842 - DNA, 1355 bp, Homo sapiens
agcggaagggggagctgcgggccaggcggggccccctagcgtcgcgcagggtcggggactgcgcggcggtgccaggccgggcgtgggcgagagcacgaacgggctgcctgcgggctgagagcgtcgagctgtcaccatgggtgatcacgcttggagcttcctaaaggacttcctggccgggggcgtcgccgctgccgtctccaagaccgcggtcgcccccatcgagagggtcaaactgctgctgcaggtccagcatgccagcaaacagatcagtgctgagaagcagtacaaagggatcattgattgtgtggtgagaatccctaaggagcagggcttcctctccttctggaggggtaacctggccaacgtgatccgttacttccccacccaagctctcaacttcgccttcaaggacaagtacaagcagctcttcttagggggtgtggatcggcataagcagttctggcgctactttgctggtaacctggcgtccggtggggccgctggggccacctccctttgctttgtctacccgctggactttgctaggaccaggttggctgctgatgtgggcaagggcgccgcccagcgtgagttccatggtctgggcgactgtatcatcaagatcttcaagtctgatggcctgagggggctctaccagggtttcaacgtctctgtccaaggcatcattatctatagagctgcctacttcggagtctatgatactgccaaggggatgctgcctgaccccaagaacgtgcacatttttgtgagctggatgattgcccagagtgtgacggcagtcgcagggctggtgtcctacccctttgacactgttcgtcgtagaatgatgatgcagtccggccggaaaggggccgatattatgtacacggggacagttgactgctggaggaagattgcaaaagacgaaggagccaaggccttcttcaaaggtgcctggtccaatgtgctgagaggcatgggcggtgcttttgtattggtgttgtatgatgagatcaaaaaatatgtctaatgtaattaaaacacaagttcacagatttacagtgaacttgatctacaagttcacagatccattgtgtggtttaatagactattcctaggggaagtaaaaagatctgggataaaaccagactgaaaggaatacctcagaagagatgcttcattgagtgttcattaaaccacacatgtattttgtatttattttacatttaaattcccacagcaaatagaaaataatttatcatacttgtacaattaactgaagaattgataataactgaatgtgaaacatcaataaagaccacttaatgcacttaatgcacgctttctatttt

SEQ ID NO: 78843 - DNA, 1735 bp, Homo sapiens
  misc_feature (1383)..(1383): n is a, c, g, or t
  misc_feature (1392)..(1392): n is a, c, g, or t
agcggaagggggagctgcgggccaggcggggccccctagcgtcgcgcagggtcggggactgcgcggcggtgccaggccgggcgtgggcgagagcacgaacgggctgcctgcgggctgagagcgtcgagctgtcaccatgggtgatcacgcttggagcttcctaaaggacttcctggccgggggcgtcgccgctgccgtctccaagaccgcggtcgcccccatcgagagggtcaaactgctgctgcaggtccagcatgccagcaaacagatcagtgctgagaagcagtacaaagggatcattgattgtgtggtgagaatccctaaggagcagggcttcctctccttctggaggggtaacctggccaacgtgatccgttacttccccacccaagctctcaacttcgccttcaaggacaagtacaagcagctcttcttagggggtgtggatcggcataagcagttctggcgctactttgctggtaacctggcgtccggtggggccgctggggccacctccctttgctttgtctacccgctggactttgctaggaccaggttggctgctgatgtgggcaagggcgccgcccagcgtgagttccatggtctgggcgactgtatcatcaagatcttcaagtctgatggcctgagggggctctaccagggtttcaacgtctctgtccaaggcatcattatctatagagctgcctacttcggagtctatgatactgccaaggggatgctgcctgaccccaagaacgtgcacatttttgtgagctggatgattgcccagagtgtgacggcagtcgcagggctggtgtcctacccctttgacactgttcgtcgtagaatgatgatgcagtccggccggaaaggggccgatattatgtacacggggacagttgactgctggaggaagattgcaaaagacgaaggagccaaggccttcttcaaaggtgcctggtccaatgtgctgagaggcatgggcggtgcttttgtattggtgttgtatgatgagatcaaaaaatatgtctaatgtaattaaaacacaagttcacagatttacagtgaacttgatctacaagttcacagatccattgtgtggtttaatagactattcctaggggaagtaaaaagatctgggataaaaccagactgaaaggaatacctcagaagagatgcttcattgagtgttcattaaaccacacatgtattttgtatttattttacatttaaattcccacagcaaatagaaaataatttatcatacttgtacaattaactgaagaattgataataactgaatgtgaaacatcaataaagaccacttaatgcactcgtgccgaattcggcacgaggtcaaatggatgtaatatagggtttgtntgctgcttntgatggctatgttttggagagagcaatcttgctgtgaaacagtgtggatgtaaattttataaggctgactcttactaaccaccatttcccctgtggtttgttatcagtacaattctttgttgcttaatctagagctatgcacaccaaattgctgagatgtttagtagctgataaagaaaccttttaaaaaaataatataaatgaatgaaatataaactgtgagataaatatcattatagcatgtaatattaaattcctcctgtctcctctgtcagtttgtgaagtgattgacattttgtagctagtttaaaattattaaaaattatagactccagactcgtgc

SEQ ID NO: 78844 - DNA, 1484 bp, Homo sapiens
agcggggggggctaagtggccaaggagagtgctttgtgagtctcttgttggaaggactgtctttaaattaaagcaattagagttactttataagatttacccaaatataagagctgaagagaataattcaaattgatcagaagaaaatactcaattactgacaaatgtcaattacatcaatagcctaggctgctcttgaactcctgggctcaaacgatcctcccctgtcggcctcccaaagtgctgggattacaagcttgaaccaccatgcccagcctcagaaattttttaaatgacagctcatacagttttcttttataaagccatgttatgatgctgcaagaagcccattgccagatgctggtgccttgacactggacttctcagcctccagaactgtccagcatgccagcaaacagatcagtgctgagaagcagtacaaagggatcattgattgtgtggtgagaatccctaaggagcagggcttcctctccttctggaggggtaacctggccaacgtgatccgttacttccccacccaagctctcaacttcgccttcaaggacaagtacaagcagctcttcttagggggtgtggatcggcataagcagttctggcgctactttgctggtaacctggcgtccggtggggccgctggggccacctccctttgctttgtctacccgctggactttgctaggaccaggttggctgctgatgtgggcaagggcgccgcccagcgtgagttccatggtctgggcgactgtatcatcaagatcttcaagtctgatggcctgagggggctctaccagggtttcaacgtctctgtccaaggcatcattatctatagagctgcctacttcggagtctatgatactgccaaggggatgctgcctgaccccaagaacgtgcacatttttgtgagctggatgattgcccagagtgtgacggcagtcgcagggctggtgtcctacccctttgacactgttcgtcgtagaatgatgatgcagtccggccggaaaggggccgatattatgtacacggggacagttgactgctggaggaagattgcaaaagacgaaggagccaaggccttcttcaaaggtgcctggtccaatgtgctgagaggcatgggcggtgcttttgtattggtgttgtatgatgagatcaaaaaatatgtctaatgtaattaaaacacaagttcacagatttacagtgaacttgatctacaagttcacagatccattgtgtggtttaatagactattcctaggggaagtaaaaagatctgggataaaaccagactgaaaggaatacctcagaagagatgcttcattgagtgttcattaaaccacacatgtattttgtatttattttacatttaaattcccacagcaaatagaaaataatttatcatacttgtacaattaactgaagaattgataataactgaatgtgaaacatcaataaagaccacttaatgca

SEQ ID NO: 78845 - DNA, 1085 bp, Homo sapiens
caaaagaattccgtggcatgctggacctgcagcagcagtacaaagggatcattgattgtgtggtgagaatccctaaggagcagggcttcctctccttctggaggggtaacctggccaacgtgatccgttacttccccacccaagctctcaacttcgccttcaaggacaagtacaagcagctcttcttagggggtgtggatcggcataagcagttctggcgctactttgctggtaacctggcgtccggtggggccgctggggccacctccctttgctttgtctacccgctggactttgctaggaccaggttggctgctgatgtgggcaagggcgccgcccagcgtgagttccatggtctgggcgactgtatcatcaagatcttcaagtctgatggcctgagggggctctaccagggtttcaacgtctctgtccaaggcatcattatctatagagctgcctacttcggagtctatgatactgccaaggggatgctgcctgaccccaagaacgtgcacatttttgtgagctggatgattgcccagagtgtgacggcagtcgcagggctggtgtcctacccctttgacactgttcgtcgtagaatgatgatgcagtccggccggaaaggggccgatattatgtacacggggacagttgactgctggaggaagattgcaaaagacgaaggagccaaggccttcttcaaaggtgcctggtccaatgtgctgagaggcatgggcggtgcttttgtattggtgttgtatgatgagatcaaaaaatatgtctaatgtaattaaaacacaagttcacagatttacagtgaacttgatctacaagttcacagatccattgtgtggtttaatagactattcctaggggaagtaaaaagatctgggataaaaccagactgaaaggaatacctcagaagagatgcttcattgagtgttcattaaaccacacatgtattttgtatttattttacatttaaattcccacagcaaatagaaaataatttatcatacttgtacaattaactgaagaattgataataactgaatgtgaaacatcaataaagaccacttaatgca

SEQ ID NO: 78846 - DNA, 1176 bp, Homo sapiens
agcggaagggggagctgcgggccaggcggggccccctagcgtcgcgcagggtcggggactgcgcggcggtgccaggccgggcgtgggcgagagcacgaacgggctgcctgcgggctgagagcgtcgagctgtcaccatgggtgatcacgcttggagcttcctaaaggacttcctggccgggggcgtcgccgctgccgtctccaagaccgcggtcgcccccatcgagagggtcaaactgctgctgcaggtccagcatgccagcaaacagatcagtgctgagaagcagtacaaagggatcattgattgtgtggtgagaatccctaaggagcagggcttcctctccttctggaggggtaacctggccaacgtgatccgttacttccccacccaagctctcaacttcgccttcaaggacaagtacaagcagctcttcttagggggtgtggatcggcataagcagttctggcgctactttgctggtaacctggcgtccggtggggccgctggggccacctccctttgctttgtctacccgctggactttgctaggaccaggttggctgctgatgtgggcaagggcgccgcccagcgtgagttccatggtctgggcgactgtatcatcaagatcttcaagtctgatggcctgagggggctctaccagggtttcaacgtctctgtccaaggcatcattatctatagagctgcctacttcggagtctatgatactgccaaggggatgctgcctgaccccaagaacgtgcacatttttgtgagctggatgattgcccagagtgtgacggcagtcgcagggctggtgtcctacccctttgacactgttcgtcgtagaatgatgatgcagtccggccggaaaggggccgatattatgtacacggggacagttgactgctggaggaagattgcaaaagacgaaggagccaaggccttcttcaaaggtgcctggtccaatgtgctgagaggcatgggcggtgcttttgtattggtgttgtatgatgagatcaaaaaatatgtctaatgtaattaaacacacatgtattttgtatttattttacatttaaattcccacagcaaatagaaaataatttatcatacttgtacaattaactgaagaattgataataactgaatgtgaaacatcaataaagaccacttaatgca

SEQ ID NO: 78847 - DNA, 1281 bp, Homo sapiens
agcggaagggggagctgcgggccaggcggggccccctagcgtcgcgcagggtcggggactgcgcggcggtgccaggccgggcgtgggcgagagcacgaacgggctgcctgcgggctgagagcgtcgagctgtcaccatgggtgatcacgcttggagcttcctaaaggacttcctggccgggggcgtcgccgctgccgtctccaagaccgcggtcgcccccatcgagagggtcaaactgctgctgcaggtccagcatgccagcaaacagatcagtgctgagaagcagtacaaagggatcattgattgtgtggtgagaatccctaaggagcagggcttcctctccttctggaggggtaacctggccaacgtgatccgttacttccccacccaagctctcaacttcgccttcaaggacaagtacaagcagctcttcttagggggtgtggatcggcataagcagttctggcgctactttgctggtaacctggcgtccggtggggccgctggggccacctccctttgctttgtctacccgctggactttgctaggaccaggttgactgtatcatcaagatcttcaagtctgatggcctgagggggctctaccagggtttcaacgtctctgtccaaggcatcattatctatagagctgcctacttcggagtctatgatactgccaaggggatgctgcctgaccccaagaacgtgcacatttttgtgagctggatgattgcccagagtgtgacggcagtcgcagggctggtgtcctacccctttgacactgttcgtcgtagaatgatgatgcagtccggccggaaaggggccgatattatgtacacggggacagttgactgctggaggaagattgcaaaagacgaaggagccaaggccttcttcaaaggtgcctggtccaatgtgctgagaggcatgggcggtgcttttgtattggtgttgtatgatgagatcaaaaaatatgtctaatgtaattaaaacacaagttcacagatttacagtgaacttgatctacaagttcacagatccattgtgtggtttaatagactattcctaggggaagtaaaaagatctgggataaaaccagactgaaaggaatacctcagaagagatgcttcattgagtgttcattaaaccacacatgtattttgtatttattttacatttaaattcccacagcaaatagaaaataatttatcatacttgtacaattaactgaagaattgataataactgaatgtgaaacatcaataaagaccacttaatgca

SEQ ID NO: 78848 - DNA, 1841 bp, Homo sapiens
agcggaagggggagctgcgggccaggcggggccccctagcgtcgcgcagggtcggggactgcgcggcggtgccaggccgggcgtgggcgagagcacgaacgggctgcctgcgggctgagagcgtcgagctgtcaccatgggtgatcacgcttggagcttcctaaaggacttcctggccgggggcgtcgccgctgccgtctccaagaccgcggtcgcccccatcgagagggtcaaactgctgctgcaggtccagcatgccagcaaacagatcagtgctgagaagcagtacaaagggatcattgattgtgtggtgagaatccctaaggagcagggcttcctctccttctggaggggtaacctggccaacgtgatccgttacttccccacccaagctctcaacttcgccttcaaggacaagtacaagcagctcttcttagggggtgtggatcggcataagcagttctggcgctactttgctggtaacctggcgtccggtggggccgctggggccacctccctttgctttgtctacccgctggactttgctaggaccaggttggctgctgatgtgggcaagggcgccgcccagcgtgagttccatggtctgggcgactgtatcatcaagatcttcaagtctgatggcctgagggggctctaccagggtttcaacgtctctgtccaaggcatcattatctatagagctgcctacttcggagtctatgatactgccaagggtgagagaggggcatcggggagaaggagggtggtgtggaaagaggatcctatgggatctataactcacaaaggacctgatatatattgatcttgttttttctagtctctgggataattgaggcttctgaatgaggaggtgatgtgcataagttaatagctgaagcgttccttgtgtcctctactgaaataaactctggcctttagttattcagagaggaggaggggggagcctgtctccctctagacacagccatagcagttactgagtttaacttgaagccacttccaatgccctgtatacaagctgagcactgcccctccggggtccggagagggcagcagccacctttgctgtctgcctggtcatatgtgaagcacctgcacaggggcaggttccccgcaaggtcagagcatggagctggaggtgcagtggcctctctccctccacctgctttctgctgagaacaggcacttcatagccgttcggcttctgggctctgtccacagggatgctgcctgaccccaagaacgtgcacatttttgtgagctggatgattgcccagagtgtgacggcagtcgcagggctggtgtcctacccctttgacactgttcgtcgtagaatgatgatgcagtccggccggaaaggggccgatattatgtacacggggacagttgactgctggaggaagattgcaaaagacgaaggagccaaggccttcttcaaaggtgcctggtccaatgtgctgagaggcatgggcggtgcttttgtattggtgttgtatgatgagatcaaaaaatatgtctaatgtaattaaaacacaagttcacagatttacagtgaacttgatctacaagttcacagatccattgtgtggtttaatagactattcctaggggaagtaaaaagatctgggataaaaccagactgaaaggaatacctcagaagagatgcttcattgagtgttcattaaaccacacatgtattttgtatttattttacatttaaattcccacagcaaatagaaaataatttatcatacttgtacaattaactgaagaattgataataactgaatgtgaaacatcaataaagaccacttaatgca

SEQ ID NO: 78849 - DNA, 1737 bp, Homo sapiens
agcggaagggggagctgcgggccaggcggggccccctagcgtcgcgcagggtcggggactgcgcggcggtgccaggccgggcgtgggcgagagcacgaacgggctgcctgcgggctgagagcgtcgagctgtcaccatgggtgatcacgcttggagcttcctaaaggacttcctggccgggggcgtcgccgctgccgtctccaagaccgcggtcgcccccatcgagagggtcaaactgctgctgcaggtccagcatgccagcaaacagatcagtgctgagaagcagtacaaagggatcattgattgtgtggtgagaatccctaaggagcagggcttcctctccttctggaggggtaacctggccaacgtgatccgttacttccccacccaagctctcaacttcgccttcaaggacaagtacaagcagctcttcttagggggtgtggatcggcataagcagttctggcgctactttgctggtaacctggcgtccggtggggccgctggggccacctccctttgctttgtctacccgctggactttgctaggaccaggttggctgctgatgtgggcaagggcgccgcccagcgtgagttccatggtctgggcgactgtatcatcaagatcttcaagtctgatggcctgagggggctctaccagggtttcaacgtctctgtccaaggcatcattatctatagagctgcctacttcggagtctatgatactgccaaggtctctgggataattgaggcttctgaatgaggaggtgatgtgcataagttaatagctgaagcgttccttgtgtcctctactgaaataaactctggcctttagttattcagagaggaggaggggggagcctgtctccctctagacacagccatagcagttactgagtttaacttgaagccacttccaatgccctgtatacaagctgagcactgcccctccggggtccggagagggcagcagccacctttgctgtctgcctggtcatatgtgaagcacctgcacaggggcaggttccccgcaaggtcagagcatggagctggaggtgcagtggcctctctccctccacctgctttctgctgagaacaggcacttcatagccgttcggcttctgggctctgtccacagggatgctgcctgaccccaagaacgtgcacatttttgtgagctggatgattgcccagagtgtgacggcagtcgcagggctggtgtcctacccctttgacactgttcgtcgtagaatgatgatgcagtccggccggaaaggggccgatattatgtacacggggacagttgactgctggaggaagattgcaaaagacgaaggagccaaggccttcttcaaaggtgcctggtccaatgtgctgagaggcatgggcggtgcttttgtattggtgttgtatgatgagatcaaaaaatatgtctaatgtaattaaaacacaagttcacagatttacagtgaacttgatctacaagttcacagatccattgtgtggtttaatagactattcctaggggaagtaaaaagatctgggataaaaccagactgaaaggaatacctcagaagagatgcttcattgagtgttcattaaaccacacatgtattttgtatttattttacatttaaattcccacagcaaatagaaaataatttatcatacttgtacaattaactgaagaattgataataactgaatgtgaaacatcaataaagaccacttaatgca

SEQ ID NO: 78850 - DNA, 1260 bp, Homo sapiens
agcggaagggggagctgcgggccaggcggggccccctagcgtcgcgcagggtcggggactgcgcggcggtgccaggccgggcgtgggcgagagcacgaacgggctgcctgcgggctgagagcgtcgagctgtcaccatgggtgatcacgcttggagcttcctaaaggacttcctggccgggggcgtcgccgctgccgtctccaagaccgcggtcgcccccatcgagagggtcaaactgctgctgcaggtccagcatgccagcaaacagatcagtgctgagaagcagtacaaagggatcattgattgtgtggtgagaatccctaaggagcagggcttcctctccttctggaggggtaacctggccaacgtgatccgttacttccccacccaagctctcaacttcgccttcaaggacaagtacaagcagctcttcttagggggtgtggatcggcataagcagttctggcgctactttgctggtaacctggcgtccggtggggccgctggggccacctccctttgctttgtctacccgctggactttgctaggaccaggttggctgctgatgtgggcaagggcgccgcccagcgtgagttccatggtctgggcgactgtatcatcaagatcttcaagtctgatggcctgagggggctctaccagggtttcaacgtctctgtccaaggcatcattatctatagagctgcctacttcggagtctatgatactgccaaggggatgctgcctgaccccaagaacgtgcacatttttgtgagctggatgattgcccagagtgtgacggcagtcgcagggctggtgtcctacccctttgacactgttcgtcgtagaatgatgatgcagtccggccggaaagggggtaagcttgtgctctactcatctaaacttgtttggttttgcccgaggagaacattttacagggctcctttcagtcttccttactggaaattaattttcaaaattatttgataaggacttagggaagaaagatggtattaattccccctaacgttctcaactatcctattagggaaaagtattttccattttattagagatgataagaacatgaatagtaagacatttagatgtgaatttaactaggtatccagcattatagagaccctaggccctcttcccttagagcctgggtgcaaaagctagggaaaagaagtagttagctacttcttacaaagaactcttgcttccctcctagttacaggtgttagtgggatggggtgttt

SEQ ID NO: 78851 - DNA, 1863 bp, Homo sapiens
agcggaagggggagctgcgggccaggcggggccccctagcgtcgcgcagggtcggggactgcgcggcggtgccaggccgggcgtgggcgagagcacgaacgggctgcctgcgggctgagagcgtcgagctgtcaccatgggtgatcacgcttggagcttcctaaaggacttcctggccgggggcgtcgccgctgccgtctccaagaccgcggtcgcccccatcgagagggtcaaactgctgctgcaggtccagcatgccagcaaacagatcagtgctgagaagcagtacaaagggatcattgattgtgtggtgagaatccctaaggagcagggcttcctctccttctggaggggtaacctggccaacgtgatccgttacttccccacccaagctctcaacttcgccttcaaggacaagtacaagcagctcttcttagggggtgtggatcggcataagcagttctggcgctactttgctggtaacctggcgtccggtggggccgctggggccacctccctttgctttgtctacccgctggactttgctaggaccaggttggctgctgatgtgggcaagggcgccgcccagcgtgagttccatggtctgggcgactgtatcatcaagatcttcaagtctgatggcctgagggggctctaccagggtttcaacgtctctgtccaaggcatcattatctatagagctgcctacttcggagtctatgatactgccaagggtgagagaggggcatcggggagaaggagggtggtgtggaaagaggatcctatgggatctataactcacaaaggacctgatatatattgatcttgttttttctagtctctgggataattgaggcttctgaatgaggaggtgatgtgcataagttaatagctgaagcgttccttgtgtcctctactgaaataaactctggcctttagttattcagagaggaggaggggggagcctgtctccctctagacacagccatagcagttactgagtttaacttgaagccacttccaatgccctgtatacaagctgagcactgcccctccggggtccggagagggcagcagccacctttgctgtctgcctggtcatatgtgaagcacctgcacaggggcaggttccccgcaaggtcagagcatggagctggaggtgcagtggcctctctccctccacctgctttctgctgagaacaggcacttcatagccgttcggcttctgggctctgtccacagggatgctgcctgaccccaagaacgtgcacatttttgtgagctggatgattgcccagagtgtgacggcagtcgcagggctggtgtcctacccctttgacactgttcgtcgtagaatgatgatgcagtccggccggaaaggggccgatattatgtacacggggacagttgactgctggaggaagattgcaaaagacgaaggagccaaggccttcttcaaaggtgcctggtccaatgtgctgagaggcatgggcggtgcttttgtattggtgttgtatgatgagatcaaaaaatatgtctaatgtaattaaaacacaagttcacagatttacagtgaacttgatctacaagttcacagatccattgtgtggtttaatagactattcctaggggaagtaaaaagatctgggataaaaccagactgaaaggaatacctcagaagagatgcttcattgagtgttcattaaaccacacatgtattttgtatttattttacatttaaattcccacagcaaatagaaaataatttatcatacttgtacaattaactgaagaattgataataactgaatgtgaaacatcaataaagaccacttaatgcacttaatgcacgctttctatttt

SEQ ID NO: 78852 - DNA, 523 bp, Homo sapiens
tgtttcaggggaaaagtctctttcctccagcgttacggagccctcaccagcatttgtttccacagccgatattatgtacacggggacagttgactgctggaggaagattgcaaaagacgaaggagccaaggccttcttcaaaggtgcctggtccaatgtgctgagaggcatgggcggtgcttttgtattggtgttgtatgatgagatcaaaaaatatgtctaatgtaattaaaacacaagttcacagatttacagtgaacttgatctacaagttcacagatccattgtgtggtttaatagactattcctaggggaagtaaaaagatctgggataaaaccagactgaaaggaatacctcagaagagatgcttcattgagtgttcattaaaccacacatgtattttgtatttattttacatttaaattcccacagcaaatagaaaataatttatcatacttgtacaattaactgaagaattgataataactgaatgtgaaacatcaataaagaccacttaatgca

SEQ ID NO: 78853 - DNA, 1768 bp, Homo sapiens
agcggaagggggagctgcgggccaggcggggccccctagcgtcgcgcagggtcggggactgcgcggcggtgccaggccgggcgtgggcgagagcacgaacgggctgcctgcgggctgagagcgtcgagctgtcaccatgggtgatcacgcttggagcttcctaaaggacttcctggccgggggcgtcgccgctgccgtctccaagaccgcggtcgcccccatcgagagggtcaaactgctgctgcaggtccagcatgccagcaaacagatcagtgctgagaagcagtacaaagggatcattgattgtgtggtgagaatccctaaggagcagggcttcctctccttctggaggggtaacctggccaacgtgatccgttacttccccacccaagctctcaacttcgccttcaaggacaagtacaagcagctcttcttagggggtgtggatcggcataagcagttctggcgctactttgctggtaacctggcgtccggtggggccgctggggccacctccctttgctttgtctacccgctggactttgctaggaccaggttggctgctgatgtgggcaagggcgccgcccagcgtgagttccatggtctgggcgactgtatcatcaagatcttcaagtctgatggcctgagggggctctaccagggtttcaacgtctctgtccaaggcatcattatctatagagctgcctacttcggagtctatgatactgccaagggtgagagaggggcatcggggagaaggagggtggtgtggaaagaggatcctatgggatctataactcacaaaggacctgatatatattgatcttgttttttctagtctctgggataattgaggcttctgaatgaggaggtgatgtgcataagttaatagctgaagcgttccttgtgtcctctactgaaataaactctggcctttagttattcagagaggaggaggggggagcctgtctccctctagacacagccatagcagttactgagtttaacttgaagccacttccaatgccctgtatacaagctgagcactgcccctccggggtccggagagggcagcagccacctttgctgtctgcctggtcatatgtgaagcacctgcacaggggcaggttccccgcaaggtcagagcatggagctggaggtgcagtggcctctctccctccacctgctttctgctgagaacaggcacttcatagccgttcggcttctgggctctgtccacagggatgctgcctgaccccaagaacgtgcacatttttgtgagctggatgattgcccagagtgtgacggcagtcgcagggctggtgtcctacccctttgacactgttcgtcgtagaatgatgatgcagtccggccggaaagggggtaagcttgtgctctactcatctaaacttgtttggttttgcccgaggagaacattttacagggctcctttcagtcttccttactggaaattaattttcaaaattatttgataaggacttagggaagaaagatggtattaattccccctaacgttctcaactatcctattagggaaaagtattttccattttattagagatgataagaacatgaatagtaagacatttagatgtgaatttaactaggtatccagcattatagagaccctaggccctcttcccttagagcctgggtgcaaaagctagggaaaagaagtagttagctacttcttacaaagaactcttgcttccctcctagttacaggtgttagtgggatggggtgttt

SEQ ID NO: 78854 - DNA, 949 bp, Homo sapiens
agcggaagggggagctgcgggccaggcggggccccctagcgtcgcgcagggtcggggactgcgcggcggtgccaggccgggcgtgggcgagagcacgaacgggctgcctgcgggctgagagcgtcgagctgtcaccatgggtgatcacgcttggagcttcctaaaggacttcctggccgggggcgtcgccgctgccgtctccaagaccgcggtcgcccccatcgagagggtcaaactgctgctgcaggtccagcatgccagcaaacagatcagtgctgagaagcagtacaaagggatcattgattgtgtggtgagaatccctaaggagcagggcttcctctccttctggaggggtaacctggccaacgtgatccgttacttccccacccaagctctcaacttcgccttcaaggacaagtacaagcagctcttcttagggggtgtggatcggcataagcagttctggcgctactttgctggtaacctggcgtccggtggggccgctggggccacctccctttgctttgtctacccgctggactttgctaggaccaggttggctgctgatgtgggcaagggcgccgcccagcgtgagttccatggtctgggcgactgtatcatcaagatcttcaagtctgatggcctgagggggctctaccagggtttcaacgtctctgtccaaggcatcattatctatagagctgcctacttcggagtctatgatactgccaagggatgctgcctgaccccaagaacgtgctataaaatcaccacggtctttagccatgcacaaacggtagttttgtgtgttggctgctccactgtcctctgccagcctacaggaggaaaagcaaggcttacagaaggatgttccttcaggaggaagcagcactaaaagcactctgagtcaagatgagtgggaaaccatctcaataaacacattttggat

SEQ ID NO: 78855 - DNA, 985 bp, Homo sapiens
cggctagtaggtggtagaattaatactgcatccaggtcttctgactacggactgggtggtttccctccaacacagcaggaatagaatcaccgcctaacacagccacaagatggcaagggaagaaaggatgacttattacacagctaatgcaaagggatctttgtcaagatcttcaatggtctcccctcctcctccccttcagtggacatcgccgttctctttctctgcatctgcctcagtactggggagattctgggactgaacctaagattcagatggcagagagcaaagggagaggggataagatgggcctgcaaaaccttagtgataaccagcggaaaactgattcgttgttgcttcttttcattttattcttttttaaaaaaattttttcttattttataaaatctagccactatactaatgaggatcattttattattcactgctgagattgagaaaatgactttggatttactaatgtaaaagtataatgccatgtcccttgattgtttttgtttttcttttctttttagagcctaaagatagtaatgagcagcttgagtcttaagttttttaatacaccgatggaaggtgacaaagattctttgcttggccaaactttagtcagactcctcaaccttctcgtaggtttatctgtgcatttccttggaaaatccagttagaaccctctaccctcaatatctgatcaggttcctcatcctctaccatccaaggtgatgtctgatcaccttgacctattttcagcaagaaacccctttactcctgaagttccttcttagtaattttttatccagtgaccccaagctttttgttccttggctataaattcccacttgcccatgctgtatttagagttgagcccactctctctctcctaattcagaatcccattgccatggttgctatacctatcctgatggtccggaataaaatctgtcttactgtgctttaataaatatca

SEQ ID NO: 78856 - DNA, 1121 bp, Homo sapiens
tgcagtggctcacgcctataatcccagcactttgggaagccgaggcgggaggatcacctgaggtcgggagtttgagaccaacctgaccaacacggagaaacctcgtctctactaaaaatacaaaattagccgggtgtggtggtgcatgcctgtaatcccaactacttgtgaggctgacacaggagaattgcttgaacccggaggcagaggttgaggtgaaccaagattgcgccactgcactctagcctgggcaacaagagcaaaactctgtctcaacaaaataaataaataaataaataaaattaaatttaaaaagtctgaaccacatatgccaagctactatgaaggaggggaggagatttgccgttcatcaattttcactgcatctaatagatttcaatataattgcagtctgtgcgaagtctttaaaagagctcagggctttggagacaactatgaagaagtggcactttgaaaatataggacccggccagacacagtggttcacgcctgtaatctcagcactctgggtggattgcttgagctcaggagttcaagaccagcctgggcaacatggcaaaacttcatctctacaaaaaatacaaaaattagccaggcatagtggcaagtgcctgtagtcccagctactccggatgctgaggtgggaggatggctcgagcccgggaggtggaggttgcagtgagcccagatggcgcaactgcactccagcctaggccacagagccagactctgtctcaaaaataaaaacaaatcaaatcaaaccaaacaaaaaataggacccactgaataagtttcagtaaggtgaactgtagagtttgaacagcatacacacaataatgacaaggggaaaaatgacaagtctagctagacaagaggttcaggtaagatatcaacacgttaggaagaagccaaaggacagcatgacacaatccaatacaacttaatacagctcattttatttatggactaatccaaggcatctcaaccttggcattattggcatggggggggctggggtcttcgttggggagtgtcctgtgcaccgcatgatgtttagtagcattcaggcctctctacccactagacgtgagcagcacctt

SEQ ID NO: 78857 - DNA, 312 bp, Homo sapiens
tttttgagacagggtcttgctctgtcacccaggttggagcgcagtggcttgatctcggctcactgcaacctccacctcccaggctcaagtgatcctcccacctcagtacaccccctcaacagtatctgggaccacagacacacgccaccaccaattctttccctcaccctgccataacttgggttgctgccactcaagcccctaacagaagtcccaagccccatattcttttctgtagctcaggatgctatataagcttcaattatctgacccttctttgagcctcatattttgtaggattcctgtgtacaa

SEQ ID NO: 78858 - DNA, 639 bp, Homo sapiens
ctcaaaggtttactcattcaaacattttaatattttttttactagaaagaatagcaaagatttttttaagggtaacacagtgtacctaacaaaatatagagttatgagcaatctcacatacagctaatacagtgtaagttctagaggacaatttcacacaatgtatttcttgaagcttccaaaatgttcacacacttttacacagatgctagcagtgtatactaaatgccagacaccaaactaggcccttcaaccacaaagggttgcttaattaaatttacagtttgttgaatctcatgatattctgtattacagaccaagtatctattaaaaatacagcagaaacacaatttattgacacacaaaagatgctgtgtaattttcaaaagcaaacaaaaaatataagcaaaacgattcaactttttcgtaagtatatactataagcaaaaatacacagaaaaaaccccgtctctactaaaaaatagaaaaattagtcgggcgtgatagtgggcacctgtaatcccagctactcaggaggctaaggcaggagaattgcttgaacccgggaggcagaggttgctgtgagccgagatcatgccactgcattccagcctgggtgacagagtgagactctgtctc

SEQ ID NO: 78859 - DNA, 546 bp, Homo sapiens
tcaccatcatatcctcactaaagaaaatgctaaagataaattttcaggaaaaggaaaaagatctcagatgacctgagatacaagaatgaaagaagagaaaaaaaggtgatacgtggatagatgtaaatgaacactgtataaacaatgataaagtcttgtggagttaaattagaaggacaatattagaatattaggccagaataacataaaaggcgactaggaaggataaattgagatatttaaaaaatatatgacttccagccaggtgcagtggctcacccctgtaatcccagcactttgggagcctgaagtgggcagatcacctgaggtcaggagtttgagaccagactggccaacatgggggaaccccgtttctactaaaaatacaaaaattagctgcgtgtggtggcaggcacctgtaatcccagctattcaggaggctgaggcaggagaatcgcttaaacctgggaggcagaggttgcagtgagctgagattgtgccactgcactccagcctgggcaacagagcaagtctctgtctccaaaa

SEQ ID NO: 78860 - DNA, 251 bp, Homo sapiens
agccgtggtgaagggaaatcaatgtctttgagtccatcagttggttccatttctactccgtggccactttgcatatgagcccatcaaacagtcagtgaggtggctgggaaggaagttgactgatatctacagggctgataattttgtccactggtttattcattacctttcccactgtggagtagggtctttgggagagagtacactttcgggaaacttttctagatgctgatccacatacctcctcaaac

SEQ ID NO: 78861 - DNA, 621 bp, Homo sapiens
  misc_feature (548)..(548): n is a, c, g, or t
  misc_feature (570)..(570): n is a, c, g, or t
  misc_feature (575)..(575): n is a, c, g, or t
  misc_feature (597)..(597): n is a, c, g, or t
  misc_feature (604)..(604): n is a, c, g, or t
atttgctacattggatcggcaactaaaccattatgtaaaggctgttcaatctacaataaatcatctaggtgtggtgcgcacgcctgtagttccagctacttgggaggctgaagtgggaggatcacttgagcccaggagttcaagatcagcctggacaacatagtgaaagaagaacgtccagaaaaaataccagatttaaaattattggtagagaagaaatttttggctttacagagcaagaattctgatgcagactttcaaaataatgaaaaatttgtacagtttaaacaacagctgaaagaactaaagaagcaatgtaagtcaacatgctttgctttggttcggctttttgaaattagggaactgacttgatgaacagccccagttaactgattttataaagtttgcttatctgcttggcttgatcctcattctaagttgcgttttattgttgttgcaattctgtattttgtctaatttttggttcaaatcagcctgctcatttctggaaagccaaccagtttccacaaagtgctccaggaaatttncccagcaggctaggtaaggggnatggncccaattgctggggaagggganatttggnaaaccaaaataaaaggt

SEQ ID NO: 78862 - DNA, 420 bp, Homo sapiens
gagggttggagacaggagacagtggggtgggaaatccaaatctcaactgcttttgtactgtctcctgctcccgagtgccccagagcccatccagaccctctgctgtctatgatatcctgttcagccctcaactttctctaccatccctgcaactggggttcactgtgagccaaaccagtttgcttcttgttttctaaaagcaggcagcccttcaggactgtctcattcaaggcatttcccacctctcttctccactcatatcccttcccaaactgcctttcctcatttctccgtctccagggagagggactccaggctaccacagacaaaaatggtggtcttcagtcctacgtaagccaacctgtgtgagtgtgtaaggactgaggttgctcacaaggagacacacagagtggatgccag

SEQ ID NO: 78863 - DNA, 824 bp, Homo sapiens
agtgagctgagattgcgcctcttcactccagcctgggcgacacagcgagactccgtctcaaaaaaaaaaaagaaaaaaaatccttctgagaccaagaataagagacttctttatttaccattgtcctggaggtcctagccagctcagtaaaacaaaatacatataaataaaaagtattaaggattgaaaaggaagaaacaaaatctaaaaaccactatatatacattattagacttattagaaacttagaaagtttattgaatacaaggaaatatggaaaaatcaattgcatttttatatatcagctacaaatagttttttaaagttttaaagatagaaaatttatcatagcattaaaaatatcaagtacctaggactctaacaaaagatgtatatatctctagagggaagactgaaactttgttcagagacattaaagaagacataagtcaatggagaaatatgccatgttcagactcactgtctccttcaccctcctttttattgctctggatatagtaccctacctggaacccaagtcctgtgcttcagaaaacttcctgcctccagttcttccacgtggaggatcagtcagctacaaacaaatgtcagtataagaaggaagaactcggtggctcactcttgtaatcccagcactttgggagactgaggcgggcggatcacaaggtcaggaaatcgagaccatcctggctaacacggtgaaaccccgtctctactaaaaatacaaaaattagccgggcgtggtggtgggcgcctgtagtcccagctactcgggaggctgaggcaggagaatggcgtgaacc

SEQ ID NO: 78864 - DNA, 259 bp, Homo sapiens
gaccttgcattaggcaactgtttcttagatatgacacctagagcaccaatgacaaaagaaaaagccgataaactggaatttgtcaaaatttaaaaatattgtccttcaaaggacaccatcaagaaagtaaaggccgggcgcagtggctcacacctgtaatcccagtgctttgagcgattggggtgggtagatcgcttgagcccaggtgttcgagaccagcctgggcaacatggcaaaatccagtctctaccaaaaatac

SEQ ID NO: 78865 - DNA, 1181 bp, Homo sapiens
  misc_feature (1061)..(1062): n is a, c, g, or t
gaattctgaccacataaacagacataaattacctagcctggcttggtcctaacaagttctgtaggtagaaaagaatggcattggagaactgctgatgtggttgggttatctgtcattgcactgtactgctggcctcacatgctacagatgagattctggggtgtctgaagggagcctgaagtgatgggtaggtctcatctccacaataatggactgtcatccaaagaagaatcactcagcactggcaacaaaaataatccattaacctatatcttcctggcctcctaaagaaactctcccctcaaaaaatgtcccagctgaagttgttgccatactagctctggaatgcatcgatatcatcactcattttctcatttcagccccctacccttctttacaagctaactgatacaaccattcggcctctccaaatccctgcaatttttctctacatgtgggaactcagccatgggaacttagatggcttcaccatcctacgctttggggtcctaatctgtaaaatgaaaaggatactagcatctatcccatagggtagtcggatgtgaggattgagacacagtaagagaaagtgtttattacactaccaggaaagtcctcaattaaagtgcagtacgattgttatcgttcattgatgctaattgatcataaatagagtaattatatgccaagtttgcgtgtgacatttcagctttaaacttgtggtctcaacttagttatcaatagcatcccttttccttcacaaaatgttcccacacgctaccttaacgataaggaacaagacaagaaggcaattgttagaactcagtcatcatattagtataggcagaaaagatgatttacagtaaaacatctgcctcagcttgttaaatcctgactgcctaaggaacagggttggtgctagaaccagtgacacgactgagtttctgcaacaagccaagggtatcaaaaagccatgagtatatgacttcagagagatgtgatatttttcgtctccttgaacatttttttcttcaccctccctaatccagagagaaagtggnnattttttttttaagagaagtggtcttgctctgttgcccaagctcaagtgcagtggcacaattatagtttgctttagccttgaactcctgggcccaagtgatcttcctgtctaggtctcc

SEQ ID NO: 78866 - DNA, 855 bp, Homo sapiens
acagaagagaatatctacccataaccttcaagtcggtatcctcgtctaatccactatagcctcctatctgaactattcaatagcctaattggtttctctggttcttctcttgctattctacaatgtactgtccattcagcagtcaggatgaatcccttaaatgtgaatccaatgtttcttacctgctcaaaacactccagtgtcttctcatcacactcagaataaaactaaaattccctacatggccgactaggtcaagtataatatatcctctaactgtatcactctgactgtatcacttgaaactctcctgctctcctattcagctctagccatactcattgtatttctgcttctggaaatacctcatgtctttatcagaggctttgtactcactacttcctctgcctagaatatttccctcttcagatagctttatatgctccgtccattcaatcatataaacagtgaaatgccagctcctctaaagggctcttcctcagcaaccaatctaaaatagtctccttaaattgcttacactattctgtgtagacctttccctcacttcgtcttcatagcatttacggctacattagaaatgtgttaatgttgttctctctctcaaaagtgtaagctcaattaagtagcttccccataaatcccaagggaatgcttgcccgtagtgatgacaatttagtgaacagttgaataagttaatgaataaattgataccatgtaccaatgtatataagtagtaagatggatcatttatcccaaacccactagacttccacataattgtgacttcatttgaattttttcttaggcttaatttattaaagattcttgtggacc

SEQ ID NO: 78867 - DNA, 370 bp, Homo sapiens
ccatttctgttcactcttttcccccacatcccacaactatacagatagggtaaaagagaatcaggtggatcaattaattatggcagcccacagaggtgctcttaaggtcccaggaaaaccataaaggaatagctctgggcgaactctggaatgctaacaatgcagaggccacaaggtagctcaaatcaatttaaccgatatttaataggcacctcctatgcacaagataccatgcagagatatacactatgatgaatgagacacaatatttactctcaaatatgttatctagtaaggggattagaaaagctatgttagtaagttcatacaacagctgccatcaaaggaataagccaacaccagggatatg

SEQ ID NO: 78868 - DNA, 478 bp, Homo sapiens
gtgagtggacttaagaactgaactgtactcttactaatggctcagatggtagattctgttatgtgtaccacaaccgaaaaacaaaaaatgggatacaagtgtcacctcattaggctcttgtgacataaaatgagttcattcacctaagtgcccagaacaatgcctgacccatataaaacgtgcagcaaaggttaactgctcttgccattttgttgttgttgttgttgttgttgttgttagttaagggctgagccttgggaccccagaaaataggttccttttctacacattaatcaattagcacgaacaaaattacgaatgcagtagtccttctgctgtcaattacaaagacatgctgcagtggcacagagttgctctttcacaaagactttccctgggcgttggtaaaacaccggggtgtaatagagcaggcagaattttcctcctcacacagaagagatcctgtaatctgcctgag

SEQ ID NO: 78869 - DNA, 281 bp, Homo sapiens
gaccaacattctctcctctccttatctggaaagccccataatgcctccttagtattaattctacctcaagtccccaaattcctggttgttgttaattggcttatgagagtcatctaacctaagaggaccaatcaaattctctctctgacaaactgttattaaggttcaagaagcctagttgttcttcataatatgagtgaatggaaaagacatttcattttgggggtgtgatggttaatactaagtgtcaacttgattggatcgaaggatgtaaagtattg

SEQ ID NO: 78870 - DNA, 658 bp, Homo sapiens
acaggctttgagttgtcactgccatttgtttatttgtttgtttcttgtctgagatggagtctcgctctgtcacccaggctggagtgcagtggtgtgatcttggctcactgcaacctctgcctccaaggttcaagtgattctcatgcctcagcctcccaaaaaactgggattacaggtgcacaccaccacacccagttaatttttgtatttttagtagaaacggtgtttcaccatgttggccaggctcatctcaaactcctgacctcaagtgatccccccgactcagcctgccaaagtgctgggattacgggtgtgagccactgcacctggcctgcagatttaaaaaaaagtatgcactgtttcacattaaagtataaagtcgatctgatattctatgaaatttctttagtctatgcttcttttagaaaaaagcaaataagggcagaattctctctctaggttctctacattccagattaactgagagttccagattaattagataagaagtatatatataaaacacaggttccatataaaatttaaagtagtttttttctgattctgtgaagaaagtcaagggtagcttgttggggataacattgaatctataaattacacaatagcaaagacttggagccaacctaaatgcccatca

SEQ ID NO: 78871 - DNA, 812 bp, Homo sapiens
atggagtcactcaccttagagtctgaattctgctaagtcaccatccacttcaaaaacgagttaactgaatccaaaggcctaaaaacagaatcttgggggagggggacaaagacaacagggggtctgtaagagcatttatgtaactaggaacatctgttttgggggctctttcgtagtattgtgtggaaataagttcaactactaaactctaaccataaaacagacacaaaaatctaatacagaaagctctttagagatcatccatcagagtagaaccttagtcatagaaactcgctcagaacataccaatctaaataaccaaactttccaagtgccaataaagatatatcaaatatgaactcttttggctataagtctgaggctcattacatccttctctgtcctttttaaaccatgtctgagaaacagaaccattaagtggagattaagtcatcactcattcagtttcactacacaccagtgataacttagccacacagatattaccaaagtgacccaaactcatatgctgtcccagtgcaggcctgtctccttctaaaaactatcatcaagatttcaaacatcatatgaaatgtaaaaacatgcatgggggctttgtggcatttattttgatctgacaccaacttttgctattctcccaaatccttaatatgttcagatatgttgttgccagacgcccccagtacctgcccaactggcaaatccagaggcttcttgtccttccccacctcttgaaagcctgccatcattcttcctacacacagcaatactactaactcccacatcaaatt

SEQ ID NO: 78872 - DNA, 788 bp, Homo sapiens
taatttcttggacactcacatcaagtaaatccttagtactacctgacaattgtacttttatttccattatattcaccctttagtttcctgtagaacgatatcatactttccagcttttaatccttttctctcatattagcaaaattccacagaatgaattgttcatattttctgtctacagtttccacctattttatgaacccattccacttatccctcctcccccatgtacagatctagctacttactcaacatctccttctcttagatgtctaatagacatcttaaactgaacatgtcccaaatagtttctgatttttccttctcaagtcttaagatgagtgtatatgtacatacccatattcatacccataccgcattcatacccatcctcccacctagatttactgttcttaacattttaaacaagtaaatataagtaaatagattttcccccaccaataaaaagtaaggtccatgacagcagatggttctctgttttgtttattgctgtatctgcacctggtacatactagggactttaaaaatatttgctaaatatactacctacttagtggaggaaaacttcataaagctgtacttgccattgcagggcttaatgcttgcattcctatatgttatactattcagttatgttgtttacaaataaggcacagcccactaattcccactacatttatttcactacctacaaatggacagtttgaccaatgttagtctagcggctaggccatctatatgttgatttcaccttcttacctatctct

SEQ ID NO: 78873 - DNA, 377 bp, Homo sapiens
taatttcttggacactcacatcaagtaaatccttagtactacctgacaattgtacttttatttccattatattcaccctttagtttcctgtagaacgatatcatactttcttgctctttaagcagatatctttgctatctttactctcagctgataaccttggttttggtttcactcagaaaatagaggcaagtagaagaggattttcacaggtttccaccactgcattgacccacctacctgcattgtgccctataaactaagcctttcccttggtgctgtgggtaaacttaagttcttagccagggcctactgaaggacactgctttagtagttctttttgctttcaggcatcattactttttccttttttgatg

SEQ ID NO: 78874 - DNA, 778 bp, Homo sapiens
taatgcttcagatagcagaggaccgacagctgtgactttatttggtgatggaataaataagagtctcactgtgtcacccaggattggctcgctgcatcacccaggatcggcccactgcaacctccaccttccaggttcaaacgattcttctgcctctgccttttgagtagctgggattacaggcacgagccaccatgcccagctaatttttgtatttttagtagagccgggctttcaccacgttggccaggctggtcttgaactcccgatctcagatgatctaccaaccttggccacccaaagtgctgggtttacaggtgtgagccaccatgcctgacctccaatttcatgaacttctcaggccctctgtgcatgccatgcttaataaggtaataaaaaggtaagattataaagaaggaagaggcctatcaaggaaagaaggctctttatttgctttgctgtcatggtatccttcccattccactggcttccagcacatatgtggaaacttttgggaaagttccccaaaactttggggaactgtgttccccctgaagtttggagggtgaggagtgaacaggaggttgagaagaatgagctggctgggttggacattcagaggtgacaatggtcagatcaaccttgatggagtcttgttctgtcaccaggctggagtgcagtggtgcgatctcaagctcactacaacctccaactcctgggttcaagtgaatcccctgctcagcctccctaagtagctgggactacaggccaaccacaa

SEQ ID NO: 78875 - DNA, 208 bp, Homo sapiens
ggagggtggggcatgggaggagggagagcatcaggaagaacagctaatggatgctgggcttaatacctaggtgatgggatgatctgtgcagcaaaccacaaggcacatgtttacctatgtaccaaactgcacactctatatcctgaacatgttcccttgagcttaaaagttggaaatcaaaaattaaaaaaaagaaaaaaaagaaaag

SEQ ID NO: 78876 - DNA, 986 bp, Homo sapiens
tctgttctccagtcccatttagttcccaaaggaatcatttacaaaccattgtctgatcttccggcccatttatttacagctccccctctttccccaatgaaaatgatacttaagtgtcagccatctatcggctctttgagttttcacattttgtatgactcctgtgcacacacatgcatgtaataactgttatacttgttaactttttttcattataggggtatccaccatgattatatatgatggggaggaaagggattactccatttctgcccctgcagtctgtaggcatgattgattacatcattggtcgccggtgattaactcagtctccaagccctgtcgtgtccctggaggttggagggtggcactgaaagctccaaccatctcatcatgctttgatctttccgatgaccagaccccaccctgaagctatctacgggtccccagcaacattcatttcgttatcatacaaatgacattcttacaatttcagagattccaagggctttaggaaatggagatgaagagcaaatatatatttcacaatatcacaaacatacccttgggaattagacctctgatctaatctaggctccctcacttgccatttttgtgaccttgaacaagttgttcatcttttctggatagttctctgttaaaaaaattaaaataaaaaaatggtggctatcaggttgttaggaggactagataagagaactatgtgaaggaccctgcacagtgctagcaacaaagttgtttagtaagtgctatttcaatttattttgcttccaagctcatgtgagctccctcagtgtgtaccaccaaatcacatgatgtgtatcccagtcaaatcttaaaggtcatccaccttgaatctttaagttaattaacgtgtgtttttaaaactgcattataagaacgttagggtttttgttttgatcctatggaagttaaattttttacacaagcattcaactgtttag

SEQ ID NO: 78877 - DNA, 416 bp, Homo sapiens
caggtggtgcccaggactaatgcctgtgagctcggcgtggcaccaggtgatgcgaacccctaacaccactgcgaatccctaacaccactcagtcgaaccgcaggcatgaggcagggcctggccatgggctctccttcaccgcctgggcttcttctccagggagggagctggggtggcatggagcctgcagaccggaagattcttccctgactggggcttgcctcagaggccctgggcctggctggggttccatattgattcattctcacatgggggacccctcggttctctgaaatccctgccccccatcactgcatcactgggcactgctgcccaccccaagcagttccttgggaaatggtgtcttggttctggctgctgtaacaataccagaggctggtaattcatacacaacg

SEQ ID NO: 78878 - DNA, 149 bp, Homo sapiens
cagaaatcattttctgttacgaaaatattaagataatttttaaacaatgcattctgaaaaacaacaaaataatcctataaaatcttgagctctgaagtgctgtgcctgcagcccaacatactgtgttccatcatctttcctttcccatt

SEQ ID NO: 78879 - DNA, 924 bp, Homo sapiens
agcgggttttagaggatgacaggtgctgtggagttgggagactgagactgtcaggagcgaggagggatggctgtaattttaaatagtggcatcatcaggatgaaccttgctgaactgaagccccttccatgacactaaagtaagaagataattctggtcatttcatccaagcccttcagattggcaggtgtttggttcaaacatatattcaggacatgacttattttgatatttgaggagccctcttctctccatcccctccggaaaaaaaaaaagttgattttccttgtgattcttctggaactccgaggcaacctgttttcccaagaacagggcaccgaggtggtcgcaagggtgcggagggaggatcgcccctgtgggagaggcgcgccggtctctctcagggacctgtagctacacgcagaagatgctgccaattgcgcggaggtctctgacgctgggtgctgaggacattgtactaatttaaatggtatcagagtgaacacgatgctacatgtagaatgaaacttcccaagccctcacctgaagagacaaggctgaagtcataaacatcatacgtggaaaagtattgcaaacctgcttctcttctgtgctggggtctgtaccaatgttcattgaaccaaacaaggtccctatcttacagaagatgcttcttgaaggatggcgtgttaatcttctaagtatgttctggttgcgaggatagagcactgtcacagctacagctatacctgtgcaaagccaggaataacacgctccctaggagagtctctagccttaatctgtagctgcaaatagaaatgacaattcattttctcaataatgaaatgtttttgggtagggctaaaagcagaatgaaccaccaaaaagccccttttgacatggtgcctgtgtaaagacaaaaaa

SEQ ID NO: 78880 - DNA, 790 bp, Homo sapiens
agcgggttttagaggatgacaggtgctgtggagttgggagactgagactgtcaggagcgaggagggatggctgtaattttaaatagtggcatcatcaggatgaaccttgctgaactgaagccccttccatgacactaaagtaagaagataattctggtcatttcatccaagcccttcagattggcaggtgtttggttcaaacatatattcaggacatgacttattttgatatttgaggagccctcttctctccatcccctccggaaaaaaaaaaagttgattttccttgtgattcttctggaactccgaggcaacctgttttcccaagaacagggcaccgaggtggtcgcaagggtgcggagggaggatcgcccctgtgggagaggcgcgccggtctctctcagggacctgtagctacacgcagaagatgctgccaattgcgcggaggaaaagtattgcaaacctgcttctcttctgtgctggggtctgtaccaatgttcattgaaccaaacaaggtccctatcttacagaagatgcttcttgaaggatggcgtgttaatcttctaagtatgttctggttgcgaggatagagcactgtcacagctacagctatacctgtgcaaagccaggaataacacgctccctaggagagtctctagccttaatctgtagctgcaaatagaaatgacaattcattttctcaataatgaaatgtttttgggtagggctaaaagcagaatgaaccaccaaaaagccccttttgacatggtgcctgtgtaaagacaaaaaa

SEQ ID NO: 78881 - DNA, 248 bp, Homo sapiens
gtttgtaaatgtatgattttgcttttaagcaaaacctgtgatcggttccaggggcctgggtctggatctggtgcagaatatctaacctttccagcaggcaaaagcagagaagaggggatcgccatgcattggaaattacttcccattcatgtcatccaaatcctcacacaccaaaaaaaattccatattttttcagtaagatagagtgagcaaggaagcaggaaaaaaagagagatgtgaactcctgc

SEQ ID NO: 78882 - DNA, 260 bp, Homo sapiens
aataatcaaaaatgcaaatttactggttattaatatttaagtaaagctatgcctcatgtctttgaatttaacatattactaaaacaaaaccatacagtgaattttctccatgaagaattgagtccaccatgtgtctaatatttccataaatattcttagtttctttcactgctcttgaacggacctcgtatctcttaagttcatctaaagtatcaacttaataaaactttttctttaccgtacttcttatggaacaaaaa

SEQ ID NO: 78883 - DNA, 425 bp, Homo sapiens
tagactgagctaatgagctaagacatggtttcctggtgatccatgggacctgaggagaactcaggattcttagaggacttggagctctgtagaccagattataatggtttaagttctaacttcacctgggagttggtgtgttttccattccccacagaagctgtacttcaagctatgttgatccctgctcactttctcctttctaacattcttgcctcagttttcctccaatggaaccctctacttctgcttgaggaacagtcattgcccttaatatcagctccccaccagaccataagctccatgagggcatggactatctctgttctgttgcctgccagatcctgagcaactggcaatagaagttcttaataaacatggctggatgagtaaataaagtgtcagtcctttaaccaaaaaaaaat

SEQ ID NO: 78884 - DNA, 427 bp, Homo sapiens
cagggcttcagttcctcactggtgtaggcgtcttaatatgttagcttgcttaatcaaagcatgtaagccaagaaggcaacagagagggtgccagtgaaatagaaataactgtcttttgtaacctagtcatggaagtaacatcctttgattttttttgtgtgtggtagaaataagtcacaatgtccagcccccacacaggacataaataccagcagacagggatcattgagagccatgtcagaagctattttgccttagttatataaaattatgatagactacattgagaatgagtttatagacaatctgtttagtttttttgtgagtgcaaagcccactattaattttgtgggaatttttagtatgggtaaattctttttaatatgatgtttaacaggaatgctgcctttctgtttctttgcctcag

SEQ ID NO: 78885 - DNA, 411 bp, Homo sapiens
gctgctgcctttggatggggcctgcgctccccagttttacaactccccatgtaggcaccctcccttgctgatttgtgccatttgccaggctcctgtaggcatttgagttcccagccctgccttgactgtgtctcataacttcctgtaaagcccaaatcctcccgcatggcacccaagatgaccccaacttacagtttctccttcatcctctgctctaaccttacagaatgatgtgccttttcttgagtttttcaagtctccttcacctggaatgcttccttccttcacctggaatgctttcttccctgacacgtctccagctaatggaaacccatgctcccagtaagacttcactcaagtgtcgtttgcttgatatttttgaagccttctccagctaagctatctgctcac

SEQ ID NO: 78886 - DNA, 637 bp, Homo sapiens
aaattcttgccagtgctatttgatgccctgttgaactttagccaaacttcattttataatgttctctcagtcctgagcatatataatatattttaatgaaattacgcttctgtattgactggcagacatcagaaacacattcacataggtcaaaagcagttgagctaagtgttgggtgggaggaactattaaaacagtacaggaaaaatatttggaaacaaaacaaaactttaaaataaaataacccaaataaacaattctctctctctctctctctctcacacacacacacacacacacgcacacagaacttggatgtggctattgggagttaatgtataattctgataatttgtgtatttcttcattatattaaacttggaatttatatttttgacattattccaaaggtgtaataattgacttttaaaatagaataacattgtaatgggatcatattaagcatatattaaatgtaacacaaataagcactgagtctacctaaagtggtatttttttttaattttgtggctactcaggggttttgcattatattatcaaaagctaacaaccttaaggccatttgtggtaattcaaaaaatgttcaagcatctatgcttgatggctaagcttatat

SEQ ID NO: 78887 - DNA, 283 bp, Homo sapiens
ttggcctcccaaagtgctgtgattacaggtatgagccacctcgtcaggcccattttctaaaacatttaaaaaagcaactcctgaaagtcaaaggcaaaataaaacaaatgaaactggttgtgtaatgaccagttctatttttataaattgtgactgctctctgattagctcatagaaatctaagtacaggtagtggcttcctttgtaatggaggtaacccatgttctgaagttttttctcttggaattttctacaaatctcacatatctatttttggcattcc

SEQ ID NO: 78888 - DNA, 422 bp, Homo sapiens
caggtacgtactttggcgtctgaaaatgagcggtctaaattcaagcattttgacatgaaaaatgaaatgtgaagtatttggaattcaaccctgaatttttttgccggtaactcttgtgtatgttcaactaatttagcaaactgcactagttcacattttttaggtgaaacaagaaataacagaagttgcacctaaagtagtcaaatttcgtagagacagaaagtggaatggtgcttaccaggggctgcggcactggaaaggaacggggagttagtgtttaatggggacagtttcagttttgcaagatgaaagcatcctggagaatggttacacaacattgtgagtgtacttaatgccattgaatgcacacttaaaatggttaaaatggtaaattttatattgtgtatattttatacagtttt

SEQ ID NO: 78889 - DNA, 273 bp, Homo sapiens
acaggaagggtttcatggaggctgaattataccctgattaagacagaagctgtcctctgaatattattataaaactctatgaagcaacttggaacaattagggcatctgaatcggaaagtgctttttggttacacttcttaccaaataaactggaaaaaatctgttgtttctgagaaataaaacagatccttttgtcaatggattcatgcaattggggaagaaaaggtgacagcacagtcactacattcaactagattaccaaataacaagca

SEQ ID NO: 78890 - DNA, 513 bp, Homo sapiens
attcaaatttcttcctatcctaggcaacacttgatattactaaactttcacgtttgcctatttaatagatgtaaataagtattttggtgtttttatgtacagttatctgattataagtgaggttggatatctcttcatctacttgttagtctctcaaggttcccttctataaatctgcctgttcatatcctttggctatttttctattgcatttcttttttttctcagttatttgtaggaattcttaatactgtatattctagatattaatcttttgttggcttcagcctttgaaaatactttccaatctatcaactttctctaaacttgtttatgatgttttttgttgaacagaacagtttaaaattttgatgtcatcaagttcatctttttttgattttatagtttatgctttgagtcttgtttaaatgcttttcttcttttttctaccctaagattacaaagctattcttctatttttaatttctattagttttaccttttacttttagg

SEQ ID NO: 78891 - DNA, 370 bp, Homo sapiens
gagttcttcatctttccctgggcaactacatgttactacgttttctttccactggtctatgaagaagtaaacattagcttcatcaatatacataaatggtcagaactcaaagaactccaaatgaagaaaattcaccctggtagaaggttatttcagcatacattttgtaaggcatcttcagaatagcactagatgcctaaagcacaaatggaccttttccaagaatctggaaggaaccgattctaaatgtgaaaggccaaaaattctgtgtctgattgcccaagcccctctgttggtctttggtctagaacacatcagacaaataaagcaattcctgaaagcacactacctcactctgccagccaccccc

SEQ ID NO: 78892 - DNA, 568 bp, Homo sapiens
cccatacacagtccactgaattctactcatgtcccctttttggtctcttgtgtgcatgtccctcatttctattcagagccagaactcttgtttagattcaaatgatccacagcagcagctagaagacagagactccataggctaccagctgtgtgatcttaggggaaagaaaattatctgtgcctcagtttccttacctgtgaaatgggaataacagtatttactgcataagatttaacaattgaagagtgcttagaacagtgcctggcactcaaatgttagttcttactatgaactgtgtaatagcttgccaactggtgtaactctgttttctctctccatcaaaatatatttacattgccagcagattcatcttcttaaactactcacatatctgcttctgcaaacagaaaaagtccaatttgcttagtctggctaagaataatgtcctcctaaagaatgaagcctactttcctagcggaccttccactagtttccttcacaaaaaccatctgttccaataaaacaaattcactcattttcccctaaatattttcatgctttctgc

SEQ ID NO: 78893 - DNA, 286 bp, Homo sapiens
agcacagcagttgatagtttggtttaaagagaaaaaaatgggattagaggtcagaagatttcagtcctaatcctggccctgccacttggtaccaagttttgtaaatttaaattctcttatcctcacttagcctgtctgtaaaatgggattaatgatgttggttctgtctatgccacaagattattgtgagtataaaataagtgtataaataaggaaactataaactacagtacaagtactgtacaatttatatgtaataatgttctttatattacttgattttttt

SEQ ID NO: 78894 - DNA, 481 bp, Homo sapiens
ggctctacaattatacacctgtgccttttggcatgaagttttgcattaccttccactattgatgttcaacttggccatatgacttgtttggccaatggaatgttggtgaatatgatgagaggagaggtgttaaatgtatttgaatgatttggcttgacctcttgccagaaggagacatgtggtgaagacttgaatctgacctgcatcctggagccaagtccagctgaattcagctgaacccaaccaagtcttaaggagcccagatgagatgagctgaatctcagttcatatacagacccataagggagaaaaataaatgactaccataagccactgataagttgggattatctgttacataatattattattgcagcaagcaatagctgactaactcaacatgatttcctcatggatttgtggtgttaccatgatcacatatcagattctcttatgtaaatgggttgtttctgagttctct

SEQ ID NO: 78895 - DNA, 282 bp, Homo sapiens
ttgagtactcatttgaggactgcagtcatagatttaaagtgtaatcagtcaactcagtggaattactttctccattaatcttaaattgcttcaggactgtttcagcctaagccagtagctgggtttaaccaaatttgaagatttttctaggagagtttggcacgaggagagaggggcaaaggcgtgtaaggcagtgtttataacagtggcccatggaattgatcatgggtaaagagaaaacaaggacatgcgaggaggtgataaatagaacaaaacaaagca

SEQ ID NO: 78896 - DNA, 774 bp, Homo sapiens
aggagccagccctgtgcaccctgtgtgcctgtccatctggaaggcccagcatgagaggcccgaccgtcctcctcactgtggctctgcccacgctcctggctcccagggccggggcaccggtacaaagtcagggctcccggaacaagctgctcctggtgtccttcgacagcttccgctggaactacgagcaggacgtggacacccccaacctggacgccatggcccgagatggggtgaaggcacgctacatgacccccgcctttgtcaccatgaccagcccctgccacttcaccctggtcaccggcaaatatatcgagaaccacggggtggttcacaacatgtactacaacaccaccagcaaggtgaagctgccctaccacgccacgctgggcatccagaggtggtgggacaacggcagcgtgcccatctggatcacagcccagaggcagggcctgagggctggctccttcttctacccgggcgggaacgtcacctaccaaggggtggctgtgacgcggagccggaaagaaggcatcgcacacaactacaaaaatgagacggagtggagagcgaacatcgacacagtgatggcgtggttcacagaggaggacctggatctggtcacactctacttcggggagccggactccacgggccacaggtacggccccgagtccccggagaggagggagatggtgcggcaggtggaccggaccgtgggctacctccgggagagcatcgcgcgcaaccacctcacagaccgctcaactgatc

SEQ ID NO: 78897 - DNA, 963 bp, Homo sapiens
ttcctggttcatactggagagaagccgtttcggtgcacttttgaagggtgcggaaagcgcttctctctggactttaatttgcgtacgcacgtgcgcatccacacgggggagaaacgtttcgtgtgtccctttcaaggctgcaacaggaggtttattcagtcaaataacctgaaagcccacatcctaacgcatgcaaatacgaacaagaatgaacaagagggaaagtagtcctccaacaggatgaagcagattaacagaagagtgatcagtgacaaacatgcctcattgattattgtttctaggaaggaatttctaaatcaatattgcaaccccaaaagcggttataatttggtgttactaagatgctcctacactttgtgataccgttttaaggacatggtgcatttttttttcttttatttgttttatttagaactttttttatttgttttatttagaactttgtgtgttcttaaagtgtgcttccaacaggaaggtcagtgataaattttcaaaagcataaccttcaatatattatctgttggattattggatataagacttattttcatgtactataaatatgaaaataactttgatttttaattgtgtagtttccatttcttagcttttgccttttaaatttatacttcagccaggcatagtgactgatgcctgtaatcccaacactttgttgggaggccaaagcaggaggatagcttgaggccaggagttccagaccagcctgggcaacatagtgagatcctgtctctacaaaaaaatttgtttttatttgtatttatatatttttatttttgtttttgttggtaggcgtctcgctctgtcacccaggctggagtctagtgtcgtgatcttggctcactgcaacctccacctcccgggttcaagtgattctctggcctcagcctcccaagtagctgggactacaggtgtgtgtcacca

SEQ ID NO: 78898 - DNA, 671 bp, Homo sapiens
ctcccaaagtgctgggattacaggtgtgagccactgtgcctggccccccacaacatgtttaaacttagctaggcctggttgcatacgcctgtgttcccagctactcaggaggctgaagcaggaggatagcttgagcccaggagtttgaggctacagtgagctgtgattgcaccactgtactccagactggataacagcaagagcccatcttttaaaaaaagtaaaaattaaaaatatacttcatggttcatgtcatagccctagagaatgaaaaatttgcagtagatagtcaataaatgaatcagtagttaaatattccttaaagtcaactgtatttcattgtgatttttgttttctttttatcattgtatcaaactatatggaaatcatatggttagatgtgattatttgataatgttagtccatttgaatccattttagatatttcacaattaaagaatatgaaacttcagaaatatgccaagtctgtattttaaaaaatcaaagtctacattgaaaagagataccatttatttgttcttaaaacttagcaaaattcaacagactgatgttcggtataggtgagatatggcgggaagttgggcttacgtgtggttggataagggataaactgtcacagccagtttggaaataaattttgtaattgtgct

SEQ ID NO: 78899 - DNA, 703 bp, Homo sapiens
ttcctggttcatactggagagaagccgtttcggtgcacttttgaagggtgcggaaagcgcttctctctggactttaatttgcgtacgcacgtgcgcatccacacgggggagaaacgtttcgtgtgttcccagctactcaggaggctgaagcaggaggatagcttgagcccaggagtttgaggctacagtgagctgtgattgcaccactgtactccagactggataacagcaagagcccatcttttaaaaaaagtaaaaattaaaaatatacttcatggttcatgtcatagccctagagaatgaaaaatttgcagtagatagtcaataaatgaatcagtagttaaatattccttaaagtcaactgtatttcattgtgatttttgttttctttttatcattgtatcaaactatatggaaatcatatggttagatgtgattatttgataatgttagtccatttgaatccattttagatatttcacaattaaagaatatgaaacttcagaaatatgccaagtctgtattttaaaaaatcaaagtctacattgaaaagagataccatttatttgttcttaaaacttagcaaaattcaacagactgatgttcggtataggtgagatatggcgggaagttgggcttacgtgtggttggataagggataaactgtcacagccagtttggaaataaattttgtaattgtgct

SEQ ID NO: 78900 - DNA, 611 bp, Homo sapiens
ggttgcagtgaatcgagatcatgccactgcactccagcctaggcaataagagtgaaattgtgtctcaaaaaaataataacaataaaataaaataataaacaataatgggccaatgatcagcagaactgagttctagacatacatctgctgtttggtagatcacttctgacttacgatattttcaatttataatgggtttatcagaatgtaaccccatcataagtttaggggcatctggccttcactgggtgaccaactatatggcttcctcaggtgaaatcaatcaccttattttatgttcacctctatatctatcaatgttccaatgagacggttacaagatatatttatcagaagaatgaggaatgtagaatgatatgttaaacatcagcctggatgtataaattctaatatgcttctaaatatatatatataatatgtagcaataacacatattattactacgtataaagcttgtacatattttatgctgtcttggaaggtagataagctcttaaagaacatactgtacaatataaataccttaagagcaataaatagaaaccactgaaacaacagcccatacaatttagcttttaaaaacctttcta

SEQ ID NO: 78901 - DNA, 996 bp, Homo sapiens
agaaagagccaatctccttgagacagaagattttaaaaactgagtaaaaaattttaacaaaggtcataaattatttaatttacagaaaaggaaataactcacaaaagagtgttcgttctcattcattagagaaacatactgaatcatttttcacttatggtattggcaaaaatcaaaacaaacatctgttggttgataacacatggttatggcaggaatgtaggaaggctgtgactcctaggcatctgctgggatgacttgtatttttggtgtgcattagcacaacctctgttgggggctatataacaatatctatccaaactacatctttagtgatccaaaattccgcttctgggaatttatttggtagataagcttgcatttgtatgagatgatccatgtaaaaagttattttttatagcactgattatgactgcacaaggttggaaactatgcagatgttcactgctggagaactttcatgcaatggataccactcaactgtgaaagaaaaaagagataattctctctatagtgaagtggaaaaacctccaagattaactttgcacagaaagagcaaaatgcagagtggtgtgtatggaatgctatctttagtgcaaataagaggaaaaacaagaatatatttttatttacatttttttaagttaacaagtaatgtcataacactcactaggtgtcaggcactttataagtattaatttaatccttctaacttcaggagaagggcagtaggaacagagaggttaagtaattagtctaaagtcacactgcaagtcacctaaaggagccagcattgacacccagggcctccagctccaaagttcctgttcttaagcatcatattaagcagactaatttgaagttaagaaagggagggtgggagggaggactgggtggatgggagacttacgtgactttttatacatgtattttagaaccatgtacatgtgttacctattaaaaagttgaattaga

SEQ ID NO: 78902 - DNA, 853 bp, Homo sapiens
  misc_feature (853)..(853): n is a, c, g, or t
ggaggtcagaggcgcggagaacatgagacccgaggtctcaactgcttcttaccaatattaattccagtgactactatcagaatatgatgagcaatccactcatcagagaagctgtttctacactctcctgaatgaccattttatagatgctgggaaaaaattgtattaaagactatgagttagctgggcttggtggctcacgcctgtaatcccagcactttgtgaagccaaggcgggagcatcgattgagcctagcagttcaagaccaaccttggcggcataagcgagaccctgtctctacaaaaattttaaaattagccaggtgtggtggtgtgcacctataatcttagctacttgggaagctgaggtgggaggattactcagcctaggaggttgaggttacagtgagctgggatcacaccactgcccttcagcctgggtgacagagcaggaccccgtctcttaaaaaaaaaaaaaaaaaagtggtggactttggttatccttatgcatatgactcatcaatatatctgtatttccatatagaaagaacacttagaccgggcacagtgactcacgcctgtaatcccagcactttgggaggccaaggctggcggatcacttgaggccaggagttcaagaccagcctggctaacatggcgaaaccctgtctctactaaaaaatacaaaaattagcctggtatggctcggtgtgcacctataatcttagctacttgggaaagctgaagtgcgacggattactcaggctacgaggttgaggttccagttgagctggggatcacgccactgaccttaaacctggggtgacacaaaaccagggtaccccgtctcttan

SEQ ID NO: 78903 - DNA, 273 bp, Homo sapiens
gagccagactgcactttgctgtgtgggatctagaaggtggcgtgctggaagctggtgctgagtgatacatggggacaaggtgggagtgagagagaccagcaaggcagtgaagagactggagagagactgaaggggtcagagaaagggcagagcattcagcatgggagaggcgaagaagactttgaggatattttgttgaacaaggcatggtgtgcaggtgacttccttaaaaacattcctctggaagcagaaaatagatgattaccaggggct

SEQ ID NO: 78904 - DNA, 738 bp, Homo sapiens
agcctggggtaaaggggcggggccttgtggttggcatagcaacagacatgggtcaaactcacctgggggttagggcggggttgtttgtcactaaggaatcattgctgaatgacactacagtggagaaccagagccccgggcttttctaaacaaacagccctggtcactgctgaattcaaagtgtactgccggggccgggcgcggtggctcacgcctgtaatcccaacactttgggaggctgaggcaggcggatcacgaggtcaggagatagagaccatcctggccaacatggtgaaaccgaaaccccgtctctactaaaaatacaaaaattagctgggcatgatggcgggcgcctgtaatcccagctactcaggaggctgaggcaggagaatcacttgaacccaggaagcggaggttacagtgagccgagatggtgccactgcactgcagcctgtcaacagagcaagacttgtctggaaaaaaaaaaaaatgcgcaccgccgggcccgcctccctcagcacccaatgctggtcggagccctcgggcaaacaaactacctcctgcatccgggaacttaccctccaggcggaaggaaagaatgcggggacagagacctgtcctgggagaagctccttaggagatgaaggagcaccgaaagatgcctgacgtttttacgactcctctttcatgtttgtgtcccatctcttctcagaagaattagccatgttttgtgaattc

SEQ ID NO: 78905 - DNA, 270 bp, Homo sapiens
gaaattacccatggtcatatctagcctacaaagaagagaaaatacagtgattcaagtttcattgtattcctctcattgatatatttatcaaccttccaattgaaggaagtgtcttctaggcctttacaaagaatgtaaccagggtttaggtatacaagttgcatatgataaatctgtcatgtttctatataaatctgtccatattcctcttctgaaatgcattatttttgggggaaattaaaatgtgatgcaaagatccttatactttgt

SEQ ID NO: 78906 - DNA, 889 bp, Homo sapiens
tttactgtatattttaagcccactgttgagacctactgcttgggaaaaaaaaaaattcctttcaaaatactactgctgattgacaatacaccatgttacccaagagctctgctggagatgtgcgaagagattagcattgttttcgcgcctgctaccacgacatccagccgaagcccatggatcaaggcgtcattgtgactttcaaatctaactatttaagaaatacatttcaggctgggggaggggagaaaaaagaaaaaaaagaaaggaagaaaaaaatcatttcataaggctatagctgccatagatagtgattcctctgatggagctgggcaaagtaaacagaaaacctctggaaaggattcagcattccagatgccattaagaacattcaggatccgtgggaggagatcaaaatatcaacattaacaggagtttggaaaaagtgaattccaaccctcttggatgactctgaggaattcgagacttgagtaaaggaagtcatgcagatgtacagcaagagaatgagaagtggagcctgaagatgtaactgaactgctgcaatctcatgatcacacttgaatggatgaggagtcgcttcttataaatgagcaaaaaagtggtttcttggctgcaatcaactcttgttgcagatgctgtgaacactgttgaaatgacaaaggatttagaatattacgtaaacatagttgataaagcagcagcagggtttaagaggattgactcctattttgaaatgagttcggctgggagaagtggctcatgcctgtcgtcctagcactttgggaggccaaggcagacagagcacctgaggtaaggagttcgagaccagcctggccaacatggtgaaaccccctctctactaaaaata

SEQ ID NO: 78907 - DNA, 3578 bp, Homo sapiens
acacgctttgggcatccttgaaaagaatcttctgaggcctcagcattttatctgagtcttctgaatcccacttagaactgtgttgagctctcacccatcacgatgagcaacaaattcctgggcacctggaaacttgtctctagtgagaactttgacgattacatgaaagctctgggtgtggggttagccaccagaaaactgggaaatttggccaaacccactgtgatcatcagcaagaaaggagatattataactatacgaactgaaagtacctttaaaaatacagagatctccttcaagctaggccaggaatttgaagaaaccacagctgacaatagaaagaccaagagcatcgtaaccctgcagagaggatcactgaatcaagtgcagagatgggatggcaaagagacaaccataaagagaaagctagtgaatgggaaaatggtagcggaatgtaaaatgaagggcgtggtgtgcaccagaatctatgagaaggtctgaaaaatcatttcctcattgaagtggctttttatcatttaatgatggaaatcaattgcttccattgacaaaactgaatacactgcaaatatttgtttttgcttttgtcttaatatatcagatatgcaaaggcctaaactgagaattaatctaaaagtcagtgttatttaaacattttcaatgtgcatgcatgtcattattacatcaaagcatatatattggccagacacaaacagttgatgatgtcattcaattaactacaaaattctaatctatgttgaactttgtatacttgaaatgataataaaaaggatataatttcttagtaaaatgaaatcaaagtattgatcagggtagcaaactcaaatgctgacaggggccagaggagatatggggaaggagcatcagaaatgaggcaagctaggagaatgggctattataatgtaaagaattgtagtctcagttaaaaggggtagcctctactccagccaacattttaaaattaatggataatttatagacagttaaatttatagacagttaagtaaaaatggataatttatagacagataatttatagacaggtaaatgtgagttaaatataactcacatcccactcaagacacaaaacattttcttaatcctagtacatttttttctgtcccttcccaatcagtgtccttttctgttccacccctaccaaaagcaagtagtggtttggtttctatcatatagattaattttacctgctcatatgaagggaattgtacatcatgcattcttttctgtttgccttttttaaattcagcatcatgtttttgtgatacatccacattgttgcatgcagctgtagtttgtttctttttattaccaagtactatttcattgtatgaatatatcacagtttatccattctactattaagacaattgagctatttctaattttcggctgctatgaataaagctgctacaaatatttttgtacaagactttttgtaaacataggagtccctttattttaaataaataactagtcatatcattaggtccagtaattgttgacaggcaggaacgggggaccattgcattgtgcccaagtaataataaaactatttcagatgtattatatgattgagcaaatgagaaaacatgttgatgttgatgggagtcaggatgttcactatggaaaaacaaatatacaaatatgaaatgagggaaggcaagaaagaaccatgtggaaatggaatagaattggtataaattcataatttctaaaccatgtatatgtacgtttatatgtattataattgcatacacatgcctccatgcatatatgtgtgtgataatacacatgcatttatgtgcgtgtgtgtatacacatgcatatatttactaatcctatctgccaaaatggcttagacacaaaaacacctcagcagaaatgaatatacctagcactcagatcttcgtgtctaatatagtttgccactaaaaggaaccaaggctacttggaaaaatggatgattccaaagcaagggcaaggtaggaacaagatgagcttgaaatatcttgttatgccagaaagtaatgttaaaaaaaaaaaatagaggtatattgccaaaacatagagccagcttgaaggggctcccactggccaaacttgagccaatctgagagcaaaataattgagaaaaataaataacaagataattgagaaaaaaataaaataaattcccaattccattgggaaaaaatagaaatccatgaatccatactgatataatgatagataatcgatagataggtagatgactgacagatgatagatagatatatagatagatagatagatagatagatagatagatagatagatagatagagaaatgagaaggtttctcttttgcaatagaacgtcatggaccagtgttaaatgtgagtggaaggagttctggaattggaaaaccatcatttttcaaccatcacagtaaatatggctcaggcaagaattatcaatcaatgctaaagctagggggaaatttcgcttaggagcaggatattagggtattagtctgggcttaaagtatctcctcacagattgttgttagtttctggggaaagaatagtaaccatgcaatggaaaaaaatggacaacctcttgactaggttatcaaaattaacctcaccaataaagggtggatgttcaacatgtgccttcaaatgtgacccactgagaaggaaacaacatcactgtaacaacaacaaccagaaacgacagggggttttgactgaattcttcaaaaatgtcaatgtcatagaagacaaagaaaggttgtggaaatgtttcagattaaatgatagtaaaaacacctgacaactaaacatagtaagtaatactagactggattctgtaccagaggtaacataagtgctccaaaggacaatgttaggtcaactggcaaattggaatatagacagtcaatcagataagaagtatactttgattaagtaaaaaaaatccctattcttggaaaatacacaataaagtattttgaggtaacgggccataatgtatgcaatctactctcaaaaaattcagaaacatatatttgtgtgcatttgcatgtgcaacagtacacacaaacatacataaagagagcaattgataaggcaaataaggtaacatttaacaataatctgatacacataaatagagaaagagcaattgataaagtaaatgaggtaaaatttaacaataatctgagcaaaaggtatatgtgttttctttgagacagtctgattcttgcaacttattctgtaagttggaacttatttccaaacatgattgaaaaaaaaccccgcacttggcaacttcttctctttttcagcctagaaatgtctgtgttaagtggttttttatttattgttgttgtttgttgttattgttgttttgttgccaggctccaactcacaaaatacgagtttaaaaactgcgttgttatttttagagatttgtgataatacaacttgttataaaatttattcctcaataaatataatttctctactatgcaaaaa

SEQ ID NO: 78908 - DNA, 701 bp, Homo sapiens
acacgctttgggcatccttgaaaagaatcttctgaggcctcagcattttatctgagtcttctgaatcccacttagaactgtgttgagctctcacccatcacgatgagcaacaaattcctgggcacctggaaacttgtctctagtgagaactttgacgattacatgaaagctctgggtaagaaatgctttttgttgttctgctgaaaagctcctttttaagaaagctacatgacattttcatctactacttttaacaggatactggggagttttgcaaggctgcagtacaatcctcttttaggattaatcttttgttgtgtcattcagataatttatttgaattttatttgtggtaatttttaatagaattaacttaaatgagagagctgcttaaatgcatggaatgcccactgatttcaagggcaatttcataccaagagaattttggttgcaggtccagaggagagaaagcttaaaagcatggtcaacccattttctggcttttctgagagctacgttcatagcaactgaagtgttcataaaataaggaattgaatatattgcaaatcctagaaaatctcaatttaaaaatttaagttttagctaaactaacagttttttctctctacctctaggttgtcctttattacacaatcatgtagatacagagagtttaaaaacaaaaatacttcctaaaatac

SEQ ID NO: 78909 - DNA, 2216 bp, Homo sapiens
acacgctttgggcatccttgaaaagaatcttctgaggcctcagcattttatctgagtcttctgaatcccacttagaactgtgttgagctctcacccatcacgatgagcaacaaattcctgggcacctggaaacttgtctctagtgagaactttgacgattacatgaaagctctgggtgtggggttagccaccagaaaactgggaaatttggccaaacccactgtgatcatcagcaagaaaggagatattataactatacgaactgaaagtacctttaaaaatacagagatctccttcaagctaggccaggaatttgaagaaaccacagctgacaatagaaagaccaagagcatcgtaaccctgcagagaggatcactgaatcaagtgcagagatgggatggcaaagagacaaccataaagagaaagctagtgaatgggaaaatggtagcggaatgtaaaatgaagggcgtggtgtgcaccagaatctatgagaaggtctgaaaaatcatttcctcattgaagtggctttttatcatttaatgatggaaatcaattgcttccattgacaaaactgaatacactgcaaatatttgtttttgcttttgtcttaatatatcagatatgcaaaggcctaaactgagaattaatctaaaagtcagtgttatttaaacattttcaatgtgcatgcatgtcattattacatcaaagcatatatattggccagacacaaacagttgatgatgtcattcaattaactacaaaattctaatctatgttgaactttgtatacttgaaatgataataaaaaggatataatttcttagtaaaatgaaatcaaagtattgatcagggtagcaaactcaaatgctgacaggggccagaggagatatggggaaggagcatcagaaatgaggcaagctaggagaatgggctattataatgtaaagaattgtagtctcagttaaaaggggtagcctctactccagccaacattttaaaattaatggataatttatagacagttaaatttatagacagttaagtaaaaatggataatttatagacagataatttatagacaggtaaatgtgagttaaatataactcacatcccactcaagacacaaaacattttcttaatcctagtacatttttttctgtcccttcccaatcagtgtccttttctgttccacccctaccaaaagcaagtagtggtttggtttctatcatatagattaattttacctgctcatatgaagggaattgtacatcatgcattcttttctgtttgccttttttaaattcagcatcatgtttttgtgatacatccacattgttgcatgcagctgtagtttgtttctttttattaccaagtactatttcattgtatgaatatatcacagtttatccattctactattaagacaattgagctatttctaattttcggctgctatgaataaagctgctacaaatatttttgtacaagactttttgtaaacataggagtccctttattttaaataaataactagtcatatcattaggtccagtaattgttgacaggcaggaacgggggaccattgcattgtgcccaagtaataataaaactatttcagatgtattatatgattgagcaaatgagaaaacatgttgatgttgatgggagtcaggatgttcactatggaaaaacaaatatacaaatatgaaatgagggaaggcaagaaagaaccatgtggaaatggaatagaattggtataaattcataatttctaaaccatgtatatgtacgtttatatgtattataattgcatacacatgcctccatgcatatatgtgtgtgataatacacatgcatttatgtgcgtgtgtgtatacacatgcatatatttactaatcctatctgccaaaatggcttagacacaaaaacacctcagcagaaatgaatatacctagcactcagatcttcgtgtctaatatagtttgccactaaaaggaaccaaggctacttggaaaaatggatgattccaaagcaagggcaaggtaggaacaagatgagcttgaaatatcttgttatgccagaaagtaatgttaaaaaaaaaaaatagaggtatattgccaaaacatagagccagcttgaaggggctcccactggccaaacttgagccaatctgagagcaaaataattgagaaaaataaataacaagataattgaga

SEQ ID NO: 78910 - DNA, 2880 bp, Homo sapiens
cgatcctcccacctcagcctcccaaagggctgagattacaggtgtgagcccccgaatccggtgtgcactgctgtttacttagtatttttctttaactagatttatttttaaacaaggctttgtccaaggacatttggctcgcaggcacagagctgattaactcgttatgtatcttttgataataaggcagcgatcattaagaaaaacgtgtagccaatgaaataacatgttctgggccccaccactggactgggaggtgcagcgcatccaagcagaggctgcctcctgccctccacgcctgctgctctcgcaggcaggggctctgctgcttacagcagtgcggccatctcggcttctctccacatcgtctgtcacgcgctggtccccaccatacctctcgccaccccgtgcctctgtccccgtgcggcctgaggagctccagctttccctgccagcggtgctctgggagtggggacgtgatgcagggcgagcatgatgcaacggggcaccccagacccttccctcccgtggggggaggggtgtggcacgcagaggggcagagggcggggacactggccccgtgggggaagaaggtgctgtcacagccgttactgtcccccgtgggaccccagcctggagccccccatcctttggctcctgcctgtggccactcagctctcaggtggccacatgcacatcccctgctccttccctgcgcacctgccctgcccagtggcctttctggtcccagctactgaaaccggtgagctgctccagggtgaggctgctttctggctcctggtgtatttggacacagataggcccttagtgtccagaggcgccccatgcagccctcatggtcagcaggacacccaggatagaccccctccacgcagcacctgggccctgggagcggctgcttttaggatgccacctgttcctgggcgccttgtttttagcttctgacctgaagatgagcgggggagcgcggtggcgagggcacgtgggcgtggctcacggtctcctctctgtggcaggtacatgtcccagagcaagcacacggaggcccgggagctcatgtactcgggagccctgctcttcttcagccatggccagcaaaacagtgcagcagacttgtccatgctggtcctggagtccctggagaaggcggaagtggaggtggctgacgagctgctggaaaatctggctaaagtgttcagcctgatggaccccaactctcctgagcgcgtgacctttgtgtccagagccctgaagtggtccagtgggggctccgggaagctgggccacccccggctgcaccagctgctggccctcaccctgtggaaagaacaaaactattgtgagtcgaggtatcattttctgcactcagcggacggggagggctgtgccaacatgctggtggagtattccacgtcccgcggcttccgcagcgaggtggacatgttcgtggcccaggccgtgctacagtttctctgtttaaaaaacaaaagtagcgcatcggtggtcttcacgacgtacacccagaagcacccgtccatcgaggacgggcctccgtttgtggagccgctgcttaacttcatctggttcctgctgctggctgtggacggtgggaagctgacggtgttcactgtgctgtgtgagcagtaccagccatccctccggcgggaccccatgtacaacgagtacctcgaccgcataggacagctgttcttcggcgtcccgcccaagcagacgtcttcctacgggggcctgctcgggaaccttctgaccagcctcatgggctcctcagagcaggaggatggggaggagagccccagcgacggcagccccatcgagctggactgaactggccaggccacgtggagacaccacggtcgacgacggctggagggacgtttcagaggcgagtcctgggtggctcctcgccttgggggctcctggccctgaggctggcggtggccgcatgccggcgcgtgtctgtttctgtgcggcggctcagggtggcgcggctgctgctcactgtgctgctgggacccaagagtggggcgtcgcccctgctggccgccgcgtcccccgagattgacccacaataaagcacaggccttaccgcggcgtcaccctctcccactcctttgttctgggtcctttcgggagggctgatgggcagcacaggaggcccgtcctcggggggctgcgcacatcacgctccttgccgggcgtccggcacagctgcggtcaccaaagcaggtgctggccctcggacctgagagcccagccagggcccatgtggtctgcaaatgggagcggctgtttttgaacacggggtcattctgcagtcaggacgaaccggtccccgtcgcagacggagtgcacgtgccctgcgccacatcctcacgctcggtggagggacgcgtgcggcgggacggtgcctacgggtacttgcagctgtgtcccatgtggcatcccagagctgcgccctgctggtctctgtgagcgccacgctgctgtgctggaaatgccgctttaaaaagggataccgtgggactctgcccgtctctttcataacgcaatatttatttgtattgggtgacgattgattctttcgacctaacattttgggttttaaccaaataaccggtccaggagtgagcagctccgttctgtcagatgctactccaaatgttaccagaacgatgacaaaaggggagacgctctattttttcacagttaaatgacagttgtagattgatacgcagttgtgcatgggaaggggaaacgcacagctttatttactgtaaagtggaatttcaggaaggcttgtgtgaaccgttgcgcataaataaaccctttctaccgggc

SEQ ID NO: 78911 - DNA, 912 bp, Homo sapiens
agagcaggaggatggggaggagagccccagcgacggcagccccatcgagctggaaccttctgaccagcctcatgggctcctcagagcaggaggatggggaggagagccccagcgacggcagccccatcgagctggactgaactggccaggccacgtggagacaccacggtcgacgacggctggagggacgtttcagaggcgagtcctgggtggctcctcgccttgggggctcctggccctgaggctggcggtggccgcatgccggcgcgtgtctgtttctgtgcggcggctcagggtggcgcggctgctgctcactgtgctgctgggacccaagagtggggcgtcgcccctgctggccgccgcgtcccccgagattgacccacaataaagcacaggccttaaaaaaacaaaaagaaagacagacagagagcgagagagagagagagacagagaaagaggagcagcgaggacacagaggcgaggcggagagcagaagcggggccgacgcggacggacggcgccaacaaagaggagagacgagactcgacaaggagggggagacaaaggcaagagagcgcgagacaaggcaggagagagagcagagaaaagagagaggagacagagggagcaacaagaaagtaggagagaaaggagaggggagagccaggggaggacagaggggaggggaggcgcagggagggaaaagaagctcgcgcggaagagagagagaggcgggggaggaaaagagagagcgggggcaggggagcgagaagcggagagagagggcgacgcaggcgcgggcaaagaacaaaagggagaaccacagcaaacaaacaaacacacaacaaagcaggaaagcaaaacaacaaacaagacaccacaaaaagaagcagacaaagacagccaggcaag

SEQ ID NO: 78912 - DNA, 609 bp, Homo sapiens
gttgggtgcgggcatggtggttgcaggtgagtgttgggtgtaggcgtggtggtgtgtgcaggtgagtgttgggcgtaggcgtggtggttgcaggtgagtgttgggcatgggcgcggtgtgtgcaggtgagtgttgggcgcgggcgtggtggtgtgtgcaggtgagtgttgggcgcaggcgcggtggtttgtgcaggtgagtgtggtcctgttctgctcacccagcacatccctgtgtgtctctgtcccagtgggaagctgacggtgttcactgtgctgtgtgagcagtaccagccatccctccggcgggaccccatgtacaacgaggtgagagcttggggctggggagggaggaggggaccccacggtctgggtccaccccctctgagcccgctgcctgtgccttgcagtacctcgaccgcataggacagctgttcttcggcgtcccgcccaagcagacgtcttcctacgggggcctgctcggtaagccggggcgcccttgtcacacccactccagccctgggtcggtgtggggtcatcatctctgcccaggcaggtccagtgcggtccttcacgtggaagtggttttctgatcttttaaatgtttctc

SEQ ID NO: 78913 - DNA, 511 bp, Homo sapiens
caggccgggggccgtgaccatcggcagtgccccccagagcaggctcctcgtgcaggaatatgggtcactgccttccagggagtcctttttttcttctggtttctaagtcgccacctcttgctttacctcagatagaagcatccagaacgctgtagtatcggcaaagcagaagctggtgtggtgcttgctcagggtcggtgcatgcggttctgcccgtggccccactggcggcatcgtgaggccaggcgtgtctgggagcttgtttttccagagtgccctgtgccagacggctcccggcctcctctgagtcagtcatgtccctgcaggactggaactaggacggccggtcacagagtcagtggtcctgtcgaggctcctgctgtggtgttggggtacatgtcccagagcaagcacacggaggcccgggagctcatgtactcgggagccctgctcttcttcagccatggccagaaaacagtgcagcagacaacagacgacactacctggtacc

SEQ ID NO: 78914 - DNA, 706 bp, Homo sapiens
caggccgggggccgtgaccatcggcagtgccccccagagcaggctcctcgtgcaggaatatgggtcactgccttccagggagtcctttttttcttctggtttctaagtcgccacctcttgctttacctcagatagaagcatccagaacgctgtagtatcggcaaagcagaagctggtgtggtgcttgctcagggtcggtgcatgcggttctgcccgtggccccactggcggcatcgtgaggccaggcgtgtctgggagcttgtttttccagagtgccctgtgccagacggctcccggcctcctctgagtcagtcatgtccctgcaggactggaactaggacggccggtcacagagtcagtggtcctgtcgaggctcctgctgtggtgttggggtgggtctccctccagaaccttcactgtgcggggagcacagcaaaaccggaggcctgccaacggcctgcaggctgacgggggttgcgggggcactttctctcttgggtgcgggcttttccctcctggtgccctgcctctgtgcagcacgaagcggtctcctgtggggggagggcctgtgtgccaggctaatgagatgcccggatgtggcggggctgtctgtgtttggggtcctggctgtggtgccttctgaagaggagcccttttctgtggttaactgagatccaacccgttgcgttctcggctggccttcccg

SEQ ID NO: 78915 - DNA, 2094 bp, Homo sapiens
agcgagaagggcgtcgggcggccgtcgggacggaagccgggaggcgctgccgaccgcgcctgcgacagcgtcagccctgcgcggagcgccggcccgatggcggcggcggcggcgatggccgagcaggagagcgcccggaacggcggccgcaaccgcggcggcgtccagcgtgtggagggcaagctgcgcgccagcgtcgagaagggcgactactacgaggcgcaccagatgtaccggaccctgttcttcaggtacatgtcccagagcaagcacacggaggcccgggagctcatgtactcgggagccctgctcttcttcagccatggccagcaaaacagtgcagcagacttgtccatgctggtcctggagtccctggagaaggcggaagtggaggtggctgacgagctgctggaaaatctggctaaagtgttcagcctgatggaccccaactctcctgagcgcgtgacctttgtgtccagagccctgaagtggtccagtgggggctccgggaagctgggccacccccggctgcaccagctgctggccctcaccctgtggaaagaacaaaactattgtgagtcgaggtatcattttctgcactcagcggacggggagggctgtgccaacatgctggtggagtattccacgtcccgcggcttccgcagcgaggtggacatgttcgtggcccaggccgtgctacagtttctctgtttaaaaaacaaaagtagcgcatcggtggtcttcacgacgtacacccagaagcacccgtccatcgaggacgggcctccgtttgtggagccgctgcttaacttcatctggttcctgctgctggctgtggacggtgggaagctgacggtgttcactgtgctgtgtgagcagtaccagccatccctccggcgggaccccatgtacaacgagtacctcgaccgcataggacagctgttcttcggcgtcccgcccaagcagacgtcttcctacgggggcctgctcgggaaccttctgaccagcctcatgggctcctcagagcaggaggatggggaggagagccccagcgacggcagccccatcgagctggactgaactggccaggccacgtggagacaccacggtcgacgacggctggagggacgtttcagaggcgagtcctgggtggctcctcgccttgggggctcctggccctgaggctggcggtggccgcatgccggcgcgtgtctgtttctgtgcggcggctcagggtggcgcggctgctgctcactgtgctgctgggacccaagagtggggcgtcgcccctgctggccgccgcgtcccccgagattgacccacaataaagcacaggccttaccgcggcgtcaccctctcccactcctttgttctgggtcctttcgggagggctgatgggcagcacaggaggcccgtcctcggggggctgcgcacatcacgctccttgccgggcgtccggcacagctgcggtcaccaaagcaggtgctggccctcggacctgagagcccagccagggcccatgtggtctgcaaatgggagcggctgtttttgaacacggggtcattctgcagtcaggacgaaccggtccccgtcgcagacggagtgcacgtgccctgcgccacatcctcacgctcggtggagggacgcgtgcggcgggacggtgcctacgggtacttgcagctgtgtcccatgtggcatcccagagctgcgccctgctggtctctgtgagcgccacgctgctgtgctggaaatgccgctttaaaaagggataccgtgggactctgcccgtctctttcataacgcaatatttatttgtattgggtgacgattgattctttcgacctaacattttgggttttaaccaaataaccggtccaggagtgagcagctccgttctgtcagatgctactccaaatgttaccagaacgatgacaaaaggggagacgctctattttttcacagttaaatgacagttgtagattgatacgcagttgtgcatgggaaggggaaacgcacagctttatttactgtaaagtggaatttcaggaaggcttgtgtgaaccgttgcgcataaataaaccctttctaccgggc

SEQ ID NO: 78916 - DNA, 2532 bp, Homo sapiens
  misc_feature (2118)..(2119): n is a, c, g, or t
  misc_feature (2123)..(2123): n is a, c, g, or t
  misc_feature (2130)..(2130): n is a, c, g, or t
agcgagaagggcgtcgggcggccgtcgggacggaagccgggaggcgctgccgaccgcgcctgcgacagcgtcagccctgcgcggagcgccggcccgatggcggcggcggcggcgatggccgagcaggagagcgcccggaacggcggccgcaaccgcggcggcgtccagcgtgtggagggcaagctgcgcgccagcgtcgagaagggcgactactacgaggcgcaccagatgtaccggaccctgttcttcaggtacatgtcccagagcaagcacacggaggcccgggagctcatgtactcgggagccctgctcttcttcagccatggccagcaaaacagtgcagcagacttgtccatgctggtcctggagtccctggagaaggcggaagtggaggtggctgacgagctgctggaaaatctggctaaagtgttcagcctgatggaccccaactctcctgagcgcgtgacctttgtgtccagagccctgaagtggtccagtgggggctccgggaagctgggccacccccggctgcaccagctgctggccctcaccctgtggaaagaacaaaactattgtgagtcgaggtatcattttctgcactcagcggacggggagggctgtgccaacatgctggtggagtattccacgtcccgcggcttccgcagcgaggtggacatgttcgtggcccaggccgtgctacagtttctctgtttaaaaaacaaaagtagcgcatcggtggtcttcacgacgtacacccagaagcacccgtccatcgaggacgggcctccgtttgtggagccgctgcttaacttcatctggttcctgctgctggctgtggacggtgggaagctgacggtgttcactgtgctgtgtgagcagtaccagccatccctccggcgggaccccatgtacaacgagtacctcgaccgcataggacagctgttcttcggcgtcccgcccaagcagacgtcttcctacgggggcctgctcgggaaccttctgaccagcctcatgggctcctcagagcaggaggatggggaggagagccccagcgacggcagccccatcgagctggactgaactggccaggccacgtggagacaccacggtcgacgacggctggagggacgtttcagaggcgagtcctgggtggctcctcgccttgggggctcctggccctgaggctggcggtggccgcatgccggcgcgtgtctgtttctgtgcggcggctcagggtggcgcggctgctgctcactgtgctgctgggacccaagagtggggcgtcgcccctgctggccgccgcgtcccccgagattgacccacaataaagcacaggccttaccgcggcgtcaccctctcccactcctttgttctgggtcctttcgggagggctgatgggcagcacaggaggcccgtcctcggggggctgcgcacatcacgctccttgccgggcgtccggcacagctgcggtcaccaaagcaggtgctggccctcggacctgagagcccagccagggcccatgtggtctgcaaatgggagcggctgtttttgaacacggggtcattctgcagtcaggacgaaccggtccccgtcgcagacggagtgcacgtgccctgcgccacatcctcacgctcggtggagggacgcgtgcggcgggacggtgcctacgggtacttgcagctgtgtcccatgtggcatcccagagctgcgccctgctggtctctgtgagcgccacgctgctgtgctggaaatgccgctttaaaaagggataccgtgggactctgcccgtctctttcataacgcaatatttatttgtattgggtgacgattgattctttcgacctaacattttgggttttaaccaaataaccggtccaggagtgagcagctccgttctgtcagatgctactccaaatgttaccagaacgatgacaaaaggggagacgctctattttttcacagttaaatgacagttgtagattgatacgcagttgtgcatgggaaggggaaacgcacagctttatttactgtaaagtggaatttcaggaaggcttgtgtgaaccgttgcgcataaataaaccctttctaccgggcaaaaaaaaaaaaaaaaaaaaaaannaaanaaaaaanaaaaaaaaaaaaaaaaaaaaaaaaaaaaaaaaaaaaaaaaaaaaaaaaaaaaaaaaaaaaaaaaaaaaaaaaaaaaaaaaaagaagaggggcgggggcggcgcgagcagtacactcacacgcgcggggggaggcggggcacgaagagagagcgcgccgcgcgcgccccgcggtgttaacgagagagaggcgggggcgcggtcaagagggaggagggagcggaaatatacgatgcagagcagcggcggccgcgcgaccccgaactaaacaaaagacgaggagcaagaggagagaacgaggaagcgaagggaagagggacacgaccggcggagcggaggacacacaacaccgggaggggggggacaagagcaaagcgaggacgacacaaccctcacaggagtac

SEQ ID NO: 78917 - DNA, 2131 bp, Homo sapiens
agcgagaagggcgtcgggcggccgtcgggacggaagccgggaggcgctgccgaccgcgcctgcgacagcgtcagccctgcgcggagcgccggcccgatggcggcggcggcggcgatggccgagcaggagagcgcccggaacggcggccgcaaccgcggcggcgtccagcgtgtggagggcaagctgcgcgccagcgtcgagaagggcgactactacgaggcgcaccagatgtaccggaccctgttcttcaggtacatgtcccagagcaagcacacggaggcccgggagctcatgtactcgggagccctgctcttcttcagccatggccagcaaaacagtgcagcagacttgtccatgctggtcctggagtccctggagaaggcggaagtggaggtggctgacgagctgctggaaaatctggctaaagtgttcagcctgatggaccccaactctcctgagcgcgtgacctttgtgtccagagccctgaagtggtccagtgggggctccgggaagctgggccacccccggctgcaccagctgctggccctcaccctgtggaaagaacaaaactattgtgagtcgaggtatcattttctgcactcagcggacggggagggctgtgccaacatgctggtggagtattccacgtcccgcggcttccgcagcgaggtggacatgttcgtggcccaggccgtgctacagtttctctgtttaaaaaacaaaagtagcgcatcggtggtcttcacgacgtacacccagaagcacccgtccatcgaggacgggcctccgtttgtggagccgctgcttaacttcatctggttcctgctgctggctgtggacggtgggaagctgacggtgttcactgtgctgtgtgagcagtaccagccatccctccggcgggaccccatgtacaacgagtacctcgaccgcataggacagctgttcttcggcgtcccgcccaagcagacgtcttcctacgggggcctgctcgggaaccttctgaccagcctcatgggctcctcagagcaggaggatggggaggagagccccagcgacggcagccccatcgagctggactgaactggccaggccacgtggagacaccacggtcgacgacggctggagggacgtttcagaggcgagtcctgggtggctcctcgccttgggggctcctggccctgaggctggcggtggccgcatgccggcgcgtgtctgtttctgtgcggcggctcagggtggcgcggctgctgctcactgtgctgctgggacccaagagtggggcgtcgcccctgctggccgccgcgtcccccgagattgacccacaataaagcacaggccttaccgcggcgtcaccctctcccactcctttgttctgggtcctttcgggagggctgatgggcagcacaggaggcccgtcctcggggggctgcgcacatcacgctccttgccgggcgtccggcacagctgcggtcaccaaagcaggtgctggccctcggacctgagagcccagccagggcccatgtggtctgcaaatgggagcggctgtttttgaacacggggtcattctgcagtcaggacgaaccggtccccgtcgcagacggagtgcacgtgccctgcgccacatcctcacgctcggtggagggacgcgtgcggcgggacggtgcctacgggtacttgcagctgtgtcccatgtggcatcccagagctgcgccctgctggtctctgtgagcgccacgctgctgtgctggaaatgccgctttaaaaagggataccgtgggactctgcccgtctctttcataacgcaatatttatttgtattgggtgacgattgattctttcgacctaacattttgggttttaaccaaataaccggtccaggagtgagcagctccgttctgtcagatgctactccaaatgttaccagaacgatgacaaaaggggagacgctctattttttcacagttaaatgacagttgtagattgatacgcagttgtgcatgggaaggggaaacgcacagctttatttactgtaaagtggaatttcaggaaggcttgtgtgaaccgttgcgcataaataaaccctttctaccgggcagaagaaaaaccgaaaataaagaacaagtcgcatcga

SEQ ID NO: 78918 - DNA, 1703 bp, Homo sapiens
agcgagaagggcgtcgggcggccgtcgggacggaagccgggaggcgctgccgaccgcgcctgcgacagcgtcagccctgcgcggagcgccggcccgatggcggcggcggcggcgatggccgagcaggagagcgcccggaacggcggccgcaaccgcggcggcgtccagcgtgtggagggcaagctgcgcgccagcgtcgagaagggcgactactacgaggcgcaccagatgtaccggaccctgttcttcaggtacatgtcccagagcaagcacacggaggcccgggagctcatgtactcgggagccctgctcttcttcagccatggccagcaaaacagtgcagcagacttgtccatgctggtcctggagtccctggagaaggcggaagtggaggtggctgacgagctgctggaaaatctggctaaagtgttcagcctgatggaccccaactctcctgagcgcgtgacctttgtgtccagagccctgaagtggtccagtgggggctccgggaagctgggccacccccggctgcaccagctgctggccctcaccctgtggaaagaacaaaactattgtgagtcgaggtatcattttctgcactcagcggacggggagggctgtgccaacatgctggtggagtattccacgtcccgcggcttccgcagcgaggtggacatgttcgtggcccaggccgtgctacagtttctctgtttaaaaaacaaaagtagcgcatcggtggtcttcacgacgtacacccagaagcacccgtccatcgaggacgggcctccgtttgtggagccgctgcttaacttcatctggttcctgctgctggctgtggacggtgggaagctgacggtgttcactgtgctgtgtgagcagtaccagccatccctccggcgggaccccatgtacaacgagtacctcgaccgcataggacagctgttcttcggcgtcccgcccaagcagacgtcttcctacgggggcctgctcgggaaccttctgaccagcctcatgggctcctcagagcaggaggatggggaggagagccccagcgacggcagccccatcgagctggactgaactggccaggccacgtggagacaccacggtcgacgacggctggagggacgtttcagaggcgagtcctgggtggctcctcgccttgggggctcctggccctgaggctggcggtggccgcatgccggcgcgtgtctgtttctgtgcggcggctcagggtggcgcggctgctgctcactgtgctgctgggacccaagagtggggcgtcgcccctgctggccgccgcgtcccccgagattgacccacaataaagcacaggccttaccgcggcgtcaccctctcccactcctttgttctgggtcctttcgggagggctgatgggcagcacaggaggcccgtcctcggggggctgcgcacatcacgctccttgccgggcgtccggcaaccaaggcttggccggggttcaacccaaaaaggccagcgggttgccctttggggcccccttcggacctggaagaagccccaagcccaaggggcccccccattggtttgagtcctttggcaacattgggcgcgaacgcccgggcatcagcgttaatttctgggaaaaccaaccgagggggggtccacattttcctttggccaaggtttccaaggggaaacctggaaaacccggggttcccgcg

SEQ ID NO: 78919 - DNA, 1949 bp, Homo sapiens
  misc_feature (22)..(22): n is a, c, g, or t
  misc_feature (50)..(50): n is a, c, g, or t
gcgacccgaaccgggtgtaccnagcgttgtggagggcaagctgcgcccantcgtagaagggcgactactacgaggcgcaccagatgtaccggaccctgttcttcaggtacatgtcccagagcaagcacacggaggcccgggagctcatgtactcgggagccctgctcttcttcagccatggccagcaaaacagtgcagcagacttgtccatgctggtcctggagtccctggagaaggcggaagtggaggtggctgacgagctgctggaaaatctggctaaagtgttcagcctgatggaccccaactctcctgagcgcgtgacctttgtgtccagagccctgaagtggtccagtgggggctccgggaagctgggccacccccggctgcaccagctgctggccctcaccctgtggaaagaacaaaactattgtgagtcgaggtatcattttctgcactcagcggacggggagggctgtgccaacatgctggtggagtattccacgtcccgcggcttccgcagcgaggtggacatgttcgtggcccaggccgtgctacagtttctctgtttaaaaaacaaaagtagcgcatcggtggtcttcacgacgtacacccagaagcacccgtccatcgaggacgggcctccgtttgtggagccgctgcttaacttcatctggttcctgctgctggctgtggacggtgggaagctgacggtgttcactgtgctgtgtgagcagtaccagccatccctccggcgggaccccatgtacaacgagtacctcgaccgcataggacagctgttcttcggcgtcccgcccaagcagacgtcttcctacgggggcctgctcgggaaccttctgaccagcctcatgggctcctcagagcaggaggatggggaggagagccccagcgacggcagccccatcgagctggactgaactggccaggccacgtggagacaccacggtcgacgacggctggagggacgtttcagaggcgagtcctgggtggctcctcgccttgggggctcctggccctgaggctggcggtggccgcatgccggcgcgtgtctgtttctgtgcggcggctcagggtggcgcggctgctgctcactgtgctgctgggacccaagagtggggcgtcgcccctgctggccgccgcgtcccccgagattgacccacaataaagcacaggccttaccgcggcgtcaccctctcccactcctttgttctgggtcctttcgggagggctgatgggcagcacaggaggcccgtcctcggggggctgcgcacatcacgctccttgccgggcgtccggcacagctgcggtcaccaaagcaggtgctggccctcggacctgagagcccagccagggcccatgtggtctgcaaatgggagcggctgtttttgaacacggggtcattctgcagtcaggacgaaccggtccccgtcgcagacggagtgcacgtgccctgcgccacatcctcacgctcggtggagggacgcgtgcggcgggacggtgcctacgggtacttgcagctgtgtcccatgtggcatcccagagctgcgccctgctggtctctgtgagcgccacgctgctgtgctggaaatgccgctttaaaaagggataccgtgggactctgcccgtctctttcataacgcaatatttatttgtattgggtgacgattgattctttcgacctaacattttgggttttaaccaaataaccggtccaggagtgagcagctccgttctgtcagatgctactccaaatgttaccagaacgatgacaaaaggggagacgctctattttttcacagttaaatgacagttgtagattgatacgcagttgtgcatgggaaggggaaacgcacagctttatttactgtaaagtggaatttcaggaaggcttgtgtgaaccgttgcgcataaataaaccctttctaccgggc

SEQ ID NO: 78920 - DNA, 1956 bp, Homo sapiens
  misc_feature (13)..(13): n is a, c, g, or t
  misc_feature (22)..(22): n is a, c, g, or t
  misc_feature (34)..(34): n is a, c, g, or t
  misc_feature (54)..(54): n is a, c, g, or t
  misc_feature (60)..(60): n is a, c, g, or t
gcgtctcgcaagnctcgtgcgntactcgagcgtngtggagggcaagctgcgcgncagtcngagaagggcgactactacgaggcgcaccagatgtaccggaccctgttcttcaggtacatgtcccagagcaagcacacggaggcccgggagctcatgtactcgggagccctgctcttcttcagccatggccagcaaaacagtgcagcagacttgtccatgctggtcctggagtccctggagaaggcggaagtggaggtggctgacgagctgctggaaaatctggctaaagtgttcagcctgatggaccccaactctcctgagcgcgtgacctttgtgtccagagccctgaagtggtccagtgggggctccgggaagctgggccacccccggctgcaccagctgctggccctcaccctgtggaaagaacaaaactattgtgagtcgaggtatcattttctgcactcagcggacggggagggctgtgccaacatgctggtggagtattccacgtcccgcggcttccgcagcgaggtggacatgttcgtggcccaggccgtgctacagtttctctgtttaaaaaacaaaagtagcgcatcggtggtcttcacgacgtacacccagaagcacccgtccatcgaggacgggcctccgtttgtggagccgctgcttaacttcatctggttcctgctgctggctgtggacggtgggaagctgacggtgttcactgtgctgtgtgagcagtaccagccatccctccggcgggaccccatgtacaacgagtacctcgaccgcataggacagctgttcttcggcgtcccgcccaagcagacgtcttcctacgggggcctgctcgggaaccttctgaccagcctcatgggctcctcagagcaggaggatggggaggagagccccagcgacggcagccccatcgagctggactgaactggccaggccacgtggagacaccacggtcgacgacggctggagggacgtttcagaggcgagtcctgggtggctcctcgccttgggggctcctggccctgaggctggcggtggccgcatgccggcgcgtgtctgtttctgtgcggcggctcagggtggcgcggctgctgctcactgtgctgctgggacccaagagtggggcgtcgcccctgctggccgccgcgtcccccgagattgacccacaataaagcacaggccttaccgcggcgtcaccctctcccactcctttgttctgggtcctttcgggagggctgatgggcagcacaggaggcccgtcctcggggggctgcgcacatcacgctccttgccgggcgtccggcacagctgcggtcaccaaagcaggtgctggccctcggacctgagagcccagccagggcccatgtggtctgcaaatgggagcggctgtttttgaacacggggtcattctgcagtcaggacgaaccggtccccgtcgcagacggagtgcacgtgccctgcgccacatcctcacgctcggtggagggacgcgtgcggcgggacggtgcctacgggtacttgcagctgtgtcccatgtggcatcccagagctgcgccctgctggtctctgtgagcgccacgctgctgtgctggaaatgccgctttaaaaagggataccgtgggactctgcccgtctctttcataacgcaatatttatttgtattgggtgacgattgattctttcgacctaacattttgggttttaaccaaataaccggtccaggagtgagcagctccgttctgtcagatgctactccaaatgttaccagaacgatgacaaaaggggagacgctctattttttcacagttaaatgacagttgtagattgatacgcagttgtgcatgggaaggggaaacgcacagctttatttactgtaaagtggaatttcaggaaggcttgtgtgaaccgttgcgcataaataaaccctttctaccgggc

SEQ ID NO: 78921 - DNA, 2177 bp, Homo sapiens
agcgagaagggcgtcgggcggccgtcgggacggaagccgggaggcgctgccgaccgcgcctgcgacagcgtcagccctgcgcggagcgccggcccgatggcggcggcggcggcgatggccgagcaggagagcgcccggaacggcggccgcaaccgcggcggcgtccagcgtgtggagggcaagctgcgcgccagcgtcgagaagggcgactactacgaggcgcaccagatgtaccggaccctgttcttcaggtacatgtcccagagcaagcacacggaggcccgggagctcatgtactcgggagccctgctcttcttcagccatggccagcaaaacagtgcagcagacttgtccatgctggtcctggagtccctggagaaggcggaagtggaggtggctgacgagctgctggaaaatctggctaaagtgttcagcctgatggaccccaactctcctgagcgcgtgacctttgtgtccagagccctgaagtggtccagtgggggctccgggaagctgggccacccccggctgcaccagctgctggccctcaccctgtggaaagaacaaaactattgtgagtcgaggtatcattttctgcactcagcggacggggagggctgtgccaacatgctggtggagtattccacgtcccgcggcttccgcagcgaggtggacatgttcgtggcccaggccgtgctacagtttctctgtttaaaaaacaaaagtagcgcatcggtggtcttcacgacgtacacccagaagcacccgtccatcgaggacgggcctccgtttgtggagccgctgcttaacttcatctggttcctgctgctggctgtggacggtgggaagctgacggtgttcactgtgctgtgtgagcagtaccagccatccctccggcgggaccccatgtacaacgaggtgagagcttggggctggggagggaggaggggaccccacggtctgggtccaccccctctgagcccgctgcctgtgccttgcagtacctcgaccgcataggacagctgttcttcggcgtcccgcccaagcagacgtcttcctacgggggcctgctcgggaaccttctgaccagcctcatgggctcctcagagcaggaggatggggaggagagccccagcgacggcagccccatcgagctggactgaactggccaggccacgtggagacaccacggtcgacgacggctggagggacgtttcagaggcgagtcctgggtggctcctcgccttgggggctcctggccctgaggctggcggtggccgcatgccggcgcgtgtctgtttctgtgcggcggctcagggtggcgcggctgctgctcactgtgctgctgggacccaagagtggggcgtcgcccctgctggccgccgcgtcccccgagattgacccacaataaagcacaggccttaccgcggcgtcaccctctcccactcctttgttctgggtcctttcgggagggctgatgggcagcacaggaggcccgtcctcggggggctgcgcacatcacgctccttgccgggcgtccggcacagctgcggtcaccaaagcaggtgctggccctcggacctgagagcccagccagggcccatgtggtctgcaaatgggagcggctgtttttgaacacggggtcattctgcagtcaggacgaaccggtccccgtcgcagacggagtgcacgtgccctgcgccacatcctcacgctcggtggagggacgcgtgcggcgggacggtgcctacgggtacttgcagctgtgtcccatgtggcatcccagagctgcgccctgctggtctctgtgagcgccacgctgctgtgctggaaatgccgctttaaaaagggataccgtgggactctgcccgtctctttcataacgcaatatttatttgtattgggtgacgattgattctttcgacctaacattttgggttttaaccaaataaccggtccaggagtgagcagctccgttctgtcagatgctactccaaatgttaccagaacgatgacaaaaggggagacgctctattttttcacagttaaatgacagttgtagattgatacgcagttgtgcatgggaaggggaaacgcacagctttatttactgtaaagtggaatttcaggaaggcttgtgtgaaccgttgcgcataaataaaccctttctaccgggc

SEQ ID NO: 78922 - DNA, 2235 bp, Homo sapiens
caggccgggggccgtgaccatcggcagtgccccccagagcaggctcctcgtgcaggaatatgggtcactgccttccagggagtcctttttttcttctggtttctaagtcgccacctcttgctttacctcagatagaagcatccagaacgctgtagtatcggcaaagcagaagctggtgtggtgcttgctcagggtcggtgcatgcggttctgcccgtggccccactggcggcatcgtgaggccaggcgtgtctgggagcttgtttttccagagtgccctgtgccagacggctcccggcctcctctgagtcagtcatgtccctgcaggactggaactaggacggccggtcacagagtcagtggtcctgtcgaggctcctgctgtggtgttggggtacatgtcccagagcaagcacacggaggcccgggagctcatgtactcgggagccctgctcttcttcagccatggccagcaaaacagtgcagcagacttgtccatgctggtcctggagtccctggagaaggcggaagtggaggtggctgacgagctgctggaaaatctggctaaagtgttcagcctgatggaccccaactctcctgagcgcgtgacctttgtgtccagagccctgaagtggtccagtgggggctccgggaagctgggccacccccggctgcaccagctgctggccctcaccctgtggaaagaacaaaactattgtgagtcgaggtatcattttctgcactcagcggacggggagggctgtgccaacatgctggtggagtattccacgtcccgcggcttccgcagcgaggtggacatgttcgtggcccaggccgtgctacagtttctctgtttaaaaaacaaaagtagcgcatcggtggtcttcacgacgtacacccagaagcacccgtccatcgaggacgggcctccgtttgtggagccgctgcttaacttcatctggttcctgctgctggctgtggacggtgggaagctgacggtgttcactgtgctgtgtgagcagtaccagccatccctccggcgggaccccatgtacaacgagtacctcgaccgcataggacagctgttcttcggcgtcccgcccaagcagacgtcttcctacgggggcctgctcgggaaccttctgaccagcctcatgggctcctcagagcaggaggatggggaggagagccccagcgacggcagccccatcgagctggactgaactggccaggccacgtggagacaccacggtcgacgacggctggagggacgtttcagaggcgagtcctgggtggctcctcgccttgggggctcctggccctgaggctggcggtggccgcatgccggcgcgtgtctgtttctgtgcggcggctcagggtggcgcggctgctgctcactgtgctgctgggacccaagagtggggcgtcgcccctgctggccgccgcgtcccccgagattgacccacaataaagcacaggccttaccgcggcgtcaccctctcccactcctttgttctgggtcctttcgggagggctgatgggcagcacaggaggcccgtcctcggggggctgcgcacatcacgctccttgccgggcgtccggcacagctgcggtcaccaaagcaggtgctggccctcggacctgagagcccagccagggcccatgtggtctgcaaatgggagcggctgtttttgaacacggggtcattctgcagtcaggacgaaccggtccccgtcgcagacggagtgcacgtgccctgcgccacatcctcacgctcggtggagggacgcgtgcggcgggacggtgcctacgggtacttgcagctgtgtcccatgtggcatcccagagctgcgccctgctggtctctgtgagcgccacgctgctgtgctggaaatgccgctttaaaaagggataccgtgggactctgcccgtctctttcataacgcaatatttatttgtattgggtgacgattgattctttcgacctaacattttgggttttaaccaaataaccggtccaggagtgagcagctccgttctgtcagatgctactccaaatgttaccagaacgatgacaaaaggggagacgctctattttttcacagttaaatgacagttgtagattgatacgcagttgtgcatgggaaggggaaacgcacagctttatttactgtaaagtggaatttcaggaaggcttgtgtgaaccgttgcgcataaataaaccctttctaccgggc

SEQ ID NO: 78923 - DNA, 2029 bp, Homo sapiens
agcgagaagggcgtcgggcggccgtcgggacggaagccgggaggcgctgccgaccgcgcctgcgacagcgtcagccctgcgcggagcgccggcccgatggcggcggcggcggcgatggccgagcaggagagcgcccggaacggcggccgcaaccgcggcggcgtccagcgtgtggagggcaagctgcgcgccagcgtcgagaagggcgactactacgaggcgcaccagatgtaccggaccctgttcttcaggtacatgtcccagagcaagcacacggaggcccgggagctcatgtactcgggagccctgctcttcttcagccatggccagcaaaacagtgcagcagacttgtccatgctggtcctggagtccctggagaaggcggaagtggaggtggctgacgagctgctggaaaatctggctaaagtgttcagcctgatggaccccaactctcctgagcgcgtgacctttgtgtccagagccctgaagtggtccagtgggggctccgggaagctgggccacccccggctgcaccagctgctggccctcaccctgtggaaagatgctggtggagtattccacgtcccgcggcttccgcagcgaggtggacatgttcgtggcccaggccgtgctacagtttctctgtttaaaaaacaaaagtagcgcatcggtggtcttcacgacgtacacccagaagcacccgtccatcgaggacgggcctccgtttgtggagccgctgcttaacttcatctggttcctgctgctggctgtggacggtgggaagctgacggtgttcactgtgctgtgtgagcagtaccagccatccctccggcgggaccccatgtacaacgagtacctcgaccgcataggacagctgttcttcggcgtcccgcccaagcagacgtcttcctacgggggcctgctcgggaaccttctgaccagcctcatgggctcctcagagcaggaggatggggaggagagccccagcgacggcagccccatcgagctggactgaactggccaggccacgtggagacaccacggtcgacgacggctggagggacgtttcagaggcgagtcctgggtggctcctcgccttgggggctcctggccctgaggctggcggtggccgcatgccggcgcgtgtctgtttctgtgcggcggctcagggtggcgcggctgctgctcactgtgctgctgggacccaagagtggggcgtcgcccctgctggccgccgcgtcccccgagattgacccacaataaagcacaggccttaccgcggcgtcaccctctcccactcctttgttctgggtcctttcgggagggctgatgggcagcacaggaggcccgtcctcggggggctgcgcacatcacgctccttgccgggcgtccggcacagctgcggtcaccaaagcaggtgctggccctcggacctgagagcccagccagggcccatgtggtctgcaaatgggagcggctgtttttgaacacggggtcattctgcagtcaggacgaaccggtccccgtcgcagacggagtgcacgtgccctgcgccacatcctcacgctcggtggagggacgcgtgcggcgggacggtgcctacgggtacttgcagctgtgtcccatgtggcatcccagagctgcgccctgctggtctctgtgagcgccacgctgctgtgctggaaatgccgctttaaaaagggataccgtgggactctgcccgtctctttcataacgcaatatttatttgtattgggtgacgattgattctttcgacctaacattttgggttttaaccaaataaccggtccaggagtgagcagctccgttctgtcagatgctactccaaatgttaccagaacgatgacaaaaggggagacgctctattttttcacagttaaatgacagttgtagattgatacgcagttgtgcatgggaaggggaaacgcacagctttatttactgtaaagtggaatttcaggaaggcttgtgtgaaccgttgcgcataaataaaccctttctaccgggc

SEQ ID NO: 78924 - DNA, 1585 bp, Homo sapiens
gttgggtgcgggcatggtggttgcaggtgagtgttgggtgtaggcgtggtggtgtgtgcaggtgagtgttgggcgtaggcgtggtggttgcaggtgagtgttgggcatgggcgcggtgtgtgcaggtgagtgttgggcgcgggcgtggtggtgtgtgcaggtgagtgttgggcgcaggcgcggtggtttgtgcaggtgagtgtggtcctgttctgctcacccagcacatccctgtgtgtctctgtcccagtgggaagctgacggtgttcactgtgctgtgtgagcagtaccagccatccctccggcgggaccccatgtacaacgaggtgagagcttggggctggggagggaggaggggaccccacggtctgggtccaccccctctgagcccgctgcctgtgccttgcagtacctcgaccgcataggacagctgttcttcggcgtcccgcccaagcagacgtcttcctacgggggcctgctcgggaaccttctgaccagcctcatgggctcctcagagcaggaggatggggaggagagccccagcgacggcagccccatcgagctggactgaactggccaggccacgtggagacaccacggtcgacgacggctggagggacgtttcagaggcgagtcctgggtggctcctcgccttgggggctcctggccctgaggctggcggtggccgcatgccggcgcgtgtctgtttctgtgcggcggctcagggtggcgcggctgctgctcactgtgctgctgggacccaagagtggggcgtcgcccctgctggccgccgcgtcccccgagattgacccacaataaagcacaggccttaccgcggcgtcaccctctcccactcctttgttctgggtcctttcgggagggctgatgggcagcacaggaggcccgtcctcggggggctgcgcacatcacgctccttgccgggcgtccggcacagctgcggtcaccaaagcaggtgctggccctcggacctgagagcccagccagggcccatgtggtctgcaaatgggagcggctgtttttgaacacggggtcattctgcagtcaggacgaaccggtccccgtcgcagacggagtgcacgtgccctgcgccacatcctcacgctcggtggagggacgcgtgcggcgggacggtgcctacgggtacttgcagctgtgtcccatgtggcatcccagagctgcgccctgctggtctctgtgagcgccacgctgctgtgctggaaatgccgctttaaaaagggataccgtgggactctgcccgtctctttcataacgcaatatttatttgtattgggtgacgattgattctttcgacctaacattttgggttttaaccaaataaccggtccaggagtgagcagctccgttctgtcagatgctactccaaatgttaccagaacgatgacaaaaggggagacgctctattttttcacagttaaatgacagttgtagattgatacgcagttgtgcatgggaaggggaaacgcacagctttatttactgtaaagtggaatttcaggaaggcttgtgtgaaccgttgcgcataaataaaccctttctaccgggc

SEQ ID NO: 78925 - DNA, 1625 bp, Homo sapiens
agcgagaagggcgtcgggcggccgtcgggacggaagccgggaggcgctgccgaccgcgcctgcgacagcgtcagcccgcggcggcgtccagcgtgtggagggcaagctgcgcgccagcgtcgagaagggcgactactacgaggcgcaccagatgtaccggaccctgttcttcaggtacatgtcccagagcaagcacacggaggcccgggagctcatgtactcgggagccctgctcttcttcagccatggccagcaaaacagtgcagcagacttgtccatgctggtcctggagtccctggagaaggcggaagtggaggtggctgacgagctgctggaaaatctggctaaagtgttcagcctgatggaccccaactctcctgagcgcgtgacctttgtgtccagagccctgaagtggtccagtgggggctccgggaagctgggccacccccggctgcaccagctgctggccctcaccctgtggaaagaacaaaactattgtgagtcgaggtatcattttctgcactcagcggacggggagggctgtgccaacatgctggtggagtattccacgtcccgcggcttccgcagcgaggtggacatgttcgtggcccaggccgtgctacagtttctctgtttaaaaaacaaaagtagcgcatcggtggtcttcacgacgtacacccagaagcacccgtccatcgaggacgggcctccgtttgtggagccgctgcttaacttcatctggttcctgctgctggctgtggacggggtggcgcggctgctgctcactgtgctgctgggacccaagagtggggcgtcgcccctgctggccgccgcgtcccccgagattgacccacaataaagcacaggccttaccgcggcgtcaccctctcccactcctttgttctgggtcctttcgggagggctgatgggcagcacaggaggcccgtcctcggggggctgcgcacatcacgctccttgccgggcgtccggcacagctgcggtcaccaaagcaggtgctggccctcggacctgagagcccagccagggcccatgtggtctgcaaatgggagcggctgtttttgaacacggggtcattctgcagtcaggacgaaccggtccccgtcgcagacggagtgcacgtgccctgcgccacatcctcacgctcggtggagggacgcgtgcggcgggacggtgcctacgggtacttgcagctgtgtcccatgtggcatcccagagctgcgccctgctggtctctgtgagcgccacgctgctgtgctggaaatgccgctttaaaaagggataccgtgggactctgcccgtctctttcataacgcaatatttatttgtattgggtgacgattgattctttcgacctaacattttgggttttaaccaaataaccggtccaggagtgagcagctccgttctgtcagatgctactccaaatgttaccagaacgatgacaaaaggggagacgctctattttttcacagttaaatgacagttgtagattgatacgcagttgtgcatgggaaggggaaacgcacagctttatttactgtaaagtggaatttcaggaaggcttgtgtgaaccgttgcgcataaataaaccctttctaccgggc

SEQ ID NO: 78926 - DNA, 1499 bp, Homo sapiens
agcgagaagggcgtcgggcggccgtcgggacggaagccgggaggcgctgccgaccgcgcctgcgacagcgtcagccctgcgcggagcgccggcccgatggcggcggcggcggcgatggccgagcaggagagcgcccggaacggcggccgcaaccgcggcggcgtccagcgtgtggagggcaagctgcgcgccagcgtcgagaagggcgactactacgaggcgcaccagatgtaccggaccctgttcttcaggtacatgtcccagagcaagcacacggaggcccgggagctcatgtactcgggagccctgctcttcttcagccatggccagcaaaacagtgcagcagacttgtccatgctggtcctggagtccctggagaaggcggaagtggaggtggctgacgagctgctggaaaatctggctaaagtgttcagcctgatggggaggagagccccagcgacggcagccccatcgagctggactgaactggccaggccacgtggagacaccacggtcgacgacggctggagggacgtttcagaggcgagtcctgggtggctcctcgccttgggggctcctggccctgaggctggcggtggccgcatgccggcgcgtgtctgtttctgtgcggcggctcagggtggcgcggctgctgctcactgtgctgctgggacccaagagtggggcgtcgcccctgctggccgccgcgtcccccgagattgacccacaataaagcacaggccttaccgcggcgtcaccctctcccactcctttgttctgggtcctttcgggagggctgatgggcagcacaggaggcccgtcctcggggggctgcgcacatcacgctccttgccgggcgtccggcacagctgcggtcaccaaagcaggtgctggccctcggacctgagagcccagccagggcccatgtggtctgcaaatgggagcggctgtttttgaacacggggtcattctgcagtcaggacgaaccggtccccgtcgcagacggagtgcacgtgccctgcgccacatcctcacgctcggtggagggacgcgtgcggcgggacggtgcctacgggtacttgcagctgtgtcccatgtggcatcccagagctgcgccctgctggtctctgtgagcgccacgctgctgtgctggaaatgccgctttaaaaagggataccgtgggactctgcccgtctctttcataacgcaatatttatttgtattgggtgacgattgattctttcgacctaacattttgggttttaaccaaataaccggtccaggagtgagcagctccgttctgtcagatgctactccaaatgttaccagaacgatgacaaaaggggagacgctctattttttcacagttaaatgacagttgtagattgatacgcagttgtgcatgggaaggggaaacgcacagctttatttactgtaaagtggaatttcaggaaggcttgtgtgaaccgttgcgcataaataaaccctttctaccgggc

SEQ ID NO: 78927 - DNA, 1101 bp, Homo sapiens
aggagagccccatcctcctgctctgaggagcccatggaggatggggaggagagccccagcgacggcagccccatcgagctggactgaactggccaggccacgtggagacaccacggtcgacgacggctggagggacgtttcagaggcgagtcctgggtggctcctcgccttgggggctcctggccctgaggctggcggtggccgcatgccggcgcgtgtctgtttctgtgcggcggctcagggtggcgcggctgctgctcactgtgctgctgggacccaagagtggggcgtcgcccctgctggccgccgcgtcccccgagattgacccacaataaagcacaggccttaccgcggcgtcaccctctcccactcctttgttctgggtcctttcgggagggctgatgggcagcacaggaggcccgtcctcggggggctgcgcacatcacgctccttgccgggcgtccggcacagctgcggtcaccaaagcaggtgctggccctcggacctgagagcccagccagggcccatgtggtctgcaaatgggagcggctgtttttgaacacggggtcattctgcagtcaggacgaaccggtccccgtcgcagacggagtgcacgtgccctgcgccacatcctcacgctcggtggagggacgcgtgcggcgggacggtgcctacgggtacttgcagctgtgtcccatgtggcatcccagagctgcgccctgctggtctctgtgagcgccacgctgctgtgctggaaatgccgctttaaaaagggataccgtgggactctgcccgtctctttcataacgcaatatttatttgtattgggtgacgattgattctttcgacctaacattttgggttttaaccaaataaccggtccaggagtgagcagctccgttctgtcagatgctactccaaatgttaccagaacgatgacaaaaggggagacgctctattttttcacagttaaatgacagttgtagattgatacgcagttgtgcatgggaaggggaaacgcacagctttatttactgtaaagtggaatttcaggaaggcttgtgtgaaccgttgcgcataaataaaccctttctaccgggc

SEQ ID NO: 78928 - DNA, 1008 bp, Homo sapiens
attagaggatcgtgtctagcctgcaagtgggggctggagggacgtttcagaggcgagtcctgggtggctcctcgccttgggggctcctggccctgaggctggcggtggccgcatgccggcgcgtgtctgtttctgtgcggcggctcagggtggcgcggctgctgctcactgtgctgctgggacccaagagtggggcgtcgcccctgctggccgccgcgtcccccgagattgacccacaataaagcacaggccttaccgcggcgtcaccctctcccactcctttgttctgggtcctttcgggagggctgatgggcagcacaggaggcccgtcctcggggggctgcgcacatcacgctccttgccgggcgtccggcacagctgcggtcaccaaagcaggtgctggccctcggacctgagagcccagccagggcccatgtggtctgcaaatgggagcggctgtttttgaacacggggtcattctgcagtcaggacgaaccggtccccgtcgcagacggagtgcacgtgccctgcgccacatcctcacgctcggtggagggacgcgtgcggcgggacggtgcctacgggtacttgcagctgtgtcccatgtggcatcccagagctgcgccctgctggtctctgtgagcgccacgctgctgtgctggaaatgccgctttaaaaagggataccgtgggactctgcccgtctctttcataacgcaatatttatttgtattgggtgacgattgattctttcgacctaacattttgggttttaaccaaataaccggtccaggagtgagcagctccgttctgtcagatgctactccaaatgttaccagaacgatgacaaaaggggagacgctctattttttcacagttaaatgacagttgtagattgatacgcagttgtgcatgggaaggggaaacgcacagctttatttactgtaaagtggaatttcaggaaggcttgtgtgaaccgttgcgcataaataaaccctttctaccgggc

SEQ ID NO: 78929 - DNA, 208 bp, Homo sapiens
ctactccaaatgttaccagaacgatgacaaaaggggagacgctctattttttcacagttaaatgacagttgtagattgatacgcagttgtgcatgggaaggggaaacgcacagctttatttactgtaaagtggaatttcaggaaggcttgtgtgaaccgttgcgcataaataaaccctttctaccgggcgctgtgcaacgctggtcct

SEQ ID NO: 78930 - DNA, 1702 bp, Homo sapiens
agcgagaagggcgtcgggcggccgtcgggacggaagccgggaggcgctgccgaccgcgcctgcgacagcgtcagccctgcgcggagcgccggcccgatggcggcggcggcggcgatggccgagcaggagagcgcccggaacggcggccgcaaccgcggcggcgtccagcgtgtggagggcaagctgcgcgccagcgtcgagaagggcgactactacgaggcgcaccagatgtaccggaccctgttcttcaggtacatgtcccagagcaagcacacggaggcccgggagctcatgtactcgggagccctgctcttcttcagccatggccagcaaaacagtgcagcagacttgtccatgctggtcctggagtccctggagaaggcggaagtggaggtggctgacgagctgctggaaaatctggctaaagtgttcagcctgatggaccccaactctcctgagcgcgtgacctttgtgtccagagccctgaagtggtccagtgggggctccgggaagctgggccacccccggctgcaccagctgctggccctcaccctgtggaaagaacaaaactattgtgagtcgaggtatcattttctgcactcagcggacggggagggctgtgccaacatgctggtggagtattccacgtcccgcggcttccgcagcgaggtggacatgttcgtggcccaggccgtgctacagtttctctgtttaaaaaacaaaagtagcgcatcggtggtcttcacgacgtacacccagaagcacccgtccatcgaggacgggcctccgtttgtggagccgctgcttaacttcatctggttcctgctgctggctgtggacggggtggcgcggctgctgctcactgtgctgctgggacccaagagtggggcgtcgcccctgctggccgccgcgtcccccgagattgacccacaataaagcacaggccttaccgcggcgtcaccctctcccactcctttgttctgggtcctttcgggagggctgatgggcagcacaggaggcccgtcctcggggggctgcgcacatcacgctccttgccgggcgtccggcacagctgcggtcaccaaagcaggtgctggccctcggacctgagagcccagccagggcccatgtggtctgcaaatgggagcggctgtttttgaacacggggtcattctgcagtcaggacgaaccggtccccgtcgcagacggagtgcacgtgccctgcgccacatcctcacgctcggtggagggacgcgtgcggcgggacggtgcctacgggtacttgcagctgtgtcccatgtggcatcccagagctgcgccctgctggtctctgtgagcgccacgctgctgtgctggaaatgccgctttaaaaagggataccgtgggactctgcccgtctctttcataacgcaatatttatttgtattgggtgacgattgattctttcgacctaacattttgggttttaaccaaataaccggtccaggagtgagcagctccgttctgtcagatgctactccaaatgttaccagaacgatgacaaaaggggagacgctctattttttcacagttaaatgacagttgtagattgatacgcagttgtgcatgggaaggggaaacgcacagctttatttactgtaaagtggaatttcaggaaggcttgtgtgaaccgttgcgcataaataaaccctttctaccgggc

SEQ ID NO: 78931 - DNA, 1417 bp, Homo sapiens
agcgagaagggcgtcgggcggccgtcgggacggaagccgggaggcgctgccgaccgcgcctgcgacagcgtcagccctgcgcggagcgccggcccgatggcggcggcggcggcgatggccgagcaggagagcgcccggaacggcggccgcaaccgcggcggcgtccagcgtgtggagggcaagctgcgcgccagcgtcgagaagggcgactactacgaggcgcaccagatgtaccggaccctgttcttcaggtacatgtcccagagcaagcacacggaggcccgggagctcatgtactcgggagccctgctcttcttcagccatggccagcaaaacagtgcagcagacttgtccatgctggtcctggagtccctggagaaggcggaagtggaggtggctgacgagctgctggaaaatctggctaaagtgttcagcctgatggaccccaactctcctgagcgcgtgacctttgtgtccagagccctgaagtggtccagtgggggctccgggaagctgggccacccccggctgcaccagctgctggccctcaccctgtggaaagaacaaaactattgtgagtcgaggtatcattttctgcactcagcggacggggagggctgtgccaacatgctggtggagtattccacgtcccgcggcttccgcagcgaggtggacatgttcgtggcccaggccgtgctacagtttctctgtttaaaaaacaaaagtagcgcatcggtggtcttcacgacgtacacccagaagcacccgtccatcgaggacgggcctccgtttgtggagccgctgcttaacttcatctggttcctgctgctggctgtggacggtgggaagctgacggtgttcactgtgctgtgtgagcagtaccagccatccctccggcgggaccccatgtacaacgagtacctcgaccgcataggacagctgttcttcggcgtcccgcccaagcagacgtcttcctacgggggcctgctcgggaaccttctgaccagcctcatgggctcctcagagcaggaggatggggaggagagccccagcgacggcagccccatcgagctggactgaactggccaggccacgtggagacaccacggtcgacgacggctggagggacgtttcagaggcgagtcctgggtggctcctcgccttgggggctcctggccctgaggctggcggtggccgcatgccggcgcgtgtctgtttctgtgcggcggctcagggtggcgcggctgctgctcactgtgctgggagacgctctattttttcacagttaaatgacagttgtagattgatacgcagttgtgcatgggaaggggaaacgcacagctttatttactgtaaagtggaatttcaggaaggcttgtgtgaaccgttgcgcataaataaaccctttctaccgggc

SEQ ID NO: 78932 - DNA, 1201 bp, Homo sapiens
agcgagaagggcgtcgggcggccgtcgggacggaagccgggaggcgctgccgaccgcgcctgcgacagcgtcagccctgcgcggagcgccggcccgatggcggcggcggcggcgatggccgagcaggagagcgcccggaacggcggccgcaaccgcggcggcgtccagcgtgtggagggcaagctgcgcgccagcgtcgagaagggcgactactacgaggcgcaccagatgtaccggaccctgttcttcaggtacatgtcccagagcaagcacacggaggcccgggagctcatgtactcgggagccctgctcttcttcagccatggccagcaaaacagtgcagcagacttgtccatgctggtcctggagtccctggagaaggcggaagtggaggtggctgacgagctgctggaaaatctggctaaagtgttcagcctgatggaccccaactctcctgagcgcgtgacctttgtgtccagagccctgaagtggtccagtgggggctccgggaagctgggccacccccggctgcaccagctgctggccctcaccctgtggaaagaacaaaactattgtgagtcgaggtatcattttctgcactcagcggacggggagggctgtgccaacatgctggtggagtattccacgtcccgcggcttccgcagcgaggtggacatgttcgtggcccaggccgtgctacagtttctctgtttaaaaaacaaaagtagcgcatcggtggtcttcacgacgtacacccagaagcacccgtccatcgaggacgggcctccgtttgtggagccgctgcttaacttcatctggttcctgctgctggctgtggacggtgggaagctgacggtgttcactgtgctgtgtgagcagtaccagccatccctccggcgggaccccatgtacaacgaggtgagagcttggggctggggagggaggaggggaccccacggtctgggtccaccccctctgagcccgctgcctgtgccttgcagtacctcgaccgcataggacagctgttcttcggcgtcccgcccaagcagacgtcttcctacgggggcctgctcggtaagccggggcgcccttgtcacacccactccagccctgggtcggtgtggggtcatcatctctgcccaggcaggtccagtgcggtccttcacgtggaagtggttttctgatcttttaaatgtttctc

SEQ ID NO: 78933 - DNA, 2285 bp, Homo sapiens
cgatcctcccacctcagcctcccaaagggctgagattacaggtgtgagcccccgaatccggtgtgcactgctgtttacttagtatttttctttaactagatttatttttaaacaaggctttgtccaaggacatttggctcgcaggcacagagctgattaactcgttatgtatcttttgataataaggcagcgatcattaagaaaaacgtgtagccaatgaaataacatgttctgggccccaccactggactgggaggtgcagcgcatccaagcagaggctgcctcctgccctccacgcctgctgctctcgcaggcaggggctctgctgcttacagcagtgcggccatctcggcttctctccacatcgtctgtcacgcgctggtccccaccatacctctcgccaccccgtgcctctgtccccgtgcggcctgaggagctccagctttccctgccagcggtgctctgggagtggggacgtgatgcagggcgagcatgatgcaacggggcaccccagacccttccctcccgtggggggaggggtgtggcacgcagaggggcagagggcggggacactggccccgtgggggaagaaggtgctgtcacagccgttactgtcccccgtgggaccccagcctggagccccccatcctttggctcctgcctgtggccactcagctctcaggtggccacatgcacatcccctgctccttccctgcgcacctgccctgcccagtggcctttctggtcccagctactgaaaccggtgagctgctccagggtgaggctgctttctggctcctggtgtatttggacacagataggcccttagtgtccagaggcgccccatgcagccctcatggtcagcaggacacccaggatagaccccctccacgcagcacctgggccctgggagcggctgcttttaggatgccacctgttcctgggcgccttgtttttagcttctgacctgaagatgagcgggggagcgcggtggcgagggcacgtgggcgtggctcacggtctcctctctgtggcaggtacatgtcccagagcaagcacacggaggcccgggagctcatgtactcgggagccctgctcttcttcagccatggccagcaaaacagtgcagcagacttgtccatgctggtcctggagtccctggagaaggcggaagtggaggtggctgacgagctgctggaaaatctggctaaagtgttcagcctgatggggaggagagccccagcgacggcagccccatcgagctggactgaactggccaggccacgtggagacaccacggtcgacgacggctggagggacgtttcagaggcgagtcctgggtggctcctcgccttgggggctcctggccctgaggctggcggtggccgcatgccggcgcgtgtctgtttctgtgcggcggctcagggtggcgcggctgctgctcactgtgctgctgggacccaagagtggggcgtcgcccctgctggccgccgcgtcccccgagattgacccacaataaagcacaggccttaccgcggcgtcaccctctcccactcctttgttctgggtcctttcgggagggctgatgggcagcacaggaggcccgtcctcggggggctgcgcacatcacgctccttgccgggcgtccggcacagctgcggtcaccaaagcaggtgctggccctcggacctgagagcccagccagggcccatgtggtctgcaaatgggagcggctgtttttgaacacggggtcattctgcagtcaggacgaaccggtccccgtcgcagacggagtgcacgtgccctgcgccacatcctcacgctcggtggagggacgcgtgcggcgggacggtgcctacgggtacttgcagctgtgtcccatgtggcatcccagagctgcgccctgctggtctctgtgagcgccacgctgctgtgctggaaatgccgctttaaaaagggataccgtgggactctgcccgtctctttcataacgcaatatttatttgtattgggtgacgattgattctttcgacctaacattttgggttttaaccaaataaccggtccaggagtgagcagctccgttctgtcagatgctactccaaatgttaccagaacgatgacaaaaggggagacgctctattttttcacagttaaatgacagttgtagattgatacgcagttgtgcatgggaaggggaaacgcacagctttatttactgtaaagtggaatttcaggaaggcttgtgtgaaccgttgcgcataaataaaccctttctaccgggc

SEQ ID NO: 78934 - DNA, 1389 bp, Homo sapiens
agcgagaagggcgtcgggcggccgtcgggacggaagccgggaggcgctgccgaccgcgcctgcgacagcgtcagccctgcgcggagcgccggcccgatggcggcggcggcggcgatggccgagcaggagagcgcccggaacggcggccgcaaccgcggcggcgtccagcgtgtggagggcaagctgcgcgccagcgtcgagaagggcgactactacgaggcgcaccagatgtaccggaccctgttcttcaggtacatgtcccagagcaagcacacggaggcccgggagctcatgtactcgggagccctgctcttcttcagccatggccagcaaaacagtgcagcagacttgtccatgctggtcctggagtccctggagaaggcggaagtggaggtggctgacgagctgctggaaaatctggctaaagtgttcagcctgatggaccccaactctcctgagcgcgtgacctttgtgtccagagccctgaagtggtccagtgggggctccgggaagctgggccacccccggctgcaccagctgctggccctcaccctgtggaaagaacaaaactattgtgagtcgaggtatcattttctgcactcagcggacggggagggctgtgccaacatgctggtggagtattccacgtcccgcggcttccgcagcgaggtggacatgttcgtggcccaggccgtgctacagtttctctgtttaaaaaacaaaagtagcgcatcggtggtcttcacgacgtacacccagaagcacccgtccatcgaggacgggcctccgtttgtggagccgctgcttaacttcatctggttcctgctgctggctgtggacggggtgcgtcttgggatcctgcagggggagggggctgtgaatgtgcgggttgtgtgtagacgtggtgtggatagctgtgtgggtgtgtgtgcaagtgtagccatggtgtgggtagccgtgtgggtatatgcatagggtatgagtgctgggtgtagacgtggcataggtgtgtgtgcaggtctgttgggtgtagacatggtagtgcgggtagctgtgtgggtgtatgtgcaagtgtagacatggcgtgggggagtgtaggtgttgggcctctggtagtgtgggtgtgtgcaggtgtggggtggtgtgggtgcagacgtctggggggttgtgtgcgggtgttgggtatccatgtggtgtgggggtgtgtagacgtgtatacaggtgtgagtgcaggtgtagacggcgtatgtgcaggtgttgcgtgtctggtgtgggtagttggggtgcgtgcaggtatgtgtgttgtgtgtagacgtgtgggtagctgtgggggtgtgcaggtgtgtgtactgggtataacctgagcagccagggggatactctagatct

SEQ ID NO: 78935 - DNA, 5772 bp, Homo sapiens
ggcctggtagtcgcagcagccgctgccgcagccgccacattcaacaggcagcagcgcagcgggcgcgccgctggggagagcaagcggcccgcggcgtccgtccgtccttccgtccgcggccctgtcagctggagcgcggcgcaggctctgccccggcccggcggctctggccggccgtccagtccgtgcggcggaccccgaggagcctcgatgtggatggccccgcgaagttaagttctgggctcgcgcttccactccgccgcgccttcctcccagtttccgtccgctcgccgcaccggcttcgttcccccaaatctcggaccgtcccttcgcgccccctccccgtccgcccccagtgctgcgttctccccctcttggctctcctgcggctgggggaggggcgggggtcaccatggccgaggcgcctcaggtggtggagatcgacccggacttcgagccgctgccccggccgcgctcgtgcacctggccgctgcccaggccggagtttagccagtccaactcggccacctccagcccggcgccgtcgggcagcgcggctgccaaccccgacgccgcggcgggcctgccctcggcctcggctgccgctgtcagcgccgacttcatgagcaacctgagcttgctggaggagagcgaggacttcccgcaggcgcccggctccgtggcggcggcggtggcggcggcggccgccgcggccgccaccggggggctgtgcggggacttccagggcccggaggcgggctgcctgcacccagcgccaccgcagcccccgccgcccgggccgctgtcgcagcacccgccggtgccccccgccgccgctgggccgctcgcggggcagccgcgcaagagcagctcgtcccgccgcaacgcgtggggcaacctgtcctacgccgacctcatcaccaaggccatcgagagctcggcggagaagcggctcacgctgtcgcagatctacgagtggatggtcaagagcgtgccctacttcaaggataagggtgacagcaacagctcggcgggctggaagaattcaattcgtcataatctgtccctacacagcaagttcattcgtgtgcagaatgaaggaactggaaaaagttcttggtggatgctcaatccagagggtggcaagagcgggaaatctcctaggagaagagctgcatccatggacaacaacagtaaatttgctaagagccgaagccgagctgccaagaagaaagcatctctccagtctggccaggagggtgctggggacagccctggatcacagttttccaaatggcctgcaagccctggctctcacagcaatgatgactttgataactggagtacatttcgccctcgaactagctcaaatgctagtactattagtgggagactctcacccattatgaccgaacaggatgatcttggagaaggggatgtgcattctatggtgtacccgccatctgccgcaaagatggcctctactttacccagtctgtctgagataagcaatcccgaaaacatggaaaatcttttggataatctcaaccttctctcatcaccaacatcattaactgtttcgacccagtcctcacctggcaccatgatgcagcagacgccgtgctactcgtttgcgccaccaaacaccagtttgaattcacccagcccaaactaccaaaaatatacatatggccaatccagcatgagccctttgccccagatgcctatacaaacacttcaggacaataagtcgagttatggaggtatgagtcagtataactgtgcgcctggactcttgaaggagttgctgacttctgactctcctccccataatgacattatgacaccagttgatcctggggtagcccagcccaacagccgggttctgggccagaacgtcatgatgggccctaattcggtcatgtcaacctatggcagccaggcatctcataacaaaatgatgaatcccagctcccatacccaccctggacatgctcagcagacatctgcagttaacgggcgtcccctgccccacacggtaagcaccatgccccacacctcgggtatgaaccgcctgacccaagtgaagacacctgtacaagtgcctctgccccaccccatgcagatgagtgccctggggggctactcctccgtgagcagctgcaatggctatggcagaatgggccttctccaccaggagaagctcccaagtgacttggatggcatgttcattgagcgcttagactgtgacatggaatccatcattcggaatgacctcatggatggagatacattggattttaactttgacaatgtgttgcccaaccaaagcttcccacacagtgtcaagacaacgacacatagctgggtgtcaggctgagggttagtgagcaggttacacttaaaagtacttcagattgtctgacagcaggaactgagagaagcagtccaaagatgtctttcaccaactcccttttagttttcttggttaaaaaaaaaaaacaaaaaaaaaaaccctccttttttcctttcgtcagacttggcagcaaagacatttttcctgtacaggatgtttgcccaatgtgtgcaggttatgtgctgctgtagataaggactgtgccattggaaatttcattacaatgaagtgccaaactcactacaccatataattgcagaaaagattttcagatcctggtgtgctttcaagttttgtatataagcagtagatacagattgtatttgtgtgtgtttttggtttttctaaatatccaattggtccaaggaaagtttatactctttttgtaatactgtgatgggcctcatgtcttgataagttaaacttttgtttgtactacctgttttctgcggaactgacggatcacaaagaactgaatctccattctgcatctccattgaacagccttggacctgttcacgttgccacagaattcacatgagaaccaagtagcctgttatcaatctgctaaattaatggacttgttaaacttttggaaaaaaaaagattaaatgccagctttgtacaggtcttttctatttttttttgtttattttgttatttgcaaatttgtacaaacatttaaatggttctaatttccagataaatgatttttgatgttattgttgggacttaagaacatttttggaatagatattgaactgtaataatgttttcttaaaactagagtctactttgttacatagtcagcttgtaaattttgtggaaccacaggtatttggggcagcattcataattttcattttgtattctaactggattagtactaattttatacatgcttaactggtttgtacactttgggatgctacttagtgatgtttctgactaatcttaaatcattgtaattagtacttgcatattcaacgtttcaggccctggttgggcaggaaagtgatgtatagttatggacactttgcgtttcttatttaggataacttaatatgtttttatgtatgtattttaaagaaatttcatctgcttctactgaactatgcgtactgcatagcatcaagtcttctctagagacctctgtagtcctgggaggcctcataatgtttgtagatcagaaaagggagatctgcatctaaagcaatggtcctttgtcaaacgagggattttgatccacttcaccattttgagttgagctttagcaaaagtttcccctcataattctttgctcttgtttcagtccaggtggaggttggttttgtagttctgccttgaggaattatgtcaacactcatacttcatctcattctcccttctgccctgcagattagattacttagcacactgtggaagtttaagtggaaggagggaatttaaaaatgggacttgagtggtttgtagaatttgtgttcataagttcagatgggtagcaaatggaatagaacttacttaaaaattggggagatttatttgaaaaccagctgtaagttgtgcattgagattatgttaaaagccttggcttaagaatttgaaaatttctttagcctgtagcaacctaaactgtaattcctatcattatgttttattactttccaattacctgtaactgacagaccaaattaattggctttgtgtcctatttagtccatcagtattttcaagtcatgtggaaagcccaaagtcatcacaatgaagagaacaggtgcacagcactgttcctcttgtgttcttgagaaggatctaatttttctgtatatagcccacatcacacttgctttgtcttgtatgttaattgcatcttcattggcttggtatttcctaaatgtttaacaagaacacaagtgttcctgataagatttcctacagtaagccagctctattgtaagcttcccactgtgatgatcatttttttgaagattcattgaacagccaccactctatcatcctcattttggggcagtccaagacatagctggttttagaaacccaagttcctctaagcacagcctcccgggtatgtaactgaacttggtgccaaagtacttgtgtactaatttctattactacgtactgtcactttcctcccgtgccattactgcatcataatacaaggaacctcagagcccccatttgttcattaaagaggcaactacagccaaaatcactgttaaaatcttactacttcatggagtagctcttaggaaaatatatcttcctcctgagtctgggtaattatacctctcccaagcccccattgtgtgttgaaatcctgtcatgaatccttggtagctctctgagaacagtgaagtccagggaaaggcatctggtctgtctggaaagcaaacattatgtggcctctggtagtttttttcctgtaagaatactgactttctggagtaatgagtatatatcagttattgtacatgattgctttgtgaaatgtgcaaatgatatcacctatgcagccttgtttgatttattttctctggtttgtactgttattaaaagcatattgtattatagagctattcagatattttaaatataaagatgtattgtttccgtaatatagacgtatggaatatatttaggtaatagatgtattacttggaaagttctgctttgacaaactgacaaagtctaaatgagcacatgtatcccagtgagcagtaaatcaatggaacatcccaagaagaggataaggatgcttaaaatggaaatcattctccaacgatatacaaattggacttgttcaactgctggatatatgctaccaataaccccagccccaacttaaaattcttacattcaagctcctaagagttcttaatttataactaattttaaaagagaagtttcttttctggttttagtttgggaataatcattcattaaaaaaaatgtattgtggtttatgcgaacagaccaacctggcattacagttggcctctccttgaggtgggcacagcctggcagtgtggccaggggtggccatgtaagtcccatcaggacgtagtcatgcctcctgcatttcgctacccgagtttagtaacagtgcagattccacgttcttgttccgatactctgagaagtgcctgatgttgatgtacttacagacacaagaacaatctttgctataattgtataaagccataaatgtacataaattatgtttaaatggcttggtgtctttcttttctaattatgcagaataagctctttattaggaattttttgtgaagctattaaatacttgagttaagtcttgtcagccaaaaaaaagt

SEQ ID NO: 78936 - DNA, 478 bp, Homo sapiens
gtaccgggccccccctcgagactagttctctctctcctcttaggagcttgaatgtaagaattcttaatttataactaatttgaaaagaaacttctcttttaaaattagttataaattaagaactcttaggagcttgaatgtaagaattttaagttggggctggggttagtttgggaataatcattcattaaaaaaaatgtattgtggtttatgcgaacagaccaacctggcattacagttggcctctccttgaggtgggcacagcctggcagtgtggccaggggtggccatgtaagtcccatcaggacgtagtcatgcctcctgcatttcgctacccgagtttagtaacagtgcagattccacgttcttgttccgatactctgagaagtgcctgatgttgatgtacttacagacacaagaacaatctttgctataattgtataaagccataaatgtacataaattatgtttaaatggc

SEQ ID NO: 78937 - DNA, 536 bp, Homo sapiens
ttcctactcctaggttttccagcacggacccttgtgaccttggtcaaattgctgaacgtctcagaagatgctcttcatgccatagaatggagttgacgcctacctacctcttggtgctaaggctggaatgaggaaaggtaaccttttaaataacagttagaagagaacctagcacatagaaggaattcagttagtctacttctcttctccctgacccacagtctaccaaaaaactcgatctattctgagacccatgccctcagagtcctatcctctgtgaatgtgaccaccctagtaagttagtgcattacccctggctagaccctgggccaggagggtgctggggacagccctggatcacagttttccaaatggcctgcaagccctggctctcacagcaatgatgagaggtggctgagactgcaaaagtgaggacctcagattgctcccctttgcagtgactgcaggtcagaacagtttcatggggtcaggaatatgtatagtgacatcattcagatattttatgttcatgaaca

SEQ ID NO: 78938 - DNA, 5670 bp, Homo sapiens
ggcctggtagtcgcagcagccgctgccgcagccgccacattcaacaggcagcagcgcagcgggcgcgccgctggggagagcaagcggcccgcggcgtccgtccgtccttccgtccgcggccctgtcagctggagcgcggcgcaggctctgccccggcccggcggctctggccggccgtccagtccgtgcggcggaccccgaggagcctcgatgtggatggccccgcgaagttaagttctgggctcgcgcttccactccgccgcgccttcctcccagtttccgtccgctcgccgcaccggcttcgttcccccaaatctcggaccgtcccttcgcgccccctccccgtccgcccccagtgctgcgttctccccctcttggctctcctgcggctgggggaggggcgggggtcaccatggccgaggcgcctcaggtggtggagatcgacccggacttcgagccgctgccccggccgcgctcgtgcacctggccgctgcccaggccggagtttagccagtccaactcggccacctccagcccggcgccgtcgggcagcgcggctgccaaccccgacgccgcggcgggcctgccctcggcctcggctgccgctgtcagcgccgacttcatgagcaacctgagcttgctggaggagagcgaggacttcccgcaggcgcccggctccgtggcggcggcggtggcggcggcggccgccgcggccgccaccggggggctgtgcggggacttccagggcccggaggcgggctgcctgcacccagcgccaccgcagcccccgccgcccgggccgctgtcgcagcacccgccggtgccccccgccgccgctgggccgctcgcggggcagccgcgcaagagcagctcgtcccgccgcaacgcgtggggcaacctgtcctacgccgacctcatcaccaaggccatcgagagctcggcggagaagcggctcacgctgtcgcagatctacgagtggatggtcaagagcgtgccctacttcaaggataagggtgacagcaacagctcggcgggctggaagaattcaattcgtcataatctgtccctacacagcaagttcattcgtgtgcagaatgaaggaactggaaaaagttcttggtggatgctcaatccagagggtggcaagagcgggaaatctcctaggagaagagctgcatccatggacaacaacagtaaatttgctaagagccgaagccgagctgccaagaagaaagcatctctccagtctggccaggagggtgctggggacagccctggatcacagttttccaaatggcctgcaagccctggctctcacagcaatgatgactttgataactggagtacatttcgccctcgaactagctcaaatgctagtactattagtgggagactctcacccattatgaccgaacaggatgatcttggagaaggggatgtgcattctatggtgtacccgccatctgccgcaaagatggcctctactttacccagtctgtctgagataagcaatcccgaaaacatggaaaatcttttggataatctcaaccttctctcatcaccaacatcattaactgtttcgacccagtcctcacctggcaccatgatgcagcagacgccgtgctactcgtttgcgccaccaaacaccagtttgaattcacccagcccaaactaccaaaaatatacatatggccaatccagcatgagccctttgccccagatgcctatacaaacacttcaggacaataagtcgagttatggaggtatgagtcagtataactgtgcgcctggactcttgaaggagttgctgacttctgactctcctccccataatgacattatgacaccagttgatcctggggtagcccagcccaacagccgggttctgggccagaacgtcatgatgggccctaattcggtcatgtcaacctatggcagccaggcatctcataacaaaatgatgaatcccagctcccatacccaccctggacatgctcagcagacatctgcagttaacgggcgtcccctgccccacacggtaagcaccatgccccacacctcgggtatgaaccgcctgacccaagtgaagacacctgtacaagtgcctctgccccaccccatgcagatgagtgccctggggggctactcctccgtgagcagctgcaatggctatggcagaatgggccttctccaccaggagaagctcccaagtgacttggatggcatgttcattgagcgcttagactgtgacatggaatccatcattcggaatgacctcatggatggagatacattggattttaactttgacaatgtgttgcccaaccaaagcttcccacacagtgtcaagacaacgacacatagctgggtgtcaggctgagggttagtgagcaggttacacttaaaagtacttcagattgtctgacagcaggaactgagagaagcagtccaaagatgtctttcaccaactcccttttagttttcttggttaaaaaaaaaaaacaaaaaaaaaaaccctccttttttcctttcgtcagacttggcagcaaagacatttttcctgtacaggatgtttgcccaatgtgtgcaggttatgtgctgctgtagataaggactgtgccattggaaatttcattacaatgaagtgccaaactcactacaccatataattgcagaaaagattttcagatcctggtgtgctttcaagttttgtatataagcagtagatacagattgtatttgtgtgtgtttttggtttttctaaatatccaattggtccaaggaaagtttatactctttttgtaatactgtgatgggcctcatgtcttgataagttaaacttttgtttgtactacctgttttctgcggaactgacggatcacaaagaactgaatctccattctgcatctccattgaacagccttggacctgttcacgttgccacagaattcacatgagaaccaagtagcctgttatcaatctgctaaattaatggacttgttaaacttttggaaaaaaaaagattaaatgccagctttgtacaggtcttttctatttttttttgtttattttgttatttgcaaatttgtacaaacatttaaatggttctaatttccagataaatgatttttgatgttattgttgggacttaagaacatttttggaatagatattgaactgtaataatgttttcttaaaactagagtctactttgttacatagtcagcttgtaaattttgtggaaccacaggtatttggggcagcattcataattttcattttgtattctaactggattagtactaattttatacatgcttaactggtttgtacactttgggatgctacttagtgatgtttctgactaatcttaaatcattgtaattagtacttgcatattcaacgtttcaggccctggttgggcaggaaagtgatgtatagttatggacactttgcgtttcttatttaggataacttaatatgtttttatgtatgtattttaaagaaatttcatctgcttctactgaactatgcgtactgcatagcatcaagtcttctctagagacctctgtagtcctgggaggcctcataatgtttgtagatcagaaaagggagatctgcatctaaagcaatggtcctttgtcaaacgagggattttgatccacttcaccattttgagttgagctttagcaaaagtttcccctcataattctttgctcttgtttcagtccaggtggaggttggttttgtagttctgccttgaggaattatgtcaacactcatacttcatctcattctcccttctgccctgcagattagattacttagcacactgtggaagtttaagtggaaggagggaatttaaaaatgggacttgagtggtttgtagaatttgtgttcataagttcagatgggtagcaaatggaatagaacttacttaaaaattggggagatttatttgaaaaccagctgtaagttgtgcattgagattatgttaaaagccttggcttaagaatttgaaaatttctttagcctgtagcaacctaaactgtaattcctatcattatgttttattactttccaattacctgtaactgacagaccaaattaattggctttgtgtcctatttagtccatcagtattttcaagtcatgtggaaagcccaaagtcatcacaatgaagagaacaggtgcacagcactgttcctcttgtgttcttgagaaggatctaatttttctgtatatagcccacatcacacttgctttgtcttgtatgttaattgcatcttcattggcttggtatttcctaaatgtttaacaagaacacaagtgttcctgataagatttcctacagtaagccagctctattgtaagcttcccactgtgatgatcatttttttgaagattcattgaacagccaccactctatcatcctcattttggggcagtccaagacatagctggttttagaaacccaagttcctctaagcacagcctcccgggtatgtaactgaacttggtgccaaagtacttgtgtactaatttctattactacgtactgtcactttcctcccgtgccattactgcatcataatacaaggaacctcagagcccccatttgttcattaaagaggcaactacagccaaaatcactgttaaaatcttactacttcatggagtagctcttaggaaaatatatcttcctcctgagtctgggtaattatacctctcccaagcccccattgtgtgttgaaatcctgtcatgaatccttggtagctctctgagaacagtgaagtccagggaaaggcatctggtctgtctggaaagcaaacattatgtggcctctggtagtttttttcctgtaagaatactgactttctggagtaatgagtatatatcagttattgtacatgattgctttgtgaaatgtgcaaatgatatcacctatgcagccttgtttgatttattttctctggtttgtactgttattaaaagcatattgtattatagagctattcagatattttaaatataaagatgtattgtttccgtaatatagacgtatggaatatatttaggtaatagatgtattacttggaaagttctgctttgacaaactgacaaagtctaaatgagcacatgtatcccagtgagcagtaaatcaatggaacatcccaagaagaggataaggatgcttaaaatggaaatcattctccaacgatatacaaattggacttgttcaactgctggatatatgctaccaataaccccagccccaacttaaaattcttacattcaagctcctaagagttcttaatttataactaattttaaaagagaagtttcttttctggttttagtttgggaataatcattcattaaaaaaaatgtattgtggtttatgcgaacagaccaacctggcattacagttggcctctccttgaggtgggcacagcctggcagtgtggccaggggtggccatgtaagtcccatcaggacgtagtcatgcctcctgcatttcgctacccgagtttagtaacagtgcagattccacgttcttgttccgatactctgagaagtgcctgatgttgatgtacttacagacacaagaacaatctttgctataattgtataaagccataaatgtacataaattatgtttaaatggc

SEQ ID NO: 78939 - DNA, 5711 bp, Homo sapiens
ggcctggtagtcgcagcagccgctgccgcagccgccacattcaacaggcagcagcgcagcgggcgcgccgctggggagagcaagcggcccgcggcgtccgtccgtccttccgtccgcggccctgtcagctggagcgcggcgcaggctctgccccggcccggcggctctggccggccgtccagtccgtgcggcggaccccgaggagcctcgatgtggatggccccgcgaagttaagttctgggctcgcgcttccactccgccgcgccttcctcccagtttccgtccgctcgccgcaccggcttcgttcccccaaatctcggaccgtcccttcgcgccccctccccgtccgcccccagtgctgcgttctccccctcttggctctcctgcggctgggggaggggcgggggtcaccatggccgaggcgcctcaggtggtggagatcgacccggacttcgagccgctgccccggccgcgctcgtgcacctggccgctgcccaggccggagtttagccagtccaactcggccacctccagcccggcgccgtcgggcagcgcggctgccaaccccgacgccgcggcgggcctgccctcggcctcggctgccgctgtcagcgccgacttcatgagcaacctgagcttgctggaggagagcgaggacttcccgcaggcgcccggctccgtggcggcggcggtggcggcggcggccgccgcggccgccaccggggggctgtgcggggacttccagggcccggaggcgggctgcctgcacccagcgccaccgcagcccccgccgcccgggccgctgtcgcagcacccgccggtgccccccgccgccgctgggccgctcgcggggcagccgcgcaagagcagctcgtcccgccgcaacgcgtggggcaacctgtcctacgccgacctcatcaccaaggccatcgagagctcggcggagaagcggctcacgctgtcgcagatctacgagtggatggtcaagagcgtgccctacttcaaggataagggtgacagcaacagctcggcgggctggaagaattcaattcgtcataatctgtccctacacagcaagttcattcgtgtgcagaatgaaggaactggaaaaagttcttggtggatgctcaatccagagggtggcaagagcgggaaatctcctaggagaagagctgcatccatggacaacaacagtaaatttgctaagagccgaagccgagctgccaagaagaaagcatctctccagtctggccaggagggtgctggggacagccctggatcacagttttccaaatggcctgcaagccctggctctcacagcaatgatgactttgataactggagtacatttcgccctcgaactagctcaaatgctagtactattagtgggagactctcacccattatgaccgaacaggatgatcttggagaaggggatgtgcattctatggtgtacccgccatctgccgcaaagatggcctctactttacccagtctgtctgagataagcaatcccgaaaacatggaaaatcttttggataatctcaaccttctctcatcaccaacatcattaactgtttcgacccagtcctcacctggcaccatgatgcagcagacgccgtgctactcgtttgcgccaccaaacaccagtttgaattcacccagcccaaactaccaaaaatatacatatggccaatccagcatgagccctttgccccagatgcctatacaaacacttcaggacaataagtcgagttatggaggtatgagtcagtataactgtgcgcctggactcttgaaggagttgctgacttctgactctcctccccataatgacattatgacaccagttgatcctggggtagcccagcccaacagccgggttctgggccagaacgtcatgatgggccctaattcggtcatgtcaacctatggcagccaggcatctcataacaaaatgatgaatcccagctcccatacccaccctggacatgctcagcagacatctgcagttaacgggcgtcccctgccccacacggtaagcaccatgccccacacctcgggtatgaaccgcctgacccaagtgaagacacctgtacaagtgcctctgccccaccccatgcagatgagtgccctggggggctactcctccgtgagcagctgcaatggctatggcagaatgggccttctccaccaggagaagctcccaagtgacttggatggcatgttcattgagcgcttagactgtgacatggaatccatcattcggaatgacctcatggatggagatacattggattttaactttgacaatgtgttgcccaaccaaagcttcccacacagtgtcaagacaacgacacatagctgggtgtcaggctgagggttagtgagcaggttacacttaaaagtacttcagattgtctgacagcaggaactgagagaagcagtccaaagatgtctttcaccaactcccttttagttttcttggttaaaaaaaaaaaacaaaaaaaaaaaccctccttttttcctttcgtcagacttggcagcaaagacatttttcctgtacaggatgtttgcccaatgtgtgcaggttatgtgctgctgtagataaggactgtgccattggaaatttcattacaatgaagtgccaaactcactacaccatataattgcagaaaagattttcagatcctggtgtgctttcaagttttgtatataagcagtagatacagattgtatttgtgtgtgtttttggtttttctaaatatccaattggtccaaggaaagtttatactctttttgtaatactgtgatgggcctcatgtcttgataagttaaacttttgtttgtactacctgttttctgcggaactgacggatcacaaagaactgaatctccattctgcatctccattgaacagccttggacctgttcacgttgccacagaattcacatgagaaccaagtagcctgttatcaatctgctaaattaatggacttgttaaacttttggaaaaaaaaagattaaatgccagctttgtacaggtcttttctatttttttttgtttattttgttatttgcaaatttgtacaaacatttaaatggttctaatttccagataaatgatttttgatgttattgttgggacttaagaacatttttggaatagatattgaactgtaataatgttttcttaaaactagagtctactttgttacatagtcagcttgtaaattttgtggaaccacaggtatttggggcagcattcataattttcattttgtattctaactggattagtactaattttatacatgcttaactggtttgtacactttgggatgctacttagtgatgtttctgactaatcttaaatcattgtaattagtacttgcatattcaacgtttcaggccctggttgggcaggaaagtgatgtatagttatggacactttgcgtttcttatttaggataacttaatatgtttttatgtatgtattttaaagaaatttcatctgcttctactgaactatgcgtactgcatagcatcaagtcttctctagagacctctgtagtcctgggaggcctcataatgtttgtagatcagaaaagggagatctgcatctaaagcaatggtcctttgtcaaacgagggattttgatccacttcaccattttgagttgagctttagcaaaagtttcccctcataattctttgctcttgtttcagtccaggtggaggttggttttgtagttctgccttgaggaattatgtcaacactcatacttcatctcattctcccttctgccctgcagattagattacttagcacactgtggaagtttaagtggaaggagggaatttaaaaatgggacttgagtggtttgtagaatttgtgttcataagttcagatgggtagcaaatggaatagaacttacttaaaaattggggagatttatttgaaaaccagctgtaagttgtgcattgagattatgttaaaagccttggcttaagaatttgaaaatttctttagcctgtagcaacctaaactgtaattcctatcattatgttttattactttccaattacctgtaactgacagaccaaattaattggctttgtgtcctatttagtccatcagtattttcaagtcatgtggaaagcccaaagtcatcacaatgaagagaacaggtgcacagcactgttcctcttgtgttcttgagaaggatctaatttttctgtatatagcccacatcacacttgctttgtcttgtatgttaattgcatcttcattggcttggtatttcctaaatgtttaacaagaacacaagtgttcctgataagatttcctacagtaagccagctctattgtaagcttcccactgtgatgatcatttttttgaagattcattgaacagccaccactctatcatcctcattttggggcagtccaagacatagctggttttagaaacccaagttcctctaagcacagcctcccgggtatgtaactgaacttggtgccaaagtacttgtgtactaatttctattactacgtactgtcactttcctcccgtgccattactgcatcataatacaaggaacctcagagcccccatttgttcattaaagaggcaactacagccaaaatcactgttaaaatcttactacttcatggagtagctcttaggaaaatatatcttcctcctgagtctgggtaattatacctctcccaagcccccattgtgtgttgaaatcctgtcatgaatccttggtagctctctgagaacagtgaagtccagggaaaggcatctggtctgtctggaaagcaaacattatgtggcctctggtagtttttttcctgtaagaatactgactttctggagtaatgagtatatatcagttattgtacatgattgctttgtgaaatgtgcaaatgatatcacctatgcagccttgtttgatttattttctctggtttgtactgttattaaaagcatattgtattatagagctattcagatattttaaatataaagatgtattgtttccgtaatatagacgtatggaatatatttaggtaatagatgtattacttggaaagttctgctttgacaaactgacaaagtctaaatgagcacatgtatcccagtgagcagtaaatcaatggaacatcccaagaagaggataaggatgcttaaaaaaaaaaaaaaaaaaaaaaaaaaaaaaaaaaaaaaaaaaaaaaaaaaagagggacagcaaaagaatagagcggacgaacatcaacaacatgcagcgacacgctaatgatgatggggacaaagtggagtcccacgtgaaagaaacacacgtatatgacgactaagccagccgcagccacacatctatacaaaaaagcgaggacgaagcgagccgaaaccaaggaacatgtaagggacaaaccacgagtgacaagacgacaccaataagacatccagcgagagagggcacaacaccaaagaagggcgaccaacacgacactagcctgaagaaagaaatctagaacacccgagccaacgagagcagacaactaataggcaactttagggagtcggaccaaacgaggacgaccaaacacagaggcaaggcacaagagcatgaccgaagagacgacgaaacacatgcgcgtgcaggcctagagaatagacttgtcagaacgacacaacgtcgcgc

SEQ ID NO: 78940 - DNA, 6145 bp, Homo sapiens
ggcctggtagtcgcagcagccgctgccgcagccgccacattcaacaggcagcagcgcagcgggcgcgccgctggggagagcaagcggcccgcggcgtccgtccgtccttccgtccgcggccctgtcagctggagcgcggcgcaggctctgccccggcccggcggctctggccggccgtccagtccgtgcggcggaccccgaggagcctcgatgtggatggccccgcgaagttaagttctgggctcgcgcttccactccgccgcgccttcctcccagtttccgtccgctcgccgcaccggcttcgttcccccaaatctcggaccgtcccttcgcgccccctccccgtccgcccccagtgctgcgttctccccctcttggctctcctgcggctgggggaggggcgggggtcaccatggccgaggcgcctcaggtggtggagatcgacccggacttcgagccgctgccccggccgcgctcgtgcacctggccgctgcccaggccggagtttagccagtccaactcggccacctccagcccggcgccgtcgggcagcgcggctgccaaccccgacgccgcggcgggcctgccctcggcctcggctgccgctgtcagcgccgacttcatgagcaacctgagcttgctggaggagagcgaggacttcccgcaggcgcccggctccgtggcggcggcggtggcggcggcggccgccgcggccgccaccggggggctgtgcggggacttccagggcccggaggcgggctgcctgcacccagcgccaccgcagcccccgccgcccgggccgctgtcgcagcacccgccggtgccccccgccgccgctgggccgctcgcggggcagccgcgcaagagcagctcgtcccgccgcaacgcgtggggcaacctgtcctacgccgacctcatcaccaaggccatcgagagctcggcggagaagcggctcacgctgtcgcagatctacgagtggatggtcaagagcgtgccctacttcaaggataagggtgacagcaacagctcggcgggctggaagaattcaattcgtcataatctgtccctacacagcaagttcattcgtgtgcagaatgaaggaactggaaaaagttcttggtggatgctcaatccagagggtggcaagagcgggaaatctcctaggagaagagctgcatccatggacaacaacagtaaatttgctaagagccgaagccgagctgccaagaagaaagcatctctccagtctggccaggagggtgctggggacagccctggatcacagttttccaaatggcctgcaagccctggctctcacagcaatgatgactttgataactggagtacatttcgccctcgaactagctcaaatgctagtactattagtgggagactctcacccattatgaccgaacaggatgatcttggagaaggggatgtgcattctatggtgtacccgccatctgccgcaaagatggcctctactttacccagtctgtctgagataagcaatcccgaaaacatggaaaatcttttggataatctcaaccttctctcatcaccaacatcattaactgtttcgacccagtcctcacctggcaccatgatgcagcagacgccgtgctactcgtttgcgccaccaaacaccagtttgaattcacccagcccaaactaccaaaaatatacatatggccaatccagcatgagccctttgccccagatgcctatacaaacacttcaggacaataagtcgagttatggaggtatgagtcagtataactgtgcgcctggactcttgaaggagttgctgacttctgactctcctccccataatgacattatgacaccagttgatcctggggtagcccagcccaacagccgggttctgggccagaacgtcatgatgggccctaattcggtcatgtcaacctatggcagccaggcatctcataacaaaatgatgaatcccagctcccatacccaccctggacatgctcagcagacatctgcagttaacgggcgtcccctgccccacacggtaagcaccatgccccacacctcgggtatgaaccgcctgacccaagtgaagacacctgtacaagtgcctctgccccaccccatgcagatgagtgccctggggggctactcctccgtgagcagctgcaatggctatggcagaatgggccttctccaccaggagaagctcccaagtgacttggatggcatgttcattgagcgcttagactgtgacatggaatccatcattcggaatgacctcatggatggagatacattggattttaactttgacaatgtgttgcccaaccaaagcttcccacacagtgtcaagacaacgacacatagctgggtgtcaggctgagggttagtgagcaggtaagttcaccccaatatcaaaagaccttttgaaaaatagaacttaaaagcgaggaacacagtaacttgccatggttagcacatctttgatgtcaactgactgtcccttgtcagagagggatcttttatcattcattctctgtcctttttgcagcttacagttttccttctgagcttacacagaaggaagcttcctttaactgctttaaagatttctttttgacagttcgatggctgcatctttttagtagctcttcaataaatgaatacatttgatataaatcaaatgctgaagggttttttgtaaagtagaattttccccattgaatgattttagagctgtttgagaaagctctagctttttgcccctaagtatgtctgtcactcttaacatgttaagttgaattgattttaatttggctatattttcattgtgtgtgtatgtgtgtgtgcgtatgtatgtgttttttcctaggttacacttaaaagtacttcagattgtctgacagcaggaactgagagaagcagtccaaagatgtctttcaccaactcccttttagttttcttggttaaaaaaaaaaaacaaaaaaaaaaaccctccttttttcctttcgtcagacttggcagcaaagacatttttcctgtacaggatgtttgcccaatgtgtgcaggttatgtgctgctgtagataaggactgtgccattggaaatttcattacaatgaagtgccaaactcactacaccatataattgcagaaaagattttcagatcctggtgtgctttcaagttttgtatataagcagtagatacagattgtatttgtgtgtgtttttggtttttctaaatatccaattggtccaaggaaagtttatactctttttgtaatactgtgatgggcctcatgtcttgataagttaaacttttgtttgtactacctgttttctgcggaactgacggatcacaaagaactgaatctccattctgcatctccattgaacagccttggacctgttcacgttgccacagaattcacatgagaaccaagtagcctgttatcaatctgctaaattaatggacttgttaaacttttggaaaaaaaaagattaaatgccagctttgtacaggtcttttctatttttttttgtttattttgttatttgcaaatttgtacaaacatttaaatggttctaatttccagataaatgatttttgatgttattgttgggacttaagaacatttttggaatagatattgaactgtaataatgttttcttaaaactagagtctactttgttacatagtcagcttgtaaattttgtggaaccacaggtatttggggcagcattcataattttcattttgtattctaactggattagtactaattttatacatgcttaactggtttgtacactttgggatgctacttagtgatgtttctgactaatcttaaatcattgtaattagtacttgcatattcaacgtttcaggccctggttgggcaggaaagtgatgtatagttatggacactttgcgtttcttatttaggataacttaatatgtttttatgtatgtattttaaagaaatttcatctgcttctactgaactatgcgtactgcatagcatcaagtcttctctagagacctctgtagtcctgggaggcctcataatgtttgtagatcagaaaagggagatctgcatctaaagcaatggtcctttgtcaaacgagggattttgatccacttcaccattttgagttgagctttagcaaaagtttcccctcataattctttgctcttgtttcagtccaggtggaggttggttttgtagttctgccttgaggaattatgtcaacactcatacttcatctcattctcccttctgccctgcagattagattacttagcacactgtggaagtttaagtggaaggagggaatttaaaaatgggacttgagtggtttgtagaatttgtgttcataagttcagatgggtagcaaatggaatagaacttacttaaaaattggggagatttatttgaaaaccagctgtaagttgtgcattgagattatgttaaaagccttggcttaagaatttgaaaatttctttagcctgtagcaacctaaactgtaattcctatcattatgttttattactttccaattacctgtaactgacagaccaaattaattggctttgtgtcctatttagtccatcagtattttcaagtcatgtggaaagcccaaagtcatcacaatgaagagaacaggtgcacagcactgttcctcttgtgttcttgagaaggatctaatttttctgtatatagcccacatcacacttgctttgtcttgtatgttaattgcatcttcattggcttggtatttcctaaatgtttaacaagaacacaagtgttcctgataagatttcctacagtaagccagctctattgtaagcttcccactgtgatgatcatttttttgaagattcattgaacagccaccactctatcatcctcattttggggcagtccaagacatagctggttttagaaacccaagttcctctaagcacagcctcccgggtatgtaactgaacttggtgccaaagtacttgtgtactaatttctattactacgtactgtcactttcctcccgtgccattactgcatcataatacaaggaacctcagagcccccatttgttcattaaagaggcaactacagccaaaatcactgttaaaatcttactacttcatggagtagctcttaggaaaatatatcttcctcctgagtctgggtaattatacctctcccaagcccccattgtgtgttgaaatcctgtcatgaatccttggtagctctctgagaacagtgaagtccagggaaaggcatctggtctgtctggaaagcaaacattatgtggcctctggtagtttttttcctgtaagaatactgactttctggagtaatgagtatatatcagttattgtacatgattgctttgtgaaatgtgcaaatgatatcacctatgcagccttgtttgatttattttctctggtttgtactgttattaaaagcatattgtattatagagctattcagatattttaaatataaagatgtattgtttccgtaatatagacgtatggaatatatttaggtaatagatgtattacttggaaagttctgctttgacaaactgacaaagtctaaatgagcacatgtatcccagtgagcagtaaatcaatggaacatcccaagaagaggataaggatgcttaaaatggaaatcattctccaacgatatacaaattggacttgttcaactgctggatatatgctaccaataaccccagccccaacttaaaattcttacattcaagctcctaagagttcttaatttataactaattttaaaagagaagtttcttttctggttttagtttgggaataatcattcattaaaaaaaatgtattgtggtttatgcgaacagaccaacctggcattacagttggcctctccttgaggtgggcacagcctggcagtgtggccaggggtggccatgtaagtcccatcaggacgtagtcatgcctcctgcatttcgctacccgagtttagtaacagtgcagattccacgttcttgttccgatactctgagaagtgcctgatgttgatgtacttacagacacaagaacaatctttgctataattgtataaagccataaatgtacataaattatgtttaaatggc

SEQ ID NO: 78941 - DNA, 5744 bp, Homo sapiens
ggcctggtagtcgcagcagccgctgccgcagccgccacattcaacaggcagcagcgcagcgggcgcgccgctggggagagcaagcggcccgcggcgtccgtccgtccttccgtccgcggccctgtcagctggagcgcggcgcaggctctgccccggcccggcggctctggccggccgtccagtccgtgcggcggaccccgaggagcctcgatgtggatggccccgcgaagttaagttctgggctcgcgcttccactccgccgcgccttcctcccagtttccgtccgctcgccgcaccggcttcgttcccccaaatctcggaccgtcccttcgcgccccctccccgtccgcccccagtgctgcgttctccccctcttggctctcctgcggctgggggaggggcgggggtcaccatggccgaggcgcctcaggtggtggagatcgacccggacttcgagccgctgccccggccgcgctcgtgcacctggccgctgcccaggccggagtttagccagtccaactcggccacctccagcccggcgccgtcgggcagcgcggctgccaaccccgacgccgcggcgggcctgccctcggcctcggctgccgctgtcagcgccgacttcatgagcaacctgagcttgctggaggagagcgaggacttcccgcaggcgcccggctccgtggcggcggcggtggcggcggcggccgccgcggccgccaccggggggctgtgcggggacttccagggcccggaggcgggctgcctgcacccagcgccaccgcagcccccgccgcccgggccgctgtcgcagcacccgccggtgccccccgccgccgctgggccgctcgcggggcagccgcgcaagagcagctcgtcccgccgcaacgcgtggggcaacctgtcctacgccgacctcatcaccaaggccatcgagagctcggcggagaagcggctcacgctgtcgcagatctacgagtggatggtcaagagcgtgccctacttcaaggataagggtgacagcaacagctcggcgggctggaagcctggctctggtgtttctgctgaaacttggagagaccacctctggcccctttcaccatatatttgcagttgtggaattcaattcgtcataatctgtccctacacagcaagttcattcgtgtgcagaatgaaggaactggaaaaagttcttggtggatgctcaatccagagggtggcaagagcgggaaatctcctaggagaagagctgcatccatggacaacaacagtaaatttgctaagagccgaagccgagctgccaagaagaaagcatctctccagtctggccaggagggtgctggggacagccctggatcacagttttccaaatggcctgcaagccctggctctcacagcaatgatgactttgataactggagtacatttcgccctcgaactagctcaaatgctagtactattagtgggagactctcacccattatgaccgaacaggatgatcttggagaaggggatgtgcattctatggtgtacccgccatctgccgcaaagatggcctctactttacccagtctgtctgagataagcaatcccgaaaacatggaaaatcttttggataatctcaaccttctctcatcaccaacatcattaactgtttcgacccagtcctcacctggcaccatgatgcagcagacgccgtgctactcgtttgcgccaccaaacaccagtttgaattcacccagcccaaactaccaaaaatatacatatggccaatccagcatgagccctttgccccagatgcctatacaaacacttcaggacaataagtcgagttatggaggtatgagtcagtataactgtgcgcctggactcttgaaggagttgctgacttctgactctcctccccataatgacattatgacaccagttgatcctggggtagcccagcccaacagccgggttctgggccagaacgtcatgatgggccctaattcggtcatgtcaacctatggcagccaggcatctcataacaaaatgatgaatcccagctcccatacccaccctggacatgctcagcagacatctgcagttaacgggcgtcccctgccccacacggtaagcaccatgccccacacctcgggtatgaaccgcctgacccaagtgaagacacctgtacaagtgcctctgccccaccccatgcagatgagtgccctggggggctactcctccgtgagcagctgcaatggctatggcagaatgggccttctccaccaggagaagctcccaagtgacttggatggcatgttcattgagcgcttagactgtgacatggaatccatcattcggaatgacctcatggatggagatacattggattttaactttgacaatgtgttgcccaaccaaagcttcccacacagtgtcaagacaacgacacatagctgggtgtcaggctgagggttagtgagcaggttacacttaaaagtacttcagattgtctgacagcaggaactgagagaagcagtccaaagatgtctttcaccaactcccttttagttttcttggttaaaaaaaaaaaacaaaaaaaaaaaccctccttttttcctttcgtcagacttggcagcaaagacatttttcctgtacaggatgtttgcccaatgtgtgcaggttatgtgctgctgtagataaggactgtgccattggaaatttcattacaatgaagtgccaaactcactacaccatataattgcagaaaagattttcagatcctggtgtgctttcaagttttgtatataagcagtagatacagattgtatttgtgtgtgtttttggtttttctaaatatccaattggtccaaggaaagtttatactctttttgtaatactgtgatgggcctcatgtcttgataagttaaacttttgtttgtactacctgttttctgcggaactgacggatcacaaagaactgaatctccattctgcatctccattgaacagccttggacctgttcacgttgccacagaattcacatgagaaccaagtagcctgttatcaatctgctaaattaatggacttgttaaacttttggaaaaaaaaagattaaatgccagctttgtacaggtcttttctatttttttttgtttattttgttatttgcaaatttgtacaaacatttaaatggttctaatttccagataaatgatttttgatgttattgttgggacttaagaacatttttggaatagatattgaactgtaataatgttttcttaaaactagagtctactttgttacatagtcagcttgtaaattttgtggaaccacaggtatttggggcagcattcataattttcattttgtattctaactggattagtactaattttatacatgcttaactggtttgtacactttgggatgctacttagtgatgtttctgactaatcttaaatcattgtaattagtacttgcatattcaacgtttcaggccctggttgggcaggaaagtgatgtatagttatggacactttgcgtttcttatttaggataacttaatatgtttttatgtatgtattttaaagaaatttcatctgcttctactgaactatgcgtactgcatagcatcaagtcttctctagagacctctgtagtcctgggaggcctcataatgtttgtagatcagaaaagggagatctgcatctaaagcaatggtcctttgtcaaacgagggattttgatccacttcaccattttgagttgagctttagcaaaagtttcccctcataattctttgctcttgtttcagtccaggtggaggttggttttgtagttctgccttgaggaattatgtcaacactcatacttcatctcattctcccttctgccctgcagattagattacttagcacactgtggaagtttaagtggaaggagggaatttaaaaatgggacttgagtggtttgtagaatttgtgttcataagttcagatgggtagcaaatggaatagaacttacttaaaaattggggagatttatttgaaaaccagctgtaagttgtgcattgagattatgttaaaagccttggcttaagaatttgaaaatttctttagcctgtagcaacctaaactgtaattcctatcattatgttttattactttccaattacctgtaactgacagaccaaattaattggctttgtgtcctatttagtccatcagtattttcaagtcatgtggaaagcccaaagtcatcacaatgaagagaacaggtgcacagcactgttcctcttgtgttcttgagaaggatctaatttttctgtatatagcccacatcacacttgctttgtcttgtatgttaattgcatcttcattggcttggtatttcctaaatgtttaacaagaacacaagtgttcctgataagatttcctacagtaagccagctctattgtaagcttcccactgtgatgatcatttttttgaagattcattgaacagccaccactctatcatcctcattttggggcagtccaagacatagctggttttagaaacccaagttcctctaagcacagcctcccgggtatgtaactgaacttggtgccaaagtacttgtgtactaatttctattactacgtactgtcactttcctcccgtgccattactgcatcataatacaaggaacctcagagcccccatttgttcattaaagaggcaactacagccaaaatcactgttaaaatcttactacttcatggagtagctcttaggaaaatatatcttcctcctgagtctgggtaattatacctctcccaagcccccattgtgtgttgaaatcctgtcatgaatccttggtagctctctgagaacagtgaagtccagggaaaggcatctggtctgtctggaaagcaaacattatgtggcctctggtagtttttttcctgtaagaatactgactttctggagtaatgagtatatatcagttattgtacatgattgctttgtgaaatgtgcaaatgatatcacctatgcagccttgtttgatttattttctctggtttgtactgttattaaaagcatattgtattatagagctattcagatattttaaatataaagatgtattgtttccgtaatatagacgtatggaatatatttaggtaatagatgtattacttggaaagttctgctttgacaaactgacaaagtctaaatgagcacatgtatcccagtgagcagtaaatcaatggaacatcccaagaagaggataaggatgcttaaaatggaaatcattctccaacgatatacaaattggacttgttcaactgctggatatatgctaccaataaccccagccccaacttaaaattcttacattcaagctcctaagagttcttaatttataactaattttaaaagagaagtttcttttctggttttagtttgggaataatcattcattaaaaaaaatgtattgtggtttatgcgaacagaccaacctggcattacagttggcctctccttgaggtgggcacagcctggcagtgtggccaggggtggccatgtaagtcccatcaggacgtagtcatgcctcctgcatttcgctacccgagtttagtaacagtgcagattccacgttcttgttccgatactctgagaagtgcctgatgttgatgtacttacagacacaagaacaatctttgctataattgtataaagccataaatgtacataaattatgtttaaatggc

SEQ ID NO: 78942 - DNA, 5772 bp, Homo sapiens
ggcctggtagtcgcagcagccgctgccgcagccgccacattcaacaggcagcagcgcagcgggcgcgccgctggggagagcaagcggcccgcggcgtccgtccgtccttccgtccgcggccctgtcagctggagcgcggcgcaggctctgccccggcccggcggctctggccggccgtccagtccgtgcggcggaccccgaggagcctcgatgtggatggccccgcgaagttaagttctgggctcgcgcttccactccgccgcgccttcctcccagtttccgtccgctcgccgcaccggcttcgttcccccaaatctcggaccgtcccttcgcgccccctccccgtccgcccccagtgctgcgttctccccctcttggctctcctgcggctgggggaggggcgggggtcaccatggccgaggcgcctcaggtggtggagatcgacccggacttcgagccgctgccccggccgcgctcgtgcacctggccgctgcccaggccggagtttagccagtccaactcggccacctccagcccggcgccgtcgggcagcgcggctgccaaccccgacgccgcggcgggcctgccctcggcctcggctgccgctgtcagcgccgacttcatgagcaacctgagcttgctggaggagagcgaggacttcccgcaggcgcccggctccgtggcggcggcggtggcggcggcggccgccgcggccgccaccggggggctgtgcggggacttccagggcccggaggcgggctgcctgcacccagcgccaccgcagcccccgccgcccgggccgctgtcgcagcacccgccggtgccccccgccgccgctgggccgctcgcggggcagccgcgcaagagcagctcgtcccgccgcaacgcgtggggcaacctgtcctacgccgacctcatcaccaaggccatcgagagctcggcggagaagcggctcacgctgtcgcagatctacgagtggatggtcaagagcgtgccctacttcaaggataagggtgacagcaacagctcggcgggctggaaggaatgaaatggcttgggccataagaactgtttgttcgaccttttgaggaactgtcaaactgctgaaaagtggctgcaccattttacattcctaccatgaaagaattcaattcgtcataatctgtccctacacagcaagttcattcgtgtgcagaatgaaggaactggaaaaagttcttggtggatgctcaatccagagggtggcaagagcgggaaatctcctaggagaagagctgcatccatggacaacaacagtaaatttgctaagagccgaagccgagctgccaagaagaaagcatctctccagtctggccaggagggtgctggggacagccctggatcacagttttccaaatggcctgcaagccctggctctcacagcaatgatgactttgataactggagtacatttcgccctcgaactagctcaaatgctagtactattagtgggagactctcacccattatgaccgaacaggatgatcttggagaaggggatgtgcattctatggtgtacccgccatctgccgcaaagatggcctctactttacccagtctgtctgagataagcaatcccgaaaacatggaaaatcttttggataatctcaaccttctctcatcaccaacatcattaactgtttcgacccagtcctcacctggcaccatgatgcagcagacgccgtgctactcgtttgcgccaccaaacaccagtttgaattcacccagcccaaactaccaaaaatatacatatggccaatccagcatgagccctttgccccagatgcctatacaaacacttcaggacaataagtcgagttatggaggtatgagtcagtataactgtgcgcctggactcttgaaggagttgctgacttctgactctcctccccataatgacattatgacaccagttgatcctggggtagcccagcccaacagccgggttctgggccagaacgtcatgatgggccctaattcggtcatgtcaacctatggcagccaggcatctcataacaaaatgatgaatcccagctcccatacccaccctggacatgctcagcagacatctgcagttaacgggcgtcccctgccccacacggtaagcaccatgccccacacctcgggtatgaaccgcctgacccaagtgaagacacctgtacaagtgcctctgccccaccccatgcagatgagtgccctggggggctactcctccgtgagcagctgcaatggctatggcagaatgggccttctccaccaggagaagctcccaagtgacttggatggcatgttcattgagcgcttagactgtgacatggaatccatcattcggaatgacctcatggatggagatacattggattttaactttgacaatgtgttgcccaaccaaagcttcccacacagtgtcaagacaacgacacatagctgggtgtcaggctgagggttagtgagcaggttacacttaaaagtacttcagattgtctgacagcaggaactgagagaagcagtccaaagatgtctttcaccaactcccttttagttttcttggttaaaaaaaaaaaacaaaaaaaaaaaccctccttttttcctttcgtcagacttggcagcaaagacatttttcctgtacaggatgtttgcccaatgtgtgcaggttatgtgctgctgtagataaggactgtgccattggaaatttcattacaatgaagtgccaaactcactacaccatataattgcagaaaagattttcagatcctggtgtgctttcaagttttgtatataagcagtagatacagattgtatttgtgtgtgtttttggtttttctaaatatccaattggtccaaggaaagtttatactctttttgtaatactgtgatgggcctcatgtcttgataagttaaacttttgtttgtactacctgttttctgcggaactgacggatcacaaagaactgaatctccattctgcatctccattgaacagccttggacctgttcacgttgccacagaattcacatgagaaccaagtagcctgttatcaatctgctaaattaatggacttgttaaacttttggaaaaaaaaagattaaatgccagctttgtacaggtcttttctatttttttttgtttattttgttatttgcaaatttgtacaaacatttaaatggttctaatttccagataaatgatttttgatgttattgttgggacttaagaacatttttggaatagatattgaactgtaataatgttttcttaaaactagagtctactttgttacatagtcagcttgtaaattttgtggaaccacaggtatttggggcagcattcataattttcattttgtattctaactggattagtactaattttatacatgcttaactggtttgtacactttgggatgctacttagtgatgtttctgactaatcttaaatcattgtaattagtacttgcatattcaacgtttcaggccctggttgggcaggaaagtgatgtatagttatggacactttgcgtttcttatttaggataacttaatatgtttttatgtatgtattttaaagaaatttcatctgcttctactgaactatgcgtactgcatagcatcaagtcttctctagagacctctgtagtcctgggaggcctcataatgtttgtagatcagaaaagggagatctgcatctaaagcaatggtcctttgtcaaacgagggattttgatccacttcaccattttgagttgagctttagcaaaagtttcccctcataattctttgctcttgtttcagtccaggtggaggttggttttgtagttctgccttgaggaattatgtcaacactcatacttcatctcattctcccttctgccctgcagattagattacttagcacactgtggaagtttaagtggaaggagggaatttaaaaatgggacttgagtggtttgtagaatttgtgttcataagttcagatgggtagcaaatggaatagaacttacttaaaaattggggagatttatttgaaaaccagctgtaagttgtgcattgagattatgttaaaagccttggcttaagaatttgaaaatttctttagcctgtagcaacctaaactgtaattcctatcattatgttttattactttccaattacctgtaactgacagaccaaattaattggctttgtgtcctatttagtccatcagtattttcaagtcatgtggaaagcccaaagtcatcacaatgaagagaacaggtgcacagcactgttcctcttgtgttcttgagaaggatctaatttttctgtatatagcccacatcacacttgctttgtcttgtatgttaattgcatcttcattggcttggtatttcctaaatgtttaacaagaacacaagtgttcctgataagatttcctacagtaagccagctctattgtaagcttcccactgtgatgatcatttttttgaagattcattgaacagccaccactctatcatcctcattttggggcagtccaagacatagctggttttagaaacccaagttcctctaagcacagcctcccgggtatgtaactgaacttggtgccaaagtacttgtgtactaatttctattactacgtactgtcactttcctcccgtgccattactgcatcataatacaaggaacctcagagcccccatttgttcattaaagaggcaactacagccaaaatcactgttaaaatcttactacttcatggagtagctcttaggaaaatatatcttcctcctgagtctgggtaattatacctctcccaagcccccattgtgtgttgaaatcctgtcatgaatccttggtagctctctgagaacagtgaagtccagggaaaggcatctggtctgtctggaaagcaaacattatgtggcctctggtagtttttttcctgtaagaatactgactttctggagtaatgagtatatatcagttattgtacatgattgctttgtgaaatgtgcaaatgatatcacctatgcagccttgtttgatttattttctctggtttgtactgttattaaaagcatattgtattatagagctattcagatattttaaatataaagatgtattgtttccgtaatatagacgtatggaatatatttaggtaatagatgtattacttggaaagttctgctttgacaaactgacaaagtctaaatgagcacatgtatcccagtgagcagtaaatcaatggaacatcccaagaagaggataaggatgcttaaaatggaaatcattctccaacgatatacaaattggacttgttcaactgctggatatatgctaccaataaccccagccccaacttaaaattcttacattcaagctcctaagagttcttaatttataactaattttaaaagagaagtttcttttctggttttagtttgggaataatcattcattaaaaaaaatgtattgtggtttatgcgaacagaccaacctggcattacagttggcctctccttgaggtgggcacagcctggcagtgtggccaggggtggccatgtaagtcccatcaggacgtagtcatgcctcctgcatttcgctacccgagtttagtaacagtgcagattccacgttcttgttccgatactctgagaagtgcctgatgttgatgtacttacagacacaagaacaatctttgctataattgtataaagccataaatgtacataaattatgtttaaatggc

SEQ ID NO: 78943 - DNA, 5391 bp, Homo sapiens
ggcctggtagtcgcagcagccgctgccgcagccgccacattcaacaggcagcagcgcagcgggcgcgccgctggggagagcaagcggcccgcggcgtccgtccgtccttccgtccgcggccctgtcagctggagcgcggcgcaggctctgccccggcccggcggctctggccggccgtccagtccgtgcggcggaccccgaggagcctcgatgtggatggccccgcgaagttaagttctgggctcgcgcttccactccgccgcgccttcctcccagtttccgtccgctcgccgcaccggcttcgttcccccaaatctcggaccgtcccttcgcgccccctccccgtccgcccccagtgctgcgttctccccctcttggctctcctgcggctgggggaggggcgggggtcaccatggccgaggcgcctcaggtggtggagatcgacccggacttcgagccgctgccccggccgcgctcgtgcacctggccgctgcccaggccggagtttagccagtccaactcggccacctccagcccggcgccgtcgggcagcgcggctgccaaccccgacgccgcggcgggcctgccctcggcctcggctgccgctgtcagcgccgacttcatgagcaacctgagcttgctggaggagagcgaggacttcccgcaggcgcccggctccgtggcggcggcggtggcggcggcggccgccgcggccgccaccggggggctgtgcggggacttccagggcccggaggcgggctgcaattcaattcgtcataatctgtccctacacagcaagttcattcgtgtgcagaatgaaggaactggaaaaagttcttggtggatgctcaatccagagggtggcaagagcgggaaatctcctaggagaagagctgcatccatggacaacaacagtaaatttgctaagagccgaagccgagctgccaagaagaaagcatctctccagtctggccaggagggtgctggggacagccctggatcacagttttccaaatggcctgcaagccctggctctcacagcaatgatgactttgataactggagtacatttcgccctcgaactagctcaaatgctagtactattagtgggagactctcacccattatgaccgaacaggatgatcttggagaaggggatgtgcattctatggtgtacccgccatctgccgcaaagatggcctctactttacccagtctgtctgagataagcaatcccgaaaacatggaaaatcttttggataatctcaaccttctctcatcaccaacatcattaactgtttcgacccagtcctcacctggcaccatgatgcagcagacgccgtgctactcgtttgcgccaccaaacaccagtttgaattcacccagcccaaactaccaaaaatatacatatggccaatccagcatgagccctttgccccagatgcctatacaaacacttcaggacaataagtcgagttatggaggtatgagtcagtataactgtgcgcctggactcttgaaggagttgctgacttctgactctcctccccataatgacattatgacaccagttgatcctggggtagcccagcccaacagccgggttctgggccagaacgtcatgatgggccctaattcggtcatgtcaacctatggcagccaggcatctcataacaaaatgatgaatcccagctcccatacccaccctggacatgctcagcagacatctgcagttaacgggcgtcccctgccccacacggtaagcaccatgccccacacctcgggtatgaaccgcctgacccaagtgaagacacctgtacaagtgcctctgccccaccccatgcagatgagtgccctggggggctactcctccgtgagcagctgcaatggctatggcagaatgggccttctccaccaggagaagctcccaagtgacttggatggcatgttcattgagcgcttagactgtgacatggaatccatcattcggaatgacctcatggatggagatacattggattttaactttgacaatgtgttgcccaaccaaagcttcccacacagtgtcaagacaacgacacatagctgggtgtcaggctgagggttagtgagcaggttacacttaaaagtacttcagattgtctgacagcaggaactgagagaagcagtccaaagatgtctttcaccaactcccttttagttttcttggttaaaaaaaaaaaacaaaaaaaaaaaccctccttttttcctttcgtcagacttggcagcaaagacatttttcctgtacaggatgtttgcccaatgtgtgcaggttatgtgctgctgtagataaggactgtgccattggaaatttcattacaatgaagtgccaaactcactacaccatataattgcagaaaagattttcagatcctggtgtgctttcaagttttgtatataagcagtagatacagattgtatttgtgtgtgtttttggtttttctaaatatccaattggtccaaggaaagtttatactctttttgtaatactgtgatgggcctcatgtcttgataagttaaacttttgtttgtactacctgttttctgcggaactgacggatcacaaagaactgaatctccattctgcatctccattgaacagccttggacctgttcacgttgccacagaattcacatgagaaccaagtagcctgttatcaatctgctaaattaatggacttgttaaacttttggaaaaaaaaagattaaatgccagctttgtacaggtcttttctatttttttttgtttattttgttatttgcaaatttgtacaaacatttaaatggttctaatttccagataaatgatttttgatgttattgttgggacttaagaacatttttggaatagatattgaactgtaataatgttttcttaaaactagagtctactttgttacatagtcagcttgtaaattttgtggaaccacaggtatttggggcagcattcataattttcattttgtattctaactggattagtactaattttatacatgcttaactggtttgtacactttgggatgctacttagtgatgtttctgactaatcttaaatcattgtaattagtacttgcatattcaacgtttcaggccctggttgggcaggaaagtgatgtatagttatggacactttgcgtttcttatttaggataacttaatatgtttttatgtatgtattttaaagaaatttcatctgcttctactgaactatgcgtactgcatagcatcaagtcttctctagagacctctgtagtcctgggaggcctcataatgtttgtagatcagaaaagggagatctgcatctaaagcaatggtcctttgtcaaacgagggattttgatccacttcaccattttgagttgagctttagcaaaagtttcccctcataattctttgctcttgtttcagtccaggtggaggttggttttgtagttctgccttgaggaattatgtcaacactcatacttcatctcattctcccttctgccctgcagattagattacttagcacactgtggaagtttaagtggaaggagggaatttaaaaatgggacttgagtggtttgtagaatttgtgttcataagttcagatgggtagcaaatggaatagaacttacttaaaaattggggagatttatttgaaaaccagctgtaagttgtgcattgagattatgttaaaagccttggcttaagaatttgaaaatttctttagcctgtagcaacctaaactgtaattcctatcattatgttttattactttccaattacctgtaactgacagaccaaattaattggctttgtgtcctatttagtccatcagtattttcaagtcatgtggaaagcccaaagtcatcacaatgaagagaacaggtgcacagcactgttcctcttgtgttcttgagaaggatctaatttttctgtatatagcccacatcacacttgctttgtcttgtatgttaattgcatcttcattggcttggtatttcctaaatgtttaacaagaacacaagtgttcctgataagatttcctacagtaagccagctctattgtaagcttcccactgtgatgatcatttttttgaagattcattgaacagccaccactctatcatcctcattttggggcagtccaagacatagctggttttagaaacccaagttcctctaagcacagcctcccgggtatgtaactgaacttggtgccaaagtacttgtgtactaatttctattactacgtactgtcactttcctcccgtgccattactgcatcataatacaaggaacctcagagcccccatttgttcattaaagaggcaactacagccaaaatcactgttaaaatcttactacttcatggagtagctcttaggaaaatatatcttcctcctgagtctgggtaattatacctctcccaagcccccattgtgtgttgaaatcctgtcatgaatccttggtagctctctgagaacagtgaagtccagggaaaggcatctggtctgtctggaaagcaaacattatgtggcctctggtagtttttttcctgtaagaatactgactttctggagtaatgagtatatatcagttattgtacatgattgctttgtgaaatgtgcaaatgatatcacctatgcagccttgtttgatttattttctctggtttgtactgttattaaaagcatattgtattatagagctattcagatattttaaatataaagatgtattgtttccgtaatatagacgtatggaatatatttaggtaatagatgtattacttggaaagttctgctttgacaaactgacaaagtctaaatgagcacatgtatcccagtgagcagtaaatcaatggaacatcccaagaagaggataaggatgcttaaaatggaaatcattctccaacgatatacaaattggacttgttcaactgctggatatatgctaccaataaccccagccccaacttaaaattcttacattcaagctcctaagagttcttaatttataactaattttaaaagagaagtttcttttctggttttagtttgggaataatcattcattaaaaaaaatgtattgtggtttatgcgaacagaccaacctggcattacagttggcctctccttgaggtgggcacagcctggcagtgtggccaggggtggccatgtaagtcccatcaggacgtagtcatgcctcctgcatttcgctacccgagtttagtaacagtgcagattccacgttcttgttccgatactctgagaagtgcctgatgttgatgtacttacagacacaagaacaatctttgctataattgtataaagccataaatgtacataaattatgtttaaatggc

SEQ ID NO: 78944 - DNA, 4654 bp, Homo sapiens
  misc_feature (149)..(149): n is a, c, g, or t
  misc_feature (151)..(151): n is a, c, g, or t
  misc_feature (161)..(161): n is a, c, g, or t
  misc_feature (167)..(167): n is a, c, g, or t
  misc_feature (171)..(172): n is a, c, g, or t
gacacaggggaaactgaaagtagagaaatgggtatcacaggagtacgcgtaacataaaagcatactgtaagatccagttagcagacataagcccaaataggctctgacgctgctagcagtcaaagagagaagggaaacatgatcagttntnagactgggtncatatnatannaactaatagctcagaagaatcagctaatggtataccctgcttgtgtgcacctggctagaccggccaggagggtgctggggacagccctggatcacagttttccaaatggcctgcaagccctggctctcacagcaatgatgactttgataactggagtacatttcgccctcgaactagctcaaatgctagtactattagtgggagactctcacccattatgaccgaacaggatgatcttggagaaggggatgtgcattctatggtgtacccgccatctgccgcaaagatggcctctactttacccagtctgtctgagataagcaatcccgaaaacatggaaaatcttttggataatctcaaccttctctcatcaccaacatcattaactgtttcgacccagtcctcacctggcaccatgatgcagcagacgccgtgctactcgtttgcgccaccaaacaccagtttgaattcacccagcccaaactaccaaaaatatacatatggccaatccagcatgagccctttgccccagatgcctatacaaacacttcaggacaataagtcgagttatggaggtatgagtcagtataactgtgcgcctggactcttgaaggagttgctgacttctgactctcctccccataatgacattatgacaccagttgatcctggggtagcccagcccaacagccgggttctgggccagaacgtcatgatgggccctaattcggtcatgtcaacctatggcagccaggcatctcataacaaaatgatgaatcccagctcccatacccaccctggacatgctcagcagacatctgcagttaacgggcgtcccctgccccacacggtaagcaccatgccccacacctcgggtatgaaccgcctgacccaagtgaagacacctgtacaagtgcctctgccccaccccatgcagatgagtgccctggggggctactcctccgtgagcagctgcaatggctatggcagaatgggccttctccaccaggagaagctcccaagtgacttggatggcatgttcattgagcgcttagactgtgacatggaatccatcattcggaatgacctcatggatggagatacattggattttaactttgacaatgtgttgcccaaccaaagcttcccacacagtgtcaagacaacgacacatagctgggtgtcaggctgagggttagtgagcaggttacacttaaaagtacttcagattgtctgacagcaggaactgagagaagcagtccaaagatgtctttcaccaactcccttttagttttcttggttaaaaaaaaaaaacaaaaaaaaaaaccctccttttttcctttcgtcagacttggcagcaaagacatttttcctgtacaggatgtttgcccaatgtgtgcaggttatgtgctgctgtagataaggactgtgccattggaaatttcattacaatgaagtgccaaactcactacaccatataattgcagaaaagattttcagatcctggtgtgctttcaagttttgtatataagcagtagatacagattgtatttgtgtgtgtttttggtttttctaaatatccaattggtccaaggaaagtttatactctttttgtaatactgtgatgggcctcatgtcttgataagttaaacttttgtttgtactacctgttttctgcggaactgacggatcacaaagaactgaatctccattctgcatctccattgaacagccttggacctgttcacgttgccacagaattcacatgagaaccaagtagcctgttatcaatctgctaaattaatggacttgttaaacttttggaaaaaaaaagattaaatgccagctttgtacaggtcttttctatttttttttgtttattttgttatttgcaaatttgtacaaacatttaaatggttctaatttccagataaatgatttttgatgttattgttgggacttaagaacatttttggaatagatattgaactgtaataatgttttcttaaaactagagtctactttgttacatagtcagcttgtaaattttgtggaaccacaggtatttggggcagcattcataattttcattttgtattctaactggattagtactaattttatacatgcttaactggtttgtacactttgggatgctacttagtgatgtttctgactaatcttaaatcattgtaattagtacttgcatattcaacgtttcaggccctggttgggcaggaaagtgatgtatagttatggacactttgcgtttcttatttaggataacttaatatgtttttatgtatgtattttaaagaaatttcatctgcttctactgaactatgcgtactgcatagcatcaagtcttctctagagacctctgtagtcctgggaggcctcataatgtttgtagatcagaaaagggagatctgcatctaaagcaatggtcctttgtcaaacgagggattttgatccacttcaccattttgagttgagctttagcaaaagtttcccctcataattctttgctcttgtttcagtccaggtggaggttggttttgtagttctgccttgaggaattatgtcaacactcatacttcatctcattctcccttctgccctgcagattagattacttagcacactgtggaagtttaagtggaaggagggaatttaaaaatgggacttgagtggtttgtagaatttgtgttcataagttcagatgggtagcaaatggaatagaacttacttaaaaattggggagatttatttgaaaaccagctgtaagttgtgcattgagattatgttaaaagccttggcttaagaatttgaaaatttctttagcctgtagcaacctaaactgtaattcctatcattatgttttattactttccaattacctgtaactgacagaccaaattaattggctttgtgtcctatttagtccatcagtattttcaagtcatgtggaaagcccaaagtcatcacaatgaagagaacaggtgcacagcactgttcctcttgtgttcttgagaaggatctaatttttctgtatatagcccacatcacacttgctttgtcttgtatgttaattgcatcttcattggcttggtatttcctaaatgtttaacaagaacacaagtgttcctgataagatttcctacagtaagccagctctattgtaagcttcccactgtgatgatcatttttttgaagattcattgaacagccaccactctatcatcctcattttggggcagtccaagacatagctggttttagaaacccaagttcctctaagcacagcctcccgggtatgtaactgaacttggtgccaaagtacttgtgtactaatttctattactacgtactgtcactttcctcccgtgccattactgcatcataatacaaggaacctcagagcccccatttgttcattaaagaggcaactacagccaaaatcactgttaaaatcttactacttcatggagtagctcttaggaaaatatatcttcctcctgagtctgggtaattatacctctcccaagcccccattgtgtgttgaaatcctgtcatgaatccttggtagctctctgagaacagtgaagtccagggaaaggcatctggtctgtctggaaagcaaacattatgtggcctctggtagtttttttcctgtaagaatactgactttctggagtaatgagtatatatcagttattgtacatgattgctttgtgaaatgtgcaaatgatatcacctatgcagccttgtttgatttattttctctggtttgtactgttattaaaagcatattgtattatagagctattcagatattttaaatataaagatgtattgtttccgtaatatagacgtatggaatatatttaggtaatagatgtattacttggaaagttctgctttgacaaactgacaaagtctaaatgagcacatgtatcccagtgagcagtaaatcaatggaacatcccaagaagaggataaggatgcttaaaatggaaatcattctccaacgatatacaaattggacttgttcaactgctggatatatgctaccaataaccccagccccaacttaaaattcttacattcaagctcctaagagttcttaatttataactaattttaaaagagaagtttcttttctggttttagtttgggaataatcattcattaaaaaaaatgtattgtggtttatgcgaacagaccaacctggcattacagttggcctctccttgaggtgggcacagcctggcagtgtggccaggggtggccatgtaagtcccatcaggacgtagtcatgcctcctgcatttcgctacccgagtttagtaacagtgcagattccacgttcttgttccgatactctgagaagtgcctgatgttgatgtacttacagacacaagaacaatctttgctataattgtataaagccataaatgtacataaattatgtttaaatggc

SEQ ID NO: 78945 - DNA, 4493 bp, Homo sapiens
  misc_feature (72)..(72): n is a, c, g, or t
acaaatgcatgggctgcgacgataacgttgtagatgtggtcgttacctagaaggttgcctggctagacccanggccaggagggtgctggggacagccctggatcacagttttccaaatggcctgcaagccctggctctcacagcaatgatgactttgataactggagtacatttcgccctcgaactagctcaaatgctagtactattagtgggagactctcacccattatgaccgaacaggatgatcttggagaaggggatgtgcattctatggtgtacccgccatctgccgcaaagatggcctctactttacccagtctgtctgagataagcaatcccgaaaacatggaaaatcttttggataatctcaaccttctctcatcaccaacatcattaactgtttcgacccagtcctcacctggcaccatgatgcagcagacgccgtgctactcgtttgcgccaccaaacaccagtttgaattcacccagcccaaactaccaaaaatatacatatggccaatccagcatgagccctttgccccagatgcctatacaaacacttcaggacaataagtcgagttatggaggtatgagtcagtataactgtgcgcctggactcttgaaggagttgctgacttctgactctcctccccataatgacattatgacaccagttgatcctggggtagcccagcccaacagccgggttctgggccagaacgtcatgatgggccctaattcggtcatgtcaacctatggcagccaggcatctcataacaaaatgatgaatcccagctcccatacccaccctggacatgctcagcagacatctgcagttaacgggcgtcccctgccccacacggtaagcaccatgccccacacctcgggtatgaaccgcctgacccaagtgaagacacctgtacaagtgcctctgccccaccccatgcagatgagtgccctggggggctactcctccgtgagcagctgcaatggctatggcagaatgggccttctccaccaggagaagctcccaagtgacttggatggcatgttcattgagcgcttagactgtgacatggaatccatcattcggaatgacctcatggatggagatacattggattttaactttgacaatgtgttgcccaaccaaagcttcccacacagtgtcaagacaacgacacatagctgggtgtcaggctgagggttagtgagcaggttacacttaaaagtacttcagattgtctgacagcaggaactgagagaagcagtccaaagatgtctttcaccaactcccttttagttttcttggttaaaaaaaaaaaacaaaaaaaaaaaccctccttttttcctttcgtcagacttggcagcaaagacatttttcctgtacaggatgtttgcccaatgtgtgcaggttatgtgctgctgtagataaggactgtgccattggaaatttcattacaatgaagtgccaaactcactacaccatataattgcagaaaagattttcagatcctggtgtgctttcaagttttgtatataagcagtagatacagattgtatttgtgtgtgtttttggtttttctaaatatccaattggtccaaggaaagtttatactctttttgtaatactgtgatgggcctcatgtcttgataagttaaacttttgtttgtactacctgttttctgcggaactgacggatcacaaagaactgaatctccattctgcatctccattgaacagccttggacctgttcacgttgccacagaattcacatgagaaccaagtagcctgttatcaatctgctaaattaatggacttgttaaacttttggaaaaaaaaagattaaatgccagctttgtacaggtcttttctatttttttttgtttattttgttatttgcaaatttgtacaaacatttaaatggttctaatttccagataaatgatttttgatgttattgttgggacttaagaacatttttggaatagatattgaactgtaataatgttttcttaaaactagagtctactttgttacatagtcagcttgtaaattttgtggaaccacaggtatttggggcagcattcataattttcattttgtattctaactggattagtactaattttatacatgcttaactggtttgtacactttgggatgctacttagtgatgtttctgactaatcttaaatcattgtaattagtacttgcatattcaacgtttcaggccctggttgggcaggaaagtgatgtatagttatggacactttgcgtttcttatttaggataacttaatatgtttttatgtatgtattttaaagaaatttcatctgcttctactgaactatgcgtactgcatagcatcaagtcttctctagagacctctgtagtcctgggaggcctcataatgtttgtagatcagaaaagggagatctgcatctaaagcaatggtcctttgtcaaacgagggattttgatccacttcaccattttgagttgagctttagcaaaagtttcccctcataattctttgctcttgtttcagtccaggtggaggttggttttgtagttctgccttgaggaattatgtcaacactcatacttcatctcattctcccttctgccctgcagattagattacttagcacactgtggaagtttaagtggaaggagggaatttaaaaatgggacttgagtggtttgtagaatttgtgttcataagttcagatgggtagcaaatggaatagaacttacttaaaaattggggagatttatttgaaaaccagctgtaagttgtgcattgagattatgttaaaagccttggcttaagaatttgaaaatttctttagcctgtagcaacctaaactgtaattcctatcattatgttttattactttccaattacctgtaactgacagaccaaattaattggctttgtgtcctatttagtccatcagtattttcaagtcatgtggaaagcccaaagtcatcacaatgaagagaacaggtgcacagcactgttcctcttgtgttcttgagaaggatctaatttttctgtatatagcccacatcacacttgctttgtcttgtatgttaattgcatcttcattggcttggtatttcctaaatgtttaacaagaacacaagtgttcctgataagatttcctacagtaagccagctctattgtaagcttcccactgtgatgatcatttttttgaagattcattgaacagccaccactctatcatcctcattttggggcagtccaagacatagctggttttagaaacccaagttcctctaagcacagcctcccgggtatgtaactgaacttggtgccaaagtacttgtgtactaatttctattactacgtactgtcactttcctcccgtgccattactgcatcataatacaaggaacctcagagcccccatttgttcattaaagaggcaactacagccaaaatcactgttaaaatcttactacttcatggagtagctcttaggaaaatatatcttcctcctgagtctgggtaattatacctctcccaagcccccattgtgtgttgaaatcctgtcatgaatccttggtagctctctgagaacagtgaagtccagggaaaggcatctggtctgtctggaaagcaaacattatgtggcctctggtagtttttttcctgtaagaatactgactttctggagtaatgagtatatatcagttattgtacatgattgctttgtgaaatgtgcaaatgatatcacctatgcagccttgtttgatttattttctctggtttgtactgttattaaaagcatattgtattatagagctattcagatattttaaatataaagatgtattgtttccgtaatatagacgtatggaatatatttaggtaatagatgtattacttggaaagttctgctttgacaaactgacaaagtctaaatgagcacatgtatcccagtgagcagtaaatcaatggaacatcccaagaagaggataaggatgcttaaaatggaaatcattctccaacgatatacaaattggacttgttcaactgctggatatatgctaccaataaccccagccccaacttaaaattcttacattcaagctcctaagagttcttaatttataactaattttaaaagagaagtttcttttctggttttagtttgggaataatcattcattaaaaaaaatgtattgtggtttatgcgaacagaccaacctggcattacagttggcctctccttgaggtgggcacagcctggcagtgtggccaggggtggccatgtaagtcccatcaggacgtagtcatgcctcctgcatttcgctacccgagtttagtaacagtgcagattccacgttcttgttccgatactctgagaagtgcctgatgttgatgtacttacagacacaagaacaatctttgctataattgtataaagccataaatgtacataaattatgtttaaatggc

SEQ ID NO: 78946 - DNA, 4658 bp, Homo sapiens
ctcccgggttcacgctattctcctgcctcagcctcctgagtagctgagactacaggcgcccaccaccacgcccggctaatttttttttgtatttttagtagagacgggatttcaccgtgttagccaggatggtctccatctcctgaccttgtgatccacccgcctcggcctcccaaagtgctaggattacaggcgtaagccactgcgcccggccacgtcttccttttcttagctttgggccaggagggtgctggggacagccctggatcacagttttccaaatggcctgcaagccctggctctcacagcaatgatgactttgataactggagtacatttcgccctcgaactagctcaaatgctagtactattagtgggagactctcacccattatgaccgaacaggatgatcttggagaaggggatgtgcattctatggtgtacccgccatctgccgcaaagatggcctctactttacccagtctgtctgagataagcaatcccgaaaacatggaaaatcttttggataatctcaaccttctctcatcaccaacatcattaactgtttcgacccagtcctcacctggcaccatgatgcagcagacgccgtgctactcgtttgcgccaccaaacaccagtttgaattcacccagcccaaactaccaaaaatatacatatggccaatccagcatgagccctttgccccagatgcctatacaaacacttcaggacaataagtcgagttatggaggtatgagtcagtataactgtgcgcctggactcttgaaggagttgctgacttctgactctcctccccataatgacattatgacaccagttgatcctggggtagcccagcccaacagccgggttctgggccagaacgtcatgatgggccctaattcggtcatgtcaacctatggcagccaggcatctcataacaaaatgatgaatcccagctcccatacccaccctggacatgctcagcagacatctgcagttaacgggcgtcccctgccccacacggtaagcaccatgccccacacctcgggtatgaaccgcctgacccaagtgaagacacctgtacaagtgcctctgccccaccccatgcagatgagtgccctggggggctactcctccgtgagcagctgcaatggctatggcagaatgggccttctccaccaggagaagctcccaagtgacttggatggcatgttcattgagcgcttagactgtgacatggaatccatcattcggaatgacctcatggatggagatacattggattttaactttgacaatgtgttgcccaaccaaagcttcccacacagtgtcaagacaacgacacatagctgggtgtcaggctgagggttagtgagcaggttacacttaaaagtacttcagattgtctgacagcaggaactgagagaagcagtccaaagatgtctttcaccaactcccttttagttttcttggttaaaaaaaaaaaacaaaaaaaaaaaccctccttttttcctttcgtcagacttggcagcaaagacatttttcctgtacaggatgtttgcccaatgtgtgcaggttatgtgctgctgtagataaggactgtgccattggaaatttcattacaatgaagtgccaaactcactacaccatataattgcagaaaagattttcagatcctggtgtgctttcaagttttgtatataagcagtagatacagattgtatttgtgtgtgtttttggtttttctaaatatccaattggtccaaggaaagtttatactctttttgtaatactgtgatgggcctcatgtcttgataagttaaacttttgtttgtactacctgttttctgcggaactgacggatcacaaagaactgaatctccattctgcatctccattgaacagccttggacctgttcacgttgccacagaattcacatgagaaccaagtagcctgttatcaatctgctaaattaatggacttgttaaacttttggaaaaaaaaagattaaatgccagctttgtacaggtcttttctatttttttttgtttattttgttatttgcaaatttgtacaaacatttaaatggttctaatttccagataaatgatttttgatgttattgttgggacttaagaacatttttggaatagatattgaactgtaataatgttttcttaaaactagagtctactttgttacatagtcagcttgtaaattttgtggaaccacaggtatttggggcagcattcataattttcattttgtattctaactggattagtactaattttatacatgcttaactggtttgtacactttgggatgctacttagtgatgtttctgactaatcttaaatcattgtaattagtacttgcatattcaacgtttcaggccctggttgggcaggaaagtgatgtatagttatggacactttgcgtttcttatttaggataacttaatatgtttttatgtatgtattttaaagaaatttcatctgcttctactgaactatgcgtactgcatagcatcaagtcttctctagagacctctgtagtcctgggaggcctcataatgtttgtagatcagaaaagggagatctgcatctaaagcaatggtcctttgtcaaacgagggattttgatccacttcaccattttgagttgagctttagcaaaagtttcccctcataattctttgctcttgtttcagtccaggtggaggttggttttgtagttctgccttgaggaattatgtcaacactcatacttcatctcattctcccttctgccctgcagattagattacttagcacactgtggaagtttaagtggaaggagggaatttaaaaatgggacttgagtggtttgtagaatttgtgttcataagttcagatgggtagcaaatggaatagaacttacttaaaaattggggagatttatttgaaaaccagctgtaagttgtgcattgagattatgttaaaagccttggcttaagaatttgaaaatttctttagcctgtagcaacctaaactgtaattcctatcattatgttttattactttccaattacctgtaactgacagaccaaattaattggctttgtgtcctatttagtccatcagtattttcaagtcatgtggaaagcccaaagtcatcacaatgaagagaacaggtgcacagcactgttcctcttgtgttcttgagaaggatctaatttttctgtatatagcccacatcacacttgctttgtcttgtatgttaattgcatcttcattggcttggtatttcctaaatgtttaacaagaacacaagtgttcctgataagatttcctacagtaagccagctctattgtaagcttcccactgtgatgatcatttttttgaagattcattgaacagccaccactctatcatcctcattttggggcagtccaagacatagctggttttagaaacccaagttcctctaagcacagcctcccgggtatgtaactgaacttggtgccaaagtacttgtgtactaatttctattactacgtactgtcactttcctcccgtgccattactgcatcataatacaaggaacctcagagcccccatttgttcattaaagaggcaactacagccaaaatcactgttaaaatcttactacttcatggagtagctcttaggaaaatatatcttcctcctgagtctgggtaattatacctctcccaagcccccattgtgtgttgaaatcctgtcatgaatccttggtagctctctgagaacagtgaagtccagggaaaggcatctggtctgtctggaaagcaaacattatgtggcctctggtagtttttttcctgtaagaatactgactttctggagtaatgagtatatatcagttattgtacatgattgctttgtgaaatgtgcaaatgatatcacctatgcagccttgtttgatttattttctctggtttgtactgttattaaaagcatattgtattatagagctattcagatattttaaatataaagatgtattgtttccgtaatatagacgtatggaatatatttaggtaatagatgtattacttggaaagttctgctttgacaaactgacaaagtctaaatgagcacatgtatcccagtgagcagtaaatcaatggaacatcccaagaagaggataaggatgcttaaaatggaaatcattctccaacgatatacaaattggacttgttcaactgctggatatatgctaccaataaccccagccccaacttaaaattcttacattcaagctcctaagagttcttaatttataactaattttaaaagagaagtttcttttctggttttagtttgggaataatcattcattaaaaaaaatgtattgtggtttatgcgaacagaccaacctggcattacagttggcctctccttgaggtgggcacagcctggcagtgtggccaggggtggccatgtaagtcccatcaggacgtagtcatgcctcctgcatttcgctacccgagtttagtaacagtgcagattccacgttcttgttccgatactctgagaagtgcctgatgttgatgtacttacagacacaagaacaatctttgctataattgtataaagccataaatgtacataaattatgtttaaatggc

SEQ ID NO: 78947 - DNA, 4569 bp, Homo sapiens
tattaattttgtccataagttatactttctcattccatgatacggctttcactctgtaaaactttgtccccaaaggaactttaaatctgttttgtgcctttttggcttgacagtattctttttccattacttttccaagtaccctgggggccaggagggtgctggggacagccctggatcacagttttccaaatggcctgcaagccctggctctcacagcaatgatgactttgataactggagtacatttcgccctcgaactagctcaaatgctagtactattagtgggagactctcacccattatgaccgaacaggatgatcttggagaaggggatgtgcattctatggtgtacccgccatctgccgcaaagatggcctctactttacccagtctgtctgagataagcaatcccgaaaacatggaaaatcttttggataatctcaaccttctctcatcaccaacatcattaactgtttcgacccagtcctcacctggcaccatgatgcagcagacgccgtgctactcgtttgcgccaccaaacaccagtttgaattcacccagcccaaactaccaaaaatatacatatggccaatccagcatgagccctttgccccagatgcctatacaaacacttcaggacaataagtcgagttatggaggtatgagtcagtataactgtgcgcctggactcttgaaggagttgctgacttctgactctcctccccataatgacattatgacaccagttgatcctggggtagcccagcccaacagccgggttctgggccagaacgtcatgatgggccctaattcggtcatgtcaacctatggcagccaggcatctcataacaaaatgatgaatcccagctcccatacccaccctggacatgctcagcagacatctgcagttaacgggcgtcccctgccccacacggtaagcaccatgccccacacctcgggtatgaaccgcctgacccaagtgaagacacctgtacaagtgcctctgccccaccccatgcagatgagtgccctggggggctactcctccgtgagcagctgcaatggctatggcagaatgggccttctccaccaggagaagctcccaagtgacttggatggcatgttcattgagcgcttagactgtgacatggaatccatcattcggaatgacctcatggatggagatacattggattttaactttgacaatgtgttgcccaaccaaagcttcccacacagtgtcaagacaacgacacatagctgggtgtcaggctgagggttagtgagcaggttacacttaaaagtacttcagattgtctgacagcaggaactgagagaagcagtccaaagatgtctttcaccaactcccttttagttttcttggttaaaaaaaaaaaacaaaaaaaaaaaccctccttttttcctttcgtcagacttggcagcaaagacatttttcctgtacaggatgtttgcccaatgtgtgcaggttatgtgctgctgtagataaggactgtgccattggaaatttcattacaatgaagtgccaaactcactacaccatataattgcagaaaagattttcagatcctggtgtgctttcaagttttgtatataagcagtagatacagattgtatttgtgtgtgtttttggtttttctaaatatccaattggtccaaggaaagtttatactctttttgtaatactgtgatgggcctcatgtcttgataagttaaacttttgtttgtactacctgttttctgcggaactgacggatcacaaagaactgaatctccattctgcatctccattgaacagccttggacctgttcacgttgccacagaattcacatgagaaccaagtagcctgttatcaatctgctaaattaatggacttgttaaacttttggaaaaaaaaagattaaatgccagctttgtacaggtcttttctatttttttttgtttattttgttatttgcaaatttgtacaaacatttaaatggttctaatttccagataaatgatttttgatgttattgttgggacttaagaacatttttggaatagatattgaactgtaataatgttttcttaaaactagagtctactttgttacatagtcagcttgtaaattttgtggaaccacaggtatttggggcagcattcataattttcattttgtattctaactggattagtactaattttatacatgcttaactggtttgtacactttgggatgctacttagtgatgtttctgactaatcttaaatcattgtaattagtacttgcatattcaacgtttcaggccctggttgggcaggaaagtgatgtatagttatggacactttgcgtttcttatttaggataacttaatatgtttttatgtatgtattttaaagaaatttcatctgcttctactgaactatgcgtactgcatagcatcaagtcttctctagagacctctgtagtcctgggaggcctcataatgtttgtagatcagaaaagggagatctgcatctaaagcaatggtcctttgtcaaacgagggattttgatccacttcaccattttgagttgagctttagcaaaagtttcccctcataattctttgctcttgtttcagtccaggtggaggttggttttgtagttctgccttgaggaattatgtcaacactcatacttcatctcattctcccttctgccctgcagattagattacttagcacactgtggaagtttaagtggaaggagggaatttaaaaatgggacttgagtggtttgtagaatttgtgttcataagttcagatgggtagcaaatggaatagaacttacttaaaaattggggagatttatttgaaaaccagctgtaagttgtgcattgagattatgttaaaagccttggcttaagaatttgaaaatttctttagcctgtagcaacctaaactgtaattcctatcattatgttttattactttccaattacctgtaactgacagaccaaattaattggctttgtgtcctatttagtccatcagtattttcaagtcatgtggaaagcccaaagtcatcacaatgaagagaacaggtgcacagcactgttcctcttgtgttcttgagaaggatctaatttttctgtatatagcccacatcacacttgctttgtcttgtatgttaattgcatcttcattggcttggtatttcctaaatgtttaacaagaacacaagtgttcctgataagatttcctacagtaagccagctctattgtaagcttcccactgtgatgatcatttttttgaagattcattgaacagccaccactctatcatcctcattttggggcagtccaagacatagctggttttagaaacccaagttcctctaagcacagcctcccgggtatgtaactgaacttggtgccaaagtacttgtgtactaatttctattactacgtactgtcactttcctcccgtgccattactgcatcataatacaaggaacctcagagcccccatttgttcattaaagaggcaactacagccaaaatcactgttaaaatcttactacttcatggagtagctcttaggaaaatatatcttcctcctgagtctgggtaattatacctctcccaagcccccattgtgtgttgaaatcctgtcatgaatccttggtagctctctgagaacagtgaagtccagggaaaggcatctggtctgtctggaaagcaaacattatgtggcctctggtagtttttttcctgtaagaatactgactttctggagtaatgagtatatatcagttattgtacatgattgctttgtgaaatgtgcaaatgatatcacctatgcagccttgtttgatttattttctctggtttgtactgttattaaaagcatattgtattatagagctattcagatattttaaatataaagatgtattgtttccgtaatatagacgtatggaatatatttaggtaatagatgtattacttggaaagttctgctttgacaaactgacaaagtctaaatgagcacatgtatcccagtgagcagtaaatcaatggaacatcccaagaagaggataaggatgcttaaaatggaaatcattctccaacgatatacaaattggacttgttcaactgctggatatatgctaccaataaccccagccccaacttaaaattcttacattcaagctcctaagagttcttaatttataactaattttaaaagagaagtttcttttctggttttagtttgggaataatcattcattaaaaaaaatgtattgtggtttatgcgaacagaccaacctggcattacagttggcctctccttgaggtgggcacagcctggcagtgtggccaggggtggccatgtaagtcccatcaggacgtagtcatgcctcctgcatttcgctacccgagtttagtaacagtgcagattccacgttcttgttccgatactctgagaagtgcctgatgttgatgtacttacagacacaagaacaatctttgctataattgtataaagccataaatgtacataaattatgtttaaatggc

SEQ ID NO: 78948 - DNA, 4623 bp, Homo sapiens
atgccccggtggttgaaggatggagttgtaaagggctcaactacagctgtggtaaaaccctggggcgctcgggtaaatagagaactccagcataggaacttcttgccataatcaactgagagacgttccatgagcagcgaggtgaacccagaaccagttcccccaccaaagctgtggaaaaccaagaagccctggctagaccggccaggagggtgctggggacagccctggatcacagttttccaaatggcctgcaagccctggctctcacagcaatgatgactttgataactggagtacatttcgccctcgaactagctcaaatgctagtactattagtgggagactctcacccattatgaccgaacaggatgatcttggagaaggggatgtgcattctatggtgtacccgccatctgccgcaaagatggcctctactttacccagtctgtctgagataagcaatcccgaaaacatggaaaatcttttggataatctcaaccttctctcatcaccaacatcattaactgtttcgacccagtcctcacctggcaccatgatgcagcagacgccgtgctactcgtttgcgccaccaaacaccagtttgaattcacccagcccaaactaccaaaaatatacatatggccaatccagcatgagccctttgccccagatgcctatacaaacacttcaggacaataagtcgagttatggaggtatgagtcagtataactgtgcgcctggactcttgaaggagttgctgacttctgactctcctccccataatgacattatgacaccagttgatcctggggtagcccagcccaacagccgggttctgggccagaacgtcatgatgggccctaattcggtcatgtcaacctatggcagccaggcatctcataacaaaatgatgaatcccagctcccatacccaccctggacatgctcagcagacatctgcagttaacgggcgtcccctgccccacacggtaagcaccatgccccacacctcgggtatgaaccgcctgacccaagtgaagacacctgtacaagtgcctctgccccaccccatgcagatgagtgccctggggggctactcctccgtgagcagctgcaatggctatggcagaatgggccttctccaccaggagaagctcccaagtgacttggatggcatgttcattgagcgcttagactgtgacatggaatccatcattcggaatgacctcatggatggagatacattggattttaactttgacaatgtgttgcccaaccaaagcttcccacacagtgtcaagacaacgacacatagctgggtgtcaggctgagggttagtgagcaggttacacttaaaagtacttcagattgtctgacagcaggaactgagagaagcagtccaaagatgtctttcaccaactcccttttagttttcttggttaaaaaaaaaaaacaaaaaaaaaaaccctccttttttcctttcgtcagacttggcagcaaagacatttttcctgtacaggatgtttgcccaatgtgtgcaggttatgtgctgctgtagataaggactgtgccattggaaatttcattacaatgaagtgccaaactcactacaccatataattgcagaaaagattttcagatcctggtgtgctttcaagttttgtatataagcagtagatacagattgtatttgtgtgtgtttttggtttttctaaatatccaattggtccaaggaaagtttatactctttttgtaatactgtgatgggcctcatgtcttgataagttaaacttttgtttgtactacctgttttctgcggaactgacggatcacaaagaactgaatctccattctgcatctccattgaacagccttggacctgttcacgttgccacagaattcacatgagaaccaagtagcctgttatcaatctgctaaattaatggacttgttaaacttttggaaaaaaaaagattaaatgccagctttgtacaggtcttttctatttttttttgtttattttgttatttgcaaatttgtacaaacatttaaatggttctaatttccagataaatgatttttgatgttattgttgggacttaagaacatttttggaatagatattgaactgtaataatgttttcttaaaactagagtctactttgttacatagtcagcttgtaaattttgtggaaccacaggtatttggggcagcattcataattttcattttgtattctaactggattagtactaattttatacatgcttaactggtttgtacactttgggatgctacttagtgatgtttctgactaatcttaaatcattgtaattagtacttgcatattcaacgtttcaggccctggttgggcaggaaagtgatgtatagttatggacactttgcgtttcttatttaggataacttaatatgtttttatgtatgtattttaaagaaatttcatctgcttctactgaactatgcgtactgcatagcatcaagtcttctctagagacctctgtagtcctgggaggcctcataatgtttgtagatcagaaaagggagatctgcatctaaagcaatggtcctttgtcaaacgagggattttgatccacttcaccattttgagttgagctttagcaaaagtttcccctcataattctttgctcttgtttcagtccaggtggaggttggttttgtagttctgccttgaggaattatgtcaacactcatacttcatctcattctcccttctgccctgcagattagattacttagcacactgtggaagtttaagtggaaggagggaatttaaaaatgggacttgagtggtttgtagaatttgtgttcataagttcagatgggtagcaaatggaatagaacttacttaaaaattggggagatttatttgaaaaccagctgtaagttgtgcattgagattatgttaaaagccttggcttaagaatttgaaaatttctttagcctgtagcaacctaaactgtaattcctatcattatgttttattactttccaattacctgtaactgacagaccaaattaattggctttgtgtcctatttagtccatcagtattttcaagtcatgtggaaagcccaaagtcatcacaatgaagagaacaggtgcacagcactgttcctcttgtgttcttgagaaggatctaatttttctgtatatagcccacatcacacttgctttgtcttgtatgttaattgcatcttcattggcttggtatttcctaaatgtttaacaagaacacaagtgttcctgataagatttcctacagtaagccagctctattgtaagcttcccactgtgatgatcatttttttgaagattcattgaacagccaccactctatcatcctcattttggggcagtccaagacatagctggttttagaaacccaagttcctctaagcacagcctcccgggtatgtaactgaacttggtgccaaagtacttgtgtactaatttctattactacgtactgtcactttcctcccgtgccattactgcatcataatacaaggaacctcagagcccccatttgttcattaaagaggcaactacagccaaaatcactgttaaaatcttactacttcatggagtagctcttaggaaaatatatcttcctcctgagtctgggtaattatacctctcccaagcccccattgtgtgttgaaatcctgtcatgaatccttggtagctctctgagaacagtgaagtccagggaaaggcatctggtctgtctggaaagcaaacattatgtggcctctggtagtttttttcctgtaagaatactgactttctggagtaatgagtatatatcagttattgtacatgattgctttgtgaaatgtgcaaatgatatcacctatgcagccttgtttgatttattttctctggtttgtactgttattaaaagcatattgtattatagagctattcagatattttaaatataaagatgtattgtttccgtaatatagacgtatggaatatatttaggtaatagatgtattacttggaaagttctgctttgacaaactgacaaagtctaaatgagcacatgtatcccagtgagcagtaaatcaatggaacatcccaagaagaggataaggatgcttaaaatggaaatcattctccaacgatatacaaattggacttgttcaactgctggatatatgctaccaataaccccagccccaacttaaaattcttacattcaagctcctaagagttcttaatttataactaattttaaaagagaagtttcttttctggttttagtttgggaataatcattcattaaaaaaaatgtattgtggtttatgcgaacagaccaacctggcattacagttggcctctccttgaggtgggcacagcctggcagtgtggccaggggtggccatgtaagtcccatcaggacgtagtcatgcctcctgcatttcgctacccgagtttagtaacagtgcagattccacgttcttgttccgatactctgagaagtgcctgatgttgatgtacttacagacacaagaacaatctttgctataattgtataaagccataaatgtacataaattatgtttaaatggc

SEQ ID NO: 78949 - DNA, 469 bp, Homo sapiens
tggttgagaagaggggccgcagagatgcagggggcatggtcagctgagccttgcatccagttggcagaggaggccaagaaagctgggagactgtgcacattccagggtcttagggcacccagaatcccactccttgggagcagacctctgaggaaagaggctgctgaatgaacaaggtgtagtggctgtgtgccctgtactgtgctgggggccagaagctataagacaaggcccttccttctggggagctcacagcgtttccctcgtctccttttccacgtgtcccacggactcccctgaacaccatcttactctgtgttgtagaggaggtgaatcaaaccatggctttctcatctgcagcctggctctggtgtttctgctgaaacttggagagaccacctctggcccctttcaccatatatttgcagttgtgggtttgtatctgtactacttctaagctcctatacat

SEQ ID NO: 78950 - DNA, 4664 bp, Homo sapiens
aaggaaatatgcaaaagaacatcacatcaaggatcaattaattaccatctattaattactatatgtgggtaattatgactatttcccaagcattctacgttgactgcttgagaagatgtttgtcctgcatggtggagagtggagaagggccaggattcttaggttgatctatctgtgggttatgacttcccacaatagccacccccggcccccaccagtccttttattggctctggctagaccggccaggagggtgctggggacagccctggatcacagttttccaaatggcctgcaagccctggctctcacagcaatgatgactttgataactggagtacatttcgccctcgaactagctcaaatgctagtactattagtgggagactctcacccattatgaccgaacaggatgatcttggagaaggggatgtgcattctatggtgtacccgccatctgccgcaaagatggcctctactttacccagtctgtctgagataagcaatcccgaaaacatggaaaatcttttggataatctcaaccttctctcatcaccaacatcattaactgtttcgacccagtcctcacctggcaccatgatgcagcagacgccgtgctactcgtttgcgccaccaaacaccagtttgaattcacccagcccaaactaccaaaaatatacatatggccaatccagcatgagccctttgccccagatgcctatacaaacacttcaggacaataagtcgagttatggaggtatgagtcagtataactgtgcgcctggactcttgaaggagttgctgacttctgactctcctccccataatgacattatgacaccagttgatcctggggtagcccagcccaacagccgggttctgggccagaacgtcatgatgggccctaattcggtcatgtcaacctatggcagccaggcatctcataacaaaatgatgaatcccagctcccatacccaccctggacatgctcagcagacatctgcagttaacgggcgtcccctgccccacacggtaagcaccatgccccacacctcgggtatgaaccgcctgacccaagtgaagacacctgtacaagtgcctctgccccaccccatgcagatgagtgccctggggggctactcctccgtgagcagctgcaatggctatggcagaatgggccttctccaccaggagaagctcccaagtgacttggatggcatgttcattgagcgcttagactgtgacatggaatccatcattcggaatgacctcatggatggagatacattggattttaactttgacaatgtgttgcccaaccaaagcttcccacacagtgtcaagacaacgacacatagctgggtgtcaggctgagggttagtgagcaggttacacttaaaagtacttcagattgtctgacagcaggaactgagagaagcagtccaaagatgtctttcaccaactcccttttagttttcttggttaaaaaaaaaaaacaaaaaaaaaaaccctccttttttcctttcgtcagacttggcagcaaagacatttttcctgtacaggatgtttgcccaatgtgtgcaggttatgtgctgctgtagataaggactgtgccattggaaatttcattacaatgaagtgccaaactcactacaccatataattgcagaaaagattttcagatcctggtgtgctttcaagttttgtatataagcagtagatacagattgtatttgtgtgtgtttttggtttttctaaatatccaattggtccaaggaaagtttatactctttttgtaatactgtgatgggcctcatgtcttgataagttaaacttttgtttgtactacctgttttctgcggaactgacggatcacaaagaactgaatctccattctgcatctccattgaacagccttggacctgttcacgttgccacagaattcacatgagaaccaagtagcctgttatcaatctgctaaattaatggacttgttaaacttttggaaaaaaaaagattaaatgccagctttgtacaggtcttttctatttttttttgtttattttgttatttgcaaatttgtacaaacatttaaatggttctaatttccagataaatgatttttgatgttattgttgggacttaagaacatttttggaatagatattgaactgtaataatgttttcttaaaactagagtctactttgttacatagtcagcttgtaaattttgtggaaccacaggtatttggggcagcattcataattttcattttgtattctaactggattagtactaattttatacatgcttaactggtttgtacactttgggatgctacttagtgatgtttctgactaatcttaaatcattgtaattagtacttgcatattcaacgtttcaggccctggttgggcaggaaagtgatgtatagttatggacactttgcgtttcttatttaggataacttaatatgtttttatgtatgtattttaaagaaatttcatctgcttctactgaactatgcgtactgcatagcatcaagtcttctctagagacctctgtagtcctgggaggcctcataatgtttgtagatcagaaaagggagatctgcatctaaagcaatggtcctttgtcaaacgagggattttgatccacttcaccattttgagttgagctttagcaaaagtttcccctcataattctttgctcttgtttcagtccaggtggaggttggttttgtagttctgccttgaggaattatgtcaacactcatacttcatctcattctcccttctgccctgcagattagattacttagcacactgtggaagtttaagtggaaggagggaatttaaaaatgggacttgagtggtttgtagaatttgtgttcataagttcagatgggtagcaaatggaatagaacttacttaaaaattggggagatttatttgaaaaccagctgtaagttgtgcattgagattatgttaaaagccttggcttaagaatttgaaaatttctttagcctgtagcaacctaaactgtaattcctatcattatgttttattactttccaattacctgtaactgacagaccaaattaattggctttgtgtcctatttagtccatcagtattttcaagtcatgtggaaagcccaaagtcatcacaatgaagagaacaggtgcacagcactgttcctcttgtgttcttgagaaggatctaatttttctgtatatagcccacatcacacttgctttgtcttgtatgttaattgcatcttcattggcttggtatttcctaaatgtttaacaagaacacaagtgttcctgataagatttcctacagtaagccagctctattgtaagcttcccactgtgatgatcatttttttgaagattcattgaacagccaccactctatcatcctcattttggggcagtccaagacatagctggttttagaaacccaagttcctctaagcacagcctcccgggtatgtaactgaacttggtgccaaagtacttgtgtactaatttctattactacgtactgtcactttcctcccgtgccattactgcatcataatacaaggaacctcagagcccccatttgttcattaaagaggcaactacagccaaaatcactgttaaaatcttactacttcatggagtagctcttaggaaaatatatcttcctcctgagtctgggtaattatacctctcccaagcccccattgtgtgttgaaatcctgtcatgaatccttggtagctctctgagaacagtgaagtccagggaaaggcatctggtctgtctggaaagcaaacattatgtggcctctggtagtttttttcctgtaagaatactgactttctggagtaatgagtatatatcagttattgtacatgattgctttgtgaaatgtgcaaatgatatcacctatgcagccttgtttgatttattttctctggtttgtactgttattaaaagcatattgtattatagagctattcagatattttaaatataaagatgtattgtttccgtaatatagacgtatggaatatatttaggtaatagatgtattacttggaaagttctgctttgacaaactgacaaagtctaaatgagcacatgtatcccagtgagcagtaaatcaatggaacatcccaagaagaggataaggatgcttaaaatggaaatcattctccaacgatatacaaattggacttgttcaactgctggatatatgctaccaataaccccagccccaacttaaaattcttacattcaagctcctaagagttcttaatttataactaattttaaaagagaagtttcttttctggttttagtttgggaataatcattcattaaaaaaaatgtattgtggtttatgcgaacagaccaacctggcattacagttggcctctccttgaggtgggcacagcctggcagtgtggccaggggtggccatgtaagtcccatcaggacgtagtcatgcctcctgcatttcgctacccgagtttagtaacagtgcagattccacgttcttgttccgatactctgagaagtgcctgatgttgatgtacttacagacacaagaacaatctttgctataattgtataaagccataaatgtacataaattatgtttaaatggc

SEQ ID NO: 78951 - DNA, 989 bp, Homo sapiens
tgacgcccccgaacccagctgcagaagctgccgccacctccaatgcacaaggtgtctcatctgaaaagaaacctgagccccagggaggcggcgcggagcgaccctggcagagctggcgcaaacagggcgagaggtcgctgggcagcgttcgaggaccagagggagctcggccacagaagaccccagtgatctgatcccgggatcccggctccaagctctcctcgcattttacagatttcacccccgcgactatctccccaaaacggagcctttatatcaagagaaggtgcgggagctggggcaaccaggactttctcgggcacccaagatgcgctccattaggaagaggtggacgatctgcacaataagtctgctcctgatcttttataagacaaaagaaatagcaagaactgaggagcaccaggagacgcaactcatcggagatggtgaattgtctttgagtcggtcacttgtcaatagctctgataaaatcattcgaaaggctggctcttcaatcttccagcacaatgtagaaggttggaaaatcaattcctctttggtcctagagataaggaagaacatacttcgtttcttagatgcagaacgagatgtgtcagtggtcaagagcagttttaagcctggtgatgtcatacactatgtgcttgacaggcgccggacactaaacatttctcatgatctacatagcctcctacctgaagtttcaccaatgaagaatcgcaggtttaagacctgtgcagttgttggaaattctggcattctgttagacagtgaatgtggaaaggagattgacagtcacaattttgtaataaggtgagctttcttctgctttttgagattgtaagtttttcaaagatattttacttgggggtggaaaactgttagaaaattttaaagtattactaaacctcaaacaaatatttgtctatgatatccttttctgtgcaacatttaaattacatttaccctgg

SEQ ID NO: 78952 - DNA, 1769 bp, Homo sapiens
tgacgcccccgaacccagctgcagaagctgccgccacctccaatgcacaaggtgtctcatctgaaaagaaacctgagccccagggaggcggcgcggagcgaccctggcagagctggcgcaaacagggcgagaggtcgctgggcagcgttcgaggaccagagggagctcggccacagaagaccccagtgatctgatcccgggatcccggctccaagctctcctcgcattttacagatttcacccccgcgactatctccccaaaacggagcctttatatcaagagaaggtgcgggagctggggcaaccaggactttctcgggcacccaagatgcgctccattaggaagaggtggacgatctgcacaataagtctgctcctgatcttttataagacaaaagaaatagcaagaactgaggagcaccaggagacgcaactcatcggagatggtgaattgtctttgagtcggtcacttgtcaatagctctgataaaatcattcgaaaggctggctcttcaatcttccagcacaatgtagaaggttggaaaatcaattcctctttggtcctagagataaggaagaacatacttcgtttcttagatgcagaacgagatgtgtcagtggtcaagagcagttttaagcctggtgatgtcatacactatgtgcttgacaggcgccggacactaaacatttctcatgatctacatagcctcctacctgaagtttcaccaatgaagaatcgcaggtttaagacctgtgcagttgttggaaattctggcattctgttagacagtgaatgtggaaaggagattgacagtcacaattttgtaataaggtgtaatctagctcctgtggtggagtttgctgcagatgtgggaactaaatcagattttattaccatgaatccatcagttgtacaaagagcatttggaggctttcgaaatgagagtgacagagaaaaatttgtgcatagactttccatgctgaatgacagtgtcctttggattcctgctttcatggtcaaaggaggagagaagcacgtggagtgggttaatgcattaatccttaagaataaactgaaagtgcgaactgcctatccgtcattgagacttattcatgctgtcagagggtaagtgactggaaaggaccagtttgtccttggcacagtggaacacatataactaaacattttcactagacaagaataagcttcagtaaaatctccaaatggatatatgtttccgttattttataatggttactctatttacaaacttgaagtttgtttatgtacgatatgattttaactcaccctcttttttgaaaaagcaaattgttgaacctggcacttatttatgtgtgttcatgaacaaactactaatttttatatttttgcactaaaaagtaataagaattcatagtaaaattaatgagctttgggtagggaaactacaacagaagtgctgaatggctagtgggcaatattgtgtaagcataaatgttagatatatttaaggagcaattaagtcccatctgtagccaagaggcctagtagtgagaaaggaggctggctgcgataaaatgccttaatgcttccccccaaagtcacagatgctgttttaatgaattaagccaacatttcccttttattaacacaagttcagaaaaaagcattaaaatataaactcttgcttaaaagtggcaaatgaccaaaaggccaaattcactcatgcacacatataagtatgtaaagtagataaaccacagatgaga

SEQ ID NO: 78953 - DNA, 1511 bp, Homo sapiens
tgacgcccccgaacccagctgcagaagctgccgccacctccaatgcacaaggtgtctcatctgaaaagaaacctgagccccagggaggcggcgcggagcgaccctggcagagctggcgcaaacagggcgagaggtcgctgggcagcgttcgaggaccagagggagctcggccacagaagaccccagtgatctgatcccgggatcccggctccaagctctcctcgcattttacagatttcacccccgcgactatctccccaaaacggagcctttatatcaagagaaggtgcgggagctggggcaaccaggactttctcgggcacccaagatgcgctccattaggaagaggtggacgatctgcacaataagtctgctcctgatcttttataagacaaaagaaatagcaagaactgaggagcaccaggagacgcaactcatcggagatggtgaattgtctttgagtcggtcacttgtcaatagctctgataaaatcattcgaaaggctggctcttcaatcttccagcacaatgtagaaggttggaaaatcaattcctctttggtcctagagataaggtgtaatctagctcctgtggtggagtttgctgcagatgtgggaactaaatcagattttattaccatgaatccatcagttgtacaaagagcatttggaggctttcgaaatgagagtgacagagaaaaatttgtgcatagactttccatgctgaatgacagtgtcctttggattcctgctttcatggtcaaaggaggagagaagcacgtggagtgggttaatgcattaatccttaagaataaactgaaagtgcgaactgcctatccgtcattgagacttattcatgctgtcagagggtaagtgactggaaaggaccagtttgtccttggcacagtggaacacatataactaaacattttcactagacaagaataagcttcagtaaaatctccaaatggatatatgtttccgttattttataatggttactctatttacaaacttgaagtttgtttatgtacgatatgattttaactcaccctcttttttgaaaaagcaaattgttgaacctggcacttatttatgtgtgttcatgaacaaactactaatttttatatttttgcactaaaaagtaataagaattcatagtaaaattaatgagctttgggtagggaaactacaacagaagtgctgaatggctagtgggcaatattgtgtaagcataaatgttagatatatttaaggagcaattaagtcccatctgtagccaagaggcctagtagtgagaaaggaggctggctgcgataaaatgccttaatgcttccccccaaagtcacagatgctgttttaatgaattaagccaacatttcccttttattaacacaagttcagaaaaaagcattaaaatataaactcttgcttaaaagtggcaaatgaccaaaaggccaaattcactcatgcacacatataagtatgtaaagtagataaaccacagatgaga

SEQ ID NO: 78954 - DNA, 2010 bp, Homo sapiens
tgacgcccccgaacccagctgcagaagctgccgccacctccaatgcacaaggtgtctcatctgaaaagaaacctgagccccagggaggcggcgcggagcgaccctggcagagctggcgcaaacagggcgagaggtcgctgggcagcgttcgaggaccagagggagctcggccacagaagaccccagtgatctgatcccgggatcccggctccaagctctcctcgcattttacagatttcacccccgcgactatctccccaaaacggagcctttatatcaagagaaggtgcgggagctggggcaaccaggactttctcgggcacccaagatgcgctccattaggaagaggtggacgatctgcacaataagtctgctcctgatcttttataagacaaaagaaatagcaagaactgaggagcaccaggagacgcaactcatcggagatggtgaattgtctttgagtcggtcacttgtcaatagctctgataaaatcattcgaaaggctggctcttcaatcttccagcacaatgtagaaggttggaaaatcaattcctctttggtcctagagataaggaagaacatacttcgtttcttagatgcagaacgagatgtgtcagtggtcaagagcagttttaagcctggtgatgtcatacactatgtgcttgacaggcgccggacactaaacatttctcatgatctacatagcctcctacctgaagtttcaccaatgaagaatcgcaggtttaagacctgtgcagttgttggaaattctggcattctgttagacagtgaatgtggaaaggagattgacagtcacaattttgtaataaggtgtaatctagctcctgtggtggagtttgctgcagatgtgggaactaaatcagattttattaccatgaatccatcagttgtacaaagagcatttggaggctttcgaaatgagagtgacagagaaaaatttgtgcatagactttccatgctgaatgacagtgtcctttggattcctgctttcatggtcaaaggaggagagaagcacgtggagtgggttaatgcattaatccttaagaataaactgaaagtgcgaactgcctatccgtcattgagacttattcatgctgtcagaggttactggctgaccaacaaagttcctatcaaaagacccagcacaggtcttctcatgtatacacttgccacaagattctgtgatgaaattcacctgtatggattctggcccttccctaaggatttaaatggaaaagcggtcaaatatcattattatgatgacttaaaatataggtacttttccaatgcaagccctcacagaatgccattagaattcaaaacattaaatgtgctacataatagaggagctctaaaactgacaacaggaaagtgtgtaaagcaataaagcacattttgaaacaaacaatatgcacttcttttctgagatgcttccgaagatttgaaaataggatccaaaacacggctgggtttcagcatccaccaatgaactgaaaggtgaataaaggacgttcatgagaaatcgactaccagctgatgaaatacctgcaaagtgctctaaaaattaaatattttgactttaagggtcctagtaagtgccacttccactaagaatacagtttgaatgtataatcagtagtgtttacaagatccaacagtgcactcatcattagttaacaaagcaaatatgttcatcactgtcaggctgcccacagcaacaccaagcatattagaagaggaaccccaggaacgcaactcagaccttgggaaattaaaccatccttgtcagcagaagccaagatggaagcagtttgagcaatgaaatccgtaagattaaacaactcaagtaaatgcttcagtcaggactctgagtctgatcatgaattttatgttttaatttatgtttttttttttgtcttctggaatctcttttggtttggatattgggatgcttagaaatcctttctgagatgcatatgagtgaggaaa

SEQ ID NO: 78955 - DNA, 790 bp, Homo sapiens
tgacgcccccgaacccagctgcagaagctgccgccacctccaatgcacaaggtgtctcatctgaaaagaaacctgagccccagggaggcggcgcggagcgaccctggcagagctggcgcaaacagggcgagaggtcgctgggcagcgttcgaggaccagagggagctcggccacagaagaccccagtgatctgatcccgggatcccggctccaagctctcctcgcattttacagatttcacccccgcgactatctccccaaaacggagcctttatatcaagagaaggtgcgggagctggggcaaccaggactttctcgggcacccaagatgcgctccattaggaagaggtggacgatctgcacaataagtctgctcctgatcttttataagacaaaagaaatagcaagaactgaggagcaccaggagacgcaactcatcgggtaaatgcaaagcttcatttcaggatatgacaaaaagtcaagccataaatgaaatgtgaatatagagggtagagtgatggttaggatagcatgtgtgtttgtttgagcttgcgcgtggttagtgtcatgaattaaataacaaaggctgttgttgagatgtgcgtgcttctctaagctgttcccagtatgagttcaacttgctctgtgtggttgtggtgacagttgtgttggccctgggtgctctctcgccaaaggagaagtcactgcagaagtgtcaacaaagaacgtgtgtccttgtccttttaatctgtgggcagaactcaagagaaatgtctttattcaccaaacg

SEQ ID NO: 78956 - DNA, 599 bp, Homo sapiens
aaggcagtattgaccagacatttctatttcagagttggatttgtgcttagttttttttaggtgttgggacccttgtagttgctttttattttgcttagtcaacaaacactaaaatgataaaatttggtatgtataagtactggacgaaggatgttttgacactaaaaaggacataatttaggaaattaagaatttagacaccaagtttggcttaatagaaaaagtcactatctgaacttctttctttttcaccacaaatcaccgcagaccagtgtttgggagcaggtgtaggaaattgaattattggatctatgtttaggtaagaaaactaaaggtacttcagaatttaggctatgacataactgtctttctgaagtttaaagaaagaaagtgaactatagaaatctattcagctaattaaagtgaatgaaaaatattacagattccataactgcatggcgccttacctgctattaatactgccgccttactgtcagccagatgattttttcccaccacggccagtcttaaatttggcaataagaaaaagctaatcttccaagtgtaagtaggtatgtgttagaatcttggtgaaagat

SEQ ID NO: 78957 - DNA, 632 bp, Homo sapiens
tctttgcctctgaaaacactgaaaccataatgtgaagaagtttagattcatctgttgaagttagtgtagcccagctgacaagtacgaccccctaccagacatatgaggtggacatcttgcaccatccagtgccagtttgctacagaaatgaacctggatgagaccagtagaagaaccactcagttgagctcagcccaaatttctcatcagaaaatcatgagcaaatgcaatagttgttgttttaagccatgacagcttgaggtcatttattataaagtaatataaaactcattcattgatatattaatgaattatttcaagagaaaagtcaagtgatttctttcataggtgaaagaatattattttgttaatttatcctgaaactgtttgcctcttacaggcaactgcttaatgggggcaaataaataaacaaataaataaataaagcaaaaatatgtcttttttgtttagtagtcccaaagtatgaaaagctgaagatttatttaaaatatgaatatattctactaaagagataattttctcctttctttttacctgaaacagtcaagtaaagattccacttttctgccctttgttttttaggaacctccttttgttttgcttgttgacat

SEQ ID NO: 78958 - DNA, 655 bp, Homo sapiens
atagataagtttaaccaacatatacggaaccaaagaagccagacacaaaaatatgaatccatatccatagaagttcaaaaatgaacattttgggggattcatttataagaggtaaaatgaaaaaggaaatcacaatggtagtccctccagaagaacaggagggagttttgaaggagacaggctcatggactgctggccatgatcttttacgagctgggattggtaattatattggtatttatttttataattatttcaactaactatacaaatgtatgtatatgtactttcctgtgtgtgtgttatatttcataataaatgaagcaaaaatagtacaaaatcaaagatgtgtacacaaatattttgttataaagtattaactataactatgtttattatagggggaaaccccatactttgaatcactactttggattatgtaaaagaagggatcaaatacatcacgtggcacacagaagagaggttatacagcctctagaaattatagaagaatatttcatggcttctaaagataattgagatatatatttaggtgggagatgatgtttatcatacattatgcacaaatatttcaatgttttaaaacaaactttgaatgctaatgcatgaaaaaagattgggagaaacacattat

SEQ ID NO: 78959 - DNA, 332 bp, Homo sapiens
cagttcatggcacccaccaaactgcacaaggcagaaacaagagctctccattcctaactttctcttctgccttccatccatgtaatccgctagcccagctcattggctgcggaagcatctgagagtcatccactcccttccatctctgctgccaactccaggcctctgcccctcatctgaactgggactcagctgccctgtctctaagcatcctcactgcttcccacttaaccagccctagctctggggagcccatgaggtgacaccattgccctctgtacttcaaatgcacccaaattctcagcgacagctgccaggcctgacgcgtgtgg

SEQ ID NO: 78960 - DNA, 893 bp, Homo sapiens
ttaatagtgccctttgaacgtggctttggtggaattaagttaatcgtggtatagtatgcacctgaaggaatgtggagccgcatgctgggtctgcagaatgttgtcacctgatgaagaagaactggaagacgctggaagaaggctttggaaaaatgcccagatcatgagaaggtgagaggtgtttcttccgcctgctccaccagcaggtaaaggaggctgatcacaggctggcactcagggcgaggtggaagaaatgcgtggtcttgccactacagacccgcagagctgtcctccaacatgatccaagagagccacaaaacacaggggtgtgtcttgggaaaggaaaagtaacaacttgcaaaaaggttggttctgcttcagagaaatgttctagaaagacagccaagttaccctgccgtgaactcacacacacctgtgctttctgcatgttatgtttcataggagagggaagtgccgggaattaaaattgcggatgcactgttccccaggtgtgtgggtgaggcacgcttcctgggaccactccatttaagcattgggtcccaggcatgttcactactagcaggaggctctttatcaatttcctcccgtggaccagatgattgggatttttttttctaccagactttattacagaataactatttttgtattaactaagcaaacaaatgtaccgctcccagcttctgactggcccaaggtgctgagctagacctctttgctttggtacaaagagagcccaaagccaagagacttggcatttctgttagctggtattccccagggtgactaaaaggatgatttccattggatttttttaaatgctgaagacactgaaagacctgaatagtaagcccgtaataaacgttattcgg

SEQ ID NO: 78961 - DNA, 1230 bp, Homo sapiens
agaaaaggccggcagtccaactggaatcctcagcatcttctgattctacaagcccagtttgcctcgagcctcttccagacatcagagggcaaatacctgctgtctgatctgggcccacaagagcgtatgcaaatctctaagtttacgggactctcaatgaccactatcagtcactggctggccaacgtcaagtaccagcttaggaaaacgggcgggacaaaatttctgaaaaacatggacaaaggccaccccatcttttattgcagtgactgtgcctcccagttcagaaccccttctacctacatcagtcacttagaatctcacctgggtttccaaatgaaggacatgacccgcttgtcagtggaccagcaaagcaaggtggagcaagagatctcccgggtatcgtcggctcagaggtctccagaaacaatagctgccgaagaggacacagactctaaattcaagtgacgaatgccttagtttccactttccagcctggatcccctcacactgaacccttcttcgttgcaccatcctgcttctgacattgaactcattgaactcctcctgacaccctggctctgagaagactgccaaaaaaaaaaaaaaaaaaaatcaccccagccatttctcttcatcctcactaacaatttggtaatgaagtattgatttccacttctctgcttatgggcggtattagattttcattgataaattgcaatggggctgtctcgtctccacagtacccttttcactgtcacaagaaaacaaagtgccaccgaagaaaagtaatgactgagagcattgatgtacttattttgtcagtttgtaacaggaaagtgggggggagtctaagtcttcatagtctaatgtccaagtgggttgcactagatgtagacacttggaggcttacttttcatggtaatgtccatttcctatttataacccctctgggaacgtttgtctaaaggaaatgtttctgttcagtgtaacaattacagttgcacctggattgcccagtcctgcccctgcactaggggaccattaatcactgcaaagtagaagaattattaagttaaaccagagtttgagccaagaaaacccctgaacaatgttcatcttctgtgaaacttgttcaaatagttaagcttaaccatgttgctgccaaagacttttcctatgcagtggtggggcaccttgatcatcatcattatcttgattggctgaaaa

SEQ ID NO: 78962 - DNA, 1357 bp, Homo sapiens
agaaaaggccggcagtccaactggaatcctcagcatcttctgattctacaagcccagtttgcctcgagcctcttccagacatcagagggcaaatacctgctgtctgatctgggcccacaagagcgtatgcaaatctctaagtttacgggactctcaatgaccactatcagtcactggctggccaacgtcaagtaccagcttaggaaaacgggcgggacaaaatttctgaaaaacatggacaaaggccaccccatcttttattgcagtgactgtgcctcccagttcagaaccccttctacctacatcagtcacttagaatctcacctgggtttccaaatgaaggacatgacccgcttgtcagtggaccagcaaagcaaggtggagcaagagatctcccgggtatcgtcggctcagaggtctccagaaacaatagctgccgaagaggacacagactctaaattcaagtgtaagttgtgctgtcggacatttgtgagcaaacatgcggtaaaactccacctaagcaaaacgcacagcaagtcacccgaacaccattcacagtttgtaacagacgtggatgaagaatagctctgcaggacgaatgccttagtttccactttccagcctggatcccctcacactgaacccttcttcgttgcaccatcctgcttctgacattgaactcattgaactcctcctgacaccctggctctgagaagactgccaaaaaaaaaaaaaaaaaaaatcaccccagccatttctcttcatcctcactaacaatttggtaatgaagtattgatttccacttctctgcttatgggcggtattagattttcattgataaattgcaatggggctgtctcgtctccacagtacccttttcactgtcacaagaaaacaaagtgccaccgaagaaaagtaatgactgagagcattgatgtacttattttgtcagtttgtaacaggaaagtgggggggagtctaagtcttcatagtctaatgtccaagtgggttgcactagatgtagacacttggaggcttacttttcatggtaatgtccatttcctatttataacccctctgggaacgtttgtctaaaggaaatgtttctgttcagtgtaacaattacagttgcacctggattgcccagtcctgcccctgcactaggggaccattaatcactgcaaagtagaagaattattaagttaaaccagagtttgagccaagaaaacccctgaacaatgttcatcttctgtgaaacttgttcaaatagttaagcttaaccatgttgctgccaaagacttttcctatgcagtggtggggcaccttgatcatcatcattatcttgattggctgaaaa

SEQ ID NO: 78963 - DNA, 1025 bp, Homo sapiens
ggtgggggtggcgaaaggaagggcgggccctcaggtgacgcagattggccctccagagaaggggcggccccttctcaggtgccgtcacccccaaacctcagcactgccattccaggtccttaaaggggagaccgcgattctaagaagcagccaagcccagggctggcctgaagcccccggacggcagtgcccagcaggcagcgcccagcaccctggctcccacctcccagtggccccaaaggaaaacagctgccatgcacatccccaaaagcctccaggagctggccaacagcgaagccgtgcagtttctgagaaggcccaagaccatcacgcgggtcttcgaaggggtcttctccctgatcgtcatctcctccctgctgaccgacggctaccagaacaagatggagtctccgcagctccactgcattctcaacagcaacagcgtggcctgcagctttgccgtgggagccggcttcctggccttcctcagctgcctggccttcctcgtcctggacacacaggagacccgcattgccggcacccgcttcaagacagccttccagctcctggacttcatcctggctgttctctgggcagttgtctggttcatgggtttctgcttcctggccaaccaatggcagcattcgccgcccaaagagttcctcctggggagcagcagtgcccaggcagccatcgccttcaccttcttctccatccttgtctggatattccaggcctacctggcattccaggacctccgaaatgatgctccagtcccttacaagcgcttcctggatgagggtggcatggtgctgaccaccctccccttgccctctgccaacagccctgtgaacatgcccaccactggccccaacagcctgagttatgctagctctgccctgtccccctgtctgaccgctccaaagtccccccggcttgctatgatgcctgacaactaaatatccttatccaaatcaataaagagagaatcctccctccagaagggtttctaaaaacagccctca

SEQ ID NO: 78964 - DNA, 419 bp, Homo sapiens
ggtgggggtggcgaaaggaagggcgggccctcaggtgacgcagattggccctccagagaaggggcggccccttctcaggtgccgtcacccccaaacctcagcactgccattccaggtccttaaaggggagaccgcgattctaagaagcagccaagcccagggctggcctgaagcccccggacggcagtgcccagcaggcagcgcccagcaccctggctcccacctcccagtggccccaaaggaaaacagctgccatgcacatccccaaaagcctgagttatgctagctctgccctgtccccctgtctgaccgctccaaagtccccccggcttgctatgatgcctgacaactaaatatccttatccaaatcaataaagagagaatcctccctccagaagggtttctaaaaacagccctca

SEQ ID NO: 78965 - DNA, 504 bp, Homo sapiens
gagttgtatttggtttgtggatgggggcggactcataaaataccaaacaacagacagcaacgtattactaaacgaagacgtctttttatgggtttctgcttcctggccaaccaatggcagcattcgccgcccaaagagttcctcctggggagcagcagtgcccaggcagccatcgccttcaccttcttctccatccttgtctggatattccaggcctacctggcattccaggacctccgaaatgatgctccagtcccttacaagcgcttcctggatgagggtggcatggtgctgaccaccctccccttgccctctgccaacagccctgtgaacatgcccaccactggccccaacagcctgagttatgctagctctgccctgtccccctgtctgaccgctccaaagtccccccggcttgctatgatgcctgacaactaaatatccttatccaaatcaataaagagagaatcctccctccagaagggtttctaaaaacagccctca

SEQ ID NO: 78966 - DNA, 474 bp, Homo sapiens
agtgatccacttgcctcagcttcccaaagtgctgggattacaggcgttagccacctcgcctagcctaaaatcctgtgttaatgaatagaaatttaaaccgctgcatgaggccggcggctcctgtattagacagcgcaactctactccagcagctcactttagggaaggctaggagggactggggaatgacttgtgggagatgtgtcaacatagaagctaataaaaaaagtatttttcaatacctcgtggaagttcgtgcagcaagaccaccagccccatccttcccatgcctcagcagccctgcctgagtgagctttccccctgccccttttctctccctgtgacgccacagttctctgggcagttgtctggttcatgggtttctgcttcctggccaaccaatggcagcattcgccgcccaaagagttcctcctggggagcagcagtgcccaggcagccatcgccttcaccttc

SEQ ID NO: 78967 - DNA, 333 bp, Homo sapiens
ctgaccccaaagccattgcttcttctgttgtaagaagtcctgacaacatccatcttaaatttaaatgctctaccttcaaaacttttctccagaaatcacttaagtgcagtatcagagaccaaaacagattttgctatgattaactttgtacccatacttttaactcctgggcatatatcccttccttgatgtagaggatgctggtttcaggttaacacttatagatggcctgctctgtgcagaacattgccaacctctccaggtctggcacttaggcctgggcccacatgctcaatgaagccgctgctttgactatcaggtctagagaatact

SEQ ID NO: 78968 - DNA, 316 bp, Homo sapiens
ctcatgcagggtctgctcttctggtggtaactgacaggccatgaggtgaattagttgttaggaagtaaattggtacaattcctataggattctgaggctgcttaagaatctctctcctgagttgctgcccaaggcaatgagatgctaatgacatcacggctagaatgacagaagcagttcattaggcagcaaagaaatcaaatgcaagctaatcaaatcccagcttttggagacagcttaggatctacaggaaagaaggcttgatgtggggcaaatgaagcacagccaccctgaagcccaccaaaaccctgcattc

SEQ ID NO: 78969 - DNA, 250 bp, Homo sapiens
gtgcaatgttgtcacagatgtgtgccagattttgcagaggacataagttggctgtgaggaagaacacagaggttgcctattttttaggcaggaaagaaagcctgcacttttctgtgtgtgtgtgtcaataaatctgaataacaacttgaaagggttaaaaagctgagcaccaggtgttttctttccactttccagagtaatttaagcacactgcaaagttatctcccttccttccccacgagccagctta

SEQ ID NO: 78970 - DNA, 316 bp, Homo sapiens
taaaagcattttactttcaaattcttcattagacttccctctcatgggcctattaggacaatgaatgtcatttgaagtaacacagcaccttgttttctctccaccttctctttctttgtagtccctaactccttcccacccttctttctgttgttctcttcatttatccactctccttacaagaacttcaagaattacacaccaatgaagtgtctaaagcaaaagcaccagaggtggtacagttctttcttcagtgactgccttacggtgctctaaggatcacacgcttctaacactcagaggaataaaagacatc

SEQ ID NO: 78971 - DNA, 777 bp, Homo sapiens
cttaaatacactggtaacacaaggaaacaataatgactaagaatttccaagttcatatcagacaccaaaccacagatccataaaactcagataacattaagactgaggcccctaaaaacctaaaaataatttttaaaaatctaagcatatcatattcaagcttcagaaaatcaaaagcaaagaaagaaaatcttgaaagaaaccagaggcaaaaaacaccttgcctacagaagaccagcttctccttagaaacaatgcaaacaggagagtagaatgaaattaaactaaagtgttgagagaaaaaaaacatgaacctaaaaatttataccatgcccggctaattttttgtatttttagtagagacagggtttcaccatgttagccaggatggtctcgatctcctgacctcgtgatccacccgcctcggcctcccaaagtgctgggattacaggtgtgagccaccgtgcccagcctcctgttccttctttacatgtaagaagattaaaagtcaccactccatcctaacaagtaaaaagctaagcaaactgaaaaaccaatagctgtagttagatccttcagagaagtgaggtcacagggcaaaccacggttccccaaaattgagagacaggtaggcagatagagaaaaatctcaagtcatcagagcagaaacccacaagcagaaacttccttgggaaccagtgccagggtaagaaagcctcaactataatgacaaattgctggagactcagtgccaacaaatgacaattaaaaactcca

SEQ ID NO: 78972 - DNA, 4752 bp, Homo sapiens
acccgcgcgaggtaggcgctctggtgcttgcggaggacgcttccttcctcagatgcaccgatcttcccgatactgcctttggagcggctagattgctagccttggctgctccattggcctgccttgccccttacctgccgattgcatatgaactcttcttctgtctgtacatcgttgtcgtcggagtcgtcgcgatcgtcgtggcgctcgtgtgatggccttcgtccgtttagagtagtgtagttagttaggggccaacgaagaagaaagaagacgcgattagtgcagagatgctggaggtggtcagttactaagctagagtaagatagcggagcgaaaagagccaaacctagccggggggcgcacggtcacccaaaggaggtcgactcgccggcgcttcctatcgcgccgagctccctccattcctctccctccgccgaggcgcgaggttgcggcgcgcagcgcagcgcagctcagcgcaccgactgccgcgggctccgctgggcgattgcagccgagtccgtttctcgtctagctgccgccgcggcgaccgctgcctggtcttcctcccggacgctagtgggttatcagctaacacccgcgagcatctataacataggccaactgacgccatccttcaaaaacaactaaaggatgatatgatgaacctagcctgttaatttcgtcttctcaattttaaactttggttgcttaagactgaagcaatcatggtgaacctgaggaatgcggtgcattcattccttgtgcacctaattggcctattggtttggcaatgtgatatttctgtgagcccagtagcagctatagtaactgacattttcaatacctccgatggtggacgcttcaaattcccagacggggtacaaaactggccagcactttcaatcgtcatcataataatcatgacaataggtggcaacatccttgtgatcatggcagtaagcatggaaaagaaactgcacaatgccaccaattacttcttaatgtccctagccattgctgatatgctagtgggactacttgtcatgcccctgtctctcctggcaatcctttatgattatgtctggccactacctagatatttgtgccccgtctggatttctttagatgttttattttcaacagcgtccatcatgcacctctgcgctatatcgctggatcggtatgtagcaatacgtaatcctattgagcatagccgtttcaattcgcggactaaggccatcatgaagattgctattgtttgggcaatttctataggtgtatcagttcctatccctgtgattggactgagggacgaagaaaaggtgttcgtgaacaacacgacgtgcgtgctcaacgacccaaatttcgttcttattgggtccttcgtagctttcttcataccgctgacgattatggtgattacgtattgcctgaccatctacgttctgcgccgacaagctttgatgttactgcacggccacaccgaggaaccgcctggactaagtctggatttcctgaagtgctgcaagaggaatacggccgaggaagagaactctgcaaaccctaaccaagaccagaacgcacgccgaagaaagaagaaggagagacgtcctaggggcaccatgcaggctatcaacaatgaaagaaaagcttcgaaagtccttgggattgttttctttgtgtttctgatcatgtggtgcccatttttcattaccaatattctgtctgttctttgtgagaagtcctgtaaccaaaagctcatggaaaagcttctgaatgtgtttgtttggattggctatgtttgttcaggaatcaatcctctggtgtatactctgttcaacaaaatttaccgaagggcattctccaactatttgcgttgcaattataaggtagagaaaaagcctcctgtcaggcagattccaagagttgccgccactgctttgtctgggagggagcttaatgttaacatttatcggcataccaatgaaccggtgatcgagaaagccagtgacaatgagcccggtatagagatgcaagttgagaatttagagttaccagtaaatccctccagtgtggttagcgaaaggattagcagtgtgtgagaaagaacagcacagtcttttcctacggtacaagctacatatgtaggaaaattttcttctttaatttttctgttggtcttaactaatgtaaatattgctgtctgaaaaagtgtttttacatatagctttgcaaccttgtactttacaatcatgcctacattagtgagatttagggttctatatttactgtttataataggtggagactaacttattttgattgtttgatgaataaaatgtttatttttgctctccctcccttctttccttccttttttcctttcttccttcctttctctctttcttttgtgcatatggcaacgttcatgttcatctcaggtggcatttgcaggtgaccagaatgaggcacatgacagtggttatatttcaaccacacctaaattaacaaattcagtggacatttgttctgggttaacagtaaatatacactttacattcttgctctgctcatctacacatataaacacagtaagataggttctgctttctgatacatctgtcagtgagtcagaggcagaacctagtcttgttgttcatataggggcaaaaatttgacattgtcagaatgttgtgttggtatttactgcaatgtctgtccctaaacatagtggtattttaacatagcagctggttaaccgggactacagaagtggaaggataatgagatgtaatacaccaaatagcttttcacttcttaaggacagtgttcaaattctgattattacaacaagcaaactgaaattagtgttttcattctggtccttagtaaattcctaattctatgattaaactgggaaatgagatcccagagttatttcccaacccaggattcaacatcaattgggttttgatctcagcatcctggaaatttgtgtgcttcacacaaagtgaaattagtattttgagccttattaaaatattttcttaattatggtacctctgtctataggacttaatttagcagtccatttttgagtaaaacttgtattggaagtatagatggtagaaactttggaagttttacttgattaaggactacagaattgggcccttagaatgtgaaaaaaaaaagtaattaaaaagacacttttaccgaactcgggattacagaaacacggagtttccatttggattttaaacaaaatttatgtcattttcagatccttccaaactctctagtgcaggaaaaggctgcagctaatttgtgaaagtggcaagctcttcattgcactgcagttatttaccagaagtttaaatctttgttaaaatatagtgttgtgttacaataagtgttggccatcatttcattcgtgggcctgctgctctctaagaattcagtagcattttaatagtttctaaaccatgaaaagttttcaagcattgctaaagtcaggccattcagtctatgctgtgtgcagagtatacaagtgtttctagtaacagtatttccatacgtgcccatttcacacaactgtggataaattttggaagaattcatgatgctagttcttacgcttgacagttacttacacacctgagaatgtgcctctcagtatcttaaaattggttaatgaaaaatctgaatttctaaaacccttggtctgtgttctcaacacacagtatagataaatccaatagtctgccacaagggcagtggaagagctgctgtatttgaggaaactcatacagtctctatttgatttgcaacactggccaaacatcagtcatttgcttgagcatgcccaaatattacatgaaagtcaagtctacctgccttgcctgttaggtctgttgaagtgcatgttaaaataattatatgaagcagaatgagatgatttaattcttaccgaaatgaaaatggctgaagaaacacagcatgcatttagcatgagttctgcacatacagatggtgtcctgcatgtatgccatgtatgttgcatgaatccatcgatttgtattaatgtagggcagaatagctgatagaagaaggactgaagaaaatccttcagcaatccttaaaaagaccatgcattcagatctgaagtagtgtgagtgttagaaaaaactggaaacatctgatttctgaactatcagggcaagctcatagcacatgttttacaaagaaacaaaatataaatcacagatttccaaaagtactagcaataagttgaatgataatagctcacagcacatttgttaatgattcttgtgtcatcaagtagtagtacttaatagtacccaacctggtaattatcctcaagttgtgtgctattcgtaagttctgtgcagtttggtatgaaacaaatatactcatttggatataaatcttacccttcaatgttaaatctacaaacttttataaatgttttaaagaagtccatgtgataattgtaaaggtgatgaatttaccatcaaacaaatcattttgatgtattattatatatgtatatctgtgtaagacacgtgcaacagactgccttatattattttctgtaattcttctcctttgtcaaatggtattttttgtgaatggttgcaaagtgttgtcttattcctaattcctgtatgttatccactacaggttttatgagacttcctattaatttattaaatttattaaatgttg

SEQ ID NO: 78973 - DNA, 4843 bp, Homo sapiens
acccgcgcgaggtaggcgctctggtgcttgcggaggacgcttccttcctcagatgcaccgatcttcccgatactgcctttggagcggctagattgctagccttggctgctccattggcctgccttgccccttacctgccgattgcatatgaactcttcttctgtctgtacatcgttgtcgtcggagtcgtcgcgatcgtcgtggcgctcgtgtgatggccttcgtccgtttagagtagtgtagttagttaggggccaacgaagaagaaagaagacgcgattagtgcagagatgctggaggtggtcagttactaagctagagtaagatagcggagcgaaaagagccaaacctagccggggggcgcacggtcacccaaaggaggtcgactcgccggcgcttcctatcgcgccgagctccctccattcctctccctccgccgaggcgcgaggttgcggcgcgcagcgcagcgcagctcagcgcaccgactgccgcgggctccgctgggcgattgcagccgagtccgtttctcgtctagctgccgccgcggcgaccgctgcctggtcttcctcccggacgctagtgggttatcagctaacacccgcgagcatctataacataggccaactgacgccatccttcaaaaacaactgtctgggaaaaaaagaataaaaagtagtgtgagagcagaaaacgtgattgaaacacgaccaatctttcttcagtgccaaagggtggaaaagaaaggatgatatgatgaacctagcctgttaatttcgtcttctcaattttaaactttggttgcttaagactgaagcaatcatggtgaacctgaggaatgcggtgcattcattccttgtgcacctaattggcctattggtttggcaatgtgatatttctgtgagcccagtagcagctatagtaactgacattttcaatacctccgatggtggacgcttcaaattcccagacggggtacaaaactggccagcactttcaatcgtcatcataataatcatgacaataggtggcaacatccttgtgatcatggcagtaagcatggaaaagaaactgcacaatgccaccaattacttcttaatgtccctagccattgctgatatgctagtgggactacttgtcatgcccctgtctctcctggcaatcctttatgattatgtctggccactacctagatatttgtgccccgtctggatttctttagatgttttattttcaacagcgtccatcatgcacctctgcgctatatcgctggatcggtatgtagcaatacgtaatcctattgagcatagccgtttcaattcgcggactaaggccatcatgaagattgctattgtttgggcaatttctataggtgtatcagttcctatccctgtgattggactgagggacgaagaaaaggtgttcgtgaacaacacgacgtgcgtgctcaacgacccaaatttcgttcttattgggtccttcgtagctttcttcataccgctgacgattatggtgattacgtattgcctgaccatctacgttctgcgccgacaagctttgatgttactgcacggccacaccgaggaaccgcctggactaagtctggatttcctgaagtgctgcaagaggaatacggccgaggaagagaactctgcaaaccctaaccaagaccagaacgcacgccgaagaaagaagaaggagagacgtcctaggggcaccatgcaggctatcaacaatgaaagaaaagcttcgaaagtccttgggattgttttctttgtgtttctgatcatgtggtgcccatttttcattaccaatattctgtctgttctttgtgagaagtcctgtaaccaaaagctcatggaaaagcttctgaatgtgtttgtttggattggctatgtttgttcaggaatcaatcctctggtgtatactctgttcaacaaaatttaccgaagggcattctccaactatttgcgttgcaattataaggtagagaaaaagcctcctgtcaggcagattccaagagttgccgccactgctttgtctgggagggagcttaatgttaacatttatcggcataccaatgaaccggtgatcgagaaagccagtgacaatgagcccggtatagagatgcaagttgagaatttagagttaccagtaaatccctccagtgtggttagcgaaaggattagcagtgtgtgagaaagaacagcacagtcttttcctacggtacaagctacatatgtaggaaaattttcttctttaatttttctgttggtcttaactaatgtaaatattgctgtctgaaaaagtgtttttacatatagctttgcaaccttgtactttacaatcatgcctacattagtgagatttagggttctatatttactgtttataataggtggagactaacttattttgattgtttgatgaataaaatgtttatttttgctctccctcccttctttccttccttttttcctttcttccttcctttctctctttcttttgtgcatatggcaacgttcatgttcatctcaggtggcatttgcaggtgaccagaatgaggcacatgacagtggttatatttcaaccacacctaaattaacaaattcagtggacatttgttctgggttaacagtaaatatacactttacattcttgctctgctcatctacacatataaacacagtaagataggttctgctttctgatacatctgtcagtgagtcagaggcagaacctagtcttgttgttcatataggggcaaaaatttgacattgtcagaatgttgtgttggtatttactgcaatgtctgtccctaaacatagtggtattttaacatagcagctggttaaccgggactacagaagtggaaggataatgagatgtaatacaccaaatagcttttcacttcttaaggacagtgttcaaattctgattattacaacaagcaaactgaaattagtgttttcattctggtccttagtaaattcctaattctatgattaaactgggaaatgagatcccagagttatttcccaacccaggattcaacatcaattgggttttgatctcagcatcctggaaatttgtgtgcttcacacaaagtgaaattagtattttgagccttattaaaatattttcttaattatggtacctctgtctataggacttaatttagcagtccatttttgagtaaaacttgtattggaagtatagatggtagaaactttggaagttttacttgattaaggactacagaattgggcccttagaatgtgaaaaaaaaaagtaattaaaaagacacttttaccgaactcgggattacagaaacacggagtttccatttggattttaaacaaaatttatgtcattttcagatccttccaaactctctagtgcaggaaaaggctgcagctaatttgtgaaagtggcaagctcttcattgcactgcagttatttaccagaagtttaaatctttgttaaaatatagtgttgtgttacaataagtgttggccatcatttcattcgtgggcctgctgctctctaagaattcagtagcattttaatagtttctaaaccatgaaaagttttcaagcattgctaaagtcaggccattcagtctatgctgtgtgcagagtatacaagtgtttctagtaacagtatttccatacgtgcccatttcacacaactgtggataaattttggaagaattcatgatgctagttcttacgcttgacagttacttacacacctgagaatgtgcctctcagtatcttaaaattggttaatgaaaaatctgaatttctaaaacccttggtctgtgttctcaacacacagtatagataaatccaatagtctgccacaagggcagtggaagagctgctgtatttgaggaaactcatacagtctctatttgatttgcaacactggccaaacatcagtcatttgcttgagcatgcccaaatattacatgaaagtcaagtctacctgccttgcctgttaggtctgttgaagtgcatgttaaaataattatatgaagcagaatgagatgatttaattcttaccgaaatgaaaatggctgaagaaacacagcatgcatttagcatgagttctgcacatacagatggtgtcctgcatgtatgccatgtatgttgcatgaatccatcgatttgtattaatgtagggcagaatagctgatagaagaaggactgaagaaaatccttcagcaatccttaaaaagaccatgcattcagatctgaagtagtgtgagtgttagaaaaaactggaaacatctgatttctgaactatcagggcaagctcatagcacatgttttacaaagaaacaaaatataaatcacagatttccaaaagtactagcaataagttgaatgataatagctcacagcacatttgttaatgattcttgtgtcatcaagtagtagtacttaatagtacccaacctggtaattatcctcaagttgtgtgctattcgtaagttctgtgcagtttggtatgaaacaaatatactcatttggatataaatcttacccttcaatgttaaatctacaaacttttataaatgttttaaagaagtccatgtgataattgtaaaggtgatgaatttaccatcaaacaaatcattttgatgtattattatatatgtatatctgtgtaagacacgtgcaacagactgccttatattattttctgtaattcttctcctttgtcaaatggtattttttgtgaatggttgcaaagtgttgtcttattcctaattcctgtatgttatccactacaggttttatgagacttcctattaatttattaaatttattaaatgttg

SEQ ID NO: 78974 - DNA, 4708 bp, Homo sapiens
acccgcgcgaggtaggcgctctggtgcttgcggaggacgcttccttcctcagatgcaccgatcttcccgatactgcctttggagcggctagattgctagccttggctgctccattggcctgccttgccccttacctgccgattgcatatgaactcttcttctgtctgtacatcgttgtcgtcggagtcgtcgcgatcgtcgtggcgctcgtgtgatggccttcgtccgtttagagtagtgtagttagttaggggccaacgaagaagaaagaagacgcgattagtgcagagatgctggaggtggtcagttactaagctagagtaagatagcggagcgaaaagagccaaacctagccggggggcgcacggtctccctccattcctctccctccgccgaggcgcgaggttgcggcgcgcagcgcagcgcagctcagcgcaccgactgccgcgggctccgctgggcgattgcagccgagtccgtttctcgtctagctgccgccgcggcgaccgctgcctggtcttcctcccggacgctagtgggttatcagctaacacccgcgagcatctataacataggccaactgacgccatccttcaaaaacaactaaaggatgatatgatgaacctagcctgttaatttcgtcttctcaattttaaactttggttgcttaagactgaagcaatcatggtgaacctgaggaatgcggtgcattcattccttgtgcacctaattggcctattggtttggcaatgtgatatttctgtgagcccagtagcagctatagtaactgacattttcaatacctccgatggtggacgcttcaaattcccagacggggtacaaaactggccagcactttcaatcgtcatcataataatcatgacaataggtggcaacatccttgtgatcatggcagtaagcatggaaaagaaactgcacaatgccaccaattacttcttaatgtccctagccattgctgatatgctagtgggactacttgtcatgcccctgtctctcctggcaatcctttatgattatgtctggccactacctagatatttgtgccccgtctggatttctttagatgttttattttcaacagcgtccatcatgcacctctgcgctatatcgctggatcggtatgtagcaatacgtaatcctattgagcatagccgtttcaattcgcggactaaggccatcatgaagattgctattgtttgggcaatttctataggtgtatcagttcctatccctgtgattggactgagggacgaagaaaaggtgttcgtgaacaacacgacgtgcgtgctcaacgacccaaatttcgttcttattgggtccttcgtagctttcttcataccgctgacgattatggtgattacgtattgcctgaccatctacgttctgcgccgacaagctttgatgttactgcacggccacaccgaggaaccgcctggactaagtctggatttcctgaagtgctgcaagaggaatacggccgaggaagagaactctgcaaaccctaaccaagaccagaacgcacgccgaagaaagaagaaggagagacgtcctaggggcaccatgcaggctatcaacaatgaaagaaaagcttcgaaagtccttgggattgttttctttgtgtttctgatcatgtggtgcccatttttcattaccaatattctgtctgttctttgtgagaagtcctgtaaccaaaagctcatggaaaagcttctgaatgtgtttgtttggattggctatgtttgttcaggaatcaatcctctggtgtatactctgttcaacaaaatttaccgaagggcattctccaactatttgcgttgcaattataaggtagagaaaaagcctcctgtcaggcagattccaagagttgccgccactgctttgtctgggagggagcttaatgttaacatttatcggcataccaatgaaccggtgatcgagaaagccagtgacaatgagcccggtatagagatgcaagttgagaatttagagttaccagtaaatccctccagtgtggttagcgaaaggattagcagtgtgtgagaaagaacagcacagtcttttcctacggtacaagctacatatgtaggaaaattttcttctttaatttttctgttggtcttaactaatgtaaatattgctgtctgaaaaagtgtttttacatatagctttgcaaccttgtactttacaatcatgcctacattagtgagatttagggttctatatttactgtttataataggtggagactaacttattttgattgtttgatgaataaaatgtttatttttgctctccctcccttctttccttccttttttcctttcttccttcctttctctctttcttttgtgcatatggcaacgttcatgttcatctcaggtggcatttgcaggtgaccagaatgaggcacatgacagtggttatatttcaaccacacctaaattaacaaattcagtggacatttgttctgggttaacagtaaatatacactttacattcttgctctgctcatctacacatataaacacagtaagataggttctgctttctgatacatctgtcagtgagtcagaggcagaacctagtcttgttgttcatataggggcaaaaatttgacattgtcagaatgttgtgttggtatttactgcaatgtctgtccctaaacatagtggtattttaacatagcagctggttaaccgggactacagaagtggaaggataatgagatgtaatacaccaaatagcttttcacttcttaaggacagtgttcaaattctgattattacaacaagcaaactgaaattagtgttttcattctggtccttagtaaattcctaattctatgattaaactgggaaatgagatcccagagttatttcccaacccaggattcaacatcaattgggttttgatctcagcatcctggaaatttgtgtgcttcacacaaagtgaaattagtattttgagccttattaaaatattttcttaattatggtacctctgtctataggacttaatttagcagtccatttttgagtaaaacttgtattggaagtatagatggtagaaactttggaagttttacttgattaaggactacagaattgggcccttagaatgtgaaaaaaaaaagtaattaaaaagacacttttaccgaactcgggattacagaaacacggagtttccatttggattttaaacaaaatttatgtcattttcagatccttccaaactctctagtgcaggaaaaggctgcagctaatttgtgaaagtggcaagctcttcattgcactgcagttatttaccagaagtttaaatctttgttaaaatatagtgttgtgttacaataagtgttggccatcatttcattcgtgggcctgctgctctctaagaattcagtagcattttaatagtttctaaaccatgaaaagttttcaagcattgctaaagtcaggccattcagtctatgctgtgtgcagagtatacaagtgtttctagtaacagtatttccatacgtgcccatttcacacaactgtggataaattttggaagaattcatgatgctagttcttacgcttgacagttacttacacacctgagaatgtgcctctcagtatcttaaaattggttaatgaaaaatctgaatttctaaaacccttggtctgtgttctcaacacacagtatagataaatccaatagtctgccacaagggcagtggaagagctgctgtatttgaggaaactcatacagtctctatttgatttgcaacactggccaaacatcagtcatttgcttgagcatgcccaaatattacatgaaagtcaagtctacctgccttgcctgttaggtctgttgaagtgcatgttaaaataattatatgaagcagaatgagatgatttaattcttaccgaaatgaaaatggctgaagaaacacagcatgcatttagcatgagttctgcacatacagatggtgtcctgcatgtatgccatgtatgttgcatgaatccatcgatttgtattaatgtagggcagaatagctgatagaagaaggactgaagaaaatccttcagcaatccttaaaaagaccatgcattcagatctgaagtagtgtgagtgttagaaaaaactggaaacatctgatttctgaactatcagggcaagctcatagcacatgttttacaaagaaacaaaatataaatcacagatttccaaaagtactagcaataagttgaatgataatagctcacagcacatttgttaatgattcttgtgtcatcaagtagtagtacttaatagtacccaacctggtaattatcctcaagttgtgtgctattcgtaagttctgtgcagtttggtatgaaacaaatatactcatttggatataaatcttacccttcaatgttaaatctacaaacttttataaatgttttaaagaagtccatgtgataattgtaaaggtgatgaatttaccatcaaacaaatcattttgatgtattattatatatgtatatctgtgtaagacacgtgcaacagactgccttatattattttctgtaattcttctcctttgtcaaatggtattttttgtgaatggttgcaaagtgttgtcttattcctaattcctgtatgttatccactacaggttttatgagacttcctattaatttattaaatttattaaatgttg

SEQ ID NO: 78975 - DNA, 407 bp, Homo sapiens
gacgcttcaaattcccagacggggtacaaaactggccagcactttcaatcgtcatcataataatcatgacaataggtggcaacatccttgtgatcatggcagtaagcatggaaaagaaactgcacaatgccaccaattacttcttaatgtccctagccattgctgatatgctagtgggactacttgtcatgcccctgtctctcctggcaatcctttatggtaagtacaattttattcacttttcaatctcgtataatgtcataaatttgtgtcatagtaaacactcataaagttaattattttacttgtaacatttggaaaaagaaaaaagcaaatcgtgtgacagaaggagttggatgtatgtatcatatttattaaacaaatcagtaacagtcttccaaaagcaa

SEQ ID NO: 78976 - DNA, 423 bp, Homo sapiens
actccaactagtggcttggcaaaaaattagagatttttaatggggggctagcaggctataggaagggttgtaattggtacatggagaaaaaagagtacaaattgaatatttgaattttaaaaaaaagatgatcatgaaaaggcacaaaatgtgttgctgtttagtccaagtgtaacagcgttctagaattgtttctatggatctgaagacagattaagggcaagtgacttggcaaaaggcctagacctgttttcagataattatctcacagtagaaaaaaataagggcagtacaagctccagtgaggacactacaccaacatgacagatctaaatggaacatacttctatgagtcatttatagctttaaatactatagagaaaagaatgcataaaacatgcccaaacagcctctttttgatgt

SEQ ID NO: 78977 - DNA, 817 bp, Homo sapiens
aacataacttctagattgttttgtgcaatacttttttccgccatattctggttcctgtatacagtatatctgttcagtatcttaaaaattacaactgttttcatgattttgattgaagatttttttaactcagcccacccacttatggaagtaaagcagaaagggtctcaaagcaactcagaagcctcaggtgcatgatttaaaactcaacatatttatttaaagcagcatctgtcaggcccaaagctcacaacctccttttgggcattaaatttggcatgagccaccatgcccagccaatgtaactggtttctaagagtttagccacagtagcttctagagataggaaattagatttagtgggtgggaagaggccctgatgctggtctttccagagcttatagttgctaacacttttctttgtaaagaagtttaccttttgactggaaccagatggcactgagaaaaagaatgagaaccaccttattcttctgaaaaagactttcttctcatccagtaatttgggctaaaaaatggaaagatgttgatgacttgaagtgatgcaagaatggacaagtcagggaagtcattgggaacatggatgaggttgtaagcattggtacagtgtcctgtttcctgacttttttgagagaaatgtctacttttcctgttttctcttggggacttttgaccctagagtagccctggtgttatattttagatatcccaagctatatcagactttacctgaatatactggagttacttattatcccccattctataccccaataaactcagtttggggcttcttaag

SEQ ID NO: 78978 - DNA, 675 bp, Homo sapiens
ggtttctttctttttttgagatggagtcttgctctgttgcccaggctggagtgcagcggcatgatctcgactcactgcagcctccgcctcctgggttcaagtggttctcctgcctcagcctccctagtagctgggattacaggtgcacaccaccacacctggctaatttttgtatttttagcagacagggtttcaccatgttggccaggctcgtatcaaacccttgaccccaggtgatctgcctgcctcagcctcccaaagttctgggattacaggcatgagccaccatgcccagccaatgtaactggtttctaagagtttagccacagtagcttctagagataggaaattagatttagtgggtgggaagaggccctgatgctggtctttccagagcttatagttgctaacacttttctttgtaaagaagtttaccttttgactggaaccagatggcactgagaaaaagaatgagaaccaccttattcttctgaaaaagactttcttctcatccagtaatttgggctaaaaaatggaaagatgttgatgacttgaagtgatgcaagaatggacaagtcagggaagtcattgggaacatggatgaggttgtaagcattggtacagtgtcctgtttcctgacttttttgagagaaatgtctacttttcctgttttct

SEQ ID NO: 78979 - DNA, 468 bp, Homo sapiens
attcaagcactcattctatccacaactaacaaactgatatcagaaatattactgttaaacatttaaaaaattaaatgtgaatttatcttataaatttgtgaattcaaattttaaatttcaaatttttaactggaagtggtagcaatgaataacagattggatagcacagaaaatgacactgatgatttgaaagtccactttgaggagttccccaaaaaccaagaagcaaaagatagagatgaatataatatgtaaaatataagagatatgaggggtaggtttaggagataaaatagagtatagtaggaattttagaaagaaatacaataatcaatacatttggaatgtattaacacagcctgagcggaataagattttaagttaaatggatcctttctagaaaaagcattaccataaagatgattcactgttaatatcatttattgtatgattagatcaaaagagaaa

SEQ ID NO: 78980 - DNA, 864 bp, Homo sapiens
accctggctggatatagggcaaaggagagtttggttcagtgcggtaggcccagctgaagcaggaggatggctcctttgtgaaagtggctatgaagatgctgaaagctgatctcattgcctcaagtgacattgaagagttcctcaggaaagcagcttgcatgaaggagtttgaccatccacatgtggccaaacttgttggggtaagcctctgagcctctggagcagggctaaaggctgtcaccccatccccgtggtcatcttgcccttcatgaagcatggggacctgcacgccttcctgctcacctcctggcttggggagaacccctttaccctgatccggttcatggtggacattgcctgcagcatggagtacctgagctctcggaacttcatccaccgagacctggccgctcggaactgcatgctggcaggggacatgaccgtgtgtgtggctgactttggactctcctggaagatctacagcggggctactattgttagggctgtgcctccaaattgcccgtcaagtggctggccctggagagcctggctgacaacctgtatactgtgcacagtgatgtgtgggccttcggggtgaccatgtgggagatcatgacacgtgggcagacaccatacgctggcatcgaaaacactgagatttacaactacctcattggcgggaatcacctgaaacagcttccagagtgtatggaggacgttcttacactcccactccatccaagccaaggtctccttaggccttcagacgaccttttgtatgatctcatgtaccagtgctggagtgctgaccccaagcagcgcccaagctttacttgtctgcgaatggaactggagaacattctg

SEQ ID NO: 78981 - DNA, 1198 bp, Homo sapiens
tacttaaaaaaaaaaaaaaaacctagtgtctagatttatatcactagattgtttcattctaaggtttcagtttggacaaagcaacaacacctactgtctctggggctttgtttgtgatatcccaaattttgcatagaattgtaaaattgaaaaatctccttagaggtcatgttgtccaatgtacaataaaataaccttttagttacattcctaacaaatggttttctagtattttcttgaacacttccagcatcagattactacttagggatgcagcttattctgtattggacagcttgaatttagtttttattgtactgagctgtaactcctcagtagcttctaccagttgaacataggactgtgatcaagttcttttcaaatccttgtacttcattctataaaaataggaattttaaaaatcaaaggtggttttgctagatgtcagtgtgtgcaagtatggttgaaaagactagtgtgtaataagcgatcttctttattatccatataatttcttacaatttgcagcttagaccactgtggtatttgcatcttctttttggtaccatttttgagtttcctatctaatcttttacacttgttaacagaactattttctttttcatttctgtgctacacttagatgtaaatttgaatagtttgctttctttattttctaaaagcctaccccatcatgtaaattaatgcttgaatacggagcttggccaactttttctgtaaaggactagataaaatattttaggctttgtgggccaaaaggcaaaatcgaggatatcatataggtacttcagtaacaaaagagaaaacacattttcacaaatttttttattgatgaagttagaggtataataattgagtcttttttttatttttatttttaaatacagctctactaaccagaagaattgagttctttttggggaaatataacctttctcttaattgatgttcaaagttagtactttctaatcatcaaattgatggcaaatctgttaattcttagcttatgggcttcacacagacaatgggctgtagtttcctggtctctgctcttacacaaccattcagcatttctcctgtccctaggcttttatttgacgtacttgagctcaccatcaccatgctacaattctgtgggcatattagctattctatttgtcatatatgtttagctcat

SEQ ID NO: 78982 - DNA, 424 bp, Homo sapiens
agggagaaaaagtgtgtaaagagcaatgttctttggaaaaaccaattaattttcaaccatgaaaaaatgaaaacaggtaagtgctagaagtaaatgatggatgattattttcataatcttaggcagaaaaagtctttctaagaagttctaaattaaaactttgatatttaaaagattaaatatgtaatccttcaacatcaaaaacataaagataacaaaaattaaaagtaaatgaagatctgggaaaatatacttagaccatatatgataatgaagttagcactatcatatataatgatataataaagtcatatatcgtaatgtcattgtttctataacatataaagaaatgttataaatcaaggaaaagatgaacgccttaatataacgataagttaagaacatgaagcaatctgagagacaa

SEQ ID NO: 78983 - DNA, 1127 bp, Homo sapiens
gattctgcaaaagctgcccgaacaggctttcctctgaaaagcagtgccgttcctttttagaaagactgaatctaaatgttgtctctggagacaagaagccttcagtatgttaaattactttcattatgtattttcagatgcttattgattccacagtaggaagagtgagagactgcagcagcctctaagcagcactacatgttccatacattagcagtactgctgaaacaatggcacactacagacacatattttcattaaggtcattttcgaagagatgtttatgaccctcttcccccagtcctctactaacaagtgaacaaaatgaatcaatccaaactggaaatgcttcaactacatcaagaatttatcaaatctttagcagagggccaatagcagctaattcagtatttacaactgacaatatgaagaatgcaattgactgagcatctccctagctgtctgaactacgaactgcaagatgttcttgtaacacgactttaagacattaaggagttaaaaccagggaataggtctacattactgatggaatataaaaaatcaactgtatcctaagaagatgctacataaaataaccacaaaaagaaaaacaatataactgtaaaagcctgaaaagaatttttaaaaggggaagtttatactttcatataccagaattgtggaagttactgattctggaagacataatgaaacatgaatttccaaaaagaaaagaaaatactttatcagcacacaaaaggaagatttaggaagtgttttctgcactaaatattcagatattcatatcaattggtatgactaatggatttttctatctgacttttatgaccaattatgtatcctcttctaatgaaaacaaacaaaattaaacagcagatggtttttatcaaaaggacatggcctggatttataatataaagcaagttatgtgatccaagaaaatcatttcaaaatagtgagcactgctattaaaaacagatttacaatggtaacaaaaggatgtctaaatatattttagaagctacaaacgttatgtttccttttttgttttcacatattctggaaaataaagaaatattatcatgtactccatcaaagggaaacat

SEQ ID NO: 78984 - DNA, 1011 bp, Homo sapiens
gcagtggagagaagcgacaagatgcttattgattccacagtaggaagagtgagagactgcagcagcctctaagcagcactacatgttccatacattagcagtactgctgaaacaatggcacactacagacacatattttcattaaggtcattttcgaagagatgtttatgaccctcttcccccagtcctctactaacaagtgaacaaaatgaatcaatccaaactggaaatgcttcaactacatcaagaatttatcaaatctttagcagagggccaatagcagctaattcagtatttacaactgacaatatgaagaatgcaattgactgagcatctccctagctgtctgaactacgaactgcaagatgttcttgtaacacgactttaagacattaaggagttaaaaccagggaataggtctacattactgatggaatataaaaaatcaactgtatcctaagaagatgctacataaaataaccacaaaaagaaaaacaatataactgtaaaagcctgaaaagaatttttaaaaggggaagtttatactttcatataccagaattgtggaagttactgattctggaagacataatgaaacatgaatttccaaaaagaaaagaaaatactttatcagcacacaaaaggaagatttaggaagtgttttctgcactaaatattcagatattcatatcaattggtatgactaatggatttttctatctgacttttatgaccaattatgtatcctcttctaatgaaaacaaacaaaattaaacagcagatggtttttatcaaaaggacatggcctggatttataatataaagcaagttatgtgatccaagaaaatcatttcaaaatagtgagcactgctattaaaaacagatttacaatggtaacaaaaggatgtctaaatatattttagaagctacaaacgttatgtttccttttttgttttcacatattctggaaaataaagaaatattatcatgtactccatcaaagggaaacat

SEQ ID NO: 78985 - DNA, 2627 bp, Homo sapiens
tcattagaaccttttttttttttaatgtggtctctccctttctctctccaaggtcacaagatttccctcagcccagtggttgtgcaactttgggggaggaggcaatggggctctaggactaaacaatgcgcgtctgctcaacacccagatcagttgattaatcttaggcggccaaaattcacttttgctctcttcagctgagagacccaagactcatggaagagggaacaagaccaccaaggtgcctagtccttctaatcctgtcgtcccacattacagcctgattatcaggccccagaggtttcctcgccagttaaagagaggttcactagagcggttctaaaaaggtttcacaaaagaagcaacacctgaagggaggtgaaggacgacctaggaaaaggaagcaagttctgtgtcacggaggcccaagggcaaggggcttaggctgtgggttgaggggactgtctgagacggacttaaacctgcaccagctccagagccctgcggaaacagagatcggtcccctccggcgtctaggtaaggcccaccctcccagaccgcaaagagccaggatccgacggcagcctctccggaccaatcacaaccttccttcatcaaggaggcggggtcggggggggctgacttttccttgtctccgcccctttagtcgaagtaaccaatctcagtgcacctaggggaagtaatcgcaatgggagtaaccaatgacgccatgaagcttctcgtgcgtgcttgaccctgcctctccagctgcgacacagatggcgcgcgggctcttgggttctgtagttttctcgcgatccaaaaggctccgtgcccaagtgagtccttaccgcctccctacccagcggcttcccctccgctagtacgcatgtccacagcttcacggaccgggagagagggggcgcggaaggaaggaggcgggacggtattacaaacaaaaaaatacggccttctcgagaagcgacggcggagggcccgctcctcccagaaggcggtgcagcctgcccgggcgagccacgcacgcagagggttgtggggcggatagctcccctccagatggaggctcacgaagtagggtgggcgggggactccatatcccagcgtgccccgcggcgggccctaccggccgcgactccgggcttggccccggccctagctcgtcggctgtgtattggggcgcgtggaggctgcagtcacggtggcgcccgcggggacggaggagggaatgagtgaagaggagcaaggctccggcactaccacgggctgcgggctgcctagtatagagcaaatgctggccgccaacccaggcaagaccccgatcagccttctgcaggagtatgggaccagaatagggaagacgcctgtgtacgaccttctcaaagccgagggccaagcccaccagcctaatttcaccttccgggtcaccgttggcgacaccagctgcactggtcagggccccagcaagaaggcagccaagcacaaggcagctgaggtggccctcaaacacctcaaaggggggagcatgctggagccggccctggaggacagcagttctttttctcccctagactcttcactgcctgaggacattccggtttttactgctgcagcagctgctaccccagttccatctgtagtcctaaccaggagcccccccatggaactgcagccccctgtctcccctcagcagtctgagtgcaaccccgttggtgctctgcaggagctggtggtgcagaaaggctggcggttgccggagtacacagtgacccaggagtctgggccagcccaccgcaaagaattcaccatgacctgtcgagtggagcgtttcattgagattgggagtggcacttccaaaaaattggcaaagcggaatgcggcggccaaaatgctgcttcgagtgcacacggtgcctctggatgcccgggatggcaatgaggtggagcctgatgatgaccacttctccattggtgtgggctcccgcctggatggtcttcgaaaccggggcccaggttgcacctgggattctctacgaaattcagtaggagagaagatcctgtccctccgcagttgctccctgggctccctgggtgccctgggccctgcctgctgccgtgtcctcagtgagctctctgaggagcaggcctttcacgtcagctacctggatattgaggagctgagcctgagtggactctgccagtgcctggtggaactgtccacccagccggccactgtgtgtcatggctctgcaaccaccagggaggcagcccgtggtgaggctgcccgccgtgccctgcagtacctcaagatcatggcaggcagcaagtgaagccccagctggactcatggatgtgcaccctttgctccctgctctttctgcctctgggctcatgtatctgcgcagctctggtaccctctgtgggtgccatctctacctctgacacagactgcctgccttgaagctgagaaggcacagggcaaggagccaaggaccacagagcctcagccagcccaggatccgtcctcattttattggtgatgatgaatgggaatgaaatcagggggctgtctactagagcctggaataaatatgctgctttgtggatttt

SEQ ID NO: 78986 - DNA, 2167 bp, Homo sapiens
tcattagaaccttttttttttttaatgtggtctctccctttctctctccaaggtcacaagatttccctcagcccagtggttgtgcaactttgggggaggaggcaatggggctctaggactaaacaatgcgcgtctgctcaacacccagatcagttgattaatcttaggcggccaaaattcacttttgctctcttcagctgagagacccaagactcatggaagagggaacaagaccaccaaggtgcctagtccttctaatcctgtcgtcccacattacagcctgattatcaggccccagaggtttcctcgccagttaaagagaggttcactagagcggttctaaaaaggtttcacaaaagaagcaacacctgaagggaggtgaaggacgacctaggaaaaggaagcaagttctgtgtcacggaggcccaagggcaaggggcttaggctgtgggttgaggggactgtctgagacggacttaaacctgcaccagctccagagccctgcggaaacagagatcggtcccctccggcgtctaggtaaggcccaccctcccagaccgcaaagagccaggatccgacggcagcctctccggaccaatcacaaccttccttcatcaaggaggcggggtcggggggggctgacttttccttgtctccgcccctttagtcgaagtaaccaatctcagtgcacctaggggaagtaatcgcaatgggagtaaccaatgacgccatgaagcttctcgtgcgtgcttgaccctgcctctccagctgcgacacagatggcgcgcgggctcttgggttctgtagttttctcgcgatccaaaaggctccgtgcccaatatagagcaaatgctggccgccaacccaggcaagaccccgatcagccttctgcaggagtatgggaccagaatagggaagacgcctgtgtacgaccttctcaaagccgagggccaagcccaccagcctaatttcaccttccgggtcaccgttggcgacaccagctgcactggtcagggccccagcaagaaggcagccaagcacaaggcagctgaggtggccctcaaacacctcaaaggggggagcatgctggagccggccctggaggacagcagttctttttctcccctagactcttcactgcctgaggacattccggtttttactgctgcagcagctgctaccccagttccatctgtagtcctaaccaggagcccccccatggaactgcagccccctgtctcccctcagcagtctgagtgcaaccccgttggtgctctgcaggagctggtggtgcagaaaggctggcggttgccggagtacacagtgacccaggagtctgggccagcccaccgcaaagaattcaccatgacctgtcgagtggagcgtttcattgagattgggagtggcacttccaaaaaattggcaaagcggaatgcggcggccaaaatgctgcttcgagtgcacacggtgcctctggatgcccgggatggcaatgaggtggagcctgatgatgaccacttctccattggtgtgggctcccgcctggatggtcttcgaaaccggggcccaggttgcacctgggattctctacgaaattcagtaggagagaagatcctgtccctccgcagttgctccctgggctccctgggtgccctgggccctgcctgctgccgtgtcctcagtgagctctctgaggagcaggcctttcacgtcagctacctggatattgaggagctgagcctgagtggactctgccagtgcctggtggaactgtccacccagccggccactgtgtgtcatggctctgcaaccaccagggaggcagcccgtggtgaggctgcccgccgtgccctgcagtacctcaagatcatggcaggcagcaagtgaagccccagctggactcatggatgtgcaccctttgctccctgctctttctgcctctgggctcatgtatctgcgcagctctggtaccctctgtgggtgccatctctacctctgacacagactgcctgccttgaagctgagaaggcacagggcaaggagccaaggaccacagagcctcagccagcccaggatccgtcctcattttattggtgatgatgaatgggaatgaaatcagggggctgtctactagagcctggaataaatatgctgctttgtggatttt

SEQ ID NO: 78987 - DNA, 1882 bp, Homo sapiens
gcggtggagggtccggccgctctcgaatgtccttcgctgggtgcagacaccggtacgtccggcgcgggtttttagtctcccaagcgagagcgtccgtcattcacccgcgtgggtctgcggtcgccctacgacccctaaggatgctggacacccttcgctgacctgtaccactacgcctgtcgctcagaaggaggcgggacggtattacaaacaaaaaaatacggccttctcgagaagcgacggcggagggcccgctcctcccagaaggcggtgcagcctgcccgggcgagccacgcacgcagagggttgtggggcggatagctcccctccagatggaggctcacgaagtagggtgggcgggggactccatatcccagcgtgccccgcggcgggccctaccggccgcgactccgggcttggccccggccctagctcgtcggctgtgtattggggcgcgtggaggctgcagtcacggtggcgcccgcggggacggaggagggaatgagtgaagaggagcaaggctccggcactaccacgggctgcgggctgcctagtatagagcaaatgctggccgccaacccaggcaagaccccgatcagccttctgcaggagtatgggaccagaatagggaagacgcctgtgtacgaccttctcaaagccgagggccaagcccaccagcctaatttcaccttccgggtcaccgttggcgacaccagctgcactggtcagggccccagcaagaaggcagccaagcacaaggcagctgaggtggccctcaaacacctcaaaggggggagcatgctggagccggccctggaggacagcagttctttttctcccctagactcttcactgcctgaggacattccggtttttactgctgcagcagctgctaccccagttccatctgtagtcctaaccaggagcccccccatggaactgcagccccctgtctcccctcagcagtctgagtgcaaccccgttggtgctctgcaggagctggtggtgcagaaaggctggcggttgccggagtacacagtgacccaggagtctgggccagcccaccgcaaagaattcaccatgacctgtcgagtggagcgtttcattgagattgggagtggcacttccaaaaaattggcaaagcggaatgcggcggccaaaatgctgcttcgagtgcacacggtgcctctggatgcccgggatggcaatgaggtggagcctgatgatgaccacttctccattggtgtgggctcccgcctggatggtcttcgaaaccggggcccaggttgcacctgggattctctacgaaattcagtaggagagaagatcctgtccctccgcagttgctccctgggctccctgggtgccctgggccctgcctgctgccgtgtcctcagtgagctctctgaggagcaggcctttcacgtcagctacctggatattgaggagctgagcctgagtggactctgccagtgcctggtggaactgtccacccagccggccactgtgtgtcatggctctgcaaccaccagggaggcagcccgtggtgaggctgcccgccgtgccctgcagtacctcaagatcatggcaggcagcaagtgaagccccagctggactcatggatgtgcaccctttgctccctgctctttctgcctctgggctcatgtatctgcgcagctctggtaccctctgtgggtgccatctctacctctgacacagactgcctgccttgaagctgagaaggcacagggcaaggagccaaggaccacagagcctcagccagcccaggatccgtcctcattttattggtgatgatgaatgggaatgaaatcagggggctgtctactagagcctggaataaatatgctgctttgtggatttt

SEQ ID NO: 78988 - DNA, 3698 bp, Homo sapiens
tcattagaaccttttttttttttaatgtggtctctccctttctctctccaaggtcacaagatttccctcagcccagtggttgtgcaactttgggggaggaggcaatggggctctaggactaaacaatgcgcgtctgctcaacacccagatcagttgattaatcttaggcggccaaaattcacttttgctctcttcagctgagagacccaagactcatggaagagggaacaagaccaccaaggtgcctagtccttctaatcctgtcgtcccacattacagcctgattatcaggccccagaggtttcctcgccagttaaagagaggttcactagagcggttctaaaaaggtttcacaaaagaagcaacacctgaagggaggtgaaggacgacctaggaaaaggaagcaagttctgtgtcacggaggcccaagggcaaggggcttaggctgtgggttgaggggactgtctgagacggacttaaacctgcaccagctccagagccctgcggaaacagagatcggtcccctccggcgtctaggtaaggcccaccctcccagaccgcaaagagccaggatccgacggcagcctctccggaccaatcacaaccttccttcatcaaggaggcggggtcggggggggctgacttttccttgtctccgcccctttagtcgaagtaaccaatctcagtgcacctaggggaagtaatcgcaatgggagtaaccaatgacgccatgaagcttctcgtgcgtgcttgaccctgcctctccagctgcgacacagatggcgcgcgggctcttgggttctgtagttttctcgcgatccaaaaggctccgtgcccaagtgagtccttaccgcctccctacccagcggcttcccctccgctagtacgcatgtccacagcttcacggaccgggagagagggggcgcggaaggaaggaggcgggacggtattacaaacaaaaaaatacggccttctcgagaagcgacggcggagggcccgctcctcccagaaggcggtgcagcctgcccgggcgagccacgcacgcagagggttgtggggcggatagctcccctccagatggaggctcacgaagtagggtgggcgggggactccatatcccagcgtgccccgcggcgggccctaccggccgcgactccgggcttggccccggccctagctcgtcggctgtgtattggggcgcgtggaggctgcagtcacggtggcgcccgcggggacggaggagggaatgagtgaagaggagcaaggctccggcactaccacgggctgcgggctgcctagtatagagcaaatgctggccgccaacccaggcaagaccccgatcagccttctgcaggagtatgggaccagaatagggaagacgcctgtgtacgaccttctcaaagccgagggccaagcccaccagcctaatttcaccttccgggtcaccgttggcgacaccagctgcactggtcagggccccagcaagaaggcagccaagcacaaggcagctgaggtggccctcaaacacctcaaaggggggagcatgctggagccggccctggaggacagcaggtgagggaggaaccgaggcatcccagaagcccttcaaggaacccaggccctgcaccacccactctgccccgaggcctggccaggtgacacttagccaccctgacctggcctcttcctgagagtccctctggacctgaacagggttttccagggcttctgctgctatgaagaattcttggggtggaggggttggttagccccatagaggggttgtggcagtaggttggggcctgggttagggagggagaggggtagaggcttgaggctaaagggagttactccccaacatacctccttgttctagcaagatgtccttccttcacgcgcaggttggagttagttgctcctcctggttcttgggtacaaagataccctcttctctgagactctcttttctcagtcttttcgccggtgtttggcagcaaaggatccgaggaggaagctgttggttgagcctccctgattctttggctcaatttggaattctttttctcccctagactcttcactgcctgaggacattccggtttttactgctgcagcagctgctaccccagttccatctgtagtcctaaccaggtatctgtgtcccctgactgcctgaggtgggtggaggaaggggttctggtttttggtccctcagtccttggacccaagctggtcaggcatgaggaagtctgagaataaacagaatggaatagttgggaaccagaacttgaagaaatcacagcagctggtaagctcttgggacaagaggtcatttgtgattttcagacagccttatgaatgatgtccgaccatgtttaagggtcttgcaggccccattttcttctgggttgaccacatgtcagttctgtgtttgaggcccatcaggcacttctgggactggaaatacagctcttctcccactgtcctggcttagatgatacccaagtgttccagaatggaaatgggctggggcctggagaaggcctcccttgagtgggagggggaaggaagccggctagagcaggaggagcaggctagatgtgtggacagacagctccccacccggtggaatcgggagatggtagtcaggaatctaaagtagtggttaggtttggagctcatgggcaggctcagatggaacccttcacctcaactttggccctgtgccttttccttcaggagcccccccatggaactgcagccccctgtctcccctcagcagtctgagtgcaaccccgttggtgctctgcaggagctggtggtgcagaaaggctggcggttgccggagtacacagtgacccaggagtctgggccagcccaccgcaaagaattcaccatgacctgtcgagtggagcgtttcattgagattgggagtggcacttccaaaaaattggcaaagcggaatgcggcggccaaaatgctgcttcgagtgcacacggtgcctctggatgcccgggatggcaatgaggtggagcctgatgatgaccacttctccattggtgtgggctcccgcctggatggtcttcgaaaccggggcccaggttgcacctgggattctctacgaaattcagtaggagagaagatcctgtccctccgcagttgctccctgggctccctgggtgccctgggccctgcctgctgccgtgtcctcagtgagctctctgaggagcaggcctttcacgtcagctacctggatattgaggagctgagcctgagtggactctgccagtgcctggtggaactgtccacccagccggccactgtgtgtcatggctctgcaaccaccagggaggcagcccgtggtgaggctgcccgccgtgccctgcagtacctcaagatcatggcaggcagcaagtgaagccccagctggactcatggatgtgcaccctttgctccctgctctttctgcctctgggctcatgtatctgcgcagctctggtaccctctgtgggtgccatctctacctctgacacagactgcctgccttgaagctgagaaggcacagggcaaggagccaaggaccacagagcctcagccagcccaggatccgtcctcattttattggtgatgatgaatgggaatgaaatcagggggctgtctactagagcctggaataaatatgctgctttgtggatttt

SEQ ID NO: 78989 - DNA, 2710 bp, Homo sapiens
tcattagaaccttttttttttttaatgtggtctctccctttctctctccaaggtcacaagatttccctcagcccagtggttgtgcaactttgggggaggaggcaatggggctctaggactaaacaatgcgcgtctgctcaacacccagatcagttgattaatcttaggcggccaaaattcacttttgctctcttcagctgagagacccaagactcatggaagagggaacaagaccaccaaggtgcctagtccttctaatcctgtcgtcccacattacagcctgattatcaggccccagaggtttcctcgccagttaaagagaggttcactagagcggttctaaaaaggtttcacaaaagaagcaacacctgaagggaggtgaaggacgacctaggaaaaggaagcaagttctgtgtcacggaggcccaagggcaaggggcttaggctgtgggttgaggggactgtctgagacggacttaaacctgcaccagctccagagccctgcggaaacagagatcggtcccctccggcgtctaggtaaggcccaccctcccagaccgcaaagagccaggatccgacggcagcctctccggaccaatcacaaccttccttcatcaaggaggcggggtcggggggggctgacttttccttgtctccgcccctttagtcgaagtaaccaatctcagtgcacctaggggaagtaatcgcaatgggagtaaccaatgacgccatgaagcttctcgtgcgtgcttgaccctgcctctccagctgcgacacagatggcgcgcgggctcttgggttctgtagttttctcgcgatccaaaaggctccgtgcccaagtgagtccttaccgcctccctacccagcggcttcccctccgctagtacgcatgtccacagcttcacggaccgggagagagggggcgcggaaggaaggaggcgggacggtattacaaacaaaaaaatacggccttctcgagaagcgacggcggagggcccgctcctcccagaaggcggtgcagcctgcccgggcgagccacgcacgcagagggttgtggggcggatagctcccctccagatggaggctcacgaagtagggtgggcgggggactccatatcccagcgtgccccgcggcgggccctaccggccgcgactccgggcttggccccggccctagctcgtcggctgtgtattggggcgcgtggaggctgcagtcacggtggcgcccgcggggacggaggagggaatgagtgaagaggagcaaggctccggcactaccacgggctgcgggctgcctagtatagagcaaatgctggccgccaacccaggcaagaccccgatcagccttctgcaggagtatgggaccagaatagggaagacgcctgtgtacgaccttctcaaagccgagggccaagcccaccagcctaatttcaccttccgggtcaccgttggcgacaccagctgcactggtcagggccccagcaagaaggcagccaagcacaaggcagctgaggtggccctcaaacacctcaaaggggggagcatgctggagccggccctggaggacagcaggtgagggaggaaccgaggcatcccagaagcccttcaaggaacccaggccctgcaccacccactctgccccgaggcctggccagttctttttctcccctagactcttcactgcctgaggacattccggtttttactgctgcagcagctgctaccccagttccatctgtagtcctaaccaggagcccccccatggaactgcagccccctgtctcccctcagcagtctgagtgcaaccccgttggtgctctgcaggagctggtggtgcagaaaggctggcggttgccggagtacacagtgacccaggagtctgggccagcccaccgcaaagaattcaccatgacctgtcgagtggagcgtttcattgagattgggagtggcacttccaaaaaattggcaaagcggaatgcggcggccaaaatgctgcttcgagtgcacacggtgcctctggatgcccgggatggcaatgaggtggagcctgatgatgaccacttctccattggtgtgggctcccgcctggatggtcttcgaaaccggggcccaggttgcacctgggattctctacgaaattcagtaggagagaagatcctgtccctccgcagttgctccctgggctccctgggtgccctgggccctgcctgctgccgtgtcctcagtgagctctctgaggagcaggcctttcacgtcagctacctggatattgaggagctgagcctgagtggactctgccagtgcctggtggaactgtccacccagccggccactgtgtgtcatggctctgcaaccaccagggaggcagcccgtggtgaggctgcccgccgtgccctgcagtacctcaagatcatggcaggcagcaagtgaagccccagctggactcatggatgtgcaccctttgctccctgctctttctgcctctgggctcatgtatctgcgcagctctggtaccctctgtgggtgccatctctacctctgacacagactgcctgccttgaagctgagaaggcacagggcaaggagccaaggaccacagagcctcagccagcccaggatccgtcctcattttattggtgatgatgaatgggaatgaaatcagggggctgtctactagagcctggaataaatatgctgctttgtggatttt

SEQ ID NO: 78990 - DNA, 2582 bp, Homo sapiens
tcattagaaccttttttttttttaatgtggtctctccctttctctctccaaggtcacaagatttccctcagcccagtggttgtgcaactttgggggaggaggcaatggggctctaggactaaacaatgcgcgtctgctcaacacccagatcagttgattaatcttaggcggccaaaattcacttttgctctcttcagctgagagacccaagactcatggaagagggaacaagaccaccaaggtgcctagtccttctaatcctgtcgtcccacattacagcctgattatcaggccccagaggtttcctcgccagttaaagagaggttcactagagcggttctaaaaaggtttcacaaaagaagcaacacctgaagggaggtgaaggacgacctaggaaaaggaagcaagttctgtgtcacggaggcccaagggcaaggggcttaggctgtgggttgaggggactgtctgagacggacttaaacctgcaccagctccagagccctgcggaaacagagatcggtcccctccggcgtctaggtaaggcccaccctcccagaccgcaaagagccaggatccgacggcagcctctccggaccaatcacaaccttccttcatcaaggaggcggggtcggggggggctgacttttccttgtctccgcccctttagtcgaagtaaccaatctcagtgcacctaggggaagtaatcgcaatgggagtaaccaatgacgccatgaagcttctcgtgcgtgcttgaccctgcctctccagctgcgacacagatggcgcgcgggctcttgggttctgtagttttctcgcgatccaaaaggctccgtgcccaagtgagtccttaccgcctccctacccagcggcttcccctccgctagtacgcatgtccacagcttcacggaccgggagagagggggcgcggaaggaaggaggcgggacggtattacaaacaaaaaaatacggccttctcgagaagcgacggcggagggcccgctcctcccagaaggcggtgcagcctgcccgggcgagccacgcacgcagagggttgtggggcggatagctcccctccagatggaggctcacgaagtagggtgggcgggggactccatatcccagcgtgccccgcggcgggccctaccggccgcgactccgggcttggccccggccctagctcgtcggctgtgtattggggcgcgtggaggctgcagtcacggtggcgcccgcggggacggaggagggaatgagtgaagaggagcaaggctccggcactaccacgggctgcgggctgcctagccttctgcaggagtatgggaccagaatagggaagacgcctgtgtacgaccttctcaaagccgagggccaagcccaccagcctaatttcaccttccgggtcaccgttggcgacaccagctgcactggtcagggccccagcaagaaggcagccaagcacaaggcagctgaggtggccctcaaacacctcaaaggggggagcatgctggagccggccctggaggacagcagttctttttctcccctagactcttcactgcctgaggacattccggtttttactgctgcagcagctgctaccccagttccatctgtagtcctaaccaggagcccccccatggaactgcagccccctgtctcccctcagcagtctgagtgcaaccccgttggtgctctgcaggagctggtggtgcagaaaggctggcggttgccggagtacacagtgacccaggagtctgggccagcccaccgcaaagaattcaccatgacctgtcgagtggagcgtttcattgagattgggagtggcacttccaaaaaattggcaaagcggaatgcggcggccaaaatgctgcttcgagtgcacacggtgcctctggatgcccgggatggcaatgaggtggagcctgatgatgaccacttctccattggtgtgggctcccgcctggatggtcttcgaaaccggggcccaggttgcacctgggattctctacgaaattcagtaggagagaagatcctgtccctccgcagttgctccctgggctccctgggtgccctgggccctgcctgctgccgtgtcctcagtgagctctctgaggagcaggcctttcacgtcagctacctggatattgaggagctgagcctgagtggactctgccagtgcctggtggaactgtccacccagccggccactgtgtgtcatggctctgcaaccaccagggaggcagcccgtggtgaggctgcccgccgtgccctgcagtacctcaagatcatggcaggcagcaagtgaagccccagctggactcatggatgtgcaccctttgctccctgctctttctgcctctgggctcatgtatctgcgcagctctggtaccctctgtgggtgccatctctacctctgacacagactgcctgccttgaagctgagaaggcacagggcaaggagccaaggaccacagagcctcagccagcccaggatccgtcctcattttattggtgatgatgaatgggaatgaaatcagggggctgtctactagagcctggaataaatatgctgctttgtggatttt

SEQ ID NO: 78991 - DNA, 1447 bp, Homo sapiens
gttcccggcgtgcaccggggcagtggctgctgcctccagctctaaatagtttggggttggcccggttcccagactgcactggaacactgggctttatgcccccacattcagtgcatttgtatagagcaaatgctggccgccaacccaggcaagaccccgatcagccttctgcaggagtatgggaccagaatagggaagacgcctgtgtacgaccttctcaaagccgagggccaagcccaccagcctaatttcaccttccgggtcaccgttggcgacaccagctgcactggtcagggccccagcaagaaggcagccaagcacaaggcagctgaggtggccctcaaacacctcaaaggggggagcatgctggagccggccctggaggacagcagttctttttctcccctagactcttcactgcctgaggacattccggtttttactgctgcagcagctgctaccccagttccatctgtagtcctaaccaggagcccccccatggaactgcagccccctgtctcccctcagcagtctgagtgcaaccccgttggtgctctgcaggagctggtggtgcagaaaggctggcggttgccggagtacacagtgacccaggagtctgggccagcccaccgcaaagaattcaccatgacctgtcgagtggagcgtttcattgagattgggagtggcacttccaaaaaattggcaaagcggaatgcggcggccaaaatgctgcttcgagtgcacacggtgcctctggatgcccgggatggcaatgaggtggagcctgatgatgaccacttctccattggtgtgggctcccgcctggatggtcttcgaaaccggggcccaggttgcacctgggattctctacgaaattcagtaggagagaagatcctgtccctccgcagttgctccctgggctccctgggtgccctgggccctgcctgctgccgtgtcctcagtgagctctctgaggagcaggcctttcacgtcagctacctggatattgaggagctgagcctgagtggactctgccagtgcctggtggaactgtccacccagccggccactgtgtgtcatggctctgcaaccaccagggaggcagcccgtggtgaggctgcccgccgtgccctgcagtacctcaagatcatggcaggcagcaagtgaagccccagctggactcatggatgtgcaccctttgctccctgctctttctgcctctgggctcatgtatctgcgcagctctggtaccctctgtgggtgccatctctacctctgacacagactgcctgccttgaagctgagaaggcacagggcaaggagccaaggaccacagagcctcagccagcccaggatccgtcctcattttattggtgatgatgaatgggaatgaaatcagggggctgtctactagagcctggaataaatatgctgctttgtggatttt

SEQ ID NO: 78992 - DNA, 2646 bp, Homo sapiens
tcattagaaccttttttttttttaatgtggtctctccctttctctctccaaggtcacaagatttccctcagcccagtggttgtgcaactttgggggaggaggcaatggggctctaggactaaacaatgcgcgtctgctcaacacccagatcagttgattaatcttaggcggccaaaattcacttttgctctcttcagctgagagacccaagactcatggaagagggaacaagaccaccaaggtgcctagtccttctaatcctgtcgtcccacattacagcctgattatcaggccccagaggtttcctcgccagttaaagagaggttcactagagcggttctaaaaaggtttcacaaaagaagcaacacctgaagggaggtgaaggacgacctaggaaaaggaagcaagttctgtgtcacggaggcccaagggcaaggggcttaggctgtgggttgaggggactgtctgagacggacttaaacctgcaccagctccagagccctgcggaaacagagatcggtcccctccggcgtctaggtaaggcccaccctcccagaccgcaaagagccaggatccgacggcagcctctccggaccaatcacaaccttccttcatcaaggaggcggggtcggggggggctgacttttccttgtctccgcccctttagtcgaagtaaccaatctcagtgcacctaggggaagtaatcgcaatgggagtaaccaatgacgccatgaagcttctcgtgcgtgcttgaccctgcctctccagctgcgacacagatggcgcgcgggctcttgggttctgtagttttctcgcgatccaaaaggctccgtgcccaagtgagtccttaccgcctccctacccagcggcttcccctccgctagtacgcatgtccacagcttcacggaccgggagagagggggcgcggaaggaaggaggcgggacggtattacaaacaaaaaaatacggccttctcgagaagcgacggcggagggcccgctcctcccagaaggcggtgcagcctgcccgggcgagccacgcacgcagagggttgtggggcggatagctcccctccagatggaggctcacgaagtagggtgggcgggggactccatatcccagcgtgccccgcggcgggccctaccggccgcgactccgggcttggccccggccctagctcgtcggctgtgtattggggcgcgtggaggctgcagtcacggtggcgcccgcggggacggaggagggaatgagtgaagaggagcaaggctccggcactaccacgggctgcgggctgcctagtatagagcaaatgctggccgccaacccaggcaagaccccgatcagccttctgcaggagtatgggaccagaatagggaagacgcctgtgtacgaccttctcaaagccgagggccaagcccaccagcctaatttcaccttccgggtcaccgttggcgacaccagctgcactggtcagggccccagcaagaaggcagccaagcacaaggcagctgaggtggccctcaaacacctcaaaggggggagcatgctggagccggccctggaggacagcagttctttttctcccctagactcttcactgcctgaggacattccggtttttactgctgcagcagctgctaccccagttccatctgtagtcctaaccaggagcccccccatggaactgcagccccctgtctcccctcagcagtctgagtgcaaccccgttggtgctctgcaggagctggtggtgcagaaaggctggcggttgccggagtacacagtgacccaggagtctgggccagcccaccgcaaagaattcaccatgacctgtcgagtggagcgtttcattgagattgggagtggcacttccaaaaaattggcaaagcggaatgcggcggccaaaatgctgcttcgagtgcacacggtgcctctggatgcccgggatggcaatgaggtggagcctgatgatgaccacttctccattggtgtgggctcccgcctggatggtcttcgaaaccggggcccaggttgcacctgggattctctacgaaattcagtaggagagaagatcctgtccctccgcagttgctccctgggctccctgggtgccctgggccctgcctgctgccgtgtcctcagtgagctctctgaggagcaggcctttcacgtcagctacctggatattgaggagctgagcctgagtggactctgccagtgcctggtggaactgtccacccagccggccactgtgtgtcatggctctgcaaccaccagggaggcagcccgtggtgaggctgcccgccgtgccctgcagtacctcaagatcatggcaggcagcaagtgaagccccagctggactcatggatgtgcaccctttgctccctgctctttctgcctctgggctcatgtatctgcgcagctctggtaccctctgtgggtgccatctctacctctgacacagactgcctgccttgaagctgagaaggcacagggcaaggagccaaggaccacagagcctcagccagcccaggatccgtcctcattttattggtgatgatgaatgggaatgaaatcagggggctgtttcagcagcgggtgaatatattctttacttttttttttttttttttttttttttttttt

SEQ ID NO: 78993 - DNA, 1533 bp, Homo sapiens
gttcccggcgtgcaccggggcagtggctgctgcctccagctctaaatagtttggggttggcccggttcccagactgcactggaacactgggctttatgcccccacattcagtgcatttgtatagagcaaatgctggccgccaacccaggcaagaccccgatcagccttctgcaggagtatgggaccagaatagggaagacgcctgtgtacgaccttctcaaagccgagggccaagcccaccagcctaatttcaccttccgggtcaccgttggcgacaccagctgcactggtcagggccccagcaagaaggcagccaagcacaaggcagctgaggtggccctcaaacacctcaaaggggggagcatgctggagccggccctggaggacagcagttctttttctcccctagactcttcactgcctgaggacattccggtttttactgctgcagcagctgctaccccagttccatctgtagtcctaaccaggagcccccccatggaactgcagccccctgtctcccctcagcagtctgagtgcaaccccgttggtgctctgcagagtctgaggctcctgcgtggggaccagcgtgggtgtgagaagccttttttcactcagcctcatgcaccctgtgtctcccttccaaggagctggtggtgcagaaaggctggcggttgccggagtacacagtgacccaggagtctgggccagcccaccgcaaagaattcaccatgacctgtcgagtggagcgtttcattgagattgggagtggcacttccaaaaaattggcaaagcggaatgcggcggccaaaatgctgcttcgagtgcacacggtgcctctggatgcccgggatggcaatgaggtggagcctgatgatgaccacttctccattggtgtgggctcccgcctggatggtcttcgaaaccggggcccaggttgcacctgggattctctacgaaattcagtaggagagaagatcctgtccctccgcagttgctccctgggctccctgggtgccctgggccctgcctgctgccgtgtcctcagtgagctctctgaggagcaggcctttcacgtcagctacctggatattgaggagctgagcctgagtggactctgccagtgcctggtggaactgtccacccagccggccactgtgtgtcatggctctgcaaccaccagggaggcagcccgtggtgaggctgcccgccgtgccctgcagtacctcaagatcatggcaggcagcaagtgaagccccagctggactcatggatgtgcaccctttgctccctgctctttctgcctctgggctcatgtatctgcgcagctctggtaccctctgtgggtgccatctctacctctgacacagactgcctgccttgaagctgagaaggcacagggcaaggagccaaggaccacagagcctcagccagcccaggatccgtcctcattttattggtgatgatgaatgggaatgaaatcagggggctgtctactagagcctggaataaatatgctgctttgtggatttt

SEQ ID NO: 78994 - DNA, 2382 bp, Homo sapiens
tcattagaaccttttttttttttaatgtggtctctccctttctctctccaaggtcacaagatttccctcagcccagtggttgtgcaactttgggggaggaggcaatggggctctaggactaaacaatgcgcgtctgctcaacacccagatcagttgattaatcttaggcggccaaaattcacttttgctctcttcagctgagagacccaagactcatggaagagggaacaagaccaccaaggtgcctagtccttctaatcctgtcgtcccacattacagcctgattatcaggccccagaggtttcctcgccagttaaagagaggttcactagagcggttctaaaaaggtttcacaaaagaagcaacacctgaagggaggtgaaggacgacctaggaaaaggaagcaagttctgtgtcacggaggcccaagggcaaggggcttaggctgtgggttgaggggactgtctgagacggacttaaacctgcaccagctccagagccctgcggaaacagagatcggtcccctccggcgtctaggtaaggcccaccctcccagaccgcaaagagccaggatccgacggcagcctctccggaccaatcacaaccttccttcatcaaggaggcggggtcggggggggctgacttttccttgtctccgcccctttagtcgaagtaaccaatctcagtgcacctaggggaagtaatcgcaatgggagtaaccaatgacgccatgaagcttctcgtgcgtgcttgaccctgcctctccagctgcgacacagatggcgcgcgggctcttgggttctgtagttttctcgcgatccaaaaggctccgtgcccaagtgagtccttaccgcctccctacccagcggcttcccctccgctagtacgcatgtccacagcttcacggaccgggagagagggggcgcggaaggaaggaggcgggacggtattacaaacaaaaaaatacggccttctcgagaagcgacggcggagggcccgctcctcccagaaggcggtgcagcctgcccgggcgagccacgcacgcagagggttgtggggcggatagctcccctccagatggaggctcacgaagtagggtgggcgggggactccatatcccagcgtgccccgcggcgggccctaccggccgcgactccgggcttggccccggccctagctcgtcggctgtgtattggggcgcgtggaggctgcagtcacggtggcgcccgcggggacggaggagggaatgagtgaagaggagcaaggctccggcactaccacgggctgcgggctgcctagtatagagcaaatgctggccgccaacccaggcaagaccccgatcagccttctgcaggagtatgggaccagaatagggaagacgcctgtgtacgaccttctcaaagccgagggccaagcccaccagcctaatttcaccttccgggtcaccgttggcgacaccagctgcactggtcagggccccagcaagaaggcagccaagcacaaggcagctgaggtggccctcaaacacctcaaaggggggagcatgctggagccggccctggaggacagcagttctttttctcccctagactcttcactgcctgaggacattccggtttttactgctgcagcagctgctaccccagttccatctgtagtcctaaccaggagcccccccatggaactgcagccccctgtctcccctcagcagtctgagtgcaaccccgttggtgctctgcaggagctggtggtgcagaaaggctggcggttgccggagtacacagtgacccaggagtctgggccagcccaccgcaaagaattcaccatgacctgtcgagtggagcgtttcattgagattgggagtggcacttccaaaaaattggcaaagcggaatgcggcggccaaaatgctgcttcgagtgcacacggtgcctctggatgcccgggatggcaatgaggtggagcctgatgatgaccacttctccattggtgtgggctcccgcctggatggtcttcgaaaccggggcccaggttgcacctgggattctctacgaaattcagtaggagagaagatcctgtccctccgcagttgctccctgggctccctgggtgccctgggccctgcctgctgccgtgtctccctgctctttctgcctctgggctcatgtatctgcgcagctctggtaccctctgtgggtgccatctctacctctgacacagactgcctgccttgaagctgagaaggcacagggcaaggagccaaggaccacagagcctcagccagcccaggatccgtcctcattttattggtgatgatgaatgggaatgaaatcagggggctgtctactagagcctggaataaatatgctgctttgtggatttt

SEQ ID NO: 78995 - DNA, 2202 bp, Homo sapiens
tcattagaaccttttttttttttaatgtggtctctccctttctctctccaaggtcacaagatttccctcagcccagtggttgtgcaactttgggggaggaggcaatggggctctaggactaaacaatgcgcgtctgctcaacacccagatcagttgattaatcttaggcggccaaaattcacttttgctctcttcagctgagagacccaagactcatggaagagggaacaagaccaccaaggtgcctagtccttctaatcctgtcgtcccacattacagcctgattatcaggccccagaggtttcctcgccagttaaagagaggttcactagagcggttctaaaaaggtttcacaaaagaagcaacacctgaagggaggtgaaggacgacctaggaaaaggaagcaagttctgtgtcacggaggcccaagggcaaggggcttaggctgtgggttgaggggactgtctgagacggacttaaacctgcaccagctccagagccctgcggaaacagagatcggtcccctccggcgtctaggtaaggcccaccctcccagaccgcaaagagccaggatccgacggcagcctctccggaccaatcacaaccttccttcatcaaggaggcggggtcggggggggctgacttttccttgtctccgcccctttagtcgaagtaaccaatctcagtgcacctaggggaagtaatcgcaatgggagtaaccaatgacgccatgaagcttctcgtgcgtgcttgaccctgcctctccagctgcgacacagatggcgcgcgggctcttgggttctgtagttttctcgcgatccaaaaggctccgtgcccaagtgagtccttaccgcctccctacccagcggcttcccctccgctagtacgcatgtccacagcttcacggaccgggagagagggggcgcggaaggaaggaggcgggacggtattacaaacaaaaaaatacggccttctcgagaagcgacggcggagggcccgctcctcccagaaggcggtgcagcctgcccgggcgagccacgcacgcagagggttgtggggcggatagctcccctccagatggaggctcacgaagtagggtgggcgggggactccatatcccagcgtgccccgcggcgggccctaccggccgcgactccgggcttggccccggccctagctcgtcggctgtgtattggggcgcgtggaggctgcagtcacggtggcgcccgcggggacggaggagggaatgagtgaagaggagcaaggctccggcactaccacgggctgcgggctgcctagtatagagcaaatgctggccgccaacccaggcaagaccccgatcagccttctgcaggagtatgggaccagaatagggaagacgcctgtgtacgaccttctcaaagccgagggccaagcccaccagcctaatttcaccttccgggtcaccgttggcgacaccagctgcactggtcagggccccagcaagaaggcagccaagcacaaggcagctgaggtggccctcaaacacctcaaaggggggagcatgctggagccggccctggaggacagcagttctttttctcccctagactcttcactgcctgaggacattccggtttttactgctgcagcagctgctaccccagttccatctgtagtcctaaccaggagcccccccatggaactgcagccccctgtctcccctcagcagtctgagtgcaaccccgttggtgctctgcaggagctggtggtgcagaaaggctggcggttgccggagtacacagtgacccaggagtctgggccagcccaccgcaaagaattcaccatgacctgtcgagtggagcgtttcattgagattgggagtggcacttccaaaaaattggcaaagcggaatgcggcggccaaaatgctgcttcaagtgaagccccagctggactcatggatgtgcaccctttgctccctgctctttctgcctctgggctcatgtatctgcgcagctctggtaccctctgtgggtgccatctctacctctgacacagactgcctgccttgaagctgagaaggcacagggcaaggagccaaggaccacagagcctcagccagcccaggatccgtcctcattttattggtgatgatgaatgggaatgaaatcagggggctgtctactagagcctggaataaatatgctgctttgtggatttt

SEQ ID NO: 78996 - DNA, 2462 bp, Homo sapiens
tcattagaaccttttttttttttaatgtggtctctccctttctctctccaaggtcacaagatttccctcagcccagtggttgtgcaactttgggggaggaggcaatggggctctaggactaaacaatgcgcgtctgctcaacacccagatcagttgattaatcttaggcggccaaaattcacttttgctctcttcagctgagagacccaagactcatggaagagggaacaagaccaccaaggtgcctagtccttctaatcctgtcgtcccacattacagcctgattatcaggccccagaggtttcctcgccagttaaagagaggttcactagagcggttctaaaaaggtttcacaaaagaagcaacacctgaagggaggtgaaggacgacctaggaaaaggaagcaagttctgtgtcacggaggcccaagggcaaggggcttaggctgtgggttgaggggactgtctgagacggacttaaacctgcaccagctccagagccctgcggaaacagagatcggtcccctccggcgtctaggtaaggcccaccctcccagaccgcaaagagccaggatccgacggcagcctctccggaccaatcacaaccttccttcatcaaggaggcggggtcggggggggctgacttttccttgtctccgcccctttagtcgaagtaaccaatctcagtgcacctaggggaagtaatcgcaatgggagtaaccaatgacgccatgaagcttctcgtgcgtgcttgaccctgcctctccagctgcgacacagatggcgcgcgggctcttgggttctgtagttttctcgcgatccaaaaggctccgtgcccaagtgagtccttaccgcctccctacccagcggcttcccctccgctagtacgcatgtccacagcttcacggaccgggagagagggggcgcggaaggaaggaggcgggacggtattacaaacaaaaaaatacggccttctcgagaagcgacggcggagggcccgctcctcccagaaggcggtgcagcctgcccgggcgagccacgcacgcagagggttgtggggcggatagctcccctccagatggaggctcacgaagtagggtgggcgggggactccatatcccagcgtgccccgcggcgggccctaccggccgcgactccgggcttggccccggccctagctcgtcggctgtgtattggggcgcgtggaggctgcagtcacggtggcgcccgcggggacggaggagggaatgagtgaagaggagcaaggctccggcactaccacgggctgcgggctgcctagtatagagcaaatgctggccgccaacccaggcaagaccccgatcagccttctgcaggagtatgggaccagaatagggaagacgcctgtgtacgaccttctcaaagccgagggccaagcccaccagcctaatttcaccttccgggtcaccgttggcgacaccagctgcactggtcagggccccagcaagaaggcagccaagcacaaggcagctgaggtggccctcaaacacctcaaaggggggagcatgctggagccggccctggaggacagcaggtgagggaggaaccgaggcatcccagaagcccttcaaggaacccaggccctgcaccacccactctgccccgaggcctggccaggtgacacttagccaccctgacctggcctcttcctgagagtccctctggacctgaacagggttttccagggcttctgctgctatgaagaattcttggggtggaggggttggttagccccatagaggggttgtggcagtaggttggggcctgggttagggagggagaggggtagaggcttgaggctaaagggagttactccccaacatacctccttgttctagcaagatgtccttccttcacgcgcaggttggagttagttgctcctcctggttcttgggtacaaagataccctcttctctgagactctcttttctcagtcttttcgccggtgtttggcagcaaaggatccgaggaggaagctgttggttgagcctccctgattctttggctcaatttggaagttctcttaggggattgggaggtcaggaggacgtgggtcccccacccctctcttccccctatacatgggtgtgaatcaaaggcccccttcccctcgggaagttcttctttttctcccctagactcttcactgcctgaggacattccggtttttactgctgcagcagctgctaccccagttccatctgtagtcctaaccaggtatctgtgtcccctgactgcctgaggtgggtggaggaaggggttctggtttttggtccctcagtccttggacccaagctggtcaggcatgaggaagtctgagaataaacagaatggaatagttgggaaccagaacttgaagaaatcacagcagctggtaagctcttggacacgaatgatcaggtaccgagctgattcgtatcagct

SEQ ID NO: 78997 - DNA, 3215 bp, Homo sapiens
tcattagaaccttttttttttttaatgtggtctctccctttctctctccaaggtcacaagatttccctcagcccagtggttgtgcaactttgggggaggaggcaatggggctctaggactaaacaatgcgcgtctgctcaacacccagatcagttgattaatcttaggcggccaaaattcacttttgctctcttcagctgagagacccaagactcatggaagagggaacaagaccaccaaggtgcctagtccttctaatcctgtcgtcccacattacagcctgattatcaggccccagaggtttcctcgccagttaaagagaggttcactagagcggttctaaaaaggtttcacaaaagaagcaacacctgaagggaggtgaaggacgacctaggaaaaggaagcaagttctgtgtcacggaggcccaagggcaaggggcttaggctgtgggttgaggggactgtctgagacggacttaaacctgcaccagctccagagccctgcggaaacagagatcggtcccctccggcgtctaggtaaggcccaccctcccagaccgcaaagagccaggatccgacggcagcctctccggaccaatcacaaccttccttcatcaaggaggcggggtcggggggggctgacttttccttgtctccgcccctttagtcgaagtaaccaatctcagtgcacctaggggaagtaatcgcaatgggagtaaccaatgacgccatgaagcttctcgtgcgtgcttgaccctgcctctccagctgcgacacagatggcgcgcgggctcttgggttctgtagttttctcgcgatccaaaaggctccgtgcccaagtgagtccttaccgcctccctacccagcggcttcccctccgctagtacgcatgtccacagcttcacggaccgggagagagggggcgcggaaggaaggaggcgggacggtattacaaacaaaaaaatacggccttctcgagaagcgacggcggagggcccgctcctcccagaaggcggtgcagcctgcccgggcgagccacgcacgcagagggttgtggggcggatagctcccctccagatggaggctcacgaagtagggtgggcgggggactccatatcccagcgtgccccgcggcgggccctaccggccgcgactccgggcttggccccggccctagctcgtcggctgtgtattggggcgcgtggaggctgcagtcacggtggcgcccgcggggacggaggagggaatgagtgaagaggagcaaggctccggcactaccacgggctgcgggctgcctagtatagagcaaatgctggccgccaacccaggcaagaccccgatcagccttctgcaggagtatgggaccagaatagggaagacgcctgtgtacgaccttctcaaagccgagggccaagcccaccagcctaatttcaccttccgggtcaccgttggcgacaccagctgcactggtcagggccccagcaagaaggcagccaagcacaaggcagctgaggtggccctcaaacacctcaaaggggggagcatgctggagccggccctggaggacagcagttctttttctcccctagactcttcactgcctgaggacattccggtttttactgctgcagcagctgctaccccagttccatctgtagtcctaaccaggtatctgtgtcccctgactgcctgaggtgggtggaggaaggggttctggtttttggtccctcagtccttggacccaagctggtcaggcatgaggaagtctgagaataaacagaatggaatagttgggaaccagaacttgaagaaatcacagcagctggtaagctcttgggacaagaggtcatttgtgattttcagacagccttatgaatgatgtccgaccatgtttaagggtcttgcaggccccattttcttctgggttgaccacatgtcagttctgtgtttgaggcccatcaggcacttctgggactggaaatacagctcttctcccactgtcctggcttagatgatacccaagtgttccagaatggaaatgggctggggcctggagaaggcctcccttgagtgggagggggaaggaagccggctagagcaggaggagcaggctagatgtgtggacagacagctccccacccggtggaatcgggagatggtagtcaggaatctaaagtagtggttaggtttggagctcatgggcaggctcagatggaacccttcacctcaactttggccctgtgccttttccttcaggagcccccccatggaactgcagccccctgtctcccctcagcagtctgagtgcaaccccgttggtgctctgcaggagctggtggtgcagaaaggctggcggttgccggagtacacagtgacccaggagtctgggccagcccaccgcaaagaattcaccatgacctgtcgagtggagcgtttcattgagattgggagtggcacttccaaaaaattggcaaagcggaatgcggcggccaaaatgctgcttcgagtgcacacggtgcctctggatgcccgggatggcaatgaggtggagcctgatgatgaccacttctccattggtgtgggctcccgcctggatggtcttcgaaaccggggcccaggttgcacctgggattctctacgaaattcagtaggagagaagatcctgtccctccgcagttgctccctgggctccctgggtgccctgggccctgcctgctgccgtgtcctcagtgagctctctgaggagcaggcctttcacgtcagctacctggatattgaggagctgagcctgagtggactctgccagtgcctggtggaactgtccacccagccggccactgtgtgtcatggctctgcaaccaccagggaggcagcccgtggtgaggctgcccgccgtgccctgcagtacctcaagatcatggcaggcagcaagtgaagccccagctggactcatggatgtgcaccctttgctccctgctctttctgcctctgggctcatgtatctgcgcagctctggtaccctctgtgggtgccatctctacctctgacacagactgcctgccttgaagctgagaaggcacagggcaaggagccaaggaccacagagcctcagccagcccaggatccgtcctcattttattggtgatgatgaatgggaatgaaatcagggggctgtctactagagcctggaataaatatgctgctttgtggatttt

SEQ ID NO: 78998 - DNA, 2499 bp, Homo sapiens
tcattagaaccttttttttttttaatgtggtctctccctttctctctccaaggtcacaagatttccctcagcccagtggttgtgcaactttgggggaggaggcaatggggctctaggactaaacaatgcgcgtctgctcaacacccagatcagttgattaatcttaggcggccaaaattcacttttgctctcttcagctgagagacccaagactcatggaagagggaacaagaccaccaaggtgcctagtccttctaatcctgtcgtcccacattacagcctgattatcaggccccagaggtttcctcgccagttaaagagaggttcactagagcggttctaaaaaggtttcacaaaagaagcaacacctgaagggaggtgaaggacgacctaggaaaaggaagcaagttctgtgtcacggaggcccaagggcaaggggcttaggctgtgggttgaggggactgtctgagacggacttaaacctgcaccagctccagagccctgcggaaacagagatcggtcccctccggcgtctaggtaaggcccaccctcccagaccgcaaagagccaggatccgacggcagcctctccggaccaatcacaaccttccttcatcaaggaggcggggtcggggggggctgacttttccttgtctccgcccctttagtcgaagtaaccaatctcagtgcacctaggggaagtaatcgcaatgggagtaaccaatgacgccatgaagcttctcgtgcgtgcttgaccctgcctctccagctgcgacacagatggcgcgcgggctcttgggttctgtagttttctcgcgatccaaaaggctccgtgcccaagtgagtccttaccgcctccctacccagcggcttcccctccgctagtacgcatgtccacagcttcacggaccgggagagagggggcgcggaaggaaggaggcgggacggtattacaaacaaaaaaatacggccttctcgagaagcgacggcggagggcccgctcctcccagaaggcggtgcagcctgcccgggcgagccacgcacgcagagggttgtggggcggatagctcccctccagatggaggctcacgaagtagggtgggcgggggactccatatcccagcgtgccccgcggcgggccctaccggccgcgactccgggcttggccccggccctagctcgtcggctgtgtattggggcgcgtggaggctgcagtcacggtggcgcccgcggggacggaggagggaatgagtgaagaggagcaaggctccggcactaccacgggctgcgggctgcctagtatagagcaaatgctggccgccaacccaggcaagaccccgatcagccttctgcaggagtatgggaccagaatagggaagacgcctgtgtacgaccttctcaaagccgagggccaagcccaccagcctaatttcaccttccgggtcaccgttggcgacaccagctgcactggtcagggccccagcaagaaggcagccaagcacaaggcagctgaggtggccctcaaacacctcaaaggggggagcatgctggagccggccctggaggacagcagttctttttctcccctagactcttcactgcctgaggacattccggtttttactgctgcagcagctgctaccccagttccatctgtagtcctaaccaggagcccccccatggaactgcagccccctgtctcccctcagcagtctgagtgcaaccccgttggtgctctgcaggagctggtggtgcagaaaggctggcggttgccggagtacacagtgacccaggagtctgggccagcccaccgcaaagaattcaccatgacctgtcgagtggagcgtttcattgagattgggtgtgggctcccgcctggatggtcttcgaaaccggggcccaggttgcacctgggattctctacgaaattcagtaggagagaagatcctgtccctccgcagttgctccctgggctccctgggtgccctgggccctgcctgctgccgtgtcctcagtgagctctctgaggagcaggcctttcacgtcagctacctggatattgaggagctgagcctgagtggactctgccagtgcctggtggaactgtccacccagccggccactgtgtgtcatggctctgcaaccaccagggaggcagcccgtggtgaggctgcccgccgtgccctgcagtacctcaagatcatggcaggcagcaagtgaagccccagctggactcatggatgtgcaccctttgctccctgctctttctgcctctgggctcatgtatctgcgcagctctggtaccctctgtgggtgccatctctacctctgacacagactgcctgccttgaagctgagaaggcacagggcaaggagccaaggaccacagagcctcagccagcccaggatccgtcctcattttattggtgatgatgaatgggaatgaaatcagggggctgtctactagagcctggaataaatatgctgctttgtggatttt

SEQ ID NO: 78999 - DNA, 3214 bp, Homo sapiens
tcattagaaccttttttttttttaatgtggtctctccctttctctctccaaggtcacaagatttccctcagcccagtggttgtgcaactttgggggaggaggcaatggggctctaggactaaacaatgcgcgtctgctcaacacccagatcagttgattaatcttaggcggccaaaattcacttttgctctcttcagctgagagacccaagactcatggaagagggaacaagaccaccaaggtgcctagtccttctaatcctgtcgtcccacattacagcctgattatcaggccccagaggtttcctcgccagttaaagagaggttcactagagcggttctaaaaaggtttcacaaaagaagcaacacctgaagggaggtgaaggacgacctaggaaaaggaagcaagttctgtgtcacggaggcccaagggcaaggggcttaggctgtgggttgaggggactgtctgagacggacttaaacctgcaccagctccagagccctgcggaaacagagatcggtcccctccggcgtctaggtaaggcccaccctcccagaccgcaaagagccaggatccgacggcagcctctccggaccaatcacaaccttccttcatcaaggaggcggggtcggggggggctgacttttccttgtctccgcccctttagtcgaagtaaccaatctcagtgcacctaggggaagtaatcgcaatgggagtaaccaatgacgccatgaagcttctcgtgcgtgcttgaccctgcctctccagctgcgacacagatggcgcgcgggctcttgggttctgtagttttctcgcgatccaaaaggctccgtgcccaagtgagtccttaccgcctccctacccagcggcttcccctccgctagtacgcatgtccacagcttcacggaccgggagagagggggcgcggaaggaaggaggcgggacggtattacaaacaaaaaaatacggccttctcgagaagcgacggcggagggcccgctcctcccagaaggcggtgcagcctgcccgggcgagccacgcacgcagagggttgtggggcggatagctcccctccagatggaggctcacgaagtagggtgggcgggggactccatatcccagcgtgccccgcggcgggccctaccggccgcgactccgggcttggccccggccctagctcgtcggctgtgtattggggcgcgtggaggctgcagtcacggtggcgcccgcggggacggaggagggaatgagtgaagaggagcaaggctccggcactaccacgggctgcgggctgcctagtatagagcaaatgctggccgccaacccaggcaagaccccgatcagccttctgcaggagtatgggaccagaatagggaagacgcctgtgtacgaccttctcaaagccgagggccaagcccaccagcctaatttcaccttccgggtcaccgttggcgacaccagctgcactggtcagggccccagcaagaaggcagccaagcacaaggcagctgaggtggccctcaaacacctcaaaggggggagcatgctggagccggccctggaggacagcaggtgagggaggaaccgaggcatcccagaagcccttcaaggaacccaggccctgcaccacccactctgccccgaggcctggccaggtgacacttagccaccctgacctggcctcttcctgagagtccctctggacctgaacagggttttccagggcttctgctgctatgaagaattcttggggtggaggggttggttagccccatagaggggttgtggcagtaggttggggcctgggttagggagggagaggggtagaggcttgaggctaaagggagttactccccaacatacctccttgttctagcaagatgtccttccttcacgcgcaggttggagttagttgctcctcctggttcttgggtacaaagataccctcttctctgagactctcttttctcagtcttttcgccggtgtttggcagcaaaggatccgaggaggaagctgttggttgagcctccctgattctttggctcaatttggaagttctcttaggggattgggaggtcaggaggacgtgggtcccccacccctctcttccccctatacatgggtgtgaatcaaaggcccccttcccctcgggaagttcttctttttctcccctagactcttcactgcctgaggacattccggtttttactgctgcagcagctgctaccccagttccatctgtagtcctaaccaggagcccccccatggaactgcagccccctgtctcccctcagcagtctgagtgcaaccccgttggtgctctgcaggagctggtggtgcagaaaggctggcggttgccggagtacacagtgacccaggagtctgggccagcccaccgcaaagaattcaccatgacctgtcgagtggagcgtttcattgagattgggagtggcacttccaaaaaattggcaaagcggaatgcggcggccaaaatgctgcttcgagtgcacacggtgcctctggatgcccgggatggcaatgaggtggagcctgatgatgaccacttctccattggtgtgggctcccgcctggatggtcttcgaaaccggggcccaggttgcacctgggattctctacgaaattcagtaggagagaagatcctgtccctccgcagttgctccctgggctccctgggtgccctgggccctgcctgctgccgtgtcctcagtgagctctctgaggagcaggcctttcacgtcagctacctggatattgaggagctgagcctgagtggactctgccagtgcctggtggaactgtccacccagccggccactgtgtgtcatggctctgcaaccaccagggaggcagcccgtggtgaggctgcccgccgtgccctgcagtacctcaagatcatggcaggcagcaagtgaagccccagctggactcatggatgtgcaccctttgctccctgctctttctgcctctgggctcatgtatctgcgcagctctggtaccctctgtgggtgccatctctacctctgacacagactgcctgccttgaagctgagaaggcacagggcaaggagccaaggaccacagagcctcagccagcccaggatccgtcctcattttattggtgatgatgaatgggaatgaaatcagggggctgtctactagagcctggaataaatatgctgctttgtggatttt

SEQ ID NO: 79000 - DNA, 2597 bp, Homo sapiens
  misc_feature (27)..(27): n is a, c, g, or t
gcagtgctggtactggtcccagtgttntgatggcgggccctaccggccgcgactccgggcttggccccggccctagctcgtcggctgtgtattggggcgcgtggaggctgcagtcacggtggcgcccgcggggacggaggagggaatgagtgaagaggagcaaggctccggcactaccacgggctgcgggctgcctagtatagagcaaatgctggccgccaacccaggcaagaccccgatcagccttctgcaggagtatgggaccagaatagggaagacgcctgtgtacgaccttctcaaagccgagggccaagcccaccagcctaatttcaccttccgggtcaccgttggcgacaccagctgcactggtcagggccccagcaagaaggcagccaagcacaaggcagctgaggtggccctcaaacacctcaaaggggggagcatgctggagccggccctggaggacagcaggtgagggaggaaccgaggcatcccagaagcccttcaaggaacccaggccctgcaccacccactctgccccgaggcctggccaggtgacacttagccaccctgacctggcctcttcctgagagtccctctggacctgaacagggttttccagggcttctgctgctatgaagaattcttggggtggaggggttggttagccccatagaggggttgtggcagtaggttggggcctgggttagggagggagaggggtagaggcttgaggctaaagggagttactccccaacatacctccttgttctagcaagatgtccttccttcacgcgcaggttggagttagttgctcctcctggttcttgggtacaaagataccctcttctctgagactctcttttctcagtcttttcgccggtgtttggcagcaaaggatccgaggaggaagctgttggttgagcctccctgattctttggctcaatttggaattctttttctcccctagactcttcactgcctgaggacattccggtttttactgctgcagcagctgctaccccagttccatctgtagtcctaaccaggtatctgtgtcccctgactgcctgaggtgggtggaggaaggggttctggtttttggtccctcagtccttggacccaagctggtcaggcatgaggaagtctgagaataaacagaatggaatagttgggaaccagaacttgaagaaatcacagcagctggtaagctcttgggacaagaggtcatttgtgattttcagacagccttatgaatgatgtccgaccatgtttaagggtcttgcaggccccattttcttctgggttgaccacatgtcagttctgtgtttgaggcccatcaggcacttctgggactggaaatacagctcttctcccactgtcctggcttagatgatacccaagtgttccagaatggaaatgggctggggcctggagaaggcctcccttgagtgggagggggaaggaagccggctagagcaggaggagcaggctagatgtgtggacagacagctccccacccggtggaatcgggagatggtagtcaggaatctaaagtagtggttaggtttggagctcatgggcaggctcagatggaacccttcacctcaactttggccctgtgccttttccttcaggagcccccccatggaactgcagccccctgtctcccctcagcagtctgagtgcaaccccgttggtgctctgcaggagctggtggtgcagaaaggctggcggttgccggagtacacagtgacccaggagtctgggccagcccaccgcaaagaattcaccatgacctgtcgagtggagcgtttcattgagattgggagtggcacttccaaaaaattggcaaagcggaatgcggcggccaaaatgctgcttcgagtgcacacggtgcctctggatgcccgggatggcaatgaggtggagcctgatgatgaccacttctccattggtgtgggctcccgcctggatggtcttcgaaaccggggcccaggttgcacctgggattctctacgaaattcagtaggagagaagatcctgtccctccgcagttgctccctgggctccctgggtgccctgggccctgcctgctgccgtgtcctcagtgagctctctgaggagcaggcctttcacgtcagctacctggatattgaggagctgagcctgagtggactctgccagtgcctggtggaactgtccacccagccggccactgtgtgtcatggctctgcaaccaccagggaggcagcccgtggtgaggctgcccgccgtgccctgcagtacctcaagatcatggcaggcagcaagtgaagccccagctggactcatggatgtgcaccctttgctccctgctctttctgcctctgggctcatgtatctgcgcagctctggtaccctctgtgggtgccatctctacctctgacacagactgcctgccttgaagctgagaaggcacagggcaaggagccaaggaccacagagcctcagccagcccaggatccgtcctcattttattggtgatgatgaatgggaatgaaatcagggggctgtctactagagcctggaataaatatgctgctttgtggatttt

SEQ ID NO: 79001 - DNA, 1097 bp, Homo sapiens
  misc_feature (34)..(34): n is a, c, g, or t
  misc_feature (61)..(61): n is a, c, g, or t
  misc_feature (71)..(71): n is a, c, g, or t
  misc_feature (76)..(76): n is a, c, g, or t
  misc_feature (80)..(80): n is a, c, g, or t
  misc_feature (92)..(92): n is a, c, g, or t
  misc_feature (108)..(108): n is a, c, g, or t
  misc_feature (130)..(130): n is a, c, g, or t
  misc_feature (133)..(133): n is a, c, g, or t
  misc_feature (161)..(161): n is a, c, g, or t
  misc_feature (195)..(197): n is a, c, g, or t
  misc_feature (199)..(201): n is a, c, g, or t
cgcgactgtaggccagcaaagagcagacagcgtnagtgcctaacactcaagggggagtgancgcctgagangagtntttnccctaatcttangctagacatccgtttnacgcgcgcgtgtacccagtccnttnagtctaccagagccccccatggacgcanccccttctcccctcagcattctaatgcaaccccnnncnnntctgcagggggagctggtggtgcagaaaggctggcggttgccggagtacacagtgacccaggagtctgggccagcccaccgcaaagaattcaccatgacctgtcgagtggagcgtttcattgagattgggagtggcacttccaaaaaattggcaaagcggaatgcggcggccaaaatgctgcttcgagtgcacacggtgcctctggatgcccgggatggcaatgaggtggagcctgatgatgaccacttctccattggtgtgggctcccgcctggatggtcttcgaaaccggggcccaggttgcacctgggattctctacgaaattcagtaggagagaagatcctgtccctccgcagttgctccctgggctccctgggtgccctgggccctgcctgctgccgtgtcctcagtgagctctctgaggagcaggcctttcacgtcagctacctggatattgaggagctgagcctgagtggactctgccagtgcctggtggaactgtccacccagccggccactgtgtgtcatggctctgcaaccaccagggaggcagcccgtggtgaggctgcccgccgtgccctgcagtacctcaagatcatggcaggcagcaagtgaagccccagctggactcatggatgtgcaccctttgctccctgctctttctgcctctgggctcatgtatctgcgcagctctggtaccctctgtgggtgccatctctacctctgacacagactgcctgccttgaagctgagaaggcacagggcaaggagccaaggaccacagagcctcagccagcccaggatccgtcctcattttattggtgatgatgaatgggaatgaaatcagggggctgtctactagagcctggaataaatatgctgctttgtggatttt

SEQ ID NO: 79002 - DNA, 812 bp, Homo sapiens
gttttccccctggcctgttcaagagagccgttccgtaaaaatggggaggggccttttccaaaaattggcagaacgggataggggggccaaaattgtcgctttgggggacccgggtgcctttgacggccgggaaggcatgagaggggacccggatgtgaccccttcccccattggtgtgggctcccgcctggatggtcttcgaaaccggggcccaggttgcacctgggattctctacgaaattcagtaggagagaagatcctgtccctccgcagttgctccctgggctccctgggtgccctgggccctgcctgctgccgtgtcctcagtgagctctctgaggagcaggcctttcacgtcagctacctggatattgaggagctgagcctgagtggactctgccagtgcctggtggaactgtccacccagccggccactgtgtgtcatggctctgcaaccaccagggaggcagcccgtggtgaggctgcccgccgtgccctgcagtacctcaagatcatggcaggcagcaagtgaagccccagctggactcatggatgtgcaccctttgctccctgctctttctgcctctgggctcatgtatctgcgcagctctggtaccctctgtgggtgccatctctacctctgacacagactgcctgccttgaagctgagaaggcacagggcaaggagccaaggaccacagagcctcagccagcccaggatccgtcctcattttattggtgatgatgaatgggaatgaaatcagggggctgtctactagagcctggaataaatatgctgctttgtggatttt

SEQ ID NO: 79003 - DNA, 2468 bp, Homo sapiens
tcattagaaccttttttttttttaatgtggtctctccctttctctctccaaggtcacaagatttccctcagcccagtggttgtgcaactttgggggaggaggcaatggggctctaggactaaacaatgcgcgtctgctcaacacccagatcagttgattaatcttaggcggccaaaattcacttttgctctcttcagctgagagacccaagactcatggaagagggaacaagaccaccaaggtgcctagtccttctaatcctgtcgtcccacattacagcctgattatcaggccccagaggtttcctcgccagttaaagagaggttcactagagcggttctaaaaaggtttcacaaaagaagcaacacctgaagggaggtgaaggacgacctaggaaaaggaagcaagttctgtgtcacggaggcccaagggcaaggggcttaggctgtgggttgaggggactgtctgagacggacttaaacctgcaccagctccagagccctgcggaaacagagatcggtcccctccggcgtctaggtaaggcccaccctcccagaccgcaaagagccaggatccgacggcagcctctccggaccaatcacaaccttccttcatcaaggaggcggggtcggggggggctgacttttccttgtctccgcccctttagtcgaagtaaccaatctcagtgcacctaggggaagtaatcgcaatgggagtaaccaatgacgccatgaagcttctcgtgcgtgcttgaccctgcctctccagctgcgacacagatggcgcgcgggctcttgggttctgtagttttctcgcgatccaaaaggctccgtgcccaagtgagtccttaccgcctccctacccagcggcttcccctccgctagtacgcatgtccacagcttcacggaccgggagagagggggcgcggaaggaaggaggcgggacggtattacaaacaaaaaaatacggccttctcgagaagcgacggcggagggcccgctcctcccagaaggcggtgcagcctgcccgggcgagccacgcacgcagagggttgtggggcggatagctcccctccagatggaggctcacgaagtagggtgggcgggggactccatatcccagcgtgccccgcggcgggccctaccggccgcgactccgggcttggccccggccctagctcgtcggctgtgtattggggcgcgtggaggctgcagtcacggtggcgcccgcggggacggaggagggaatgagtgaagaggagcaaggctccggcactaccacgggctgcgggctgcctagtatagagcaaatgctggccgccaacccaggcaagaccccgatcagccttctgcaggagtatgggaccagaatagggaagacgcctgtgtacgaccttctcaaagccgagggccaagcccaccagcctaatttcaccttccgggtcaccgttggcgacaccagctgcactggtcagggccccagcaagaaggcagccaagcacaaggcagctgaggtggccctcaaacacctcaaaggggggagcatgctggagccggccctggaggacagcagttctttttctcccctagactcttcactgcctgaggacattccggtttttactgctgcagcagctgctaccccagttccatctgtagtcctaaccaggagcccccccatggaactgcagccccctgtctcccctcagcagtctgagtgcaaccccgttggtgctctgcagagtctgaggctcctgcgtggggaccagcgtgggtgtgagaagccttttttcactcagcctcatgcaccctgtgtctcccttccaaggagctggtggtgcagaaaggctggcggttgccggagtacacagtgacccaggagtctgggccagcccaccgcaaagaattcaccatgacctgtcgagtggagcgtttcattgagattgggagtggcacttccaaaaaattggcaaagcggaatgcggcggccaaaatgctgcttcgagtgcacacggtgcctctggatgcccgggatggcaatgaggtggagcctgatgatgaccacttctccattggtgtgggctcccgcctggatggtcttcgaaaccggggcccaggttgcacctgggattctctacgaaattcagtaggagagaagatcctgtccctccgcagttgctccctgggctccctgggtgccctgggccctgcctgctgccgtgtctccctgctctttctgcctctgggctcatgtatctgcgcagctctggtaccctctgtgggtgccatctctacctctgacacagactgcctgccttgaagctgagaaggcacagggcaaggagccaaggaccacagagcctcagccagcccaggatccgtcctcattttattggtgatgatgaatgggaatgaaatcagggggctgtctactagagcctggaataaatatgctgctttgtggatttt

SEQ ID NO: 79004 - DNA, 579 bp, Homo sapiens
attttgtcctgtcttgtggatgttccatggcggacagacaggctgaacaaacaaagggtgtgcaaagaagcccagagcaggagagaaggctccccagcctggctcttggtcagcacagtcacaggctggctctgcctctcttggctgcactgtcctgaagcaggaaatatgagaaaaacaagtaaagggaaaacaagtccagttggagctatgataacattatctgcaaggccaggcaggggccccaaagaaatgggatccaagagcagggacgagaaaagcaagttcttagtctccccctggaattctttccccatgccatcattctttgttctgctcttataactatttttgtaactatttctgcaagtttgcaaggattttataagttcatgttttcccatctatgcaggatggcaaaggtcacaagacatgcctgaattgcaaaacctgtcacagtttgattaactgcctttgttctgcttctgtaagctcgctttccccaccccgcaagttttgcaccactggctagccactccccttcagtcgcctgaataaaagtcaagcctgatctttgtt

SEQ ID NO: 79005 - DNA, 763 bp, Homo sapiens
gaaaaagttcccacgtggtcaactggacaagcagggcaggcaaggccaagccagggctggccaagcccacccatctgcttcagggagttactgtgagtttagtatgtgtgtgcatttccactaaagaggctgacactaaaggtttgagacacacacatacagaacagtgggaaaacactgattttggagacaggtcaaatgctcaacacccccatttattggctgagaggccttgggagagtttcttaactcctctgagcctgtttcttcttcatgtgaataggagatctagtaatacccaacttgctaggttaatatgaggattgaacaaaatgtatacacctgtctagctcagagcccaggacacgtaaatactcaataaaagttaagaggataaagcagtgcatatgtggatgtaacagcagcatataaccccagtttaatactcatgtgagtctgaacaaaacactgagggaactcatctttgaggaatgagtggaatttctatctgtccacctccaggaaatctcctcttattgcctcagtgttctctccttcctctgagtttcagtagcacttaatgacttagcacaagtcacctggattatttatgagcttttaaatatacacttgtcagccgggcgcagtgactcatgcctgtaatcccagcactttaggaggcctaggcgggtggatcacttgaggtcgggagttggaaaccagcctgaccaacatggtaaaactccgtctctactaaaaatac

SEQ ID NO: 79006 - DNA, 456 bp, Homo sapiens
caaatgacccaacaccaagtatgaaggtgtctaaatgagaaacggttaggataaccttcttatatcaactacttcttttgtttctcctactcaagctgatgtttccacctcataaaacaatactaggttccctctatcatcacctacaggcctcctaccctccagaaagatgttaagtagaagatggtgctaaagcccatgggaactcatcaagttttataaattcttctcagagtcctcggaagtctcagcaggttctagtttagttcacaggccagtctactttgtaacaaaaagttgtttgctgttgctattgtttttaaaaggttagaggtgtaggactggaaaagacgtataccctgaaaatatttccaaaaatgttttagctagaaaagtgagtaacaacttggaatattaagagtatgtatttatgtgtgtgtatgtatgtgtttgcac

SEQ ID NO: 79007 - DNA, 330 bp, Homo sapiens
tctcccttctctggcctggctccatcccaaggcaagagagtaaaggttctctctttggaggaagggggcagtttgaggaaaaagagctccaaatcctgacactggctgggttccctctgtgttccacacggtgaagcccatcagtcaacaggtctcggcagtgcaccagaacattcagtcagcatttttgtgcctcattcttaaatggtacatacagaaggtcaagatttctggatatttgcagaatgcatccggcatgaaaaacagagaccaaaacaaacaaagaaaagggactcagagggaaaagaagcaatactcggaggaaaagac

SEQ ID NO: 79008 - DNA, 177 bp, Homo sapiens
gttggaagtagccctgggtttaattgctctgatgtcctaactaatgatgatcctaatattgaactcactgctgctcatcggagtcctagatctccatcaggtgggagaagtgggatttgttggcctacctttgcttcagctcataacatggcaccccgaaagccccatgcaggaatc

SEQ ID NO: 79009 - DNA, 253 bp, Homo sapiens
gccactccagccctcttccagccacatacccacaaagccaaggaatctatgcagaaatagaacatagggctccagagctggtggccccattcctagaccacagtttaaattcccaggattccagactaccttgcttgaatggctggctctaagctctcttccaggacttgggtaggattcttcctaggtccatcccccagggaagattgcctctagtgttttcaatcctaagagcaagatgtgccaaagccag

SEQ ID NO: 79010 - DNA, 398 bp, Homo sapiens
ggtttcggggtgaaatgcagggggttttagagataagcttgaggaggcggtgtctggtttacatggggcgtgcaagattggtcagatcaggtgtgttctttgcatgaggagtgagatactggttaggactaggtgtgccatttgcatagggcatgaatttctggcctcccccagcctacacttttattatgcagatgggttcgctgcctggctggtaccatgttgcccattcctttactgtacacgtggtaacaaaaaagggaagatggagcctccatgttggacatgcctggccaccaggtagctcttttctattggcgcagctgctgcattccctcatgcaagcttccggcttctctatgttcgcatttccatttttcaggctgctctttgttagg

SEQ ID NO: 79011 - DNA, 880 bp, Homo sapiens
ccagactataaattgggacagctgagcttgcagaatccagacaaccaaactccatcaatcaagaggaacttaatccagggttcttctgctcactgggtcagaagcatccgatttcctgtcatcggttgcggttcagccatgttaatactgaaagtataagaatatcataatcccagagtgatataaagacctttccaaggaagatgagatacccggaggctgtgaaggagaagtctgaaggatttgaacgcgttcaaatgaaaacctttggttcagcaaaacaccagaaacaaattcaaaagataaaatacactccggagaagcccattctctcaacgcatctgacagttcacaaagagcaactgcagtccaacttaaaaaataaagaaaatggtaggaaaatgggcaacatgcactgaggcaatatataagaagaaggaatgcgcaattaatcaacaaaagcctgctctttcctaacgagtgaagatacaagcttagtaaatattaaaatttattgaagataaaaatggacacttccggccatatataaaagcattgttggtaagagagtggggtaattgacatgctcctgggaaataatacgcattcagacaacctctaatgagtgaatccactgggggtatccactaggaatagaaaacgaccaccaatgcccaagtttgtggtccagaatttgagcagcgatctaacaaagtagagtctccccctgtgtcatgggccccacttcttaagcaaagaagaatgcctcattttggtaactcacccaaataaacagaaattttttttgataaacagagaatactcaagtaagcaaagagaaagagaaaaaagaaaaaaaagaggggggcgcgaaaaaccg

SEQ ID NO: 79012 - DNA, 380 bp, Homo sapiens
tatttgcccatttgttgattgcatgcaattaaggtagaattcacttttagataggtttttttaaatttaactctaacatgaatgctattgtttgaatgattacagcaattttatttggttctaaatggcttcattgttattttattaaggatgagagcgctcagatgtaatagttcttcagcaccatcttggaaaaaaaatttctcaaagcccaaagcttaaacactgtttttccacccacagatcttaccataatttctctagaataaaactagactgatgcagattttgtagtatattaaaaatagctcacgtgaatcattgtagaggccagaatatgtagagacttgagtattaatctaaagtaggaaaaggaaacc

SEQ ID NO: 79013 - DNA, 3954 bp, Homo sapiens
gcggtggcgcgggagcggccccggggaccccgcgctgctgacggcggcgaccgcggccggaggcgggcgcgggtctcggaggcggtcgcctcagcaccgccccacgggcggccccagcccctcccgcagccctcctccctcccgctcccttcccgccgcctcctccccgccctcctccctcctcgctcgcgggccgggcccggcatggtgcggcgtcgccgccgatggcgctgaggcggagcatggggcggccggggctcccgccgctgccgctgccgccgccaccgcggctcgggctgctgctggcggctctggcttctctgctgctcccggagtccgccgccgcaggtctgaagctcatgggagccccggtgaagctgacagtgtctcaggggcagccggtgaagctcaactgcagtgtggaggggatggaggagcctgacatccagtgggtgaaggatggggctgtggtccagaacttggaccagttgtacatcccagtcagcgagcagcactggatcggcttcctcagcctgaagtcagtggagcgctctgacgccggccggtactggtgccaggtggaggatgggggtgaaaccgagatctcccagccagtgtggctcacggtagaaggtgtgccatttttcacagtggagccaaaagatctggcagtgccacccaatgcccctttccaactgtcttgtgaggctgtgggtccccctgaacctgttaccattgtctggtggagaggaactacgaagatcgggggacccgctccctctccatctgttttaaatgtaacaggggtgacccagagcaccatgttttcctgtgaagctcacaacctaaaaggcctggcctcttctcgcacagccactgttcaccttcaagcactgcctgcagcccccttcaacatcaccgtgacaaagctttccagcagcaacgctagtgtggcctggatgccaggtgctgatggccgagctctgctacagtcctgtacagttcaggtgacacaggccccaggaggctgggaagtcctggctgttgtggtccctgtgcccccctttacctgcctgctccgggacctggtgcctgccaccaactacagcctcagggtgcgctgtgccaatgccttggggccctctccctatgctgactgggtgccctttcagaccaagggtctagccccagccagcgctccccaaaacctccatgccatccgcacagattcaggcctcatcttggagtgggaagaagtgatccccgaggcccctttggaaggccccctgggaccctacaaactgtcctgggttcaagacaatggaacccaggatgagctgacagtggaggggaccagggccaatttgacaggctgggatccccaaaaggacctgatcgtacgtgtgtgcgtctccaatgcagttggctgtggaccctggagtcagccactggtggtctcttctcatgaccgtgcaggccagcagggccctcctcacagccgcacatcctgggtacctgtggtccttggtgtgctaacggccctggtgacggctgctgccctggccctcatcctgcttcgaaagagacggaaagagacgcggtttgggcaagcctttgacagtgtcatggcccggggagagccagccgttcacttccgggcagcccggtccttcaatcgagaaaggcccgagcgcatcgaggccacattggacagcttgggcatcagcgatgaactaaaggaaaaactggaggatgtgctcatcccagagcagcagttcaccctgggccggatgttgggcaaaggagagtttggttcagtgcgggaggcccagctgaagcaagaggatggctcctttgtgaaagtggctgtgaagatgctgaaagctgacatcattgcctcaagcgacattgaagagttcctcagggaagcagcttgcatgaaggagtttgaccatccacacgtggccaaacttgttggggtaagcctccggagcagggctaaaggccgtctccccatccccatggtcatcttgcccttcatgaagcatggggacctgcatgccttcctgctcgcctcccggattggggagaacccctttaacctacccctccagaccctgatccggttcatggtggacattgcctgcggcatggagtacctgagctctcggaacttcatccaccgagacctggctgctcggaattgcatgctggcagaggacatgacagtgtgtgtggctgacttcggactctcccggaagatctacagtggggactactatcgtcaaggctgtgcctccaaactgcctgtcaagtggctggccctggagagcctggccgacaacctgtatactgtgcagagtgacgtgtgggcgttcggggtgaccatgtgggagatcatgacacgtgggcagacgccatatgctggcatcgaaaacgctgagatttacaactacctcattggcgggaaccgcctgaaacagcctccggagtgtatggaggacgtgtatgatctcatgtaccagtgctggagtgctgaccccaagcagcgcccgagctttacttgtctgcgaatggaactggagaacatcttgggccagctgtctgtgctatctgccagccaggaccccttatacatcaacatcgagagagctgaggagcccactgcgggaggcagcctggagctacctggcagggatcagccctacagtggggctggggatggcagtggcatgggggcagtgggtggcactcccagtgactgtcggtacatactcacccccggagggctggctgagcagccagggcaggcagagcaccagccagagagtcccctcaatgagacacagaggcttttgctgctgcagcaagggctactgccacacagtagctgttagcccacaggcagagggcatcggggccatttggccggctctggtggccactgagctggctgactaagccccgtctgaccccagcccagacagcaaggtgtggaggctcctgtggtagtcctcccaagctgtgctgggaagcccggactgaccaaatcacccaatcccagttcttcctgcaaccactctgtggccagcctggcatcagtttaggccttggcttgatggaagtgggccagtcctggttgtctgaacccaggcagctggcaggagtggggtggttatgtttccatggttaccatgggtgtggatggcagtgtggggagggcaggtccagctctgtgggccctaccctcctgctgagctgcccctgctgcttaagtgcatgcattgagctgcctccagcctggtggcccagctattaccacacttggggtttaaatatccaggtgtgcccctccaagtcacaaagagatgtccttgtaatattcccttttaggtgagggttggtaaggggttggtatctcaggtctgaatcttcaccatctttctgattccgcaccctgcctacgccaggagaagttgaggggagcatgcttccctgcagctgaccgggtcacacaaaggcatgctggagtacccagcctatcaggtgcccctcttccaaaggcagcgtgccgagccagcaagaggaaggggtgctgtgaggcttgcccaggagcaagtgaggccggagaggagttcaggaacccttctccatacccacaatctgagcacgctaccaaatctcaaaatatcctaagactaacaaaggcagctgtgtctgagcccaacccttctaaacggtgacctttagtgccaacttcccctctaactggacagcctcttctgtcccaagtctccagagagaaatcaggcctgatgagggggaattcctggaacctggaccccagccttggtgggggagcctctggaatgcatggggcgggtcctagctgttagggacatttccaagctgttagttgctgtttaaaatagaaataaaattgaagactaaaga

SEQ ID NO: 79014 - DNA, 4345 bp, Homo sapiens
cattagatctttacatgaaagtaaaatttataagatttctagaaagtcaaaagatgataactatttcttaggatactaaaagcactcacattatagaaaaaaaatcagttaactatactccacaaacattaaaggctccctataaaaaaacatttttaataggcaagccacagaaagggcaaatattaatagtttgcaatacatatgtatgaaaaggaattgaatctagaatatttaacaaagctttacaactcaaaaaatacaaagaaaatatttttcttccaattggcaaattacttaaacagaaccttcacaaaagaagataagaatgtttaataaacatttgaagccataataatgacatcattagccatgatggaaatgcaaatttaagtaccacttcacatccacaagaaaaagataaaaataaaaggactgagctcaccaaacattggtgaggatgtggtaatactgaaattcttgtaccgtgctcctgagggtataacatattacaggatttttttgaaaactagtggttccttataaacttaatgccctggcaacctcacacctatttacttaagaatgaaagggccccgccctcctccctcctcgctcgcgggccgggcccggcatggtgcggcgtcgccgccgatggcgctgaggcggagcatggggcggccggggctcccgccgctgccgctgccgccgccaccgcggctcgggctgctgctggcgggtctgaagctcatgggagccccggtgaagctgacagtgtctcaggggcagccggtgaagctcaactgcagtgtggaggggatggaggagcctgacatccagtgggtgaaggatggggctgtggtccagaacttggaccagttgtacatcccagtcagcgagcagcactggatcggcttcctcagcctgaagtcagtggagcgctctgacgccggccggtactggtgccaggtggaggatgggggtgaaaccgagatctcccagccagtgtggctcacggtagaaggtgtgccatttttcacagtggagccaaaagatctggcagtgccacccaatgcccctttccaactgtcttgtgaggctgtgggtccccctgaacctgttaccattgtctggtggagaggaactacgaagatcgggggacccgctccctctccatctgttttaaatgtaacaggggtgacccagagcaccatgttttcctgtgaagctcacaacctaaaaggcctggcctcttctcgcacagccactgttcaccttcaagcactgcctgcagcccccttcaacatcaccgtgacaaagctttccagcagcaacgctagtgtggcctggatgccaggtgctgatggccgagctctgctacagtcctgtacagttcaggtgacacaggccccaggaggctgggaagtcctggctgttgtggtccctgtgcccccctttacctgcctgctccgggacctggtgcctgccaccaactacagcctcagggtgcgctgtgccaatgccttggggccctctccctatgctgactgggtgccctttcagaccaagggtctagccccagccagcgctccccaaaacctccatgccatccgcacagattcaggcctcatcttggagtgggaagaagtgatccccgaggcccctttggaaggccccctgggaccctacaaactgtcctgggttcaagacaatggaacccaggatgagctgacagtggaggggaccagggccaatttgacaggctgggatccccaaaaggacctgatcgtacgtgtgtgcgtctccaatgcagttggctgtggaccctggagtcagccactggtggtctcttctcatgaccgtgcaggccagcagggccctcctcacagccgcacatcctgggtacctgtggtccttggtgtgctaacggccctggtgacggctgctgccctggccctcatcctgcttcgaaagagacggaaagagacgcggtttgggcaagcctttgacagtgtcatggcccggggagagccagccgttcacttccgggcagcccggtccttcaatcgagaaaggcccgagcgcatcgaggccacattggacagcttgggcatcagcgatgaactaaaggaaaaactggaggatgtgctcatcccagagcagcagttcaccctgggccggatgttgggcaaaggagagtttggttcagtgcgggaggcccagctgaagcaagaggatggctcctttgtgaaagtggctgtgaagatgctgaaagctgacatcattgcctcaagcgacattgaagagttcctcagggaagcagcttgcatgaaggagtttgaccatccacacgtggccaaacttgttggggtaagcctccggagcagggctaaaggccgtctccccatccccatggtcatcttgcccttcatgaagcatggggacctgcatgccttcctgctcgcctcccggattggggagaacccctttaacctacccctccagaccctgatccggttcatggtggacattgcctgcggcatggagtacctgagctctcggaacttcatccaccgagacctggctgctcggaattgcatgctggcagaggacatgacagtgtgtgtggctgacttcggactctcccggaagatctacagtggggactactatcgtcaaggctgtgcctccaaactgcctgtcaagtggctggccctggagagcctggccgacaacctgtatactgtgcagagtgacgtgtgggcgttcggggtgaccatgtgggagatcatgacacgtgggcagacgccatatgctggcatcgaaaacgctgagatttacaactacctcattggcgggaaccgcctgaaacagcctccggagtgtatggaggacgtgtatgatctcatgtaccagtgctggagtgctgaccccaagcagcgcccgagctttacttgtctgcgaatggaactggagaacatcttgggccagctgtctgtgctatctgccagccaggaccccttatacatcaacatcgagagagctgaggagcccactgcgggaggcagcctggagctacctggcagggatcagccctacagtggggctggggatggcagtggcatgggggcagtgggtggcactcccagtgactgtcggtacatactcacccccggagggctggctgagcagccagggcaggcagagcaccagccagagagtcccctcaatgagacacagaggcttttgctgctgcagcaagggctactgccacacagtagctgttagcccacaggcagagggcatcggggccatttggccggctctggtggccactgagctggctgactaagccccgtctgaccccagcccagacagcaaggtgtggaggctcctgtggtagtcctcccaagctgtgctgggaagcccggactgaccaaatcacccaatcccagttcttcctgcaaccactctgtggccagcctggcatcagtttaggccttggcttgatggaagtgggccagtcctggttgtctgaacccaggcagctggcaggagtggggtggttatgtttccatggttaccatgggtgtggatggcagtgtggggagggcaggtccagctctgtgggccctaccctcctgctgagctgcccctgctgcttaagtgcatgcattgagctgcctccagcctggtggcccagctattaccacacttggggtttaaatatccaggtgtgcccctccaagtcacaaagagatgtccttgtaatattcccttttaggtgagggttggtaaggggttggtatctcaggtctgaatcttcaccatctttctgattccgcaccctgcctacgccaggagaagttgaggggagcatgcttccctgcagctgaccgggtcacacaaaggcatgctggagtacccagcctatcaggtgcccctcttccaaaggcagcgtgccgagccagcaagaggaaggggtgctgtgaggcttgcccaggagcaagtgaggccggagaggagttcaggaacccttctccatacccacaatctgagcacgctaccaaatctcaaaatatcctaagactaacaaaggcagctgtgtctgagcccaacccttctaaacggtgacctttagtgccaacttcccctctaactggacagcctcttctgtcccaagtctccagagagaaatcaggcctgatgagggggaattcctggaacctggaccccagccttggtgggggagcctctggaatgcatggggcgggtcctagctgttagggacatttccaagctgttagttgctgtttaaaatagaaataaaattgaagactaaaga

SEQ ID NO: 79015 - DNA, 2429 bp, Homo sapiens
  misc_feature (1345)..(1345): n is a, c, g, or t
tagtacgtggatctctttgtactcttgccctgggcccccaaaatgtaagatgaagggctggttcatagtgccctaggctcccagttttctctgagcttcagaagctctagaactttggagtggcatgtaaacaggcacagtaagtggtaagtataccctaagagtttcgtaccaagtacaaaaggacaagagttttctggagtggttgagaaaggctttcaccaagaaagtgatatttgcactgagtcttaaaggatgagtaggcctttgctaggaagagcaggtcattccaagtgaaaggaacagcatttgcaaaggtatgaagatgtggaaccctgtgtattattggggtgggggcagatgggagggcgtgggttgcaagtgtttgctgatagaggaagcattcattcaagcacccataactatacccatcccatcttccatctctcacaggctctcccctacatcattagttttctgcttttctgtaggtgacacaggccccaggaggctgggaagtcctggctgttgtggtccctgtgcccccctttacctgcctgctccgggacctggtgcctgccaccaactacagcctcagggtgcgctgtgccaatgccttggggccctctccctatgctgactgggtgccctttcagaccaagggtctaggtaagggatgcatagagcagagcgggtgggcagggctggagccgggaagggggccgtgttggctggagttctgaatggtgctggtagagatggaggttcaggcatcattcggcaaacatttactgcatataactacataccaccttgtaagtagttcttgtaggtggaacagataagcaaactggaaaagatcagataatgtggttgataaagagtgtccccaggtggttaaggaaaccccccctaaaaaggtctgaaggataaagatctgaaggatctgggatctgaacgataaagaagaagccatgtaaatatctgggggaaaatcactgccggaagaaggcacagcaagtgcaaagaccctatgacaggaacttgcttggcaattgcaaagaggctggcatagctgtgagaggggagtggtaaggggtgaggcagaaaggcagtaaccatggtgatgaagagcaacactgccgagctggggtgctgcctgtcctgcccattgcttacccctcccccagcacagtgggtgagagcagtcagagctgggaggtgaacccttccccagtttgtgcctctcagagctgtttagttcttgggagttgattccaaaggtctgcatggaattatgatggtgggaagggcaggggtcttagcaatcttctctctttggctncagccccagccagcgctccccaaaacctccatgccatccgcacagattcaggcctcatcttggagtgggaagaagtgatccccgaggcccctttggaaggccccctgggaccctacaaactgtcctgggttcaagacaatggaacccaggtaagacagaaccctcccctctctccactctcctggagtataagccttcagggttctaaggcctttaagaatttcaaaatgattgtctttggtgggcctgggtctcccgcagccccagggaatcctttcctcctcaccctcctctgcaagctccacttctcaaaggattatgtctcctgttagggttgcatcctgtgtgcactttgtaaataaagcaggaagcacattcctgcttgagctgggggagggcacagataaggctttgtccccagctcagttcgctcccatcccccacctgtgcattccgggactgagccttgtttgtgttctggagaggcccctgcagccgggaacaggaatgtgattactcccagaaggttgtgttcctgcagcccctgaacccacagtgcccctatactcccatgttcccagctggacctttttctgtcctcaggccccagctggaggccttctccccaggctcactatggggtgggggcttttcctggctgcaggatgagctgacagtggaggggaccagggccaatttgacaggctgggatccccaaaaggacctgatcgtacgtgtgtgcgtctccaatgcagttggctgtggaccctggagtcagccactggtggtctcttctcatgaccgtgcaggtgaggcttgtaggtggagaggggcagaggctcaggggatcaaggttttcaagggcaacctagactgatgggaggagcctagtagcatctcccctcctagtagacccacagacagagtgaagaagttgaggccagggctgtttaaactatcttggctgggcatggtggctcatgcctgtaatcccaacattttgggaggttgagggatcgcttgaggccggcagtttgagaccagctctggcaacatagcaagactctgtctctacaaaaaaatt

SEQ ID NO: 79016 - DNA, 5139 bp, Homo sapiens
  misc_feature (4416)..(4416): n is a, c, g, or t
  misc_feature (4434)..(4434): n is a, c, g, or t
cattagatctttacatgaaagtaaaatttataagatttctagaaagtcaaaagatgataactatttcttaggatactaaaagcactcacattatagaaaaaaaatcagttaactatactccacaaacattaaaggctccctataaaaaaacatttttaataggcaagccacagaaagggcaaatattaatagtttgcaatacatatgtatgaaaaggaattgaatctagaatatttaacaaagctttacaactcaaaaaatacaaagaaaatatttttcttccaattggcaaattacttaaacagaaccttcacaaaagaagataagaatgtttaataaacatttgaagccataataatgacatcattagccatgatggaaatgcaaatttaagtaccacttcacatccacaagaaaaagataaaaataaaaggactgagctcaccaaacattggtgaggatgtggtaatactgaaattcttgtaccgtgctcctgagggtataacatattacaggatttttttgaaaactagtggttccttataaacttaatgccctggcaacctcacacctatttacttaagaatgaaagggccccgccctcctccctcctcgctcgcgggccgggcccggcatggtgcggcgtcgccgccgatggcgctgaggcggagcatggggcggccggggctcccgccgctgccgctgccgccgccaccgcggctcgggctgctgctggcggctctggcttctctgctgctcccggagtccgccgccgcaggtctgaagctcatgggagccccggtgaagctgacagtgtctcaggggcagccggtgaagctcaactgcagtgtggaggggatggaggagcctgacatccagtgggtgaaggatggggctgtggtccagaacttggaccagttgtacatcccagtcagcgagcagcactggatcggcttcctcagcctgaagtcagtggagcgctctgacgccggccggtactggtgccaggtggaggatgggggtgaaaccgagatctcccagccagtgtggctcacggtagaaggtgtgccatttttcacagtggagccaaaagatctggcagtgccacccaatgcccctttccaactgtcttgtgaggctgtgggtccccctgaacctgttaccattgtctggtggagaggaactacgaagatcgggggacccgctccctctccatctgttttaaatgtaacaggggtgacccagagcaccatgttttcctgtgaagctcacaacctaaaaggcctggcctcttctcgcacagccactgttcaccttcaagcactgcctgcagcccccttcaacatcaccgtgacaaagctttccagcagcaacgctagtgtggcctggatgccaggtgctgatggccgagctctgctacagtcctgtacagttcaggtgacacaggccccaggaggctgggaagtcctggctgttgtggtccctgtgcccccctttacctgcctgctccgggacctggtgcctgccaccaactacagcctcagggtgcgctgtgccaatgccttggggccctctccctatgctgactgggtgccctttcagaccaagggtctagccccagccagcgctccccaaaacctccatgccatccgcacagattcaggcctcatcttggagtgggaagaagtgatccccgaggcccctttggaaggccccctgggaccctacaaactgtcctgggttcaagacaatggaacccaggatgagctgacagtggaggggaccagggccaatttgacaggctgggatccccaaaaggacctgatcgtacgtgtgtgcgtctccaatgcagttggctgtggaccctggagtcagccactggtggtctcttctcatgaccgtgcaggccagcagggccctcctcacagccgcacatcctgggtacctgtggtccttggtgtgctaacggccctggtgacggctgctgccctggccctcatcctgcttcgaaagagacggaaagagacgcggtttgggcaagcctttgacagtgtcatggcccggggagagccagccgttcacttccgggcagcccggtccttcaatcgagaaaggcccgagcgcatcgaggccacattggacagcttgggcatcagcgatgaactaaaggaaaaactggaggatgtgctcatcccagagcagcagttcaccctgggccggatgttgggcaaaggagagtttggttcagtgcgggaggcccagctgaagcaagaggatggctcctttgtgaaagtggctgtgaagatgctgaaagctgacatcattgcctcaagcgacattgaagagttcctcagggaagcagcttgcatgaaggagtttgaccatccacacgtggccaaacttgttggggtaagcctccggagcagggctaaaggccgtctccccatccccatggtcatcttgcccttcatgaagcatggggacctgcatgccttcctgctcgcctcccggattggggagaacccctttaacctacccctccagaccctgatccggttcatggtggacattgcctgcggcatggagtacctgagctctcggaacttcatccaccgagacctggctgctcggaattgcatgctggcagaggacatgacagtgtgtgtggctgacttcggactctcccggaagatctacagtggggactactatcgtcaaggctgtgcctccaaactgcctgtcaagtggctggccctggagagcctggccgacaacctgtatactgtgcagagtgacgtgtgggcgttcggggtgaccatgtgggagatcatgacacgtgggcagacgccatatgctggcatcgaaaacgctgagatttacaactacctcattggcgggaaccgcctgaaacagcctccggagtgtatggaggacgtgtatgatctcatgtaccagtgctggagtgctgaccccaagcagcgcccgagctttacttgtctgcgaatggaactggagaacatcttgggccagctgtctgtgctatctgccagccaggaccccttatacatcaacatcgagagagctgaggagcccactgcgggaggcagcctggagctacctggcagggatcagccctacagtggggctggggatggcagtggcatgggggcagtgggtggcactcccagtgactgtcggtacatactcacccccggagggctggctgagcagccagggcaggcagagcaccagccagagagtcccctcaatgagacacagaggcttttgctgctgcagcaagggctactgccacacagtagctgttagcccacaggcagagggcatcggggccatttggccggctctggtggccactgagctggctgactaagccccgtctgaccccagcccagacagcaaggtgtggaggctcctgtggtagtcctcccaagctgtgctgggaagcccggactgaccaaatcacccaatcccagttcttcctgcaaccactctgtggccagcctggcatcagtttaggccttggcttgatggaagtgggccagtcctggttgtctgaacccaggcagctggcaggagtggggtggttatgtttccatggttaccatgggtgtggatggcagtgtggggagggcaggtccagctctgtgggccctaccctcctgctgagctgcccctgctgcttaagtgcatgcattgagctgcctccagcctggtggcccagctattaccacacttggggtttaaatatccaggtgtgcccctccaagtcacaaagagatgtccttgtaatattcccttttaggtgagggttggtaaggggttggtatctcaggtctgaatcttcaccatctttctgattccgcaccctgcctacgccaggagaagttgaggggagcatgcttccctgcagctgaccgggtcacacaaaggcatgctggagtacccagcctatcaggtgcccctcttccaaaggcagcgtgccgagccagcaagaggaaggggtgctgtgaggcttgcccaggagcaagtgaggccggagaggagttcaggaacccttctccatacccacaatctgagcacgctaccaaatctcaaaatatcctaagactaacaaaggcagctgtgtctgagcccaacccttctaaacggtgacctttagtgccaacttcccctctaactggacagcctcttctgtcccaagtctccagagagaaatcaggcctgatgagggggaattcctggaacctggaccccagccttggtgggggagcctctggaatgcatggggcgggtcctagctgttagggacatttccaagctgttagttgctgtttaaaatagaaataaaattgaagactaaagaaaaaaaaaaaaaaaaaaaaaaaaaaaaaaaanaaaaaagggggggggggnaaaaaaaattccccgaggggggcccacaaatattaaggagagacccacagtataggtggcaaacaagcgggggccacaaaagagagggggcctactaaaaaacaatcagagagcaaggggcgcgagagaaaaaaaacaggctgcgcaacgctgaaaacggtgccaccggggcaactctgagagagagcacaccacaaacccgcggggcgggacacaaagcgggaccacacaaccagagacagcaaaaagagccaagggcacaaatcaaagaccaagagagcgcgacataggcggggttacaacaccacgcgcagaaacagccgcagcccccgtagaacaacgtcgggccacacagggcaatagtcatcgctcagcccctttttaacacggggaaaaatcacaatcacgacccccaaacacagaacgcgacacaccaacatagaaacaacaaaaacgagcaacaaagccagaaaaactccaaaaagcgccacaccccagagaaccagaaaccaagaaaaaaagagaaaaaacccaccagaaacaaacaaacagagaggagaacgcaaacacaagcaaacagacagcaaccccgcaccacaaaacagcaacaccaacaccgagcacaagccgacaggaaaacagaaaagagcaaaaaccaaagacaaagagacaaccaacaccaacgacacaaaaaaaaaaacgaag

SEQ ID NO: 79017 - DNA, 4899 bp, Homo sapiens
cattagatctttacatgaaagtaaaatttataagatttctagaaagtcaaaagatgataactatttcttaggatactaaaagcactcacattatagaaaaaaaatcagttaactatactccacaaacattaaaggctccctataaaaaaacatttttaataggcaagccacagaaagggcaaatattaatagtttgcaatacatatgtatgaaaaggaattgaatctagaatatttaacaaagctttacaactcaaaaaatacaaagaaaatatttttcttccaattggcaaattacttaaacagaaccttcacaaaagaagataagaatgtttaataaacatttgaagccataataatgacatcattagccatgatggaaatgcaaatttaagtaccacttcacatccacaagaaaaagataaaaataaaaggactgagctcaccaaacattggtgaggatgtggtaatactgaaattcttgtaccgtgctcctgagggtataacatattacaggatttttttgaaaactagtggttccttataaacttaatgccctggcaacctcacacctatttacttaagaatgaaagggccccgccctcctccctcctcgctcgcgggccgggcccggcatggtgcggcgtcgccgccgatggcgctgaggcggagcatggggcggccggggctcccgccgctgccgctgccgccgccaccgcggctcgggctgctgctggcggctctggcttctctgctgctcccggagtccgccgccgcaggtctgaagctcatgggagccccggtgaagctgacagtgtctcaggggcagccggtgaagctcaactgcagtgtggaggggatggaggagcctgacatccagtgggtgaaggatggggctgtggtccagaacttggaccagttgtacatcccagtcagcgagcagcactggatcggcttcctcagcctgaagtcagtggagcgctctgacgccggccggtactggtgccaggtggaggatgggggtgaaaccgagatctcccagccagtgtggctcacggtagaaggtgtgccatttttcacagtggagccaaaagatctggcagtgccacccaatgcccctttccaactgtcttgtgaggctgtgggtccccctgaacctgttaccattgtctggtggagaggaactacgaagatcgggggacccgctccctctccatctgttttaaatgtaacaggggtgacccagagcaccatgttttcctgtgaagctcacaacctaaaaggcctggcctcttctcgcacagccactgttcaccttcaagcactgcctgcagcccccttcaacatcaccgtgacaaagctttccagcagcaacgctagtgtggcctggatgccaggtgctgatggccgagctctgctacagtcctgtacagttcaggtgacacaggccccaggaggctgggaagtcctggctgttgtggtccctgtgcccccctttacctgcctgctccgggacctggtgcctgccaccaactacagcctcagggtgcgctgtgccaatgccttggggccctctccctatgctgactgggtgccctttcagaccaagggtctagccccagccagcgctccccaaaacctccatgccatccgcacagattcaggcctcatcttggagtgggaagaagtgatccccgaggcccctttggaaggccccctgggaccctacaaactgtcctgggttcaagacaatggaacccaggtaagacagaaccctcccctctctccactctcctggagtataagccttcagggttctaaggcctttaagaatttcaaaatgattgtctttggtgggcctgggtctcccgcagccccagggaatcctttcctcctcaccctcctctgcaagctccacttctcaaaggattatgtctcctgttagggttgcatcctgtgtgcactttgtaaataaagcaggaagcacattcctgcttgagctgggggagggcacagataaggctttgtccccagctcagttcgctcccatcccccacctgtgcattccgggactgagccttgtttgtgttctggagaggcccctgcagccgggaacaggaatgtgattactcccagaaggttgtgttcctgcagcccctgaacccacagtgcccctatactcccatgttcccagctggacctttttctgtcctcaggccccagctggaggccttctccccaggctcactatggggtgggggcttttcctggctgcaggatgagctgacagtggaggggaccagggccaatttgacaggctgggatccccaaaaggacctgatcgtacgtgtgtgcgtctccaatgcagttggctgtggaccctggagtcagccactggtggtctcttctcatgaccgtgcaggccagcagggccctcctcacagccgcacatcctgggtacctgtggtccttggtgtgctaacggccctggtgacggctgctgccctggccctcatcctgcttcgaaagagacggaaagagacgcggtttgggcaagcctttgacagtgtcatggcccggggagagccagccgttcacttccgggcagcccggtccttcaatcgagaaaggcccgagcgcatcgaggccacattggacagcttgggcatcagcgatgaactaaaggaaaaactggaggatgtgctcatcccagagcagcagttcaccctgggccggatgttgggcaaaggagagtttggttcagtgcgggaggcccagctgaagcaagaggatggctcctttgtgaaagtggctgtgaagatgctgaaagctgacatcattgcctcaagcgacattgaagagttcctcagggaagcagcttgcatgaaggagtttgaccatccacacgtggccaaacttgttggggtaagcctccggagcagggctaaaggccgtctccccatccccatggtcatcttgcccttcatgaagcatggggacctgcatgccttcctgctcgcctcccggattggggagaacccctttaacctacccctccagaccctgatccggttcatggtggacattgcctgcggcatggagtacctgagctctcggaacttcatccaccgagacctggctgctcggaattgcatgctggcagaggacatgacagtgtgtgtggctgacttcggactctcccggaagatctacagtggggactactatcgtcaaggctgtgcctccaaactgcctgtcaagtggctggccctggagagcctggccgacaacctgtatactgtgcagagtgacgtgtgggcgttcggggtgaccatgtgggagatcatgacacgtgggcagacgccatatgctggcatcgaaaacgctgagatttacaactacctcattggcgggaaccgcctgaaacagcctccggagtgtatggaggacgtgtatgatctcatgtaccagtgctggagtgctgaccccaagcagcgcccgagctttacttgtctgcgaatggaactggagaacatcttgggccagctgtctgtgctatctgccagccaggaccccttatacatcaacatcgagagagctgaggagcccactgcgggaggcagcctggagctacctggcagggatcagccctacagtggggctggggatggcagtggcatgggggcagtgggtggcactcccagtgactgtcggtacatactcacccccggagggctggctgagcagccagggcaggcagagcaccagccagagagtcccctcaatgagacacagaggcttttgctgctgcagcaagggctactgccacacagtagctgttagcccacaggcagagggcatcggggccatttggccggctctggtggccactgagctggctgactaagccccgtctgaccccagcccagacagcaaggtgtggaggctcctgtggtagtcctcccaagctgtgctgggaagcccggactgaccaaatcacccaatcccagttcttcctgcaaccactctgtggccagcctggcatcagtttaggccttggcttgatggaagtgggccagtcctggttgtctgaacccaggcagctggcaggagtggggtggttatgtttccatggttaccatgggtgtggatggcagtgtggggagggcaggtccagctctgtgggccctaccctcctgctgagctgcccctgctgcttaagtgcatgcattgagctgcctccagcctggtggcccagctattaccacacttggggtttaaatatccaggtgtgcccctccaagtcacaaagagatgtccttgtaatattcccttttaggtgagggttggtaaggggttggtatctcaggtctgaatcttcaccatctttctgattccgcaccctgcctacgccaggagaagttgaggggagcatgcttccctgcagctgaccgggtcacacaaaggcatgctggagtacccagcctatcaggtgcccctcttccaaaggcagcgtgccgagccagcaagaggaaggggtgctgtgaggcttgcccaggagcaagtgaggccggagaggagttcaggaacccttctccatacccacaatctgagcacgctaccaaatctcaaaatatcctaagactaacaaaggcagctgtgtctgagcccaacccttctaaacggtgacctttagtgccaacttcccctctaactggacagcctcttctgtcccaagtctccagagagaaatcaggcctgatgagggggaattcctggaacctggaccccagccttggtgggggagcctctggaatgcatggggcgggtcctagctgttagggacatttccaagctgttagttgctgtttaaaatagaaataaaattgaagactaaaga

SEQ ID NO: 79018 - DNA, 4239 bp, Homo sapiens
cattagatctttacatgaaagtaaaatttataagatttctagaaagtcaaaagatgataactatttcttaggatactaaaagcactcacattatagaaaaaaaatcagttaactatactccacaaacattaaaggctccctataaaaaaacatttttaataggcaagccacagaaagggcaaatattaatagtttgcaatacatatgtatgaaaaggaattgaatctagaatatttaacaaagctttacaactcaaaaaatacaaagaaaatatttttcttccaattggcaaattacttaaacagaaccttcacaaaagaagataagaatgtttaataaacatttgaagccataataatgacatcattagccatgatggaaatgcaaatttaagtaccacttcacatccacaagaaaaagataaaaataaaaggactgagctcaccaaacattggtgaggatgtggtaatactgaaattcttgtaccgtgctcctgagggtataacatattacaggatttttttgaaaactagtggttccttataaacttaatgccctggcaacctcacacctatttacttaagaatgaaagggccccgccctcctccctcctcgctcgcgggccgggcccggcatggtgcggcgtcgccgccgatggcgctgaggcggagcatggggcggccggggctcccgccgctgccgctgccgccgccaccgcggctcgggctgctgctggcggctctggcttctctgctgctcccggagtccgccgccgcaggtctgaagctcatgggagccccggtgaagctgacagtgtctcaggggcagccggtgaagctcaactgcagtgtggaggggatggaggagcctgacatccagtgggtgaaggatggggctgtggtccagaacttggaccagttgtacatcccagtcagcgagcagcactggatcggcttcctcagcctgaagtcagtggagcgctctgacgccggccggtactggtgccaggtggaggatgggggtgaaaccgagatctcccagccagtgtggctcacggtagaaggtgtgccatttttcacagtggagccaaaagatctggcagtgccacccaatgcccctttccaactgtcttgtgaggctgtgggtccccctgaacctgttaccattgtctggtggagaggaactacgaagatcgggggacccgctccctctccatctgttttaaatgtaacaggggtgacccagagcaccatgttttcctgtgaagctcacaacctaaaaggcctggcctcttctcgcacagccactgttcaccttcaagcactgcctgcagcccccttcaacatcaccgtgacaaagctttccagcagcaacgctagtgtggcctggatgccaggtgctgatggccgagctctgctacagtcctgtacagttcaggtgacacaggccccaggaggctgggaagtcctggctgttgtggtccctgtgcccccctttacctgcctgctccgggacctggtgcctgccaccaactacagcctcagggtgcgctgtgccaatgccttggggccctctccctatgctgactgggtgccctttcagaccaagggtctagccccagccagcgctccccaaaacctccatgccatccgcacagattcaggcctcatcttggagtgggaagaagtgatccccgaggcccctttggaaggccccctgggaccctacaaactgtcctgggttcaagacaatggaacccaggccagcagggccctcctcacagccgcacatcctgggtacctgtggtccttggtgtgctaacggccctggtgacggctgctgccctggccctcatcctgcttcgaaagagacggaaagagacgcggtttgggcaagcctttgacagtgtcatggcccggggagagccagccgttcacttccgggcagcccggtccttcaatcgagaaaggcccgagcgcatcgaggccacattggacagcttgggcatcagcgatgaactaaaggaaaaactggaggatgtgctcatcccagagcagcagttcaccctgggccggatgttgggcaaaggagagtttggttcagtgcgggaggcccagctgaagcaagaggatggctcctttgtgaaagtggctgtgaagatgctgaaagctgacatcattgcctcaagcgacattgaagagttcctcagggaagcagcttgcatgaaggagtttgaccatccacacgtggccaaacttgttggggtaagcctccggagcagggctaaaggccgtctccccatccccatggtcatcttgcccttcatgaagcatggggacctgcatgccttcctgctcgcctcccggattggggagaacccctttaacctacccctccagaccctgatccggttcatggtggacattgcctgcggcatggagtacctgagctctcggaacttcatccaccgagacctggctgctcggaattgcatgctggcagaggacatgacagtgtgtgtggctgacttcggactctcccggaagatctacagtggggactactatcgtcaaggctgtgcctccaaactgcctgtcaagtggctggccctggagagcctggccgacaacctgtatactgtgcagagtgacgtgtgggcgttcggggtgaccatgtgggagatcatgacacgtgggcagacgccatatgctggcatcgaaaacgctgagatttacaactacctcattggcgggaaccgcctgaaacagcctccggagtgtatggaggacgtgtatgatctcatgtaccagtgctggagtgctgaccccaagcagcgcccgagctttacttgtctgcgaatggaactggagaacatcttgggccagctgtctgtgctatctgccagccaggaccccttatacatcaacatcgagagagctgaggagcccactgcgggaggcagcctggagctacctggcagggatcagccctacagtggggctggggatggcagtggcatgggggcagtgggtggcactcccagtgactgtcggtacatactcacccccggagggctggctgagcagccagggcaggcagagcaccagccagagagtcccctcaatgagacacagaggcttttgctgctgcagcaagggctactgccacacagtagctgttagcccacaggcagagggcatcggggccatttggccggctctggtggccactgagctggctgactaagccccgtctgaccccagcccagacagcaaggtgtggaggctcctgtggtagtcctcccaagctgtgctgggaagcccggactgaccaaatcacccaatcccagttcttcctgcaaccactctgtggccagcctggcatcagtttaggccttggcttgatggaagtgggccagtcctggttgtctgaacccaggcagctggcaggagtggggtggttatgtttccatggttaccatgggtgtggatggcagtgtggggagggcaggtccagctctgtgggccctaccctcctgctgagctgcccctgctgcttaagtgcatgcattgagctgcctccagcctggtggcccagctattaccacacttggggtttaaatatccaggtgtgcccctccaagtcacaaagagatgtccttgtaatattcccttttaggtgagggttggtaaggggttggtatctcaggtctgaatcttcaccatctttctgattccgcaccctgcctacgccaggagaagttgaggggagcatgcttccctgcagctgaccgggtcacacaaaggcatgctggagtacccagcctatcaggtgcccctcttccaaaggcagcgtgccgagccagcaagaggaaggggtgctgtgaggcttgcccaggagcaagtgaggccggagaggagttcaggaacccttctccatacccacaatctgagcacgctaccaaatctcaaaatatcctaagactaacaaaggcagctgtgtctgagcccaacccttctaaacggtgacctttagtgccaacttcccctctaactggacagcctcttctgtcccaagtctccagagagaaatcaggcctgatgagggggaattcctggaacctggaccccagccttggtgggggagcctctggaatgcatggggcgggtcctagctgttagggacatttccaagctgttagttgctgtttaaaatagaaataaaattgaagactaaaga

SEQ ID NO: 79019 - DNA, 4632 bp, Homo sapiens
  misc_feature (1345)..(1345): n is a, c, g, or t
tagtacgtggatctctttgtactcttgccctgggcccccaaaatgtaagatgaagggctggttcatagtgccctaggctcccagttttctctgagcttcagaagctctagaactttggagtggcatgtaaacaggcacagtaagtggtaagtataccctaagagtttcgtaccaagtacaaaaggacaagagttttctggagtggttgagaaaggctttcaccaagaaagtgatatttgcactgagtcttaaaggatgagtaggcctttgctaggaagagcaggtcattccaagtgaaaggaacagcatttgcaaaggtatgaagatgtggaaccctgtgtattattggggtgggggcagatgggagggcgtgggttgcaagtgtttgctgatagaggaagcattcattcaagcacccataactatacccatcccatcttccatctctcacaggctctcccctacatcattagttttctgcttttctgtaggtgacacaggccccaggaggctgggaagtcctggctgttgtggtccctgtgcccccctttacctgcctgctccgggacctggtgcctgccaccaactacagcctcagggtgcgctgtgccaatgccttggggccctctccctatgctgactgggtgccctttcagaccaagggtctaggtaagggatgcatagagcagagcgggtgggcagggctggagccgggaagggggccgtgttggctggagttctgaatggtgctggtagagatggaggttcaggcatcattcggcaaacatttactgcatataactacataccaccttgtaagtagttcttgtaggtggaacagataagcaaactggaaaagatcagataatgtggttgataaagagtgtccccaggtggttaaggaaaccccccctaaaaaggtctgaaggataaagatctgaaggatctgggatctgaacgataaagaagaagccatgtaaatatctgggggaaaatcactgccggaagaaggcacagcaagtgcaaagaccctatgacaggaacttgcttggcaattgcaaagaggctggcatagctgtgagaggggagtggtaaggggtgaggcagaaaggcagtaaccatggtgatgaagagcaacactgccgagctggggtgctgcctgtcctgcccattgcttacccctcccccagcacagtgggtgagagcagtcagagctgggaggtgaacccttccccagtttgtgcctctcagagctgtttagttcttgggagttgattccaaaggtctgcatggaattatgatggtgggaagggcaggggtcttagcaatcttctctctttggctncagccccagccagcgctccccaaaacctccatgccatccgcacagattcaggcctcatcttggagtgggaagaagtgatccccgaggcccctttggaaggccccctgggaccctacaaactgtcctgggttcaagacaatggaacccaggtaagacagaaccctcccctctctccactctcctggagtataagccttcagggttctaaggcctttaagaatttcaaaatgattgtctttggtgggcctgggtctcccgcagccccagggaatcctttcctcctcaccctcctctgcaagctccacttctcaaaggattatgtctcctgttagggttgcatcctgtgtgcactttgtaaataaagcaggaagcacattcctgcttgagctgggggagggcacagataaggctttgtccccagctcagttcgctcccatcccccacctgtgcattccgggactgagccttgtttgtgttctggagaggcccctgcagccgggaacaggaatgtgattactcccagaaggttgtgttcctgcagcccctgaacccacagtgcccctatactcccatgttcccagctggacctttttctgtcctcaggccccagctggaggccttctccccaggctcactatggggtgggggcttttcctggctgcaggatgagctgacagtggaggggaccagggccaatttgacaggctgggatccccaaaaggacctgatcgtacgtgtgtgcgtctccaatgcagttggctgtggaccctggagtcagccactggtggtctcttctcatgaccgtgcaggccagcagggccctcctcacagccgcacatcctgggtacctgtggtccttggtgtgctaacggccctggtgacggctgctgccctggccctcatcctgcttcgaaagagacggaaagagacgcggtttgggcaagcctttgacagtgtcatggcccggggagagccagccgttcacttccgggcagcccggtccttcaatcgagaaaggcccgagcgcatcgaggccacattggacagcttgggcatcagcgatgaactaaaggaaaaactggaggatgtgctcatcccagagcagcagttcaccctgggccggatgttgggcaaaggagagtttggttcagtgcgggaggcccagctgaagcaagaggatggctcctttgtgaaagtggctgtgaagatgctgaaagctgacatcattgcctcaagcgacattgaagagttcctcagggaagcagcttgcatgaaggagtttgaccatccacacgtggccaaacttgttggggtaagcctccggagcagggctaaaggccgtctccccatccccatggtcatcttgcccttcatgaagcatggggacctgcatgccttcctgctcgcctcccggattggggagaacccctttaacctacccctccagaccctgatccggttcatggtggacattgcctgcggcatggagtacctgagctctcggaacttcatccaccgagacctggctgctcggaattgcatgctggcagaggacatgacagtgtgtgtggctgacttcggactctcccggaagatctacagtggggactactatcgtcaaggctgtgcctccaaactgcctgtcaagtggctggccctggagagcctggccgacaacctgtatactgtgcagagtgacgtgtgggcgttcggggtgaccatgtgggagatcatgacacgtgggcagacgccatatgctggcatcgaaaacgctgagatttacaactacctcattggcgggaaccgcctgaaacagcctccggagtgtatggaggacgtgtatgatctcatgtaccagtgctggagtgctgaccccaagcagcgcccgagctttacttgtctgcgaatggaactggagaacatcttgggccagctgtctgtgctatctgccagccaggaccccttatacatcaacatcgagagagctgaggagcccactgcgggaggcagcctggagctacctggcagggatcagccctacagtggggctggggatggcagtggcatgggggcagtgggtggcactcccagtgactgtcggtacatactcacccccggagggctggctgagcagccagggcaggcagagcaccagccagagagtcccctcaatgagacacagaggcttttgctgctgcagcaagggctactgccacacagtagctgttagcccacaggcagagggcatcggggccatttggccggctctggtggccactgagctggctgactaagccccgtctgaccccagcccagacagcaaggtgtggaggctcctgtggtagtcctcccaagctgtgctgggaagcccggactgaccaaatcacccaatcccagttcttcctgcaaccactctgtggccagcctggcatcagtttaggccttggcttgatggaagtgggccagtcctggttgtctgaacccaggcagctggcaggagtggggtggttatgtttccatggttaccatgggtgtggatggcagtgtggggagggcaggtccagctctgtgggccctaccctcctgctgagctgcccctgctgcttaagtgcatgcattgagctgcctccagcctggtggcccagctattaccacacttggggtttaaatatccaggtgtgcccctccaagtcacaaagagatgtccttgtaatattcccttttaggtgagggttggtaaggggttggtatctcaggtctgaatcttcaccatctttctgattccgcaccctgcctacgccaggagaagttgaggggagcatgcttccctgcagctgaccgggtcacacaaaggcatgctggagtacccagcctatcaggtgcccctcttccaaaggcagcgtgccgagccagcaagaggaaggggtgctgtgaggcttgcccaggagcaagtgaggccggagaggagttcaggaacccttctccatacccacaatctgagcacgctaccaaatctcaaaatatcctaagactaacaaaggcagctgtgtctgagcccaacccttctaaacggtgacctttagtgccaacttcccctctaactggacagcctcttctgtcccaagtctccagagagaaatcaggcctgatgagggggaattcctggaacctggaccccagccttggtgggggagcctctggaatgcatggggcgggtcctagctgttagggacatttccaagctgttagttgctgtttaaaatagaaataaaattgaagactaaaga

SEQ ID NO: 79020 - DNA, 2332 bp, Homo sapiens
gagtaacagagatccccgcggaagtgttatctgcggcaataattcagtcagaaaccacgcgtcgacgagcgcatcgaggccacattggacagcttgggcatcagcgatgaactaaaggaaaaactggaggatgtgctcatcccagagcagcagttcaccctgggccggatgttgggcaaaggagagtttggttcagtgcgggaggcccagctgaagcaagaggatggctcctttgtgaaagtggctgtgaagatgctgaaagctgacatcattgcctcaagcgacattgaagagttcctcagggaagcagcttgcatgaaggagtttgaccatccacacgtggccaaacttgttggggtaagcctccggagcagggctaaaggccgtctccccatccccatggtcatcttgcccttcatgaagcatggggacctgcatgccttcctgctcgcctcccggattggggagaacccctttaacctacccctccagaccctgatccggttcatggtggacattgcctgcggcatggagtacctgagctctcggaacttcatccaccgagacctggctgctcggaattgcatgctggcagaggacatgacagtgtgtgtggctgacttcggactctcccggaagatctacagtggggactactatcgtcaaggctgtgcctccaaactgcctgtcaagtggctggccctggagagcctggccgacaacctgtatactgtgcagagtgacgtgtgggcgttcggggtgaccatgtgggagatcatgacacgtgggcagacgccatatgctggcatcgaaaacgctgagatttacaactacctcattggcgggaaccgcctgaaacagcctccggagtgtatggaggacgtgtatgatctcatgtaccagtgctggagtgctgaccccaagcagcgcccgagctttacttgtctgcgaatggaactggagaacatcttgggccagctgtctgtgctatctgccagccaggaccccttatacatcaacatcgagagagctgaggagcccactgcgggaggcagcctggagctacctggcagggatcagccctacagtggggctggggatggcagtggcatgggggcagtgggtggcactcccagtgactgtcggtacatactcacccccggagggctggctgagcagccagggcaggcagagcaccagccagagagtcccctcaatgagacacagaggcttttgctgctgcagcaagggctactgccacacagtagctgttagcccacaggcagagggcatcggggccatttggccggctctggtggccactgagctggctgactaagccccgtctgaccccagcccagacagcaaggtgtggaggctcctgtggtagtcctcccaagctgtgctgggaagcccggactgaccaaatcacccaatcccagttcttcctgcaaccactctgtggccagcctggcatcagtttaggccttggcttgatggaagtgggccagtcctggttgtctgaacccaggcagctggcaggagtggggtggttatgtttccatggttaccatgggtgtggatggcagtgtggggagggcaggtccagctctgtgggccctaccctcctgctgagctgcccctgctgcttaagtgcatgcattgagctgcctccagcctggtggcccagctattaccacacttggggtttaaatatccaggtgtgcccctccaagtcacaaagagatgtccttgtaatattcccttttaggtgagggttggtaaggggttggtatctcaggtctgaatcttcaccatctttctgattccgcaccctgcctacgccaggagaagttgaggggagcatgcttccctgcagctgaccgggtcacacaaaggcatgctggagtacccagcctatcaggtgcccctcttccaaaggcagcgtgccgagccagcaagaggaaggggtgctgtgaggcttgcccaggagcaagtgaggccggagaggagttcaggaacccttctccatacccacaatctgagcacgctaccaaatctcaaaatatcctaagactaacaaaggcagctgtgtctgagcccaacccttctaaacggtgacctttagtgccaacttcccctctaactggacagcctcttctgtcccaagtctccagagagaaatcaggcctgatgagggggaattcctggaacctggaccccagccttggtgggggagcctctggaatgcatggggcgggtcctagctgttagggacatttccaagctgttagttgctgtttaaaatagaaataaaattgaagactaaaga

SEQ ID NO: 79021 - DNA, 1738 bp, Homo sapiens
atcccacctcagccttccgagtagctgggactacaggcgtgtctaccaagcctggctaatttttgtattattatagagacagggttttgccatattgcccaggctggtctcgaactcctgggctcaaataataccccccttcggcctcccaaagtgttgagattacagatgcgagccgctgtgccccaccagggaataaaattttttaaaaccctagtgccatatgatgaaggggcccctgcttttgagggaagggctcctgccttttctcacgcttctctccaccccaggtatgatctcatgtaccagtgctggagtgctgaccccaagcagcgcccgagctttacttgtctgcgaatggaactggagaacatcttgggccagctgtctgtgctatctgccagccaggaccccttatacatcaacatcgagagagctgaggagcccactgcgggaggcagcctggagctacctggcagggatcagccctacagtggggctggggatggcagtggcatgggggcagtgggtggcactcccagtgactgtcggtacatactcacccccggagggctggctgagcagccagggcaggcagagcaccagccagagagtcccctcaatgagacacagaggcttttgctgctgcagcaagggctactgccacacagtagctgttagcccacaggcagagggcatcggggccatttggccggctctggtggccactgagctggctgactaagccccgtctgaccccagcccagacagcaaggtgtggaggctcctgtggtagtcctcccaagctgtgctgggaagcccggactgaccaaatcacccaatcccagttcttcctgcaaccactctgtggccagcctggcatcagtttaggccttggcttgatggaagtgggccagtcctggttgtctgaacccaggcagctggcaggagtggggtggttatgtttccatggttaccatgggtgtggatggcagtgtggggagggcaggtccagctctgtgggccctaccctcctgctgagctgcccctgctgcttaagtgcatgcattgagctgcctccagcctggtggcccagctattaccacacttggggtttaaatatccaggtgtgcccctccaagtcacaaagagatgtccttgtaatattcccttttaggtgagggttggtaaggggttggtatctcaggtctgaatcttcaccatctttctgattccgcaccctgcctacgccaggagaagttgaggggagcatgcttccctgcagctgaccgggtcacacaaaggcatgctggagtacccagcctatcaggtgcccctcttccaaaggcagcgtgccgagccagcaagaggaaggggtgctgtgaggcttgcccaggagcaagtgaggccggagaggagttcaggaacccttctccatacccacaatctgagcacgctaccaaatctcaaaatatcctaagactaacaaaggcagctgtgtctgagcccaacccttctaaacggtgacctttagtgccaacttcccctctaactggacagcctcttctgtcccaagtctccagagagaaatcaggcctgatgagggggaattcctggaacctggaccccagccttggtgggggagcctctggaatgcatggggcgggtcctagctgttagggacatttccaagctgttagttgctgtttaaaatagaaataaaattgaagactaaaga

SEQ ID NO: 79022 - DNA, 4409 bp, Homo sapiens
cattagatctttacatgaaagtaaaatttataagatttctagaaagtcaaaagatgataactatttcttaggatactaaaagcactcacattatagaaaaaaaatcagttaactatactccacaaacattaaaggctccctataaaaaaacatttttaataggcaagccacagaaagggcaaatattaatagtttgcaatacatatgtatgaaaaggaattgaatctagaatatttaacaaagctttacaactcaaaaaatacaaagaaaatatttttcttccaattggcaaattacttaaacagaaccttcacaaaagaagataagaatgtttaataaacatttgaagccataataatgacatcattagccatgatggaaatgcaaatttaagtaccacttcacatccacaagaaaaagataaaaataaaaggactgagctcaccaaacattggtgaggatgtggtaatactgaaattcttgtaccgtgctcctgagggtataacatattacaggatttttttgaaaactagtggttccttataaacttaatgccctggcaacctcacacctatttacttaagaatgaaagggccccgccctcctccctcctcgctcgcgggccgggcccggcatggtgcggcgtcgccgccgatggcgctgaggcggagcatggggcggccggggctcccgccgctgccgctgccgccgccaccgcggctcgggctgctgctggcggctctggcttctctgctgctcccggagtccgccgccgcaggtctgaagctcatgggagccccggtgaagctgacagtgtctcaggggcagccggtgaagctcaactgcagtgtggaggggatggaggagcctgacatccagtgggtgaaggatggggctgtggtccagaacttggaccagttgtacatcccagtcagcgagcagcactggatcggcttcctcagcctgaagtcagtggagcgctctgacgccggccggtactggtgccaggtggaggatgggggtgaaaccgagatctcccagccagtgtggctcacggtagaaggtgtgccatttttcacagtggagccaaaagatctggcagtgccacccaatgcccctttccaactgtcttgtgaggctgtgggtccccctgaacctgttaccattgtctggtggagaggaactacgaagatcgggggacccgctccctctccatctgttttaaatgtaacaggggtgacccagagcaccatgttttcctgtgaagctcacaacctaaaaggcctggcctcttctcgcacagccactgttcaccttcaagcactgcctgcagcccccttcaacatcaccgtgacaaagctttccagcagcaacgctagtgtggcctggatgccaggtgctgatggccgagctctgctacagtcctgtacagttcaggtgacacaggccccaggaggctgggaagtcctggctgttgtggtccctgtgcccccctttacctgcctgctccgggacctggtgcctgccaccaactacagcctcagggtgcgctgtgccaatgccttggggccctctccctatgctgactgggtgccctttcagaccaagggtctagccccagccagcgctccccaaaacctccatgccatccgcacagattcaggcctcatcttggagtgggaagaagtgatccccgaggcccctttggaaggccccctgggaccctacaaactgtcctgggttcaagacaatggaacccaggtaagacagaaccctcccctctctccactctcctggagtataagccttcagggttctaaggcctttaagaatttcaaaatgattgtctttggtgggcctgggtctcccgcagccccagggaatcctttcctcctcaccctcctctgcaagctccacttctcaaaggattatgtctcctgttagggttgcatcctgtgtgcactttgtaaataaagcaggaagcacattcctgcttgagctgggggagggcacagataaggctttgtccccagctcagttcgctcccatcccccacctgtgcattccgggactgagccttgtttgtgttctggagaggcccctgcagccgggaacaggaatgtgattactcccagaaggttgtgttcctgcagcccctgaacccacagtgcccctatactcccatgttcccagctggacctttttctgtcctcaggccccagctggaggccttctccccaggctcactatggggtgggggcttttcctggctgcaggatgagctgacagtggaggggaccagggccaatttgacaggctgggatccccaaaaggacctgatcgtacgtgtgtgcgtctccaatgcagttggctgtggaccctggagtcagccactggtggtctcttctcatgaccgtgcaggccagcagggccctcctcacagccgcacatcctgggtacctgtggtccttggtgtgctaacggccctggtgacggctgctgccctggccctcatcctgcttcgaaagagacggaaagagacgcggtttgggcaagcctttgacagtgtcatggcccggggagagccagccgttcacttccgggcagcccggtccttcaatcgagaaaggcccgagcgcatcgaggccacattggacagcttgggcatcagcgatgaactaaaggaaaaactggaggatgtgctcatcccagagcagcagttcaccctgggccggatgttgggcaaaggagagtttggttcagtgcgggaggcccagctgaagcaagaggatggctcctttgtgaaagtggctgtgaagatgctgaaagctgacatcattgcctcaagcgacattgaagagttcctcagggaagcagcttgcatgaaggagtttgaccatccacacgtggccaaacttgttggggtaagcctccggagcagggctaaaggccgtctccccatccccatggtcatcttgcccttcatgaagcatggggacctgcatgccttcctgctcgcctcccggattggggagaacccctttaacctacccctccagaccctgatccggttcatggtggacattgcctgcggcatggagtacctgagctctcggaacttcatccaccgagacctggctgctcggaattgcatgctggcagaggacatgacagtgtgtgtggctgacttcggactctcccggaagatctacatgactgtcggtacatactcacccccggagggctggctgagcagccagggcaggcagagcaccagccagagagtcccctcaatgagacacagaggcttttgctgctgcagcaagggctactgccacacagtagctgttagcccacaggcagagggcatcggggccatttggccggctctggtggccactgagctggctgactaagccccgtctgaccccagcccagacagcaaggtgtggaggctcctgtggtagtcctcccaagctgtgctgggaagcccggactgaccaaatcacccaatcccagttcttcctgcaaccactctgtggccagcctggcatcagtttaggccttggcttgatggaagtgggccagtcctggttgtctgaacccaggcagctggcaggagtggggtggttatgtttccatggttaccatgggtgtggatggcagtgtggggagggcaggtccagctctgtgggccctaccctcctgctgagctgcccctgctgcttaagtgcatgcattgagctgcctccagcctggtggcccagctattaccacacttggggtttaaatatccaggtgtgcccctccaagtcacaaagagatgtccttgtaatattcccttttaggtgagggttggtaaggggttggtatctcaggtctgaatcttcaccatctttctgattccgcaccctgcctacgccaggagaagttgaggggagcatgcttccctgcagctgaccgggtcacacaaaggcatgctggagtacccagcctatcaggtgcccctcttccaaaggcagcgtgccgagccagcaagaggaaggggtgctgtgaggcttgcccaggagcaagtgaggccggagaggagttcaggaacccttctccatacccacaatctgagcacgctaccaaatctcaaaatatcctaagactaacaaaggcagctgtgtctgagcccaacccttctaaacggtgacctttagtgccaacttcccctctaactggacagcctcttctgtcccaagtctccagagagaaatcaggcctgatgagggggaattcctggaacctggaccccagccttggtgggggagcctctggaatgcatggggcgggtcctagctgttagggacatttccaagctgttagttgctgtttaaaatagaaataaaattgaagactaaaga

SEQ ID NO: 79023 - DNA, 820 bp, Homo sapiens
agcggtctggttagtgcaccaaacataatacaatatgccttcaatatgtcagcctgtttcatcctccctaaatacataattgattttcaacattttatgctccaattattgcccaaaagcagattggggcaagttcatatttcaaatactccttgcttaaaagtacaaaaagaatgaccagaacaattaatgaattgtcttcaatttttcttggaagagagtcatttgtttatgaccttctccaatttctccatcacacacatacatccccctaatatatcaaaaagaatacagaatttatataccctggctaaaaaatagagctacataaataccatgcaaaactaccaacaagaagagaagaatttttctttatttggaacaccgaaagagtagcctcctacatccccccacagaaacagaattaggaacaatgtcaaacaaaaattaaaagctcaaaattcccttttttaaaaaaagtagagctttatatttaggtcattttatttttaaccacagcctcctaaatgacctgaatatcccaacatccactctaagtgacaagttttgtaattcctctgaataatttagttgggcaaatttgttttactccttgttaaataaaaatgttacttcagaaattgacaagtcagttgccccacagaaattttcagtctcagtatcttccattcctattaggaaaaaactgtgtgagggaaagcacaactttaaaactgggtctcttgtgtggcagagacttcaaccgcacaatagagaggggcagtttcttgtttacctgaagtcttccatctatccacca

SEQ ID NO: 79024 - DNA, 475 bp, Homo sapiens
cctgcttaatattctcagttgtaattcttgttgttacaaacactttgaaattttaaattaaatttagctagaagtctttaagttccaactaatggctaatgtttgtagtaggtgcctttcagtagaatttgagggtggtgggaaaacctggcatttgaagcttccaacattctgagactgaggaggaataatcaagattaacagagtagaaccctcttaaataataccattgggacttgtaattgggcagttaactgaaaaagtcggttatagctgggactaataaaatgttaagacttaagcattttactttctttaaaacgtaaaactgcatttattcaccaatccttagatgtaaagctgccaagatcttttcttcgagtttagattgttgaatggtgttctcagagctctcacaaaaatcacacccttgatgcatgatgtatgatttcccattttgatttctttggagaaa

SEQ ID NO: 79025 - DNA, 350 bp, Homo sapiens
attcttattttttaagaaaggcattacgactgcttattattataaggtaaaggggaaattgaaggtcattgtacagatcacattagccagagggtacaatctcctgaaggcagtaacctcccctttattagggagaaagggggcatacatctaggaggcgcaggagcccttcatttctctactgagtaacacaggtctgagatgaaagccgagtgatggaatttgttcagaattctctggtttacctccctccactcttcaaattgtgccctcacccatctgtgcccaggagtggggccatgtcttcaatgagggtctcaccctagagccatttattccatctgagtcaa

SEQ ID NO: 79026 - DNA, 230 bp, Homo sapiens
gtcacgtaaatatctactacacacagtgtcaatccttaaggaccaaaatgaaacaaaacagaaatttttaagatataaatacattcaggatgtatcattattttcttcattgcttaagagattgggagaaaaaccattacatgtaaaattggaataataatgagatgcatcaccagtcatcaaatatgtttttgcccataaaataaaaccaaaacaaaattgactagata

SEQ ID NO: 79027 - DNA, 325 bp, Homo sapiens
aaattaaacattatcccaggtatgtatgtatggggaaaaacatacaatagctagggttcagaactctctatgcttctgggcatccactgttgtcttggaatgtatcccccaggatgagggtgaatgacagtaccatggattctattcatgtctccttaatccccacagtgaaccaagaatgcacctcccagtcactgactggctacagaaatcaatctccagggagaaatctgacaagtgacactgtgtggagtttcagttacagtgacacggcaatggaatacagtttgaaaggtacataaatagatttctctcctgcctagag

SEQ ID NO: 79028 - DNA, 562 bp, Homo sapiens
gtgaattgacattcccctgggagaacattttctgatattccagacatgattgggtctacctggtgtatgctctcataccttgcattttcctccagagcattttttcacagtctataatttcatatcaatagaatggctagttttaatctaatctataagacttataaacttggtaagggtagggatctcaattaatttgttcaccactgatttcctcattattcaatgtaacagtagtacatagtaggttcttcaagtgtttgttgagaataatgaggtggccgggcgtggtggctcacgcctgtaatcccagcactatgggaggctgaggcaggtggatcacgaggtcaggagttcaagaccagactggccaacatggtgaaaccctgtctctactaaaaatacaaaaattagctgggcgtggtggcgggcgcctgtaatcccagctattcaggaggctgaggcaggagaattgtttgaagccgggaggcgggggttgcagtgagccaagatcccaccactgcactccagcctgggtgacagagcaagactccatccccct

SEQ ID NO: 79029 - DNA, 736 bp, Homo sapiens
aaagaggaggtagacaggtcatcccactgaagtgagcaaagggctgaatggtctgagttgctgatgaagaaaactcatgaagagtttctgtaaaagcattcccaaatgtcctcatcaaagggaagggagtagatctaagggagggaagagtggcaaactctcccaacattttcctttattagtcgttccgtgttgaccaagggctcttatgaaacatgacatgtggttggccatggctatgctgcactctgaagagtggccatcctgccctttagatttgagccttttttctttctctgcattggtcgtgcatcaggttgttattgtcggggacaatcacaaaattactccattaggccaactacacatcttaaccaagccaaaaagatggccttacaaacacactgggttgccgcctggtgctgtgaccccatgagcattagtttcttcatatgtaaagtgagaattaaattaaatgagataatttttataatacaattagtatgtaattggcctttggtagattcttaatcatcagtaacattattattaccaacctatggtttttatcactaaatcagaatgtatttttgattatataaaaagctcttttggtggatgctaaaaaatgaaaactgactttgttttaagctatttcagatcatgtttatttgccctgtttgaaatccaaagctccaaatggttgaggacaaactcatcgctaatattgagattg

SEQ ID NO: 79030 - DNA, 539 bp, Homo sapiens
ttaaacatttctagaagcagttaacacctccaggtccttatttcatgccctggagcaatcacttattaaccacttcccaaatttcacagtttctgaaaattagctccgccagaatagagatttaatgttttcttcaaggattaaagagctcattaggaagtgatttttttctcactttcccattgatttttccgtttctgctgagaccattttgttatgcaggctaagagtaaagacgaagaatcctctctttcattcttaggttgccgcaagacagaagccaggcttgggtgagagttcaacacacatgggagctgaggcgagctgcacccgggttactgaacagccctgcaggaaatgcagtgtgctaggaccagggagagccccagttcctctgccagttctctatgttgtttcttccttagggaaaaactgtagtgttcattcctgtgggtgccctatattctaataacctcagtatttttatgatatttcagtgttcatcaagtacactctctttccctctcttggtatctttc

SEQ ID NO: 79031 - DNA, 922 bp, Homo sapiens
cgggccggccccgatacccagctccgcgccgcgcggacccaccgagcccgtgctcagacgccccagctccgccgagaagccgcttgagccgggtccttcttcttccccaagttcaggcagagcccgcggagccatggccagcccttccagcagctccgaagccactggcaagccccgaggcagggatggcagtcccaggatgggggaggaggacgtccctcccgaagagaagaggctggggctgtagctggaggggggaagcgcacagcccgaggactgcgaggacggggaggacccgccgctaccgggcaggaaggagaccggcacccagacaggtggcgacggcaaaggattcaggcagagcccgcggagccatggccagcccttccagcagctccgaaggccactggcaagccccgaggcagggatggcagtcccaggatgggggaggaggacgtccctccctgaagagaagaggctgggggcctgtagctggcaggggggaagcgcacagcccgaggactgcgaggacggggaggaacccgcgctgccaggcaggaaggagaccggcacccagacaggtggcgacggcaaaggagtaagtgatgcgggcgcgggggtccgggagtgccgggggctcgggggtgccggggacgcgacgaaggggcgtcgggaggctccgtggccgtccccgggttgaagttgggagtgcagccttcattctgaacccatttaggcagcatgggcagccctcctcgccatgggcaggatcagagcccccccgcccagtcttggggttgctcctggatgctgtctgggaggcttgctcatggtgacatcctcatctccccgtccacgttaccgcattcagagcttgggtcacctggacactgaactcaggtgaattttctctgagatcccg

SEQ ID NO: 79032 - DNA, 682 bp, Homo sapiens
tccagtttggccatgatacagggtctgtaaaagggagacatgagaaaagcctggaaagacctctctggtctgagaacaaactggtgaggatgctgttagtctggattctccccttagtgcatctgccaaggtgatatgatttctagaaacagagctttgaagcttctggggtagagaaagcctggccaggacctccaagggctcctgctggagaaggcttcaagataatcagtatctctattataactttggattccttgctctaaaaacagaggcaataataatagtatctgccttaaagcagttcacagaatttactgaaaggatgcctgacatgtggtaagaactcaatactggaaggatgcctgacatgtggtaagaactcaataaaagtttgcaaatataggccgggcgcagcggctcatgcctgtaatcctagcactttcggaggccaaggtgggtggatcacctgaggtcaggattttgagaccagcctggccaacatggtgaaaccctgtctctactaaaaatacaaaaattagttgtgcgtggtggcacgtgcctgtagtcccagctacatgggaggctgaggcaggagaattgcttgaatccgggaggcagaggttgcagtgagccgagatcatgccactgttctccagcgacagagtgagattccgtctca

SEQ ID NO: 79033 - DNA, 527 bp, Homo sapiens
ccagtgaccttgcacattccatcaatctttaataatatcattgtcattactcttattatcttaagtgttaaattgttgccagaatcaatacaagtctacttctttgaatatattttatcccagtgttgtttttaacatctttgttaagaggccaattaatttccaactcacagctccagtgaagtttatatataatgaggatttcctgactctttttcttttttccttcttttcttttttttttttttgcttatttctacttttgaaagaagacaaataaatggcatgtgaaaatgtgaaacaaacaacttgccatttaaaatgatatgaaattatttctaaactgatgaaaggaaaaaatatgccaaaaactgagacaaagcacattgaactaatacttgtttaatttctttttttatctgagcagcaggactaattttctcaaattcgatcagattgtatagcttagcaacccctccagggtcgccagaactagaggaatttctctaagcagaatctaaatgcct

SEQ ID NO: 79034 - DNA, 366 bp, Homo sapiens
aatgaactaaagatggtttgttgtgttggagaaatagagaatgtcagtaagatgaagtgtcatgaagatggcagaagaccatatgtgcccatcatccccttgcttaccaagtccttacaggaatttacaggagatactgtttcactgtgtgttgttttaaagagtaaatctccagtgatgctggaaaacaaggaagagtacacacatacacatacacacacacacacacacacacacacacacacacacacgtatgtttttgtttttgtgggtttgttttttttttgtttttttttagttttgttacaggccataaacttcaaaagactcaaagcagataggattgtatcgttgaggaaaaccaac

SEQ ID NO: 79035 - DNA, 212 bp, Homo sapiens
aatggaactatattagagctatgtttttatattttactggaacttactggaatatattttccagaattaatatgaatcagtacattgtgataaattaagacatatattttaacccctagataaatcactaagaaaataactccaaaaaatagttaaaacaaaaaacttataatagaacactataaaatatgtatttttaacacaaaagaaag

SEQ ID NO: 79036 - DNA, 408 bp, Homo sapiens
cgaaagcaactgcgatgattcttttatagtttattatagaataaaaaatccttttgaaagtaaaagaaagtgtacttaaatggcaactggtaacattgctgacacttttccaacctctacctcctgggttcaaatgattctcctgcctcagcctcccaagtagctgggattacaggcaaccgccaccacgcccagctaatttttgtatttttggtagagacggggtttcaccatggtggccaggttggtctcaaactcctgacctcgtgatccacctgctttggcctcccagagtgctaggattacaggcgtgagccactgtgcccggctgacacttttctatactgataggaatcttcatgatcagatgttgtcaaatacttttaaagtttatatataacattgtat

SEQ ID NO: 79037 - DNA, 272 bp, Homo sapiens
ttggatgctctggggggccgcctactactactactgctcgaattcaagcttctaacgatatacggggacatgctggttttttcatactattggttgtctctgtaatgcgagcagcttttgatctattaattaatgagatattaaaagtgatggtattctaaaaaaaatattccttcatttatgatctaaaatacctctaaataggaacttcctctcatctactttttgggggaagttaagaataaatgcctaactccttggtcttcaaaata

SEQ ID NO: 79038 - DNA, 1362 bp, Homo sapiens
aaaaacagccattactaatatctgcattagtctactcaggttgcaatcataatatgctaaagtagtaaacttttaaaaatgacagtaaacctgagtttattaacaggttacattctaaaagctaagctagtttggaaattggaaagcaaatgtgtgtagatattcatatgtccttgaccagactgggcctttctcttcccaggtaagtcattctctccaatggggccagttacttaaaattacatcagacaattgatagagcttctagatcccccttctaaaacaaaagcattttgccacaaactaggatggagtaggtttttttcagactatttatacttattttatgtatttcaatactgccctttaagtaaaagtactatatactttctctttttttagattaattctgcttaagtcagtcttttaatttattctagtttgagtttttaaaaaattttagaatgaaaaatctcaaaaatatactattatgtatatacactattttatatatatatatatatatatatagagagagagagagagagagagagaaagagagaataaagaacacctaggtaacccatcctccaccttcgacaattatcagctcctagctaatttgtgtcatctgtaaccccacctgcttctgccctttctgtattattttgaagcaaatcttatcatttatctgtaaatatttcaggactttaaaaaatatgtgtaatctgaataccatttttacacctaagaaaatggacaattccttaatataatgtgttgtctatagatgtcaaaaatttttgcagttttttggaatcaggaaccaagtaaggtactgaatattgcagttagctgatacacatcctaaatttcttcaattgttgtggtcctcaaactagagtgtatcagaatcactagagccttgttagaacacaaactgctgggccccaccccagagctggtgatctgtaagtctgctgtggagtctgggaatttgcatctctaacaaattcccaggtgatgctgaagctgcaggtttggggttcactcacctattggttcatcagcatctctctgccctcttacaatatatttgttgaagaagttgtgttgtttaccttgtagagtttttcttagtttggattttggtgatagcatgctggttttttcatactattggttgtctctgtaatgcgagcagcttttgatctattaattaatgagatattaaaagtgatggtattctaaaaaaaatattccttcatttatgatctaaaatacctctaaataggaacttcctctcatctactttttgggggaagttaagaataaatgcctaactccttggtcttcaaaata

SEQ ID NO: 79039 - DNA, 424 bp, Homo sapiens
gaatttttgctagtcttagcccccagttgtaaaataatgtcatgaaaacatttttatttcctaatgattataacaaagggaaaagatcttaaagagttgactttggtagtacaagtttgcgcaaatgattgatgattttttatttccttgatttgtgcattagcagcttttagtgtgtcatatcaagaggaatactggggaaataatataatgattgtttatatggagttctctactttcttgttttggcagtgtttgaaagttaggactgatcctgagggagttgaattttgtaaagttaattactttcctgctgccagtagtgatttatatctgtgatattatatcagctagtcatatgagaatgagaaacaaaattactttttctgcaattaccaactcactagtagggtattcaggtgtc

SEQ ID NO: 79040 - DNA, 475 bp, Homo sapiens
gcctctttatgaaattctttgagataatcttatagaggttagctgtaaccttgttccttgaaattctcttttggcactaggaacaggacaggcacatgagctgtgttttaggtttatttggagtatttaagatggattcagaagaaagcaacaaaacttacaagttaagattttattataactgcagttttctaatttagaagagaaacctggaagtaaatttaattatatttaattgtaattttctagtgtgcgtgtgtattttccataatttaaaaattattcttatttatttccttttgacaaacatatcagtttttaattctttggtgtttatttttatgtaaattattgacagcctgcattaagtgtttcagtagtgattttctaacaaccatacagtgttagtggcctgatgttcccttttttaatggaaggtgaatcacaaaatagggttaaaaactgtaacagaaaa

SEQ ID NO: 79041 - DNA, 879 bp, Homo sapiens
atttgttaaaaagaagtaaacatgttaatgaaacagaaaaaaagtaaattaatagaccaattcctggcaaagatgatgagaatgctaattcagtttaagagggagaaaataaatcatcatctctgggggcctacaattcagaaagacagtccagggcaggcgggcagactctgctccacgaagtcatccagagattgaaactagcaggtgctctgccattgtataaggcatcctttttttttggtctgcatggcagaaattaaatctctgaaacatttgtgttccagacaataggaggagaaagaaaggagggagcattacaaacaagatcttaagaccaatgttctggaagtgacatgtgtctcttctgctcatattccatcagtaagaacctgatttttggtgagaacacaggggactgagaaatgtaatatagctgggatgccatgtgcctggctggtagaagaaaggaaaaacatatttttgtggtctacttagcagtgtctctcacacctgctacagtggacctttataaattatgtaaaagtagtgtatatatggataaaactaaatatttcagtgacatgaagtgttctgagaaaatgtaaatgaaccaaattgaagaaaagagaagtagaaaatatgaaaagataataattctttccaacattgcctttgtctaaggcagttttactgctttactgctgtgtcttttaactttcaataagtagataaataccatattatagaaacttcttcagagcattataaaaaacaatttgccatcaattccttttgaaaaggtagaataatcctgatgctcaagcttgaaaaatataatacatcaaaggacattctagacccatctcattgagaata

SEQ ID NO: 79042 - DNA, 3493 bp, Homo sapiens
ggcttatagggctcgagcggccgcccgggcaggtatagaattcagcggccgctgaattctagggttttcaggagcccgagcgagggcgccgcttttgcgtccgggaggagccaaccgtggcgcaggcggcgcggggaggcgtcccagagtctcactctgccgcccaggctggactgcagtgacacaatctcggctgactgcaaccactgcctccagggttcaagcgattctcttgcctcagcctcccaagtagctgggattacagattgatgttcatgttcctggcactactacaagattcatactcctgatgctactgacaacgtggcttctccacagtcaccaaaccagggatgctatactggacttccctactctcatctgctccagccccctgaccttatagttgcccagctttcctggcaattgactttgcccatcaatacacaggatttagcatccagggaagatgtcggagcctcagatgttaattttctaattgagaatgttggcgctgtccgaacctggagacagaaaaacaaaaagtcctttctcctgattcaccaaaaaataaaatactgactaccatcactgtgatgagattcctatagtctcaggaactgaagtctttaaacaaccagggaccctctgcccctagaataagaacatactagaagtcccttctgctaggacaacgaggatcatgggagaccacctggaccttctcctaggagtggtgctcatggccggtcctgtgtttggaattccttcctgctcctttgatggccgaatagccttttatcgtttctgcaacctcacccaggtcccccaggtcctcaacaccactgagaggctcctgctgagcttcaactatatcaggacagtcactgcttcatccttcccctttctggaacagctgcagctgctggagctcgggagccagtatacccccttgactattgacaaggaggccttcagaaacctgcccaaccttagaatcttggacctgggaagtagtaagatatacttcttgcatccagatgcttttcagggactgttccatctgtttgaacttagactgtatttctgtggtctctctgatgctgtattgaaagatggttatttcagaaatttaaaggctttaactcgcttggatctatccaaaaatcagattcgtagcctttaccttcatccttcatttgggaagttgaattccttaaagtccatagatttttcctccaaccaaatattccttgtatgtgaacatgagctcgagcccctacaagggaaaacgctctccttttttagcctcgcagctaatagcttgtatagcagagtctcagtggactggggaaaatgtatgaacccattcagaaacatggtgctggagatactagatgtttctggaaatggctggacagtggacatcacaggaaactttagcaatgccatcagcaaaagccaggccttctctttgattcttgcccaccacatcatgggtgccgggtttggcttccataacatcaaagatcctgaccagaacacatttgctggcctggccagaagttcagtgagacacctggatctttcacatgggtttgtcttctccctgaactcacgagtctttgagacactcaaggatttgaaggttctgaaccttgcctacaacaagataaataagattgcagatgaagcattttacggacttgacaacctccaagttctcaatttgtcatataaccttctgggggaactttacagttcgaatttctatggactacctaaggtagcctacattgatttgcaaaagaatcacattgcaataattcaagaccaaacattcaaattcctggaaaaattacagaccttggatctccgagacaatgctcttacaaccattcattttattccaagcatacccgatatcttcttgagtggcaataaactagtgactttgccaaagatcaaccttacagcgaacctcatccacttatcagaaaacaggctagaaaatctagatattctctactttctcctacgggtacctcatctccagattctcattttaaatcaaaatcgcttctcctcctgtagtggagatcaaaccccttcagagaatcccagcttagaacagcttttccttggagaaaatatgttgcaacttgcctgggaaactgagctctgttgggatgtttttgagggactttctcatcttcaagttctgtatttgaatcataactatcttaattcccttccaccaggagtatttagccatctgactgcattaaggggactaagcctcaactccaacaggctgacagttctttctcacaatgatttacctgctaatttagagatcctggacatatccaggaaccagctcctagctcctaatcctgatgtatttgtatcacttagtgtcttggatataactcataacaagttcatttgtgaatgtgaacttagcacttttatcaattggcttaatcacaccaatgtcactatagctgggcctcctgcagacatatattgtgtgtaccctgactcgttctctggggtttccctcttctctctttccacggaaggttgtgatgaagaggaagtcttaaagtccctaaagttctcccttttcattgtatgcactgtcactctgactctgttcctcatgaccatcctcacagtcacaaagttccggggcttctgttttatctgttataagacagcccagagactggtgttcaaggaccatccccagggcacagaacctgatatgtacaaatatgatgcctatttgtgcttcagcagcaaagacttcacatgggtgcagaatgctttgctcaaacacctggacactcaatacagtgaccaaaacagattcaacctgtgctttgaagaaagagactttgtcccaggagaaaaccgcattgccaatatccaggatgccatctggaacagtagaaagatcgtttgtcttgtgagcagacacttccttagagatggctggtgccttgaagccttcagttatgcccagggcaggtgcttatctgaccttaacagtgctctcatcatggtggtggttgggtccttgtcccagtaccagttgatgaaacatcaatccatcagaggctttgtacagaaacagcagtatttgaggtggcctgaggatctccaggatgttggctggtttcttcataaactctctcaacagatactaaagaaagaaaaagaaaagaagaaagacaataacattccgttgcaaactgtagcaaccatctcctaatcaaaggagcaatttccaacttatctcaagccacaaataactcttcactttgtatttgcaccaagttatcattttggggtcctctctggaggttttttttttctttttgctactatgaaaacaacataaatctctcaattttcgtatcaacaccatgttctgtctcactaacctccaaatggaaaataatagatctagaaaattgcaactgcc

SEQ ID NO: 79043 - DNA, 3429 bp, Homo sapiens
ggcttatagggctcgagcggccgcccgggcaggtatagaattcagcggccgctgaattctagggttttcaggagcccgagcgagggcgccgcttttgcgtccgggaggagccaaccgtggcgcaggcggcgcggggaggcgtcccagagtctcactctgccgcccaggctggactgcagtgacacaatctcggctgactgcaaccactgcctccagggttcaagcgattctcttgcctcagcctcccaagtagctgggattacagattgatgttcatgttcctggcactactacaagattcatactcctgatgctactgacaacgtggcttctccacagtcaccaaaccagggatgctatactggacttccctactctcatctgctccagccccctgaccttatagttgcccagctttcctggcaattgactttgcccatcaatacacaggatttagcatccagggaagatgtcggagcctcagatgttaattttctaattgagaatgttggcgctgtccgaacctggagacagaaaaacaaaaagtcctttctcctgattcaccaaaaaataaaatactgactaccatcactgtgatgagattcctatagtctcaggaactgaagtctttaaacaaccagggaccctctgcccctagaataagaacatactagaagtcccttctgctaggacaacgaggatcatgggagaccacctggaccttctcctaggagtggtgctcatggccggtcctgtgtttggaattccttcctgctcctttgatggccgaatagccttttatcgtttctgcaacctcacccaggtcccccaggtcctcaacaccactgagaggctcctgctgagcttcaactatatcaggacagtcactgcttcatccttcccctttctggaacagctgcagctgctggagctcgggagccagtatacccccttgactattgacaaggaggccttcagaaacctgcccaaccttagaatcttggacctgggaagtagtaagatatacttcttgcatccagatgcttttcagggactgttccatctgtttgaacttagactgtatttctgtggtctctctgatgctgtattgaaagatggttatttcagaaatttaaaggctttaactcgcttggatctatccaaaaatcagattcgtagcctttaccttcatccttcatttgggaagttgaattccttaaagtccatagatttttcctccaaccaaatattccttgtatgtgaacatgagctcgagcccctacaagggaaaacgctctccttttttagcctcgcagctaatagcttgtatagcagagtctcagtggactggggaaaatgtatgaacccattcagaaacatggtgctggagatactagatgtttctggaaatggctggacagtggacatcacaggaaactttagcaatgccatcagcaaaagccaggccttctctttgattcttgcccaccacatcatgggtgccgggtttggcttccataacatcaaagatcctgaccagaacacatttgctggcctggccagaagttcagtgagacacctggatctttcacatgggtttgtcttctccctgaactcacgagtctttgagacactcaaggatttgaaggttctgaaccttgcctacaacaagataaataagattgcagatgaagcattttacggacttgacaacctccaagttctcaatttgtcatataaccttctgggggaactttacagttcgaatttctatggactacctaaggtagcctacattgatttgcaaaagaatcacattgcaataattcaagaccaaacattcaaattcctggaaaaattacagaccttggatctccgagacaatgctcttacaaccattcattttattccaagcatacccgatatcttcttgagtggcaataaactagtgactttgccaaagatcaaccttacagcgaacctcatccacttatcagaaaacaggctagaaaatctagatattctctactttctcctacgggtacctcatctccagattctcattttaaatcaaaatcgcttctcctcctgtagtggagatcaaaccccttcagagaatcccagcttagaacagcttttccttggagaaaatatgttgcaacttgcctgggaaactgagctctgttgggatgtttttgagggactttctcatcttcaagttctgtatttgaatcataactatcttaattcccttccaccaggagtatttagccatctgactgcattaaggggactaagcctcaactccaacaggctgacagttctttctcacaatgatttacctgctaatttagagatcctggacatatccaggaaccagctcctagctcctaatcctgatgtatttgtatcacttagtgtcttggatataactcataacaagttcatttgtgaatgtgaacttagcacttttatcaattggcttaatcacaccaatgtcactatagctgggcctcctgcagacatatattgtgtgtaccctgactcgttctctggggtttccctcttctctctttccacggaaggttgtgatgaagaggaagtcttaaagtccctaaagttctcccttttcattgtatgcactgtcactctgactctgttcctcatgaccatcctcacagtcacaaagttccggggcttctgttttatctgttataagacagcccagagactggtgttcaaggaccatccccagggcacagaacctgatatgtacaaatatgatgcctatttgtgcttcagcagcaaagacttcacatgggtgcagaatgctttgctcaaacacctggacactcaatacagtgaccaaaacagattcaacctgtgctttgaagaaagagactttgtcccaggagaaaaccgcattgccaatatccaggatgccatctggaacagtagaaagatcgtttgtcttgtgagcagacacttccttagagatggctggtgccttgaagccttcagttatgcccagggcaggtgcttatctgaccttaacagtgctctcatcatggtggtggttgggtccttgtcccagtaccagttgatgaaacatcaatccatcagaggctttgtacagaaacagcagtatttgaggtggcctgaggatctccaggatgttggctggtttcttcataaactctctcaacagatactaaagaaagaaaaagaaaagaagaaagacaataacattccgttgcaaactgtagcaaccatctcctaatcaaaggagcaatttccaacttatctcaagccacaaataactcttcactttgtatttgcaccaagttatcattttggggtcctctctggaggttttttttttctttttgctactatgaaaacaacataaatctctcaattttcgtatca

SEQ ID NO: 79044 - DNA, 585 bp, Homo sapiens
ggcttatagggctcgagcggccgcccgggcaggtatagaattcagcggccgctgaattctagggttttcaggagcccgagcgagggcgccgcttttgcgtccgggaggagccaaccgtggcgcaggcggcgcggggaggcgtcccagagtctcactctgccgcccaggctggactgcagtgacacaatctcggctgactgcaaccactgcctccagggttcaagcgattctcttgcctcagcctcccaagtagctgggattacagattgatgttcatgttcctggcactactacaagattcatactcctgatgctactgacaacgtggcttctccacagtcaccaaaccagggatgctatactggacttccctactctcatctgctccagccccctgaccttatagttgcccagctttcctggcaattgactttgcccatcaatacacaggatttagcatccagggaagatgtcggagcctcagatgttaattttctaattgagaatgttggcgctgtccgaacctggagacagagtatcagcgcctttgcttgctgctgtttttgctgttttttgatgctggga

SEQ ID NO: 79045 - DNA, 1735 bp, Homo sapiens
  misc_feature (191)..(191): n is a, c, g, or t
ctcttatcctgttacccttacataaaaccagttatgataattgtatgtttggaagataaattgtatgctgagccttaaaacccagtgtgactgtagaagatataatgcggacatgatttgaatttagtgacagcttggctgatgtcactgaaccagaagggtttatactgagtgaaggaaaggtaaaaagnagtattttgtatatttttgtaacaaaatataaatgaagatattttaccatgaagagattgcacttatccttgagaacagtctaaatataaatgaagatattttaccatgaagagattgcacttatccttgagaacagtctaatgatactttttttactttcagactgtttctagctaaagttctgataaaagtattgagttaatttaaactttcaaacactgtttagatcagttgaaaactaattcttaatagccattgttttataatctttagtttaaattcatctgtttgacatttggttttttgtgaacttgagtcagtcctattgaacattttgacctatattcttgcaaattatgttaatttttcatattttagtttgattttagacaattattttcaaaaagaaacctgactttttttcaccttcttgacattgtgagtgatacacgttaaaaggctatttgcccgcatcctcctctatcctgtttcgaggtagagagcttggcacttctgttacaagctgagagtctggaggtgctgagtttaacgtggctgtgcaggtgatttcaaggcatgagctgaacagcgttgacacagccgtgacttacaattaaaccctttcaattacagtacagattctgtgtgctacttgatgagatgttacccaaggccagtttggacttactgctttttgtccctcatattaaattatcaaatgatgccgatgaaatgcttgaaaatgattctgctctcaaagttatgcttccctagaaaggtgtcatgtcgggcacttgtgttgggtgactatgacatcccagcagtgctggtcaggtctcagagttgctttcacctagagctgatgcttccacaaggggacatttgtgttactttgctccaggggtctgtcataaaaacaatggtaactacttcatccctaggaagcccaagacttcagggcactgttagctgattggtaaataagggacacgatattcacgggaattgtttactgctccccactagtaattctcatggggccacttttttaactctttctaattaacacctcttctcagcatagagcagaggatgcagtcatttctctgttgaaatctatgtagtatttatgtagaatgtcattatatgaaaagcgaattcagaatcctaactctgggaaagcgctctctggaaatgtagtttgataatagtgtcttataggggccacgggaatttgtttctctataaagcgatgggctccagtgtcatgttaccagagttatcgctcagttttgtttgttaaggcttttgctagaacctattatgtatccagtttttaaaacatacttcattcccttgatagcagagatccagagcacagatggcaagttgtgtggatgatactgaatatgtttattttcctaaagataaatgtcacgacacgacatttctcagtttttatttagatgtttattaccatgtgttaacagaatcttaaaacccaagggatttcttcagtaaactagactttgattcaacctgc

SEQ ID NO: 79046 - DNA, 916 bp, Homo sapiens
  misc_feature (191)..(191): n is a, c, g, or t
ctcttatcctgttacccttacataaaaccagttatgataattgtatgtttggaagataaattgtatgctgagccttaaaacccagtgtgactgtagaagatataatgcggacatgatttgaatttagtgacagcttggctgatgtcactgaaccagaagggtttatactgagtgaaggaaaggtaaaaagnagtattttgtatatttttgtaacaaaatataaatgaagatattttaccatgaagagattgcacttatccttgagaacagtctaaatataaatgaagatattttaccatgaagagattgcacttatccttgagaacagtctaatgatactttttttactttcagactgtttctagctaaagttctgataaaagtattgagttaatttaaactttcaaacactgtttagatcagttgaaaactaattcttaatagccattgttttataatctttagtttaaattcatctgtttgacatttggttttttgtgaacttgagtcagtcctattgaacattttgacctatattcttgcaaattatgttaatttttcatattttagtttgattttagacaattattttcaaaaagaaacctgactttttttcaccttcttgacattgtgagtgatacacgttaaaaggctatttgcccgcatcctcctctatcctgtttcgaggtagagagcttggcacttctgttacaagctgagagtctggaggtgctgagtttaacgtggctgtgcaggtgatttcaaggcatgagctgaacagcgttgacacagccgtgacttacaattaaaccctttcaattacagtacagattctgtgtgctacttgatgagatgttacccaaggccagtttggacttactgctttttgtccctcatattaaattatcaaatgatg

SEQ ID NO: 79047 - DNA, 943 bp, Homo sapiens
  misc_feature (943)..(943): n is a, c, g, or t
aattggcaaggtaatggtctgaatcggacaatccttttgtttttacattgatgttttctatatttattttgtacctggaaaaatatttttacaatttattttgattttatatgtgtagaaaaatgtactgaacaatgttgacatgcttatttttgtaagagatgggtacttcttgttccccttggatttcggaagcaaagcaatgggaccctacgcttcagagtcttaatggggtggggcagtgtccattgaggtgtcctgtcgggaatgacaagtccagggcagattatgaggcaggcatcctttggagttcttctctcaggtatattttaactaaaagctatcatttaagttgaagaaatcaagtcttgtgaattgatacgattgtacttctagagtctttgatgataagttgtctttgggtactacgcttggctcctcgatctttcaaagtgtcatttaaatggaaataaatgtctgaaacagaaaaacaaaaaaacaaaaacaaaaaaaaaaactttttgtggcgcgcgcgcctgtggcgccctctcgagaagaagctttctttaagacaccacaatctcgtttgtgggcgggccgcgggcgccccaaattggggtttaagggttacacacaattgggtctcaaaaaacgaaggataccccatagggagaaaatctccttggggctacatgagaccatagtctcgtttagaggattttctttcccccaattatttaataaaaaaccgcccccggggagggaaaaaccgagagaacggcgtgtttcgtaggaacagaaactcccaaggaaattggggaggtttccggagaggggctcaatacacgggggaattactattttacagcagagaggagctttccaaacaggaggagctctcagcattatctacaagttttacccccccggcctagtggggagn

SEQ ID NO: 79048 - DNA, 487 bp, Homo sapiens
aattggcaaggtaatggtctgaatcggacaatccttttgtttttacattgatgttttctatatttattttgtacctggaaaaatatttttacaatttattttgattttatatgtgtagaaaaatgtactgaacaatgttgacatgcttatttttgtaagagatgggtacttcttgttccccttggatttcggaagcaaagcaatgggaccctacgcttcagagtcttaatggggtggggcagtgtccattgaggtgtcctgtcgggaatgacaagtccagggcagattatgaggcaggcatcctttggagttcttctctcaggtatattttaactaaaagctatcatttaagttgaagaaatcaagtcttgtgaattgatacgattgtacttctagagtctttgatgataagttgtctttgggtactacgcttggctcctcgatctttcaaagtgtcatttaaatggaaataaatgtctgaaacaga

SEQ ID NO: 79049 - DNA, 399 bp, Homo sapiens
  misc_feature (1)..(1): n is a, c, g, or t
ntgccaaagcgtagtacccaatatgtgtagaaaaatgtactgaacaatgttgacatgcttatttttgtaagagatgggtacttcttgttccccttggatttcggaagcaaagcaatgggaccctacgcttcagagtcttaatggggtggggcagtgtccattgaggtgtcctgtcgggaatgacaagtccagggcagattatgaggcaggcatcctttggagttcttctctcaggtatattttaactaaaagctatcatttaagttgaagaaatcaagtcttgtgaattgatacgattgtacttctagagtctttgatgataagttgtctttgggtactacgcttggctcctcgatctttcaaagtgtcatttaaatggaaataaatgtctgaaacaga

SEQ ID NO: 79050 - DNA, 855 bp, Homo sapiens
  misc_feature (1)..(1): n is a, c, g, or t
  misc_feature (855)..(855): n is a, c, g, or t
ntgccaaagcgtagtacccaatatgtgtagaaaaatgtactgaacaatgttgacatgcttatttttgtaagagatgggtacttcttgttccccttggatttcggaagcaaagcaatgggaccctacgcttcagagtcttaatggggtggggcagtgtccattgaggtgtcctgtcgggaatgacaagtccagggcagattatgaggcaggcatcctttggagttcttctctcaggtatattttaactaaaagctatcatttaagttgaagaaatcaagtcttgtgaattgatacgattgtacttctagagtctttgatgataagttgtctttgggtactacgcttggctcctcgatctttcaaagtgtcatttaaatggaaataaatgtctgaaacagaaaaacaaaaaaacaaaaacaaaaaaaaaaactttttgtggcgcgcgcgcctgtggcgccctctcgagaagaagctttctttaagacaccacaatctcgtttgtgggcgggccgcgggcgccccaaattggggtttaagggttacacacaattgggtctcaaaaaacgaaggataccccatagggagaaaatctccttggggctacatgagaccatagtctcgtttagaggattttctttcccccaattatttaataaaaaaccgcccccggggagggaaaaaccgagagaacggcgtgtttcgtaggaacagaaactcccaaggaaattggggaggtttccggagaggggctcaatacacgggggaattactattttacagcagagaggagctttccaaacaggaggagctctcagcattatctacaagttttacccccccggcctagtggggagn

SEQ ID NO: 79051 - DNA, 452 bp, Homo sapiens
agcctgcctcttgccctctttactaaaaaggcctttgcagaggctgcctgtgttctttctttctaggtctctctcatcctaggccctccagcttgattctgtggagctgccctcttgtcactcagtagcttgtggggtcttctctgtctagccacttaattgattgtgttcctcgagttgctgtccatggtctctcgttactgttttctctgtgtttctgcctctctccttggccttggtaggtccatcccctttgtgaccttggctgttgctctcatggacaactttctcttgctggtccttgtagtcctggcatccagcttctcgacacgggacttgtcctgccagtacctcagacttgcacttaaaattgaactagcaccactgtcactctccagggcctcttcttgttaattagatcattagggatgttcagaatcccagcatcatag

SEQ ID NO: 79052 - DNA, 618 bp, Homo sapiens
agcttccaactgtttatgagttacatctgtgttcttattttagtataattgtagtaaacttaatattcacactgaaagaaatagtaggaatatggctgatttcgaatggtaaacaaatcatacatattaatgttgctttgaaacatttttttgttgttgttttgagacggcgtcttcactctgttgcccaggctggagtgcagtggcactatcttgactcactgcaacctccacctcctgggttccagtgattctcctgctgcagcctccctagtagctaggaccacaggcacatgcccccacgcctggctaattttttaccttttttgtagagacagggcttcaccgtgttacgcaggatggtcttgatctcctgacctcgtgatctgcctgccttggcctcccaaagtgctgggattacaggcatgagccactgtgcctgtcaaaacatatatatatatatttttaagattttgtttgaatatggaaatagccaatctggggatttcccacagttacgaagcggggtgtgtgtgtgtgtgtgtgtcttaacataggggacttaggagttatctcatttctttaccattcccttaactaatctgttctggattaggc

SEQ ID NO: 79053 - DNA, 906 bp, Homo sapiens
agcggattattttgtctggccaaaccaatgtatcatttgaaaattatctgatttataaatttggtttactcacaaagtctactgcatatatgcccagtgaatttctgaaacaaaaaacacaaaatcatttggcagcatttattcctttggaagctatattttgggatctatttatatttttctgtaatgtttaatcatgccaaacaatatgatccattaatcatgtaggataatattaaaattccagtgtgtcattaaagttttacaaatgaatcaattaaagttatgaataattcagagatctaatatccacttagctgtcaatataaccaaatacaatcattcactgaaaattttttgctttgttctttgctgctcaaagtttggtctgtgagccataagtgccctggtcacctgggaacttgtttgaggtagaaaaccccaggcaccacctacatctcatgtaacaaaatccttagctgattcgtgcgcaccttaacatttgagaagggcttcctagggatatataaagatataccatacaaatgttgcaaatttatggtcaaaaaggatcaggatcagggaagaaaatttgtttattttttaatcccttatttcttagcttgtaaaacatattttctagagaaaaatgtgtctcttcaaggcaactggatattttgatgcaagatccctgactttaaaactttgggattgtcagaggcactgaaaccagagtgactctatcttgaataggtgctgggtaaaatgaggctgagacctgctgggctgcattcccaggtgaggcatttttaggcacaggatgtttacaattcagggaacagattcgtaatatttacccaatagacccaggacttgtaacagacccagcaaaagtcctgatgtccc

SEQ ID NO: 79054 - DNA, 399 bp, Homo sapiens
agagttaagttcctctaatgctagaaagaaaggtaatttttaaaattgagattgaagttatagtttttttgtgattaatttatttgtgagaattcctttgggccccttcaaatcaaatttagaaagagttcatgtctttccttatgttgaaaagatctcaggatctttcatttgagaattttagtctctgatctgaaatgtggcctagactagtacttttcatgctatgtgtgagagagctctagggttctacagaggtgctgtgtagcttcctcatttgtgcttttatctatttcatatattgaatttttgtaaaaaattttgtttgggagtacaaagttctgctatctaaaaaaagaaagtttgaaaaatattgagcattttatagttagtagcaga

SEQ ID NO: 79055 - DNA, 463 bp, Homo sapiens
tcgagaaaattgttgtcagataattctctgtagatctctctcatttctgcatatcttgaatgcacaggtactaattgacctttgttctggagcaaagagcagccatgtatgctgtttagaataatgaataagttgtctgtctgtggcaaagatcaggcctgctgactcccggttttgaaagacttgggttccataagctcaggaatcctctcctgtagaatgtgttcaagcatttatctgggcacttcttggaaacaaaggaaactggcaaatatgcagatgctcatgcttcttgctttgtttaaagaggaaaactgaagcattgtctctaaaagttggaaacatatggttaaagtacaggtgacttcagtgatgccacacactggccacacactaaggagaaagggtctgagggaagaggaagaaagtcaccactgaggaagtgaagaaggagttgccatct

SEQ ID NO: 79056 - DNA, 844 bp, Homo sapiens
aaaaaaaaaaaaaaaaaaagactagagaatgtcagggaacacatgtgtatatttaaacaacttcactttgcatttaaaaactcgaaggacagcgaaggtgaaatcaattcacgggccacctagactttccagtctaggactagagctgtagcaatgatctgttgtgctgtacaagaaaagagaaagaggtgttcatttgagaacagatgtttttatacatcagagtaaaagctgtattgaagagcaggctgaatcccttccatatagaatgaaatatgagcttgaccccagtccttatcttcagttacctccataccaactggtggcatgttggatttagcatgtagaataatttcccatctcttatttttcccaaggttaatggcatccttctggtacctggcttacatgtgaactgaattttgatctgggttctattttgaatttttctccttcagagacctaagtaggcaacatgaaagacaagtagttaagaaagaaaaaatgatgtttcatacacacaggctaccaacgagagttttctatgtaaaacatttagagtgtattctgatttaaaatgagaataacttcaaggtagatattatagtatttatgtagtttgcaaaagaagtttacatttttttgctattgtgatataacatttatgtgcaagaactacttgtaataaaaggatttgagatgtcatgcttctaaatataatagcctaaaatagagaatattatgatttgaaagtgtagatttcacaaactctgtatagtatgtgggtctatctgaagcttttatcgaagctacctataaaataaaattttaaaagatctgttct

SEQ ID NO: 79057 - DNA, 462 bp, Homo sapiens
caaagtgaagttgtttaaatatacacatgtgaactgaattttgatctgggttctattttgaatttttctccttcagagacctaagtaggcaacatgaaagacaagtagttaagaaagaaaaaatgatgtttcatacacacaggctaccaacgagagttttctatgtaaaacatttagagtgtattctgatttaaaatgagaataacttcaaggtagatattatagtatttatgtagtttgcaaaagaagtttacatttttttgctattgtgatataacatttatgtgcaagaactacttgtaataaaaggatttgagatgtcatgcttctaaatataatagcctaaaatagagaatattatgatttgaaagtgtagatttcacaaactctgtatagtatgtgggtctatctgaagcttttatcgaagctacctataaaataaaattttaaaagatctgttct

SEQ ID NO: 79058 - DNA, 376 bp, Homo sapiens
gacagggtcagggagtcaaggtggggccctacaggtcacctcctggcccacagcccctccctggccatgtcagcccctaactccccaggcagttgtgggtgtgggtggcaggtcagcatttcgagctttgccctcctgccactgcctgtcctggccactcatcagagcctgtcctctggaaaacaagacaaaggacgtgatttcacaagtgcctgggccagaatctcaaattcaggattaagaaaaagaaggattggctgggcacggtggctcctgcctataatcccagcactttgggaggccgaggtgggtggatcatgaggtcaggagtttgagaccagcctgaccaacatggtgaaacctcatctctactaaa

SEQ ID NO: 79059 - DNA, 1787 bp, Homo sapiens
acttaaacggaatggaacggaacgggaggccccggctggtgggcaggtcgcctgctgctgatacaggaagggacaaagggctcggacgattccggtctttccttagctgctctccttgcaagctctttcctccccatgggtctcttgatgagtccaacaagacgggcatggagcccgatctcacagatggggaagctgaggccagcggcagcttcccccagcacagaagagagctcctggcattccagcagggggtgactggaagaaaaccagggacctggtctaaccacctcactcttcagatggggaatagctggagatacaggaaatggcagagtacgatttctgcactggaggtttccccaggtgcccctgctggttggtggggaacacaggagccacgaccatccccacgagttggctgtcagttttatggattcccagaatatttaacagctgagtggatggcactggtcaaggccggcctgttccctcccacatctacccacaaggtatcttcctgggaagcagggaagacagtgtaggccctgccccgccagtgcatgagtgtctgggagtcaggactcctgtgtttgggtggccctgactccagtttgctctgtggccccaggcaagccactcaccctctctgggccatccatcaaacaagagataagatgctctccaggggctagcccttccttcggaccgtgagaaaaatctagggagggcacaggcatccatccatgaggacaggatggaggagggactacctaaacccctgtccatctctgacccccaagaggcctgtgaggcagtgggggcagcgcctggcccagccaccatcctctaggcagggtgctgccgtgggaagagagcactgtggtgaggtggtgagaccgcgtgccccgggtcaccctgaccggtccaattgcctgtcactcaccagaggcccaatcttgggcaagtgactcagcctcttggtgtgcgaaatggcccccatgaggcctcctcagcctggggggctccatggcagaagggttccaagaaggcaggagctggagctgttcttgccgctgctgggaggtcctgtccaccctctagcctccctctccctgatcccccaccactgcccattcccagtaaggcacctattctctttgccaccctgacaccaagtcactgttcagcttgtgggcaacagagccggaagcatggaaaaatctcatgctgctcccaaagccaagggagggctcaaagaaggctggtggaaaaaggcccagagctgtggccggacagagtaggccccgaacaaccacagagccgccttgacagaagccagggcacggtcctgagatgagcctcatccctggagggcagcaatggaccatacacgtgtctaagcccccatcaccagccggggacccagtgactcagagcctgctcttcctgaacccactcggcaggaagaaaactgaaggcccaagagccccagccacactgtgacctggaggtgacctggagggagacagggtgacagcaccaagctcagcctttcctccgaggcttcgcaggactgaatgaaggcaaacttcccaacaccccaagccatgggattgtccttcctggggccctgactgagctgtgacgggctgtgtggccctgggtgagttacttgccttccctgaggctcatctcagcacatataatagaaaatggagacaaaaggatgccctttgcatgggttttgggaaagattaagtcacatgtttataaaagtgcctggc

SEQ ID NO: 79060 - DNA, 744 bp, Homo sapiens
aggttacatgttatgctgcccaaaacaaagtcaacacagccttcggctgggctgcgaactcctgtttgaactgtgattactgttccttcttctatcagaaggcaacacttgcactgtgggaatggccatcaccagtgagggagaaatggaaggcaaaggaaagtcctttccagaaaagccccagctccctaagtcccaaatacccattcttcaggttctcagatgggaagcaggcatccacgcactcgcctcactggggaggggagtgtgtgggacacagtcgtccttgcttggtcaaggaaaaactcaacttctcaacatgcagctccatgttccaaaaggagcaagactgtctgtgctttgaggttcacatgaaaggaagtggaacaattgcccagtaaaggactcccatggagccaaagcacattctcaccaaaaagagggatattttagccagagtgggataaagatcaagggtgcaaaagtaaacttcagatataaggaggtagagaaaacacaaaggtggaacaaggatttctgtccaggtggtcaagctctcttcctctggggtcagcgtacagtggtattctctgctaatgacacctggatgcagcactcgcagtgagcatggtgttcagaaggtacggaccctacctctatcgttcaggaagcccccaggtgacagtgacacacacccacatctgaatatcactgggacagagcacacaaagctgtaactggtgg

SEQ ID NO: 79061 - DNA, 322 bp, Homo sapiens
catgtaatccagatacttgggagggtggggcaggggaattgcttcacccgggagcggaggttgcagtggcgcgatttcagcttactgcaacctctgtctccccggctgaagtcacaggggaatattttaaatcagggagccagagaaggccactctgacaggtgacatttgagatgagaccagaaggatgagaatgagccaactatgcaaagaaccagggagggctggtcaaagtgcagtggtgtttacaagtaattgaccacaatcagctacagatttctttgttccttcccactcccactgcttcacttgacttgcccta

SEQ ID NO: 79062 - DNA, 570 bp, Homo sapiens
atgtggtatatacatacaccagaatattacttagcctggaaaaggaaggaaattccaacatatgccacaacatggatgaatcttggagaaattatgctaagcgaaataagccaatcacaaaaagacaaatactatatgattctgctaatacaaagtacatagagtagtcaagacctagagacagaaagtagaatagtggttgccaggggctacagagaggaggaaatggggcattgtttaatggatatagtgttttaattttacagaatgaaaagggttctggaggctgggtacagtggcttagagctgttatcgcagcactttgggaggccgaggtgggcagatcacttgaggtcaggagttcaagaccagcctggccaacatggtgaaacccatctctactaaaaatacaaaaaattagccaggtgtggttgcgcacacctgtagtcccagctacttgggaggctgaagcaggagaatcgcttgaacctgggagatggaagttgcagtgagccgagatcgtgccactgcactccagcctgggcaacagagggagactctgtctcaaaa

SEQ ID NO: 79063 - DNA, 476 bp, Homo sapiens
aaccccagctactgggaaggctgaggcgggagattgcttaaggcaggatttccaggttgcagtgagctgtgatcaagccactgcattctcacctggatgacagagccagtctctaaacaaaaataaagaaaaaagagaaaccaataatgatgataaatagcagtgaggagttaaaattcagattatgtaataatgtacatttattttactgatttttttccccatattaaaaaccctttgggctttacttaattttccttaatcaccatgtttcaaattacaccagtagtcctctgattataatgaagatgaatcagtttcttattttcagatgcgtcaagtgttgccaagacattgcattcctccaccacctcaccagccattcccattttccactttaaggattatagccacatttaattgtgtctgtctgcttccttacctggcctgggacctggagagtaaaaaggtagttt

SEQ ID NO: 79064 - DNA, 647 bp, Homo sapiens
aaaagctttaattctttatatagcctttaactcacccttccaggaacttaaaatgttttatttttttcttgagacaatgtctcactgtgtcacccaggctggagtgcagtggtgcgaacatggctcactgcagcctggatctcctgggctcaagcaatcctcccacctcaacctcccacatagctgagactataggcgcacattgtcatgctcagctacttttagtatttttattttcttgtagagacgggggtcttgctgtgttgcccgagctggtctcgaactcctggcctcaagcaatcttcccacctcagcctcccaaaatgttgtaaaaattgtggagatttccccaacttatggccaagatggattaaccctcttgccttaaatacctacaaaaccgtacaacacatacgcaaaggcagtttttagacaccggtcaataggtggcactaaagaccgtgatctctgttaggggagaaaccaatgaggcaaagtgtttccagctgctgcgggaggagggcagccgagcagagcccagtggtctccctgagtgcaggagacagagctgaaagtgtgagcaggcctggccaggtgcagtggttcacgcctgtaatcctagcaccttgggaggccgaggtgggtgg

SEQ ID NO: 79065 - DNA, 163 bp, Homo sapiens
ctaaatcttttcatgtgatatacaattatggtgcaaaccaaaatgctgtaaaaatgttacatagtaccctcacataatagaagaaagcaaaccatagatataaaactgcaaatttgcaatggtagaacaaactgtattattgagtaaaaattagcttggtgag

SEQ ID NO: 79066 - DNA, 436 bp, Homo sapiens
gtttctgctccctctgctatgagcaatgaggttctctctgaccaagcctccagaagagcagaaataagatgcctgagtgctgcgtttgatgcagagagaaaccatttgcagataatgctttcactcagaggattttttttcacctcaaaatttgcattcaaaagctctaccaaggaaggcaaatgtgccagagattatggaacatctgctctgacactggcattactgcagtgacgagggctccctggagtaggggtgacaggagccagatgatgctcctgaggagatttgctgatttcaaaagaggcatctgtgaaaacctagtaagaatataaggaatgtgcttgaacagatggtatgtgtagaacattggaatagaatcattctctgaatcttttaaggattaataaatgtgatgaaggaaaaggattgcaaa

SEQ ID NO: 79067 - DNA, 167 bp, Homo sapiens
agagtagaactgatcttaggatgtaattttctagtaagatcacactacaatatttatgtcatacagatttgttttatttatgaccctgagaatgaacatccttatgggaattcatttaaaaatgttttaaataatgccttttcttcataaatcagggtctgattaga

SEQ ID NO: 79068 - DNA, 270 bp, Homo sapiens
tctaccttaaagtttgctgattctttcttctgtcacctcaaatctactgttgagtttagtaaacttttttgtcttggttattgtaactttccactccataatttctatgtaactgtatgttgacctactcacaacttgatattatatatttattttcattcagagaattatacattttgggtaagaattagcacttttaaattacatgattaaagatatagaaaatgcttctgttaaaccaaaacttctggaataataatacaatgtatt

SEQ ID NO: 79069 - DNA, 806 bp, Homo sapiens
cggggcgagatccgcgcccgggaaggcggaggggggcggcaggcccttctctgacaccctcgacgagcgaccgccgcaggggcataggccacccctgcccacctcggcctggcccgctcgaaggttccgcgttcccgccttgcgcccctccctccgtctagggtccacgccaccccggctgagagctgagttcggctctctagggtcccagcctggcgggtccatcccacccccctgggccttcagcccaggtcctggagaccagaggctcgaaaaccccgccaggactccgggcttctgaccacgggccgcgcggaacctcttctggactcatctgccagtcgcctaacagcatagacccccacccccaacaatcccccggggcttggcgatgaaacgggctggcgggctccctgcagacccgagcactgctgcactttttcctggagctgggtttcggacacttgccagactggggtgtctcccttctctgggctacacgtaattttggttcttttaaagtaaacagcgagatggaaatgtctggtcaccaagagacagggaccagttaactggtatttttcaaatggccctgaatgaatacacaaaccagctttcatctgcaatcagcatcccctcttcctgctgccctccgctggggagagttccttgcctggggtccaagctgatctgcagcctcagtatttacaggcactccagcatttcccctgaagctgagcaggcaaggcgggtctggggcctagcgcccacctacctgacagtgtgtatcaggccagggggaaccc

SEQ ID NO: 79070 - DNA, 697 bp, Homo sapiens
agagaagaaaagaaatgcccaaataagttgtacagtttggaagagcatgaatccaaaaagaactctgtagatgagaaaagcaagtaatctaagcacaggtgaaactagaactcaggtacctgggcttctagacctatactctttccacaataacattacctaaagaggcatgtcatttcacaaagaaaaacactacacagatttctcagaaacttaaaaaacaaaacactattcattctctttcacaaaacggcactgtatgaagaataatttaaaaccaattggaattaaagtttttttaaaaaaaacttaatagtatcctactacgaatctagtgccagaaaactctgcaacgttattataggtctatcactctcttgatactttattattatactgattatcttccttaataccaataagccctaacttaagaataatatctaatttattctagaaaaatcaaaaaataaattagcaatccctttgaaagcaacaataatcagctttaccggcatcaagcaagaagtcctcatcaagcatcacttgtcattaagctcaaagtgttggtcaagatgttataaacaatagctaacagtggttaatgtttcatttacactgttccattctttaacacgcctaaaaatagaggccaagtgaaaagcaactaacttgagcttaatttatttagggatat

SEQ ID NO: 79071 - DNA, 517 bp, Homo sapiens
tccatatatagagccaacaaaatgtggcatgattttttagcatttattgaagtgcaggaaaggagaatctattttaacattcttctttagtacaatgaatatgacattgatactgagaaggaaatgttggctctgcagaaaacagaaattacatagtaaagtctatgtattggtcttaaacttttgaaataaatcaatctataaaaaagtaaggaagacttattgagggttacagaacagaatataaatgccatatatcttgaaaacataaaagtgacagtacttttaacagaatatggaagaaggaaataaggaaaagaagtaaatgataagaacaccgatatccacatcttcgaagtggggaatcaacagatactgtctgtaccttatggaacaagaaataaagattaaagtatttgcttaaagttattaaggtaatcaagagagaagctaaaaatagggatataactctatggcagtgtaagggaacttaatccccacctctcataatgaagct

SEQ ID NO: 79072 - DNA, 386 bp, Homo sapiens
gatgctattttatttgttgcttgcaaaggggaaggtgatcaaaattcttttgacttatttaaaaacatctatatattttggccacgttttaaagattaaacaagtgttttaaatggcacatgatagttgttattacatccaacatatctaggctgttaaaaacatcttattgtatgacatatattgtaaatgttaaagaaaagtaactatcaccatatgcttacagttgcatgaggatgatacccttgataccttagcctctgaaaaggtataaaaaaaggtaaaaattgtaaaaaagaaatatattaataaacattgatacattattttgaaattgacaatctgaaacaatgatataaacaaatttgattttgcttggcacttct

SEQ ID NO: 79073 - DNA, 4101 bp, Homo sapiens
  misc_feature (2028)..(2028): n is a, c, g, or t
  misc_feature (2134)..(2134): n is a, c, g, or t
  misc_feature (2615)..(2615): n is a, c, g, or t
  misc_feature (2625)..(2625): n is a, c, g, or t
  misc_feature (2633)..(2633): n is a, c, g, or t
  misc_feature (2642)..(2642): n is a, c, g, or t
  misc_feature (2655)..(2655): n is a, c, g, or t
  misc_feature (2660)..(2660): n is a, c, g, or t
gagctcggcgcggagcccggagcccgcagccgacagtctcctgctcccgtacgctgggcgccagctccggccgtgctgcccggctgcctgagagcgcgcccggccatggagccctcgcacaaagacgccgagacggcggcggcggcggcggcggtggcggcggcggacccccggggggcgtcctcgtccagcggggtggtggtgcaggtccgcgagaagaagggccccctgcgcgccgccatcccctacatgcccttccccgtggccgtcatctgcctcttcctcaacactttcgtgccgggactggggacattcgtctcggccttcactgtgctgtgcggggcccgcaccgacctcccggacaggcatgtgtgctgcgtcttctggctgaacattgcagcagccctcatccaaatcctcactgccatcgtcatggtgggctggatcatgagcatcttctggggcatggacatggtcatccttgccatttcccaaggctacaaggagcagggcatcccacagcagctgtgagcccacgggagccgctggggagatccaggggggccctgtgagggctgcaccaggcagctttgggcacaaggacctttacatgttcttttctgccattttctggactgggggtggaaagggggtatttttaaaaatattatttattttgaaaacgcatctgcttttctcagcaggttgtgagggctgccagcccctcctgctctggaaagcactgtgggcgcaggcaccagagcatcagagagtggggtggagatgagaacgcccacagagaggctgggatgctccggcaggctccaactggccttgctgtacccactgcccaccgcaaaggcacgccacgtctgctgggccgggccacaccgggccctgtctgggtgagcaggggctcaccaaggggacaggactgtggtagacccgtcctgtgggaccccacctgcctcaaaatctggtgccccgagtgtttactgtgtggtctcctgggggcagcaccagggtgtgggtgaggatggccaggctccaccctagcgtggaaaggcccactgtgcccacagctggcctgaggcctcggggagaagaccagtcccacaggcgtctcctgggcctgcctccctgaccgcaccccccgcctcctcgcagctgaaatctgagggctgggtgtgtcgtgacctgtgttttcctgggaaggagaggagtagctccttccctggggtgaaactgccagatgtttatacacaaagttattagactgaagcaggagtgggcagactagcaggctttcacccaatacttaacagcatttctggcccacattcctttttctgaagtcattggggccagatgtgtctccgaattgagaaattttagatttgagaaagacaatgcgatccatttatcgtacactttctaacttcccggcagagtgtggaacatctcgcctaccatcaggcacgtgaatatttctgcagagaaacatgtgactagtcccattaactgggagctatacaaactgtaaatagcctcacctcagttcagtctaattttgccactaagtaacttagggaaaaacttaccatttgagagcttttagggtttcagaattgcaagaacaattgtatggggttgtggaccttgatctgaaaatcctgcttgcaaacagatgtgttagagggtgaaattgtcggcattacacaaggactccttcagttgccaaaagaccatgggcctctttaaggagcccctctgtaagtgattgggacagggctagatccctaatgggggctaggggtggggagaatctagcagaagttgtccaggatactgtggatcaagtatcaatctgaaattaagagaaattagatactaagaggatggacatttacatgtctgtttcctttcctttcattttcattctaacataggaaatgctaacagatggggctggcccaaagtcaagcttctgactccacttgacacagtgccattgggcatgtccctctntgaagggcttgtttgtctatcagagactgtcagaactccatgagggcaggagaagggattttgcaggatgaaagtgcttgggaagtagtggccaccgttctggggntttcagcccacctaccccatccaccgggctttctaatcacagtcctgcctgagaagcgggccctgctgcccaccccttatcatggatcccttagctactgtccgtcttccattgctgcctggggctgggctgccgtttttgaacacctggcagtgtctttgtcgcgtcctgtcctctcttcttacagaccccaacccaggcctttgccttcttctctcctgtttggaagcctctgtatcttcaaggtgtgggaacagatttggttttctctaaaaagctagaaccttctgctgtgtgcagcaggcatcctccaggctggtgctggctgctctcgaggaagctgcgtcagagtggagctgcccctctactcagataaaatagcttcagctgcaggaagccgccccctcccatgcccaccagcccacagcccttcaccccacacagcccccagagtttgcccgacaccccctgagtgatgacnggtctcaggngggggccncccccacanatgggaggcggangcttnttttccccgcttgggctgggggcggctgctgagggggtgaagaagagatggcaatttatgtcgcatgtttagtgacacaatccagatgcaggtgggactttcttgagtggcaggtgtcaccctgggtcccgtgtgggatggtttaatacaggggtttgtgtgtttgtgtgtgtggagggccactgcgcccccagatcctcctctcccccgagggctgcgtctctaaacctgggaaaacatcagcctcaggaggaggcccctttccgggtaactgatgtgtgggagaagccaagaggcccctgcctgtctcctgaatgaggctgtgagggttgccatgtgggcgggaccggttcaaaatagcgcccccgcccctctaaattagaccgtggtctcagcatgatcatcttcagtagataagggacagtggctgatttactccaaatagttccagctggccactcagaccagggccagagttaacttctcaaacaccagccagctgaaaattagggttctcgtgcaggcaagtgcatggttgacacacagccctttggtgacaaagctgggctttgcctgcatagtgcagacaaggctgttggttcagaggctgcagggcacattccaggttggggccttttgtcggtcggaattcaataggacattccctggctgtgggtgtttagggcaggaattacaggcttgcagagaaagtcagaggcaatgagatgctcccagtaccaaactgtgacactgggatcagggtggtcattcccttgggtcagagtgggaccctagagccagagtgagctgtgggtggcctgggtgtgtcctgtggacggcggagactgttgatttggatgttgagctctgagtcagtttcagaaccaaggatctcaggctgagaaggccaggtccccatgggagcggcaggagtctgatggctctgctgccagagcctaccccagcctgccacgccgctgaccttcccatggtaaggaaggggcaggcagcatggttcccaccctcagctgccccagacccacacatccagccccaagagcagcctcacccaggcacagtgcagggcattttagctcctgggaggggagatgcctttgtgagtttcagatgtcagaggagaagctccgagagagtaagtcatgtgcccccaaacactcagctcctaagtggcaggacaggcaagtggccaggttgggccgcccccacagcctgtgccgtccacacactcactacagcactcccagaagaaggagcagaatcgcatgcagcccagagcaggtcctgtggaggggtcctcacccctcaggagtaatagggtgattatgtcacatgtttagtgatacaatcccacctgtgtctggattgtgtcactaaacatgcaacataaattgccatctcttctccatcccctcagcagccg

SEQ ID NO: 79074 - DNA, 3700 bp, Homo sapiens
  misc_feature (1627)..(1627): n is a, c, g, or t
  misc_feature (1733)..(1733): n is a, c, g, or t
  misc_feature (2214)..(2214): n is a, c, g, or t
  misc_feature (2224)..(2224): n is a, c, g, or t
  misc_feature (2232)..(2232): n is a, c, g, or t
  misc_feature (2241)..(2241): n is a, c, g, or t
  misc_feature (2254)..(2254): n is a, c, g, or t
  misc_feature (2259)..(2259): n is a, c, g, or t
ctctgttttcaggctgtgttttctcttcttctctctctcctcttcctcctgctgcctcccactctgtgctgctgcagtttcccaagtttcccaaggctacaaggagcagggcatcccacagcagctgtgagcccacgggagccgctggggagatccaggggggccctgtgagggctgcaccaggcagctttgggcacaaggacctttacatgttcttttctgccattttctggactgggggtggaaagggggtatttttaaaaatattatttattttgaaaacgcatctgcttttctcagcaggttgtgagggctgccagcccctcctgctctggaaagcactgtgggcgcaggcaccagagcatcagagagtggggtggagatgagaacgcccacagagaggctgggatgctccggcaggctccaactggccttgctgtacccactgcccaccgcaaaggcacgccacgtctgctgggccgggccacaccgggccctgtctgggtgagcaggggctcaccaaggggacaggactgtggtagacccgtcctgtgggaccccacctgcctcaaaatctggtgccccgagtgtttactgtgtggtctcctgggggcagcaccagggtgtgggtgaggatggccaggctccaccctagcgtggaaaggcccactgtgcccacagctggcctgaggcctcggggagaagaccagtcccacaggcgtctcctgggcctgcctccctgaccgcaccccccgcctcctcgcagctgaaatctgagggctgggtgtgtcgtgacctgtgttttcctgggaaggagaggagtagctccttccctggggtgaaactgccagatgtttatacacaaagttattagactgaagcaggagtgggcagactagcaggctttcacccaatacttaacagcatttctggcccacattcctttttctgaagtcattggggccagatgtgtctccgaattgagaaattttagatttgagaaagacaatgcgatccatttatcgtacactttctaacttcccggcagagtgtggaacatctcgcctaccatcaggcacgtgaatatttctgcagagaaacatgtgactagtcccattaactgggagctatacaaactgtaaatagcctcacctcagttcagtctaattttgccactaagtaacttagggaaaaacttaccatttgagagcttttagggtttcagaattgcaagaacaattgtatggggttgtggaccttgatctgaaaatcctgcttgcaaacagatgtgttagagggtgaaattgtcggcattacacaaggactccttcagttgccaaaagaccatgggcctctttaaggagcccctctgtaagtgattgggacagggctagatccctaatgggggctaggggtggggagaatctagcagaagttgtccaggatactgtggatcaagtatcaatctgaaattaagagaaattagatactaagaggatggacatttacatgtctgtttcctttcctttcattttcattctaacataggaaatgctaacagatggggctggcccaaagtcaagcttctgactccacttgacacagtgccattgggcatgtccctctntgaagggcttgtttgtctatcagagactgtcagaactccatgagggcaggagaagggattttgcaggatgaaagtgcttgggaagtagtggccaccgttctggggntttcagcccacctaccccatccaccgggctttctaatcacagtcctgcctgagaagcgggccctgctgcccaccccttatcatggatcccttagctactgtccgtcttccattgctgcctggggctgggctgccgtttttgaacacctggcagtgtctttgtcgcgtcctgtcctctcttcttacagaccccaacccaggcctttgccttcttctctcctgtttggaagcctctgtatcttcaaggtgtgggaacagatttggttttctctaaaaagctagaaccttctgctgtgtgcagcaggcatcctccaggctggtgctggctgctctcgaggaagctgcgtcagagtggagctgcccctctactcagataaaatagcttcagctgcaggaagccgccccctcccatgcccaccagcccacagcccttcaccccacacagcccccagagtttgcccgacaccccctgagtgatgacnggtctcaggngggggccncccccacanatgggaggcggangcttnttttccccgcttgggctgggggcggctgctgagggggtgaagaagagatggcaatttatgtcgcatgtttagtgacacaatccagatgcaggtgggactttcttgagtggcaggtgtcaccctgggtcccgtgtgggatggtttaatacaggggtttgtgtgtttgtgtgtgtggagggccactgcgcccccagatcctcctctcccccgagggctgcgtctctaaacctgggaaaacatcagcctcaggaggaggcccctttccgggtaactgatgtgtgggagaagccaagaggcccctgcctgtctcctgaatgaggctgtgagggttgccatgtgggcgggaccggttcaaaatagcgcccccgcccctctaaattagaccgtggtctcagcatgatcatcttcagtagataagggacagtggctgatttactccaaatagttccagctggccactcagaccagggccagagttaacttctcaaacaccagccagctgaaaattagggttctcgtgcaggcaagtgcatggttgacacacagccctttggtgacaaagctgggctttgcctgcatagtgcagacaaggctgttggttcagaggctgcagggcacattccaggttggggccttttgtcggtcggaattcaataggacattccctggctgtgggtgtttagggcaggaattacaggcttgcagagaaagtcagaggcaatgagatgctcccagtaccaaactgtgacactgggatcagggtggtcattcccttgggtcagagtgggaccctagagccagagtgagctgtgggtggcctgggtgtgtcctgtggacggcggagactgttgatttggatgttgagctctgagtcagtttcagaaccaaggatctcaggctgagaaggccaggtccccatgggagcggcaggagtctgatggctctgctgccagagcctaccccagcctgccacgccgctgaccttcccatggtaaggaaggggcaggcagcatggttcccaccctcagctgccccagacccacacatccagccccaagagcagcctcacccaggcacagtgcagggcattttagctcctgggaggggagatgcctttgtgagtttcagatgtcagaggagaagctccgagagagtaagtcatgtgcccccaaacactcagctcctaagtggcaggacaggcaagtggccaggttgggccgcccccacagcctgtgccgtccacacactcactacagcactcccagaagaaggagcagaatcgcatgcagcccagagcaggtcctgtggaggggtcctcacccctcaggagtaatagggtgattatgtcacatgtttagtgatacaatcccacctgtgtctggattgtgtcactaaacatgcaacataaattgccatctcttctccatcccctcagcagccg

SEQ ID NO: 79075 - DNA, 223 bp, Homo sapiens
ttgcggtcctcttccactgctttccctccgccctgattttccattccttgtgagcggtggttttggttggggggagggggcggggaaggggcctggcgaggaggggcgtcagagcgctgtcaccgggtgtcgcgccgccctccccgcccctccgccgggcgtgtggggacgccggagggcgggagtctccgcgagccgcgcggcgcacggagcacggcggccg

SEQ ID NO: 79076 - DNA, 463 bp, Homo sapiens
gcggccgcctgagctcggcgcggagcccggagcccgcagccgacagtctcctgctcccgtacgctgggcgccagctccggccgtgctgcccggctgcctgagagcgcgcccggccatggagccctcgcacaaagacgccgagacggcggcggcggcggcggcggtggcggcggcggacccccggggggcgtcctcgtccagcggggtggtggtgcaggtccgcgagaagaagggccccctgcgcgccgccatcccctacatgcccttccccgtggccgtcatctgcctcttcctcaacactttcgtgccgggactgggtaagacacggctgccgcgacccttgcgacccccaccccgccgcgggagggcgtggggggagagaagggcgcggccggagacctcctggcggggccgcgcgctccaagtgctgcgaccacgcgccaccgcccgctcctggcgtccc

SEQ ID NO: 79077 - DNA, 483 bp, Homo sapiens
ttctccaccctgggagctaccatgtgtaagcttcctggtctcagaatcaccagcaccaccttcgctctggtcggcatcttcatttcttggtgattttagctcctaactcactgtcattccctccatctccaagtgtggaaactcagtgcttctgaatccacacaggcaatccttccagcctcctgccctatatcctaaaagtacctgggttttgtttgaatcaggtatagtaaagtgacagactagaagacaagtgccacaaaggaaggatttagtactcgtggttctcaggaggaggggccctgccatgccacgcagggccagaaggggaagtaccagggtcaggaggagccaggagagagcatgacccagagccttttttgtgttttcctcagggtgaaaatggacaaggcagggtaggtaagtgtgagcaagtttaggattagatagcttgaatcatgaaaaaaaaataaaataaataaa

SEQ ID NO: 79078 - DNA, 1434 bp, Homo sapiens
tggtagctatagatggagcatacttcagagcaaggaaaattaccagggataaagagagacattacatatgataatgggatcaatgctccaaaaagacaaatgcaatggttaattttaggtgtcaactttactgggttaacagatacccagatagatggtaaaacattatttctgggcatgtttatgcaggtatttctggaagagattggcatttgaatcagtagactgagtaaagaagatgtgccctcacccgtgtaagtgggcatcattaaatctgttgagggccccagtagaacagaaaggtagagaagagacaatttgctctctcttctggagcttggacttccattttcttctgccatcagacatcagaacactaggttcttgggcttttggactctaggatttacaccagtggtccttcaggttctcagggcctttagcctcggactgagttacaccattggctcccctagttctcaggcctttggactcagactgagttacagcactggctttactgattctccagcttgtgaaacttattacttctataacagcataagccaatttccattaaaaattatatatatatacacacacacacacacgtatgtgtatatgtatctatagctatacatcttctattagttctgtctctctggagagccttaatacaggtaacaatctttaatgtgtatgcaccattacagcattaaaacacatgaggcaaaaactgatagaattgcaagaaaaaatagatgaatccactaatataattggagatttcacccctccatcataaatagacccggcaggtagaaaatcagtacggacataatttaactcaacaaaacaatgaatcaactggatatgatgaacatcagtagactgctacatgtaacagcagcagaatacacattcttctcaagctcacatggaacactcaccaagataaattatattctggcgaatagaacacaccttaaccaatttaaaagactagaaatcatatggtgtgtgctttggaattcaactagaagtcactaacgaaagctggaaaatccccgatacttggagattaaacagcacacttctaaataactctgggtcaaagaagaaatctcaagataaattttttaatattttgaactaaataaaagtgcaaacacaacttatcagaatttgtgggatacagttaaagcagtgattagagagaatttttatagcattggatgcatgtattagaaaacgagaaggttctaaaatcaatcatctaagcctccaccttacaaaactaaaaaaaaaaaaaaaaagcaaattagaatgaaaataagcagaagaagggaaatacagtagctctccaccccccttatccacagtttgctttctgcagtttcggttacttgtggccaactaaggtctgaaaatatt

SEQ ID NO: 79079 - DNA, 466 bp, Homo sapiens
tatggagaagggagggataggaattccatatttcaagatagcaaatataatttcatagaaatatatagctaaagattccaaagtgcttttacagagaactgttgaataatatattcctaaagggcagcaatatgccatgttcatggtgaagacagaaaaccaatgaatcagttgtggatctcaggtgggagaggaaacctcaggctcccaactttgacttctctactctcaccaggccatgttaacactgtaaaaccaaactctttgctaagaacaatacagggcagtagtttagtctgctgatgaaaccttgtgcttccaagaatattagctatatataatttgtgctttctggatgattctattgtccagaaagctaaccctgacgttacttttattagtctgttgttattcctcagggtgtagaagatttagtaaattcaggacaaattttatattcagtgac

SEQ ID NO: 79080 - DNA, 342 bp, Homo sapiens
caaaattagctgggtttggtggtgtgcacctgtagtcctagctacttagtgtgctgaggcagaaggatcacttgagcccaggaattcaaggttataatgagctatgattgggccactacactccagcctgggtgacagtgggagatcacatctctaaaaaataaataaataccaaggtgggaggatcacatgagtccaggagttcgagaccaacctggacaatacaatgagacctcatctctactttattttaaataagtaaataaaaaaccaaattgattgtggtgatggttgcacaactctgtgaatattataaaaatcactgaattgtacattttaaat

SEQ ID NO: 79081 - DNA, 483 bp, Homo sapiens
aatgggaaaaaaggaaaaatgatcagaagcaaaacaactgtcaactgcttctaaggagctggaacaatttgcttttgtgaagagactgacagataagagaaagggcggcttctcttccccacaccactcctcccaccaaagagtacggaaggaaggccggaaggaaaagctttggcaacttgaactccaactggaagcatccaatcactgttccaaaagctctttcagaacacatcaaccactttctactttttagactgctacttaaaattgagatatggtggactacaagagatattcaaactcctgcagtccaacacacttcactgatgaagaaccaagcccagaaggttttcaggtagcggcagagcctggaagggaacccaggtctcctgacgcacattccctattaattattatcccattccctaattatcattatgtgtttttatattataaaataaaaaggcattatagaaaaga

SEQ ID NO: 79082 - DNA, 503 bp, Homo sapiens
atttttttgagacagggtcctacttgttgctcaggttgaaatgcagtggtgaaatcacagcatgctgcagccttgacctcctaagtacaaacagtcctcccacctcagcctccacagtagctgggattacaggtatgcatcaccatgaccagctaatttttaagtttttttgtagagccacagtctcactatgttgctcaagctggtcttaaaatcctgggctcaagctgtcttcttgccttggcctcccagagtgttaggattacaggcatgagccactgtgtccagccatgtgcttttttaaactgttaaattctcacagagatcataaaacagtggtagtattggtgtaccaattttttttctgagttttttcccgaaattttgttataagtagagaaacataaaaaacattgtgttttagctcagaggttgactttggacaaatggtaattatgaaactgtttttgtctttagctgctttttgtcaattcatagcctgg

SEQ ID NO: 79083 - DNA, 1033 bp, Homo sapiens
caaatgacccaaaagcacctaaataagagtgacgagagtttaacagacattcattatggacttcagagaaaatgatgctaaactggtcttagaatcttctttaattttgttaactaggtaaataatctggacattttagtcaaagcattagacagacagagaagttggtaactgaccactaactaacaaactataaattcacccattgtgggttgacctggtaagttcccccagggctgtgtccttggcccctcctttgatattagtgacagatgactttttttatgccttacccattccacaaaagaatttgaagccatttacacaagagatagtactagtaaattaggagtgctgatcaaatttttagataataagaaacccttaggaaggatgacaatttagaatccaaatttaggatccaaacaaataccattacaaactataaaaatgagcagaatctaaatgtaacatttcaataaatgcagattgataataacatctgtgcagagttgaggactatagagtactgtgctgtcactaacagtattgtgtgctactaagagtttaatggctgggtgtggtggctcacacctgtaatcccaacactttgggaggcctaggtgggtaaatcagctgagatcaggagttcgagaccagcctggccaatgtggtgaaaccccgcctctactaaaaataaaaaaattagctgggcatggtggcacgtgcctgtaatcccagctactcgggaggctgaggcgggagaatcacttgaacctgggagacagaggttgcagtgagtcgagatcacaccattgcactccagcctgggcaacagagcaagattctgtctcaaaaaataaagtttattatgccaggagggccaggtgtggtgccacacccatgtaatcccagcactttaggaggctgaggagggcagatcacttaagcccaagagtttgagaccagtctgggcaatgtggcaataccttgtctcttaaaatttaaaataaaaaaaaagtttattatgcca

SEQ ID NO: 79084 - DNA, 513 bp, Homo sapiens
agtggcctggggtcttgggggcactgccctgtgtgttagcagtggtaattttaaaggtggccctctctgactagtgtccagccgatggggattaggctggcctttgctttttgccaactttagaggcctctgcaggcagcaggctggacagctctggaactgggctgtttctgctttatggatactcctctctttggtgaaattcagccttccatggctatacaaaagatgaattccacatccacgtagtggctctgccagcttccaaagtaagctcttcgggtcagactctcaccagaccaaatgatgcctggtccctgggcctccccctgtgacttggcttttggggtatagcttgatcactggctcctggacccatcctggtttattaatgcctcccctaaacatagcaccaatcttcatttcgcctgtgctagcacttcaaatgtattggtgtggaagccagctggaactgaccagatgagctcatctaccattgcccagccaggagtt

SEQ ID NO: 79085 - DNA, 555 bp, Homo sapiens
acgtactgagttcgtgtcttttggatgcgcgcccagaggtggcactgctggatcctgtgctgggtcatacctatgtttaattctctgaggaacctccgtgctgtctccatagcagccgtgtcgtttcacacttgcaccaacagtgcacagggctccggttccccacgtcctcaccgggtaactggggttccggctccccacgtcctccccgggtaactggggttccggttccccacgtcctcaccgggtaactggggttccggctccccgcgtcctccccgggtaactggggctctggttccccacgtcctcaccggcacttggcactgtctagtgttttggtagcagccatcctgctccgtgtaggtagtatctcattgtggggttttgttgttgttttttagagacagcacctcgctctcttacccaggctggagtgcagtggcacaaccatacctcactgcagcttcgacctcctgggctcaagcgatcctcccacctcagtctccccagtagctgggatcacaggcgtgcaccaccatgcctggctaatta

SEQ ID NO: 79086 - DNA, 415 bp, Homo sapiens
acgtactgagttcgtgtcttttggatgcgcgcccagaggtggcactgctggatcctgtgctgggtcatacctatgtttaattctctgaggaacctccgtgctgtctccatagcagccgtgtcgtttcacacttgcaccaacagtgcacagggctccggttccccacgtcctcaccggcacttggcactgtctagtgttttggtagcagccatcctgctccgtgtaggtagtatctcattgtggggttttgttgttgttttttagagacagcacctcgctctcttacccaggctggagtgcagtggcacaaccatacctcactgcagcttcgacctcctgggctcaagcgatcctcccacctcagtctccccagtagctgggatcacaggcgtgcaccaccatgcctggctaatta

SEQ ID NO: 79087 - DNA, 300 bp, Homo sapiens
atattcaaggagtagtggagtacgtgataatgcactagatttaaagttacccaagggctaatttttaaaaaatcatttttcatatccaatattaaattggttgttagttcttttctatatgtctgtgataacctttgtgccctggttagcagggtctagaaagagccatccatctcaacaacagtggatttagacttgcaggaaacatacagcttgagtgatttggctgtatctttaatgattcctgaacatctgccagaagttgctcatttcaagcaagtcagtgatttaagcttattt

SEQ ID NO: 79088 - DNA, 344 bp, Homo sapiens
tttttttaagagaagttctctctctctcaggctggagtggagtggcacaatcatagctcactgcagcctcaaactcctaggctcaaacaatcttcctgccttaggcatcccagcactctgggaagccgaggtgggaggatcacttgagcccaagagttcaagaccagcatgggcaaagagagagaccctgtctctacaaaaactaaaaaaattagctgggtgtggtggtgcctgctgtaggcccagctagggggaagtagaggtgggaggatcactgggaggtagagactgcagtgagccgtgatcatgctactgcactgtagcctgaatgacagagtgagacc

SEQ ID NO: 79089 - DNA, 938 bp, Homo sapiens
tccaaaccatgctgttaaatatcagagttcctatggttatgactgacaaatgacaataatagccccaaaatacatatttttgatactatttagccaagattaccacaaagatacagtatttgacacattcttattctataacattttgaaaatattttctcttgacagataaaaatgtgtactttttctgtagaacataatattttgaacatgctgttaaatatcagagttcctatgattatgactaaaaaattaaatgacaatagtccccaaactatgtattttcatactatttagccaaagtaatcacaaagacacagtatttgacacattgttattcttttatgtcttaaaaatattttctttcaacttgagaaaatgtgtgctttttctgtagaacatattttgaagtatatatacattgttattatttctaggtaattaatacctcacatagttaacatttttgtggtgagaccacgtcttatcatttttcaaaaatccaaatacattattatgaactatagtcaccatgttgtacaataaatctcttgaacttatttctcctatttgactataattacttattatttgacagactttccaaacccccatttcttctaaataccttggcatctgatggtcaccattttactctatacatcaatgggattaagatttttggaatccatgtataggtgaaatcatgaaatattaatctttctgtgcctggcctatcccaactaatataatgtcctccagcttaatctatgtaatttaaaataatataatttttttcttttttttttttttttttaaggccaggtgtggtgtcttacacctgtaatcccagcactgtgggaagccagggcaggtggattgcttgagcccaggagtttgagaccagcctggtcaacatggaaaatccccgtctctac

SEQ ID NO: 79090 - DNA, 1623 bp, Homo sapiens
gaggattaccctcaatcttacagacataacataattcatactgaaaagaaactctacaaacttgaaagatgtgacagtgcttttgacaacacctcaaacttttctaaccataaaagaaattatactggtgagaaatcttagaaatgtaaagaatgtgacaaggcctttaaatggttgtcacacttcattataggtaagatagttcatactgaagaaatcttacaaatgtgaacaatgtggcaaaggctttaactggtcttcaacccttacaaaacataaaagaattcatactggagagaaaccctacaaatgtgaagaatgtggcaaagcctttaatgtgtcttcacaccttactacacataagatgattcatactggagagaaaccctacaaatgtgaagaatgtggcaaagcctttaaccactcctcaaaacttactatacataagataattcatactggagagaaaccttacaaatgtgaagaatgtggcaaagcttttaaccaatcctcaaaccttaccaaacataagataattcatactggagagaaactctacaaatgtgaagaatgtggcaaagcttttaaccgatcctcaaaccttactacacataagagaattcacactggagagaaaccctacaaatgtgaagaatgtggcaaagctttcaaccgatcctcaaaccttactaaacataacataattcatactggagagaaatcttacaaatgtgaagaatgtggtaaagcctttaaccaatcctcaactcttactaaacataggaaaattcagcagggcatggtggctcatgcctgtaatcccaacactttgagaggactaggtgagcagatcgcgaggtcaggagttcaagaccagcctggccaacatggtaaaaccccatctctactagaaatacaaaaatttgctgggtgtggtggcaggcgcctgtaatcccagctacttgggaggcagaggcaggagaatcatttgaacctgggaggcagaggttgcagtgagccaagatcgcgccattctactccagcctgggccacaaggcaagactctgtctcaaaaaaaaaaaaaaaaagaaaagaaaattcatactggaacgaaaccctacaattgtgaagaatgtgccagtgctttcaaccagtcctcgaacctttttaagaaaataatttatactggagagaaattctacaaatgtgaagaatatggcaaagcctttaaccagtcttcaactcttactaggcattaaaaattcatactgtacagaaaccctacgagggtgaaaaacatggcaaagcctttaacaagccctcaattcttaacagacataacataattcatactggaaagaaactctgcaaaccagaaagatctggcaatgcttttgacaacacctcaaacttttctaaccataaaagaaattatactggtgagaaatcttagaaatctgaagaatgagacaaagcctttaaatggttgtcacacttgattgtaggccaggtgtggtgtcttacacctgtaatcccagcactgtgggaagccagggcaggtggattgcttgagcccaggagtttgagaccagcctggtcaacatggaaaatccccgtctctac

SEQ ID NO: 79091 - DNA, 1473 bp, Homo sapiens
atgtgacaaagcttttaaccgattctcataccttactaaacataagataattcattctggagagaaatcttacaaatgtgaacaatgtggcaaaggctttaactggtcttcaacccttacaaaacataaaagaattcatactggagagaaaccctacaaatgtgaagaatgtggcaaagcctttaatgtgtcttcacaccttactacacataagatgattcatactggagagaaaccctacaaatgtgaagaatgtggcaaagcctttaaccactcctcaaaacttactatacataagataattcatactggagagaaaccttacaaatgtgaagaatgtggcaaagcttttaaccaatcctcaaaccttaccaaacataagataattcatactggagagaaactctacaaatgtgaagaatgtggcaaagcttttaaccgatcctcaaaccttactacacataagagaattcacactggagagaaaccctacaaatgtgaagaatgtggcaaagctttcaaccgatcctcaaaccttactaaacataacataattcatactggagagaaatcttacaaatgtgaagaatgtggtaaagcctttaaccaatcctcaactcttactaaacataggaaaattcagcagggcatggtggctcatgcctgtaatcccaacactttgagaggactaggtgagcagatcgcgaggtcaggagttcaagaccagcctggccaacatggtaaaaccccatctctactagaaatacaaaaatttgctgggtgtggtggcaggcgcctgtaatcccagctacttgggaggcagaggcaggagaatcatttgaacctgggaggcagaggttgcagtgagccaagatcgcgccattctactccagcctgggccacaaggcaagactctgtctcaaaaaaaaaaaaaaaaagaaaagaaaattcatactggaacgaaaccctacaattgtgaagaatgtgccagtgctttcaaccagtcctcgaacctttttaagaaaataatttatactggagagaaattctacaaatgtgaagaatatggcaaagcctttaaccagtcttcaactcttactaggcattaaaaattcatactgtacagaaaccctacgagggtgaaaaacatggcaaagcctttaacaagccctcaattcttaacagacataacataattcatactggaaagaaactctgcaaaccagaaagatctggcaatgcttttgacaacacctcaaacttttctaaccataaaagaaattatactggtgagaaatcttagaaatctgaagaatgagacaaagcctttaaatggttgtcacacttgattgtaggccaggtgtggtgtcttacacctgtaatcccagcactgtgggaagccagggcaggtggattgcttgagcccaggagtttgagaccagcctggtcaacatggaaaatccccgtctctac

SEQ ID NO: 79092 - DNA, 1964 bp, Homo sapiens
gaggattaccctcaatcttacagacataacataattcatactgaaaagaaactctacaaacttgaaagatgtgacagtgcttttgacaacacctcaaacttttctaaccataaaagaaattatactggtgagaaatcttagaaatgtaaagaatgtgacaaggcctttaaatggttgtcacacttcattataggtaagatagttcatactgaagaaatcttacaaatgtgaacaatgtggcaaaggctttaactggtcttcaacccttacaaaacataaaagaattcatactggagagaaaccctacaaatgtgaagaatgtggcaaagcctttaatgtgtcttcacaccttactacacataagatgattcatactggagagaaaccctacaaatgtgaagaatgtggcaaagcctttaaccactcctcaaaacttactatacataagataattcatactggagagaaaccttacaaatgtgaagaatgtggcaaagcttttaaccaatcctcaaaccttaccaaacataagataattcatactggagagaaactctacaaatgtgaagaatgtggcaaagcttttaaccgatcctcaaaccttactacacataagagaattcacactggagagaaaccctacaaatgtgaagaatgtggcaaagctttcaaccgatcctcaaaccttactaaacataacataattcatactggagagaaatcttacaaatgtgaagaatgtggtaaagcctttaaccaatcctcaactcttactaaacataggaaaattcagcagggcatggtggctcatgcctgtaatcccaacactttgagaggactaggtgagcagatcgcgaggtcaggagttcaagaccagcctggccaacatggtaaaaccccatctctactagaaatacaaaaatttgctgggtgtggtggcaggcgcctgtaatcccagctacttgggaggcagaggcaggagaatcatttgaacctgggaggcagaggttgcagtgagccaagatcgcgccattctactccagcctgggccacaaggcaagactctgtctcaaaaaaaaaaaaaaaaagaaaagaaaattcatactggaacgaaaccctacaattgtgaagaatgtgccagtgctttcaaccagtcctcgaacctttttaagaaaataatttatactggagagaaattctacaaatgtgaagaatatggcaaagcctttaaccagtcttcaactcttactaggcattaaaaattcatactgtacagaaaccctacgagggtgaaaaacatggcaaagcctttaacaagccctcaattcttaacagacataacataattcatactggaaagaaactctgcaaaccagaaagatctggcaatgcttttgacaacacctcaaacttttctaaccataaaagaaattatactggtgagaaatcttagaaatctgaagaatgagacaaagcctttaaatggttgtcacacttgattgtaggtaagataattcatactggagaaaacacctacatgtgtgaacaatgtggcaaaacttaaccagtgctcacaccttattgcacaggaaagcatttgtacttgagataaattatacaaatataaagactgaaaaagccattaatatatgttcatatctcaacaccagatagttcatacttaataaaagcattataagtacaattactgtcaaaagacctttcagaaaatacaagcttttgaccaggcgtggtggctcaggcctataatcccagcactttggtaggccaaggcaggtggatcatgaggtcaggagtttgagaccagcctatccaagatggtgaaaccccatctctactaaaaatacaacaattagccggttgcggtggtggtgcctgtaatcccagctactcaagaggctgaggcaggagaatcacttgaacttggggagggagaggttgca

SEQ ID NO: 79093 - DNA, 744 bp, Homo sapiens
agtaacggtgtgaagacacattaaaggctttgccacattcttcacataatggagagttaccttacaaaggtgaaaaacatggcaaagcctttaacaagccctcaattcttaacagacataacataattcatactggaaagaaactctgcaaaccagaaagatctggcaatgcttttgacaacacctcaaacttttctaaccataaaagaaattatactggtgagaaatcttagaaatctgaagaatgagacaaagcctttaaatggttgtcacacttgattgtaggtaagataattcatactggagaaaacacctacatgtgtgaacaatgtggcaaaacttaaccagtgctcacaccttattgcacaggaaagcatttgtacttgagataaattatacaaatataaagactgaaaaagccattaatatatgttcatatctcaacaccagatagttcatacttaataaaagcattataagtacaattactgtcaaaagacctttcagaaaatacaagcttttgaccaggcgtggtggctcaggcctataatcccagcactttggtaggccaaggcaggtggatcatgaggtcaggagtttgagaccagcctatccaagatggtgaaaccccatctctactaaaaatacaacaattagccggttgcggtggtggtgcctgtaatcccagctactcaagaggctgaggcaggagaatcacttgaacttggggagggagaggttgca

SEQ ID NO: 79094 - DNA, 721 bp, Homo sapiens
gaggattaccctcaatcttacagacataacataattcatactgaaaagaaactctacaaacttgaaagatgtgacagtgcttttgacaacacctcaaacttttctaaccataaaagaaattatactggtgagaaatcttagaaatgtaaagaatgtgacaaggcctttaaatggttgtcacacttcattataggtaagatagttcatactgaagaaaacttctacaagtgtgaacagtgtggcaaaacttttaatgaatgctcacaccttattgcacaggagagcatttatacttgaaaaaaattgtacaaatataaagaccatgaaaaagccattaatatctattcacatcttaccactggagagttcatacttaataaaaggaatataagtgcaattactgtcaaaagatctttcagaaaatataaacctttaaagcgaagaaggtatttattttgaagatgaacactacaaatgtgaagagggttgtagtacctttatttgtatcacagattttattgtacacattttgtactagaagaaaactctgaagtagttgctcaaactttgttcaacatcagggaatttatattgaagaaaaactttgcaaatttaataaattttaaaaaacactttttcaaaaagtacagcttagaagacaccagagttcatactaaaatatatttttgcagatgcagtaaaaatgaaaatatttaatcca

SEQ ID NO: 79095 - DNA, 229 bp, Homo sapiens
tactgtagtgttttaatgattgaatttatattggagaaatagatatgtggagtgttatatttcatctagaactgtgggaataagtataaagtgttgttttcccattccagagaagttattttaatattgttgaattttataagctatttcaaaggacttattagcccattttgctttttgtaccttttataacctactcacccaaacttttttgtgcttacaaaagaaa

SEQ ID NO: 79096 - DNA, 291 bp, Homo sapiens
aaaatcaattcattcctgaattgagtacctggagtgagcacagaccccacgagttaggggcccaaaatctcacaagacccctaatttcagacaccagccacaaatggggttcctgggctaccacacttgtgtcctgctgactgaattctggggttcccatgatacacacacacacaagtttgataattcattagaacagctcacagaactcaggcaagtgccatacttaccatgacagttttgttagaaaagttacaactggctgggtgtggtggctcacgcctgtaatcc

SEQ ID NO: 79097 - DNA, 497 bp, Homo sapiens
gagctctgatttgtaaccactgcttattaccataatgtgaatactcccacccattaccgatttcaagctaccaacttgatgtctgtcagccagcttgcaaaaatcctgaaaatgtaacaatcagctcttgtgcaacagtatgagcctgagccagctccaacatacaaattctataaattcattaaggcactttttgaattacaaatgtctttgtacataagagaaaatgaaatgatcactagttacagaagatataattacatatgtagaaaaatctaaagtaattcatgtaaaattaatataagcaatacacaatttcagcaatgggactagattaaatagttatacaaaaattatcttctctcgcaaaaataattagttagcaaatgtgatggtgaagatttccccatcatagtagcaatgaaacaataacagcaacaaagccttagaatacctggaaatacatttaataaagaatgtacagtttctagaagaat

SEQ ID NO: 79098 - DNA, 380 bp, Homo sapiens
acgggtttgaactgcgagagtccacttatatgagggtttttgaaaataaaagttaccccgagtgtgcctgcctctcctgccttcccttccacgtcctccacctcttctgcctctgccacccctgagacagcaagaccaacccccggcttctcctcctcagtctactcaacctgacgatcacaaggatgaagacctttatgactcacctttatgattcacttccaacatatgactttgtacagaaatcaggaagatgctttgaaagaaacactgtgcaatgaaagtgccactgatgtgtctagcattgacatgcttttggctgcaaagacttgagcccacacgttgcctgaaaccttcagtcctttgaagctgtgatttca

SEQ ID NO: 79099 - DNA, 495 bp, Homo sapiens
tcatagtttatgtaaatggtcttgaaaggtgtttcatttagagagcaaaacaagaaagcaacatgcagaagacatttgattttagtcttcagtgcatgataggaaaacgaaggtgtgtagttcagtaaaaagtaattattcaggttttagacagtaaaggaaaacgttaatcatggatagtcgacccaaaacaaattgtgtttgtagatatcctgacatgtgcaaaaacctttagggaccatgttcaaagtgaaagacatggtaaattacaaaccaattctgctgatatttgctaaagggtctttaaagcaattcttgtcagaagcaagttgtccaattcattggtatcttaaaaaatacactcagcactcctatctctgcccttaagtgaccattctgtataggcctgccttaggcccacattgtgattgcagatttcatgtacctactgtagcaggaataactaattaaactgacattgaaaatatgtttaaa

SEQ ID NO: 79100 - DNA, 450 bp, Homo sapiens
ttgatacagaaaataatgttagatactgaacaaataattttttcttcggtaggaggtcctatattgctgttgtgtatccttagtttctttctttctttttttttttaaatggggtgtcactctgtcacccagtgtggagtgaagtggcatgatctcagctcactgcaacctccccatctcacgttcaagtggttctcccgcctcagcctcctgagtggctgggattacaggtgcctggcaccacaccaggctagttgttgtatttttagtagagatgggatttcaccattttgaccatgctggtatcaaactcctgacctcaggtgatgcacctgcctcagcctcccaaagtactggaattataggtgtgggccacctcacctggccttatttagtttctttaatgaagattattgatatgatatggctgtgtaaaatagtctttttatt

SEQ ID NO: 79101 - DNA, 369 bp, Homo sapiens
tgggcctcccaaagtgctgggattacaggcatcaaccaccgtgcttggcctatggctgagtgatttcaaacagaattccatctagcttttagaatggtagctaccaaggaaaaaaataaagaaaaaaaaaaaaaaatctctcttcaatttcagctgtagacaatgaatacatttccacaaaacaatgtgatagataattgatgagttaaatagattcctgaaaacttcaattcctttttttagcagggtaaatccttggtagtgaacatctttgttctatatcctgtgtttttttgtgtgtttgattgttttttgagataaagagttgcactgcgacacccaggctggagtgcaatggtgcaatcttag

SEQ ID NO: 79102 - DNA, 765 bp, Homo sapiens
gactgtcactcggtcccagacaccagagcaagctcaagacccagcagtgggacagccagacagacggcacgatggcactgagctcccagatctgggccgcttgcctcctgctcctcctcctcctcgccagcctgaccagtggctctgttttcccacaacagacgggacaacttgcagagctgcaaccccaggacagagctggagccagggccagctggatgcccatgttccagaggcgaaggaggcgagacacccacttccccatctgcattttctgctgcggctgctgtcatcgatcaaagtgtgggatgtgctgcaagacgtagaacctacctgccctgcccccgtcccctcccttccttatttattcctgctgccccagaacataggtcttggaataaaatggctggttcttttgttttccaaaaaaaaaaaaaaaaaaaaaaaaaaaaacttttgggggggcaggggcccccgagaagaaaccttctaaaaaccctcgtggatagaggaggcgggggcccagagagggacacagctgaacaggtggtcccacaacggtgttccccaagagaaaagaacccggggccaagacacagagggagaccggagatatctcacccacacattataacaacaacggcccgggcgggacacaccggaccggttctgggaccaaacccccaaagagggagtcccaggagacactaacggggctcaattacaagcggagtccaacggcagacccgcaatctcaattacccc

SEQ ID NO: 79103 - DNA, 3816 bp, Homo sapiens
ggggaaagttgatcggagaggggaggaagcctcaagacgcggagcagcggcaggaaggagcccccggcagcccggaggagcatgggcaccttgcgggatttacagtacgcgctccaggagaagatcgaggagctgaggcagcgggatgctctcatcgacgagctggagctggagttggatcagaaggacgaactgatccagaagctgcagaacgagctggacaagtaccgctcggtgatccgaccagccacccagcaggcgcagaagcagagcgcgagcaccttgcagggcgagccgcgcaccaagcggcaggcgatctccgccgagcccaccgccttcgacatccaggatctcagccatgtgaccctgcccttctaccccaagagcccacagtccaaggatcttataaaggaagctatccttgacaatgactttatgaagaacttggagctgtcgcagatccaggagattgtggattgtatgtacccggtggagtatggcaaggacagttgcatcatcaaagaaggagacgtggggtcactggtgtatgtcatggaagatggtaaggttgaagttacaaaagaaggtgtgaagttgtgtaccatgggtccaggaaaagtgtttggggaattggctattctttacaactgtacccggacagcgaccgtcaagactcttgtaaatgtaaaactctgggccattgatcgacaatgttttcaaacaataatgatgaggacaggactcatcaagcataccgagtatatggaatttttaaaaagcgttccaacattccagagccttcctgaagagatcctcagcaagcttgctgatgtccttgaagagacccactatgaaaatggagaatatattatcaggcaaggtgcaagaggggacaccttctttatcatcagcaaaggaacggtaaatgtcactcgtgaagactcaccgagtgaagacccagtctttcttagaactttaggaaaaggagactggtttggagagaaagccttgcagggggaagatgtgagaacagcaaacgtaattgctgcagaagctgtaacctgccttgtgattgacagagactcttttaaacatttgattggagggctggatgatgtttctaataaagcatatgaagatgcagaagctaaagcaaaatatgaagctgaagcggctttcttcgccaacctgaagctgtctgatttcaacatcattgatacccttggagttggaggtttcggacgagtagaactggtccagttgaaaagtgaagaatccaaaacgtttgcaatgaagattctcaagaaacgtcacattgtggacacaagacagcaggagcacatccgctcagagaagcagatcatgcagggggctcattccgatttcatagtgagactgtacagaacatttaaggacagcaaatatttgtatatgttgatggaagcttgtctaggtggagagctctggaccattctcagggatagaggttcgtttgaagattctacaaccagattttacacagcatgtgtggtagaagcttttgcctatctgcattccaaaggaatcatttacagggacctcaagccagaaaatctcatcctagatcaccgaggttatgccaaactggttgattttggctttgcaaagaaaataggatttggaaagaaaacatggactttttgtgggactccagagtatgtagccccagagatcatcctgaacaaaggccatgacatttcagccgactactggtcactgggaatcctaatgtatgaactcctgactggcagcccacctttctcaggcccagatcctatgaaaacctataacatcatattgagggggattgacatgatagaatttccaaagaagattgccaaaaatgctgctaatttaattaaaaaactatgcagggacaatccatcagaaagattagggaatttgaaaaatggagtaaaagacattcaaaagcacaaatggtttgagggctttaactgggaaggcttaagaaaaggtaccttgacacctcctataataccaagtgttgcatcacccacagacacaagtaattttgacagtttccctgaggacaacgatgaaccaccacctgatgacaactcaggatgggatatagacttctaatgtatttctcttacctgcttctgccttgctgaagacagctttttctgagacacagctgccagcaaacctgagggaaagagagaagattagtgctcggggtcaccatgatgcctttgatcgatgctgctccagtaactacagtggcattaggacttatcgcttagatgacaatagtgctctttacatgttttctgtttgaacctaaaatagcagttgacatggtggtcctgaagcaaagcctttcaccagtaaagagatgttttctattgttgcaatgaccttgctttgctctgattataatttgaaagactgtaggaaacacttcaatgtagtataagagtctgtaccttgctggaatattcaagaagatgaaagaataatatattgggtacaatagattactatggtacagaaactgggctattccctttcttcaagtgaaggctgtgggatctattacagctgcaggccggtgtatataccatacaaaagaggaccacacatctgttggtcacagagttcatgtcacaccagtgctagaagtttcatgattttatttcccagcagtgctgatgacaagactgaatgttaccttttctttctgacagattttaaaaattgatatgataaaagcacaactgctatagattctgctgagacctctcatagtaggtatatatgagttttcacagaagactgaaaaataatgcatgatatttgtttgttttttttgataaattggcatgacagagtggggaaaaaaagcaattcacaaaaccatttcatattttttaaaatattgtgcttaaagatggtcctggaagtaaatgactagcagccaattggttttacttaacataccctcaaactgaggcttaaagtattcccttttataaaaataaatgcttggggtagggtggagtggggagggattaaaacccatccaaaaaataaataaaaactatataggtgctatgtatatctttcatctgtaaatgtcagtgtctgaacagacaacacaaattcaaatcattatacgtgtagccagaaactcaagcattttcactaaagttattaaaccaaactcctgtccaatttcacttatacaacatagtcagtctagagttgagagacaaaggtaattataaacctatttgaactagcttcttgtcttaggcctgaaccaaaaaacaacaaacaaacaaaaaacaagaatgaaaaacagaaataaaagaagtagaaaagacaaagaaagaaagcccaaagtcaaagttgttaatatttacaggtttaccagatctggaacattacttatttgaggtcagagaacaaaacaagaacctggccaggtgttgattaccttttagtgaataagctgagtccatatacttgtctaactaagaaagcagtacagaggaaaacaggaacctgatttttttaaaataaattttaaataaaatagaattactacaattctgcaatttcatactacctaaaaaagactagatttgaaaatgtcaagctgatttactttattcacatggagaaaagaatccacaaattaaactgagtccttcactggcatgccagttgactattattagctgtcataagtaactcagccatttggaagcatttcctggacaaaattacattatacctgtgaagaaaaat

SEQ ID NO: 79104 - DNA, 3722 bp, Homo sapiens
  misc_feature (2)..(6): n is a, c, g, or t
  misc_feature (10)..(10): n is a, c, g, or t
gnnnnngttncgcggaggggctcagtgaaaaaatgagcgagctagaggaagactttgccaagattctcatgctcaaggaggagaggatcaaagagctggagaagcggctgtcagagaaggaggaagaaattcaggagctgaagaggaaactccacaaatgccagtcggtgctcccagtgccctcgacccacatcggcccccggaccacccgggcgcagggcatctcggccgagccgcagacgtacaggtccttccacgacctccgacaggcattccggaagttcaccaagtccgaaaggtccaaggatcttataaaggaagctatccttgacaatgactttatgaagaacttggagctgtcgcagatccaggagattgtggattgtatgtacccggtggagtatggcaaggacagttgcatcatcaaagaaggagacgtggggtcactggtgtatgtcatggaagatggtaaggttgaagttacaaaagaaggtgtgaagttgtgtaccatgggtccaggaaaagtgtttggggaattggctattctttacaactgtacccggacagcgaccgtcaagactcttgtaaatgtaaaactctgggccattgatcgacaatgttttcaaacaataatgatgaggacaggactcatcaagcataccgagtatatggaatttttaaaaagcgttccaacattccagagccttcctgaagagatcctcagcaagcttgctgatgtccttgaagagacccactatgaaaatggagaatatattatcaggcaaggtgcaagaggggacaccttctttatcatcagcaaaggaacggtaaatgtcactcgtgaagactcaccgagtgaagacccagtctttcttagaactttaggaaaaggagactggtttggagagaaagccttgcagggggaagatgtgagaacagcaaacgtaattgctgcagaagctgtaacctgccttgtgattgacagagactcttttaaacatttgattggagggctggatgatgtttctaataaagcatatgaagatgcagaagctaaagcaaaatatgaagctgaagcggctttcttcgccaacctgaagctgtctgatttcaacatcattgatacccttggagttggaggtttcggacgagtagaactggtccagttgaaaagtgaagaatccaaaacgtttgcaatgaagattctcaagaaacgtcacattgtggacacaagacagcaggagcacatccgctcagagaagcagatcatgcagggggctcattccgatttcatagtgagactgtacagaacatttaaggacagcaaatatttgtatatgttgatggaagcttgtctaggtggagagctctggaccattctcagggatagaggttcgtttgaagattctacaaccagattttacacagcatgtgtggtagaagcttttgcctatctgcattccaaaggaatcatttacagggacctcaagccagaaaatctcatcctagatcaccgaggttatgccaaactggttgattttggctttgcaaagaaaataggatttggaaagaaaacatggactttttgtgggactccagagtatgtagccccagagatcatcctgaacaaaggccatgacatttcagccgactactggtcactgggaatcctaatgtatgaactcctgactggcagcccacctttctcaggcccagatcctatgaaaacctataacatcatattgagggggattgacatgatagaatttccaaagaagattgccaaaaatgctgctaatttaattaaaaaactatgcagggacaatccatcagaaagattagggaatttgaaaaatggagtaaaagacattcaaaagcacaaatggtttgagggctttaactgggaaggcttaagaaaaggtaccttgacacctcctataataccaagtgttgcatcacccacagacacaagtaattttgacagtttccctgaggacaacgatgaaccaccacctgatgacaactcaggatgggatatagacttctaatgtatttctcttacctgcttctgccttgctgaagacagctttttctgagacacagctgccagcaaacctgagggaaagagagaagattagtgctcggggtcaccatgatgcctttgatcgatgctgctccagtaactacagtggcattaggacttatcgcttagatgacaatagtgctctttacatgttttctgtttgaacctaaaatagcagttgacatggtggtcctgaagcaaagcctttcaccagtaaagagatgttttctattgttgcaatgaccttgctttgctctgattataatttgaaagactgtaggaaacacttcaatgtagtataagagtctgtaccttgctggaatattcaagaagatgaaagaataatatattgggtacaatagattactatggtacagaaactgggctattccctttcttcaagtgaaggctgtgggatctattacagctgcaggccggtgtatataccatacaaaagaggaccacacatctgttggtcacagagttcatgtcacaccagtgctagaagtttcatgattttatttcccagcagtgctgatgacaagactgaatgttaccttttctttctgacagattttaaaaattgatatgataaaagcacaactgctatagattctgctgagacctctcatagtaggtatatatgagttttcacagaagactgaaaaataatgcatgatatttgtttgttttttttgataaattggcatgacagagtggggaaaaaaagcaattcacaaaaccatttcatattttttaaaatattgtgcttaaagatggtcctggaagtaaatgactagcagccaattggttttacttaacataccctcaaactgaggcttaaagtattcccttttataaaaataaatgcttggggtagggtggagtggggagggattaaaacccatccaaaaaataaataaaaactatataggtgctatgtatatctttcatctgtaaatgtcagtgtctgaacagacaacacaaattcaaatcattatacgtgtagccagaaactcaagcattttcactaaagttattaaaccaaactcctgtccaatttcacttatacaacatagtcagtctagagttgagagacaaaggtaattataaacctatttgaactagcttcttgtcttaggcctgaaccaaaaaacaacaaacaaacaaaaaacaagaatgaaaaacagaaataaaagaagtagaaaagacaaagaaagaaagcccaaagtcaaagttgttaatatttacaggtttaccagatctggaacattacttatttgaggtcagagaacaaaacaagaacctggccaggtgttgattaccttttagtgaataagctgagtccatatacttgtctaactaagaaagcagtacagaggaaaacaggaacctgatttttttaaaataaattttaaataaaatagaattactacaattctgcaatttcatactacctaaaaaagactagatttgaaaatgtcaagctgatttactttattcacatggagaaaagaatccacaaattaaactgagtccttcactggcatgccagttgactattattagctgtcataagtaactcagccatttggaagcatttcctggacaaaattacattatacctgtgaagaaaaat

SEQ ID NO: 79105 - DNA, 1094 bp, Homo sapiens
ggggaaagttgatcggagaggggaggaagcctcaagacgcggagcagcggcaggaaggagcccccggcagcccggaggagcatgggcaccttgcgggatttacagtacgcgctccaggagaagatcgaggagctgaggcagcgggatgctctcatcgacgagctggagctggagttggatcagaaggacgaactgatccagaagctgcagaacgagctggacaagtaccgctcggtgatccgaccagccacccagcaggcgcagaagcagagcgcgagcaccttgcagggcgagccgcgcaccaagcggcaggcgatctccgccgagcccaccgccttcgacatccaggatctcagccatgtgaccctgcccttctaccccaagagcccacagtccaaggatcttataaaggaagctatccttgacaatgactttatgaagaacttggagctgtcgcagatccaggagattgtggattgtatgtacccggtggagtatggcaaggacagttgcatcatcaaagaaggagacgtggggtcactggtgtatgtcatggaagatggtaaggttgaagttacaaaagaaggtgtgaagttgtgtaccatgggtccaggaaaagtgtttggggaattggctattctttacaactgtacccggacagcgaccgtcaagactcttgtaaatgtaaaactctgggccattgatcgacaatgttttcaaacaataatgatgaggacaggactcatcaagcataccgagtatatggaatttttaaaaagcgttccaacattccagagccttcctgaagagatcctcagcaagcttgctgatgtccttgaagagacccactatgaaaatggagaatatattatcaggcaaggtgcaagaggggacaccttctttatcatcagcaaaggaacggtaaatgtcactcgtgaagactcaccgagtgaagacccagtctttcttagaactttaggaaaaggagactggtttggagagaaagccttgcagggctggacttggaatctgtttgaatacgttgtggaataaattccttaatttctaataaatcagtgttatattaattggaa

SEQ ID NO: 79106 - DNA, 1037 bp, Homo sapiens
ggggaaagttgatcggagaggggaggaagcctcaagacgcggagcagcggcaggaaggagcccccggcagcccggaggagcatgggcaccttgcgggatttacagtacgcgctccaggagaagatcgaggagctgaggcagcgggatgctctcatcgacgagctggagctggagttggatcagaaggacgaactgatccagaagctgcagaacgagctggacaagtaccgctcggtgatccgaccagccacccagcaggcgcagaagcagagcgcgagcaccttgcagggcgagccgcgcaccaagcggcaggcgatctccgccgagcccaccgccttcgacatccaggatctcagccatgtgaccctgcccttctaccccaagagcccacagtccaaggatcttataaaggaagctatccttgacaatgactttatgaagaacttggagctgtcgcagatccaggagattgtggattgtatgtacccggtggagtatggcaaggacagttgcatcatcaaagaaggagacgtggggtcactggtgtatgtcatggaagatggtaaggttgaagttacaaaagaaggtgtgaagttgtgtaccatgggtccaggaaaagtgtttggggaattggctattctttacaactgtacccggacagcgaccgtcaagaagatggagtcttgctatgttgcccagctgttcttgaactcctgggctcaagaagtcctcctgccttgacctctcaaagtgctggaattactggaatgaaccactgggcttagccccatttttcacctgtaaccttagtttgtacaattgttgacttttctgttagaaaatagggaaccttcgtatttaaataactttatagcaagtattgaatgtcaaaggttaacttcaaatagcaaatgctttttagtgttcctctacccaatgtaaaacaacaaaattaaccaacttccagagcagtataagaattctaaaagcatcattacaccccctggctttacattttacactccatatactgcaaa

SEQ ID NO: 79107 - DNA, 968 bp, Homo sapiens
ccgctgcgtgcaccaagtgctttgaaagtttttcgccgtattaaaacgaataaagaacctcgtgcgaataggcaaagaaggcagggttgaaaagtactcagctcgacaccggagaaagaaagaaaccccgcataggaagctccggttgttcgggtgtgtcctaagcagacctcactctggacctcttgtgacctcgtgagtccgtgtccccagtccctgcggggacagctcaggaagagagcgggttccaggacagcccaagcatccgaatcaagttatctacaccttcgagactgagcaatagatgaacgaatcgagtctatttgggcattttccaggggaaatgaaagtgtatgcccaaagaaggacttgtatttcaatgttcgtagaagttttatgcacaagagtccaaaactgcaaaaaaatccgaaagttcatcaactgggatggtgtgaagtgtctacaggcatccgagtgaacccaaagggagagtttggctggcacacggggagacgggccaaggcgcggcgggcgagggcggcacaagcatggcgctgcgacaccactgctgggagcagggctgaaaggtgtcttttgctgtaaggactttcataaggcagtcccaatccaaagactggctttaatttcacggccttagcctctcagtttcttaagccttctgaggacctcctgatcatgacaattaagtcactatttacagccatgtgacagataaatcagtattaggtgatttgttctgaaggacccccaaaaggaaacatatgagagaacccacactcggcacaggaacggcaagagtcctcctgtgagagctgagagatgacattggccctgagtctgtccactgctgaagcttggcagaggcgggggaagcgctcagaacagtcggctgccactgcttagtggaggggagggcgttaacgcgtttccccatcaaaaccaaaaca

SEQ ID NO: 79108 - DNA, 992 bp, Homo sapiens
cgaccacagcctcggtctcgcagctgcagcccccgccccgcccggccgcgaagcgtctggaaccgcatcctccgcatccacatccgcatcgtcgtcctccccgaccgcgtcctgcagcagctgccagtggagccgcctgacaaggactgccatccaccatggtgaagctgggctgcagcttctctgggaagccaggtaaagaccctggggaccaggatggggctgccatggacagtgtgcctctgatcagccccttggacatcagccagctccagccgccactccctgaccaggtggtcatcaagacacagacagaataccagctgtcctccccagaccagcagaatttccctgacctggagggccagaggctgaactgcagccacccagaggaagggcgcaggctgcccaccgcacggatgatcgccttcgccatggcgctactgggctgcgtgctgatcatgtacaaggccatctggtacgaccagttcacctgccccgacggcttcctgctgcggcacaagatctgcacgccgctgaccctggagatgtactacacggagatggaccccgagcgccaccgcagcatcctggcggccatcggggcctacccgctgagccgcaagcacggcacggagacgccggcggcctggggggacggctaccgcgcagccaaggaggagcgcaaggggcccacccaggctggggcggcggcggcggccaccgaaccccccgggaagccgtcggccaaggcggagaaggaggcggcgcggaaggcggccgggagcgcggcgcccccgcccgcgcagtgacgtctccagccccgcagcccggcccgggcgtcctccgccagctcctgtgaccagcgcgtctcccgatgctctccgccgtgttcgtgtccccaggcgccctcgctgcagccccgcccccgtgggtctctgactctgtcgcttttctctaagtaaagatttcacgtccaaaaaaaaagcttc

SEQ ID NO: 79109 - DNA, 882 bp, Homo sapiens
cgaccacagcctcggtctcgcagctgcagcccccgccccgcccggccgcgaagcgtctggaaccgcatcctccgcatccacatccgcatcgtcgtcctccccgaccgcgtcctgcagcagctgccagtggagccgcctgacaaggactgccatccaccatggtgaagctgggctgcagcttctctgggaagccaggtaaagaccctggggaccaggatggggctgccatggacagtgtgcctctgatcagccccttggacatcagccagctccagccgccactccctgaccaggtggtcatcaagacacagacagaataccagctgtcctccccagaccagcagaatttccctgacctggagggccagaggctgaactgcagccacccagaggaagggcgcagggtaaccacacccaccccacccactgtggggactcaggacaggaggagaaggtggaaggcagctgggggtgcctgggttccgtccaggccagtctggggtccccttgctctcagggaggagagggtggcagtgagtcatcccgcccagagctggccccaccggctgccctgcacccaccaggccccctcccgaggctgcaggtgcagactgaccaaacagtggcgctcctgagatgtttttctttctgggaagtgcccgcgagtgctgcttgcttgtttgcccagtgggtcattgtctcatcttcagtgacttacgggctttctatgtaatacttcctttctgcagtatatctggcaaatatcttctctcatcctcttgtttaaatctgtcaatgttactaatgatagctttagtcatttttagtggactgtttccaaagccttccattctccagtagacagatctgctagggctcccc

SEQ ID NO: 79110 - DNA, 1152 bp, Homo sapiens
cgaccacagcctcggtctcgcagctgcagcccccgccccgcccggccgcgaagcgtctggaaccgcatcctccgcatccacatccgcatcgtcgtcctccccgaccgcgtcctgcagcagctgccagtggagccgcctgacaaggactgccatccaccatggtgaagctgggctgcagcttctctgggaagccaggtaaagaccctggggaccaggatggggctgccatggacagtgtgcctctgatcagccccttggacatcagccagctccagccgccactccctgaccaggtggtcatcaagacacagacagaataccagctgtcctccccagaccagcagaatttccctgacctggagggccagaggctgaactgcagccacccagaggaagggcgcaggctgcccaccgcacggatgatcgccttcgccatggcgctactgggctgcgtgctgatcatgtacaaggccatctggtacgaccagttcacctgccccgacggcttcctgctgcggggccctgagttctgaactggaggctgatcttcggtgtcctgaagccatggctccattacaaactgtccgcagtgtccccaaccgcagaagcgggagggcctgggcccggggcgcacaggagggctcagccccaccgaccctgacccggcccctcccgcagcacaagatctgcacgccgctgaccctggagatgtactacacggagatggaccccgagcgccaccgcagcatcctggcggccatcggggcctacccgctgagccgcaagcacggcacggagacgccggcggcctggggggacggctaccgcgcagccaaggaggagcgcaaggggcccacccaggctggggcggcggcggcggccaccgaaccccccgggaagccgtcggccaaggcggagaaggaggcggcgcggaaggcggccgggagcgcggcgcccccgcccgcgcagtgacgtctccagccccgcagcccggcccgggcgtcctccgccagctcctgtgaccagcgcgtctcccgatgctctccgccgtgttcgtgtccccaggcgccctcgctgcagccccgcccccgtgggtctctgactctgtcgcttttctctaagtaaagatttcacgtccaaaaaaaaagcttc

SEQ ID NO: 79111 - DNA, 836 bp, Homo sapiens
tagcttttagtgtgtttttagaaagccttttatttatcagaagtaaaatctgctccttttctccttaactccatggtttatgctctggagcgcgctccgcagagtccttgctgcgctgggcaggtccactggtgtctgcgcccctctccctgggtggcccctccccttacaacgcgcgacctcctgctccatgcccctccagggccctgagttctgaactggaggctgatcttcggtgtcctgaagccatggctccattacaaactgtccgcagtgtccccaaccgcagaagcgggagggcctgggcccggggcgcacaggagggctcagccccaccgaccctgacccggcccctcccgcagcacaagatctgcacgccgctgaccctggagatgtactacacggagatggaccccgagcgccaccgcagcatcctggcggccatcggggcctacccgctgagccgcaagcacggcacggagacgccggcggcctggggggacggctaccgcgcagccaaggaggagcgcaaggggcccacccaggctggggcggcggcggcggccaccgaaccccccgggaagccgtcggccaaggcggagaaggaggcggcgcggaaggcggccgggagcgcggcgcccccgcccgcgcagtgacgtctccagccccgcagcccggcccgggcgtcctccgccagctcctgtgaccagcgcgtctcccgatgctctccgccgtgttcgtgtccccaggcgccctcgctgcagccccgcccccgtgggtctctgactctgtcgcttttctctaagtaaagatttcacgtccaaaaaaaaagcttc

SEQ ID NO: 79112 - DNA, 1024 bp, Homo sapiens
  misc_feature (977)..(977): n is a, c, g, or t
  misc_feature (1006)..(1006): n is a, c, g, or t
cgaccacagcctcggtctcgcagctgcagcccccgccccgcccggccgcgaagcgtctggaaccgcatcctccgcatccacatccgcatcgtcgtcctccccgaccgcgtcctgcagcagctgccagtggagccgcctgacaaggactgccatccaccatggtgaagctgggctgcagcttctctgggaagccaggtaaagaccctggggaccaggatggggctgccatggacagtgtgcctctgatcagccccttggacatcagccagctccagccgccactccctgaccaggtggtcatcaagacacagacagaataccagctgtcctccccagaccagcagaatttccctgacctggagggccagaggctgaactgcagccacccagaggaagggcgcaggctgcccaccgcacggatgatcgccttcgccatggcgctactgggctgcgtgctgatcatgtacaaggccatctggtacgaccagttcacctgccccgacggcttcctgctgcggcacaagatctgcacgccgctgaccctggagatgtactacacggagatggaccccgagcgccaccgcagcatcctggcggccatcggggcctacccgctgagccgcaagcacggcacggagacgccggcggcctggggggacggctaccgcgcagccaaggaggagcgcaaggggcccacccaggctggggcggcggcggcggccaccgaaccccccgggaagccgtcggccaaggcggagaaggaggcggcgcggaaggcggccgggagcgcggcgcccccgcccgcgcagtgacgtctccagccccgcagcccggcccgggcgtcctccgccagctcctgtgaccagcgcgtctcccgatgctctccgccgtgttcgtgtccccaggcgccctcgctgcagccccgcccccgtgggtctctgactctgtcgcttttctctaagtgatttacgttcagnattacaattactggccgcgtttaccgtcntgactgggccttgcgttc

SEQ ID NO: 79113 - DNA, 382 bp, Homo sapiens
gtctccagccccgcagcccggcccggggtaggtgcgcgccgcggggctccggccggctctgcccaggtctcttcctggcctcccgccaccgcttctgagccaaagacccccgccacccttcccttcctcttccctccgacccggcccgccagaacctcggggttgggggttgcgaatccgagcccgccgggtgacgcggggtccgcggggagcccctggccgcgtcgccgctctcaaccctcgggctctgtctccgcagcgtcctccgccagctcctgtgaccagcgcgtctcccgatgctctccgccgtgttcgtgtccccaggcgccctcgctgcagccccgcccccgtgggtctctgactctgtcgcttttctctaagt

SEQ ID NO: 79114 - DNA, 469 bp, Homo sapiens
  misc_feature (364)..(364): n is a, c, g, or t
  misc_feature (372)..(372): n is a, c, g, or t
gaagtgtggagcacatgactgggttccccccatgaagaccacacatgaacagcagctcattaccagcctgatttcaggatgaacttttatgcagtcacggagtgagtgaacatgcatgattcttagtgtgacatcagaacacaaggcctccagagggatgccaatgcatgtgagcaaaggcaggcagcctgactggtacttggcatctcaggactcagctggagggaggagggaagaactacactatggcagaggccacagccactgtggggcacctgatgttccccagacctaaacagctgggcttccccactgccctactttcccttcagttccacctgccactcctcaaaccactcgtagntgctagtnatgagcatgatcatggtggaccggcctggggatcagagctgatattactactcccgcctctccctccaccccctcaccacagaaggatcctctagag

SEQ ID NO: 79115 - DNA, 694 bp, Homo sapiens
gttgtgacttcccccagagtcacacagctaactggggcaacccagggccattatctcatgactcccaggcttcagtactggaaaaataatcgtgtcatgctttcctttctagatggtagaaactttggaatgtgtgattttgaatactgagaacagcccaaaaatgtcacatagtccctatgctaaagcacatgcattttatcagtagggacaagattgagggccatcacttaatttaaaacaaattgtaacccatctagtgatctggactcttggcctgtagatgagatacaggaaagcggatgtaagtgtgaaggcaacagcccagtgttgctgagtgccgggcacagcatgtgccatcatttcacagcaactaaaatgctgaccttacaggttcatggtttcatttttggtcttcatgaaaagcttgaattctctttagcttcagtttgcaacacaaataaagaatatatttgagactgattgtcacagaattttctaattacccacatgtggagcgatttcctaatgtgaaatacttttcttgatggtatgagatcagtaccattggacatacacagtttattcagttggccttttggtaaaaagaagttctttggtatgcaaaaattttccaagtcacttcttgcaatattataaaatgtattacttgaataaaatgttgaactcatgg

SEQ ID NO: 79116 - DNA, 529 bp, Homo sapiens
agaaaccaaaccccaagtcctcactctttagtggtctgagatttggcaaaatcaggtatcctggtcaaagcatagattcaaatattgtgggtatctgtcctagacagtggacagtggctagctcaacgacactgctgttttgtgtgtctctgggaagacctttctaaggaagaaaacaagaaaacctgaactttttagattgcgtttttatttttctttctttcagttgtcatttttattattttgcttcaggcgaatctcaagaacacggcctgataggcttagcttaagactggctatcctccatgggtcctgcgcagggaggaactgggctgagtagttatttagctgcctcccattccatttggcagatcttagtgccaggttttctttagatggggaggcacctctcttgggaatggacttctctcccacacatgtctctttcattaactccgagaccttattccttgaccttagctcaagttatttaacttctgcatccttttgccagaggtgtctcaagggc

SEQ ID NO: 79117 - DNA, 436 bp, Homo sapiens
gcagtagagacattttaaaaagacagaatgatcaacacagtcacacgtacagagccgcccagtacaataaggcaaaaaatgactgtcagagtgacctttccaaaacaattctagttaaatagtgtccttgaatataaggcaaaagagaagaaaaggaaaaaggaggaataagccagcttcccatgacaactgctgacataatgacaaatctggtatttttgtcttggttctacaatgtctgaaggataagacctggaatacgagcctcacatggggaagcacagcacatatttccaaacgcagcctctaataatccaagtgccttccaagtcagtatgcagaggactgaggcaacaaaacaattgttgaaacagctgagtgggatggaactgaacacatccaggaggcaacaactacatgggccgacagtgaaatt

SEQ ID NO: 79118 - DNA, 252 bp, Homo sapiens
tggctggactcagctgcaagttggattcaggtctgctccgcctctctccatcctccttggacacagtagctacccagacttattattctcatcgaaaaattggaagcacgagaagacaagcacaactccagcaagacactttaagccttttctttaagtctttgtcaaagcaaatcacacaactaagtccaagattcaagtgcaagcagggaaggacatctcacccaccatgaggccaaagcaagttatagg

SEQ ID NO: 79119 - DNA, 446 bp, Homo sapiens
tttcttgaggcctccccagccatgtgaaactgggagtcaattaaacctctttcctttctcaattacccagtctcgggcagttctttatagcagcatgagaacagactaatacagaaggtgtgtgttaaagggggcagcatcacaaaatggaagggctgaaacactgactccctgcttttcgtaaaactgcccacaaaggctgccttttccacagtgataactcagcttttgtgttgttacacactgagagtttagggtcgtttgttacttcagcactgtctaacctactgtgactataactatgggtctctggggaaaggcgccctagatgaaaggaccatatttattgaagactgggagtctgatgtgcaagacatcattaacatctgtattatagtcttgagactgtgtatgctttgtgagctttaatgggagatgggtcagat

SEQ ID NO: 79120 - DNA, 353 bp, Homo sapiens
tgcaaattagacacagtgtctaatgtggttgagtccccaacattcattctactgcacatgatttgcctaactagtcatggtttagtttagtaatggattacttagcatgattacttagtgtgaaggccaaggtgttgtaatagaaatctcaaaattcagtagcataaagaagatagaagtgtctttctctcataaattattgtggccagtccaaactggtggtagggtgggagagatgtggatagcacaatttcatttaggggcctaggttttttctttctgttgctctatcatctcctagaacatttgaattgtaggaaccggttgtaggcatggcagggctctaacttgca

SEQ ID NO: 79121 - DNA, 1499 bp, Homo sapiens
ccagtactggggccttattgtccagccttccacctccaggagcccactcagtgatgacttttgacaaaagtcacccggattatccctcttttggggtccatgatgccaccaacggctaaagttaacaaatgcattaccaggaggtaccactgaggtaaggattgttactgtaagtgattttctctgattttgaccactacaagtaaaatcacaagatttgtcccaaatactatataaagaggaatgtcttttatttctcgaaattgttctgccactttgtttgttcaaataacacataataaaggataaatggcttgtagctatatttatccaaattgaacatttttgatgtaatttttttaatttgtcaaaagcatatcaatggtcataaaaattttttatgtcctctggccctattaccttacccttgggaatttattccaagaacgtaatttgaaagagattaaagcacataggcacaaatattttcagtgcagtattgtttatattggaaacaacccaaatgttcagtaacagggggaacaattttgtaaatcttgctacagcaacttaacaaaattataagctgccacttataattgtaaattttgaaagtttgtagcacagcaaggaaactgatcatgttaaatgtttctgatatcttagttaatttttctcccgccagttccgatcggtgtcctggtcataccgtcagcatataagtatgtatttcataaacatttactttgtattaactcagtagtattcccttcctagagtggtttgcttcccagattgtaatggacaatcatctcacctggggatcttgtaacaatgtgattctgattctgtaaactttgtggggagcccaagattccacatgtcttagaggctctcagatactgctgatgctgttgatcacgaatcacgcattgagcagcaaggtcctagagctctttgtgtatgaagaagatactactgacccagtgcctcgctatcttgaaaggcagctgtgacctttctagcaactgagggggtggggactagaaacgagtgttttctggtgtttctctaataaagctgctgtcttgtatccagattgaccatcagtatccttatgcccttcaactaacttgaaatttgtcagttaacagaaattactgggtggcactaaaataaattattcttaatataaagggtaagaaagggttgggtgtggtggctcatgcctgtaatcccagcactttgggaggccaaggtgggcagatcacctgagatcaggactttgagaccagcctggccaacatggcaaaaacccgtctctactaacaattaaaaaaaaaaaattagccgggtgtggtggtgggttcctgtaatcccagctacttgggaagctgaggcaggagaatcgcttgaacccgggaggcggaggttgcagtgagctgagattgtgccattgcactccagcctgggggacaagagcgaaactccatctcaaa

SEQ ID NO: 79122 - DNA, 604 bp, Homo sapiens
ggggcccgaagcgtttactttgaaaaaattagagtgctgtggcgcgatctctgctcactgcaacctccacctcccgggttcaagtgattctcctgcctcagcctgccgagtagctggaattacaggtgtgcaccaccatgcccagctagtttttttgtatttttagtagagacagggtttcactatgttggccaggctggtcttgaactcctgacctcaggtgatccgcccacctcagcctcccaaagtgctgggattacaggcatgagccactgcacctggccttaacccctctttagattggaaaaaataattacaactttaaaaatagcttagtgttgaaccctttggtaaactaaagacccttttataatgcacatattcccaacaaaattaatatattttgtgagattaaacaatgcttgtatatgcttgaactttcttaaaatatgtccatgtcatactattatgaatgtacatttttatgagtcataaatattattttcaaaagcactacaggcccatgaattacttcctcacttttgcagttgattactgaaatgtaaatcacaagaatttgtcaattaaatcattttaaactgca

SEQ ID NO: 79123 - DNA, 513 bp, Homo sapiens
ggggcccgaagcgtttactttgaaaaaattagagtgctgtggcgcgatctctgctcactgcaacctccacctcccgggttcaagtgattctcctgcctcagcctgccgagtagctggaattacaggtgtgcaccaccatgcccagctagtttttttgtatttttagtagagacagggtttcactatgttggccaggctggtcttgaactcctgacctcaggtgatccgcccacctcagcctcccaaagtgctgggattacaggcatgagccactgcacctggccttaacccctctttagattggaaaaaataattacaactttaaaaatagcttagtgttgaaccctttggtaaactaaagacccttttataatgcacatattcccaacaaaattaatatattttgtgagattaaacaatgcttgtatatgcttgaactttcttaaaatatgtccatgtcatactattatgaatgtacatttttatgagtcataaatattattttcaaaagca

SEQ ID NO: 79124 - DNA, 439 bp, Homo sapiens
tggttgtgcagggcccatgtgtgaagacagcatgagtcttaacccctcttttattttatttttgagacagagtctcgctctgttgcccaggctggagtgctgtggcgcgatctctgctcactgcaacctccacctcccgggttcaagtgattctcctgcctcagcctgccgagtagctggaattacaggcatgagccactgcacctggccttaacccctctttagattggaaaaaataattacaactttaaaaatagcttagtgttgaaccctttggtaaactaaagacccttttataatgcacatattcccaacaaaattaatatattttgtgagattaaacaatgcttgtatatgcttgaactttcttaaaatatgtccatgtcatactattatgaatgtacatttttatgagtcataaatattattttcaaaagca

SEQ ID NO: 79125 - DNA, 489 bp, Homo sapiens
atggctgctgccatattcagaggcttgatatgattgctgctttgccaaggggacacttccaatagacacctcagcctcccaaagtgctgggattacaggcatgagccactgcacctggccttaacccctctttagattggaaaaaataattacaactttaaaaatagcttagtgttgaaccctttggtaaactaaagacccttttataatgcacatattcccaacaaaattaatatattttgtgagattaaacaatgcttgtatatgcttgaactttcttaaaatatgtccatgtcatactattatgaatgtacatttttatgagtcataaatattattttcaaaagcactacaggcccatgaattacttcctcacttttgcagttgattactgaaatgtaaatcacaagaatttgtcaattaaatcattttaaactgcaaaaaaaaaaatcggcctcgctggactcaacggcggacccatgtggacgt

SEQ ID NO: 79126 - DNA, 667 bp, Homo sapiens
tggttgtgcagggcccatgtgtgaagacagcatgagtcttaacccctcttttattttatttttgagacagagtctcgctctgttgcccaggctggagtgctgtggcgcgatctctgctcactgcaacctccacctcccgggttcaagtgattctcctgcctcagcctgccgagtagctggaattacaggtgtgcaccaccatgcccagctagtttttttgtatttttagtagagacagggtttcactatgttggccaggctggtcttgaactcctgacctcaggtgatccgcccacctcagcctcccaaagtgctgggattacaggcatgagccactgcacctggccttaacccctctttagattggaaaaaataattacaactttaaaaatagcttagtgttgaaccctttggtaaactaaagacccttttataatgcacatattcccaacaaaattaatatattttgtgagattaaacaatgcttgtatatgcttgaactttcttaaaatatgtccatgtcatactattatgaatgtacatttttatgagtcataaatattattttcaaaagcactacaggcccatgaattacttcctcacttttgcagttgattactgaaatgtaaatcacaagaatttgtcaattaaatcattttaaactgca

SEQ ID NO: 79127 - DNA, 707 bp, Homo sapiens
tggttgtgcagggcccatgtgtgaagacagcatgagtcttaacccctcttttattttatttttgagacagagtctcgctctgttgcccaggctggagtgctgtggcgcgatctctgctcactgcaacctccacctcccgggttcaagtgattctcctgcctcagcctgccgagtagctggaattacaggtgtgcaccaccatgcccagctagtttttttgtatttttagtagagacagggtttcactatgttggccaggctggtcttgaactcctgacctcaggtgatccgcccacctcagcctcccaaagtgctgggattacaggcatgagccactgcacctggccttaacccctctttagattggaaaaaataattacaactttaaaaatagcttagtgttgaaccctttggtaaactaaagacccttttataatgcacatattcccaacaaaattaatatattttgtgagattaaacaatgcttgtatatgcttgaactttcttaaaatatgtccatgtcatactattatgaatgtacatttttatgagtcataaatattattttcaaaagcactacaggcccatgaattacttcctcacttttgcagttgattactgaaatgtaaatcacaagaatttgtcaattaaatcattttaaactgcaaaaaaaaaaagtcgacgcggccgcgaatttagtagtagta

SEQ ID NO: 79128 - DNA, 961 bp, Homo sapiens
gcagatacttctttaagaataagagatacagattctgtaacatctattggctccataattctgaagtcttatattaattattctacaatttccttaagtgaagaacagaggtaaataggctataggaagcactgaaaaaggaaacagaaaatactgtcttttgcaaattgaattatttaaaaatagtttccaaatataaaaattagaactttatctacattgaatcatggggttttctaatagggtgaagcaaagagagtttcttttcattaacctctccaaaaacaataaggcagatcaatatccttggatatggaatatcaaagcattcaaactactttttaaacagtgataagagccttggaatacattaatataagaagacaagggcataatgttattctaagcatccagtgaggaatgcctgcttcaaaatttgcagactctaattctaccagaaataaaagatatggagcatttttaatcagaggaaaacatgtcttacccttagaaactcacctgtcctttactgtttctgttcttcccaatcctttgttcttctaagcaaagaaacaaaaggaaagtaaaaaagcttcatcctgttggggtccacaagtaaaataatgtaattcataagcatttcagtacgaatgagaaaagcagagctactttaaaaactattattatttaaaaagaaaaataaagaattagctccccaacagttaatttttgtaaagcgattttttaaaaaaagaacaaaaccataacaggcagaacactgatgtatttcttacccctgtatctattacaatgattgtattaagttactcatggggttggctaaagaggtttatatgtagattatcacttcatattttcttttgttctttgaaaatgtgcatggaagccatgttatacgttattagagaatgaaaacatgaaaaatcttgaccatcctatc

SEQ ID NO: 79129 - DNA, 361 bp, Homo sapiens
cttctcctctccatcaccactgaagtattttaaagcagatcccagccatcaccttaaagtcatgcacttcattcataacaacgttttggtcattgacagaccacatatatgacagtggtctcataagattataatactgtgtttttacagtgccttttctatgtttagatatgtttagatacacaaatccttaccattgtgttgcctacagtattcagtacagtaagtaatacattgtacaagtttgtagcctaggagcaacaggctatcccatatagcctaggtatatggtaggctataccatctagatttatgtaagtacactccgtgatgtttatacaaagatgaaatcacctaaaga

SEQ ID NO: 79130 - DNA, 211 bp, Homo sapiens
aaattgagacccttctctatatatttcgtaatcttctttgtttagagaaatatattcctgtaacatatttccataacattaaatgaccttctataacattttaaataactacagagtattccatgttaaggatgtatcataatggacttagtcattatatctttttttaaaccatataaaagatgtcgacgcggccgcgaatttagtagta

SEQ ID NO: 79131 - DNA, 548 bp, Homo sapiens
ttgggagatcttgtgtgaatgtgttttattcaaaaggtactcagagaagaccaaaagaaatcaggaagaataaaaaaggccatgattacttcctactggctgagaaacctcaacacaggcagcatttctcatgccgaccaccatcctatattgtgctatagatattcaccactgttcccatcacttctactacaactcagactctagaatatgtaatcctgtgtggatccttgtgtctaagagtgttgatatggttttgctgtgtctccacccaaatctcatcttgaatggtaactcccacaattcccatgtgtcatgggaggaacctggtgggaggtaattgaatcatgggagtgggtctttcttgtgctgttcccgtgatagtaagtctcacaagatatgatcgttttaaaaacgggagtttcctgcacaagctctcttctcttgtctgatgccatgtgagacacatctttcaccttccatcatgattgtgaggcctccccagccacgtggcactgtaagtccattaaacctctttcttttataaa

SEQ ID NO: 79132 - DNA, 330 bp, Homo sapiens
caaaggttaagaatgcctttttgttcagtttcactgctgatgaagatggtgggttggatacaatggtgttttcaaaacacttggaaataataatgcccatgttggtattgcagtacttttttagccacatacagtatccaagtcacaaatcatttctcctgtacttagtaattttagatgtattataatctagtatcatcccacttgtttcaaattactcccatgaatttacattacaaaccattttgagagcccagggaatctcaggtgtaattctaatctggtattgattccatatatctttgggggtaaatatttgctgtattaaaa

SEQ ID NO: 79133 - DNA, 242 bp, Homo sapiens
atcacttgaggccaggagttcaaaaagaaattttaatagcaaataaacatatagaaagatgcctagcctcactggtaatcagagcaatgcaaacttaaaatgaggtttttctcctcattaaactggcaaaaatctaaaaaattgttaagatccattgttggttaagatgaagagaaatgagcactttcaaatactgctggtatgaaaggcaatttgacaataactaccaaaatttaaaatat

SEQ ID NO: 79134 - DNA, 493 bp, Homo sapiens
tagcgcagctgtgttaggccatttctgcatttctgtgaaggaatacctgaggctgagtaagtggcaaagaaaaaaggtttcattcactcacagttcaacaggctgcaccaacatggcgccggcatctgtttctggggagggcctcaggaagcttccactcgtggagggaggcaaaggggcagcaagagagagggaggaagccccactcttttaaaacaaccagatctcttgtgaactgagaactcccttatcaccaaggggacggtgctagaccattcatgagggatccgcctccatgggccaatcccctcccaccaggcccacctccaacactggaaatcacctcccagcaggcccgcctccagcactggaaatcatgcttcagcgtgagactggaaggggactgatggagcctggatgtttgtccccgcccagatctcacgctgaaccgtaatccccaatgctggaggcggggcctggtgggaggtgactg

SEQ ID NO: 79135 - DNA, 970 bp, Homo sapiens
gttgcctttattatatccatttctgtattcgtaccagcacctcgcaaaataattgtctcagcagactcccttgggcaatacttcacagacatgactgtgcacgccagtcacccagagatcatgttaaaatgcacatctggttcagcaggcctaggtttctgtatgttatagaagttcaaagaagacaaactctagccaagagcagtgtgaagaaaagaagacgctatattaatcacagtccagggatgccttctggcttcctggcagcaattccggcctgagattccttctctgtgcatacttcctgtcaacattgtgtgatgtcaagctgtggccgtcacaaaagtactgtgaacacctgtaaatcccaactatcaaaaatcacacccaggaatccaaattagcattattatgtcaaaagaaaaacctgatttcttcactgtctgataactgctttctttattgtcctaaactagcattccctaacctttgagtgagatagtgacactttagtttcttatattctaaaatgttttcaggggcagctggtggcagaggagagggcagtggggatagggcagggagacagatacctgcacaaggaaggtatggggatgaggtgggagtcaagatgatgaacggagagagggatggtaaccgatttagtcacccatttgagagggtctccagacttgcactgctggctaaagactcctgtcctaagtgagaaagcatcatgtcaggcaagggctctatcccggtggttatgggtggacattctggagtgatctaaggaggctttccgagtctcactgttggctctccctgaccccttctaaaactttctttctagcttctgctgccctccaggtaagcactccacagcctgtggagctctgtgggtatagtctgtccttccataatgatttgcctcgctgcagtaattaacagaatgacttccaaaattaag

SEQ ID NO: 79136 - DNA, 426 bp, Homo sapiens
tctggaaagacaggccttttctctctgctttgcccccactaacttttagtgtttgtctagggttgtgaatccaggatgagtttttagcttccatttcattcttcttcctttcttctacgtagtataaattttttccactccaccccatttggttcaggggcctagatagtactaaaggcctaccataaccttctccctgtaataaccagggagcactcctttttcctatccatctattccttcattcatttgttcatttattccttgacatatgattttaacaaatatttgttcaacaccaatttatgggctaaggtgttccgtatataaatcccagttagccactgacaccaaagtcatggtttacagtgtagttacagagaaaagtcaacaattaccatacagtgtgataaatacagtaagtag

SEQ ID NO: 79137 - DNA, 1484 bp, Homo sapiens
gctagtcacctgggttaatcggccgagggagcggcgcccgctcgagagaagtggggccgagatcgcgccgtcccagcccgcccgccggcgtctgcgctgctccggcgcccttacccctgctggcccttgcaaggcgcgaccggcggccatgcagccccggggctgaggccgccccatggcaaagccggcggtcccggcgacgacggcgcatggagaacttccgtaaggtgcgctccgaagaggcgccagcggggtgcggggccgagggaggcggcccgggctccggccccttcgcagacctggcgccgggcgcggtgcacatgcgggtcaaggaaggcagcaagatccggaacctgatggccttcgccaccgccagcatggcgcagccagccacgcgcgccatcgtcttcagcggctgcggccgggccaccaccaaaaccgtcacgtgcgccgagatcctcaagcgccgcctggcgggcctgcaccaggtcacgcggctgcgctaccggagcgtacgcgaggtgtggcagagcctcccgcctgggcccacgcagggtcagacgcctggcgagccggccgctagtctcagcgtacttaagaacgtgcccggcctcgccatcctactttccaaggacgcgctggatccgcgacagcccggctaccagcccccgaatccccatcctggtccctcgtccccgccagccgcgccagcgtccaagaggagcctaggggaacccgcagctggagaaggctccgcgaagcgatcgcaacccgagccaggggttgcggacgaggatcagacggcctgaaactccggactgtgggccacctagtccggcaggatcttccgccagcgcctccaccttcagatgtacctccagcctttcactcctcggtcctccggagcccacaacctggacacagctcctcaagacaggtagcatggaccttaaggcgacaagagaggggccccaggagtggcaggagaggatccccgaccaccctagggaaacttcgtgcgataattgctgcttatgcccgtgttgcgtgaagacacggaacttcaccttttctgggaccttctttgggggagaatggtggacagtgggattctggaaacttgtttgggacccccaagggttaaagccacccagcattcacgaagagcacctgaagtatggaagctgagaagagttattggaatcacccccaccgttgacagaggaaggcagggggtgagaattaactgcttgagggtaggagagtctgagatgtgggggccctattccgctccccgccctgggacagttttcctttctagttttctttcccctgcttcagaggagcatctctgagggttctagctcttttaacaccccttttccccctgctggcccagagggagacccaggactgaactctccaggcctcctcccctgagccctgcagctggctggagtcttgcttccaataaaacaagcaca

SEQ ID NO: 79138 - DNA, 2126 bp, Homo sapiens
acgcgcctcggggaacagcctggcccaaagcctcactcctcacgtcccaggggtggacgggggtccgggagcctcgagctccgggcaggcgtggcgaggctgaagtctgggtcttccgcgccccgcgaggaccacgccgcgacgtaatcgcccgcggggaggcgcggagtggagccgcagccagctcctcccgcactctgctgaccgcgcactagctgtccttgaggcaagaatacttgggagcggaaaaaaggtgggggtgttccccggggcgggggaggaggggcaaggccccagcaagcctcttggaaatctctccctgggaggggacgaggggcggccttcagttgcaaatgggaagggctcggataccggatttgaagcagtgtttgcacggcaagcgcagcttttatttagactgccggtttgtgagggttggctctcagagcgctgatggcgattatagtggaacttcaccttcacctgctcatgcgccccgcagcgcgcccgctcccacgcccgcgtagctgaggacccagactcgccaggaaaggctagtgaggctggggcccgggcgggcccggccgggccgggtcaggggaggggcctggcggcaggggcggggcctcagctaaaggcgcggagcacccggcgccgagagcgctgagtagagcggcgcccgctcgagagaagtggggccgagatcgcgccgtcccagcccgcccgccggcgtctgcgctgctccggcgcccttacccctgctggcccttgcaaggcgcgaccggcggccatgcagccccggggctgaggccgccccatggcaaagccggcggtcccggcgacgacggcgcatggagaacttccgtaaggtgcgctccgaagaggcgccagcggggtgcggggccgagggaggcggcccgggctccggccccttcgcagacctggcgccgggcgcggtgcacatgcgggtcaaggaaggcagcaagatccggaacctgatggccttcgccaccgccagcatggcgcagccagccacgcgcgccatcgtcttcagcggctgcggccgggccaccaccaaaaccgtcacgtgcgccgagatcctcaagcgccgcctggcgggcctgcaccaggtcacgcggctgcgctaccggagcgtacgcgaggtgtggcagagcctcccgcctgggcccacgcagggtcagacgcctggcgagccggccgctagtctcagcgtacttaagaacgtgcccggcctcgccatcctactttccaaggacgcgctggatccgcgacagcccggctaccagcccccgaatccccatcctggtccctcgtccccgccagccgcgccagcgtccaagaggagcctaggggaacccgcagctggagaaggctccgcgaagcgatcgcaacccgagccaggggttgcggacgaggatcagacggcctgaaactccggactgtgggccacctagtccggcaggatcttccgccagcgcctccaccttcagatgtacctccagcctttcactcctcggtcctccggagcccacaacctggacacagctcctcaagacaggtagcatggaccttaaggcgacaagagaggggccccaggagtggcaggagaggatccccgaccaccctagggaaacttcgtgcgataattgctgcttatgcccgtgttgcgtgaagacacggaacttcaccttttctgggaccttctttgggggagaatggtggacagtgggattctggaaacttgtttgggacccccaagggttaaagccacccagcattcacgaagagcacctgaagtatggaagctgagaagagttattggaatcacccccaccgttgacagaggaaggcagggggtgagaattaactgcttgagggtaggagagtctgagatgtgggggccctattccgctccccgccctgggacagttttcctttctagttttctttcccctgcttcagaggagcatctctgagggttctagctcttttaacaccccttttccccctgctggcccagagggagacccaggactgaactctccaggcctcctcccctgagccctgcagctggctggagtcttgcttccaataaaacaagcaca

SEQ ID NO: 79139 - DNA, 3016 bp, Homo sapiens
acgcgcctcggggaacagcctggcccaaagcctcactcctcacgtcccaggggtggacgggggtccgggagcctcgagctccgggcaggcgtggcgaggctgaagtctgggtcttccgcgccccgcgaggaccacgccgcgacgtaatcgcccgcggggaggcgcggagtggagccgcagccagctcctcccgcactctgctgaccgcgcactagctgtccttgaggcaagaatacttgggagcggaaaaaaggtgggggtgttccccggggcgggggaggaggggcaaggccccagcaagcctcttggaaatctctccctgggaggggacgaggggcggccttcagttgcaaatgggaagggctcggataccggatttgaagcagtgtttgcacggcaagcgcagcttttatttagactgccggtttgtgagggttggctctcagagcgctgatggcgattatagtggaacttcaccttcacctgctcatgcgccccgcagcgcgcccgctcccacgcccgcgtagctgaggacccagactcgccaggaaaggctagtgaggctggggcccgggcgggcccggccgggccgggtcaggggaggggcctggcggcaggggcggggcctcagctaaaggcgcggagcacccggcgccgagagcgctgagtagagcggcgcccgctcgagagaagtggggccgagatcgcgccgtcccagcccgcccgccggcgtctgcgctgctccggcgcccttacccctgctggcccttgcaaggcgcgaccggcggccatgcagccccggggctgaggccgccccatggcaaagccggcggtcccggcgacgacggcgcatggagaacttccgtaaggtgcgctccgaagaggcgccagcggggtgcggggccgagggaggcggcccgggctccggccccttcgcagacctggcgccgggcgcggtgcacatgcgggtcaaggaaggcagcaagatccggaacctgatggccttcgccaccgccagcatggcgcagccagccacgcgcgccatcgtcttcagcggctgcggccgggccaccaccaaaaccgtcacgtgcgccgagatcctcaagcgccgcctggcgggcctgcaccaggtcacgcggctgcgctaccggagcgtacgcgaggtgtggcagagcctcccgcctgggcccacgcagggtcagacgcctggcgagccggccgctagtctcagcgtacttaagaacgtgcccggcctcgccatcctactttccaaggacgcgctggatccgcgacagcccggctaccagcccccgaatccccatcctggtccctcgtccccgccagccgcgccagcgtccaagaggagcctaggggaacccgcagctggagaaggctccgcgaagcgatcgcaacccgagccaggggttgcggacgaggatcagacggcctgaaactccggactgtgggccacctagtccggcaggatcttccgccagcgcctccaccttcagatgtacctccagcctttcactcctcggtcctccggagcccacaacctggacacagctcctcaagacaggtagcatggaccttaaggcgacaagagaggggccccaggagtggcaggagaggatccccgaccaccctagggaaacttcgtgcgataattgctgcttatgcccgtgttgcgtgaagacacggaacttcaccttttctgggaccttctttgggggagaatggtggacagtgggattctggaaacttgtttgggacccccaagggttaaagccacccagcattcacgaagagcacctgaagtatggaagctgagaagagttattggaatcacccccaccgttgacagaggaaggcagggggtgagaattaactgcttgagggtaggagagtctgagatgtgggggccctattccgctccccgccctgggacagttttcctttctagttttctttcccctgcttcagaggagcatctctgagggttctagctcttttaacaccccttttccccctgctggcccagagggagacccaggactgaactctccaggcctcctcccctgagccctgcagctggctggagtcttgcttccaataaaacaagcacaaaaatggctgtgtcccccattttttttctaaccacccgcctgtgcagagacagctctcgcctggccccttgtgtctcccctcccctccagccttgcgtcctgagtctttggagtcttcagggtcaggcacagagactgaacagcttcaaaatggtgcaaggcactgcccagtccctggcttcttcctctctcctcccccactccgcctcccgggctggccctggcctcagaggctgttgcaaatgggggcccgtgtacccctgtacatcgccactaagggaaagggagcggcacattgtttttctgggaggggaaggaaggagtggaaggacagcatcgatgaactctcctggaggtcactgcaaagggtggcagaccctgctgaggtccctgaatctgcagcctccagacaataaactgaaccttacccagaaggctggcacaaagcccccagctctgtgggtaggatctccccttcactgccctctctctcagaaaggacagcacacccttgggaaagggggaggagagagactgagcacaaatccactgctggaaattactattcagcagagaagctgggtcttgggctgtgaatcactgcaggcctcctgataagctgctgcctccagccctgcacagctgtctgttgagagataacagcctcataagcttctctgcccaactccaagccagctggggggtgggggtgctgctgtgtgctggaagagctctggtgagttgggggtggcatacagccccaggatctcagaagcagatctcatcccatgcaactcagcagcacccctggaaagggggagatgcggaagaatgtatttataagtcattttgctggcagaaccctgaaataaatcctgctggtgacaaga

SEQ ID NO: 79140 - DNA, 2141 bp, Homo sapiens
acgcgcctcggggaacagcctggcccaaagcctcactcctcacgtcccaggggtggacgggggtccgggagcctcgagctccgggcaggcgtggcgaggctgaagtctgggtcttccgcgccccgcgaggaccacgccgcgacgtaatcgcccgcggggaggcgcggagtggagccgcagccagctcctcccgcactctgctgaccgcgcactagctgtccttgaggcaagaatacttgggagcggaaaaaaggtgggggtgttccccggggcgggggaggaggggcaaggccccagcaagcctcttggaaatctctccctgggaggggacgaggggcggccttcagttgcaaatgggaagggctcggataccggatttgaagcagtgtttgcacggcaagcgcagcttttatttagactgccggtttgtgagggttggctctcagagcgctgatggcgattatagtggaacttcaccttcacctgctcatgcgccccgcagcgcgcccgctcccacgcccgcgtagctgaggacccagactcgccaggaaaggctagtgaggctggggcccgggcgggcccggccgggccgggtcaggggaggggcctggcggcaggggcggggcctcagctaaaggcgcggagcacccggcgccgagagcgctgagtagagcggcgcccgctcgagagaagtggggccgagatcgcgccgtcccagcccgcccgccggcgtctgcgctgctccggcgcccttacccctgctggcccttgcaaggcgcgaccggcggccatgcagccccggggctgaggccgccccatggcaaagccggcggtcccggcgacgacggcgcatggagaacttccgtaaggtgcgctccgaagaggcgccagcggggtgcggggccgagggaggcggcccgggctccggccccttcgcagacctggcgccgggcgcggtgcacatgcgggtcaaggaaggcagcaagatccggaacctgatggccttcgccaccgccagcatggcgcagccagccacgcgcgccatcgtcttcagcggctgcggccgggccaccaccaaaaccgtcacgtgcgccgagatcctcaagcgccgcctggcgggcctgcaccaggtcacgcggctgcgctaccggagcgtacgcgaggtgtggcagagcctcccgcctgggcccacgcagggtcagacgcctggcgagccggccgctagtctcagcgtacttaagaacgtgcccggcctcgccatcctactttccaaggacgcgctggatccgcgacagcccggctaccagcccccgaatccccatcctggtccctcgtccccgccagccgcgccagcgtccaagaggagcctaggggaacccgcagctggagaaggctccgcgaagcgatcgcaacccgagccaggggttgcggacgaggatcagacggcctgaaactccggactgtgggccacctagtccggcaggatcttccgccagcgcctccaccttcagatgtacctccagcctttcactcctcggtcctccggagcccacaacctggacacagctcctcaagacaggtagcatggaccttaaggcgacaagagaggggccccaggagtggcaggagaggatccccgaccaccctagggaaacttcgtgcgataattgctgcttatgcccgtgttgcgtgaagacacggaacttcaccttttctgggaccttctttgggggagaatggtggacagtgggattctggaaacttgtttgggacccccaagggttaaagccacccagcattcacgaagagcacctgaagtatggaagctgagaagagttattggaatcacccccaccgttgacagaggaaggcagggggtgagaattaactgcttgagggtaggagagtctgagatgtgggggccctattccgctccccgccctgggacagttttcctttctagttttctttcccctgcttcagaggagcatctctgagggttctagctcttttaacaccccttttccccctgctggcccagagggagacccaggactgaactctccaggcctcctcccctgagccctgcagtaatctgagtctgctcctaactctttttgtttttcttcttctttttttct

SEQ ID NO: 79141 - DNA, 1960 bp, Homo sapiens
acgcgcctcggggaacagcctggcccaaagcctcactcctcacgtcccaggggtggacgggggtccgggagcctcgagctccgggcaggcgtggcgaggctgaagtctgggtcttccgcgccccgcgaggaccacgccgcgacgtaatcgcccgcggggaggcgcggagtggagccgcagccagctcctcccgcactctgctgaccgcgcactagctgtccttgaggcaagaatacttgggagcggaaaaaaggtgggggtgttccccggggcgggggaggaggggcaaggccccagcaagcctcttggaaatctctccctgggaggggacgaggggcggccttcagttgcaaatgggaagggctcggataccggatttgaagcagtgtttgcacggcaagcgcagcttttatttagactgccggtttgtgagggttggctctcagagcgctgatggcgattatagtggaacttcaccttcacctgctcatgcgccccgcagcgcgcccgctcccacgcccgcgtagctgaggacccagactcgccaggaaaggctagtgaggctggggcccgggcgggcccggccgggccgggtcaggggaggggcctggcggcaggggcggggcctcagctaaaggcgcggagcacccggcgccgagagcgctgagtagagcggcgcccgctcgagagaagtggggccgagatcgcgccgtcccagcccgcccgccggcgtctgcgctgctccggcgcccttacccctgctggcccttgcaaggcgcgaccggcggccatgcagccccggggctgaggccgccccatggcaaagccggcggtcccggcgacgacggcgcatggagaacttccgtaaggtgcgctccgaagaggcgccagcggggtgcggggccgagggaggcggcccgggctccggccccttcgcagacctggcgccgggcgcggtgcacatgcgggtcaaggaaggcagcaagatccggaacctgatggccttcgccaccgccagcatggcgcagccagccacgcgcgccatcgtcttcagcggctgcggccgggccaccaccaaaaccgtcacgtgcgccgagatcctcaagcgccgcctggcgggcctgcaccaggtcacgcggctgcgctaccggagcgtacgcgaggtgtggcagagcctcccgcctgggcccacgcagggtcagacgcctggcgagccggccgctagtctcagcgtacttaagaacgtgcccggcctcgccatcctactttccaaggacgcgctggatccgcgacagcccggctaccagcccccgaatccccatcctggtccctcgtccccgccagccgcgccagcgtccaagaggagcctaggggaacccgcagctggagaaggctccgcgaagcgatcgcaacccgagccaggggttgcggacgaggatcagacggcctgaaactccggactgtgggccacctagtccggcaggatcttccgccagcgcctccaccttcagatgtacctccagcctttcactcctcggtcctccggagcccacaacctggacacagctcctcaagacaggtagcatggaccttaaggcgacaagagaggggccccaggagtggcaggagaggatccccgaccaccctagggaaacttcgtgcgataattgctgcttatgcccgtgttgcgtgaagacacggaacttcaccttttctgggaccttctttgggggagaatggtggacagtgggattctggaaacttgtttgggacccccaagggttaaagccacccagcattcacgaagagcacctgaagtatggaagctgagaagagttattggaatcacccccaccgttgacagaggaaggcagggggtgagaattaactgcttgagggtaggagagtctgagatgtgggggccctattccgctcccggcggatcctctagatcacccgc

SEQ ID NO: 79142 - DNA, 2354 bp, Homo sapiens
ggtggcccgaaatcgacgccgtcacatgccgcacggtgatatctgtgctgttacggagctcttatgcctgactggtgccatgataatggcgcgtactcggtgagtacattgacgatcgctcacttgaggtctgagagtccgccccagtgtacaacatgccagttcaggttcactcgcgcaagacggcgcatggagaacttccgtaaggtgcgctccgaagaggcgccagcggggtgcggggccgagggaggcggcccgggctccggccccttcgcagacctggcgccgggcgcggtgcacatgcgggtcaaggaaggcagcaagatccggaacctgatggccttcgccaccgccagcatggcgcagccagccacgcgcgccatcgtcttcagcggctgcggccgggccaccaccaaaaccgtcacgtgcgccgagatcctcaagcgccgcctggcgggcctgcaccaggtcacgcggctgcgctaccggagcgtacgcgaggtgtggcagagcctcccgcctgggcccacgcagggtcagacgcctggcgagccggccgctagtctcagcgtacttaagaacgtgcccggcctcgccatcctactttccaaggacgcgctggatccgcgacagcccggctaccagcccccgaatccccatcctggtccctcgtccccgccagccgcgccagcgtccaagaggagcctaggggaacccgcagctggagaaggctccgcgaagcgatcgcaacccgagccaggggttgcggacgaggatcagacggcctgaaactccggactgtgggccacctagtccggcaggatcttccgccagcgcctccaccttcagatgtacctccagcctttcactcctcggtcctccggagcccacaacctggacacagctcctcaagacaggtagcatggaccttaaggcgacaagagaggggccccaggagtggcaggagaggatccccgaccaccctagggaaacttcgtgcgataattgctgcttatgcccgtgttgcgtgaagacacggaacttcaccttttctgggaccttctttgggggagaatggtggacagtgggattctggaaacttgtttgggacccccaagggttaaagccacccagcattcacgaagagcacctgaagtatggaagctgagaagagttattggaatcacccccaccgttgacagaggaaggcagggggtgagaattaactgcttgagggtaggagagtctgagatgtgggggccctattccgctccccgccctgggacagttttcctttctagttttctttcccctgcttcagaggagcatctctgagggttctagctcttttaacaccccttttccccctgctggcccagagggagacccaggactgaactctccaggcctcctcccctgagccctgcagctggctggagtcttgcttccaataaaacaagcacaaaaatggctgtgtcccccattttttttctaaccacccgcctgtgcagagacagctctcgcctggccccttgtgtctcccctcccctccagccttgcgtcctgagtctttggagtcttcagggtcaggcacagagactgaacagcttcaaaatggtgcaaggcactgcccagtccctggcttcttcctctctcctcccccactccgcctcccgggctggccctggcctcagaggctgttgcaaatgggggcccgtgtacccctgtacatcgccactaagggaaagggagcggcacattgtttttctgggaggggaaggaaggagtggaaggacagcatcgatgaactctcctggaggtcactgcaaagggtggcagaccctgctgaggtccctgaatctgcagcctccagacaataaactgaaccttacccagaaggctggcacaaagcccccagctctgtgggtaggatctccccttcactgccctctctctcagaaaggacagcacacccttgggaaagggggaggagagagactgagcacaaatccactgctggaaattactattcagcagagaagctgggtcttgggctgtgaatcactgcaggcctcctgataagctgctgcctccagccctgcacagctgtctgttgagagataacagcctcataagcttctctgcccaactccaagccagctggggggtgggggtgctgctgtgtgctggaagagctctggtgagttgggggtggcatacagccccaggatctcagaagcagatctcatcccatgcaactcagcagcacccctggaaagggggagatgcggaagaatgtatttataagtcattttgctggcagaaccctgaaataaatcctgctggtgacaaga

SEQ ID NO: 79143 - DNA, 1612 bp, Homo sapiens
ttcggcacaggctgaagtgggaggcgcgcggaagatctggcagactaagtgggccacagtccgggagttttcagggcccgtcctgaatccctccaaccctttccagaatgtacctccagcctttcactcctcggtcctccggagcccacaacctggacacagctcctcaagacaggtagcatggaccttaaggcgacaagagaggggccccaggagtggcaggagaggatccccgaccaccctagggaaacttcgtgcgataattgctgcttatgcccgtgttgcgtgaagacacggaacttcaccttttctgggaccttctttgggggagaatggtggacagtgggattctggaaacttgtttgggacccccaagggttaaagccacccagcattcacgaagagcacctgaagtatggaagctgagaagagttattggaatcacccccaccgttgacagaggaaggcagggggtgagaattaactgcttgagggtaggagagtctgagatgtgggggccctattccgctccccgccctgggacagttttcctttctagttttctttcccctgcttcagaggagcatctctgagggttctagctcttttaacaccccttttccccctgctggcccagagggagacccaggactgaactctccaggcctcctcccctgagccctgcagctggctggagtcttgcttccaataaaacaagcacaaaaatggctgtgtcccccattttttttctaaccacccgcctgtgcagagacagctctcgcctggccccttgtgtctcccctcccctccagccttgcgtcctgagtctttggagtcttcagggtcaggcacagagactgaacagcttcaaaatggtgcaaggcactgcccagtccctggcttcttcctctctcctcccccactccgcctcccgggctggccctggcctcagaggctgttgcaaatgggggcccgtgtacccctgtacatcgccactaagggaaagggagcggcacattgtttttctgggaggggaaggaaggagtggaaggacagcatcgatgaactctcctggaggtcactgcaaagggtggcagaccctgctgaggtccctgaatctgcagcctccagacaataaactgaaccttacccagaaggctggcacaaagcccccagctctgtgggtaggatctccccttcactgccctctctctcagaaaggacagcacacccttgggaaagggggaggagagagactgagcacaaatccactgctggaaattactattcagcagagaagctgggtcttgggctgtgaatcactgcaggcctcctgataagctgctgcctccagccctgcacagctgtctgttgagagataacagcctcataagcttctctgcccaactccaagccagctggggggtgggggtgctgctgtgtgctggaagagctctggtgagttgggggtggcatacagccccaggatctcagaagcagatctcatcccatgcaactcagcagcacccctggaaagggggagatgcggaagaatgtatttataagtcattttgctggcagaaccctgaaataaatcctgctggtgacaaga

SEQ ID NO: 79144 - DNA, 722 bp, Homo sapiens
ttcggcacaggctgaagtgggaggcgcgcggaagatctggcagactaagtgggccacagtccgggagttttcagggcccgtcctgaatccctccaaccctttccagaatgtacctccagcctttcactcctcggtcctccggagcccacaacctggacacagctcctcaagacaggtagcatggaccttaaggcgacaagagaggggccccaggagtggcaggagaggatccccgaccaccctagggaaacttcgtgcgataattgctgcttatgcccgtgttgcgtgaagacacggaacttcaccttttctgggaccttctttgggggagaatggtggacagtgggattctggaaacttgtttgggacccccaagggttaaagccacccagcattcacgaagagcacctgaagtatggaagctgagaagagttattggaatcacccccaccgttgacagaggaaggcagggggtgagaattaactgcttgagggtaggagagtctgagatgtgggggccctattccgctccccgccctgggacagttttcctttctagttttctttcccctgcttcagaggagcatctctgagggttctagctcttttaacaccccttttccccctgctggcccagagggagacccaggactgaactctccaggcctcctcccctgagccctgcagctggctggagtcttgcttccaataaaacaagcaca

SEQ ID NO: 79145 - DNA, 1999 bp, Homo sapiens
acgcgcctcggggaacagcctggcccaaagcctcactcctcacgtcccaggggtggacgggggtccgggagcctcgagctccgggcaggcgtggcgaggctgaagtctgggtcttccgcgccccgcgaggaccacgccgcgacgtaatcgcccgcggggaggcgcggagtggagccgcagccagctcctcccgcactctgctgaccgcgcactagctgtccttgaggcaagaatacttgggagcggaaaaaaggtgggggtgttccccggggcgggggaggaggggcaaggccccagcaagcctcttggaaatctctccctgggaggggacgaggggcggccttcagttgcaaatgggaagggctcggataccggatttgaagcagtgtttgcacggcaagcgcagcttttatttagactgccggtttgtgagggttggctctcagagcgctgatggcgattatagtggaacttcaccttcacctgctcatgcgccccgcagcgcgcccgctcccacgcccgcgtagctgaggacccagactcgccaggaaaggctagtgaggctggggcccgggcgggcccggccgggccgggtcaggggaggggcctggcggcaggggcggggcctcagctaaaggcgcggagcacccggcgccgagagcgctgagtagagcggcgcccgctcgagagaagtggggccgagatcgcgccgtcccagcccgcccgccggcgtctgcgctgctccggcgcccttacccctgctggcccttgcaaggcgcgaccggcggccatgcagccccggggctgaggccgccccatggcaaagccggcggtcccggcgacgacggcgcatggagaacttccgtaaggtgcgctccgaagaggcgccagcggggtgcggggccgagggaggcggcccgggctccggccccttcgcagacctggcgccgggcgcggtgcacatgcgggtcaaggaaggcagcaagatccggaacctgatggccttcgccaccgccagcatggcgcagccagccacgcgcgccatcgtcttcagcggctgcggccgggccaccaccaaaaccgtcacgtgcgccgagatcctcaagcgccgcctggcgggcctgcaccaggtcacgcggctgcgctaccggagcgtacgcgaggtgtggcagagcctcccgcctgggcccacgcagggtcagacgcctggcgagccggccgctagtctcagcgtacttaagaacgtgcccggcctcgccatcctactttccaaggacgcgctggatccgcgacagcccggctaccagcccccgaatccccatcctggtccctcgtccccgccagccgcgccagcgtccaagaggagcctaggggaacccgcagctggagaaggctccgcgaagcgatcgcaacccgagccaggggttgcggacgaggatcagacggcctgaaactccggactgtgggccacctagtccggcaggatcttccgccagcgcctccaccttcagatgtacctccagcctttcactcctcggtcctccggagcccacaacctggacacagctcctcaagacaggtagcatggaccttaaggcgacaagagaggggccccaggagtggcaggagaggatccccgaccaccctagggaaacttcgtgcgataattgctgcttatgcccgtgttgcgtgaagacacggaacttcaccttttctgggaccttctttgggggagaatggtggacagtgggattctggaaacttgtttgggacccccaagggttaaagccacccagcattcacgaagagcacctgaagtatggaagctctttctagttttctttcccctgcttcagaggagcatctctgagggttctagctcttttaacaccccttttccccctgctggcccagagggagacccaggactgaactctccaggcctcctcccctgagccctgcagctggctggagtcttgcttccaataaaacaagcaca

SEQ ID NO: 79146 - DNA, 2621 bp, Homo sapiens
  misc_feature (2467)..(2467): n is a, c, g, or t
  misc_feature (2473)..(2474): n is a, c, g, or t
  misc_feature (2476)..(2476): n is a, c, g, or t
  misc_feature (2478)..(2478): n is a, c, g, or t
  misc_feature (2494)..(2494): n is a, c, g, or t
  misc_feature (2498)..(2498): n is a, c, g, or t
acgcgcctcggggaacagcctggcccaaagcctcactcctcacgtcccaggggtggacgggggtccgggagcctcgagctccgggcaggcgtggcgaggctgaagtctgggtcttccgcgccccgcgaggaccacgccgcgacgtaatcgcccgcggggaggcgcggagtggagccgcagccagctcctcccgcactctgctgaccgcgcactagctgtccttgaggcaagaatacttgggagcggaaaaaaggtgggggtgttccccggggcgggggaggaggggcaaggccccagcaagcctcttggaaatctctccctgggaggggacgaggggcggccttcagttgcaaatgggaagggctcggataccggatttgaagcagtgtttgcacggcaagcgcagcttttatttagactgccggtttgtgagggttggctctcagagcgctgatggcgattatagtggaacttcaccttcacctgctcatgcgccccgcagcgcgcccgctcccacgcccgcgtagctgaggacccagactcgccaggaaaggctagtgaggctggggcccgggcgggcccggccgggccgggtcaggggaggggcctggcggcaggggcggggcctcagctaaaggcgcggagcacccggcgccgagagcgctgagtagagcggcgcccgctcgagagaagtggggccgagatcgcgccgtcccagcccgcccgccggcgtctgcgctgctccggcgcccttacccctgctggcccttgcaaggcgcgaccggcggccatgcagccccggggctgaggccgccccatggcaaagccggcggtcccggcgacgacggcgcatggagaacttccgtaaggtgcgctccgaagaggcgccagcggggtgcggggccgagggaggcggcccgggctccggccccttcgcagacctggcgccgggcgcggtgcacatgcgggtcaaggaaggcagcaagatccggaacctgatggccttcgccaccgccagcatggcgcagccagccacgcgcgccatcgtcttcagcggctgcggccgggccaccaccaaaaccgtcacgtgcgccgagatcctcaagcgccgcctggcgggcctgcaccaggtcacgcggctgcgctaccggagcgtacgcgaggtgtggcagagcctcccgcctgggcccacgcagggtcagacgcctggcgagccggccgctagtctcagcgtacttaagaacgtgcccggcctcgccatcctactttccaaggacgcgctggatccgcgacagcccggctaccagcccccgaatccccatcctggtccctcgtccccgccagccgcgccagcgtccaagaggagcctaggggaacccgcagctggagaaggctccgcgaagcgatcgcaacccgagccaggggttgcggacgaggatcagacggcctgaaactccggactgtgggccacctagtccggcaggatcttccgccagcgcctccaccttcagatgtacctccagcctttcactcctcggtcctccggagcccacaacctggacacagctcctcaagacaggtagcatggaccttaaggcgacaagagaggggccccaggagtggcaggagaggatccccgaccaccctagggaaacttcgtgcgataattgctgcttatgcccgtgttgcgtgaagacacggaacttcaccttttctgggaccttctttgggggagaatggtggacagtgggattctggaaacttgtttgggacccccaagggttaaagccacccagcattcacgaagagcacctgaagtatggaagctgagaagagttattggaatcacccccaccgttgacagaggaaggcagggggtgagaattaactgcttgagggtaggagagtctgagatgtgggggccctattccgctccccgccctgggacagttttcctttctagttttctttcccctgcttcagaggagcatctctgagggttctagctcttttaacaccccttttccccctgctggcccagagggagacccaggactgaactctccaggcctcctcccctgagccctgcagctggctggagtcttgcttccaataaaacaagcacaaaaatggctgtgtcccccattttttttctaaccacccgcctgtgcagagacagctctcgcctggccccttgtgtctcccctcccctccagccttgcgtcctgagtctttggagtcttcagggtcaggcacagagactgaacagcttcaaaatggtgcaaggcactgcccagtccctggcttcttcctctctcctcccccactccgcctcccgggctggccctggcctcagaggctgttgcaaatgggggcccgtgtacccctgtacatcgccactaagggaaagggagcggcacattgtttttctgggaggggaaggaaggagtggaaggacgtcggaatnctgggnncngnaggggaccgtgggccnaatnggccaaaaaaggacttccaaggtggagcccctgtggtggtcctctgggctgaagagacctggggggggagaaccgggacacaagggggcgaccaggccggaaaaacacagggggggcccacga

SEQ ID NO: 79147 - DNA, 1925 bp, Homo sapiens
acgcgcctcggggaacagcctggcccaaagcctcactcctcacgtcccaggggtggacgggggtccgggagcctcgagctccgggcaggcgtggcgaggctgaagtctgggtcttccgcgccccgcgaggaccacgccgcgacgtaatcgcccgcggggaggcgcggagtggagccgcagccagctcctcccgcactctgctgaccgcgcactagctgtccttgaggcaagaatacttgggagcggaaaaaaggtgggggtgttccccggggcgggggaggaggggcaaggccccagcaagcctcttggaaatctctccctgggaggggacgaggggcggccttcagttgcaaatgggaagggctcggataccggatttgaagcagtgtttgcacggcaagcgcagcttttatttagactgccggtttgtgagggttggctctcagagcgctgatggcgattatagtggaacttcaccttcacctgctcatgcgccccgcagcgcgcccgctcccacgcccgcgtagctgaggacccagactcgccaggaaaggctagtgaggctggggcccgggcgggcccggccgggccgggtcaggggaggggcctggcggcaggggcggggcctcagctaaaggcgcggagcacccggcgccgagagcgctgagtagagcggcgcccgctcgagagaagtggggccgagatcgcgccgtcccagcccgcccgccggcgtctgcgctgctccggcgcccttacccctgctggcccttgcaaggcgcgaccggcggccatgcagccccggggctgaggccgccccatggcaaagccggcggtcccggcgacgacggcgcatggagaacttccgtaaggtgcgctccgaagaggcgccagcggggtgcggggccgagggaggcggcccgggctccggccccttcgcagacctggcgccgggcgcggtgcacatgcgggtcaaggaaggcagcaagatccggaacctgatggccttcgccaccgccagcatggcgcagccagccacgcgcgccatcgtcttcagcggctgcggccgggccaccaccaaaaccgtcacgtgcgccgagatcctcaagcgccgcctggcgggcctgcaccaggtcacgcggctgcgctaccggagcgtacgcgaggtgtggcagagcctcccgcctgggcccacgcagggtcagacgcctggcgagccggccgctagtctcagcgtacttaagaacgtgcccggcctcgccatcctactttccaaggacgcgctggatccgcgacagcccggctaccagcccccgaatccccatcctggtccctcgtccccgccagccgcgccagcgtccaagaggagcctaggggaacccgcagctggagaaggctccgcgaagcgatcgcaacccgagccaggggttgcggacgaggatcagacggcctgaaactccggactgtgggccacctagtccggcaggatcttccgccagcgcctccaccttcagatgtacctccagcctttcactcctcggtcctccggagcccacaacctggacacagctcctcaagacaggtagcatggaccttaaggcgacaagagaggggccccaggagtggcaggagaggatccccgaccaccctagggaaacttcgtgcgataattgctgcttatgcccgtgttgcgtgaagacacggaacttcaccttttctgggaccttctttgggggagaatggtggacagtgggattctggaaacttgtttgggacccccaagggttaaagccacccagcattcacgaagagcacctgaagtatggaagctgagaagagttattggaatcacccccaccgttgacagaggaaggcagggggtgagaattaaccctctgccgattcaccacccgcctctacctagccta

SEQ ID NO: 79148 - DNA, 2949 bp, Homo sapiens
acgcgcctcggggaacagcctggcccaaagcctcactcctcacgtcccaggggtggacgggggtccgggagcctcgagctccgggcaggcgtggcgaggctgaagtctgggtcttccgcgccccgcgaggaccacgccgcgacgtaatcgcccgcggggaggcgcggagtggagccgcagccagctcctcccgcactctgctgaccgcgcactagctgtccttgaggcaagaatacttgggagcggaaaaaaggtgggggtgttccccggggcgggggaggaggggcaaggccccagcaagcctcttggaaatctctccctgggaggggacgaggggcggccttcagttgcaaatgggaagggctcggataccggatttgaagcagtgtttgcacggcaagcgcagcttttatttagactgccggtttgtgagggttggctctcagagcgctgatggcgattatagtggaacttcaccttcacctgctcatgcgccccgcagcgcgcccgctcccacgcccgcgtagctgaggacccagactcgccaggaaaggctagtgaggctggggcccgggcgggcccggccgggccgggtcaggggaggggcctggcggcaggggcggggcctcagctaaaggcgcggagcacccggcgccgagagcgctgagtagagcggcgcccgctcgagagaagtggggccgagatcgcgccgtcccagcccgcccgccggcgtctgcgctgctccggcgcccttacccctgctggcccttgcaaggcgcgaccggcggccatgcagccccggggctgaggccgccccatggcaaagccggcggtcccggcgacgacggcgcatggagaacttccgtaaggtgcgctccgaagaggcgccagcggggtgcggggccgagggaggcggcccgggctccggccccttcgcagacctggcgccgggcgcggtgcacatgcgggtcaaggaaggcagcaagatccggaacctgatggccttcgccaccgccagcatggcgcagccagccacgcgcgccatcgtcttcagcggctgcggccgggccaccaccaaaaccgtcacgtgcgccgagatcctcaagcgccgcctggcgggcctgcaccaggtcacgcggctgcgctaccggagcgtacgcgaggtgtggcagagcctcccgcctgggcccacgcagggtcagacgcctggcgagccggccgctagtctcagcgtacttaagaacgtgcccggcctcgccatcctactttccaaggacgcgctggatccgcgacagcccggctaccagcccccgaatccccatcctggtccctcgtccccgccagccgcgccagcgtccaagaggagcctaggggaacccgcagctggagaaggctccgcgaagcgatcgcaacccgagccaggggttgcggacgaggatcagacggcctgaaactccggactgtgggccacctagtccggcaggatcttccgccagcgcctccaccttcagatgtacctccagcctttcactcctcggtcctccggagcccacaacctggacacagctcctcaagacaggtagcatggaccttaaggcgacaagagaggggccccaggagtggcaggagaggatccccgaccaccctagggaaacttcgtgcgataattgctgcttatgcccgtgttgcgtgaagacacggaacttcaccttttctgggaccttctttgggggagaatggtggacagtgggattctggaaagagaagagttattggaatcacccccaccgttgacagaggaaggcagggggtgagaattaactgcttgagggtaggagagtctgagatgtgggggccctattccgctccccgccctgggacagttttcctttctagttttctttcccctgcttcagaggagcatctctgagggttctagctcttttaacaccccttttccccctgctggcccagagggagacccaggactgaactctccaggcctcctcccctgagccctgcagctggctggagtcttgcttccaataaaacaagcacaaaaatggctgtgtcccccattttttttctaaccacccgcctgtgcagagacagctctcgcctggccccttgtgtctcccctcccctccagccttgcgtcctgagtctttggagtcttcagggtcaggcacagagactgaacagcttcaaaatggtgcaaggcactgcccagtccctggcttcttcctctctcctcccccactccgcctcccgggctggccctggcctcagaggctgttgcaaatgggggcccgtgtacccctgtacatcgccactaagggaaagggagcggcacattgtttttctgggaggggaaggaaggagtggaaggacagcatcgatgaactctcctggaggtcactgcaaagggtggcagaccctgctgaggtccctgaatctgcagcctccagacaataaactgaaccttacccagaaggctggcacaaagcccccagctctgtgggtaggatctccccttcactgccctctctctcagaaaggacagcacacccttgggaaagggggaggagagagactgagcacaaatccactgctggaaattactattcagcagagaagctgggtcttgggctgtgaatcactgcaggcctcctgataagctgctgcctccagccctgcacagctgtctgttgagagataacagcctcataagcttctctgcccaactccaagccagctggggggtgggggtgctgctgtgtgctggaagagctctggtgagttgggggtggcatacagccccaggatctcagaagcagatctcatcccatgcaactcagcagcacccctggaaagggggagatgcggaagaatgtatttataagtcattttgctggcagaaccctgaaataaatcctgctggtgacaaga

SEQ ID NO: 79149 - DNA, 1140 bp, Homo sapiens
  misc_feature (954)..(954): n is a, c, g, or t
  misc_feature (957)..(957): n is a, c, g, or t
  misc_feature (959)..(959): n is a, c, g, or t
  misc_feature (961)..(961): n is a, c, g, or t
  misc_feature (965)..(965): n is a, c, g, or t
agcgggtctgcggctgcgttccccgaaagacgaggctgcgcccggattccggtccgcagggagaccgaagggcacagctccccgcgccgcgcacgccgcccgagcccggagtgcggacacccccgggatgcttgcgccccagaggacccgcgccccaagcccccgcgccgcccccaggcccacccggagcatgctgcctgcagccatgaagggcctcggcctggcgctgctggccgtcctgctgtgctcggcgcccgctcatggcctgtggtgccaggactgcaccctgaccaccaactccagccattgcaccccaaagcagtgccagccgtccgacacggtgtgtgccagtgtccgaatcaccgatcccagcagcagcaggaaggatcactcggtgaacaagatgtgtgcctcctcctgtgacttcgttaagcgacactttttctcagactatctgatggggtttattaactctgggatcttaaaggtcgacgtggactgctgcgagaaggatttgtgcaatggggcggcaggggcagggcacagcccctgggccctggccggggggctcctgctcagcctggggcctgccctcctctgggctgggccctgatgtctcctccttcccacggggcttctgagcttgctcccctgagcctgtggctgccctctccccagcctggcgtggctggggctgggggcagccttggcccagctccgtggctgtggcctgtggctctcactcctcccccgacgtgaagcctccctgtctctccgccagctctgagtcccaggcagctggacatctccaggaaaccaggccatctgggcaggaggcctggggatgagggtggggggggacccccaggtcccggaggggaagtgaagcaacagcccagctggaagggcgtcttctgcggagaaataaagtcacttttgagtcctgaaaaaaanaanananacanaacaaacaaaaataaaaaagaaaacacggggggagacaacgaagaaaagatacccccggaggagcgccaccagatgagggaccgacaacagtgttgctaccaggggcgccctatagacgaggagcaatacagaggaagaggaggacacggcagacaagagggacagcagaaaccg

SEQ ID NO: 79150 - DNA, 630 bp, Homo sapiens
cagccgcatttcagtatccgccgtctccagaggttcagtatggatctcaggcggtgcgtcctgtgccaaatagcaaggcactatatcaacaacccacggcgatggcgtttgatcttacggtaccacctagtggacaagatagtgcactgcatgagaccattgctacagccagaaaacagggagatcttgaggcatggcaatatccggtaatgttacaaccgatgccggccgggaaaggcagtcaagcaggagttaaacaatatggacctaactctccttatatgagaacattattaaattccattgctcatggaaatagacttatttcttatgattgggaaattctggctaaatcttccctttcaccctctcagtatctccagtttaaaacctggtggattgatggggtacaagaacaggtacgaaaaaatcaggctactaatcctgttgcttatatagatgaagaccaattgctaggaagaggtccaaactgggacactattaaccaacaatcagtaatgaaaatgaggctattgaacaactataagggctatttgcctcagggcctgggaaaacattcaggacccaggaacctcatgcccttcttttagttcaatcagacaggatcta

SEQ ID NO: 79151 - DNA, 692 bp, Homo sapiens
atgttaaccaaatataattcatgttttagagtgtcacttgtaaatctgatgtagtaggattcttttgccattttacatgtgccaaatcatataaactaagaaatagtttgatttttggttctaggacaatgtcataaatttggtattagctaaagtgctagtcttggggaaaaaatgaggtagtagtaaaatcaggaagctaatcttcaataggcacttaatccataaagagctgacttcccttgggtgtttaatcctggtcgactgtttctggtattgattattttccctgggttgtaaagtttgtaatgaaaagttttattctttggagatttgaaaaattgcttttcatgagtcctttatcttccaggctctaaattatcttggtattcagcccacaaaggaacaacaccaagccctgagacagcaagtacaagcagactcaaaagggacagtgtcttttggagattttgtccaggttgccagaaacttgttttgcttgcagttggatgaagtaaatgttggtgcacatgaaatttccaatatattagattcacagcttcttccttgtgattcttcagaagcagatgaaatggaaaggctcaagtgtgaaagagatgatgccttgaaagaagtaaatacacttaaggtaacctctaatttagtttccttatgttttcttcagaaaaaaa

SEQ ID NO: 79152 - DNA, 432 bp, Homo sapiens
aatgacattgcatgttcctcattttctttcacagataaaaactggatacaacaaaacagtacagattccaattacttcagaaaacagtactgtgggtttgtctaatacaggctctaaattatcttggtattcagcccacaaaggaacaacaccaagccctgagacagcaagtacaagcagactcaaaagggacagtgtcttttggagattttgtccaggttgccagaaacttgttttgcttgcagttggatgaagtaaatgttggtgcacatgaaatttccaatatattagattcacagcttcttccttgtgattcttcagaagcagatgaaatggaaaggctcaagtgtgaaagagatgatgccttgaaagaagtaaatacacttaaggtaacctctaatttagtttccttatgttttcttcagaaaaaaa

SEQ ID NO: 79153 - DNA, 843 bp, Homo sapiens
atgttaaccaaatataattcatgttttagagtgtcacttgtaaatctgatgtagtaggattcttttgccattttacatgtgccaaatcatataaactaagaaatagtttgatttttggttctaggacaatgtcataaatttggtattagctaaagtgctagtcttggggaaaaaatgaggtagtagtaaaatcaggaagctaatcttcaataggcacttaatccataaagagctgacttcccttgggtgtttaatcctggtcgactgtttctggtattgattattttccctgggttgtaaagtttgtaatgaaaagttttattctttggagatttgaaaaattgcttttcatgagtcctttatcttccaggctctaaattatcttggtattcagcccacaaaggaacaacaccaagccctgagacagcaagtacaagcagactcaaaagggacagtgtcttttggagattttgtccaggttgccagaaacttgttttgcttgcagttggatgaagtaaatgttggtgcacatgaaatttccaatatattagattcacagcttcttccttgtgattcttcagaagcagatgaaatggaaaggctcaagtgtgaaagagatgatgccttgaaagaagtaaatacacttaagtggccagggcagaattagatgaagagccaataaagcaagtcgtggcaattttggatcctgtgagttctttgggatatgtgtgtttttttccgctctaaaataatattaattccaaattacgttagcaaaacatgatgtcccttaagaatagccctgcacatgaaaaaaatgtatttcccaaagaacgtcgacgc

SEQ ID NO: 79154 - DNA, 196 bp, Homo sapiens
agtgaggtttcccagcgcgcgtgtgtgtgtgtgtttgtgtgttttagattgtaattcttacatgcatttgtttggttttttgccttcacttttcctcccaacctggagctttatctctgcattaagtctgtgtagcaccaggtgtctcccagccccactatgtgtatgctagactgggcctgccggaccagcctca

SEQ ID NO: 79155 - DNA, 134 bp, Homo sapiens
agctagtaaacacatcgccacagatggtcacacaataagaccccaacccaaaaacataacctaacatgtaaagatgacagaggtttttgccaaaagttattttacgcttcagtaaggggaacagaaaactgttc

SEQ ID NO: 79156 - DNA, 620 bp, Homo sapiens
  misc_feature (289)..(289): n is a, c, g, or t
  misc_feature (293)..(293): n is a, c, g, or t
  misc_feature (298)..(299): n is a, c, g, or t
  misc_feature (314)..(315): n is a, c, g, or t
agcggttatagatgctaaatcaggtagtggctttttattccagcaaatatttctatctaaacaattggcaattctagcttatttcataagagttaactaattctgtagattattttctttttttttttcccaatggtgatagtctttatgataaatattgagtgtcctcatcttctcatccttatctggcttgtattatatgttcagaaaattacaaatttacccgttttcatttttggtggcattttctagtctaatttttttttttttttttttttttggagagagngggntcttnngtgttcccccccccnnggggtgtggggggctgttgactcttgggccccacgttgggccctccgcctcctgggttcaagcaattctcctgcctcagccttctgggtaactgggattacaggcgtccaccaccatgcctgcctaatttttgtattcttagtagagatggggtttcaccatgttgggcaggctggtctcgaactcctgagctcaagtgatctgcccatcttggcctcccaaagtgctgggattacagacatgagccactgtagtttaatttttttaatctaaatctcataaaacttcttcctctatttcaatta

SEQ ID NO: 79157 - DNA, 222 bp, Homo sapiens
gaaggttggagaggattaaattgatcacacttattaagggaaattctgttttttagattattgacttgctctaggtaaattacaagaggtgatcttgttcggattaagaatattcacagtgaatttgctgcctatcctattttaacgatcaatgaaaaagcttccagaggatggactccttggcagcctgtttatgtaagggttgttttttttgtttgtttg

SEQ ID NO: 79158 - DNA, 400 bp, Homo sapiens
ggtgaggaaggagaaatcaaattcaatgactttccctgggccaggcacaagggctaggcatttggtacatcattttacttaatttaatccctaaagcactcgtttaagacaagtattctttttgttggtttgtttttgagacagagtttcactcttgttacccaggctggagtgcaacggtgcgatctcggctcactgcaacctctgcctcctgggtgagttgctgggattacaggtgcctgccaccatacccagctaatttttgttctttttaggagagacgaggttttgccacgttggccaggctggtctcaaacccctgacctcaggtgatctgcccgcctcggcctcccaaagtgctgagattacaggtgtgagccaccacgcccagcctaagaca

SEQ ID NO: 79159 - DNA, 454 bp, Homo sapiens
gattacaggcgcccgccaccatacccgactaatttcttgtatttttagtagagacagggttttgccatgttgttcagactggtctcgagctcctgacctcaggtgatccacctgtctcggcctcctgaagtgctgagattacagctgtgagccatcatgcctagccaggtataggttttttatatatggcctttttattatcttgagatagtttgcttctattcatagttttttgagtatttttagcatgaaaggatattgagttttatcagatgttttttctgactcaattgaaatgattatctgttggtggacacttaggttgattccatatctttgctaatgttaacagtgtggctatgaacttgggggtgcaaatatccctttgatgtatttattttgtttcttttggataaatacctaacagtgggattgctggatcatatggtagttc

SEQ ID NO: 79160 - DNA, 336 bp, Homo sapiens
tgacatctgcatcttacattattaaatgcaaaggaatatcaaagactcctctgctagaaccatttttattcataaagtcacattatcattgtagaagtcttgtaaaaatgctacctgaaatgaattatgtccgtcttcccatctggcttacaaaattcttgaggaagcatctgcctcgtagctctttatctttctatttcctactacagggacaatgtatatggaaagataaatgtgtgtaggtgtataaattctcaataaatatttgctgaattagattgtacagttgttatcttttaagtttaactcatcctgagatacattttattattggtc

SEQ ID NO: 79161 - DNA, 442 bp, Homo sapiens
aaaaaaaaatcaaaggaaattgtttcattcaaattgttgagctttttgccatctttagaaccagtcagctagaggagagtgtttgtgacgattaccaagaatggttaaaaccaaaaggtgttggtttgcttgctctctcttctggtgagacagccatttgaaatagcattcaggcagcgtggcctggacgctgaagcagagcttggcagatggtaccgcaggatggagaaactgctggcagatggcatggactatttgagcaacaaagagacttttggctaccaatgctaagagttggaaagaaagaagacgacaacttctccagtgctgccagcttgtatacagaaaacgttttggcagaatggagactggtaaaagatattcaattgttaactgcaaggaaagagaagagttgttgttattaagtttcctaagtgtgctc

SEQ ID NO: 79162 - DNA, 280 bp, Homo sapiens
ttttttttttgcatttttagtagagacggggtttcactgtgttagccaggatggtctcaatctcctgacctcgtgatccacctgcctcagcctcccaaagtgctgggattacaggcatgagccactgcgcccggccaactttttgcatgttttctttaaaatttctctacttttaattgtacttctaatacagacacttctgaaatcagttttcacattgctgcagccttaccaatttgtagaaactgtttatgtgatgttttgattcttcatttatata

SEQ ID NO: 79163 - DNA, 666 bp, Homo sapiens
ccgtgttagccaggatggtctcgatctcttagtgagccgcccgccttggcctcccaaagtgctgggattacaggcgtgagccgctgcacccggccctagctaggacattgtcatgtcacagactgggcaaagagctggctttaccctgagtagaggctatttactaattgtcacttacggctggctagagttgacctgttttagatgccttagtgaagactatacagttgactgaacttatgcaattaaagttcgataggttctgaacatctttttacagatataaggaggctctgattttgtacttcacagtaactctggggaaaaccacgggattattagttccagaatttcttacagtggaaatacatagtgacttgaagtgatttgaattccccagagattgactaccgtgaaatctgatggcccaagaaaagatgaatgaaagattgtttttaggaacattagagagcaggactaaaacggctgcagactgatgttgagtcagacagacttggagaaagctgtgtgggactgttagttggagccttgggtttcctatacctacatgtaaatctgaacccaaaattctggtggccgagacacactttgagaaaaaagagcttgcctgagacacatgtcacactgagaccctaatcagggcag

SEQ ID NO: 79164 - DNA, 366 bp, Homo sapiens
ggagtttattgaagaatgttgcgagctcctacagctgtgatgaggtgggtgagccaagcccacttccaggaacggtgtcccaaatcaccccacaggacagtgggcctgatgggaaaccggcagcattgcagccaccgaacggggaaggcacccatcatatggggatgctcccacagcacagagaggtgcccatcatatggagatgctcccactgcacagatactcccattgcacagatactcccacagcacagagaggtgcccatcatatggggatgctcccactgcacagatactcccattgcacagatactcccaccgcacagagaggcacccatgatatggggatgctcccactgcacagatg

SEQ ID NO: 79165 - DNA, 353 bp, Homo sapiens
taatcatgattcaagtgactaggctgtagcacccaagaaccttgccttaaaacagtttattttacccaataatactactttgccttcttacttaaaaatgtcctgtgcttaacccttttgctctttattttgatttaagcacttgaccctaaagtcctgcttctgtcttacagaagattgttgtcatttaaaaaataaaacaatcagtactagaactagcataaatagtaatatctaacatgatcatttgtattatatagcatatttaagtaaaatgtgtttcattccattcagtatttcataaaaagacagcctctgaaaaatagttttactccttagatttctcatccact

SEQ ID NO: 79166 - DNA, 409 bp, Homo sapiens
ctctgtcgaaatgtcatctgcttaacaatgccaggctaccaactcatatgaatttaaacagtgatttaaattcattaaacagtgatattttcttgggaaaatatttcccaagaaaatgtctctcacctggtcaaatcattttagtttacacatttgtaaagaggaaaagccactgggttcaaatcactttctctaaccctatttccacctgactatcttaaagcaaacaccttcatcttttcacatcctacatctcttcattttcccaggaccctggagggtcaaggtttagaagtttttggagattcccaacaaaagcccctttcattgttgctagtataattttaaaggaaggatgactaactgaggccatttatcacagtttctatactgctagtgaggcggcatt

SEQ ID NO: 79167 - DNA, 374 bp, Homo sapiens
tcagtgatagcaccaagacttttggcccaaggaactggaaagatggaaatgtcaatgacagaatgtggaggatttcgcaagcagcagagtgtaggagaagcaatgcccttggctcatctagggcaaagggttgaattggcaactggaaatagaagtcaaattcagaagagaggtttatgtggacatctgtgtttaggtgtcaccaatatacagctgatactttttaaaaatctagtgaaattatcaaagggttaaatgcagagagggaagaaagtaggtccaaagatcaagccttgggacattggaagtttagaaataagaaagatgtcattgtcacttgtaattttgtgctagtcactgctctttttctttgt

SEQ ID NO: 79168 - DNA, 187 bp, Homo sapiens
ggctggggtaaggccaggaaaattcaacaggcactaaaaatattgtcaagctgctgacagcacagccagaggccccaggcctgggtggcatccagacagccctgtcctttctagacagccccctcctccaggctcagggacctgtctggctgtgagctcccaggaggtcccaggggtgtgacctccc

SEQ ID NO: 79169 - DNA, 887 bp, Homo sapiens
agcgcgtgtccgagcggcttaaaggggccgtgctgctgccttcgggtaccgctgccccgggagacccccggcggcccggccctgcggggaccgggcgggatggggaccggggcagtggaccctcggagttgggatggggcggggggaacgcgggcgtggagccctccggggacagggtaaggttgggtaaccgtgggcgggggctcctccaggggcgggggtggggtaacggcgggcggggccactcaagcgacagggcaggggcgggaaggccgcgggcgggggcggtccctccggggacggggcgggtgggggcaccgcgggcgagatcgcttcctgcagaggaggcaacaggccccgctagcaggtcagggtcccgggcaggcgcaggtgccccccggcctctcaagcagggactgcggcgagctcagacgcggctgacgggcagagagagactcgcgcttgggctcagtgcgtgtgaagtgggcctcgggctgcggaggagggcagcaccccgtggctcctcgcgctgctgcgagcagggccgcctggcaggggcgggggccggtgggcgggagtgtcggggtaaggccgcggactcctcccatgccgctgagcagtggacagcggggactggagacctccaggtgaggaaggggaacgaagtcaagaaggccacatgtcctggcttccaggcttggtgtcctcagaagcctccagaacgtccatggaacccgccctgcgcccaccgcctcctgctgtctttccagctgagttccggctgccctcaccctcggcttcttcactctgcctctccccagccaggccctgctcccggtcctcaaccaccacttcacctgcctgggcttcatcgctccgagctcccc

SEQ ID NO: 79170 - DNA, 279 bp, Homo sapiens
cacagatttaagttactttgcagactcactgtagtgaagatttaaacactgtgtaccagattcaaaaattagtgtgtaccatcagataaagtgcctgacatgatagaggctcaccagatattaggcaatgtatatgcagaaaaacataacccaaccagccatatgtttatagccacagttaaccactaaattgtttccattgttacaaacatatatcgggctatctccttttcctatggctaaataattaagtttgattttcttagatctccctttctt

SEQ ID NO: 79171 - DNA, 761 bp, Homo sapiens
acctgcctgggaatatgtggtaggaacagcagagtggagagagagcgcttgaataaggtgtcttgttgggagacattccccacaccatggtgccatgggaatcacataagcaggtcaagtgtgcctcactcaagcactcaggaaccaagcttgcagagggggtcagggcaggaaatgcacacgactcccagccaaccccacactctggacctggggcacctgctaagcactttctctgtaagatctcacttcaacctcccgtgaacagccctataacgtgggtgctatcaccttcttcattcttctacagaaactgacaaacgcagttaaaccaggctaatttggactgacgggctgggtggggacgtcatcagagagaagctgcaggagggaaattgtagactagaacaaagtctgaagagggtggagaaaagcacagattaaaaaaaaaaaaagaagaaagaaagaaatgtggccaggcatagtggctcacgcctgtaatcccagcactttgggaggctgaggcaggttgatcacccaaggtcaggagtttgagaccagcctggccaacatggcgaaaccctgtctctactaaaaacgccaaaattagctgagtgtggtggtgcacacctgtaatcccagctactcgggaggctgaggcaggagaatcgctcaaacccaggagtcaagagtttgcagtgagctgagattgcgccactgcactccagcctgggcggcagggtgagactctgtccccgcca

SEQ ID NO: 79172 - DNA, 806 bp, Homo sapiens
ataaagagatcatctggaactgcaatttctaactcatacatcattgctacaaaccttatttgtttactgtttctcttccagggaccatcagtcatcctttaaaattcatttcaagctctgaaaagatattttttgttacatgggcaatttacttttagtacagtaaaatgttatgtgaatttctacagtatgtttgccaaaatgaattatatctagaatacgcttaacaatatattctggaggcagctttcatttgaaattaggttcaccttctgagagtatgaaaaagttaatgggtttttgtgcctgaagattttgatgttgcatttggctacatttaatccactttcacccataagttttagcatctaaaaaaattaaatcactgctaatgcaattaaaatgcattatgaaatgcacttctgtccaggctggagtgcagtggcacaatctcggctcactgcaagctccgcctccctggttcacaccattctcctgcctcagcctccctagtagctgggactacatgtgcccgccaccacgcccggctaattttttttttagtagagacatagagtttcaccagattggccaggctggtctcgaactcctgtctcacgtgtctgtgtgaagagaccacccaacatgctttgtgtgagcaacatggctgtttatttcacctgggtgcaggcgggctgagtccgaaaaaggagtcaacaaagggtggtgtgattatcactggttcttatagatttgggtatagcgtggacttaagagcagtttttcggggcgaagtgactagacta

SEQ ID NO: 79173 - DNA, 523 bp, Homo sapiens
ataaagagatcatctggaactgcaatttctaactcatacatcattgctacaaaccttatttgtttactgtttctcttccagggaccatcagtcatcctttaaaattcatttcaagctctgaaaagatattttttgttacatgggcaatttacttttagtacagtaaaatgttatgtgaatttctacagtatgtttgccaaaatgaattatatctagaatacgcttaacaatatattctggaggcagctttcatttgaaattaggttcaccttctgagagtatgaaaaagttaatgggtttttgtgcctgaagattttgatgttgcatttggctacatttaatccactttcacccataagttttagcatctaaaaaaattaaatcactgctaatgcaattaaaatgcattatgaaatgcacttctgtccaggctggagtgcctcttcatttttatttctttattcagcaagtattgatcaaatgtgctttgtaccaagtactgagctcttcgttgagatataat

SEQ ID NO: 79174 - DNA, 318 bp, Homo sapiens
ctccacccgacggggtggcttagaattttatttttggttacatctcaactatcacagcagccgggcgcggtggcttcacagctgtaatcccagcacatccagctaatttttttttttaatgaggcggagtctcgctctgttgaccaggctggagtgcaatggcatgatcctggctcactgcaacctctgcttcctgggttcaagtgattcgcctgccttgctgggatgacagacgtgcaccacaatgtccggctaattttgtatttttagtagagacatggcttcaccatactggccaggctggtcttgaacttctga

SEQ ID NO: 79175 - DNA, 440 bp, Homo sapiens
cagttatctactatcagttaatgtagagctgcttcattctttcttagcagtcgcatgggtccatgatatggttgtgttataatctaattacttagatccccatatttggacatttaggcagtttccaatctttgagcatacattttgatcccaattgaaatttcctttctgccccctctagctaattaacatccccaagcctcagttttcccatctgtgcagtgggaataattatatgtacctttcagagttgctgtgagtattagaagtgatgcagaaatgaagcactgcccagcatgaggctcacagtaggttaatattgatatgcgttccctgaatttctgattgcggtgctgagctcatcttgcgcacctgatgaaggctcgtgaatgactttgtttccagtttaaaatacagtagaatcacgttaattttttctc

SEQ ID NO: 79176 - DNA, 772 bp, Homo sapiens
ggggtcggagtgggcagcgtgtccacagccagtgagtgctggggtgaggcggagacctggcccttggctactggtggagtatgccggccgccacagcaaggaggaccagtgcagacacaggcacagacacgcacactaatgtgtatacgcacacacacatacatgcagacacactgatgtgtacacacacaggcatagtcacactaatacacaagtgcatacactatcatgtacaaacaggcatgcagtcacaatgtgcaaatgcgtgcagacacactaacatgtaagacatgcatagtatgtgcacacagacatgcacactaacgtacgtggacgtgcacacaggcaggtacacgtccaccggcaggtgcgctgacaggtacatgcgagcacgcacacaaacagacatccgttaagtgtgctcccggggacgtcacagtaagccacgcacatctcacgcccgcactgcccagaagaggtcagggccgacctccagatcttcggagggcttctcccagcccaaccccgagaaactgctgggccaagagagtcaatgccatcccagacgcacgccacacatgaatacaaagcccacgcgttgtccattctggcccaccttctcctgaccctacaggcctgtggggacctgcccccgccccgaccaaggggaggcaagccccggcgctgggaggaggcacaggtgccactgagggtccccgagtgtgtgtgcctgtgcatgtgtgtgtcaaaccctactcctgggtctacgtcg

SEQ ID NO: 79177 - DNA, 821 bp, Homo sapiens
  misc_feature (10)..(10): n is a, c, g, or t
  misc_feature (27)..(27): n is a, c, g, or t
  misc_feature (33)..(33): n is a, c, g, or t
  misc_feature (674)..(674): n is a, c, g, or t
  misc_feature (821)..(821): n is a, c, g, or t
cctatgctgnaacgactctcttaatcntccacngctacacaaacttgttaatttaatacaatttacaacacacctgctggcactttgatcttggacctccctgttgtctgaactaggtaacctgacctctccactgaagggcgtgtggctttctgatgacagtaggtttactgccacctccagagaagctcactgccgaggtcctaggaatcatttgcattgtcctgatggccactgtgttaaaaacaatagttcttattcctttcctggagcagaacaattcttccccgaatacaagaacgcagaaagcacgtcattgtggccattgtcctgaggagtggattacatattccaacagttgttattacattggtaaggaaagaagaacttgggaagagagtttgctggcctgtacttcgaagaactccagtctgctttctatagataatgaagaagaaatgaaatttctggccagcattttaccttcctcatggattggtgtgtttcgtaacagcagtcatcatccatgggtgacaataaatggtttggctttcaaacataagataaaagactcagataatgctgaacttaactgtgcagtgctacaagtaaatcgacttaaatcagcccagtgtggatcttcaatgatatatcattgtaagcataagctttgnaaggcaaagcatttgcggttgaccgagattaaaatccttctatatttatccaaacagaattttattgtgggccaaagctgaaaaagattagcgaatttgctctcacacaaaatttctaatcatttttgtattcgcggcccccactan

SEQ ID NO: 79178 - DNA, 907 bp, Homo sapiens
  misc_feature (748)..(748): n is a, c, g, or t
  misc_feature (762)..(762): n is a, c, g, or t
  misc_feature (764)..(765): n is a, c, g, or t
  misc_feature (772)..(772): n is a, c, g, or t
tgcagagatgaataaacaaagaggaaccttctcagaagtgagtctggcccaggacccaaagcggcagcaaaggaaacctaaaggcaataaaagctccatttcaggaaccgaacaggaaatattccaagtagaattaaatcttcaaaatccttccctgaatcatcaagggattgataaaatatatgactgccaaggtttactgccacctccagagaagctcactgccgaggtcctaggaatcatttgcattgtcctgatggccactgtgttaaaaacaatagttcttattcctttcctggagcagaacaattcttccccgaatacaagaacgcagaaagcacgtcattgtggccattgtcctgaggagtggattacatattccaacagttgttattacattggtaaggaaagaagaacttgggaagagagtttgctggcctgtacttcgaagaactccagtctgctttctatagataatgaagaagaaatgaaatttctggccagcattttaccttcctcatggattggtgtgtttcgtaacagcagtcatcatccatgggtgacaataaatggtttggctttcaaacataagataaaagactcagataatgctgaacttaactgtgcagtgctacaagtaaatcgacttaaatcagcccagtgtggatcttcaatgatatatcattgtaagcataagctttagaagtaaagcatttgcgtttgcagtgcatcagatacatttcatatntcttaaatagaatntnntgatgcnttaatctgaaatgaattatgtattggtcggtcacaaatgctaactcatttgaataggtggccattctagacagactcctaattggtcgggccttggcacggttgggggcaactcaaagggggtgtgagcctgaag

SEQ ID NO: 79179 - DNA, 563 bp, Homo sapiens
gtaatacggtcccagaaaaactacaggatggactaaccctgcttattcctgtgaatcaagaggtgatcttctgcagcttggaaaaaaaaaagcgatggaatctccctctgttgcccaggctggagtacagtggtgcgatcttggcctacttcaacctctgcctcccgggttcagcgattctcgtgcctcagtctcctgggtagctgggattacaggcgctcaccatcatgccttgctaagttttgtatttttagtagagacggggtttcaccatgttggccaggatggtcgtgatctcctgacctcgtgatccgcctgcctcagcctcccaaagtgctgggattacaggcgtgagccaccacgcccggccctttaatcatttttatgaactgaaaaccagtgtcacttgtcaaaaataaatattgaacccaaatataaatataatgaaaacaaaacgatgttgttaaagcttaactacagacatttcccaactaaagtatgaacctggatcccgggtctttctttccaaagacattaaagacagactagtgccaaaaaaaaaa

SEQ ID NO: 79180 - DNA, 236 bp, Homo sapiens
gtaatacggtcccagaaaaactacaggatggactaaccctgcttattcctgtgaatcaagaggtgatcttctgcagcttggaaaaaaaaaagcgatggatggagtttcactcttatcacccaggctggagtgcaatagcgcaatcttggctcactgcaacctctgcctcctgggttcaagcgattctcctggctggcccagagtggtggcagtggaggcagggagaagtgttcaca

SEQ ID NO: 79181 - DNA, 147 bp, Homo sapiens
tttttcttgggtagatatgcaatagtggaattgtcagtttttggtaagtttatgtataactcaaagaaactatcaagctgtttttaaaagtgcttgtcacactttacattcccaaaaacaatgggagtgtccagttcctacacattg

SEQ ID NO: 79182 - DNA, 460 bp, Homo sapiens
aataatttcagtttaatacttaggtcctggaataataaaggacaggtgtggacttatttccaacaaaagtatatttacccttgttttcttagaataaaaggacattcttacataaactgcaaaatattcagaaaatgatgaaatttgagtctgcatgtgcatgtcacagacgtaaatgtaaggattattttgcaaaaattggattgtcaaatacattgggttgattttaattttgaattgaatatactacaatgccaaggtttagggggatgtaagggggtaacaggtaaaataagccattttaagcttaacacattttcaaagaccctaacaccaggtaatggtaaggatgcattgaagtgtgtacattgtgcacagttctgaaagctagctaggaaatgggaattaacccatactgttcaacttttattggtaaagaaatagtaactgggtgaagggt

SEQ ID NO: 79183 - DNA, 250 bp, Homo sapiens
aactctagccaattagtgtcctcagccagcaatgtacagagaatcatattttgtttgttggtgaaaccattcctttctaaatcatgtctgcttttgggggttgatttgcttattactttattgttaactgttatctctttgtttgctctcattatgcctgcccatagtagtctcctctttataatttgatgttttcagtgtgctgtgggaacagaaccccatacagtacttgctgaatggtggataaaaa

SEQ ID NO: 79184 - DNA, 335 bp, Homo sapiens
gtggcattcactcatttgcacaaggcagctgacaggttgtggatttctatagacttggggtctaaaagtagaagtcctgagaaacacactagagtttgaattggaatccccaaaggctacacactagaaaaaaagaattagagatggaattttcctcaggacgaaagcccagactgtaaagatgttaacccttgtctaaattaagaatatttgccttcttcctaactacctgccagaagcaaaagtgaatccactctggaggaagacaaagcatctagagcttcaaattatctgcacacctagtattggaaatatgaagtattgagccaaaaatt

SEQ ID NO: 79185 - DNA, 999 bp, Homo sapiens
gcctctccctgcatccttgtgaattttgggcctttttgtctaatgcaaaaagctatgagcacagataagagactcatttcaatagccagtaaaagcaaacagcacaaagaaggtggcagatgcacagaaccctattcaaatccaaattaaaatggctgtgaattaacaagttggctttatccgcccttctccaaatagggcttataatgagccattaacaggctgaatagtatgagatccattggtgttcctgtctgcatagggtggatcacagcagatacccagaacgtcataggatcaaaatctttccataatcaaagtggaaatgtgaagaattgttcagtcaatcttattcatcctacctttgtaactgtcttcatatatttctcctctttttcattcacatagctactaccctgagctgtagtagcttcctaatttgattgcatgcctttggtctttccttccttccaatccaccctgtcctttattgctattcatctttaaaatgctactttggtcacataaccacccagatcaagaactttaatgattttccaatgcctttaggataatgctccacaactctacagctgtgctaccctacctccccagttttattttcaattattattttatgcaggctttatgctccagctgaatggatgtattctctgagcctctgagagatacatcatattcttttttgtctatgtgccttttttcatacatttctctgcctggaatacccttcccttccctctagtttgtgctttttaagaggagcccctcctttccactctagagcctcctcctctatgatccttcccacataccaggatatgatccagctcatccctgcactacggcccttgtccgtataacccttcacctggcacagaccatctctcctccagtaatctatgcaatgttattgcctatataagccgacaggatacttaaagacaagaaccacactattcattttgagttccctag

SEQ ID NO: 79186 - DNA, 863 bp, Homo sapiens
tcttctggcggaggagaactgtcattctgaggggctggggtagggaaagctcttcaagtgcgaatttccccattttaggcctctctcctggcccccggacatttttttacctttttcttcttccgtaaacttcctgccagtgactagcttccggtatgaaatcaagctctgcgtgagagctgtaaaaccagaaaaatgtggaaatggacaggagggctgttgtccaaaaatgcaaaggaaatctgacgtcccaccctgaagaaaaatatcacaaggcccaaaagcaaggcgtctctgatgagtcacctatgacacccaattgaaatagcatcgccttggccgggtgctctggtttccacagattaacttggtctggttacagcggctgcttaggatcttcaactcccactggtgccttgcttttctagcacacccagagaacacctgttcctcacgtgaacattacaaggggatccaagatgctttactttttgctcttgggaaatggaggggatacaatactaagtattccggaatttcctttgaaaaaataccggaatgccctgagcccggagccagggatgattactgaagccctggctctttagtcactatatgtgagaactgacataagacctttcaacccctgagcgcttagatccttcatctgtaacgtgaagtaatagtaatccgtactccatggatttcataggctgcaaccttttggaaagaaaatcaaaattttactgttgacgaatttttatttactcatcttgtgtttctaacatctaacggggtgcctggcacattatagatgtttcatattttaaaaataaatgtaaggtgcaaatgagctaacattg

SEQ ID NO: 79187 - DNA, 820 bp, Homo sapiens
tcttctggcggaggagaactgtcattctgaggggctggggtagggaaagctcttcaagtgcgaatttccccattttaggcctctctcctggcccccggacatttttttacctttttcttcttccgtaaacttcctgccagtgactagcttccggtatgaaatcaagctctgcgtgagagctgtaaaaccagaaaaatgtggaaatggacaggagggctgttgtccaaaaatgcaaaggaaatctgacgtcccaccctgaagaaaaatatcacaaggcccaaaagcaaggcgtctctgatgagtcacctatgacacccaattgaaatagcatcgccttggccgggtgctctggtttccacagattaacttggtctggttacagcggctgcttaggatcttcaactcccactggtgccttgcttttctagcacacccagagaacacctgttcctcacgtgaacattacaaggggatccaagatgctttactttttgctcttttgaaaaaataccggaatgccctgagcccggagccagggatgattactgaagccctggctctttagtcactatatgtgagaactgacataagacctttcaacccctgagcgcttagatccttcatctgtaacgtgaagtaatagtaatccgtactccatggatttcataggctgcaaccttttggaaagaaaatcaaaattttactgttgacgaatttttatttactcatcttgtgtttctaacatctaacggggtgcctggcacattatagatgtttcatattttaaaaataaatgtaaggtgcaaatgagctaacattg

SEQ ID NO: 79188 - DNA, 593 bp, Homo sapiens
tttttaaaattttttgtggagacaggctcttgctttgtggcccagtctggtcttgaactcctggtttcaagtaaacctcctgccttggcctcccaaagtgctgggattacagccataagccaccatgcccagccacttcccacttctctagacactcatttatcttcccatcaaactgtggctgaatttctcaaataattgtcttgtgacctttgaacagtctccctaaatgtaaatattgcattgaccaacaatgggaatgatggcagcacattctcaccaggcaatttcagagagctgctgtataatttttcttgaagcactggctgggaatacataattgggtggaaatatactttgcttctgaaatgtgtggataaagtcatttttatttttgatgactggttttgttttaattgtgaagaaatccttaggttgatctgtatcctggcaatcatttaaaaattttcatgttggcggggcgtggtggctcaccacctgtaatcccagcactctgggaagcttaggcaggaggatcacttggcccaggaattcaagaccaacctggacaacatggtgatatccctttctta

SEQ ID NO: 79189 - DNA, 422 bp, Homo sapiens
gtttaaatggagtccacagttttagcatggcctgcgaggccctcaggaaacttacaatccatgtcagaagaggaagcaaacacatccctttttcacatggtggcaggaaaacgtgcagaatgaaggtggggtaagagccccttataaaacccatcatatctcacgagaactcactcactatcatgagaacatcatggaggtaactgcccccacgattcagttgcctcccacccaggtccccgcaacgacatgtagggataataactacatttcaagatgagatttgggtggggatacagccaaaccatattacatacaattttaagaactgagatcataaattatttcagagaaaccagaatacatagcatgctgtctaaattgataggtgggaaaacttaggtcagaggattctaaatatc

SEQ ID NO: 79190 - DNA, 310 bp, Homo sapiens
cttccaccagggtcctcaggagcctgagagtgtggtgaaaagggcagcctggtcactgtattgatttctattgagggctggaaaaaaactccaaaagtgcaaaggggagggagtttccctacatatgcttaaagccataacttggcaattccagagacctttgcaaagagaaatccctctttccaggcgcatcactggagaggaaggccctgcggggtgaaggcccaggaagctgggtaaccaccagcttcctgggcatcactggagaggaaggccctgcggggtgaaggcccagaaagctggtggttac

SEQ ID NO: 79191 - DNA, 385 bp, Homo sapiens
gttcccccttccccatcacagtcccagcacctcccttcttccatcttaacttttataagtaataatttcgttgagtttctttattgttttgtcacccagatgtgcatccctacatgctatagtcttactgtccttttaaaaaaacttgatacatcttttaagtctcttttaatctaaagggtcccctccatccctttccttttcttacaaattgttgaagattttaagccatttgatctgtagattttcacagcctgggtttttgctcatttcatgcccgtggtgcagttcaatatactcctttatcctcagcatttcctgcagatcagcagctagatctagacaatttgcctcaggttgatccctttgataagactctaggtag

SEQ ID NO: 79192 - DNA, 828 bp, Homo sapiens
atgttctgacaatcagctccaaaaagagaaaaaatatctttggaacaacttttatttgtgtgagtttatttaataactttaaattatacacttactataaagtcagtcatttcagttgggtatggtggctcacacaatcctatcgtggccccaatccctgttggactgaacaaagggagacgaacgtgggaataaaaataaagacaaaagagtatatttggaagaaggggtcagggggctccttgctccagtgaacaagggtcctgagcttttagcacccttcgtatttattgagtaaaggagatagggaggaggtggttgtcagtcagctgcttgactcggtgcaggcttgcacaactgcattctctgaacagtagtctccagatgttccagtagataacctcaaggagcacggcgccagagagtgactgccctcagcaaaccttctggcggcaggtgcagatgtgagtttgcctacatcctgcattcatgataaacagtttgctgtttgatcatatagcctcagtggaatgctaagttggtcacgatcctctggctttcggctctctacataatcccagcattttgggaggctgaggcaggtggatcacttgaggccaggagttctagaccaacctggctaatgtggcgaaaccctgtctctaccaaaaatacaaaaattaactgggcgtggtggcacacacctgtatcccagctactcaggagactgaggcaggagaatcgcttgaacccaggaggtagaggctacagggacctgagactgggccactgtactctagctttgatgacagagcgagaccttgtatc

SEQ ID NO: 79193 - DNA, 477 bp, Homo sapiens
gtcatgaactggggggagccactactctgtttttaccctcattaaggaactttattgtgaaaggtaaaatcactttgtaaatgtgaattagaatagaaaatggaaattccttatatactctctaagccactggaaacttgaggcagagaagttttaaaagacgcacatggatttcctctgaaatatttgtaaacaccaaattcagaacatgttggttagtttaggaccataccaggctttagttgttacattgaattgtaaataacttatattcatgagcctggaattaaagaaattcttggtatgagaatttgacaactacttctggcttccaggagccagaacccaccttcgaatgggattttgaaataagccccgttgaagagacacacagatggcagaggccgcagcacaggctgtgagaccttcttcaggtttcggtagactgtcttcattacggcgtaaaaacatgtcaga

SEQ ID NO: 79194 - DNA, 197 bp, Homo sapiens
aacatggtgaaaccctgtctctactagaaatacaaaaagtagctgggtgtggtggtgtgcgcctgtagtcctggctaactcaggaggctgaggtgggaggatcacttgagcccattcgtgcgccactgcactcctggggcacagagtgagactctgttagaaagagagagagagaaagaagagagagggagggagga

SEQ ID NO: 79195 - DNA, 349 bp, Homo sapiens
ggataatgcctggaaacatacagactcctaaggttgaaccaggaagaaacagaaatcctgaacagaccaatagtgagtggtgagcttgaatcagtaataaaaagaatctcaacaacagaaaagcccagggccagacagattcatgccaagttctactggacatgcaaagaggaatcggtaccaatcctactgaaactgttccaaaaaatcaaggaggaggaaatcctccctaactcagcctgcaaagccagtatcaccctgataccaaagctaggcacacagccaaaacaacaactacaggccaatgtccctgatgaacataggtgcaaaaatcctgagtgaaatacta

SEQ ID NO: 79196 - DNA, 388 bp, Homo sapiens
agaatttccacattctacagatgaggaaaccagggaagagataggcaatatcagagacaaaatttgaaatcatagctaaaagagactgtctcagtcattaaagccacaatatgtcagatcagaattgcctctctaggggtctagagagcagcaacaaccagaagatggcctggtcttgggacttggattcaagagaagtgttcccccaaggcaatgacaagcaagagttaaaaagtgaatgtgggctcaagtgttttgggaaaaataagcattttacaatctataaatcatgtctaaatgacaagtaaaaagagaagaacaggctaaaaataggaaaataaacatgcagagaatatgtattaactgaataacttttgtggggaggtta

SEQ ID NO: 79197 - DNA, 743 bp, Homo sapiens
agcgtggtactgctgggtcatatagttaagtgtatatttaaattgaaaacaaactatggctgggcggggtggctcacgcctgtaatcccagcactttgggcggccgaagcaggcggatcacaaggtcagaagatcaagaccattctggccaacatggtgaaaccccagctctactaaaagtacaaaaattagctgagtgtggtggcgcacacctgtagtcctagctactagggaggctgaggcaggagaatagcttgaacctgggaggtggaggttgcagtgagccgagattgcgccattgcacactccagcctggtgacagagggagactccatctcaaaaaaaaaaacagaaactatgaaaatattttccaaagtggcaaaatcaattttgcattccatttgcttcttatcctcaccaaagtttggtatcgaaaatgtattttccaaagtcttctcaatatataagtgggttgtttgtttccttattagcaaattgttagagtgctttatgtattctggatgcaaattcctttcagatatgtgattagcaaatattttatcttagctgtggcctgccttttcattctctaaacagtgactattgaaggggtgggttgcccctccacacctgtgggtgtttctcataaggtggaacgagagacttaggaaagaaaaagacacagagacaaagtatagagaaagaaataagggggcccggggaaccagcgttcagcatatgga

SEQ ID NO: 79198 - DNA, 349 bp, Homo sapiens
caacctctgcctcccaagctcaagtgatcctcccacctcagcctcccaagcaactggaattacaggcccacgtcactatgcccagctaattttttgtattttttgtaaagacagtgttttgccgtgtggctcaggatggtctcgaactcctgggctcagacaattcagccacctcagcctcccaaagtgctgagataacaggtgtgagccaccgcgttaagccatggacaagttatcagacctttctatgctttagtttctatacaggtaaaatgtggccagtgacagagtttttgtaaggattaaatgagttaatatgctaacaacacttagaactatgcctgacagc

SEQ ID NO: 79199 - DNA, 317 bp, Homo sapiens
tccagagaattggaggtaggtgtctttggaggatcattcttttacctaccacaggtgctaattaaacatttttaaaactcagctggttgtttcctttccccatctctgtctctgagtatttatggaccaggttttcaaaacacataactcacttccctgttataaagtaataaatgttagaaaatttctctcagttctttaaaacagttgggaaatgattaaattgtctttgcagtgattgtggcttattactctgaaaactggacttgaactccaggtatgttgggtatcatcctagggaaccactaacactctag

SEQ ID NO: 79200 - DNA, 1614 bp, Homo sapiens
gatcccttaacacttaatggatggtctctcagggtagaggttggaattttatgagtttgtgaggaggatgggcattactgatgatctcagggacagcactactcatgctggacccccgggtgactgctaaatgatgataccacttgaggtaaaaagagggagaacgttttaagcaaatttttaatacaaaggattgagtcaggtgtgctatttctagactagactgttacgtggaaaaagtcctaatttctaaacctctctttttgttaaagtggttatggccatgggaaaaagtttggtttggatttgcttggtttctgggttgcaattacagctttttgatccaagcgtcttatggacacagactagaaacttcccatgcaactgggatttgaatttcggcaacatggttgcagctgttttgaattaattattgtgagtcttttattttttaaaggttattaggtggtagtcatagctggtaggaaatcaacttggggcctcttcagtcactattttgacactatgtggcattttcatcaaagtggagacaagggttggtggtccttgaatggctgctgctcttgaaacaaatggctttttaacatggcctcagggcggctgcatttttggaactgctttactttttaagggttaaataaagccgctttgtacaactgtcccttggctgtgatcatttttcagtttgccccacaggagtacatactctaaaagtaaattgtactgatccctcatatttccgttcttcatttctttgcactgatgattctcctgttttgtacaaagtgtcagtttcgttctgaaacatttcaggagaggacaaagagggtgaggctctagatgtaaactttggacacttggctttcttgccttcaaccaatgtgcagagccattaataaatatgtccttcagatctttaaattttttgtaaaataattttaccttgtttttcattaaaaatttttcttcctatagcctcataattttaatgtcctttaaacaaaagagttggaataggcatgacttgttgaggccgttaagcgggttatttttacccttgtactgctaaaccaaaccgatccagaggacaacaaaagcccattttttgcctttggagagtctggttagagatagttttctccagggtaacactttacatttgttttctgtgtgccatcttcaagttcagcagccattttggtggttgtcttgatggattgtaacatctggtcatggtggtcatgaattggcaatccaaaccttgaggaaaatctgcagaaacttttgaaatgctttggttttttcccttttgtgtagattagaatcatatgagtctgtttaactgtttagatacaaaatctgagccctaaatttgaatttatttgtgtcctttaaatggggaggtttagaaagcggcaagaatgaagcctggcctaattcactgaagagaatccagatgctgctctggttttgtgatcttattatattcaaacattctgcctctacagatgtggagcctagtgctgtgtgcaggaccagctatagaatttgtggggcccaacacaaaacgaaaacaaggggcctcttgttaaa

SEQ ID NO: 79201 - DNA, 215 bp, Homo sapiens
aaagcccacagtgagctcacaactcaagtggggctgcagtgatttggaccttctcagcctttctcatgacatggcagggctgctctccgctggcaaatatggtctcggtctccctcaacatcctcttcccccagacgcttagagtggagggccctgcccaagggatttgcatccctttgcatgtcatttacaagcctgctgcccttgctgcctct

SEQ ID NO: 79202 - DNA, 574 bp, Homo sapiens
cttcctctgccctgaagctgtatcacagaaatttctagtcctagtgtgactctggccccatgctgatgggtttctgcagactggaagaggcggggctcgtgtcacgcagcatcagggagaggaattgcttatataactgggacagcagatttagcagagagaggaggcagaggctgggaatgggagcagtaagctgtcggcaggggcagcacacccagcagggggaacacacccgggtggctgtccctcacaaggtaggctgtggggctctggcagcctactgaggggaggagagggagacatgggcttgagtcctgggaagttcctggttaggagcatggaagtgattacccaatgtgggggtggggcagggaggctgtactatgaaagcatcacagcccaatactgaggtgcaggctgtactcttaatgcgtcatggtgaaaatgtccaacaattattttcctagaggatttgaattgtgcccaggaaatctggggcttagcacaaagcaagggtaatgggaattttgcctcatgctcaaaaatgtacctctaggggttgagacttaagggg

SEQ ID NO: 79203 - DNA, 789 bp, Homo sapiens
aggccaaggtgggcagatcagttgaggtcaagagttcgagaccagcgtggccaacatggtgaaaccttgtgtctactaaaaaaatacaaaaattagctgggtgtggtgttgcacacctgtagtcccagctaactttgggaggctgaggtgggcggatcaccagaggtcaggagttcgagaccagcctggccaacatggtgaaaccccgtttctccccaaaaaatacaaaaattagctggtcatgagggcacacactgtggtcccagctactcgggaggctgagggggaagaattgcttgaacccgggagatggaggttgcaatgagtgaagatcgtgccactgcatccagcctgagcaacagagtgagatcttgtctcaggaaaaaaataaatttaattgctgtggatactgtaaagggtgtttatcgtaacagttcataatattctatttaagaatgcgtgggagaaattttctctggacccagttatgcttttcctgaattgctgtttggtttttaccttaaggacactaaatattcagctgattgtatttttctgtttgtactgatactagaccatttagagcccaatttgtggtctaccttcagcaagtgtttatgtattttgtatgctagtcatgttcttggttctgtcttccttttctacttttattttccttattctcatttttctaagttttaatcgttttatattactataatatctgcatcttgtaagcctttttgtaataaggttgggatataaataaataaggcaatgtatccttta

SEQ ID NO: 79204 - DNA, 753 bp, Homo sapiens
gtttatctgctgaccttccttccactattgtcctatgaccctgccaaatccccctctgcgagaaacacccaagaatgatcaataaaaaataaaataaaattaaattaaaaaaaaaaaaaagagaggaacccacaaaaaaaaaaaaaagaaagtatataaaataaaatattgaagtcctttcccattaaaaaaaaaaaaaaagaaaaagcacggactctttcatccagttctgatgtgattatctctggaaggcattttctcctcctcttccctccacctccattcagagtcactgacttataccttttacatattcacatgaaattcacttaatatatacacctatatactcacaaaaattaaaaattaaaattaaaaaaattcctggcccggcgcagtggctcacgcctgtaaatcctagcactttgggaggccgaggtgggcggatcacgaggtcaggagatcaagaccagcctggccaacatagtgaaaccctgtctctactaaaaatacaaaaattagccaggtgtggtgcacgtgcctgtagtcccagggaggtggaggtgggagaatcgcttgaacacgggaggcggaggttgcagtgagccgagaccacgccattgcactccagcagccagggtgacagtgagagtccgtctcaaaaaaatagcttgggcctgggaggcagaggttgaagcgagccgagattgtgccactgcactccagcctgggtgacagagtgagactgtctca

SEQ ID NO: 79205 - DNA, 761 bp, Homo sapiens
ggcgtctcactcggcgcgaggagctcttatgccagaaccccctccatcgtctacgttatctgcatcacttccaggtccaccctttctttcggggtgtggccttcgacccagagctcctacagaagcagccagtgaactttgtcacggagacacaagctacccagcccagttcagcggagaccatgccctttgacgactttgactgtgatctggagtccttcttgctctaccctatccctgcttgagcctctctactgtaaattggggcccggctgggagcctgaagatctccatccctgcctactcagtatgaccaccttgataatccagtttgtttttattttgtagcctcttaccgttctgctctcctaggctttagaccagagttccaacctggacattctgctactggcagccacagctggccctattccttccctatcatacaacctacctctcaattcaacactgtcagatcagggtggtgaccttttccttttctttacttctccagtgctctttaccctcaggctgtcagccagagctgcttctgcttgtttctctgccatgtttcctttcttgagcaataataatacttcatgggctcccagggtgctattgatgtgtttaataggcttgtcagaagcaatatgaattttttttttttttttgagacagagtctcactctgttgcccaggctggagtgcagtggtgcgttctcagctcactgcaacctccgtctcctgggttgaagtgattt

SEQ ID NO: 79206 - DNA, 709 bp, Homo sapiens
aaaaaaaaaaaaagatttaaggttagagacatatctcaataaccttttcctttagtaaggaaaatcatctggaccttaaatttgtatacagttttggcctttatgacttcttttcatttttcttaaactaatttctcacaattttcatttttgtcctgagacttgaagggaaagtaagttttaatctagaccatattatttagttacatctaatctctctagacaaaagacagtctggagagtactctttagttctatttattaattttgtctctagattgagccagatttccccatgcatagcaggctggtgtggaactcctgacctcagatgatccacccgccttggcctcccaaagtgctgagattacaggcgtgagccaccacgcccaggctctcatcttctttaataagtcattttaacctctctggatcttagtttcctggtgtataaaatgagggtaaaataaccactggttcttaattgtggggtatgggttcagatttctgtgatgctgaaatttatttatttatataaataaataaggcaatttattcatatcctttcttttctttccccttcccctttccttttctttaagagatggcatttcgccatgtagcccaggctggtctgaactcctgggctctagtgatccacctgctttggcctctcagagtactaggattataggtgtgagccactgtt

SEQ ID NO: 79207 - DNA, 778 bp, Homo sapiens
aaaaaaaaaaaaagatttaaggttagagacatatctcaataaccttttcctttagtaaggaaaatcatctggaccttaaatttgtatacagttttggcctttatgacttcttttcatttttcttaaactaatttctcacaattttcatttttgtcctgagacttgaagggaaagtaagttttaatctagaccatattatttagttacatctaatctctctagacaaaagacagtctggagagtactctttagttctatttattaattttgtctctagattgagccagatttccccatgcatagctggcattttattggcctctgcagaattgctttttctggattggactttggtaatccatatgaaaatctctatgaaatttaattgctcgccaggtgtggtggctcacacttgtaatcccagcaagtgctgagattacaggcgtgagccaccacgcccaggctctcatcttctttaataagtcattttaacctctctggatcttagtttcctggtgtataaaatgagggtaaaataaccactggttcttaattgtggggtatgggttcagatttctgtgatgctgaaatttatttatttatataaataaataaggcaatttattcatatcctttcttttctttccccttcccctttccttttctttaagagatggcatttcgccatgtagcccaggctggtctgaactcctgggctctagtgatccacctgctttggcctctcagagtactaggattataggtgtgagccactgtt

SEQ ID NO: 79208 - DNA, 2420 bp, Homo sapiens
cttcctctgccctgaagctgtatcacagaaatttctagtcctagtgtgactctggccccatgctgatgggtttctgcagactggaagaggcggggctcgtgtcacgcagcatcagggagaggaattgcttatataactgggacagcagatttagcagagagaggaggcagaggctgggaatgggagcagtaagctgtcggcaggggcagcacacccagcagggggaacacacccgggtggctgtccctcacaagcagggtggcaacatccggggtccctgggcccgaggctggaagagcctctggacaggtttgggaaccatcaggtcagatctggaagaactctgggaactacgggggcaccactatctgcaccaggaatccctaaagccagccccagtactggtagagaagcctctgccagagtggccagtgcctcagttcatcaacctctttctaccagagtttcccattaggcccattagggggcagcagcagctgaagattttaggcctcgtggctaaaggctcctttggaactgtcctcaaggtgctagattgcacccagaaagctgtatttgcagtgaaggtggtgcccaaggtaaaggtcctacagagggataccgtgaggcagtgcaaagaggaggttagcatccaggttatctccatgacttgggcatcatgcatcgagatgtgaagatggagaatattcttctagatgaacgaggccatctgaaactgacagactttggtctgtcccgccacgtgccccagggagctcaagcctacactatctgtggcactcttcagtacatgggtgagagaggttaaagctgatgggtaagcattgggcaggaggatagctaaaggatgtctgtgatgagtatctttgaaatctgtagccccagaggtcctaagtggaggaccttacaaccatgctgctgattggtggtccctgggtgtcttgcttttctctctggcgactggaaaggtgagagaatagtagtagttttgggcagagaagagctttgccttgtggtgggaagaaggaagaccttaggaaatcttgccgtattcctactaaggaatgaacccctacccctacctccactccctacctcttaactcagtttccagtggctgcagagagagatcatgtggccatgttggcaagtgtgacccacagtgactctgagatcccagcttctcttaaccagggcctctcactcctgctccatgaggtaaggatgagcactgctttccttcttggctacgaaaccattaatgctctcctgccttcattaaagtgatttttccccattcctctcatcagtttttttgagggggctccaacttaactacctaactacttgccatctaagctgtactgagtcacattcctaagttcctggtcccccaaatctcctccccatctagaacagagaggtcccttctgagagagtggaacactgtacactcatctgaaaactcacaagcacagctccttattcccacctttgccccaaattagcctctatttctccctcttttacaaatcatctactcttcagggttcttattcctaccctccacagctccatgaacttctttcttcttttccatcctttctgttcaggcctgtcctgtcctagtcactcatccttcatgctctattttccttcagctcttatgccagaaccccctccatcgtctacgttatctgcatcacttccaggtccaccctttctttcggggtgtggccttcgacccagagctcctacagaagcagccagtgaactttgtcacggagacacaagctacccagcccagttcagcggagaccatgccctttgacgactttgactgtgatctggagtccttcttgctctaccctatccctgcttgagcctctctactgtaaattggggcccggctgggagcctgaagatctccatccctgcctactcagtatgaccaccttgataatccagtttgtttttattttgtagcctcttaccgttctgctctcctaggctttagaccagagttccaacctggacattctgctactggcagccacagctggccctattccttccctatcatacaacctacctctcaattcaacactgtcagatcagggtggtgaccttttccttttctttacttctccagtgctctttaccctcaggctgtcagccagagctgcttctgcttgtttctctgccatgtttcctttcttgagcaataataatacttcatgggctcccagggtgctattgatgtgtttaataggcttgtcagaagcaatatgaattttttttttttttttgagacagagtctcactctgttgcccaggctggagtgcagtggtgcgttctcagctcactgcaacctccgtctcctgggttgaagtgattt

SEQ ID NO: 79209 - DNA, 2595 bp, Homo sapiens
cttcctctgccctgaagctgtatcacagaaatttctagtcctagtgtgactctggccccatgctgatgggtttctgcagactggaagaggcggggctcgtgtcacgcagcatcagggagaggaattgcttatataactgggacagcagatttagcagagagaggaggcagaggctgggaatgggagcagtaagctgtcggcaggggcagcacacccagcagggggaacacacccgggtggctgtccctcacaagcagggtggcaacatccggggtccctgggcccgaggctggaagagcctctggacaggtttgggaaccatcaggtcagatctggaagaactctgggaactacgggggcaccactatctgcaccaggaatccctaaagccagccccagtactggtagagaagcctctgccagagtggccagtgcctcagttcatcaacctctttctaccagagtttcccattaggcccattagggggcagcagcagctgaagattttaggcctcgtggctaaaggctcctttggaactgtcctcaaggtgctagattgcacccagaaagctgtatttgcagtgaaggtggtgcccaaggtaaaggtcctacagagggataccgtgaggcagtgcaaagaggaggttagcatccagcgacagatcaaccatccctttgtacacagcttgggggacagctggcagggaaaacggcaccttttcattatgtgtagctactgcagcacagatctgtactccctttggtcggctgttggctgctttcctgaggcttccatccgtctctttgctgccgagttggtgctggtactgtgttatctccatgacttgggcatcatgcatcgagatgtgaagatggagaatattcttctagatgaacgaggccatctgaaactgacagactttggtctgtcccgccacgtgccccagggagctcaagcctacactatctgtggcactcttcagtacatgggtgagagaggttaaagctgatgggtaagcattgggcaggaggatagctaaaggatgtctgtgatgagtatctttgaaatctgtagccccagaggtcctaagtggaggaccttacaaccatgctgctgattggtggtccctgggtgtcttgcttttctctctggcgactggaaaggtgagagaatagtagtagttttgggcagagaagagctttgccttgtggtgggaagaaggaagaccttaggaaatcttgccgtattcctactaaggaatgaacccctacccctacctccactccctacctcttaactcagtttccagtggctgcagagagagatcatgtggccatgttggcaagtgtgacccacagtgactctgagatcccagcttctcttaaccagggcctctcactcctgctccatgaggtaaggatgagcactgctttccttcttggctacgaaaccattaatgctctcctgccttcattaaagtgatttttccccattcctctcatcagtttttttgagggggctccaacttaactacctaactacttgccatctaagctgtactgagtcacattcctaagttcctggtcccccaaatctcctccccatctagaacagagaggtcccttctgagagagtggaacactgtacactcatctgaaaactcacaagcacagctccttattcccacctttgccccaaattagcctctatttctccctcttttacaaatcatctactcttcagggttcttattcctaccctccacagctccatgaacttctttcttcttttccatcctttctgttcaggcctgtcctgtcctagtcactcatccttcatgctctattttccttcagctcttatgccagaaccccctccatcgtctacgttatctgcatcacttccaggtccaccctttctttcggggtgtggccttcgacccagagctcctacagaagcagccagtgaactttgtcacggagacacaagctacccagcccagttcagcggagaccatgccctttgacgactttgactgtgatctggagtccttcttgctctaccctatccctgcttgagcctctctactgtaaattggggcccggctgggagcctgaagatctccatccctgcctactcagtatgaccaccttgataatccagtttgtttttattttgtagcctcttaccgttctgctctcctaggctttagaccagagttccaacctggacattctgctactggcagccacagctggccctattccttccctatcatacaacctacctctcaattcaacactgtcagatcagggtggtgaccttttccttttctttacttctccagtgctctttaccctcaggctgtcagccagagctgcttctgcttgtttctctgccatgtttcctttcttgagcaataataatacttcatgggctcccagggtgctattgatgtgtttaataggcttgtcagaagcaatatgaattttttttttttttttgagacagagtctcactctgttgcccaggctggagtgcagtggtgcgttctcagctcactgcaacctccgtctcctgggttgaagtgattt

SEQ ID NO: 79210 - DNA, 1645 bp, Homo sapiens
  misc_feature (58)..(58): n is a, c, g, or t
  misc_feature (81)..(81): n is a, c, g, or t
taagagagggttaaaagcttgatgggtaagcattgggcaggaggatagtaaagatgtntgtatttggggggaaaaaaaaanggggggttaaattccccttttttttgggaaaaaaattcctgtagccccagaggtcctaagtggaggaccttacaaccatgctgctgattggtggtccctgggtgtcttgcttttctctctggcgactggaaaggtgagagaatagtagtagttttgggcagagaagagctttgccttgtggtgggaagaaggaagaccttaggaaatcttgccgtattcctactaaggaatgaacccctacccctacctccactccctacctcttaactcagtttccagtggctgcagagagagatcatgtggccatgttggcaagtgtgacccacagtgactctgagatcccagcttctcttaaccagggcctctcactcctgctccatgaggtaaggatgagcactgctttccttcttggctacgaaaccattaatgctctcctgccttcattaaagtgatttttccccattcctctcatcagtttttttgagggggctccaacttaactacctaactacttgccatctaagctgtactgagtcacattcctaagttcctggtcccccaaatctcctccccatctagaacagagaggtcccttctgagagagtggaacactgtacactcatctgaaaactcacaagcacagctccttattcccacctttgccccaaattagcctctatttctccctcttttacaaatcatctactcttcagggttcttattcctaccctccacagctccatgaacttctttcttcttttccatcctttctgttcaggcctgtcctgtcctagtcactcatccttcatgctctattttccttcagctcttatgccagaaccccctccatcgtctacgttatctgcatcacttccaggtccaccctttctttcggggtgtggccttcgacccagagctcctacagaagcagccagtgaactttgtcacggagacacaagctacccagcccagttcagcggagaccatgccctttgacgactttgactgtgatctggagtccttcttgctctaccctatccctgcttgagcctctctactgtaaattggggcccggctgggagcctgaagatctccatccctgcctactcagtatgaccaccttgataatccagtttgtttttattttgtagcctcttaccgttctgctctcctaggctttagaccagagttccaacctggacattctgctactggcagccacagctggccctattccttccctatcatacaacctacctctcaattcaacactgtcagatcagggtggtgaccttttccttttctttacttctccagtgctctttaccctcaggctgtcagccagagctgcttctgcttgtttctctgccatgtttcctttcttgagcaataataatacttcatgggctcccagggtgctattgatgtgtttaataggcttgtcagaagcaatatgaattttttttttttttttgagacagagtctcactctgttgcccaggctggagtgcagtggtgcgttctcagctcactgcaacctccgtctcctgggttgaagtgattt

SEQ ID NO: 79211 - DNA, 1467 bp, Homo sapiens
cttcctctgccctgaagctgtatcacagaaatttctagtcctagtgtgactctggccccatgctgatgggtttctgcagactggaagaggcggggctcgtgtcacgcagcatcagggagaggaattgcttatataactgggacagcagatttagcagagagaggaggcagaggctgggaatgggagcagtaagctgtcggcaggggcagcacacccagcagggggaacacacccgggtggctgtccctcacaagcagggtggcaacatccggggtccctgggcccgaggctggaagagcctctggacaggtttgggaaccatcaggtcagatctggaagaactctgggaactacgggggcaccactatctgcaccaggaatccctaaagccagccccagtactggtagagaagcctctgccagagtggccagtgcctcagttcatcaacctctttctaccagagtttcccattaggcccattagggggcagcagcagctgaagattttaggcctcgtggctaaaggctcctttggaactgtcctcaaggtgctagattgcacccagaaagctgtatttgcagtgaaggtggtgcccaaggtaaaggtcctacagagggataccgtgaggcagtgcaaagaggaggttagcatccagcgacagatcaaccatccctttgtacacagcttgggggacagctggcagggaaaacggcaccttttcattatgtgtagctactgcagcacagatctgtactccctttggtcggctgttggctgctttcctgaggcttccatccgtctctttgctgccgagttggtgctggtactgtgttatctccatgacttgggcatcatgcatcgagatgtgaagatggagaatattcttctagatgaacgagatacaaaaattagctggtcatgagggcacacactgtggtcccagctactcgggaggctgagggggaagaattgcttgaacccgggagatggaggttgcaatgagtgaagatcgtgccactgcatccagcctgagcaacagagtgagatcttgtctcaggaaaaaaataaatttaattgctgtggatactgtaaagggtgtttatcgtaacagttcataatattctatttaagaatgcgtgggagaaattttctctggacccagttatgcttttcctgaattgctgtttggtttttaccttaaggacactaaatattcagctgattgtatttttctgtttgtactgatactagaccatttagagcccaatttgtggtctaccttcagcaagtgtttatgtattttgtatgctagtcatgttcttggttctgtcttccttttctacttttattttccttattctcatttttctaagttttaatcgttttatattactataatatctgcatcttgtaagcctttttgtaataaggttgggatataaataaataaggcaatgtatccttta

SEQ ID NO: 79212 - DNA, 1083 bp, Homo sapiens
aaaaaaaaaaaaagatttaaggttagagacatatctcaataaccttttcctttagtaaggaaaatcatctggaccttaaatttgtatacagttttggcctttatgacttcttttcatttttcttaaactaatttctcacaattttcatttttgtcctgagacttgaagggaaagtaagttttaatctagaccatattatttagttacatctaatctctctagacaaaagacagtctggagagtactctttagttctatttattaattttgtctctagattgagccagatttccccatgcatagctggcattttattggcctctgcagaattgctttttctggattggactttggtaatccatatgaaaatctctatgaaatttaattgctcgccaggtgtggtggctcacacttgtaatcccagcactttgggaggctgaggtgggcggatcaccagaggtcaggagttcgagaccagcctggccaacatggtgaaaccccgtttctccccaaaaaatacaaaaattagctggtcatgagggcacacactgtggtcccagctactcgggaggctgagggggaagaattgcttgaacccgggagatggaggttgcaatgagtgaagatcgtgccactgcatccagcctgagcaacagagtgagatcttgtctcaggaaaaaaataaatttaattgctgtggatactgtaaagggtgtttatcgtaacagttcataatattctatttaagaatgcgtgggagaaattttctctggacccagttatgcttttcctgaattgctgtttggtttttaccttaaggacactaaatattcagctgattgtatttttctgtttgtactgatactagaccatttagagcccaatttgtggtctaccttcagcaagtgtttatgtattttgtatgctagtcatgttcttggttctgtcttccttttctacttttattttccttattctcatttttctaagttttaatcgttttatattactataatatctgcatcttgtaagcctttttgtaataaggttgggatataaataaataaggcaatgtatccttta

SEQ ID NO: 79213 - DNA, 247 bp, Homo sapiens
aatggaagttaaagaataggatagggatgggatgagggctactagggaaactggaaaggacagaaaagctgcagcataccccatacttgttatccacaggttatctccatgacttgggcatcatgcatcgagatgtgaaggtagagttaagtgcttttttccctttgtctgagaaagagtctcaataagaagtgccaacaagtccaagaagttagggagctgagaactgtagacattggggccccca

SEQ ID NO: 79214 - DNA, 2846 bp, Homo sapiens
cttcctctgccctgaagctgtatcacagaaatttctagtcctagtgtgactctggccccatgctgatgggtttctgcagactggaagaggcggggctcgtgtcacgcagcatcagggagaggaattgcttatataactgggacagcagatttagcagagagaggaggcagaggctgggaatgggagcagtaagctgtcggcaggggcagcacacccagcagggggaacacacccgggtggctgtccctcacaagcagggtggcaacatccggggtccctgggcccgaggctggaagagcctctggacaggtttgggaaccatcaggtcagatctggaagaactctgggaactacgggggcaccactatctgcaccaggaatccctaaagccagccccagtactggtagagaagcctctgccagagtggccagtgcctcagttcatcaacctctttctaccagagtttcccattaggcccattagggggcagcagcagctgaagattttaggcctcgtggctaaaggctcctttggaactgtcctcaaggtgctagattgcacccagaaagctgtatttgcagtgaaggtggtgcccaaggtaaaggtcctacagagggataccgtgaggcagtgcaaagaggaggttagcatccagcgacagatcaaccatccctttgtacacagcttgggggacagctggcagggaaaacggcaccttttcattagtgagtgactggactctctcctcatcccccagggtctttgtaccatgttccccacctgagattacctctttggcttgttctgcctttgctctgtcccccttctcatggcacctctctgtcccaaagggaggggaacagcaggtggtatcagtttgggcaggaggcctacaatgccttgagcccaggcattgcagctcccaaacattgcctagacttctggcaatgtatgtagctccacactggctttgcagtgtgtagctactgcagcacagatctgtactccctttggtcggctgttggctgctttcctgaggcttccatccgtctctttgctgccgagttggtgctggtactgtgttatctccatgacttgggcatcatgcatcgagatgtgaagatggagaatattcttctagatgaacgaggccatctgaaactgacagactttggtctgtcccgccacgtgccccagggagctcaagcctacactatctgtggcactcttcagtacatgggtgagagaggttaaagctgatgggtaagcattgggcaggaggatagctaaaggatgtctgtgatgagtatctttgaaatctgtagccccagaggtcctaagtggaggaccttacaaccatgctgctgattggtggtccctgggtgtcttgcttttctctctggcgactggaaaggtgagagaatagtagtagttttgggcagagaagagctttgccttgtggtgggaagaaggaagaccttaggaaatcttgccgtattcctactaaggaatgaacccctacccctacctccactccctacctcttaactcagtttccagtggctgcagagagagatcatgtggccatgttggcaagtgtgacccacagtgactctgagatcccagcttctcttaaccagggcctctcactcctgctccatgaggtaaggatgagcactgctttccttcttggctacgaaaccattaatgctctcctgccttcattaaagtgatttttccccattcctctcatcagtttttttgagggggctccaacttaactacctaactacttgccatctaagctgtactgagtcacattcctaagttcctggtcccccaaatctcctccccatctagaacagagaggtcccttctgagagagtggaacactgtacactcatctgaaaactcacaagcacagctccttattcccacctttgccccaaattagcctctatttctccctcttttacaaatcatctactcttcagggttcttattcctaccctccacagctccatgaacttctttcttcttttccatcctttctgttcaggcctgtcctgtcctagtcactcatccttcatgctctattttccttcagctcttatgccagaaccccctccatcgtctacgttatctgcatcacttccaggtccaccctttctttcggggtgtggccttcgacccagagctcctacagaagcagccagtgaactttgtcacggagacacaagctacccagcccagttcagcggagaccatgccctttgacgactttgactgtgatctggagtccttcttgctctaccctatccctgcttgagcctctctactgtaaattggggcccggctgggagcctgaagatctccatccctgcctactcagtatgaccaccttgataatccagtttgtttttattttgtagcctcttaccgttctgctctcctaggctttagaccagagttccaacctggacattctgctactggcagccacagctggccctattccttccctatcatacaacctacctctcaattcaacactgtcagatcagggtggtgaccttttccttttctttacttctccagtgctctttaccctcaggctgtcagccagagctgcttctgcttgtttctctgccatgtttcctttcttgagcaataataatacttcatgggctcccagggtgctattgatgtgtttaataggcttgtcagaagcaatatgaattttttttttttttttgagacagagtctcactctgttgcccaggctggagtgcagtggtgcgttctcagctcactgcaacctccgtctcctgggttgaagtgattt

SEQ ID NO: 79215 - DNA, 2264 bp, Homo sapiens
cttcctctgccctgaagctgtatcacagaaatttctagtcctagtgtgactctggccccatgctgatgggtttctgcagactggaagaggcggggctcgtgtcacgcagcatcagggagaggaattgcttatataactgggacagcagatttagcagagagaggaggcagaggctgggaatgggagcagtaagctgtcggcaggggcagcacacccagcagggggaacacacccgggtggctgtccctcacaagcagggtggcaacatccggggtccctgggcccgaggctggaagagcctctggacaggtttgggaaccatcaggtcagatctggaagaactctgggaactacgggggcaccactatctgcaccaggaatccctaaagccagccccagtactggtagagaagcctctgccagagtggccagtgcctcagttcatcaacctctttctaccagagtttcccattaggcccattagggggcagcagcagctgaagattttaggcctcgtggctaaaggctcctttggaactgtcctcaaggtgctagattgcacccagaaagctgtatttgcagtgaaggtggtgcccaaggtaaaggtcctacagagggataccgtgaggcagtgcaaagaggaggttagcatccagcgacagatcaaccatccctttgtacacagcttgggggacagctggcagggaaaacggcaccttttcattagtgagtgactggactctctcctcatcccccagggtctttgtaccatgttccccacctgagattacctctttggcttgttctgcctttgctctgtcccccttctcatggcacctctctgtcccaaagggaggggaacagcaggtggtatcagtttgggcaggaggcctacaatgccttgagcccaggcattgcagctcccaaacattgcctagacttctggcaatgtatgtagctccacactggctttgcagtgtgtagctactgcagcacagatctgtactccctttggtcggctgttggctgctttcctgaggcttccatccgtctctttgctgccgagttggtgctggtactgtgttatctccatgacttgggcatcatgcatcgagatgtgaagatggagaatattcttctagatgaacgaggccatctgaaactgacagactttggtctgtcccgccacgtgccccagggagctcaagcctacactatctgtggcactcttcagtacatgggtgagagaggttaaagctgatgggtaagcattgggcaggaggatagctaaaggatgtctgtgatgagtatctttgaaatctgtagccccagaggtcctaagtggaggaccttacaaccatgctgctgattggtggtccctgggtgtcttgcttttctctctggcgactggaaagtttccagtggctgcagagagagatcatgtggccatgttggcaagtgtgacccacagtgactctgagatcccagcttctcttaaccagggcctctcactcctgctccatgagctcttatgccagaaccccctccatcgtctacgttatctgcatcacttccaggtccaccctttctttcggggtgtggccttcgacccagagctcctacagaagcagccagtgaactttgtcacggagacacaagctacccagcccagttcagcggagaccatgccctttgacgactttgactgtgatctggagtccttcttgctctaccctatccctgcttgagcctctctactgtaaattggggcccggctgggagcctgaagatctccatccctgcctactcagtatgaccaccttgataatccagtttgtttttattttgtagcctcttaccgttctgctctcctaggctttagaccagagttccaacctggacattctgctactggcagccacagctggccctattccttccctatcatacaacctacctctcaattcaacactgtcagatcagggtggtgaccttttccttttctttacttctccagtgctctttaccctcaggctgtcagccagagctgcttctgcttgtttctctgccatgtttcctttcttgagcaataataatacttcatgggctcccagggtgctattgatgtgtttaataggcttgtcagaagcaatatgaattttttttttttttttgagacagagtctcactctgttgcccaggctggagtgcagtggtgcgttctcagctcactgcaacctccgtctcctgggttgaagtgattt

SEQ ID NO: 79216 - DNA, 1138 bp, Homo sapiens
cttcctctgccctgaagctgtatcacagaaatttctagtcctagtgtgactctggccccatgctgatgggtttctgcagactggaagaggcggggctcgtgtcacgcagcatcagggagaggaattgcttatataactgggacagcagatttagcagagagaggaggcagaggctgggaatgggagcagtaagctgtcggcaggggcagcacacccagcagggggaacacacccgggtggctgtccctcacaagcagggtggcaacatccggggtccctgggcccgaggctggaagagcctctggacaggtttgggaaccatcaggtcagatctggaagaactctgggaactacgggggcaccactatctgcaccaggaatccctaaagccagccccagtactggtagagaagcctctgccagagtggccagtgcctcagttcatcaacctctttctaccagagtttcccattaggcccattagggggcagcagcagctgaagattttaggcctcgtggctaaaggctcctttggaactgtcctcaaggtgctagattgcacccagaaagctgtatttgcagtgaaggtggtgcccaaggtaaaggtcctacagagggataccgtgaggcagtgcaaagaggaggttagcatccaggttatctccatgacttgggcatcatgcatcgagatgtgaagatggagaatattcttctagatgaacgaggccatctgaaactgacagactttggtctgtcccgccacgtgccccagggagctcaagcctacactatctgtggcactcttcagtacatggctggactgtgctgctgccatctcggctcactgcaacctccctgcctgattctcctgactcagccctgtctctactaaaaatacaaaaattagccaggtgtggtgcacgtgcctgtagtcccagggaggtggaggtgggagaatcgcttgaacacgggaggcggaggttgcagtgagccgagaccacgccattgcactccagcagccagggtgacagtgagagtccgtctcaaaaaaatagcttgggcctgggaggcagaggttgaagcgagccgagattgtgccactgcactccagcctgggtgacagagtgagactgtctca

SEQ ID NO: 79217 - DNA, 289 bp, Homo sapiens
gttattgccactgaacactgaatatacatattaagcttaaaatatgtctcttaagatatgccttaagctgggcgcagtggctcacacctgtaatcccagcattttgggaggccgaggtgggcagatcacttgaggtcaggagttcaagacgagcctgatcaacttggtgaaaccctgtctctactgaaaatacaaaaattagcctggtgtggtggcaggcacctgtagtcccagctacctgggaggcagaggtttcagtgagctgagatcacgccgctgcactccagcc

SEQ ID NO: 79218 - DNA, 447 bp, Homo sapiens
ctggaggatgtaatatttctgcttttttcaatattaaaatagaaattttcttaaatagggaacttgaactgtttagatagaatttgaaaaatgttaaggttatttcttttgtgtgagctttctccttaaaaaaaaaaaaaaaaaaaaaaaaaagctgggcgtggtggctgaagcatgtcatcccagcactttgagaggccagcttgaggcctcaagaggatagcttgaggccaggtttccaagaccagccttggcaacatagcaagatcttatatctacaaaaaactttttaaaaatttagccggacatggtgctgtatacctgtagtaccagatccttaggaggctgaggtgggaggattgcttgagcctaagatttcaaggttataatgagctatgattgcaccattgcactccagcctgggaggcagagtgaaaccctgactcg

SEQ ID NO: 79219 - DNA, 471 bp, Homo sapiens
tttttgagacagtttcgctcttgttgcccaggctggagcgcagtggcgcgaatctcagctcaccgcaacctccgccctccccggttcaagcgattcctcttgtcctcagcctcccctagtagctgggattaacagcatgcgcccacccacgcccggctaatttttgtatttttagtagagatggggattctccatgttggcccaggctggtcttgaactgctgacctcaggtgatccacccgcctaggcctcccaaaatgctgggattacagtgtgagccaccgcgcctggcctgaacctgtacttttcttttaaaaagtggaatagaatagaaactttcagtgtgtttacatagtaagggtaagtattgtttcatgtgatttgtttgagttatgtgtgtatgagattatgatgtaaaatagattttgtacatctcaaagtgtaagaagcaaaatgtacttaaaaagtttg

SEQ ID NO: 79220 - DNA, 817 bp, Homo sapiens
agggaagactgttctttttcactagaagaatctcacatgctccaggtattatatgaggttctaattcctactcgtttattgtaaaaatcctggagaaagctcattgatgtaacaataaaatatgaatttttccctttaatgcagccctgtaaaacacattctcaaacctcatgtcatccaatataccttttgtattttttcttataattcatgtgtatgaatgcatagagctgctttttttaaatgaaaaaatacagaatttcacggtctttttggatttcttttaaggcctttcagtatatccaagctgaagtaacatctatgcattgttttgttattatggtaataacaagttctagtttataataatatatagtacttttttgggactaggagcaatgatatactgctttttagtaactggtaaatagtatgtttttgtctatttgaactagaaatgagaaggagaaaaaagaaactatttttaatatatataaaacatactctatttaataaagtatatgcataaaatgatacattaggtaagaagcaaaattataaagaaaacagcttataatattcctgattaattagagtttctaaatataaaaacaaatgaaagtgacttgccatttacaaaattagcacatcatacaacttttacatacttcggaggaaataaagatcttgcgacactgttctgaggaatcgttgcatttataaaaatcgaaggcttaattttgcaaatacaactttcaagccgtatgagcaaattcaacttacatgaaaggcacaagataacatcatgttgaagaac

SEQ ID NO: 79221 - DNA, 1079 bp, Homo sapiens
tgacatatcatggaaagcatttggcattaggaattaggaaatgtgggatctaaaccactcatgctattgaggtagactgattcaccagaaaaattatttcctcttctgcgctttaatattttctaacactactgttctatttttaaggacaaaaaaagtaattgttttgaaagaggtcctatgttttagctattaagtcactgataatccttttcatgagttcattttgatataaaaaccactgtgtagaatttttaatgtagattaaattagtagattcatagattacttctgatctaagaaattacttaatttccacatatagatggaaatgtatcaaatactacagtacagatagtatagtcctggatgaattcagggtccatgcagctggcttgtcaaatactcatctcacatgtctgtgacaacaaccaagttcaccttcgttacaactctcatgtccccatctgggtccctgcctgtcgccataactcttgcactattaaaatcttcaactcaacatctctgtctctgtgatctgtgatctcaactttttttctttccaactctgattcttcattctgactccctggatgtgaacacatctttgatcatataattgtttttattcccttggtccctatatttttttatgtatctcatcagctcactcttttagtttctcttcccacatagctttcctagactctattcataagtgccttactgccttatcttcctctccgagtatgctgcaaaccccagtcctgtgtcagttcagctgtttgcctttttatttcagtacccatcaaatactacctcacattcagcagatgactttccttcctaatccacagaagaaaaaggggacagaggcagaaaactgcctgaaggtttcattagatatctagaagcctatctgtatggcagcatacatttctctcagaggaaaaggtgtccttcctcttctcctaagcatacctcccctctaggccctggcttcaccctcaacagttattccttctctctgttggctctttccttttggcttaagaacatgtccaagcatcattcatcta

SEQ ID NO: 79222 - DNA, 384 bp, Homo sapiens
ctgaaaatgtggaagtgactttggaactgggtaacaggcagaggttggaacagtctggagggctcagaagaagacaggaagatgtgggaaagtttggagctttctagagacttgttgaatggttttcaccaaaaagtccaggctgaggaggtctcagatagagatgaggaacttactgggaaccagagcaaaggtgattctagctatgctttagcaaagagactggtggcattttgcccctgccctaaagatctgtggaactttggacttgagagagatgatttacgatatctggcaaaagaaatttctagatggtaaagcattcaagaagaagcagaacataaaagtttggaagatttgtgctcacttcagtggcacatatac

SEQ ID NO: 79223 - DNA, 818 bp, Homo sapiens
gatgaatttgtgtgtgttgtggctgatgtgcattttggtgctttgtatgcaagtttaagaatatcttagcaataggaaaggaagatttatggcattttaattaatgaatataatgaaggctaaaacttgtagataaatttataaggtgcttaagagctcttcaatttgttaatggaaagaaacaccatttacaccggatggctacaaagcaaccttattctgagagagaggatctcattctgtcacccaggctggagtgcatgatcatagctcactgcagcctcgacctcctgggctcaagtgatcctcctgctccagcctctcaagtagctaggactacagatcttttctcagaatagcagtctgtaggctgtcacctaaagtgtcctgttttcagtgctgcacctgctctgagcttcatctttttacgaagacgtcatggtgtgctatctgtactgggaaactttccccagcatcagccatctcctgaagataacattgtctgctagagattgtcatgtatgtggattgaatctctttatcttcatggatccagttgaaaatcaggcattgcatccagttatcatggctttaatcttaatgccttccctgcactgttttgggaatatcttaatactgctatttttgaagagtccagctcagttattctgcagaatgtctgttgatttggctttgctgtttcctcataagtagatccagattatacgtttttgttgatgttgggttcttctcagtgaatcacatccgatgatgtcagcacgaggcctgatcatttggtttaggtagctttcactaga

SEQ ID NO: 79224 - DNA, 311 bp, Homo sapiens
tattatagcacttattgtattataatttctttttacttgcctgtctactatgttagaccataagccactcaatgacagaaactatatcctattcacctttatattccaacacttatcacaatgcctattacataataggttaaataaatatttattgatatgattattctgtgtgtgactttaaaattgggggtacataatcttggtctaccatttactccagccatgaatgagccagctagctttgtgcagctgtgtctctgcagaatcttctatctctttattttttatttattattattattttttga

SEQ ID NO: 79225 - DNA, 683 bp, Homo sapiens
  misc_feature (605)..(605): n is a, c, g, or t
  misc_feature (665)..(665): n is a, c, g, or t
agcgattctctcacctaagcctcctgagtagttgggactgccgtcacatgtcaccactcccagataatttttgtattttttggtagagatgaggtttcaccatgttggccaggctggtcctgaactcctgacctcctgcctgcctcagcctcacagagtgctaagattacaggcatgagctattgcacctggcccattcttgctcttgactaaaaggtctgtattagaagagtaacaatgataacataaatgataatagcagctatcattgagtgccaggaacctgatacaggcttttttgatgtgtgcttcattctttaattcttgccacaaccctataaaatagaggttacctccattttccagaaggaggctgaagcttaaagtgagtttaagtcctgtgcctgtgagcaaaactttggcgaggaaaaattaactttgccactaagtgggggaaataaataataaacatcagagggaatggttgaatctgaaaaagtctttcttttaggaatgacttagatccacggaggatggcggtgccaaaagaagcaaagtgaagtggggaatgataagcataagaagggaaaaaaagtgaggggaanggtaccagacagacaccagacagtcgcgaagagagatgtgggaaaaaggaaatcctaccngggcttgatacagtttat

SEQ ID NO: 79226 - DNA, 238 bp, Homo sapiens
tactgcaaacaaaatttttaattttatagtgtttctaggttccatcttctctgatttaatgttagagacctcttcttttccaagcctgtgtaacataaatccactttggtcttatggccactgttgctgatgaaaatcatttaagacttctttggaccaatgagaacatttaggactacctaaagtgctggaagatcctttcaaaagaatgtgaataatgatgggaaatgaaaagctt

SEQ ID NO: 79227 - DNA, 609 bp, Homo sapiens
ctttgatctagatgcttcccagtccttgctcatctcgtaatgtcagaatgttggactgtttcatgcttctgtgccttttcccaagcagctgcctctccactggacatcctccctagacctttggaagaatggaggacctctacctgtggttcacgatcttaggtcagtgactgcttgttttgtacagctatccctggcctccccacctagaactgaccactctatctactgtgctcccagtgtacctcgtacacattctattagagctcatgctgccagagctgctacatagggttgttcaggttgtgaactgcacaactctaaggaccttgttcacgaaatgatgcatagtgaagacagtcatatatcatggccctgctttttggactgtttttcctttttttgctcttaagaatcatgggaatggggaagaaggcatgaaaaggttaagaatgtaacatgtgtcattcttatcccttgccttgtcccctccagcactttccttcctgtcctgcatactgtcgtgtggtgtgaaagcctgctgctttgggaacgatcttgtgacaatgaggggatgataaaaataaataaagatgacaagaactaaca

SEQ ID NO: 79228 - DNA, 2862 bp, Homo sapiens
  misc_feature (425)..(425): n is a, c, g, or t
aggacacactgttcgggcgcggctttccccgtccgcggagcggtcttgacactcgcggcggcagcatctacgctcgcagagccgccgatgcgtgtccagtgacccggacagcaaggcccgcgcgcggcgggggcggcggcagacgcctggtcaccgtgaccccgattttggatttaccgcttgggggctggggggatcctggatttaactggcgactgttttgggggacgccggacgccatgttgtggaaaataaccgataatgtcaagtacgaagaggactgcgaggatcgccacgacgggagcagcaatgggaatccgcgggtcccccacctctcctccgccgggcagcacctctacagccccgcgccacccctctcccacactggagtcgccgaatatcagccgccaccctactttcccccnccctaccagcagctggcctactcccagtcggccgacccctactcgcatctgggggaagcgtacgccgccgccatcaaccccctgcaccagccggcgcccacaggcagccagcagcaggcctggcccggccgccagagccaggagggagcggggctgccctcgcaccacgggcgcccggccggcctactgccccacctctccgggctggaggcgggcgcggtgagcgcccgcagggatgcctaccgccgctccgacctgctgctgccccacgcacacgccctggatgccgcgggcctggccgagaacctggggctccacgacatgcctcaccagatggacgaggtgcagaatgtcgacgaccagcacctgttgctgcacgatcagacagtcattcgcaaaggtcccatttccatgaccaagaaccctctgaacctcccctgtcagaaggagctggtgggggccgtaatgaaccccactgaggtcttctgctcagtccctggaagattgtcgctcctcagctctacgtctaaatacaaagtgacagtggctgaagtacagaggcgactgtccccacctgaatgcttaaatgcctcgttactgggaggtgttctcagaagagccaaatcgaaaaatggaggccggtccttgcgggagaagttggacaagattgggttgaatcttccggccgggaggcggaaagccgctcatgtgactctcctgacatccttagtagaaggtgaagctgttcatttggctagggactttgcctatgtctgtgaagccgaatttcctagtaaaccagtggcagaatatttaaccagacctcatcttggaggacgaaatgagatggcagctaggaagaacatgctattggcggcccagcaactgtgtaaagaattcacagaacttctcagccaagaccggacaccccatgggaccagcaggctcgccccagtcttggagacgaacatacagaactgcttgtctcatttcagcctgattacccacgggtttggcagccaggccatctgtgccgcggtgtctgccctgcagaactacatcaaagaagccctgattgtcatagacaaatcctacatgaaccctggagaccagagtccagctgattctaacaaaaccctggagaaaatggagaaacacaggaaataaaattggaacgaagaaaggttaggagagtagggaaggaacaggactgcaaaaatccttctccaccgcacagactgggaacccctcctggcctgggggaagagtttgttacctaccttactatttaaagagccttcactggttctgcatcacccgcccctggacttcttagttgtttctctagcgctgagctatctcctaactttggacctattatcagaaggtgacaagtactggctctttattcattaagctttttttttttgaaccccattctttccttctctgaaagtggtgctataagttttagaatcttttaaatacattccctgggccaacagacccacacacttagccattgaaatgtcaaattgatgtgccctagatcaacagatcaacaataccttttttttcagtgttaaggtaatggttggtttttgtgtccgctaaatatttaccttgaaaaaaagaaaagtgtgtatctagcttcttcagagatcaagtcctctggtaggaggcaaaggttctatctgcttagcaactagttaataagtggtatctgacacactctaaaccccgtgttcaaacgggggccttctggttttaggaaacttgtagaaacgaagcctgctgattgatttttttctcctttttttttttttttttttttaactttgaaagttaactcttcaaatgggagactctttgaaatgacatgttcctttaaggtactgaagctttatttgcatatttatttcagatgtttcgagtaaacttgaaaagggtaggcacgaagcaatttgttgctgcttgtcacccccaagtccccgtggaggttctgtattttaagaaacagtgcgttgagtgtacagattttatttatgcgtaatttaatggggtctgtaaatactggtgcacttcttacgacttttttgagacatgggatccaattttaatattaacttttaatggtgatggggtaatctataacacatcataaggttttattcatatatatacagggtattaagaattaagaggatgctgggctctgttcttggcttggaagattctatttaattgaaactctctgttcagaaagcaataactttgtctcgttcctgttgggctgaaccctaaggtgagtgtgcagtacagtgtgtgtgggtgaaatggagatttggaattgaactctctgcctgtaaatgttccccaaataattgttgtgtgtatgatacgtgtataataaaagtattcttgttagaatctgaaa

SEQ ID NO: 79229 - DNA, 322 bp, Homo sapiens
cggaagcttgtgcacccatgttcacagcagcattggagaaggataccgaacattcttctcgtgggcttactggccatttgtgtatctcctttggagaggagtctattcaaacctcttgcctatttttaattgaaactctctgttcagaaagcaataactttgtctcgttcctgttgggctgaaccctaaggtgagtgtgcagtacagtgtgtgtgggtgaaatggagatttggaattgaactctctgcctgtaaatgttccccaaataattgttgtgtgtatgatacgtgtataataaaagtattcttgttagaatctgaaa

SEQ ID NO: 79230 - DNA, 3369 bp, Homo sapiens
  misc_feature (425)..(425): n is a, c, g, or t
aggacacactgttcgggcgcggctttccccgtccgcggagcggtcttgacactcgcggcggcagcatctacgctcgcagagccgccgatgcgtgtccagtgacccggacagcaaggcccgcgcgcggcgggggcggcggcagacgcctggtcaccgtgaccccgattttggatttaccgcttgggggctggggggatcctggatttaactggcgactgttttgggggacgccggacgccatgttgtggaaaataaccgataatgtcaagtacgaagaggactgcgaggatcgccacgacgggagcagcaatgggaatccgcgggtcccccacctctcctccgccgggcagcacctctacagccccgcgccacccctctcccacactggagtcgccgaatatcagccgccaccctactttcccccnccctaccagcagctggcctactcccagtcggccgacccctactcgcatctgggggaagcgtacgccgccgccatcaaccccctgcaccagccggcgcccacaggcagccagcagcaggcctggcccggccgccagagccaggagggagcggggctgccctcgcaccacgggcgcccggccggcctactgccccacctctccgggctggaggcgggcgcggtgagcgcccgcagggatgcctaccgccgctccgacctgctgctgccccacgcacacgccctggatgccgcgggcctggccgagaacctggggctccacgacatgcctcaccagatggacgaggtgcagaatgtcgacgaccagcacctgttgctgcacgatcagacagtcattcgcaaaggtcccatttccatgaccaagaaccctctgaacctcccctgtcagaaggagctggtgggggccgtaatgaaccccactgaggtcttctgctcagtccctggaagattgtcgctcctcagctctacgtctaaatacaaagtgacagtggctgaagtacagaggcgactgtccccacctgaatgcttaaatgcctcgttactgggaggtgttctcagaagagccaaatcgaaaaatggaggccggtccttgcgggagaagttggacaagattgggttgaatcttccggccgggaggcggaaagccgctcatgtgactctcctgacatccttagtagaaggtgaagctgttcatttggctagggactttgcctatgtctgtgaagccgaatttcctagtaaaccagtggcagaatatttaaccagacctcatcttggaggacgaaatgagatggcagctaggaagaacatgctattggcggcccagcaactgtgtaaagaattcacagaacttctcagccaagaccggacaccccatgggaccagcaggctcgccccagtcttggagacgaacatacagaactgcttgtctcatttcagcctgattacccacgggtttggcagccaggccatctgtgccgcggtgtctgccctgcagaactacatcaaagaagccctgattgtcatagacaaatcctacatgaaccctggagaccagagtccagctgattctaacaaaaccctggagaaaatggagaaacacaggaaataaaattggaacgaagaaaggttaggagagtagggaaggaacaggactgcaaaaatccttctccaccgcacagactgggaacccctcctggcctgggggaagagtttgttacctaccttactatttaaagagccttcactggttctgcatcacccgcccctggacttcttagttgtttctctagcgctgagctatctcctaactttggacctattatcagaaggtgacaagtactggctctttattcattaagctttttttttttgaaccccattctttccttctctgaaagtggtgctataagttttagaatcttttaaatacattccctgggccaacagacccacacacttagccattgaaatgtcaaattgatgtgccctagatcaacagatcaacaataccttttttttcagtgttaaggtaatggttggtttttgtgtccgctaaatatttaccttgaaaaaaagaaaagtgtgtatctagcttcttcagagatcaagtcctctggtaggaggcaaaggttctatctgcttagcaactagttaataagtggtatctgacacactctaaaccccgtgttcaaacgggggccttctggttttaggaaacttgtagaaacgaagcctgctgattgatttttttctcctttttttttttttttttttttaactttgaaagttaactcttcaaatgggagactctttgaaatgacatgttcctttaaggtactgaagctttatttgcatatttatttcagatgtttcgagtaaacttgaaaagggtaggcacgaagcaatttgttgctgcttgtcacccccaagtccccgtggaggttctgtattttaagaaacagtgcgttgagtgtacagattttatttatgcgtaatttaatggggtctgtaaatactggtgcacttcttacgacttttttgagacatgggatccaattttaatattaacttttaatggtgatggggtaatctataacacatcataaggttttattcatatatatacagggtattaagaattaagaggatgctgggctctgttcttggcttggaagattctatttaattgaaactctctgttcagaaagcaataactttgtctcgttcctgttgggctgaaccctaaggtgagtgtgcagtacagtgtgtgtgggtgaaatggagatttggaattgaactctctgcctgtaaatgttccccaaataattgttgtgtgtatgatacgtgtataataaaagtattcttgttagaatctgaaaaaaaagagcacagcaaccaaaagaaacaaagacacagaaaccaacagagaagggggcacacacgcacagaccgccacgacgagagacgacaacacagacacaccgacagccgaggagcgcgacagagcgagagacgcacacgaggggacggcacggcgaagagagcacaggaagacacgctcgtcagagtgggcacgggggcgaagcgaggacaccataggcgcccgcacgagggaaagcaacaggaatccgagcacatgaagacgcggaggaggcaccgcacgtaggagcggcggagaagacggacgaccgacggaccgcggccgcggcgaagaaccgcacgcgcacgccgaggatgaaccgcccgaagagagagggagataagacgcgacaacaaggggcggcgacgagcaaacgcaacaagaaagatcgggcaccagaggcgacgccgcgagagagcacagacccaggcagggagaagagagagaaggccaggcggagcgaaag

SEQ ID NO: 79231 - DNA, 898 bp, Homo sapiens
  misc_feature (4)..(4): n is a, c, g, or t
  misc_feature (48)..(48): n is a, c, g, or t
ctanctcgctcgctctgcaggccgcctctagaggatccccccttccancatctcatttctttttgtgtccgctaaatatttaccttgaaaaaaagaaaagtgtgtatctagcttcttcagagatcaagtcctctggtaggaggcaaaggttctatctgcttagcaactagttaataagtggtatctgacacactctaaaccccgtgttcaaacgggggccttctggttttaggaaacttgtagaaacgaagcctgctgattgatttttttctcctttttttttttttttttttttaactttgaaagttaactcttcaaatgggagactctttgaaatgacatgttcctttaaggtactgaagctttatttgcatatttatttcagatgtttcgagtaaacttgaaaagggtaggcacgaagcaatttgttgctgcttgtcacccccaagtccccgtggaggttctgtattttaagaaacagtgcgttgagtgtacagattttatttatgcgtaatttaatggggtctgtaaatactggtgcacttcttacgacttttttgagacatgggatccaattttaatattaacttttaatggtgatggggtaatctataacacatcataaggttttattcatatatatacagggtattaagaattaagaggatgctgggctctgttcttggcttggaagattctatttaattgaaactctctgttcagaaagcaataactttgtctcgttcctgttgggctgaaccctaaggtgagtgtgcagtacagtgtgtgtgggtgaaatggagatttggaattgaactctctgcctgtaaatgttccccaaataattgttgtgtgtatgatacgtgtataataaaagtattcttgttagaatctgaaa

SEQ ID NO: 79232 - DNA, 525 bp, Homo sapiens
cttcctataagtagtttcacttttctgcgaaaaccatgtttatgttttaatactcagcactactctgggtttaatgctttcaatgtcatttaaaaaacagctatctttgagacaaactcggctatgctatcactcttatgttacctgggctcacctcaagctcctgacctcaaccaatcctcacaccttggccacccaaagagctgggattataggtgtgaaccacctggtctttagaccatcattcttctagagaagatgattccttagaagtgaatatggtaaacaacccatctttccttatttgcaaagcaatattttggatattttttgagggctaagcttggtaaattgttttggacatagttttgaagatttcacaccctttttggtttcttgaaaaaccaaatgttttcttgaaaaaccaaaggaggtctttgtagcctcctttgcagtctgtcaggtattttctaggtttgtcccatgtttcaccttagcagttgaaaaacttaaaaactggttgtg

SEQ ID NO: 79233 - DNA, 316 bp, Homo sapiens
gccatgcaaatcttttaaaattcttctttaaaagtacttttcttggccttactgacatgaagcaaagaaggattctaggcccccagatggtaggatttggggtagacattctgtgtctgtctcattccccatggaattatcaaatttcccccctagccacgccagactgctaaatggtctctaagtatagcctacatttcaaggctgtttcctcagccaaaaatgccccttctccttgtctgctgtgaaactcccttccttttaccctcctctttccattatgggacagttttctcttctgggctcccttgagcac

SEQ ID NO: 79234 - DNA, 424 bp, Homo sapiens
ttacagctgactgacccaaccgggtttggggcactgcattagttacttaatccttcaaacaccccatagggcaaggactggtgatctctgacagaggaggaactagctgtgtgggtacttgagctcagagttgtctgaaccttggttaggggacctttcttcccacctttccttgtgcaggacagacgacaccctgaaaatggacaggtggggggcaccgaggggaggtctgcccagagcttggctgttctgctctgggaagcagaggtacttctgtgcccacttcttgcttgtctgcataccccagcctctcagagaggccaagagcctgtcgagggacacacagaaaagagccagcagccctagagagggcagaagcttcaaacaaggacctctcctcctaccacgcttcttcttcaaacac

SEQ ID NO: 79235 - DNA, 667 bp, Homo sapiens
cagtgacatataaatgacagaggtttccaagttcagacagttaagaaagactaccttttcatagcagacacatgaattgttaattagggaagtgcactagagcagatctcactgagtcttatacagtcaaagaaaggataggaatcctaaatccaaaacaactaaagaggcattaaattagtcaatactacgcccagcagaatgaagcaccagaataagtaacataagaacccagagagaaaaaagaaaagaaaacgagtgacaactcagggaaaggaggctgtaagagcctagaagcataggagactgtgaatgataatgccaatcctcagttttagcgtatctaatcacttctgttattcaaaaccatttttatgtttttaggcagaattagttatatgacattgcttatgttggccaattcattatttaaacgtataactaatatactcttattatcagccacctaatcatgcatattaatgataataatcatagctaacattaactgagtgataatgatatgtgaggtccttggctgggctctttatacagtctcatttggttttcataattctctcaagcctatgagatagaaactattattatccccattttaaagatgaggaaactgaggcttatagaagttaaaataacacaactatta

SEQ ID NO: 79236 - DNA, 518 bp, Homo sapiens
  misc_feature (159)..(160): n is a, c, g, or t
  misc_feature (165)..(166): n is a, c, g, or t
  misc_feature (168)..(169): n is a, c, g, or t
  misc_feature (175)..(176): n is a, c, g, or t
  misc_feature (181)..(181): n is a, c, g, or t
  misc_feature (282)..(282): n is a, c, g, or t
  misc_feature (418)..(418): n is a, c, g, or t
gctttgggaggccaagacaggaggatcgcttgaggccaggagtttgagaccagcctgggcaacatagtgagacccgtatctctaccagaaaaattatccaggtgttgtggcttatgtctattgtcctagccactctgctcactgcaacctccgcctccnnggttnnanngattcnnctgcntcagcctccagagtagctgggattacaggcaccagtcaccacgcccggctaattttttgtatttttagtagagacggtttcaccatgttggtcaggttgcnctcgaactcctgatctcaggtgatccacgcgcctcggcctcccaaagtgctgggattacaggcgtgagccaccacgcctggccgaattttcataaatgatttgaaagaaaatgagctcattctttctttttttttnagacggagtcttgctctgtcgccatcctggaatgcagccgagatcgcacctttgctctccagcctgggcaacacagtgagattctgtctcaaaaaaaaaa

SEQ ID NO: 79237 - DNA, 1252 bp, Homo sapiens
aagttacttactcaagctgtgtctatggggcagagaacagtcctcttctttaaaataatcatgatcaaaccagtcaagtcaatccaattagctgttagacagacaataaggataaccttctttttgacttaagcagtcaagttagtcaaaatagaaaaattggcttatatgggcacccagaactacagcattcaaaaattacttttaaaagtttcttcttttattaaaatggactttcttaaataaaatacatcctctgatagcagctatctctttttacttgtaatgattaattctaaatgcttcatgtaattgagggacattatgagaagactagaaagtatctcatcagataatcctaagggctgtaacttctacttgccataaacaaagtataattaagagtgagtagcaattggtttggggagtcgtagttatatatgaaactttcttttgtttctcatgatgtatgtaaaatgtttgcagaaggatggtagaaaatgttactaatgaatttagagtggtttgggagaatacactgatacttcctcatttgaaaattataaggagttacaaggggaactaagaaccagaagtggctggcctctagcttttcaatacctgataagtgttcttggttatgttttgaacacttaaatttctcaacaaatggctatgtctatatttatgtaggggccacccttgccctacttgcatgccactttgacttttaactgaaatcagtgtgaattctgtatgcataagggatgtaataaagaggcgggatcattaacgctatatcgttgcatactatttttcatatgccttacaatattttctgggatgttattaaaatgaaagcattttattgccaaaataaatctatgttgttacttataatctgcattagcagtagaaaaataatgtagcaaaaacatattgtacagtacaaaattataaaatatatattttgccaataatataaaaatagattgaggagaaagaagcacatttgttatagcacaaacttataacaaaatccactgttaaatttggcagtcatattttttaaaagtatgtcgatttagttctaagttttgtcagatttacttcatctaccatctttttaacttgctgcttgatacttttccagcaatttatttcatagccttgcaatctgtggatgtaatttcttttgttttattcccttccataaaatttattaaattttattttgtgataacactcatac

SEQ ID NO: 79238 - DNA, 435 bp, Homo sapiens
tgagcctgctaattctacctttattacatagatggcatcttgagaatttaaaaataagcaagtagagttatccttgctttgcacatggcagacaaggaggactggatcttagaggctaaaaggttatgaaataaattatcaaacatgaaaatactacccaaaatgaggttgattttttgtaagagcaaagaaggactaactcaaagaaatcatttttctaggagcttcccacttacttaagcaaggaaaagataggcaaacaaaaagggatattgctgaaggaattggaacttattatttgttgttatacagtgaacgtttgtgtccccccagccccaaatcatatgtcaaaatcctaacgccctatgtgatagtattaggaggtgaggcctctgggagatgattaggtcacacaggcagagagcgctcatgaaa

SEQ ID NO: 79239 - DNA, 875 bp, Homo sapiens
tgtgggttctatccttatgatataatcacctcccaaaggccccacctcctaataccaccacattgggagttaggatttcaacatataaattttgggggtgggacacagtctatcagtccataagagcagtaatatttattagatgtctattttgtggtagccactgctaagcactttgtttcattgttaaaattcatactcaaaagagcgctatgagggaggcagtgtgattctcagtttccaactgaggacaccgaggctcagaggcagtgagtgatgtgaccgaggacacacagctcatgaaccgctaagctgagacgggtctgtcttactcccgggtgtgctcagatgaccacaatgttacaaggtctccctaaaggcgatgggcggtatacacaggaccagattgcttagtaaccactgaacatgtagagtgtgttgtttggccagaaccacagctaaaacttgcttttttgtcctgtaaatgctaattttgtggcaactgggtactcttgtggcccagccacctctaaaccaaaatcactcttagacttttggaatcagctttggagaactacttacatcactgaaacttaaaaatggggagtagtaattgtacttacacttgaagtattattcatgcagtcctcagagaatatctgaacattcttttacctctcagataatttacaaatgccttgaatgtcaacatcgaagtgtcaatgacatgaagaatttgcccatgtttatgtttttatattagtggagggagcacgcaatcccccacgaactgtaaagtcctatcatttatggaacaaacccgacaaacctgccaggtttttctggtcataacaattttgttttggcttgatcta

SEQ ID NO: 79240 - DNA, 803 bp, Homo sapiens
atcatgatctgctttacttttaaaaatctacgatgtgggcagcagatggtaccaagggcgagagtaaaagcaggtaaaccagttgggattctactgcagtggcccaggggagagagagcaaaatcatggagtcatgttgatgcaggtggggaggagtgactgggttctagatatatttgataagatttgccgaaagattgacttagggtgggacagaaggaggagtcaaagatgactgcaagcctttcagcataagaatctctaaggtcaggatgccatttgctcaggtggggaggatgaacctgagagagcaaatcaagattttgaccatgttaagtttggaacacctgttagatagccaaatgaagatgttgcagaagaagttggagtctggagttccgatgagaggtggaggctggcaatagaaattggagaggcatcaggatcaaattgccatttaaaaacagagaactagatgagatgaatcacctagggagtaagtattaatggagaatgagctctggagcacctggaacctttggaaataagaggatgaggagaatctggcaaaggaaactgagaaagagaaaccaatgacaaagggtagatgattctagggagaaaaccaatagggtccacctaggagagcaagaagagaggtgctgttgccctttcacatgcctccaagggtcaagtggtgccactggatttgaaaagtagcagaaggtcattgattactttagagagagcagcttgcaaagtcataaggtcagcagctggacaatattggatttggaagggaa

SEQ ID NO: 79241 - DNA, 543 bp, Homo sapiens
attgcttgttgatatttatgtttaatgtaattccaggtttttttttttcttcatttggtcatagaagcatacatatggtcagtttggatggtaaattttgattgtatggtagaaggcctgagctcaggcttaccttccttttttctatgaaagaaattactaagcaaaagagtagtctggataaacttggatggaagattgtaaaatatttataaaattagcaattatatgttggttaacactttatttttacctaaatgttgaagcaggttcctgataatctctgctggataacatttttggattagccattgtatctcctgaaacaaaaaagtacatgtctttttaatattttataacttgaatcaccctttcctctcgtttgttcaaataatgagattttaatgatgtgtcatagtactcaagagaattcttttttgtgcattatttatttaatggaattacctctttttaactactgcttggtcagtttacttgctaattaactaactttaatctttcaaaaagtctaattatgttaat

SEQ ID NO: 79242 - DNA, 662 bp, Homo sapiens
ggccgcctaccggctgcagaggagaagggtaggctgtgggcggcggcggggcgcggaggggtagccaggagcgcaggctgggctccgcacctccctgccccaaaacccattgatgcagcggccactgcggctgccgagcggcgtcttcccagagcccggggctgtgcccgcccgatgcaggatgcaactgaggaagcccgctccaaagcaaaacaaaacaaattcctccagccatgccgtctttctccaacccactcaagcgaaagaatggacaccagttaccagccgctgacttttgtctcagtgagaataataataggcatggtgctacctggcaccatctgaatattctccaagagtcagtaatgggactagaaaaaatgggtgacccaaagaacccttttccctacctattcccccaagccggccatttacatctcttgcgaaagaaaaagcctctgggcattggcttctccgtcaggcggtggcctcatagcgctcagtgattctcgccaggttatgaaaggccgttttagaaagctggccctcacccaccctgtgttggtgcctcagcagcagacttttttccaaggggtctcattacaagatgaagcctgacttacctctgctaacaatcaaggcatgctcgtaattaagccacg

SEQ ID NO: 79243 - DNA, 1754 bp, Homo sapiens
taatcattttaacaaatgagatagtggaagacatttatttttagcaatatggaaacattccaagaaacagaagccctctcaccatctgagagaaaatgaaaatccactatgagagaaaactgaagactttaatacagatttaagtaaaatggcctggtaatggaaaagctgactgaggaatatgttcctggctgtaacatttcttcactcaggctgtagtttctgaatttaatgaagggattattggatgacactgaagagatcgttggactagcagatcagtgtgaatgtttcctccacaactggcacgtctttcctatgacgattattgagggagatgtctctttgactgtctatggattatttggaacttttgtcaaggagccatagagttctgcagaccacacacctgtccagtgtgtctgtagccagtattttgtgattttttttcttttttgagacaagatcttgctctgtcacccaggctggagtgcagtggtgtgagcatggctcactgcagcctctgcctcctgggctcaagcgatcctcctgcctcaacctcccaaagtagctgggaccacaagcatgcaccacaacgcctggctgacttttatattttttgtagagatggagtcttgcaatgttgcctaggctggtctcaaacttctgggctcaagcgatcctcccacctgggcctcccaaagtaatgggattacaggcgggagccactgtgcccgatcttaccctgtgaatccttcaacctgcctcaacttgagccaacagagctgctggcacctcctgaaagccgactgcgtgactgctgcatggcctgacctagaggctggagggcttctctttggcatgcactgcaatgtgggtcttgagcgcccccacgtacgtgaagctccttccacactcatcacaagaaaaaggcctctccccactgtgaaggcacagatgggccttcaggcttctcttgaggcggaaacttttgttacactcgggacacgaaaagggcttctctcccgtgtgaactctgatgtgctcgtccagcttaatcttgtagatgaatttcctgccacattcaccacaagaaaacggcttttcctcgctgtgcgtcctctggtgggtcttcagggcagccttccgggagaagctccggccacactcgggacagtggaagggcctcttcccgctgtgctgggtcagatggaccttcatgcccctcttcaggcggaagcaccggtcacactgcggacactggaagggcttctctccgctgtgcagccgcaagtgctccgtgagctcgcactgctgcacgaaggcccggccgcactccccgcagcagaacggccgctccccgcggtgtagacacaggtgcttcttcaggttggccctgtaccggaaggtcttgtcgcactcagggcatgggtagggccgctggccggtgtggacaacctgatgagtgacgaggctgcccttcaggaagtagctcttctcacactcactgcactggaaccgcttcttctgacacaggagcctctgcgtccgcctgagttcggacttccctctggacgagtttttgtactttgggtatctgcagagctggctcttggagtggctccgtttgtgctttagcaaatccctccttacttggaagactttcctacagacatagcaggaatagcatcttggccctgtgggaatttctaagcgccctggggtctcccgaggcttatgccgcaggtctttct

SEQ ID NO: 79244 - DNA, 2593 bp, Homo sapiens
taatcattttaacaaatgagatagtggaagacatttatttttagcaatatggaaacattccaagaaacagaagccctctcaccatctgagagaaaatgaaaatccactatgagagaaaactgaagactttaatacagatttaagtaaaatggcctggtaatggaaaagctgactgaggaatatgttcctggctgtaacatttcttcactcaggctgtagtttctgaatttaatgaagggattattggatgacactgaagagatcgttggactagcagatcagtgtgaatgtttcctccacaactggcacgtctttcctatgacgattattgagggagatgtctctttgactgtctatggattatttggaacttttgtcaaggagccatagagttctgcagaccacacacctgtccagtgtgtctgtagccagtattttgtgattttttttcttttttgagacaagatcttgctctgtcacccaggctggagtgcagtggtgtgagcatggctcactgcagcctctgcctcctgggctcaagcgatcctcctgcctcaacctcccaaagtagctgggaccacaagcatgcaccacaacgcctggctgacttttatattttttgtagagatggagtcttgcaatgttgcctaggctggtctcaaacttctgggctcaagcgatcctcccacctgggcctcccaaagtaatgggattacaggcgggagccactgtgcccgatcttaccctgtgaatccttcaacctgcctcaacttgagccaacagagctgctggcacctcctgaaagccgactgcgtgactgctgcatggcctgacctagaggctggagggcttctctttggcatgcactgcaatgtgggtcttgagcgcccccacgtacgtgaagctccttccacactcatcacaagaaaaaggcctctccccactgtgaaggcacagatgggccttcaggcttctcttctggaggaagcctttgccacactcgggacactggaagggcctctctccactgtgcttatacaagtggaccttcaagctgcccctgatgcagtagctcttgtcacactccggacactggaagggcttctccccgctgtggactcgaatgtgttctgtgagccggtactgttgagtgaaacttttgccgcacatcacacaagagaatggcttttggccactgtgctgcagcaggtggcttttcagatttcccttgaggcggaaagtcttctcgcattcaggacactggtagggcttctctccactgtgcagcctcaggtgctcggtgagctgagactgatgcgtgtaggtcttgtcacactcaccgcacgcgaagggcttctcgtccctgtgcatccgctggtggaacttcatggaggccttccaggagaagctcttgtcgcactcgggacactggaaggctcctcgccactgtgaagcctcgtgtgctctgtgagatgcgcgcgtcggcggaaactgcggccgcactcggcgcaggagaacggcttttccgtggtgtggaccttcaggtgctgcgtgagccgcgactgctgagaaaaggtctttttgcactcgccgcagggaaactccttctgcctgtcgtggactctggtgtggcaggcgagcttggaaggccgcgtgaagcgcttgccgcactcggcgcaggggaagggcttttgctcgctgtgcaggcgctggtgggcgcgcatggcgttcctccagaagaagcccctgctgcactccgggcactggaagggccgcttcccaatgtgctgcagcccgtgggctttcaggcttctcttgaggcggaaacttttgttacactcgggacacgaaaagggcttctctcccgtgtgaactctgatgtgctcgtccagcttaatcttgtagatgaatttcctgccacattcaccacaagaaaacggcttttcctcgctgtgcgtcctctggtgggtcttcagggcagccttccgggagaagctccggccacactcgggacagtggaagggcctcttcccgctgtgctgggtcagatggaccttcatgcccctcttcaggcggaagcaccggtcacactgcggacactggaagggcttctctccgctgtgcagccgcaagtgctccgtgagctcgcactgctgcacgaaggcccggccgcactccccgcagcagaacggccgctccccgcggtgtagacacaggtgcttcttcaggttggccctgtaccggaaggtcttgtcgcactcagggcatgggtagggccgctggccggtgtggacaacctgatgagtgacgaggctgcccttcaggaagtagctcttctcacactcactgcactggaaccgcttcttctgacacaggagcctctgcgtccgcctgagttcggacttccctctggacgagtttttgtactttgggtatctgcagagctggctcttggagtggctccgtttgtgctttagcaaatccctccttacttggaagactttcctacagacatagcaggaatagcatcttggccctgtgggaatttctaagcgccctggggtctcccgaggcttatgccgcaggtctttct

SEQ ID NO: 79245 - DNA, 603 bp, Homo sapiens
gactaatctagagtgagggaaagcagacccgtgattgcgcctggggcaaggagacttgggggtggagggggggccagagggaggggtttcaaagatgataaagacattttgagggtgatggatatgatccctctcttaatagtggcgatggcttcatggatagatacaaatgtcaagacatattgaactgtatactttaaatgcttgcgctttactacgtgccaatcacatcttcataaggctgttttttgtttttttgtttgttttttttttttaaaaaaaaaggcctcgtaatggagatgagtacagcctggcctcagtctccccacctgcaatgtgggggatccccgtgtgccttgcaccacctgagagctccaggcttaggaggagaccgaggtgagccctgtttctagccagaaaccccaaggccctaacccccagggctgggcagctgcagggcccaggctactgcccctccggggatggacggtgcgaggccactccaggggcatgacctgttttgggcaggcggtggctgtggggagaagagtggggaggtccctttcttttttcttcctgaataaaaaaatgcatgatgctaca

SEQ ID NO: 79246 - DNA, 332 bp, Homo sapiens
tatgtgcagacacacagaatgacgaacttgcagtcatctgctcagctgatggctggttgagttatgtctctttacgatattcctaagtacgattagaaaggacaggaaatgactccagggctaaaaagttttattctgatttggataagtggcttgagtcaacccggatggtgatacttcacatgacaatatttgagttaaatgaaaagtctttggagaaggaatactaatgacaataggttgcgttaagtgagcctctcccaggtgccacttttcttcgaagctttgtcgcatctatcagttcatttaacaaactgagctacaaattgtgt

SEQ ID NO: 79247 - DNA, 459 bp, Homo sapiens
aaatagtttctgtttaaaactttacttgccaagctataacattctcctttgggaatttatgaagttacaaatgcaattctatgtataattgaaatttctggcaaatatgcattaaaaagaaggtctaatatttggcggtgaattttgagaggaaatgtagaatttttttaaagtatctggtgaggtagatgggattgagtaagatgagtagctctcactcagttacttatcttttacgattttcaggttaagatcttctatttctccacactgatattcaggacattcctctgggctgtcagaggttgctccctcagctcttcaggctttgacttgagtgtgatgcattcagaatttgatacctgtaacttttactgccaaggggcttgaaagaaaatcagtgtagggctcttcccagtttgagtttaggaaaggagagagttttcactaatgccaaat

SEQ ID NO: 79248 - DNA, 229 bp, Homo sapiens
gatacaaaattctgacatgtatagcgtttacattcttgaaaggggtactgtaaaccaaagtgatttcactggtgaaggaatggcataatacagagattgtgactcatgtacccatccaacttgcatataacagctacaatgcactctatgtccaaaccaaattgtgtaaattgtagttaatatgctaggataatattcctcaatttggggtattctcatgagtctgaga

SEQ ID NO: 79249 - DNA, 396 bp, Homo sapiens
ctattacacaaggatctacggctccacctgcatcacagagcttgctagaaggctcaaataattcacacaaagcacgaccaataaactggaaactgcagcagggttgtaggccttattatctctcctcagtgaaatgcttggattttaaactcttcctttcaaacactattctaaagagtaataaaattcccataaggctaacagtctccataattcaatagtctatctggctggtcaatcagaaatatgttacaggttccaataacaaacatcagtaatagtgccattgttctaacggtttctgcaatgccatagtactaaggctatgcaaagcttgtgtttcttcgagtggtgttgaataagcaacatcttatccactgacatccgcatgaaatg

SEQ ID NO: 79250 - DNA, 208 bp, Homo sapiens
ggcagctttaatgcggaacgccggtgcagcagcacggagcacactcccagactacagtggcgcccgcactcacgcccttcaagtgccccacccctcccacacagtggccaaggagccaagccctatccctaagagttgcgtgcagccgcaccacccctggtctccactttctgggcgcaccaactcccccccttgctcgagtcccccg

SEQ ID NO: 79251 - DNA, 753 bp, Homo sapiens
tccctggcttcctgagggcggaagctgtgtgcggcctggtaagggtggtgcccactgggagttcttgaagctggcattaggctccaggtgggcagcctcacagccttgtctctcagggccaggccatggagagactctggacgggctaatgtggtggagaggatgtagcttgtcatatgggtgtgacacattggggtggtatcaccccacttcctggctgtgcaagggttggagttcatgcagacagatctatcttgcaactaccaggatagaaactcaggagtccccagtgaattagtgaaagaaatgtctatttattgagcaccagttaatcagatatttaagttattgcatttaattctatttctctattttggagaatcttgaactgggtccgtgaattagatggtattaatgtatacaatgttaatttcctgatctcagtgggtatgttagggttatgtagggaaaagtccttgtttatgggaaatagacaaagtagcgggggttattgggcataatgccagcagtttactttcaaatggggaggggacatgttctttctactcttcttgcaactgttctgtaaatttgtaattattttaaaagaaacactttatttgaaaaattactagtctcataaaatgagccacacaactctatttttttgtgttctgcagcaattaaatgacattatataacaaggacagaaagtaactgtcctttgaaaaattagaaactcaactatattaa

SEQ ID NO: 79252 - DNA, 425 bp, Homo sapiens
ggtaaaatggattaaaagaaaaaagaatgccatgaggctacccaaactgttagtagaatcttaggttttatatacagaactatagcatctggcaaatgggagttgatagaactgcagtattcacggattgagcagtgtgttgagtccttaagcaccgcatttgaaaagatggctgcgactgtactggatggtgatgaggcgtatgagcaatggaaccagggacatttgggttagaaaacagaaactcagggaaggcgtcagtgcagtttttagttatctcaaggtttcatcccgtggaagaaagaaaacttggtgctttgttatgttcagttcctggggatatatgttatggaacaggggaatggatttcagatcaatgcaagggaagacctatcagtctcccctgctcaaggcccaggagacat

SEQ ID NO: 79253 - DNA, 542 bp, Homo sapiens
acagtggtgagctcttagcttcaccaggctcatcaaagctgctccaggaaggcccaagccagaccagaagacatgcagatcatcaccacagccctggtgtgcttgctgctagctgggatgtggccggaagatgtggacagcaagagcatgcaggtacccttctccagatgttgcttctcatttgcggagcaagagattcccctgagggcaatcctgtgttacagaaataccagctccatctgctccaatgagggcttaatattcaagctgaagagaggcaaagaggcctgcgccttggacacagttggatgggttcagaggcacagaaaaatgctgaggcactgcccgtcaaaaagaaaatgagcagatttctttccattgtgggctctggaaaccacatggcttcacctgtccccgaaactaccagccctacaccattccttctgccctgcttttgctaggtcacagaggatctgcttggtcttgataagctatgttgttgcactttaaacatttaaattatacaatcatcaacccccaac

SEQ ID NO: 79254 - DNA, 294 bp, Homo sapiens
tccggattggcaagatccccctgctttagaaacccttgcttataagcatggggaggtcaggtcttaggcgtgagctgccaattctccttgcttggagtatgtccaacagtttcttaccagacttatcaacctctacatcattcagaataactctttttctcagtctttggctacagaacatcaaggggatcttggtcgagaacaaggagagacttcaaaatgggacagaaattcacaaggagatgtaaaagagaaaaacataagtaaacaaaaaacttctaaagaatacctgtc

SEQ ID NO: 79255 - DNA, 522 bp, Homo sapiens
ctaacaggtatcatcagtttctcatgaaaatcctactgaagtgtttgaagatggagaaaatccaccaagtagtcgatcatcagagagtggattcactgagtttatacaatatcaagcagaccgaactgatgatattgacagagaactgagtgagggccagggggcagctgccatcccaattggtagcacatcctctgagacagaaacagcatccactgtgggatctgaagaaaccatcatccagaccccttccgtagtcactcaggggacagcaacccgaagtaggaagacagcccaaaagactgcaatgcagtgctgcttggagtatgtccaacagtttcttaccagacttatcaacctctacatcattcagaataactctttttctcagtctttggctacagaacatcaaggggatcttggtcgagaacaaggagagacttcaaaatgggacagaaattcacaaggagatgtaaaagagaaaaacataagtaaacaaaaaacttctaaagaatacctgtc

SEQ ID NO: 79256 - DNA, 315 bp, Homo sapiens
gaaaagataaacaaaattaatagaccattagtgagattaaccaagacaacaggaaagaagatcttaataagctcaattagcaatgaaatgggagctactacaactgataccacagaaatacaaaagatcattcaaggctactatgaacaccttcacgtgcacaaactagaaaacatagaggagatggataaattcctggaattttaagaataatacaatggactttggggaatcaggagaaagggtaagagtggggtgagggataaaagactacacattgcatacagtgtacacttcttgggtgatgggtgcgcc

SEQ ID NO: 79257 - DNA, 451 bp, Homo sapiens
ttgttaacttatacagtatgactgtaggtctttcaatttagttgttgtactatattctccttttattataaaatcataaaataattgaatttctgtgctgaaaaggacctcacacattatccagtctaaccccttcactcattaagttcatgaacatagagattgagatttgaatttggccaagtaatagagttagggatagacccaggatactctgactgctagtttgtgcttattctgattctggtgtattacttcactaggcctagaactggtaataagagaacctctattctagttccactctttaaggacatggagcagtgtcatagatgtagtttgtgctcattaattatttgttctaatgaacaaatgaatgagctcttttaaatgatgtgattattggcaatacctgatttatgagtagggcctcttcgtaagaattttcctt

SEQ ID NO: 79258 - DNA, 203 bp, Homo sapiens
tcctgcaaagatgtcctgccagcaaaaccagcagcagtgccagccccctcccagttgtccctcacccaagtgtcccccaaagagcccagcacagtgtctgcctccaccctcttctgactgtgctctaagctccgggggctgtggccccagttctgaaagtggctgctgcctgagccaccacaggcacttcaggtcccatcaat

SEQ ID NO: 79259 - DNA, 478 bp, Homo sapiens
gcaaaagttaaagaagatcactttcaaagaaactcaaataaatacaagtcaaagcctttcctgaatttgaatttgttcattcatgcttacataagggaatgtgctaaccatgaatcattcaaattgaactgctcatgagaaaaagtgtgctggctttactgtcagtttccagagttgcttgactgaaaggaaaagagcattgtctccacataaagaataatcagccacagattttaggcaaagcagggatccaaattggcaaaagttctttcaattcacctgagaacgtggatgcttgtgagaaggtcttgctatctgaatattctgtactgtgactgagtttgcaggctgcaagaacagcccacggaaaagtttaaaaaaatcaatcatttggaaatgttgttcacacaatgccagaatagctaaatgctccaccaatgtggatgctgacatatctgtagctagaggcaattggatg

SEQ ID NO: 79260 - DNA, 349 bp, Homo sapiens
gaaagaaagaaagaaacttcaatattatcagtagagtccaatgttgtgaaacccctcattaactaaatttccatactcttcagtaggtagaaaataattactttttgattcattagaaagcacttaatttttaagatggagatcatgtaattttgaactctaggtcttgcctactcctatataaattctcctctaaacaacagccaaaattgaggccctctttgagcttcaggctggtgccaaatggctctgcttattttccccaaaataaatcttccttccatgtatgatgagaccccctccagtataaagaagacccaaagaaaatcacccaaagaaaaaaggccca

SEQ ID NO: 79261 - DNA, 5276 bp, Homo sapiens
caagagcggaggaccaggaaccagagagagagagagagaaaagagagaggagagacagagcgcttgggggcgaaaggagagagggagggaagggtgggtaaggaggagagagcggtctgctgcaaaccccaggaggagagcttggagcccaagccagaactcgagccctagccggagccgttcacagggaggcggctgccgggaccgtcagccctgcatgatgcatctccggctcttctgcatcctgctcgccgcggtctcaggagccgagggctggggctactacggctgcgacgaggagctggtgggtcccctgtatgcacgctccctgggcgcctcctcctactacagtctccttactgcgccgcgattcgccaggctgcacggcataagcgggtggtcaccacggattggggatccgaatccctggctccagatagacttaatgaagaagcaccggatccgggccgtggccacacagggctcctttaattcttgggactgggtcacacgttacatgctactctacggcgaccgagtggacagctggacaccgttctaccagcgagggcacaactcgaccttctttggtaacgtgaacgagtcggcggtggtgcgccatgacctgcacttccacttcactgcgcgctacatccgcatcgtgcccctggcctggaacccacgcggcaagatcggcctgaggctcggcctctatggctgcccatacaaggccgacatactctatttcgacggcgacgatgccatctcctaccgcttcccgcgaggggtcagccgaagcctgtgggacgtgttcgccttcagcttcaagaccgaggagaaggacggtcttctgctgcacgccgagggcgcccagggcgactacgtgacgctcgagctggagggggcacacctgctgctgcacatgagcctgggcagcagccctatccagccaagaccaggtcacaccaccgtgagcgcaggcggagtcctcaatgaccagcactggcactatgtgcgggtggaccgatttggccgcgatgtaaatttcaccctggacggctatgtgcagcgctttattctcaatggagacttcgagaggctgaacctggacactgagatgttcatcggaggtctggtgggcgccgcgcggaagaacctggcctatcggcataacttccgcggctgcatagaaaacgtaatcttcaaccgcgtcaacatcgcagacctggccgtgcggcgccattcccggatcaccttcgagggtaaggtggcttttcgttgcctggacccggtaccgcaccctatcaacttcggaggccctcacaacttcgttcaagtgcccggtttcccacgccgtggccgcctggcagtctcatttcgcttccgcacctgggacctcaccgggcttctccttttctcccgtctgggggacgggctgggccacgtggagctgacgctcagcgaagggcaggtcaacgtgtccatcgcgcagagcggccgaaagaagcttcagttcgctgctgggtaccgactgaatgacggcttttggcacgaggtgaattttgtggcacaggaaaaccatgcagttatcagcattgatgatgtggaaggggcagaggtcagggtctcatacccgttgctgatccggacagggacctcatatttctttgggggttgtcccaagccagccagtcgatgggactgccactccaaccagacggcattccatggctgcatggagctgctcaaggtggatggtcaactggtcaacctgactctggtggagggccggcggcttggattctatgctgaggtcctctttgatacatgtggcatcactgataggtgcagccctaacatgtgtgagcatgatggacgctgctaccagtcttgggatgacttcatttgctactgcgaactgacgggctacaagggagagacctgccacacacctttgtataaggaatcctgtgaggcttatcggctcagtgggaaaacttctggaaacttcaccattgatcctgatggcagtggccccctgaagccatttgtagtgtactgtgatatccgagagaaccgagcgtggacagttgtgcggcatgacaggctgtggacaactcgagtgacaggttccagcatggagcggccattcctgggggctatccagtactggaatgcatcctgggaggaagtcagtgcccttgccaatgcttcccagcattgtgaacagtggatcgagttctcctgctacaattcccggctgctcaacactgcaggaggctacccctacagcttttggattggccgaaatgaggagcagcacttctactggggaggctcccagcctgggatccagcgctgtgcctgtggtctggaccggagctgtgtggaccctgccttgtactgcaactgtgacgctgaccagccccagtggagaactgacaagggactgctgacctttgtggaccatctgcctgtcactcaggtagtgataggggatacgaaccgctccacttctgaggcccagttcttcctgaggcctctgcgctgctatggcgatcgaaattcctggaacaccatttccttccacaccggggctgcactacgcttccccccaatccgtgccaaccacagcctggatgtctccttctacttcaggacctctgctccctcgggggtcttcctagagaatatggggggcccttactgccagtggcgccgaccttatgtgcgggtggaactcaacacatcccgggatgtggtcttcgcctttgatgtggggaatggggatgagaacctcacagtacactcagacgactttgagttcaatgatgacgagtggcacctggtccgggctgaaatcaacgtgaagcaggcccggctccgagtggatcaccggccctgggttctgcggcctatgccactgcagacctacatctggatggagtatgaccagcccctctatgtgggatctgcagagcttaagagacgcccctttgtgggttgcttgagggccatgcgtctgaacggagtgactctgaacctggagggccgtgccaatgcctctgagggtacctcacccaactgcacaggccactgtgcccaccctcggctcccctgtttccatggaggccgctgcgtggagcgctatagctactacacgtgtgactgtgacctcacggcttttgatgggccatactgcaaccacgatattggtggtttctttgagccgggcacctggatgcgctataacctacagtcagcgctgcgctctgcagccagggagttctcccacatgctgagccggccagtgccaggctatgagcctggctacatcccgggctatgatactccgggctatgtgcctggctaccatggccccgggtaccgcctgcccgactacccccggcctggtcggcctgtgcccggttaccgtgggcctgtctacaacgttacgggagaggaggtctccttcagcttcagcaccagctccgcccctgctgtcctgctctacgtcagttcctttgttcgtgactacatggctgtgctcatcaaggatgatgggacccttcagctgcgatatcagctgggcaccagtccctacgtgtaccagctaaccactcgaccagtgaccgatggccagccccatagcatcaatatcacccgtgtttaccggaacctcttcatccaggtggactacttcccactgacagagcagaagttctcgctgttggtggacagccagttggactcacccaaggccttgtatttagggcgtgtgatggagacaggagtcattgacccggagatccagcgctacaacaccccaggtttctcaggctgcctgtctggtgttcgattcaacaacgtggctcccctcaagacccacttccgaacccctcgacccatgactgctgagctagctgaggcccttcgagttcagggagaactgtccgaatctaattgcggagctatgccacgtcttgtttcagaggtgccacctgagcttgatccctggtatctgcccccagacttcccctactaccatgatgaaggatgggttgccatacttttaggctttttggtggcctttctgctgctggggctggtgggaatgttggtgctcttctatctgcaaaatcatcgctataagggctcctaccataccaatgagcccaaggctgcccacgagtaccatcctggcagcaaacctcccctacccacttcaggccctgcccaggtccccacccctacagcagctcccaaccaagctccagcctcagccccagccccagccccaactccagccccagcccctggcccccgggatcagaacctaccccagatcctggaggagtccaggtctgaatgagtcagaagggcttctgggaccaattccagctcctgacattcccccagtcctgcctctcccccatcctatcagggacatttggctcctcttagctggctctgctcatccagaggatattcccccatcccccccccatcaagtttggtgggcagagctacagatgggacccaagggagtggccgagcctcactgcctaaaccaatgcccttctcatccctgtttccccaggctcctggctgtttatctgccccaaaggagaagcctcatggggttgacataggtcctttctgccatctctgttccagctgctgtcagggattaacaacagagtgtaggggagattaactgcctcccttccaatagacactatcagcagggacagatgtgtgggagtgcagggctgcagagggtatggggggaggaggctgctaaaccctatcccccagcctcccccctgccctgaagatcttccatttgcttccactcagctggaggctcaagagggcttgatggctgtcccctgcccccctccttttgttttgtacacagagaccaagaggcctcagtttagcaccttagtacctccgctgcttcacttgctttagccaaagccataaaaaacctgcaacgtagagaaaataatgcagataccctgactagccagccctctactcctccaaccttttccaagatatgcaatggcctttgtgcctgcccaaaggcttcgccccctccagtgcatgaggaaccctctttcctccgctcagagatgctgcttcatttacccaggaggtcatattctttatatatattttttgttgcaaagtgtctctctagagaaactctatatattattcgaatttttaaattatttgtttatatataaaagaaaagctcaattggc

SEQ ID NO: 79262 - DNA, 4531 bp, Homo sapiens
gtgcatgagccacgcaggcccctagttaagaagcagtggtcgggtccaatcaccttcttagttcatagatgaagaaagtaaggcgcagacacagggagtggcttgtccaggggtcgtgcagctgcacggtggctgagtagggacttgaaccgatggcttctctgatatgcccccctcaaccctctccgactctggagctctgttgggaagctggcaggagccaggtctgtggtccaaaattgcctctcgatactggaaggagagaagcggtcgaatcgcagacggtggagatcagcgagagcaagcgagcagagttccgagggccgactgggttggggccccctccacagatggacgagcttggaggggaagaggtcacgtcatggttggagatctcacccccgccaacaccgaaggagggcggtgaccagggtcttagaccggtgtgaaaactgaattcccagctgaggcagaggcggctcacgggtgttgatgcgtcttcacttttgcccctagggtaaggtggcttttcgttgcctggacccggtaccgcaccctatcaacttcggaggccctcacaacttcgttcaagtgcccggtttcccacgccgtggccgcctggcagtctcatttcgcttccgcacctgggacctcaccgggcttctccttttctcccgtctgggggacgggctgggccacgtggagctgacgctcagcgaagggcaggtcaacgtgtccatcgcgcagagcggccgaaagaagcttcagttcgctgctgggtaccgactgaatgacggcttttggcacgaggtgaattttgtggcacaggaaaaccatgcagttatcagcattgatgatgtggaaggggcagaggtcagggtctcatacccgttgctgatccggacagggacctcatatttctttgggggttgtcccaagccagccagtcgatgggactgccactccaaccagacggcattccatggctgcatggagctgctcaaggtggatggtcaactggtcaacctgactctggtggagggccggcggcttggattctatgctgaggtcctctttgatacatgtggcatcactgataggtgcagccctaacatgtgtgagcatgatggacgctgctaccagtcttgggatgacttcatttgctactgcgaactgacgggctacaagggagagacctgccacacacctttgtataaggaatcctgtgaggcttatcggctcagtgggaaaacttctggaaacttcaccattgatcctgatggcagtggccccctgaagccatttgtagtgtactgtgatatccgagagaaccgagcgtggacagttgtgcggcatgacaggctgtggacaactcgagtgacaggttccagcatggagcggccattcctgggggctatccagtactggaatgcatcctgggaggaagtcagtgcccttgccaatgcttcccagcattgtgaacagtggatcgagttctcctgctacaattcccggctgctcaacactgcaggaggctacccctacagcttttggattggccgaaatgaggagcagcacttctactggggaggctcccagcctgggatccagcgctgtgcctgtggtctggaccggagctgtgtggaccctgccttgtactgcaactgtgacgctgaccagccccagtggagaactgacaagggactgctgacctttgtggaccatctgcctgtcactcaggtagtgataggggatacgaaccgctccacttctgaggcccagttcttcctgaggcctctgcgctgctatggcgatcgaaattcctggaacaccatttccttccacaccggggctgcactacgcttccccccaatccgtgccaaccacagcctggatgtctccttctacttcaggacctctgctccctcgggggtcttcctagagaatatggggggcccttactgccagtggcgccgaccttatgtgcgggtggaactcaacacatcccgggatgtggtcttcgcctttgatgtggggaatggggatgagaacctcacagtacactcagacgactttgagttcaatgatgacgagtggcacctggtccgggctgaaatcaacgtgaagcaggcccggctccgagtggatcaccggccctgggttctgcggcctatgccactgcagacctacatctggatggagtatgaccagcccctctatgtgggatctgcagagcttaagagacgcccctttgtgggttgcttgagggccatgcgtctgaacggagtgactctgaacctggagggccgtgccaatgcctctgagggtacctcacccaactgcacaggccactgtgcccaccctcggctcccctgtttccatggaggccgctgcgtggagcgctatagctactacacgtgtgactgtgacctcacggcttttgatgggccatactgcaaccacgatattggtggtttctttgagccgggcacctggatgcgctataacctacagtcagcgctgcgctctgcagccagggagttctcccacatgctgagccggccagtgccaggctatgagcctggctacatcccgggctatgatactccgggctatgtgcctggctaccatggccccgggtaccgcctgcccgactacccccggcctggtcggcctgtgcccggttaccgtgggcctgtctacaacgttacgggagaggaggtctccttcagcttcagcaccagctccgcccctgctgtcctgctctacgtcagttcctttgttcgtgactacatggctgtgctcatcaaggatgatgggacccttcagctgcgatatcagctgggcaccagtccctacgtgtaccagctaaccactcgaccagtgaccgatggccagccccatagcatcaatatcacccgtgtttaccggaacctcttcatccaggtggactacttcccactgacagagcagaagttctcgctgttggtggacagccagttggactcacccaaggccttgtatttagggcgtgtgatggagacaggagtcattgacccggagatccagcgctacaacaccccaggtttctcaggctgcctgtctggtgttcgattcaacaacgtggctcccctcaagacccacttccgaacccctcgacccatgactgctgagctagctgaggcccttcgagttcagggagaactgtccgaatctaattgcggagctatgccacgtcttgtttcagaggtgccacctgagcttgatccctggtatctgcccccagacttcccctactaccatgatgaaggatgggttgccatacttttaggctttttggtggcctttctgctgctggggctggtgggaatgttggtgctcttctatctgcaaaatcatcgctataagggctcctaccataccaatgagcccaaggctgcccacgagtaccatcctggcagcaaacctcccctacccacttcaggccctgcccaggtccccacccctacagcagctcccaaccaagctccagcctcagccccagccccagccccaactccagccccagcccctggcccccgggatcagaacctaccccagatcctggaggagtccaggtctgaatgagtcagaagggcttctgggaccaattccagctcctgacattcccccagtcctgcctctcccccatcctatcagggacatttggctcctcttagctggctctgctcatccagaggatattcccccatcccccccccatcaagtttggtgggcagagctacagatgggacccaagggagtggccgagcctcactgcctaaaccaatgcccttctcatccctgtttccccaggctcctggctgtttatctgccccaaaggagaagcctcatggggttgacataggtcctttctgccatctctgttccagctgctgtcagggattaacaacagagtgtaggggagattaactgcctcccttccaatagacactatcagcagggacagatgtgtgggagtgcagggctgcagagggtatggggggaggaggctgctaaaccctatcccccagcctcccccctgccctgaagatcttccatttgcttccactcagctggaggctcaagagggcttgatggctgtcccctgcccccctccttttgttttgtacacagagaccaagaggcctcagtttagcaccttagtacctccgctgcttcacttgctttagccaaagccataaaaaacctgcaacgtagagaaaataatgcagataccctgactagccagccctctactcctccaaccttttccaagatatgcaatggcctttgtgcctgcccaaaggcttcgccccctccagtgcatgaggaaccctctttcctccgctcagagatgctgcttcatttacccaggaggtcatattctttatatatattttttgttgcaaagtgtctctctagagaaactctatatattattcgaatttttaaattatttgtttatatataaaagaaaagctcaattggc

SEQ ID NO: 79263 - DNA, 3248 bp, Homo sapiens
  misc_feature (3)..(4): n is a, c, g, or t
  misc_feature (39)..(39): n is a, c, g, or t
aanncccaactccagccaaagctctgtcccctcttgtcngccagagaaccgagcgtggacagttgtgcggcatgacaggctgtggacaactcgagtgacaggttccagcatggagcggccattcctgggggctatccagtactggaatgcatcctgggaggaagtcagtgcccttgccaatgcttcccagcattgtgaacagtggatcgagttctcctgctacaattcccggctgctcaacactgcaggaggctacccctacagcttttggattggccgaaatgaggagcagcacttctactggggaggctcccagcctgggatccagcgctgtgcctgtggtctggaccggagctgtgtggaccctgccttgtactgcaactgtgacgctgaccagccccagtggagaactgacaagggactgctgacctttgtggaccatctgcctgtcactcaggtagtgataggggatacgaaccgctccacttctgaggcccagttcttcctgaggcctctgcgctgctatggcgatcgaaattcctggaacaccatttccttccacaccggggctgcactacgcttccccccaatccgtgccaaccacagcctggatgtctccttctacttcaggacctctgctccctcgggggtcttcctagagaatatggggggcccttactgccagtggcgccgaccttatgtgcgggtggaactcaacacatcccgggatgtggtcttcgcctttgatgtggggaatggggatgagaacctcacagtacactcagacgactttgagttcaatgatgacgagtggcacctggtccgggctgaaatcaacgtgaagcaggcccggctccgagtggatcaccggccctgggttctgcggcctatgccactgcagacctacatctggatggagtatgaccagcccctctatgtgggatctgcagagcttaagagacgcccctttgtgggttgcttgagggccatgcgtctgaacggagtgactctgaacctggagggccgtgccaatgcctctgagggtacctcacccaactgcacaggccactgtgcccaccctcggctcccctgtttccatggaggccgctgcgtggagcgctatagctactacacgtgtgactgtgacctcacggcttttgatgggccatactgcaaccacgatattggtggtttctttgagccgggcacctggatgcgctataacctacagtcagcgctgcgctctgcagccagggagttctcccacatgctgagccggccagtgccaggctatgagcctggctacatcccgggctatgatactccgggctatgtgcctggctaccatggccccgggtaccgcctgcccgactacccccggcctggtcggcctgtgcccggttaccgtgggcctgtctacaacgttacgggagaggaggtctccttcagcttcagcaccagctccgcccctgctgtcctgctctacgtcagttcctttgttcgtgactacatggctgtgctcatcaaggatgatgggacccttcagctgcgatatcagctgggcaccagtccctacgtgtaccagctaaccactcgaccagtgaccgatggccagccccatagcatcaatatcacccgtgtttaccggaacctcttcatccaggtggactacttcccactgacagagcagaagttctcgctgttggtggacagccagttggactcacccaaggccttgtatttagggcgtgtgatggagacaggagtcattgacccggagatccagcgctacaacaccccaggtttctcaggctgcctgtctggtgttcgattcaacaacgtggctcccctcaagacccacttccgaacccctcgacccatgactgctgagctagctgaggcccttcgagttcagggagaactgtccgaatctaattgcggagctatgccacgtcttgtttcagaggtgccacctgagcttgatccctggtatctgcccccagacttcccctactaccatgatgaaggatgggttgccatacttttaggctttttggtggcctttctgctgctggggctggtgggaatgttggtgctcttctatctgcaaaatcatcgctataagggctcctaccataccaatgagcccaaggctgcccacgagtaccatcctggcagcaaacctcccctacccacttcaggccctgcccaggtccccacccctacagcagctcccaaccaagctccagcctcagccccagccccagccccaactccagccccagcccctggcccccgggatcagaacctaccccagatcctggaggagtccaggtctgaatgagtcagaagggcttctgggaccaattccagctcctgacattcccccagtcctgcctctcccccatcctatcagggacatttggctcctcttagctggctctgctcatccagaggatattcccccatcccccccccatcaagtttggtgggcagagctacagatgggacccaagggagtggccgagcctcactgcctaaaccaatgcccttctcatccctgtttccccaggctcctggctgtttatctgccccaaaggagaagcctcatggggttgacataggtcctttctgccatctctgttccagctgctgtcagggattaacaacagagtgtaggggagattaactgcctcccttccaatagacactatcagcagggacagatgtgtgggagtgcagggctgcagagggtatggggggaggaggctgctaaaccctatcccccagcctcccccctgccctgaagatcttccatttgcttccactcagctggaggctcaagagggcttgatggctgtcccctgcccccctccttttgttttgtacacagagaccaagaggcctcagtttagcaccttagtacctccgctgcttcacttgctttagccaaagccataaaaaacctgcaacgtagagaaaataatgcagataccctgactagccagccctctactcctccaaccttttccaagatatgcaatggcctttgtgcctgcccaaaggcttcgccccctccagtgcatgaggaaccctctttcctccgctcagagatgctgcttcatttacccaggaggtcatattctttatatatattttttgttgcaaagtgtctctctagagaaactctatatattattcgaatttttaaattatttgtttatatataaaagaaaagctcaattggc

SEQ ID NO: 79264 - DNA, 4704 bp, Homo sapiens
gtgcatgagccacgcaggcccctagttaagaagcagtggtcgggtccaatcaccttcttagttcatagatgaagaaagtaaggcgcagacacagggagtggcttgtccaggggtcgtgcagctgcacggtggctgagtagggacttgaaccgatggcttctctgatatgcccccctcaaccctctccgactctggagctctgttgggaagctggcaggagccaggtctgtggtccaaaattgcctctcgatactggaaggagagaagcggtcgaatcgcagacggtggagatcagcgagagcaagcgagcagagttccgagggccgactgggttggggccccctccacagatggacgagcttggaggggaagaggtcacgtcatggttggagatctcacccccgccaacaccgaaggagggcggtgaccagggtcttagaccggtgtgaaaactgaattcccagctgaggcagaggcggctcacgggtgttgatgcgtcttcacttttgcccctagggtaaggtggcttttcgttgcctggacccggtaccgcaccctatcaacttcggaggccctcacaacttcgttcaagtgcccggtttcccacgccgtggccgcctggcagtctcatttcgcttccgcacctgggacctcaccgggcttctccttttctcccgtctgggggacgggctgggccacgtggagctgacgctcagcgaagggcaggtcaacgtgtccatcgcgcagagcggccgaaagaagcttcagttcgctgctgggtaccgactgaatgacggcttttggcacgaggtgaattttgtggcacaggaaaaccatgcagttatcagcattgatgatgtggaaggggcagaggtcagggtctcatacccgttgctgatccggacagggacctcatatttctttgggggttgtcccaagccagccagtcgatgggactgccactccaaccagacggcattccatggctgcatggagctgctcaaggtggatggtcaactggtcaacctgactctggtggagggccggcggcttggattctatgctgaggtcctctttgatacatgtggcatcactgataggtgcagccctaacatgtgtgagcatgatggacgctgctaccagtcttgggatgacttcatttgctactgcgaactgacgggctacaagggagagacctgccacacacctttgtataaggaatcctgtgaggcttatcggctcagtgggaaaacttctggaaacttcaccattgatcctgatggcagtggccccctgaagccatttgtagtgtactgtgatatccgagagaaccgagcgtggacagttgtgcggcatgacaggctgtggacaactcgagtgacaggttccagcatggagcggccattcctgggggctatccagtactggaatgcatcctgggaggaagtcagtgcccttgccaatgcttcccagcattgtgaacagtggatcgagttctcctgctacaattcccggctgctcaacactgcaggaggctacccctacagcttttggattggccgaaatgaggagcagcacttctactggggaggctcccagcctgggatccagcgctgtgcctgtggtctggaccggagctgtgtggaccctgccttgtactgcaactgtgacgctgaccagccccagtggagaactgacaagggactgctgacctttgtggaccatctgcctgtcactcaggtagtgataggggatacgaaccgctccacttctgaggcccagttcttcctgaggcctctgcgctgctatggcgatcgaaattcctggaacaccatttccttccacaccggggctgcactacgcttccccccaatccgtgccaaccacagcctggatgtctccttctacttcaggacctctgctccctcgggggtcttcctagagaatatggggggcccttactgccagtggcgccgaccttatgtgcgggtggaactcaacacatcccgggatgtggtcttcgcctttgatgtggggaatggggatgagaacctcacagtacactcagacgactttgagttcaatgatgacgagtggcacctggtccgggctgaaatcaacgtgaagcaggcccggctccgagtggatcaccggccctgggttctgcggcctatgccactgcagacctacatctggatggagtatgaccagcccctctatgtgggatctgcagagcttaagagacgcccctttgtgggttgcttgagggccatgcgtctgaacggagtgactctgaacctggagggccgtgccaatgcctctgagggtacctcacccaactgcacaggccactgtgcccaccctcggctcccctgtttccatggaggccgctgcgtggagcgctatagctactacacgtgtgactgtgacctcacggcttttgatgggccatactgcaaccacgatattggtggtttctttgagccgggcacctggatgcgctataacctacagtcagcgctgcgctctgcagccagggagttctcccacatgctgagccggccagtgccaggctatgagcctggctacatcccgggctatgatactccgggctatgtgcctggctaccatggccccgggtaccgcctgcccgactacccccggcctggtcggcctgtgcccggttaccgtgggcctgtctacaacgttacgggagaggaggtctccttcagcttcagcaccagctccgcccctgctgtcctgctctacgtcagttcctttgttcgtgactacatggctgtgctcatcaaggatgatgggacccttcagctgcgatatcagctgggcaccagtccctacgtgtaccagctaaccactcgaccagtgaccgatggccagccccatagcatcaatatcacccgtgtttaccggaacctcttcatccaggtggactacttcccactgacagagcagaagttctcgctgttggtggacagccagttggactcacccaaggccttgtatttagggcgtgtgatggagacaggagtcattgacccggagatccagcgctacaacaccccaggtttctcaggctgcctgtctggtgttcgattcaacaacgtggctcccctcaagacccacttccgaacccctcgacccatgactgctgagctagctgaggcccttcgagttcagggagaactgtccgaatctaattgcggagctatgccacgtcttgtttcagaggtgccacctgagcttgatccctggtatctgcccccagacttcccctactaccatgatgaaggatgggttgccatacttttaggctttttggtggcctttctgctgctggggctggtgggaatgttggtgctcttctatctgcaaaatcatcgctataagggctcctaccataccaatgagcccaaggctgcccacgagtaccatcctggcagcaaacctcccctacccacttcaggccctgcccaggtccccacccctacagcagctcccaaccaagctccagcctcagccccagccccagccccaactccagccccagcccctggcccccgggatcagaacctaccccagatcctggaggagtccaggtctgaatgagtcagaagggcttctgggaccaattccagctcctgacattcccccagtcctgcctctcccccatcctatcagggacatttggctcctcttagctggctctgctcatccagaggatattcccccatcccccccccatcaagtttggtgggcagagctacagatgggacccaagggagtggccgagcctcactgcctaaaccaatgcccttctcatccctgtttccccaggctcctggctgtttatctgccccaaaggagaagcctcatggggttgacataggtcctttctgccatctctgttccagctgctgtcagggattaacaacagagtgtaggggagattaactgcctcccttccaatagacactatcagcagggacagatgtgtgggagtgcagggctgcagagggtatggggggaggaggctgctaaaccctatcccccagcctcccccctgccctgaagatcttccatttgcttccactcagctggaggctcaagagggcttgatggctgtcccctgcccccctccttttgttttgtacacagagaccaagaggcctcagtttagcaccttagtacctccgctgcttcacttgctttagccaaagccataaaaaacctgcaacgtagagaaaataatgcagataccctgactagccagccctctactcctccaaccttttccaagatatgcaatggcctttgtgcctgcccaaaggcttcgccccctccagtgcatgaggaaccctctttcctccgctcagagatgctgcttcatttacccaggaggtcatattctttatatatattttttgttgcaaagtgtctctctagagaaactctatatattattcgaatttttaaattatttgtttatatataaaagaaaagctcaattggctgtgctgtcctgtgctgtgctgtgcccacagtctgtagtttgcctttcctgtgttggaagtgtcgtgagtcctgctggtcacccaccagcctggtccggcctccactctgaagcagggttgagcctgctgtgctctcagacgcggagccgttccaataaagcagagtggcaga

SEQ ID NO: 79265 - DNA, 4321 bp, Homo sapiens
gtgcatgagccacgcaggcccctagttaagaagcagtggtcgggtccaatcaccttcttagttcatagatgaagaaagtaaggcgcagacacagggagtggcttgtccaggggtcgtgcagctgcacggtggctgagtagggacttgaaccgatggcttctctgatatgcccccctcaaccctctccgactctggagctctgttgggaagctggcaggagccaggtctgtggtccaaaattgcctctcgatactggaaggagagaagcggtcgaatcgcagacggtggagatcagcgagagcaagcgagcagagttccgagggccgactgggttggggccccctccacagatggacgagcttggaggggaagaggtcacgtcatggttggagatctcacccccgccaacaccgaaggagggcggtgaccagggtcttagaccggtgtgaaaactgaattcccagctgaggcagaggcggctcacgggtgttgatgcgtcttcacttttgcccctagggtaaggtggcttttcgttgcctggacccggtaccgcaccctatcaacttcggaggccctcacaacttcgttcaagtgcccggtttcccacgccgtggccgcctggcagtctcatttcgcttccgcacctgggacctcaccgggcttctccttttctcccgtctgggggacgggctgggccacgtggagctgacgctcagcgaagggcaggtcaacgtgtccatcgcgcagagcggccgaaagaagcttcagttcgctgctgggtaccgactgaatgacggcttttggcacgaggtgaattttgtggcacaggaaaaccatgcagttatcagcattgatgatgtggaaggggcagaggtcagggtctcatacccgttgctgatccggacagggacctcatatttctttgggggttgtcccaagccagccagtcgatgggactgccactccaaccagacggcattccatggctgcatggagctgctcaaggtggatggtcaactggtcaacctgactctggtggagggccggcggcttggattctatgctgaggtcctctttgatacatgtggcatcactgataggtgcagccctaacatgtgtgagcatgatggacgctgctaccagtcttgggatgacttcatttgctactgcgaactgacgggctacaagggagagacctgccacacacctttgtataaggaatcctgtgaggcttatcggctcagtgggaaaacttctggaaacttcaccattgatcctgatggcagtggccccctgaagccatttgtagtgtactgtgatatccgagagaaccgagcgtggacagttgtgcggcatgacaggctgtggacaactcgagtgacaggttccagcatggagcggccattcctgggggctatccagtactggaatgcatcctgggaggaagtcagtgcccttgccaatgcttcccagcattgtgaacagtggatcgagttctcctgctacaattcccggctgctcaacactgcaggaggctacccctacagcttttggattggccgaaatgaggagcagcacttctactggggaggctcccagcctgggatccagcgctgtgcctgtggtctggaccggagctgtgtggaccctgccttgtactgcaactgtgacgctgaccagccccagtggagaactgacaagggactgctgacctttgtggaccatctgcctgtcactcaggtagtgataggggatacgaaccgctccacttctgaggcccagttcttcctgaggcctctgcgctgctatggcgatcgaaattcctggaacaccatttccttccacaccggggctgcactacgcttccccccaatccgtgccaaccacagcctggatgtctccttctacttcaggacctctgctccctcgggggtcttcctagagaatatggggggcccttactgccagtggcgccgaccttatgtgcgggtggaactcaacacatcccgggatgtggtcttcgcctttgatgtggggaatggggatgagaacctcacagtacactcagacgactttgagttcaatgatgacgagtggcacctggtccgggctgaaatcaacgtgaagcaggcccggctccgagtggatcaccggccctgggttctgcggcctatgccactgcagacctacatctggatggagtatgaccagcccctctatgtgggatctgcagagcttaagagacgcccctttgtgggttgcttgagggccatgcgtctgaacggagtgactctgaacctggagggccgtgccaatgcctctgagggtacctcacccaactgcacaggccactgtgcccaccctcggctcccctgtttccatggaggccgctgcgtggagcgctatagctactacacgtgtgactgtgacctcacggcttttgatgggccatactgcaaccacgatattggtggtttctttgagccgggcacctggatgcgctataacctacagtcagcgctgcgctctgcagccagggagttctcccacatgctgagccggccagtgccaggctatgagcctggctacatcccgggctatgatactccgggctatgtgcctggctaccatggccccgggtaccgcctgcccgactacccccggcctggtcggcctgtgcccggttaccgtgggcctgtctacaacgttacgggagaggaggtctccttcagcttcagcaccagctccgcccctgctgtcctgctctacgtcagttcctttgttcgtgactacatggctgtgctcatcaaggatgatgggacccttcagctgcgatatcagctgggcaccagtccctacgtgtaccagctaaccactcgaccagtgaccgatggccagccccatagcatcaatatcacccgtgtttaccggaacctcttcatccaggtggactacttcccactgacagagcagaagttctcgctgttggtggacagccagttggactcacccaaggccttgtatttagggcgtgtgatgggtaagctgcgggtgcggacgcgttttaggcaaggagctgtggcatatgttcctggatctgaattgcccctttttttcttttcagttttggtggcctttctgctgctggggctggtgggaatgttggtgctcttctatctgcaaaatcatcgctataagggctcctaccataccaatgagcccaaggctgcccacgagtaccatcctggcagcaaacctcccctacccacttcaggccctgcccaggtccccacccctacagcagctcccaaccaagctccagcctcagccccagccccagccccaactccagccccagcccctggcccccgggatcagaacctaccccagatcctggaggagtccaggtctgaatgagtcagaagggcttctgggaccaattccagctcctgacattcccccagtcctgcctctcccccatcctatcagggacatttggctcctcttagctggctctgctcatccagaggatattcccccatcccccccccatcaagtttggtgggcagagctacagatgggacccaagggagtggccgagcctcactgcctaaaccaatgcccttctcatccctgtttccccaggctcctggctgtttatctgccccaaaggagaagcctcatggggttgacataggtcctttctgccatctctgttccagctgctgtcagggattaacaacagagtgtaggggagattaactgcctcccttccaatagacactatcagcagggacagatgtgtgggagtgcagggctgcagagggtatggggggaggaggctgctaaaccctatcccccagcctcccccctgccctgaagatcttccatttgcttccactcagctggaggctcaagagggcttgatggctgtcccctgcccccctccttttgttttgtacacagagaccaagaggcctcagtttagcaccttagtacctccgctgcttcacttgctttagccaaagccataaaaaacctgcaacgtagagaaaataatgcagataccctgactagccagccctctactcctccaaccttttccaagatatgcaatggcctttgtgcctgcccaaaggcttcgccccctccagtgcatgaggaaccctctttcctccgctcagagatgctgcttcatttacccaggaggtcatattctttatatatattttttgttgcaaagtgtctctctagagaaactctatatattattcgaatttttaaattatttgtttatatataaaagaaaagctcaattggc

SEQ ID NO: 79266 - DNA, 1069 bp, Homo sapiens
agcggataagtgtatactggtgaccgatactaggattaaggttttgccaggcttaaggctggactttggagctggccaaggggtggggtttgtggctagggctggggtttgtggctggggctgggttttgtggcagggatccaagcaggagctggtgcccctgactgatgctaaggctggacatggagctggtgatggtgctagcactggctgaggttgggtgcaaggcctgtatttggggatggtgcaggttttgggggccgagttggatttaggctagggttggagctggattggtgtcttgggttgacttaggttgtggaagatgctgaggtttaggattgagtttgggaaagtactaaaccaatgcccttctcatccctgtttccccaggctcctggctgtttatctgccccaaaggagaagcctcatggggttgacataggtcctttctgccatctctgttccagctgctgtcagggattaacaacagagtgtaggggagattaactgcctcccttccaatagacactatcagcagggacagatgtgtgggagtgcagggctgcagagggtatggggggaggaggctgctaaaccctatcccccagcctcccccctgccctgaagatcttccatttgcttccactcagctggaggctcaagagggcttgatggctgtcccctgcccccctccttttgttttgtacacagagaccaagaggcctcagtttagcaccttagtacctccgctgcttcacttgctttagccaaagccataaaaaacctgcaacgtagagaaaataatgcagataccctgactagccagccctctactcctccaaccttttccaagatatgcaatggcctttgtgcctgcccaaaggcttcgccccctccagtgcatgaggaaccctctttcctccgctcagagatgctgcttcatttacccaggaggtcatattctttatatatattttttgttgcaaagtgtctctctagagaaactctatatattattcgaatttttaaattatttgtttatatataaaagaaaagctcaattggc

SEQ ID NO: 79267 - DNA, 472 bp, Homo sapiens
tgccacctgagcttgatccctggtatctgcccccaggtacattcccaggacacagaggacagaagggagggatgacacggaagggaatgattcttaacatggaggaggcatctcctaactggtgctttctcctctccagacttcccctactaccatgatgaaggatgggttgccatacttttaggctgtgagtagcactgatcactaagctgacctcccaagactaccctctgactgtcagcatcctttccctgcccctgatccccaaggctgcaggatggcaaaggcactagatgcacaatggcacaaaggatgatgagacaggctatgctgaaggtgccatataactgggcagagatttttagatgtttgaggatgagacaggctatgctgaaggtgacatataactgggcagagatttttagatgtttgaggatgctacagatttttaaataaaatattaaaatgagac

SEQ ID NO: 79268 - DNA, 3706 bp, Homo sapiens
cgcaccgataccggcgcgggcacctggggagaaatggatggagaagggacctggctggaaagcctttgccccgctgctctgctccgcccataagaggacccctgaaatgtcccgtgcagtttgttcaagtcccctgtgtgatgaaatgtgcctctcgccttacccgtgtgagaatacctgtggtgtggcagcgagtattttggtatttgacctgtccaaagacgacttgatacctctataatgtaacagaaaaggtcagaaaatattaagcaagtagaagtgtggagcatattaagcaagatgaacatctcgggaagcagctgtggaagccctaactctgcagatacatctagtgactttaaggacctttggacaaaactaaaagaatgtcatgatagagaagtacaaggtttacaagtaaaagtaaccaagctaaaacaggaacgaatcttagatgcacaaagactagaagaattcttcaccaaaaatcaacagctgagggaacagcagaaagtccttcatgaaaccattaaagttttagaagatcggttaagagcaggcttatgtgatcgctgtgcagtaactgaagaacatatgcggaaaaaacagcaagagtttgaaaatatccggcagcagaatcttaaacttattacagaacttatgaatgaaaggaatactctacaggaagaaaataaaaagctttctgaacaactccagcagaaaattgagaatgatcaacagcatcaagcagctgagcttgaatgtgaggaagacgttattccagattcaccgataacagccttctcattttctggcgttaaccggctacgaagaaaggagaacccccatgtccgatacatagaacaaacacatactaaattggagcactctgtgtgtgcaaatgaaatgagaaaagtttccaagtcttcaactcatccacaacataatcctaatgaaaatgaaattctagtagctgacacttatgaccaaagtcaatctccaatggccaaagcacatggaacaagcagctatacccctgataagtcatcttttaatttagctacagttgttgctgaaacacttggacttggtgttcaagaagaatctgaaactcaaggtcccatgagcccccttggtgatgagctctaccactgtctggaaggaaatcacaagaaacagccttttgaggaatctacaagaaatactgaagatagtttaagattttcagattctacttcaaagactcctcctcaagaagaattacctactcgagtgtcatctcctgtatttggagctacctctagtatcaaaagtggtttagatttgaatacaagtttgtccccttctcttttacagcctgggaaaaaaaaacatctgaaaacactcccttttagcaacacttgtatatctagattagaaaaaactagatcaaaatctgaagatagtgcccttttcacacatcacagtcttgggtctgaagtgaacaagatcattatccagtcatctaataaacagatacttataaataaaaatataagtgaatccctaggtgaacagaataggactgagtacggtaaagattctaacactgataaacatttggagcccctgaaatcattgggaggccgaacatccaaaaggaagaaaactgaggaagaaagtgaacatgaagtaagctgcccccaagcttcttttgataaagaaaatgctttcccttttccaatggataatcagttttccatgaatggagactgtgtgatggataaacctctggatctgtctgatcgattttcagctattcagcgtcaagagaaaagccaaggaagtgagacttctaaaaacaaatttaggcaagtgactctttatgaggctttgaagaccattccaaagggcttttcctcaagccgtaaggcctcagatggcaactgcacgttgcccaaagattccccaggggagccctgttcacaggaatgcatcatccttcagcccttgaataaatgctctccagacaataaaccatcattacaaataaaagaagaaaatgctgtctttaaaattcctctacgtccacgtgaaagtttggagactgagaatgttttagatgacataaagagtgctggttctcatgagccaataaaaatacaaaccaggtcagaccatggaggatgtgaacttgcatcagttcttcagttaaatccatgtagaactggtaaaataaagtctctacaaaacaaccaagatgtatcctttgaaaatatccagtggagtatagatccgggagcagacctttctcagtataaaatggatgttactgtaatagatacaaaggatggcagtcagtcaaaattaggaggagagacagtggacatggactgtacattggttagtgaaaccgttctcttaaaaatgaagaagcaagagcagaagggagaaaaaagttcaaatgaagaaagaaaaatgaatgatagcttggaagatatgtttgatcggacaacacatgaagagtatgaatcctgtttggcagacagtttctcccaagcagcagatgaagaggaggaattgtctactgccacaaagaaactacacactcatggtgataaacaagacaaagtcaagcagaaagcgtttgtggagccgtattttaaaggtgatgaaagagagactagcttgcaaaattttcctcatattgaggtggttcggaaaaaagaggagagaagaaaactgcttgggcacacgtgtaaggaatgtgaaatttattatgcagatatgccagcagaagaaagagaaaagaaattggcttcctgctcaagacaccgattccgctacattccacccaacacaccagagaatttttgggaagttggttttccttccactcagacttgtatggaaagaggttatattaaggaagatcttgatccttgtcctcgtccaaaaagacgtcagccttacaacgcaatattttctccaaaaggcaaggagcagaagacatagacgttgaaacagaaacagaaggatgaaggacagttttttccttcttagttatttatagttaaagttggtactaaacattgatttttttgatcttctgtaaatggatttataaatcagttttctattgaaaatgtttgtgatattttgcttttgcacctttaaaacaataaggcgctttcattttgcactctaacttaagagtttttactttatgtagtgatacctaatacaattttgaaaatacaaaaaaaaaaaaaaaaaaaaaaaaaaaaaaaaaaaaaaaaaaaaaggggggggcggcaaaaaatccccccggggggccccatttcctcccccaggtttttttttgatcaaaagcggggcccctatatagatgagagcctccgtatttataacagcacaaaggcaacacgaggcgcggctgttataaacaacccggtcgtcatgcggcggaaacactgctgcagagcgtggaacacttgtgggagaaaagaaccccatcaactctcgggggggcggcagcaacattatggtgggaccaaactccacccttacgaagaataattttaacgagctcagagggaacaactattgtaacacttcaagcgtgtatccatcggtttggttaccacaacaacggagataaatttacctagcgctttaaagaattctggcactacaggaaatatatttttcgcaaacattttttcaa

SEQ ID NO: 79269 - DNA, 370 bp, Homo sapiens
gagggagggagagagagggagatgaagaaagaaaaatgaatgatagcttggaagatatgtttgatcggacaacacatgaagagtatgaatcctgtttggcagacagtttctcccaagcagcagatgaagaggaggaattgtctactgccacaaagaaactacacactcatggtgataaacaagacaaagtcaagcagaaagcgtttgtggagccgtattttaaaggtgatgaaagagagactagcttgcaaaattttcctcatattgaggtggttcggaaaaaagaggagagaagaaaactgcttgggcacacgtgtaaggaatgtgaaattaattgtaagtactaatgtagatactaatttttttttaa

SEQ ID NO: 79270 - DNA, 3426 bp, Homo sapiens
cgcaccgataccggcgcgggcacctggggagaaatggatggagaagggacctggctggaaagcctttgccccgctgctctgctccgcccataagaggacccctgaaatgtcccgtgcagtttgttcaagtcccctgtgtgatgaaatgtgcctctcgccttacccgtgtgagaatacctgtggtgtggcagcgagtattttggtgagcacctgcagtgtagtggtttatactaaggaatacacacaaattacaggcctttgagcccagaatgcaacttgggaggtaagacgtgacgttctgagagattgaaaaatgtacattgtcgtcgtgcctcgaataacggttcattgcagagagagatgctaacaaaaagtgccgggcatgcgggtatttgacctgtccaaagacgacttgatacctctataatgtaacagaaaaggtcagaaaatattaagcaagtagaagtgtggagcatattaagcaagatgaacatctcgggaagcagctgtggaagccctaactctgcagatacatctagtgactttaaggacctttggacaaaactaaaagaatgtcatgatagagaagtacaaggtttacaagtaaaagtaaccaagctaaaacaggaacgaatcttagatgcacaaagactagaagaattcttcaccaaaaatcaacagctgagggaacagcagaaagtccttcatgaaaccattaaagttttagaagatcggttaagagcaggcttatgtgatcgctgtgcagtaactgaagaacatatgcggaaaaaacagcaagagtttgaaaatatccggcagcagaatcttaaacttattacagaacttatgaatgaaaggaatactctacaggaagaaaataaaaagctttctgaacaactccagcagaaaattgagaatgatcaacagcatcaagcagctgagcttgaatgtgaggaagacgttattccagattcaccgataacagccttctcattttctggcgttaaccggctacgaagaaaggagaacccccatgtccgatacatagaacaaacacatactaaattggagcactctgtgtgtgcaaatgaaatgagaaaagtttccaagtcttcaactcatccacaacataatcctaatgaaaatgaaattctagtagctgacacttatgaccaaagtcaatctccaatggccaaagcacatggaacaagcagctatacccctgataagtcatcttttaatttagctacagttgttgctgaaacacttggacttggtgttcaagaagaatctgaaactcaaggtcccatgagcccccttggtgatgagctctaccactgtctggaaggaaatcacaagaaacagccttttgaggaatctacaagaaatactgaagatagtttaagattttcagattctacttcaaagactcctcctcaagaagaattacctactcgagtgtcatctcctgtatttggagctacctctagtatcaaaagtggtttagatttgaatacaagtttgtccccttctcttttacagcctgggaaaaaaaaacatctgaaaacactcccttttagcaacacttgtatatctagattagaaaaaactagatcaaaatctgaagatagtgcccttttcacacatcacagtcttgggtctgaagtgaacaagatcattatccagtcatctaataaacagatacttataaataaaaatataagtgaatccctaggtgaacagaataggactgagtacggtaaagattctaacactgataaacatttggagcccctgaaatcattgggaggccgaacatccaaaaggaagaaaactgaggaagaaagtgaacatgaagtaagctgcccccaagcttcttttgataaagaaaatgctttcccttttccaatggataatcagttttccatgaatggagactgtgtgatggataaacctctggatctgtctgatcgattttcagctattcagcgtcaagagaaaagccaaggaagtgagacttctaaaaacaaatttaggcaagtgactctttatgaggctttgaagaccattccaaagggcttttcctcaagccgtaaggcctcagatggcaactgcacgttgcccaaagattccccaggggagccctgttcacaggaatgcatcatccttcagcccttgaataaatgctctccagacaataaaccatcattacaaataaaagaagaaaatgctgtctttaaaattcctctacgtccacgtgaaagtttggagactgagaatgttttagatgacataaagagtgctggttctcatgagccaataaaaatacaaaccaggtcagaccatggaggatgtgaacttgcatcagttcttcagttaaatccatgtagaactggtaaaataaagtctctacaaaacaaccaagatgtatcctttgaaaatatccagtggagtatagatccgggagcagacctttctcagtataaaatggatgttactgtaatagatacaaaggatggcagtcagtcaaaattaggaggagagacagtggacatggactgtacattggttagtgaaaccgttctcttaaaaatgaagaagcaagagcagaagggagaaaaaagttcaaatgaagaaagaaaaatgaatgatagcttggaagatatgtttgatcggacaacacatgaagagtatgaatcctgtttggcagacagtttctcccaagcagcagatgaagaggaggaattgtctactgccacaaagaaactacacactcatggtgataaacaagacaaagtcaagcagaaagcgtttgtggagccgtattttaaaggtgatgaaagagagactagcttgcaaaattttcctcatattgaggtggttcggaaaaaagaggagagaagaaaactgcttgggcacacgtgtaaggaatgtgaaatttattatgcagatatgccagcagaagaaagagaaaagaaattggcttcctgctcaagacaccgattccgctacattccacccaacacaccagagaatttttgggaagttggttttccttccactcagacttgtatggaaagaggttatattaaggaagatcttgatccttgtcctcgtccaaaaagacgtcagccttacaacgcaatattttctccaaaaggcaaggagcagaagacatagacgttgaaacagaaacagaaggatgaaggacagttttttccttcttagttatttatagttaaagttggtactaaacattgatttttttgatcttctgtaaatggatttataaatcagttttctattgaaaatgtttgtgatattttgcttttgcacctttaaaacaataaggcgctttcattttgcactctaacttaagagtttttactttatgtagtgatacctaatacaattttgaaaatacaa

SEQ ID NO: 79271 - DNA, 3356 bp, Homo sapiens
cgcaccgataccggcgcgggcacctggggagaaatggatggagaagggacctggctggaaagcctttgccccgctgctctgctccgcccataagaggacccctgaaatgtcccgtgcagtttgttcaagtcccctgtgtgatgaaatgtgcctctcgccttacccgtgtgagaatacctgtggtgtggcagcgagtattttggtgagcacctgcagtgtagtggtttatactaaggaatacacacaaattacaggcctttgagcccagaatgcaacttgggaggtaagacgtgacgttctgagagattgaaaaatgtacattgtcgtcgtgcctcgaataacggttcattgcagagagagatgctaacaaaaagtgccgggcatgcgggtatttgacctgtccaaagacgacttgatacctctataatgtaacagaaaaggtcagaaaatattaagcaagtagaagtgtggagcatattaagcaagatgaacatctcgggaagcagctgtggaagccctaactctgcagatacatctagtgactttaaggacctttggacaaaactaaaagaatgtcatgatagagaagtacaaggtttacaagtaaaagtaaccaagctaaaacaggaacgaatcttagatgcacaaagactagaagaattcttcaccaaaaatcaacagctgagggaacagcagaaagtccttcatgaaaccattaaagttttagaagatcggttaagagcaggcttatgtgatcgctgtgcagtaactgaagaacatatgcggaaaaaacagcaagagtttgaaaatatccggcagcagaatcttaaacttattacagaacttatgaatgaaaggaatactctacaggaagaaaataaaaagctttctgaacaactccagcagaaaattgagaatgatcaacagcatcaagcagctgagcttgaatgtgaggaagacgttattccagattcaccgataacagccttctcattttctggcgttaaccggctacgaagaaaggagaacccccatgtccgatacatagaacaaacacatactaaattggagcactctgtgtgtgcaaatgaaatgagaaaagtttccaagtcttcaactcatccacaacataatcctaatgaaaatgaaattctagtagctgacacttatgaccaaagtcaatctccaatggccaaagcacatggaacaagcagctatacccctgataagtcatcttttaatttagctacagttgttgctgaaacacttggacttggtgttcaagaagaatctgaaactcaaggtcccatgagcccccttggtgatgagctctaccactgtctggaaggaaatcacaagaaacagccttttgaggaatctacaagaaatactgaagatagtttaagattttcagattctacttcaaagactcctcctcaagaagaattacctactcgagtgtcatctcctgtatttggagctacctctagtatcaaaagtggtttagatttgaatacaagtttgtccccttctcttttacagcctgggaaaaaaaaacatctgaaaacactcccttttagcaacacttgtatatctagattagaaaaaactagatcaaaatctgaagatagtgcccttttcacacatcacagtcttgggtctgaagtgaacaagatcattatccagtcatctaataaacagatacttataaataaaaatataagtgaatccctaggtgaacagaataggactgagtacggtaaagattctaacactgataaacatttggagcccctgaaatcattgggaggccgaacatccaaaaggaagaaaactgaggaagaaagtgaacatgaagtaagctgcccccaagcttcttttgataaagaaaatgctttcccttttccaatggataatcagttttccatgaatggagactgtgtgatggataaacctctggatctgtctgatcgattttcagctattcagcgtcaagagaaaagccaaggaagtgagacttctaaaaacaaatttaggcaagtgactctttatgaggctttgaagaccattccaaagggcttttcctcaagccgtaaggcctcagatggcaactgcacgttgcccaaagattccccaggggagccctgttcacaggaatgcatcatccttcagcccttgaataaatgctctccagacaataaaccatcattacaaataaaagaagaaaatgctgtctttaaaattcctctacgtccacgtgaaagtttggagactgagaatgttttagatgacataaagagtgctggttctcatgagccaataaaaatacaaaccaggtcagaccatggaggatgtgaacttgcatcagttcttcagttaaatccatgtagaactggtaaaataaagtctctacaaaacaaccaagatgtatcctttgaaaatatccagtggagtatagatccgggagcagacctttctcagtataaaatggatgttactgtaatagatacaaaggatggcagtcagtcaaaattaggaggagagacagtggacatggactgtacattggttagtgaaaccgttctcttaaaaatgaagaagcaagagcagaagggagaaaaaagttcaaatgaagaaagaaaaatgaatgatagcttggaagatatgtttgatcggacaacacatgaagagtatgaatcctgtttggcagacagtttctcccaagcagcagatgaagaggaggaattgtctactgccacaaagaaactacacaagagactagcttgcaaaattttcctcatattgaggtggttcggaaaaaagaggagagaagaaaactgcttgggcacacgtgtaaggaatgtgaaatttattatgcagatatgccagcagaagaaagagaaaagaaattggcttcctgctcaagacaccgattccgctacattccacccaacacaccagagaatttttgggaagttggttttccttccactcagacttgtatggaaagaggttatattaaggaagatcttgatccttgtcctcgtccaaaaagacgtcagccttacaacgcaatattttctccaaaaggcaaggagcagaagacatagacgttgaaacagaaacagaaggatgaaggacagttttttccttcttagttatttatagttaaagttggtactaaacattgatttttttgatcttctgtaaatggatttataaatcagttttctattgaaaatgtttgtgatattttgcttttgcacctttaaaacaataaggcgctttcattttgcactctaacttaagagtttttactttatgtagtgatacctaatacaattttgaaaatacaa

SEQ ID NO: 79272 - DNA, 3309 bp, Homo sapiens
tagcagtagtgtctagcaaaccagtgtggtccagagaggtggtgttcactgatttaatgtttaagttgatagattcagggaaagtgagcagtgaaacaatttctgcttttcaccaagagcagaggttttctaaataagtcgaaggggaaaacccttggatgcttcatagtcctacttctaggcagttctgcatgaatttctggtaatccaggtaaacaggatattgccgtagaagaggttgatggtagcttgaaccagggtggacacaaaggtatttgacctgtccaaagacgacttgatacctctataatgtaacagaaaaggtcagaaaatattaagcaagtagaagtgtggagcatattaagcaagatgaacatctcgggaagcagctgtggaagccctaactctgcagatacatctagtgactttaaggacctttggacaaaactaaaagaatgtcatgatagagaagtacaaggtttacaagtaaaagtaaccaagctaaaacaggaacgaatcttagatgcacaaagactagaagaattcttcaccaaaaatcaacagctgagggaacagcagaaagtccttcatgaaaccattaaagttttagaagatcggttaagagcaggcttatgtgatcgctgtgcagtaactgaagaacatatgcggaaaaaacagcaagagtttgaaaatatccggcagcagaatcttaaacttattacagaacttatgaatgaaaggaatactctacaggaagaaaataaaaagctttctgaacaactccagcagaaaattgagaatgatcaacagcatcaagcagctgagcttgaatgtgaggaagacgttattccagattcaccgataacagccttctcattttctggcgttaaccggctacgaagaaaggagaacccccatgtccgatacatagaacaaacacatactaaattggagcactctgtgtgtgcaaatgaaatgagaaaagtttccaagtcttcaactcatccacaacataatcctaatgaaaatgaaattctagtagctgacacttatgaccaaagtcaatctccaatggccaaagcacatggaacaagcagctatacccctgataagtcatcttttaatttagctacagttgttgctgaaacacttggacttggtgttcaagaagaatctgaaactcaaggtcccatgagcccccttggtgatgagctctaccactgtctggaaggaaatcacaagaaacagccttttgaggaatctacaagaaatactgaagatagtttaagattttcagattctacttcaaagactcctcctcaagaagaattacctactcgagtgtcatctcctgtatttggagctacctctagtatcaaaagtggtttagatttgaatacaagtttgtccccttctcttttacagcctgggaaaaaaaaacatctgaaaacactcccttttagcaacacttgtatatctagattagaaaaaactagatcaaaatctgaagatagtgcccttttcacacatcacagtcttgggtctgaagtgaacaagatcattatccagtcatctaataaacagatacttataaataaaaatataagtgaatccctaggtgaacagaataggactgagtacggtaaagattctaacactgataaacatttggagcccctgaaatcattgggaggccgaacatccaaaaggaagaaaactgaggaagaaagtgaacatgaagtaagctgcccccaagcttcttttgataaagaaaatgctttcccttttccaatggataatcagttttccatgaatggagactgtgtgatggataaacctctggatctgtctgatcgattttcagctattcagcgtcaagagaaaagccaaggaagtgagacttctaaaaacaaatttaggcaagtgactctttatgaggctttgaagaccattccaaagggcttttcctcaagccgtaaggcctcagatggcaactgcacgttgcccaaagattccccaggggagccctgttcacaggaatgcatcatccttcagcccttgaataaatgctctccagacaataaaccatcattacaaataaaagaagaaaatgctgtctttaaaattcctctacgtccacgtgaaagtttggagactgagaatgttttagatgacataaagagtgctggttctcatgagccaataaaaatacaaaccaggtcagaccatggaggatgtgaacttgcatcagttcttcagttaaatccatgtagaactggtaaaataaagtctctacaaaacaaccaagatgtatcctttgaaaatatccagtggagtatagatccgggagcagacctttctcagtataaaatggatgttactgtaatagatacaaaggatggcagtcagtcaaaattaggaggagagacagtggacatggactgtacattggttagtgaaaccgttctcttaaaaatgaagaagcaagagcagaagggagaaaaaagttcaaatgaagaaagaaaaatgaatgatagcttggaagatatgtttgatcggacaacacatgaagagtatgaatcctgtttggcagacagtttctcccaagcagcagatgaagaggaggaattgtctactgccacaaagaaactacacactcatggtgataaacaagacaaagtcaagcagaaagcgtttgtggagccgtattttaaaggtgatgaaagagagactagcttgcaaaattttcctcatattgaggtggttcggaaaaaagaggagagaagaaaactgcttgggcacacgtgtaaggaatgtgaaatttattatgcagatatgccagcagaagaaagagaaaagaaattggcttcctgctcaagacaccgattccgctacattccacccaacacaccagagaatttttgggaagttggttttccttccactcagacttgtatggaaagaggttatattaaggaagatcttgatccttgtcctcgtccaaaaagacgtcagccttacaacgcaatattttctccaaaaggcaaggagcagaagacatagacgttgaaacagaaacagaaggatgaaggacagttttttccttcttagttatttatagttaaagttggtactaaacattgatttttttgatcttctgtaaatggatttataaatcagttttctattgaaaatgtttgtgatattttgcttttgcacctttaaaacaataaggcgctttcattttgcactctaacttaagagtttttactttatgtagtgatacctaatacaattttgaaaatacaa

SEQ ID NO: 79273 - DNA, 3321 bp, Homo sapiens
cgcaccgataccggcgcgggcacctggggagaaatggatggagaagggacctggctggaaagcctttgccccgctgctctgctccgcccataagaggacccctgaaatgtcccgtgcagtttgttcaagtcccctgtgtgatgaaatgtgcctctcgccttacccgtgtgagaatacctgtggtgtggcagcgagtattttggtgagcacctgcagtgtagtggtttatactaaggaatacacacaaattacaggcctttgagcccagaatgcaacttgggaggtatttgacctgtccaaagacgacttgatacctctataatgtaacagaaaaggtcagaaaatattaagcaagtagaagtgtggagcatattaagcaagatgaacatctcgggaagcagctgtggaagccctaactctgcagatacatctagtgactttaaggacctttggacaaaactaaaagaatgtcatgatagagaagtacaaggtttacaagtaaaagtaaccaagctaaaacaggaacgaatcttagatgcacaaagactagaagaattcttcaccaaaaatcaacagctgagggaacagcagaaagtccttcatgaaaccattaaagttttagaagatcggttaagagcaggcttatgtgatcgctgtgcagtaactgaagaacatatgcggaaaaaacagcaagagtttgaaaatatccggcagcagaatcttaaacttattacagaacttatgaatgaaaggaatactctacaggaagaaaataaaaagctttctgaacaactccagcagaaaattgagaatgatcaacagcatcaagcagctgagcttgaatgtgaggaagacgttattccagattcaccgataacagccttctcattttctggcgttaaccggctacgaagaaaggagaacccccatgtccgatacatagaacaaacacatactaaattggagcactctgtgtgtgcaaatgaaatgagaaaagtttccaagtcttcaactcatccacaacataatcctaatgaaaatgaaattctagtagctgacacttatgaccaaagtcaatctccaatggccaaagcacatggaacaagcagctatacccctgataagtcatcttttaatttagctacagttgttgctgaaacacttggacttggtgttcaagaagaatctgaaactcaaggtcccatgagcccccttggtgatgagctctaccactgtctggaaggaaatcacaagaaacagccttttgaggaatctacaagaaatactgaagatagtttaagattttcagattctacttcaaagactcctcctcaagaagaattacctactcgagtgtcatctcctgtatttggagctacctctagtatcaaaagtggtttagatttgaatacaagtttgtccccttctcttttacagcctgggaaaaaaaaacatctgaaaacactcccttttagcaacacttgtatatctagattagaaaaaactagatcaaaatctgaagatagtgcccttttcacacatcacagtcttgggtctgaagtgaacaagatcattatccagtcatctaataaacagatacttataaataaaaatataagtgaatccctaggtgaacagaataggactgagtacggtaaagattctaacactgataaacatttggagcccctgaaatcattgggaggccgaacatccaaaaggaagaaaactgaggaagaaagtgaacatgaagtaagctgcccccaagcttcttttgataaagaaaatgctttcccttttccaatggataatcagttttccatgaatggagactgtgtgatggataaacctctggatctgtctgatcgattttcagctattcagcgtcaagagaaaagccaaggaagtgagacttctaaaaacaaatttaggcaagtgactctttatgaggctttgaagaccattccaaagggcttttcctcaagccgtaaggcctcagatggcaactgcacgttgcccaaagattccccaggggagccctgttcacaggaatgcatcatccttcagcccttgaataaatgctctccagacaataaaccatcattacaaataaaagaagaaaatgctgtctttaaaattcctctacgtccacgtgaaagtttggagactgagaatgttttagatgacataaagagtgctggttctcatgagccaataaaaatacaaaccaggtcagaccatggaggatgtgaacttgcatcagttcttcagttaaatccatgtagaactggtaaaataaagtctctacaaaacaaccaagatgtatcctttgaaaatatccagtggagtatagatccgggagcagacctttctcagtataaaatggatgttactgtaatagatacaaaggatggcagtcagtcaaaattaggaggagagacagtggacatggactgtacattggttagtgaaaccgttctcttaaaaatgaagaagcaagagcagaagggagaaaaaagttcaaatgaagaaagaaaaatgaatgatagcttggaagatatgtttgatcggacaacacatgaagagtatgaatcctgtttggcagacagtttctcccaagcagcagatgaagaggaggaattgtctactgccacaaagaaactacacactcatggtgataaacaagacaaagtcaagcagaaagcgtttgtggagccgtattttaaaggtgatgaaagagagactagcttgcaaaattttcctcatattgaggtggttcggaaaaaagaggagagaagaaaactgcttgggcacacgtgtaaggaatgtgaaatttattatgcagatatgccagcagaagaaagagaaaagaaattggcttcctgctcaagacaccgattccgctacattccacccaacacaccagagaatttttgggaagttggttttccttccactcagacttgtatggaaagaggttatattaaggaagatcttgatccttgtcctcgtccaaaaagacgtcagccttacaacgcaatattttctccaaaaggcaaggagcagaagacatagacgttgaaacagaaacagaaggatgaaggacagttttttccttcttagttatttatagttaaagttggtactaaacattgatttttttgatcttctgtaaatggatttataaatcagttttctattgaaaatgtttgtgatattttgcttttgcacctttaaaacaataaggcgctttcattttgcactctaacttaagagtttttactttatgtagtgatacctaatacaattttgaaaatacaa

SEQ ID NO: 79274 - DNA, 3242 bp, Homo sapiens
  misc_feature (3098)..(3098): n is a, c, g, or t
  misc_feature (3137)..(3137): n is a, c, g, or t
  misc_feature (3168)..(3168): n is a, c, g, or t
  misc_feature (3206)..(3206): n is a, c, g, or t
  misc_feature (3225)..(3225): n is a, c, g, or t
  misc_feature (3233)..(3233): n is a, c, g, or t
cgcaccgataccggcgcgggcacctggggagaaatggatggagaagggacctggctggaaagcctttgccccgctgctctgctccgcccataagaggacccctgaaatgtcccgtgcagtttgttcaagtcccctgtgtgatgaaatgtgcctctcgccttacccgtgtgagaatacctgtggtgtggcagcgagtattttggtgagcacctgcagtgtagtggtttatactaaggaatacacacaaattacaggcctttgagcccagaatgcaacttgggaggtaagacgtgacgttctgagagattgaaaaatgtacattgtcgtcgtgcctcgaataacggttcattgcagagagagatgctaacaaaaagtgccgggcatgcgggtatttgacctgtccaaagacgacttgatacctctataatgtaacagaaaaggtcagaaaatattaagcaagtagaagtgtggagcatattaagcaagatgaacatctcgggaagcagctgtggaagccctaactctgcagatacatctagtgactttaaggacctttggacaaaactaaaagaatgtcatgatagagaagtacaaggtttacaagtaaaagtaaccaagctaaaacaggaacgaatcttagatgcacaaagactagaagaattcttcaccaaaaatcaacagctgagggaacagcagaaagtccttcatgaaaccattaaagttttagaagatcggttaagagcaggcttatgtgatcgctgtgcagtaactgaagaacatatgcggaaaaaacagcaagagtttgaaaatatccggcagcagaatcttaaacttattacagaacttatgaatgaaaggaatactctacaggaagaaaataaaaagctttctgaacaactccagcagaaaattgagaatgatcaacagcatcaagcagctgagcttgaatgtgaggaagacgttattccagattcaccgataacagccttctcattttctggcgttaaccggctacgaagaaaggagaacccccatgtccgatacatagaacaaacacatactaaattggagcactctgtgtgtgcaaatgaaatgagaaaagtttccaagtcttcaactcatccacaacataatcctaatgaaaatgaaattctagtagctgacacttatgaccaaagtcaatctccaatggccaaagcacatggaacaagcagctatacccctgataagtcatcttttaatttagctacagttgttgctgaaacacttggacttggtgttcaagaagaatctgaaactcaaggtcccatgagcccccttggtgatgagctctaccactgtctggaaggaaatcacaagaaacagccttttgaggaatctacaagaaatactgaagatagtttaagattttcagattctacttcaaagactcctcctcaagaagaattacctactcgagtgtcatctcctgtatttggagctacctctagtatcaaaagtggtttagatttgaatacaagtttgtccccttctcttttacagcctgggaaaaaaaaacatctgaaaacactcccttttagcaacacttgtatatctagattagaaaaaactagatcaaaatctgaagatagtgcccttttcacacatcacagtcttgggtctgaagtgaacaagatcattatccagtcatctaataaacagatacttataaataaaaatataagtgaatccctaggtgaacagaataggactgagtacggtaaagattctaacactgataaacatttggagcccctgaaatcattgggaggccgaacatccaaaaggaagaaaactgaggaagaaagtgaacatgaagtaagctgcccccaagcttcttttgataaagaaaatgctttcccttttccaatggataatcagttttccatgaatggagactgtgtgatggataaacctctggatctgtctgatcgattttcagctattcagcgtcaagagaaaagccaaggaagtgagacttctaaaaacaaatttaggcaagtgactctttatgaggctttgaagaccattccaaagggcttttcctcaagccgtaaggcctcagatggcaactgcacgttgcccaaagattccccaggggagccctgttcacaggaatgcatcatccttcagcccttgaataaatgctctccagacaataaaccatcattacaaataaaagaagaaaatgctgtctttaaaattcctctacgtccacgtgaaagtttggagactgagaatgttttagatgacataaagagtgctggttctcatgagccaataaaaatacaaaccaggtcagaccatggaggatgtgaacttgcatcagttcttcagttaaatccatgtagaactggtaaaataaagtctctacaaaacaaccaagatgtatcctttgaaaatatccagtggagtatagatccgggagcagacctttctcagtataaaatggatgttactgtaatagatacaaaggatggcagtcagtcaaaattaggaggagagacagtggacatggactgtacattggttagtgaaaccgttctcttaaaaatgaagaagcaagagcagaagggagaaaaaagttcaaatgaagaaagaaaaatgaatgatagcttggaagatatgtttgatcggacaacacatgaagagtatgaatcctgtttggcagacagtttctcccaagcagcagatgaagaggaggaattgtctactgccacaaagaaactacacactcatggtgataaacaagacaaagtcaagcagaaagcgtttgtggagccgtattttaaaggtgatgaaagagagactagcttgcaaaattttcctcatattgaggtggttcggaaaaaagaggagagaagaaaactgcttgggcacacgtgtaaggaatgtgaaatttattatgcagatatgccagcagaagaaagagaaaagaaattggcttcctgctcaagacaccgattccgctacattccacccaacacaccagagaatttttgggaagttggttttccttccactcagacttgtatggaaagaggttatattaagggagntccccagcttgcaaaaccctgtaaatatcagtgtttggnccgtaattgcccactttttcctaattccttnacttcaggccccttttccctccctttaggggcattggncctctgttggccctttttntcaccagntggtttccc

SEQ ID NO: 79275 - DNA, 3220 bp, Homo sapiens
cgcaccgataccggcgcgggcacctggggagaaatggatggagaagggacctggctggaaagcctttgccccgctgctctgctccgcccataagaggacccctgaaatgtcccgtgcagtttgttcaagtcccctgtgtgatgaaatgtgcctctcgccttacccgtgtgagaatacctgtggtgtggcagcgagtattttggtgagcacctgcagtgtagtggtttatactaaggaatacacacaaattacaggcctttgagcccagaatgcaacttgggaggtaagacgtgacgttctgagagattgaaaaatgtacattgtcgtcgtgcctcgaataacggttcattgcagagagagatgctaacaaaaagtgccgggcatgcgggtatttgacctgtccaaagacgacttgatacctctataatgtaacagaaaaggtcagaaaatattaagcaagtagaagtgtggagcatattaagcaagatgaacatctcgggaagcagctgtggaagccctaactctgcagatacatctagtgactttaaggacctttggacaaaactaaaagaatgtcatgatagagaagtacaaggtttacaagtaaaagtaaccaagctaaaacaggaacgaatcttagatgcacaaagactagaagaattcttcaccaaaaatcaacagctgagggaacagcagaaagtccttcatgaaaccattaaagttttagaagatcggttaagagcaggcttatgtgatcgctgtgcagtaactgaagaacatatgcggaaaaaacagcaagagtttgaaaatatccggcagcagaatcttaaacttattacagaacttatgaatgaaaggaatactctacaggaagaaaataaaaagctttctgaacaactccagcagaaaattgagaatgatcaacagcatcaagcagctgagcttgaatgtgaggaagacgttattccagattcaccgataacagccttctcattttctggcgttaaccggctacgaagaaaggagaacccccatgtccgatacatagaacaaacacatactaaattggagcactctgtgtgtgcaaatgaaatgagaaaagtttccaagtcttcaactcatccacaacataatcctaatgaaaatgaaattctagtagctgacacttatgaccaaagtcaatctccaatggccaaagcacatggaacaagcagctatacccctgataagtcatcttttaatttagctacagttgttgctgaaacacttggacttggtgttcaagaagaatctgaaactcaaggtcccatgagcccccttggtgatgagctctaccactgtctggaaggaaatcacaagaaacagccttttgaggaatctacaagaaatactgaagatagtttaagattttcagattctacttcaaagactcctcctcaagaagaattacctactcgagtgtcatctcctgtatttggagctacctctagtatcaaaagtggtttagatttgaatacaagtttgtccccttctcttttacagcctgggaaaaaaaaacatctgaaaacactcccttttagcaacacttgtatatctagattagaaaaaactagatcaaaatctgaagatagtgcccttttcacacatcacagtcttgggtctgaagtgaacaagatcattatccagtcatctaataaacagatacttataaataaaaatataagtgaatccctaggtgaacagaataggactgagtacggtaaagattctaacactgataaacatttggagcccctgaaatcattgggaggccgaacatccaaaaggaagaaaactgaggaagaaagtgaacatgaagtaagctgcccccaagcttcttttgataaagaaaatgctttcccttttccaatggataatcagttttccatgaatggagactgtgtgatggataaacctctggatctgtctgatcgattttcagctattcagcgtcaagagaaaagccaaggaagtgagacttctaaaaacaaatttaggcaagtgactctttatgaggctttgaagaccattccaaagggcttttcctcaagccgtaaggcctcagatggcaactgcacgttgcccaaagattccccaggggagccctgttcacaggaatgcatcatccttcagcccttgaataaatgctctccagacaataaaccatcattacaaataaaagaagaaaatgctgtctttaaaattcctctacgtccacgtgaaagtttggagactgagaatgttttagatgacataaagagtgctggttctcatgagccaataaaaatacaaaccaggtcagaccatggaggatgtgaacttgcatcagttcttcagttaaatccatgtagaactggtaaaataaagtctctacaaaacaaccaagatgtatcctttgaaaatatccagtggagtatagatccgggagcagacctttctcagtataaaatggatgttactgtaatagatacaaaggatggcagtcagtcaaaattaggaggagagacagtggacatggactgtacattggttagtgaaaccgttctcttaaaaatgaagaagcaagagcagaagggagaaaaaagttcaaatgaagaaagaaaaatgaatgatagcttggaagatatgtttgatcggacaacacatgaagagtatgaatcctgtttggcagacagtttctcccaagcagcagatgaagaggaggaattgtctactgccacaaagaaactacacactcatggtgataaacaagacaaagtcaagcagaaagcgtttgtggagccgtattttaaaggtgatgaaagagagactagcttgcaaaattttcctcatattgaggtggttcggaaaaaagaggagagaagaaaactgcttgggcacacgtgtaaggaatgtgaaattcacatttattatgcagatatgccaggcagaagaaagagaaaagaatgggttctgtaagaacgattcggtaatgcaccaaaacagagattggagtggttccttcaatcaattgtatggaagagtaataaggagattgactgcttgtcaaagagtgcttaagaattttcaaaggggggaaattattgacgaagaggagggttctttgtttataagggaaagtttggtcgagtaaaagttaagatggatgtggcaaaggttgctaattttgcttaaaaaaggg

SEQ ID NO: 79276 - DNA, 1499 bp, Homo sapiens
cgacccacgcgtcgcccacgcgtcgacccacgcgtcggtctgatcgattttcagctattcagcgtcaagagaaaagccaaggaagtgagacttctaaaaacaaatttaggcaagtgactctttatgaggctttgaagaccattccaaagggcttttcctcaagccgtaaggcctcagatggcaactgcacgttgcccaaagattccccaggggagccctgttcacaggaatgcatcatccttcagcccttgaataaatgctctccagacaataaaccatcattacaaataaaagaagaaaatgctgtctttaaaattcctctacgtccacgtgaaagtttggagactgagaatgttttagatgacataaagagtgctggttctcatgagccaataaaaatacaaaccaggtcagaccatggaggatgtgaacttgcatcagttcttcagttaaatccatgtagaactggtaaaataaagtctctacaaaacaaccaagatgtatcctttgaaaatatccagtggagtatagatccgggagcagacctttctcagtataaaatggatgttactgtaatagatacaaaggatggcagtcagtcaaaattaggaggagagacagtggacatggactgtacattggttagtgaaaccgttctcttaaaaatgaagaagcaagagcagaagggagaaaaaagttcaaatgaagaaagaaaaatgaatgatagcttggaagatatgtttgatcggacaacacatgaagagtatgaatcctgtttggcagacagtttctcccaagcagcagatgaagaggaggaattgtctactgccacaaagaaactacacactcatggtgataaacaagacaaagtcaagcagaaagcgtttgtggagccgtattttaaaggtgatgaaagagagactagcttgcaaaattttcctcatattgaggtggttcggaaaaaagaggagagaagaaaactgcttgggcacacgtgtaaggaatgtgaaatttattatgcagatatgccagcagaagaaagagaaaagaaattggcttcctgctcaagacaccgattccgctacattccacccaacacaccagagaatttttgggaagttggttttccttccactcagacttgtatggaaagaggttatattaaggaagatcttgatccttgtcctcgtccaaaaagacgtcagccttacaacgcaatattttctccaaaaggcaaggagcagaagacatagacgttgaaacagaaacagaaggatgaaggacagttttttccttcttagttatttatagttaaagttggtactaaacattgatttttttgatcttctgtaaatggatttataaatcagttttctattgaaaatgtttgtgatattttgcttttgcacctttaaaacaataaggcgctttcattttgcactctaacttaagagtttttactttatgtagtgatacctaatacaattttgaaaatacaa

SEQ ID NO: 79277 - DNA, 917 bp, Homo sapiens
agatcatgtcatgcactcaagcctggccaacagagcaagactctgtctctaaataaataaatatttctgtgaaggacattattggtattttgatggggattacactgaatttgcaggtcactttggatagtaaatagttttaatttttttagttaaaaaaaaatacccataaaaatacttggtgtatatatagtaagcacttaataagtatttgacgaagcaatatttttctaacatactgaataaacatttcaaataaaaatgaatgaatgttttggggattatttctcctctgaactctaagctttgttaatttaattcatttttcccccagagagactagcttgcaaaattttcctcatattgaggtggttcggaaaaaagaggagagaagaaaactgcttgggcacacgtgtaaggaatgtgaaatttattatgcagatatgccagcagaagaaagagaaaagaaattggcttcctgctcaagacaccgattccgctacattccacccaacacaccagagaatttttgggaagttggttttccttccactcagacttgtatggaaagaggttatattaaggaagatcttgatccttgtcctcgtccaaaaagacgtcagccttacaacgcaatattttctccaaaaggcaaggagcagaagacatagacgttgaaacagaaacagaaggatgaaggacagttttttccttcttagttatttatagttaaagttggtactaaacattgatttttttgatcttctgtaaatggatttataaatcagttttctattgaaaatgtttgtgatattttgcttttgcacctttaaaacaataaggcgctttcattttgcactctaacttaagagtttttactttatgtagtgatacctaatacaattttgaaaatacaa

SEQ ID NO: 79278 - DNA, 709 bp, Homo sapiens
  misc_feature (4)..(5): n is a, c, g, or t
agcnngcgtgacgtcgcgcgggctcccgggcggggcgggtccggccgcctccgagcccggccggcagcccccggccttaaagcgcgggctgtccggaggggtcggctttcccaccgaggatttggcactctggtgagggaaaagggcgaaagagaaaagcgagcagccgtcctttcacagcctcagaaagtgctcgcttcccttcgggggctttcgcgaatcccgaggcaatctcggaggcggtatttgacctgtccaaagacgacttgatacctctataatgtaacagaaaaggtcagaaaatattaagcaagtagaagtgtggagcatattaagcaagatgaacatctcgggaagcagctgtggaagccctaactctgcagatacatctagtgactttaaggacctttggacaaaactaaaagaatgtcatgatagagaagtacaaggtttacaagtaaaagtaaccagcttaaaccaggaccgatcttaggtgcacacaaggctaggaggatttttcacaccaaaattcacacacctaggggacacaccagagtgccttctatagaacccttaaagtgttagaggagcgcgttagagcaccagctcttatgatctctgctgcactagtctctagagcatcatgtgcgaaaacagcacgagtagtttgattatctccagcagcagtctcatactcattacagcagct

SEQ ID NO: 79279 - DNA, 649 bp, Homo sapiens
tagcagtagtgtctagcaaaccagtgtggtccagagaggtggtgttcactgatttaatgtttaagttgatagattcagggaaagtgagcagtgaaacaatttctgcttttcaccaagagcagaggttttctaaataagtcgaaggggaaaacccttggatgcttcatagtcctacttctaggcagttctgcatgaatttctggtaatccaggtaaacaggatattgccgtagaagaggttgatggtagcttgaaccagggtggacacaaaggtgagaagcaactggattgtttgggcaggtgtgtgtgtgtgtgtgtgtgtgtgtgtgtgtgtgtgtttaagagacaggttctggctgtcattcagcctatactgcagtttctcaaatctcaagtgagcctcccgcgggcctcccacagcgttgaggttacagatatgagccaccctatctggcctcaggttgtatttttaactgcaaatggttttgcctaattcgtagggttgagaaagaaaaaagcaagtttaggaagatcacacttgtggagctcaattgtcttgtttaatcaggaggccaggttgtccacctagagtgaaaatagcttcagaggcttgaggactgaaaatagtaaaggtctggaagacagcagag

SEQ ID NO: 79280 - DNA, 203 bp, Homo sapiens
aggtagataagaccttactattaattctgtattaaagaattgttatcactctttatttagattttcagattctacttcaaagactcctcctcaagaagaattacctactcgagtgtcatctcctgtatttggagctacctctagtatcaaaagtggtttagatttgaatacaagtttgtccccttctcttttacagcctggga

SEQ ID NO: 79281 - DNA, 3280 bp, Homo sapiens
  misc_feature (4)..(5): n is a, c, g, or t
agcnngcgtgacgtcgcgcgggctcccgggcggggcgggtccggccgcctccgagcccggccggcagcccccggccttaaagcgcgggctgtccggaggggtcggctttcccaccgaggatttggcactctggtgagggaaaagggcgaaagagaaaagcgagcagccgtcctttcacagcctcagaaagtgctcgcttcccttcgggggctttcgcgaatcccgaggcaatctcggaggcggtatttgacctgtccaaagacgacttgatacctctataatgtaacagaaaaggtcagaaaatattaagcaagtagaagtgtggagcatattaagcaagatgaacatctcgggaagcagctgtggaagccctaactctgcagatacatctagtgactttaaggacctttggacaaaactaaaagaatgtcatgatagagaagtacaaggtttacaagtaaaagtaaccaagctaaaacaggaacgaatcttagatgcacaaagactagaagaattcttcaccaaaaatcaacagctgagggaacagcagaaagtccttcatgaaaccattaaagttttagaagatcggttaagagcaggcttatgtgatcgctgtgcagtaactgaagaacatatgcggaaaaaacagcaagagtttgaaaatatccggcagcagaatcttaaacttattacagaacttatgaatgaaaggaatactctacaggaagaaaataaaaagctttctgaacaactccagcagaaaattgagaatgatcaacagcatcaagcagctgagcttgaatgtgaggaagacgttattccagattcaccgataacagccttctcattttctggcgttaaccggctacgaagaaaggagaacccccatgtccgatacatagaacaaacacatactaaattggagcactctgtgtgtgcaaatgaaatgagaaaagtttccaagtcttcaactcatccacaacataatcctaatgaaaatgaaattctagtagctgacacttatgaccaaagtcaatctccaatggccaaagcacatggaacaagcagctatacccctgataagtcatcttttaatttagctacagttgttgctgaaacacttggacttggtgttcaagaagaatctgaaactcaaggtcccatgagcccccttggtgatgagctctaccactgtctggaaggaaatcacaagaaacagccttttgaggaatctacaagaaatactgaagatagtttaagattttcagattctacttcaaagactcctcctcaagaagaattacctactcgagtgtcatctcctgtatttggagctacctctagtatcaaaagtggtttagatttgaatacaagtttgtccccttctcttttacagcctgggaaaaaaaaacatctgaaaacactcccttttagcaacacttgtatatctagattagaaaaaactagatcaaaatctgaagatagtgcccttttcacacatcacagtcttgggtctgaagtgaacaagatcattatccagtcatctaataaacagatacttataaataaaaatataagtgaatccctaggtgaacagaataggactgagtacggtaaagattctaacactgataaacatttggagcccctgaaatcattgggaggccgaacatccaaaaggaagaaaactgaggaagaaagtgaacatgaagtaagctgcccccaagcttcttttgataaagaaaatgctttcccttttccaatggataatcagttttccatgaatggagactgtgtgatggataaacctctggatctgtctgatcgattttcagctattcagcgtcaagagaaaagccaaggaagtgagacttctaaaaacaaatttaggcaagtgactctttatgaggctttgaagaccattccaaagggcttttcctcaagccgtaaggcctcagatggcaactgcacgttgcccaaagattccccaggggagccctgttcacaggaatgcatcatccttcagcccttgaataaatgctctccagacaataaaccatcattacaaataaaagaagaaaatgctgtctttaaaattcctctacgtccacgtgaaagtttggagactgagaatgttttagatgacataaagagtgctggttctcatgagccaataaaaatacaaaccaggtcagaccatggaggatgtgaacttgcatcagttcttcagttaaatccatgtagaactggtaaaataaagtctctacaaaacaaccaagatgtatcctttgaaaatatccagtggagtatagatccgggagcagacctttctcagtataaaatggatgttactgtaatagatacaaaggatggcagtcagtcaaaattaggaggagagacagtggacatggactgtacattggttagtgaaaccgttctcttaaaaatgaagaagcaagagcagaagggagaaaaaagttcaaatgaagaaagaaaaatgaatgatagcttggaagatatgtttgatcggacaacacatgaagagtatgaatcctgtttggcagacagtttctcccaagcagcagatgaagaggaggaattgtctactgccacaaagaaactacacactcatggtgataaacaagacaaagtcaagcagaaagcgtttgtggagccgtattttaaaggtgatgaaagagagactagcttgcaaaattttcctcatattgaggtggttcggaaaaaagaggagagaagaaaactgcttgggcacacgtgtaaggaatgtgaaatttattatgcagatatgccagcagaagaaagagaaaagaaattggcttcctgctcaagacaccgattccgctacattccacccaacacaccagagaatttttgggaagttggttttccttccactcagacttgtatggaaagaggttatattaaggaagatcttgatccttgtcctcgtccaaaaagacgtcagccttacaacgcaatattttctccaaaaggcaaggagcagaagacatagacgttgaaacagaaacagaaggatgaaggacagttttttccttcttagttatttatagttaaagttggtactaaacattgatttttttgatcttctgtaaatggatttataaatcagttttctattgaaaatgtttgtgatattttgcttttgcacctttaaaacaataaggcgctttcattttgcactctaacttaagagtttttactttatgtagtgatacctaatacaattttgaaaatacaa

SEQ ID NO: 79282 - DNA, 331 bp, Homo sapiens
ccggcactgttgttcataccaacgaacgagactctggcatgctaactagttacgcgacccccgatacagcgaccaggtatgaacaacagtgcacagctgagcttgaatgtgaggaagacgttattccagattcaccgataacagccttctcattttctggcgttaaccggctacgaagaaaggagaacccccgatacagcgaccaggtatgaacaacagtgcaggtatgaacaacagtgcaggtatgaacaacagtgcaggtatgaacaacagtgcaggtatgaacaacagtgcaggtatgaacaacagtgcaggtatgaacaacagtgca

SEQ ID NO: 79283 - DNA, 3229 bp, Homo sapiens
  misc_feature (4)..(5): n is a, c, g, or t
agcnngcgtgacgtcgcgcgggctcccgggcggggcgggtccggccgcctccgagcccggccggcagcccccggccttaaagcgcgggctgtccggaggggtcggctttcccaccgaggatttggcactctggtgagggaaaagggcgaaagagaaaagcgagcagccgtcctttcacagcctcagaaagtgctcgcttcccttcgggggctttcgcgaatcccgaggcaatctcggaggcggtatttgacctgtccaaagacgacttgatacctctataatgtaacagaaaaggtcagaaaatattaagcaagtagaagtgtggagcatattaagcaagatgaacatctcgggaagcagctgtggaagccctaactctgcagatacatctagtgactttaaggacctttggacaaaactaaaagaatgtcatgatagagaagtacaaggtttacaagtaaaagtaaccaagctaaaacaggaacgaatcttagatgcacaaagactagaagaattcttcaccaaaaatcaacagctgagggaacagcagaaagtccttcatgaaaccattaaagttttagaagatcggttaagagcaggcttatgtgatcgctgtgcagtaactgaagaacatatgcggaaaaaacagcaagagtttgaaaatatccggcagcagaatcttaaacttattacagaacttatgaatgaaaggaatactctacaggaagaaaataaaaagctttctgaacaactccagcagaaaattgagaatgatcaacagcatcaagcagctgagcttgaatgtgaggaagacgttattccagattcaccgataacagccttctcattttctggcgttaaccggctacgaagaaaggagaacccccatgtccgatacatagaacaaacacatactaaattggagcactctgtgtgtgcaaatgaaatgagaaaagtttccaagtcttcaactcatccacaacataatcctaatgaaaatgaaattctagtagctgacacttatgaccaaagtcaatctccaatggccactacagttgttgctgaaacacttggacttggtgttcaagaagaatctgaaactcaaggtcccatgagcccccttggtgatgagctctaccactgtctggaaggaaatcacaagaaacagccttttgaggaatctacaagaaatactgaagatagtttaagattttcagattctacttcaaagactcctcctcaagaagaattacctactcgagtgtcatctcctgtatttggagctacctctagtatcaaaagtggtttagatttgaatacaagtttgtccccttctcttttacagcctgggaaaaaaaaacatctgaaaacactcccttttagcaacacttgtatatctagattagaaaaaactagatcaaaatctgaagatagtgcccttttcacacatcacagtcttgggtctgaagtgaacaagatcattatccagtcatctaataaacagatacttataaataaaaatataagtgaatccctaggtgaacagaataggactgagtacggtaaagattctaacactgataaacatttggagcccctgaaatcattgggaggccgaacatccaaaaggaagaaaactgaggaagaaagtgaacatgaagtaagctgcccccaagcttcttttgataaagaaaatgctttcccttttccaatggataatcagttttccatgaatggagactgtgtgatggataaacctctggatctgtctgatcgattttcagctattcagcgtcaagagaaaagccaaggaagtgagacttctaaaaacaaatttaggcaagtgactctttatgaggctttgaagaccattccaaagggcttttcctcaagccgtaaggcctcagatggcaactgcacgttgcccaaagattccccaggggagccctgttcacaggaatgcatcatccttcagcccttgaataaatgctctccagacaataaaccatcattacaaataaaagaagaaaatgctgtctttaaaattcctctacgtccacgtgaaagtttggagactgagaatgttttagatgacataaagagtgctggttctcatgagccaataaaaatacaaaccaggtcagaccatggaggatgtgaacttgcatcagttcttcagttaaatccatgtagaactggtaaaataaagtctctacaaaacaaccaagatgtatcctttgaaaatatccagtggagtatagatccgggagcagacctttctcagtataaaatggatgttactgtaatagatacaaaggatggcagtcagtcaaaattaggaggagagacagtggacatggactgtacattggttagtgaaaccgttctcttaaaaatgaagaagcaagagcagaagggagaaaaaagttcaaatgaagaaagaaaaatgaatgatagcttggaagatatgtttgatcggacaacacatgaagagtatgaatcctgtttggcagacagtttctcccaagcagcagatgaagaggaggaattgtctactgccacaaagaaactacacactcatggtgataaacaagacaaagtcaagcagaaagcgtttgtggagccgtattttaaaggtgatgaaagagagactagcttgcaaaattttcctcatattgaggtggttcggaaaaaagaggagagaagaaaactgcttgggcacacgtgtaaggaatgtgaaatttattatgcagatatgccagcagaagaaagagaaaagaaattggcttcctgctcaagacaccgattccgctacattccacccaacacaccagagaatttttgggaagttggttttccttccactcagacttgtatggaaagaggttatattaaggaagatcttgatccttgtcctcgtccaaaaagacgtcagccttacaacgcaatattttctccaaaaggcaaggagcagaagacatagacgttgaaacagaaacagaaggatgaaggacagttttttccttcttagttatttatagttaaagttggtactaaacattgatttttttgatcttctgtaaatggatttataaatcagttttctattgaaaatgtttgtgatattttgcttttgcacctttaaaacaataaggcgctttcattttgcactctaacttaagagtttttactttatgtagtgatacctaatacaattttgaaaatacaa

SEQ ID NO: 79284 - DNA, 3069 bp, Homo sapiens
agcggtttgagaacatgcgggctacagagaggtatttgacctgtccaaagacgacttgatacctctataatgtaacagaaaaggtcagaaaatattaagcaagtagaagtgtggagcatattaagcaagatgaacatctcgggaagcagctgtggaagccctaactctgcagatacatctagtgactttaaggacctttggacaaaactaaaagaatgtcatgatagagaagtacaaggtttacaagtaaaagtaaccaagctaaaacaggaacgaatcttagatgcacaaagactagaagaattcttcaccaaaaatcaacagctgagggaacagcagaaagtccttcatgaaaccattaaagttttagaagatcggttaagagcaggcttatgtgatcgctgtgcagtaactgaagaacatatgcggaaaaaacagcaagagtttgaaaatatccggcagcagaatcttaaacttattacagaacttatgaatgaaaggaatactctacaggaagaaaataaaaagctttctgaacaactccagcagaaaattgagaatgatcaacagcatcaagcagctgagcttgaatgtgaggaagacgttattccagattcaccgataacagccttctcattttctggcgttaaccggctacgaagaaaggagaacccccatgtccgatacatagaacaaacacatactaaattggagcactctgtgtgtgcaaatgaaatgagaaaagtttccaagtcttcaactcatccacaacataatcctaatgaaaatgaaattctagtagctgacacttatgaccaaagtcaatctccaatggccaaagcacatggaacaagcagctatacccctgataagtcatcttttaatttagctacagttgttgctgaaacacttggacttggtgttcaagaagaatctgaaactcaaggtcccatgagcccccttggtgatgagctctaccactgtctggaaggaaatcacaagaaacagccttttgaggaatctacaagaaatactgaagatagtttaagattttcagattctacttcaaagactcctcctcaagaagaattacctactcgagtgtcatctcctgtatttggagctacctctagtatcaaaagtggtttagatttgaatacaagtttgtccccttctcttttacagcctgggaaaaaaaaacatctgaaaacactcccttttagcaacacttgtatatctagattagaaaaaactagatcaaaatctgaagatagtgcccttttcacacatcacagtcttgggtctgaagtgaacaagatcattatccagtcatctaataaacagatacttataaataaaaatataagtgaatccctaggtgaacagaataggactgagtacggtaaagattctaacactgataaacatttggagcccctgaaatcattgggaggccgaacatccaaaaggaagaaaactgaggaagaaagtgaacatgaagtaagctgcccccaagcttcttttgataaagaaaatgctttcccttttccaatggataatcagttttccatgaatggagactgtgtgatggataaacctctggatctgtctgatcgattttcagctattcagcgtcaagagaaaagccaaggaagtgagacttctaaaaacaaatttaggcaagtgactctttatgaggctttgaagaccattccaaagggcttttcctcaagccgtaaggcctcagatggcaactgcacgttgcccaaagattccccaggggagccctgttcacaggaatgcatcatccttcagcccttgaataaatgctctccagacaataaaccatcattacaaataaaagaagaaaatgctgtctttaaaattcctctacgtccacgtgaaagtttggagactgagaatgttttagatgacataaagagtgctggttctcatgagccaataaaaatacaaaccaggtcagaccatggaggatgtgaacttgcatcagttcttcagttaaatccatgtagaactggtaaaataaagtctctacaaaacaaccaagatgtatcctttgaaaatatccagtggagtatagatccgggagcagacctttctcagtataaaatggatgttactgtaatagatacaaaggatggcagtcagtcaaaattaggaggagagacagtggacatggactgtacattggttagtgaaaccgttctcttaaaaatgaagaagcaagagcagaagggagaaaaaagttcaaatgaagaaagaaaaatgaatgatagcttggaagatatgtttgatcggacaacacatgaagagtatgaatcctgtttggcagacagtttctcccaagcagcagatgaagaggaggaattgtctactgccacaaagaaactacacactcatggtgataaacaagacaaagtcaagcagaaagcgtttgtggagccgtattttaaaggtgatgaaagagagactagcttgcaaaattttcctcatattgaggtggttcggaaaaaagaggagagaagaaaactgcttgggcacacgtgtaaggaatgtgaaatttattatgcagatatgccagcagaagaaagagaaaagaaattggcttcctgctcaagacaccgattccgctacattccacccaacacaccagagaatttttgggaagttggttttccttccactcagacttgtatggaaagaggttatattaaggaagatcttgatccttgtcctcgtccaaaaagacgtcagccttacaacgcaatattttctccaaaaggcaaggagcagaagacatagacgttgaaacagaaacagaaggatgaaggacagttttttccttcttagttatttatagttaaagttggtactaaacattgatttttttgatcttctgtaaatggatttataaatcagttttctattgaaaatgtttgtgatattttgcttttgcacctttaaaacaataaggcgctttcattttgcactctaacttaagagtttttactttatgtagtgatacctaatacaattttgaaaatacaa

SEQ ID NO: 79285 - DNA, 2847 bp, Homo sapiens
ttagggctatcgttaccggcgtcggataaagtaagcgagctaaaacaggaacgaatcttagatgcacaaagactagaagaattcttcaccaaaaatcaacagctgagggaacagcagaaagtccttcatgaaaccattaaagttttagaagatcggttaagagcaggcttatgtgatcgctgtgcagtaactgaagaacatatgcggaaaaaacagcaagagtttgaaaatatccggcagcagaatcttaaacttattacagaacttatgaatgaaaggaatactctacaggaagaaaataaaaagctttctgaacaactccagcagaaaattgagaatgatcaacagcatcaagcagctgagcttgaatgtgaggaagacgttattccagattcaccgataacagccttctcattttctggcgttaaccggctacgaagaaaggagaacccccatgtccgatacatagaacaaacacatactaaattggagcactctgtgtgtgcaaatgaaatgagaaaagtttccaagtcttcaactcatccacaacataatcctaatgaaaatgaaattctagtagctgacacttatgaccaaagtcaatctccaatggccaaagcacatggaacaagcagctatacccctgataagtcatcttttaatttagctacagttgttgctgaaacacttggacttggtgttcaagaagaatctgaaactcaaggtcccatgagcccccttggtgatgagctctaccactgtctggaaggaaatcacaagaaacagccttttgaggaatctacaagaaatactgaagatagtttaagattttcagattctacttcaaagactcctcctcaagaagaattacctactcgagtgtcatctcctgtatttggagctacctctagtatcaaaagtggtttagatttgaatacaagtttgtccccttctcttttacagcctgggaaaaaaaaacatctgaaaacactcccttttagcaacacttgtatatctagattagaaaaaactagatcaaaatctgaagatagtgcccttttcacacatcacagtcttgggtctgaagtgaacaagatcattatccagtcatctaataaacagatacttataaataaaaatataagtgaatccctaggtgaacagaataggactgagtacggtaaagattctaacactgataaacatttggagcccctgaaatcattgggaggccgaacatccaaaaggaagaaaactgaggaagaaagtgaacatgaagtaagctgcccccaagcttcttttgataaagaaaatgctttcccttttccaatggataatcagttttccatgaatggagactgtgtgatggataaacctctggatctgtctgatcgattttcagctattcagcgtcaagagaaaagccaaggaagtgagacttctaaaaacaaatttaggcaagtgactctttatgaggctttgaagaccattccaaagggcttttcctcaagccgtaaggcctcagatggcaactgcacgttgcccaaagattccccaggggagccctgttcacaggaatgcatcatccttcagcccttgaataaatgctctccagacaataaaccatcattacaaataaaagaagaaaatgctgtctttaaaattcctctacgtccacgtgaaagtttggagactgagaatgttttagatgacataaagagtgctggttctcatgagccaataaaaatacaaaccaggtcagaccatggaggatgtgaacttgcatcagttcttcagttaaatccatgtagaactggtaaaataaagtctctacaaaacaaccaagatgtatcctttgaaaatatccagtggagtatagatccgggagcagacctttctcagtataaaatggatgttactgtaatagatacaaaggatggcagtcagtcaaaattaggaggagagacagtggacatggactgtacattggttagtgaaaccgttctcttaaaaatgaagaagcaagagcagaagggagaaaaaagttcaaatgaagaaagaaaaatgaatgatagcttggaagatatgtttgatcggacaacacatgaagagtatgaatcctgtttggcagacagtttctcccaagcagcagatgaagaggaggaattgtctactgccacaaagaaactacacactcatggtgataaacaagacaaagtcaagcagaaagcgtttgtggagccgtattttaaaggtgatgaaagagagactagcttgcaaaattttcctcatattgaggtggttcggaaaaaagaggagagaagaaaactgcttgggcacacgtgtaaggaatgtgaaatttattatgcagatatgccagcagaagaaagagaaaagaaattggcttcctgctcaagacaccgattccgctacattccacccaacacaccagagaatttttgggaagttggttttccttccactcagacttgtatggaaagaggttatattaaggaagatcttgatccttgtcctcgtccaaaaagacgtcagccttacaacgcaatattttctccaaaaggcaaggagcagaagacatagacgttgaaacagaaacagaaggatgaaggacagttttttccttcttagttatttatagttaaagttggtactaaacattgatttttttgatcttctgtaaatggatttataaatcagttttctattgaaaatgtttgtgatattttgcttttgcacctttaaaacaataaggcgctttcattttgcactctaacttaagagtttttactttatgtagtgatacctaatacaattttgaaaatacaa

SEQ ID NO: 79286 - DNA, 2995 bp, Homo sapiens
cgcaccgataccggcgcgggcacctggggagaaatggatggagaagggacctggctggaaagcctttgccccgctgctctgctccgcccataagaggacccctgaaatgtcccgtgcagtttgttcaagtcccctgtgtgatgaaatgtgcctctcgccttacccgtgtgagaatacctgtggtgtggcagcgagtattttggtgagcacctgcagtgtagtggtttatactaaggaatacacacaaattacaggcctttgagcccagaatgcaacttgggaggtaagacgtgacgttctgagagattgaaaaatgtacattgtcgtcgtgcctcgaataacggttcattgcagagagagatgctaacaaaaagtgccgggcatgcgggtatttgacctgtccaaagacgacttgatacctctataatgtaacagaaaaggtcagaaaatattaagcaagtagaagtgtggagcatattaagcaagatgaacatctcgggaagcagctgtggaagccctaactctgcagatacatctagtgactttaaggacctttggacaaaactaaaagaatgtcatgatagagaagtacaaggtttacaagtaaaagtaaccaagctaaaacaggaacgaatcttagatgcacaaagactagaagaattcttcaccaaaaatcaacagctgagggaacagcagaaagtccttcatgaaaccattaaagttttagaagatcggttaagagcaggcttatgtgatcgctgtgcagtaactgaagaacatatgcggaaaaaacagcaagagtttgaaaatatccggcagcagaatcttaaacttattacagaacttatgaatgaaaggaatactctacaggaagaaaataaaaagctttctgaacaactccagcagaaaattgagaatgatcaacagcatcaagcagctgagcttgaatgtgaggaagacgttattccagattcaccgataacagccttctcattttctggcgttaaccggctacgaagaaaggagaacccccatgtccgatacatagaacaaacacatactaaattggagcactctgtgtgtgcaaatgaaatgagaaaagtttccaagtcttcaactcatccacaacataatcctaatgaaaatgaaattctagtagctgacacttatgaccaaagtcaatctccaatggccaaagcacatggaacaagcagctatacccctgataagtcatcttttaatttagctacagttgttgctgaaacacttggacttggtgttcaagaagaatctgaaactcaaggtcccatgagcccccttggtgatgagctctaccactgtctggaaggaaatcacaagaaacagccttttgaggaatctacaagaaatactgaagatagtttaagattttcagattctacttcaaagactcctcctcaagaagaattacctactcgagtgtcatctcctgtatttggagctacctctagtatcaaaagtggtttagatttgaatacaagtttgtccccttctcttttacagcctgggaaaaaaaaacatctgaaaacactcccttttagcaacacttgtatatctagattagaaaaaactagatcaaaatctgaagatagtgcccttttcacacatcacagtcttgggtctgaagtgaacaagatcattatccagtcatctaataaacagatacttataaataaaaatataagtgaatccctaggtgaacagaataggactgagtacggtaaagattctaacactgataaacatttggagcccctgaaatcattgggaggccgaacatccaaaaggaagaaaactgaggaagaaagtgaacatgaagtaagctgcccccaagcttcttttgataaagaaaatgctttcccttttccaatggataatcagttttccatgaatggagactgtgtgatggataaacctctggatctgtctgatcgattttcagctattcagcgtcaagagaaaagccaaggaagtgagacttctaaaaacaaatttaggcaagtgactctttatgaggctttgaagaccattccaaagggcttttcctcaagccgtaaggcctcagatggcaactgcacgttgcccaaagattccccaggggagccctgttcacaggaatgcatcatccttcagcccttgaataaatgctctccagacaataaaccatcattacaaataaaagaagaaaatgctgtctttaaaattcctctacgtccacgtgaaagtttggagactgagaatgttttagatgacataaagagtgctggttctcatgagccaataaaaatacaaaccaggtcagaccatggaggatgtgaacttgcatcagttcttcagttaaatccatgtagaactggtaaaataaagtctctacaaaacaaccaagatgtatcctttgaaaatatccagtggagtatagatccgggagcagacctttctcagtataaaatggatgttactgtaatagatacaaaggatggcagtcagtcaaaattaggaggagagacagtggacatggactgtacattggttagtgaaaccgttctcttaaaaatgaagaagcaagagcagaagggagaaaaaagttcaaatgaagaaagaaaaatgaatgatagcttggaagatatgtttgatcggacaacacatgaagagtatgaatcctgtttggcagacagtttctcccaagcagcagatgaagaggaggaattgtctactgccacaaagaaactacacactcatggtgataaacaagacaaagtcaagcagaaagcgtttgtggagccgtattttaaaggtgatgaaagagagactagcttgcaaaattttcctcatattgaggtggttcggaaaaaagaggagagaagaaaactgcttgggcacacgtgtaaggaatgtgaaattctgttaacctatgtgatatatcatcagccccatgaatccgccatacatggtcata

SEQ ID NO: 79287 - DNA, 1274 bp, Homo sapiens
gcctactactactaaattcgcggccgcgtcgacgctctccagacaataaaccatcattacaaataaaagaagaaaatgctgtctttaaaattcctctacgtccacgtgaaagtttggagactgagaatgttttagatgacataaagagtgctggttctcatgagccaataaaaatacaaaccaggtcagaccatggaggatgtgaacttgcatcagttcttcagttaaatccatgtagaactggtaaaataaagtctctacaaaacaaccaagatgtatcctttgaaaatatccagtggagtatagatccgggagcagacctttctcagtataaaatggatgttactgtaatagatacaaaggatggcagtcagtcaaaattaggaggagagacagtggacatggactgtacattggttagtgaaaccgttctcttaaaaatgaagaagcaagagcagaagggagaaaaaagttcaaatgaagaaagaaaaatgaatgatagcttggaagatatgtttgatcggacaacacatgaagagtatgaatcctgtttggcagacagtttctcccaagcagcagatgaagaggaggaattgtctactgccacaaagaaactacacactcatggtgataaacaagacaaagtcaagcagaaagcgtttgtggagccgtattttaaaggtgatgaaagagagactagcttgcaaaattttcctcatattgaggtggttcggaaaaaagaggagagaagaaaactgcttgggcacacgtgtaaggaatgtgaaatttattatgcagatatgccagcagaagaaagagaaaagaaattggcttcctgctcaagacaccgattccgctacattccacccaacacaccagagaatttttgggaagttggttttccttccactcagacttgtatggaaagaggttatattaaggaagatcttgatccttgtcctcgtccaaaaagacgtcagccttacaacgcaatattttctccaaaaggcaaggagcagaagacatagacgttgaaacagaaacagaaggatgaaggacagttttttccttcttagttatttatagttaaagttggtactaaacattgatttttttgatcttctgtaaatggatttataaatcagttttctattgaaaatgtttgtgatattttgcttttgcacctttaaaacaataaggcgctttcattttgcactctaacttaagagtttttactttatgtagtgatacctaatacaattttgaaaatacaa

SEQ ID NO: 79288 - DNA, 2918 bp, Homo sapiens
cgcaccgataccggcgcgggcacctggggagaaatggatggagaagggacctggctggaaagcctttgccccgctgctctgctccgcccataagaggacccctgaaatgtcccgtgcagtttgttcaagtcccctgtgtgatgaaatgtgcctctcgccttacccgtgtgagaatacctgtggtgtggcagcgagtattttggtgagcacctgcagtgtagtggtttatactaaggaatacacacaaattacaggcctttgagcccagaatgcaacttgggaggtaagacgtgacgttctgagagattgaaaaatgtacattgtcgtcgtgcctcgaataacggttcattgcagagagagatgctaacaaaaagtgccgggcatgcgggtatttgacctgtccaaagacgacttgatacctctataatgtaacagaaaaggtcagaaaatattaagcaagtagaagtgtggagcatattaagcaagatgaacatctcgggaagcagctgtggaagccctaactctgcagatacatctagtgactttaaggacctttggacaaaactaaaagaatgtcatgatagagaagtacaaggtttacaagtaaaagtaaccaagctaaaacaggaacgaatcttagatgcacaaagactagaagaattcttcaccaaaaatcaacagctgagggaacagcagaaagtccttcatgaaaccattaaagttttagaagatcggttaagagcaggcttatgtgatcgctgtgcagtaactgaagaacatatgcggaaaaaacagcaagagtttgaaaatatccggcagcagaatcttaaacttattacagaacttatgaatgaaaggaatactctacaggaagaaaataaaaagctttctgaacaactccagcagaaaattgagaatgatcaacagcatcaagcagctgagcttgaatgtgaggaagacgttattccagattcaccgataacagccttctcattttctggcgttaaccggctacgaagaaaggagaacccccatgtccgatacatagaacaaacacatactaaattggagcactctgtgtgtgcaaatgaaatgagaaaagtttccaagtcttcaactcatccacaacataatcctaatgaaaatgaaattctagtagctgacacttatgaccaaagtcaatctccaatggccaaagcacatggaacaagcagctatacccctgataagtcatcttttaatttagctacagttgttgctgaaacacttggacttggtgttcaagaagaatctgaaactcaaggtcccatgagcccccttggtgatgagctctaccactgtctggaaggaaatcacaagaaacagccttttgaggaatctacaagaaatactgaagatagtttaagattttcagattctacttcaaagactcctcctcaagaagaattacctactcgagtgtcatctcctgtatttggagctacctctagtatcaaaagtggtttagatttgaatacaagtttgtccccttctcttttacagcctgggaaaaaaaaacatctgaaaacactcccttttagcaacacttgtatatctagattagaaaaaactagatcaaaatctgaagatagtgcccttttcacacatcacagtcttgggtctgaagtgaacaagatcattatccagtcatctaataaacagatacttataaataaaaatataagtgaatccctaggtgaacagaataggactgagtacggtaaagattctaacactgataaacatttggagcccctgaaatcattgggaggccgaacatccaaaaggaagaaaactgaggaagaaagtgaacatgaagtaagctgcccccaagcttcttttgataaagaaaatgctttcccttttccaatggataatcagttttccatgaatggagactgtgtgatggataaacctctggatctgtctgatcgattttcagctattcagcgtcaagagaaaagccaaggaagtgagacttctaaaaacaaatttaggcaagtgactctttatgaggctttgaagaccattccaaagggcttttcctcaagccgtaaggcctcagatggcaactgcacgttgcccaaagattccccaggggagccctgttcacaggaatgcatcatccttcagcccttgaataaatgctctccagacaataaaccagcactctttatgtcatctaaaacattctcagtctccaataaaaatacaaaccaggtcagaccatggaggatgtgaacttgcatcagttcttcagttaaatccatgtagaactggtaaaataaagtctctacaaaacaaccaagatgtatcctttgaaaatatccagtggagtatagatccgggagcagacctttctcagtataaaatggatgttactgtaatagatacaaaggatggcagtcagtcaaaattaggaggagagacagtggacatggactgtacattggttagtgaaaccgttctcttaaaaatgaagaagcaagagcagaagggagaaaaaagttcaaatgaagaaagaaaaatgaatgatagcttggaagatatgtttgatcggacaacacatgaagagtatgaatcctgtttggcagacagtttctcccaagcagcagatgaagaggaggaattgtctactgccacaaagaaactacacactcatggtgataaacaagacaaagtcaagcagaaagcgtttgtggagccgtattttaaaggtgatgaaagagagactagcttgcaaaattttcctcatattgaggtggttcggaaaaaagaggagagaagaaaactgcttgggcacacgtgtaaggaatgtgaaattctgttaacctatgtgatatatcatcagccccatgaatccgccatacatggtcata

SEQ ID NO: 79289 - DNA, 489 bp, Homo sapiens
  misc_feature (189)..(189): n is a, c, g, or t
gctgggtgcagatgcagtgtggctctggatagcaccttatggacagttgtgtccccaaggaaggatgagaatagctactgaagtcctaaagagcaagcctaactcaagccattgcacacaggcattagacagaaagctggaagttgaaatggtggagtccaacttgcctggaccagcttaatggttctnctcctggtaacgtttttatccatggatgacttgcttgggtatggagagtcggcttgactacactgtgtggaacaagttttaaagaagcaaaggactcagaattcatgattgaagaaatgcaggcagacctgttatcctaaactagggtttttaatgaccacaacaagcaagcatgcagtttaccacttgaaagggtcttgcctcacctaagctggagtgcagtggccctttgaggcttactgtagcctcgaactcctgggctcaagtgatccttagcctcccaatggtctttgtagacag

SEQ ID NO: 79290 - DNA, 700 bp, Homo sapiens
ttctgtacttatcaagctgaacatatccttaatcagaccacagtgcttggagcacaatgggcccttaaaaatggggacaagagggaagaagaaaggaaggctggggcaagcaaaaaggagagccagatttctttgtcaagttttaaaagtatcgctgtacggaaattttacagaagaaattttgaacaccacagatttttgccttttgagttattatttgcattaacgtaatattaacagggcaacaatgtttttcgatttatcatgtggttaagcaaattgttaaacacatttgattaccgaaaacagggaatatggtagaagatcaaagacatgccagaaatttttattttatgtgggacactcggaatttagttgagcctgacagagtcctgctggctaacaccaaggagagactattgctggccccatgcaagtggctggaataatggaagtcaagaaggaaatctccacatggtcgacactttgaagttggtcatagataggaagttagaacaaactccagtgggtgaggggtcatgagtttaccaggagaaggtaacttaagactgaatgaacaaaaagaatttgtggtcacacgaaaataaggagcaaaacttcaggaacagtctgagataacaagaagctttatttccaatatatgggtcccatcccattgtaacactaattgagaacttcc

SEQ ID NO: 79291 - DNA, 2250 bp, Homo sapiens
gtctacttatcaataagcagctgcctgtgcagagtgcaggctgcacctttggacagcctttaaaactgaattctcagaattttagaacaaatttttgtctagaaatgctgactttggttcattaggtagtggtaaaacaggctcccttcgaagctctccttcatcaccttcctaagtgcatgtacagggaagctctccttcatcaccttcctaagtgcatgggggaaaatacctagggctcaacagtcttgagaagtgtggaaacattttctttgtgagtgagaacagatcacctagagaaaggaaaccagattcccatcactgcttctgggtatcagatgctagcgctgcactccattttgcaatggcctcccttgctgcagcaaatgcagagttttgcttcaacctgttcagagagatggatgacaatcaaggaaatggaaatgtgttcttttcctctctgagcctcttcgctgccctggccctggtccgcttgggcgctcaagatgactccctctctcagattgataagttgcttcatgttaacactgcctcaggatatggaaactcttctaatagtcagtcagggctccagtctcaactgaaaagagttttttctgatataaatgcatcccacaaggattatgatctcagcattgtgaatgggctttttgctgaaaaagtgtatggctttcataaggactacattgagtgtgccgaaaaattatacgatgccaaagtggagcgagttgactttacgaatcatttagaagacactagacgtaatattaataagtgggttgaaaatgaaacacatggcaaaatcaagaacgtgattggtgaaggtggcataagctcatctgctgtaatggtgctggtgaatgctgtgtacttcaaaggcaagtggcaatcagccttcaccaagagcgaaaccataaattgccatttcaaatctcccaagtgctctgggaaggcagtcgccatgatgcatcaggaacggaagttcaatttgtctgttattgaggacccatcaatgaagattcttgagctcagatacaatggtggcataaacatgtacgttctgctgcctgagaatgacctctctgaaattgaaaacaaactgacctttcagaatctaatggaatggaccaatccaaggcgaatgacctctaagtatgttgaggtattttttcctcagttcaagatagagaagaattatgaaatgaaacaatatttgagagccctagggctgaaagatatctttgatgaatccaaagcagatctctctgggattgcttcggggggtcgtctgtatatatcaaggatgatgcacaaatcttacatagaggtcactgaggagggcaccgaggctactgctgccacaggaagtaatattgtagaaaagcaactccctcagtccacgctgtttagagctgaccacccattcctatttgttatcaggaaggatgacatcatcttattcagtggcaaagtttcttgcccttgaaaatccaattggtttctgttatagcagtccccacaacatcaaagaaccaccacaagtcaatagatttgagtttaattggaaaaatgtggtgtttcctttgagtttatttcttcctaacattggtcagcagatgacactggtgacttgacccttcctagacacctggttgattgtcctgatccctgctcttagcattctaccaccatgtgtctcacccatttctaatttcattgtctttcttcccacgctcatttctatcattctcccccatgacccgtctggaaattatggagagtgctcaactggtaaggagaacgtagaagtagccctagggatcctttttgaaactctacagttatcgcagatattctagcttcattgtaagcaatctaggaaataagccctgctgctttctagaaataagtgtgaaggataaattttctttgttgacctatgaagattttagagtttaccttcatatgtttgattttaaatcagtgtataatctagatggtaaaaaatgtgaaattgggattagggaccaaccaaaatatttcattaatgctttcaattgacaaattttggcctttctttgataagacaatatgtacatagttttttcaaatattaaagatcttttaactgttggcagttgttatctacagaatcatatctcatatgctgtgtagtttataagttttttctctatttatcagaataaagaaatacaacatacctgtaaa

SEQ ID NO: 79292 - DNA, 1957 bp, Homo sapiens
ggcaggaggaactgaagcccagctgtgaaggccgcagactgcagtgagaggaggctgcactccattttgcaatggcctcccttgctgcagcaaatgcagagttttgcttcaacctgttcagagagatggatgacaatcaaggaaatggaaatgtgttcttttcctctctgagcctcttcgctgccctggccctggtccgcttgggcgctcaagatgactccctctctcagattgataagttgcttcatgttaacactgcctcaggatatggaaactcttctaatagtcagtcagggctccagtctcaactgaaaagagttttttctgatataaatgcatcccacaaggattatgatctcagcattgtgaatgggctttttgctgaaaaagtgtatggctttcataaggactacattgagtgtgccgaaaaattatacgatgccaaagtggagcgagttgactttacgaatcatttagaagacactagacgtaatattaataagtgggttgaaaatgaaacacatggcaaaatcaagaacgtgattggtgaaggtggcataagctcatctgctgtaatggtgctggtgaatgctgtgtacttcaaaggcaagtggcaatcagccttcaccaagagcgaaaccataaattgccatttcaaatctcccaagtgctctgggaaggcagtcgccatgatgcatcaggaacggaagttcaatttgtctgttattgaggacccatcaatgaagattcttgagctcagatacaatggtggcataaacatgtacgttctgctgcctgagaatgacctctctgaaattgaaaacaaactgacctttcagaatctaatggaatggaccaatccaaggcgaatgacctctaagtatgttgaggtattttttcctcagttcaagatagagaagaattatgaaatgaaacaatatttgagagccctagggctgaaagatatctttgatgaatccaaagcagatctctctgggattgcttcggggggtcgtctgtatatatcaaggatgatgcacaaatcttacatagaggtcactgaggagggcaccgaggctactgctgccacaggaagtaatattgtagaaaagcaactccctcagtccacgctgtttagagctgaccacccattcctatttgttatcaggaaggatgacatcatcttattcagtggcaaagtttcttgcccttgaaaatccaattggtttctgttatagcagtccccacaacatcaaagaaccaccacaagtcaatagatttgagtttaattggaaaaatgtggtgtttcctttgagtttatttcttcctaacattggtcagcagatgacactggtgacttgacccttcctagacacctggttgattgtcctgatccctgctcttagcattctaccaccatgtgtctcacccatttctaatttcattgtctttcttcccacgctcatttctatcattctcccccatgacccgtctggaaattatggagagtgctcaactggtaaggagaacgtagaagtagccctagggatcctttttgaaactctacagttatcgcagatattctagcttcattgtaagcaatctaggaaataagccctgctgctttctagaaataagtgtgaaggataaattttctttgttgacctatgaagattttagagtttaccttcatatgtttgattttaaatcagtgtataatctagatggtaaaaaatgtgaaattgggattagggaccaaccaaaatatttcattaatgctttcaattgacaaattttggcctttctttgataagacaatatgtacatagttttttcaaatattaaagatcttttaactgttggcagttgttatctacagaatcatatctcatatgctgtgtagtttataagttttttctctatttatcagaataaagaaatacaacatacctgtaaa

SEQ ID NO: 79293 - DNA, 366 bp, Homo sapiens
actaacttctgtagaaaaaaatggtttccaaagcaccattcttgaaaacacatgcaaggctatatttaccacagaaaaggtctgctttcctctttaggaaacataacttcatttaaaaacataatctttcaatcatgccatacatggatttatttgagcataaacttttttatttatcttcccataaaatcttagattttccctaaactagttaatgcatctttaactttcgacttggacattccaaagagaccacgcatctgtattccatatccttgaaatccacagactgcacagagggcctacctcctctcacaagaagtaagcacaatggttaggcaatcagagatacgtgccttgaagcag

SEQ ID NO: 79294 - DNA, 431 bp, Homo sapiens
ggctgtgatgctcacttgccagtcactcatctcctgctgtgcagcccggttcttaacaggccatgaactggtgctggtctgcagcccagggtttggggacccctgtctcattgaatatatgaaattgggaagaaagtcaggagttcctaaaaggacaagagaggaaaaaaattcagataaggactgaaaaaaaggttatttatttcagaagagacagatgagagggtaaaggtctgagttataaggcctttgtaaggagatcctcttcttcagccaggcaggaagatacatacagatgggtgccctcacagtttagaggtcaaaaggaggaatacggccgggcacagtggctcatgtgtgtaatcctggcaccttgggaggctcagatgggaagatccctcaagcccaggagaccagcctgggcaacatag

SEQ ID NO: 79295 - DNA, 417 bp, Homo sapiens
ggctgtgatgctcacttgccagtcactcatctcctgctgtgcagcccggttcttaacaggccatgaactggtgctggtctgcagcccagggtttggggacccctgtctcattgaatatatgaaattgggaagaaagtcaggagttcctaaaaggacaagagaggaaaaaaattcagataaggactgaaaaaaaggttattgtatttggcaattaggcattttgagaatagatgtagtaaagtcataaggataaaagcttaatttcagtgggttgacaaattaagagagctgaagaaggtatagaaaataaaacttctggccgggtgcggtagctcacacctgtaatcccagcactttgggaggccgaggcaggcagatcatgaggtcaggagatccagaccatcctggctaacacgg

SEQ ID NO: 79296 - DNA, 485 bp, Homo sapiens
ataagtgagaatatgcggcatttggttttctgttcctgcgttaatttgcttaggattgtggcctccggctccatccacgttgctgcaaagactatgatctcaattttttttatagttgcgtagtattctttagtgtatacatactgcattttctttatccagtccacttttggtggccacctgggttgattccacgtctttgctattgtgaatagtgctgcagtgaacataggtgtgcatgtgtcttcagggtagaacgacttatatttctgtgggtaaatggaattgctgggtcaaacggtaattctattttaaattctttgagaagtctccaaacagaacaggacttttctgagtagagtgttaaatatgtggacaaaaactgatggaactgcaagaatcaatagacaatgcatatttatagttagagatttcaatacctttctcaataactgaaaaaacagaaaatctgtgagaatatatac

SEQ ID NO: 79297 - DNA, 231 bp, Homo sapiens
aaggacatgaagcagtgttcggaggacagagagagagaagaatggggaggggaaggagcggcacatggggttgagcagaggagaaaatcagacagatggcttagagaagccagcagtctgcgaggctggggaggatggagagtggtttggggttttgggtcggggtctaaggtgatcagatgcagaagcattacacagtggcctggtttctttactcagcccctggggtag

SEQ ID NO: 79298 - DNA, 387 bp, Homo sapiens
tcatttagaggtggcatgcttgtagtgacttccaggtaacttgtgcatacacaagcacatgaacacacttcattacatttcatcactgctttgttgcctaaagaattgtttgggcatttatgtaaataagggaagggagtatttcacattagtactattgatgactatatgatatgttttttgagatgctcattatatgcgtccatatgacactggaagtcctacattttaagaatataatgattatgtacctgcagttttattttaggatggacgagaacccataaaatttgctaggtcagtatctttataggaataattgtgccgaaagtcttccaaatggaaaattacctgtcttaattttttaaatgtttttagagtgttttt

SEQ ID NO: 79299 - DNA, 2254 bp, Homo sapiens
ccgcctcacctgggcgccggtgacccttctgcggggctctggacaagcagcagcaggcaggggaggaggcggagctggtcgaggagtggggatcgggggttccctggagtggcgatggaaggcagccctcgctgcatgcttcacattacagagggtgggagggataccgcctgcccgtccctcggccaaagactgatgcgaaggacctgcaaatggggagatggcgtatctcactgacaggacctccaccttggaccaaatgaaagagatctacattccaaaggaaactggctagggagacctttaagccgtgcctactctttggaggagggactctcaactgaagcttctgcggatggttagctgggtggatgtcttcccgcttccttggccgtgattttatcaacttgttactagacagccagcgcactaataatggcagttaatatgcgcgcctcggatgggggcgattcgtaaaggttggcttgtctttgaatctttggggtgatcggatgtctgcagggcctaagctttgtgggccttctgtgctttactcttgggtgagttatgaatgaaaagaaggggactccatggaatgattgcatagcagcccgcagcgtagacagcctgttccgtggtgtccttttccttccttgggtgcagactcaaagccctgccttcataggacagggagagctgtgcagcttgactccgtagaggtgtgcccttacaaagctggaggaggtacccaggcccatgcgattaatcagcagcattgccttaccgggctcttatccccatccgaaaacttctgtagggtaaatagaagaggaaactccttcattgagccctttgactatctatgttaatgcttttggacttaaaaaaagttgtaattatgatctttataagttttagagatgatgctttgctgaagattcctaaacatttaagtcttgctccttggcaacttcttgtctttctttgaggctttcattgtgtcctgatggttttagaaatgtttgatttacagccttctaaaaaaaaaaaaaaaaaaaaaaaagacgctctagcgtggcacttgactttttgaaggagacttttgaagtttgcagtttttatctgcaatgttttaacgtgtcactctttctcaacagtagtttgtctggtgagcgagctatccattatgaggagtgttatgctttggagataatcttgggttcaccatttaatacaaaattagcagtttaaacaccatttgtaactattttatccttgtgagtagagagataatatgtgaatttggcagaaggaatctattctcttctgaaactttttgaagtgcttatctaactcttttgtagtccattagcctagccaaaaaaaaaaaaaagtcaatagttgctaagtaaagtgacttaaatggtatttaataagtttacttgttaagcaatcactaataggtgtccttaattcccttatagctgcagtaatgttggtgagtttatctgagctgtctgaatagtcatttcatggtgcacctcgtatctttagtaactttattgtggtagctgacttgttgaacctccctgtttctgcggacagagtgcagtgtggctttcagggatgtgtgtgtacaaaggctagcatgcttttatgagttctgcaaatactgtttgattgaaggaattggtgtggaccttgtctggcagccctgaaaaagttttttgtaaggaaggctgatgatgttttagggccgctgagagggaatataacattttcttttggtgagaaatgagaaagcagaaggaataaattgctgtccagctttggattaatcatgttttctaagtaacctgaacttttcaaaacctccttttatttactgtctttaaataaaccctccttttgtttactatcttgaaaaacctttataagctttagagatgatgcctatgcctgaagattccccaaacattttatcccacagtcttcaagaatagtttgaatcttaactcttgcctcattgtaacttcttgtctttctttgaggctttcactgtgcccctggtgacacagtctcattgaacttttcaaaacttccttttatttactatcttaaaagaaaatagtagccaggcatggtgtgacgcctgtagtctcagcattttgggaggctgaggcaggaggattgcttgagcctaggagttcgagaccagcctgggcaacacagttagacctggtctctacaaaaa

SEQ ID NO: 79300 - DNA, 719 bp, Homo sapiens
ccgcgtcgacttttttttttttgtattaaaaattctgttctcatctttatttacttccttcattggatttaatctgctgtccattttcaaagttccttggatgaatttttacatcattgatttttagcattacttactttctcttttttttgagacagtctcgctctgttacccaggccagagtgcagtggtatgatctcagctcactgcaacctcttgcctcccaggttcaagtgattctcctgcctcagccccccaagtagctgggagtataggcgtgtgccaccacacctggctaatttttttgtatttttagtagagatggagtttcaccgtgttggccagggtggtttcaaacttctgacctcaagtgatcccccttcctctgcatcccaaaatgctgggattacaggcatgagctaccgctcctggccactttctctcttgtatatgcatttcaagctataaatttttttaagcactctaatctgtgacacagatttgtttaatctattaatattaatttgtcaaacaattggtatatctttagatattaaacactaatattcctctaagtattcttatattccttatgcaaataatcaaacttactgataatgcaataaaaattcccagatatttaaacacgtattgcgaactttaatacttttattgattggagtcataaaatttaataataagtgtttttcaaatgatct

SEQ ID NO: 79301 - DNA, 448 bp, Homo sapiens
gaatcagaccagggttagagtactagctctgttactcacctatctacgtattaaaagtgtctctgtgtgtgtgtatccttagttacctttctaaggcttagtttctctgggtataaaatggggataatacctaactcacaagatgattgttgtaatgaaacagtagataacccatgaagaacagattcttgaggccgggcatggtggctcacgcctgtgttcccagcactttgggaggccaaggcaggtggatcacctgaggtcaggagttcaagaccagcctggccaacatgacaaaaccctgtctctgctaaaaatataaaaattagctgggcgttgttggcgtgtgcctgtagtctcagctacttgggaggccgaggcggaggaatcacttgaaccagggacgcaaagttgcggtgagccaagattgcaccactgtacactccaa

SEQ ID NO: 79302 - DNA, 553 bp, Homo sapiens
caacctcctgggctcaggtgactcttctgcctcagcctcctgagtaactgggaccaccactgcatgctatacctggctaatttctttttaaattatttgtagagacagggtttcattatgttgctcaggctggtatcaaactcctgggctcaagcaagcctctcacctcggactcccaacgtgctaagattacaggtttgagccactgtgtccagccacacggctgtttctatcattctgtattccagagatcaccagttctagtcttctgcaggggtagttgctcaatgtcatgagtaagagaggggaactacagatctacctccttttaagttttgtattaattttttttttaattttgaaataattttagatttataaaagagctgcaaagatggtacagagagttcctgtgtactcttcatcaagcttcacctgttgttaacatctttcataatcatggtgcatttattgaaactaagaaattaacatgagtatgatgctatgaactaaaccatagactttattaggatctcaccagtttttctgctga

SEQ ID NO: 79303 - DNA, 361 bp, Homo sapiens
gtagattagaggcagcccgagtaacccagaatcgctaaaatagaagtgcgagctcattgcccgctgtccttcactatgtttgcatataggaagcaagaataaaacaagcataaaataggctaactagcttgtcagagctcttcacaccaagtctttgtgagttccaataagacactgactattattaaaaagacagagactccacataagtaggaatttattgttttccttttcagtcaccaaaggacaatcctctgcataggttagcaaaaaatggtactgatcctataatctctaatattaaagtttagatttggcaagctgtacatcttatgttgttcattaacaaaaaacaatattg

SEQ ID NO: 79304 - DNA, 654 bp, Homo sapiens
tagacagagtcttgctctgtcacccaggctggagtgcagtggtgcaatctcggctcactgcaacctccgcctcctgggttcaagcaattctcctgcctcaacctccttagtagctgggattacaggcgcttgccaccacacccggctaatttttgtatttttagtagaggcagggtttcaccatgttggccaggctgatcctgacctcgtgattcacccacctgggcctcacaaggtgctgggataacaggcgtgagccaccatgcccggcctaggattctaaaatttttaaaaggcagtcataaaattataagcaacaaattgtttgcaaattattcaaattttctatgtctcacagaggcacttctcctttctttttagcatgataaattcatgaaaatgaaacacagatggtaatggataataaacagctttatccagtgtttgtctgaacaagacaataaaagcttcatcacagtacttaatcactagttcccaccgtccccatataccccctaaacagtgcaaaacaggggaaaaatgtaaagcacccaccactcgattctaatttggcttataatttggtttacttaatatgaataaaaaaatcctgttcagatataagtaacagcatatatgtagcttggatttggt

SEQ ID NO: 79305 - DNA, 2635 bp, Homo sapiens
ctcaaaaggggccggatttccttctcctggaggcagatgttgcctctctctctcgctcggattggttcagtgcactctagaaacactgctgtggtggagaaactggaccccaggtctggagcgaattccagcctgcagggctgataagcgaggcattagtgagattgagagagactttaccccgccgtggtggttggagggcgcgcagtagagcagcagcacaggcgcgggtcccgggaggccggctctgctcgcgccgagatgtggaatctccttcacgaaaccgactcggctgtggccaccgcgcgccgcccgcgctggctgtgcgctggggcgctggtgctggcgggtggcttctttctcctcggcttcctcttcgggtggtttataaaatcctccaatgaagctactaacattactccaaagcataatatgaaagcatttttggatgaattgaaagctgagaacatcaagaagttcttatataattttacacagataccacatttagcaggaacagaacaaaactttcagcttgcaaagcaaattcaatcccagtggaaagaatttggcctggattctgttgagctagcacattatgatgtcctgttgtcctacccaaataagactcatcccaactacatctcaataattaatgaagatggaaatgagattttcaacacatcattatttgaaccacctcctccaggatatgaaaatgtttcggatattgtaccacctttcagtgctttctctcctcaaggaatgccagagggcgatctagtgtatgttaactatgcacgaactgaagacttctttaaattggaacgggacatgaaaatcaattgctctgggaaaattgtaattgccagatatgggaaagttttcagaggaaataaggttaaaaatgcccagctggcaggggccaaaggagtcattctctactccgaccctgctgactactttgctcctggggtgaagtcctatccagatggttggaatcttcctggaggtggtgtccagcgtggaaatatcctaaatctgaatggtgcaggagaccctctcacaccaggttacccagcaaatgaatatgcttataggcgtggaattgcagaggctgttggtcttccaagtattcctgttcatccaattggatactatgatgcacagaagctcctagaaaaaatgggtggctcagcaccaccagatagcagctggagaggaagtctcaaagtgccctacaatgttggacctggctttactggaaacttttctacacaaaaagtcaagatgcacatccactctaccaatgaagtgacaagaatttacaatgtgataggtactctcagaggagcagtggaaccagacagatatgtcattctgggaggtcaccgggactcatgggtgtttggtggtattgaccctcagagtggagcagctgttgttcatgaaattgtgaggagctttggaacactgaaaaaggaagggtggagacctagaagaacaattttgtttgcaagctgggatgcagaagaatttggtcttcttggttctactgagtgggcagaggagaattcaagactccttcaagagcgtggcgtggcttatattaatgctgactcatctatagaaggaaactacactctgagagttgattgtacaccgctgatgtacagcttggtacacaacctaacaaaagagctgaaaagccctgatgaaggctttgaaggcaaatctctttatgaaagttggactaaaaaaagtccttccccagagttcagtggcatgcccaggataagcaaattgggatctggaaatgattttgaggtgttcttccaacgacttggaattgcttcaggcagagcacggtatactaaaaattgggaaacaaacaaattcagcggctatccactgtatcacagtgtctatgaaacatatgagttggtggaaaagttttatgatccaatgtttaaatatcacctcactgtggcccaggttcgaggagggatggtgtttgagctagccaattccatagtgctcccttttgattgtcgagattatgctgtagttttaagaaagtatgctgacaaaatctacagtatttctatgaaacatccacaggaaatgaagacatacagtgtatcatttgattcacttttttctgcagtaaagaattttacagaaattgcttccaagttcagtgagagactccaggactttgacaaaagcaacccaatagtattaagaatgatgaatgatcaactcatgtttctggaaagagcatttattgatccattagggttaccagacaggcctttttataggcatgtcatctatgctccaagcagccacaacaagtatgcaggggagtcattcccaggaatttatgatgctctgtttgatattgaaagcaaagtggacccttccaaggcctggggagaagtgaagagacagatttatgttgcagccttcacagtgcaggcagctgcagagactttgagtgaagtagcctaagaggattctttagagaatccgtattgaatttgtgtggtatgtcactcagaaagaatcgtaatgggtatattgataaattttaaaattggtatatttgaaataaagttgaatattatatata

SEQ ID NO: 79306 - DNA, 253 bp, Homo sapiens
ctcaaaaggggccggatttccttctcctggaggcagatgttgcctctctctctcgctcggattggttcagtgcactctagaaacactgctgtggtggagaaactggaccccagggtggtttataaaatcctccaatgaagctactaacattactccaaagcataatatgaaagcatttttggatgaattgaaagctgagaacatcaagaagttcttatataattttacacagataccacatttagcaggaaca

SEQ ID NO: 79307 - DNA, 3052 bp, Homo sapiens
ctcaaaaggggccggatttccttctcctggaggcagatgttgcctctctctctcgctcggattggttcagtgcactctagaaacactgctgtggtggagaaactggaccccaggtctggagcgaattccagcctgcagggctgataagcgaggcattagtgagattgagagagactttaccccgccgtggtggttggagggcgcgcagtagagcagcagcacaggcgcgggtcccgggaggccggctctgctcgcgccgagatgtggaatctccttcacgaaaccgactcggctgtggccaccgcgcgccgcccgcgctggctgtgcgctggggcgctggtgctggcgggtggcttctttctcctcggcttcctcttcgggtggtttataaaatcctccaatgaagctactaacattactccaaagcataatatgaaagcatttttggatgaattgaaagctgagaacatcaagaagttcttatataattttacacagataccacatttagcaggaacagaacaaaactttcagcttgcaaagcaaattcaatcccagtggaaagaatttggcctggattctgttgagctagcacattatgatgtcctgttgtcctacccaaataagactcatcccaactacatctcaataattaatgaagatggaaatgagattttcaacacatcattatttgaaccacctcctccaggatatgaaaatgtttcggatattgtaccacctttcagtgctttctctcctcaaggaatgccagagggcgatctagtgtatgttaactatgcacgaactgaagacttctttaaattggaacgggacatgaaaatcaattgctctgggaaaattgtaattgccagatatgggaaagttttcagaggaaataaggttaaaaatgcccagctggcaggggccaaaggagtcattctctactccgaccctgctgactactttgctcctggggtgaagtcctatccagatggttggaatcttcctggaggtggtgtccagcgtggaaatatcctaaatctgaatggtgcaggagaccctctcacaccaggttacccagcaaatgaatatgcttataggcgtggaattgcagaggctgttggtcttccaagtattcctgttcatccaattggatactatgatgcacagaagctcctagaaaaaatgggtggctcagcaccaccagatagcagctggagaggaagtctcaaagtgccctacaatgttggacctggctttactggaaacttttctacacaaaaagtcaagatgcacatccactctaccaatgaagtgacaagaatttacaatgtgataggtactctcagaggagcagtggaaccagacagatatgtcattctgggaggtcaccgggactcatgggtgtttggtggtattgaccctcagagtggagcagctgttgttcatgaaattgtgaggagctttggaacactgaaaaaggaagggtggagacctagaagaacaattttgtttgcaagctgggatgcagaagaatttggtcttcttggttctactgagtgggcagaggagaattcaagactccttcaagagcgtggcgtggcttatattaatgctgactcatctatagaaggaaactacactctgagagttgattgtacaccgctgatgtacagcttggtacacaacctaacaaaagagctgaaaagccctgatgaaggctttgaaggcaaatctctttatgaaagttggactaaaaaaagtccttccccagagttcagtggcatgcccaggataagcaaattgggatctggaaatgattttgaggtgttcttccaacgacttggaattgcttcaggcagagcacggtatactaaaaattgggaaacaaacaaattcagcggctatccactgtatcacagtgtctatgaaacatatgagttggtggaaaagttttatgatccaatgtttaaatatcacctcactgtggcccaggttcgaggagggatggtgtttgagctagccaattccatagtgctcccttttgattgtcgagattatgctgtagttttaagaaagtatgctgacaaaatctacagtatttctatgaaacatccacaggaaatgaagacatacagtgtatcatttgattcacttttttctgcagtaaagaattttacagaaattgcttccaagttcagtgagagactccaggactttgacaaaagcaacccaatagtattaagaatgatgaatgatcaactcatgtttctggaaagagcatttattgatccattagggttaccagacaggcctttttataggcatgtcatctatgctccaagcagccacaacaagtatgcaggggagtcattcccaggaatttatgatgctctgtttgatattgaaagcaaagtggacccttccaaggcctggggagaagtgaagagacagatttatgttgcagccttcacagtgcaggcagctgcagagactttgagtgaagtagcctaagaggattctttagagaatccgtattgaatttgtgtggtatgtcactcagaaagaatcgtaatgggtatattgataaattttaaaattggtatatttgaaataaagttgaatattatatataaaaaaaacaaaaaaaaaacaacaaacaaacacaaacacaacaacaaaaaaaaaacaaaaaaaaaaaaaaacaaaacacaaacacaaacaaaatagaaaaacaaaaaaaaaaaaaaaaagaaaaaaacaaagaaaagcaacgagacgcgaggcgggcgaacataaagacaacacaaggcagagagaggaacaacaaagacacacgcaaacaagaagaagagaacaagagaaggaggacacgaagagggagagaaagaaaaaacaaagacgacaagagccgcgagcgaacacacataacacagcaagagagcaaggagaacgcaaacaagcgaagagcagagagagcgcagaacgacaaaaccaacaactaaatgagtagagagggaaaagaaataaggagaaagaagaaacaagagac

SEQ ID NO: 79308 - DNA, 2448 bp, Homo sapiens
ctcaaaaggggccggatttccttctcctggaggcagatgttgcctctctctctcgctcggattggttcagtgcactctagaaacactgctgtggtggagaaactggaccccaggtctggagcgaattccagcctgcagggctgataagcgaggcattagtgagattgagagagactttaccccgccgtggtggttggagggcgcgcagtagagcagcagcacaggcgcgggtcccgggaggccggctctgctcgcgccgagatgtggaatctccttcacgaaaccgactcggctgtggccaccgcgcgccgcccgcgctggctgtgcgctggggcgctggtgctggcgggtggcttctttctcctcggcttcctcttcgggtggtttataaaatcctccaatgaagctactaacattactccaaagcataatatgaaagcatttttggatgaattgaaagctgagaacatcaagaagttcttatataattttacacagataccacatttagcaggaacagaacaaaactttcagcttgcaaagcaaattcaatcccagtggaaagaatttggcctggattctgttgagctagcacattatgatgtcctgttgtcctacccaaataagactcatcccaactacatctcaataattaatgaagatggaaatgagattttcaacacatcattatttgaaccacctcctccaggatatgaaaatgtttcggatattgtaccacctttcagtgctttctctcctcaaggaatgccagagggcgatctagtgtatgttaactatgcacgaactgaagacttctttaaattggaacgggacatgaaaatcaattgctctgggaaaattgtaattgccagatatgggaaagttttcagaggaaataagaatatgcttataggcgtggaattgcagaggctgttggtcttccaagtattcctgttcatccaattggatactatgatgcacagaagctcctagaaaaaatgggtggctcagcaccaccagatagcagctggagaggaagtctcaaagtgccctacaatgttggacctggctttactggaaacttttctacacaaaaagtcaagatgcacatccactctaccaatgaagtgacaagaatttacaatgtgataggtactctcagaggagcagtggaaccagacagatatgtcattctgggaggtcaccgggactcatgggtgtttggtggtattgaccctcagagtggagcagctgttgttcatgaaattgtgaggagctttggaacactgaaaaaggaagggtggagacctagaagaacaattttgtttgcaagctgggatgcagaagaatttggtcttcttggttctactgagtgggcagaggagaattcaagactccttcaagagcgtggcgtggcttatattaatgctgactcatctatagaaggaaactacactctgagagttgattgtacaccgctgatgtacagcttggtacacaacctaacaaaagagctgaaaagccctgatgaaggctttgaaggcaaatctctttatgaaagttggactaaaaaaagtccttccccagagttcagtggcatgcccaggataagcaaattgggatctggaaatgattttgaggtgttcttccaacgacttggaattgcttcaggcagagcacggtatactaaaaattgggaaacaaacaaattcagcggctatccactgtatcacagtgtctatgaaacatatgagttggtggaaaagttttatgatccaatgtttaaatatcacctcactgtggcccaggttcgaggagggatggtgtttgagctagccaattccatagtgctcccttttgattgtcgagattatgctgtagttttaagaaagtatgctgacaaaatctacagtatttctatgaaacatccacaggaaatgaagacatacagtgtatcatttgattcacttttttctgcagtaaagaattttacagaaattgcttccaagttcagtgagagactccaggactttgacaaaagcaacccaatagtattaagaatgatgaatgatcaactcatgtttctggaaagagcatttattgatccattagggttaccagacaggcctttttataggcatgtcatctatgctccaagcagccacaacaagtatgcaggggagtcattcccaggaatttatgatgctctgtttgatattgaaagcaaagtggacccttccaaggcctggggagaagtgaagagacagatttatgttgcagccttcacagtgcaggcagctgcagagactttgagtgaagtagcctaagaggattctttagagaatccgtattgaatttgtgtggtatgtcactcagaaagaatcgtaatgggtatattgataaattttaaaattggtatatttgaaataaagttgaatattatatata

SEQ ID NO: 79309 - DNA, 2355 bp, Homo sapiens
ctcaaaaggggccggatttccttctcctggaggcagatgttgcctctctctctcgctcggattggttcagtgcactctagaaacactgctgtggtggagaaactggaccccaggtctggagcgaattccagcctgcagggctgataagcgaggcattagtgagattgagagagactttaccccgccgtggtggttggagggcgcgcagtagagcagcagcacaggcgcgggtcccgggaggccggctctgctcgcgccgagatgtggaatctccttcacgaaaccgactcggctgtggccaccgcgcgccgcccgcgctggctgtgcgctggggcgctggtgctggcgggtggcttctttctcctcggcttcctcttcgggtggtttataaaatcctccaatgaagctactaacattactccaaagcataatatgaaagcatttttggatgaattgaaagctgagaacatcaagaagttcttatataattttacacagataccacatttagcaggaacagaacaaaactttcagcttgcaaagcaaattcaatcccagtggaaagaatttggcctggattctgttgagctagcacattatgatgtcctgttgtcctacccaaataagactcatcccaactacatctcaataattaatgaagatggaaatgagattttcaacacatcattatttgaaccacctcctccaggatatgaaaatgtttcggatattgtaccacctttcagtgctttctctcctcaaggaatgccagagggcgatctagtgtatgttaactatgcacgaactgaagacttctttaaattggaacgggacatgaaaatcaattgctctgggaaaattgtaattgccagatatgggaaagttttcagaggaaataagaatatgcttataggcgtggaattgcagaggctgttggtcttccaagtattcctgttcatccaattggatactatgatgcacagaagctcctagaaaaaatgggtggctcagcaccaccagatagcagctggagaggaagtctcaaagtgccctacaatgttggacctggctttactggaaacttttctacacaaaaagtcaagatgcacatccactctaccaatgaagtgacaagaatttacaatgtgataggtactctcagaggagcagtggaaccagacagatatgtcattctgggaggtcaccgggactcatgggtgtttggtggtattgaccctcagagtggagcagctgttgttcatgaaattgtgaggagctttggaacactgaaaaaggaagggtggagacctagaagaacaattttgtttgcaagctgggatgcagaagaatttggtcttcttggttctactgagtgggcagaggagaattcaagactccttcaagagcgtggcgtggcttatattaatgctgactcatctatagaaggaaactacactctgagagttgattgtacaccgctgatgtacagcttggtacacaacctaacaaaagagctgaaaagccctgatgaaggctttgaaggcaaatctctttatgaaagttggactaaaaaaagtccttccccagagttcagtggcatgcccaggataagcaaattgggatctggaaatgattttgaggtgttcttccaacgacttggaattgcttcaggcagagcacggtatactaaaaattgggaaacaaacaaattcagcggctatccactgtatcacagtgtctatgaaacatatgagttggtggaaaagttttatgatccaatgtttaaatatcacctcactgtggcccaggttcgaggagggatggtgtttgagctagccaattccatagtgctcccttttgattgtcgagattatgctgtagttttaagaaagtatgctgacaaaatctacagtatttctatgaaacatccacaggaaatgaagacatacagtgtatcatttgattcacttttttctgcagtaaagaattttacagaaattgcttccaagttcagtgagagactccaggactttgacaaaagcaagcatgtcatctatgctccaagcagccacaacaagtatgcaggggagtcattcccaggaatttatgatgctctgtttgatattgaaagcaaagtggacccttccaaggcctggggagaagtgaagagacagatttatgttgcagccttcacagtgcaggcagctgcagagactttgagtgaagtagcctaagaggattctttagagaatccgtattgaatttgtgtggtatgtcactcagaaagaatcgtaatgggtatattgataaattttaaaattggtatatttgaaataaagttgaatattatatata

SEQ ID NO: 79310 - DNA, 1901 bp, Homo sapiens
ctcaaaaggggccggatttccttctcctggaggcagatgttgcctctctctctcgctcggattggttcagtgcactctagaaacactgctgtggtggagaaactggaccccaggtctggagcgaattccagcctgcagggctgataagcgaggcattagtgagattgagagagactttaccccgccgtggtggttggagggcgcgcagtagagcagcagcacaggcgcgggtcccgggaggccggctctgctcgcgccgagatgtggaatctccttcacgaaaccgactcggctgtggccaccgcgcgccgcccgcgctggctgtgcgctggggcgctggtgctggcgggtggcttctttctcctcggcttcctcttcgggtggtttataaaatcctccaatgaagctactaacattactccaaagcataatatgaaagcatttttggatgaattgaaagctgagaacatcaagaagttcttatataattttacacagataccacatttagcaggaacagaacaaaactttcagcttgcaaagcaaattcaatcccagtggaaagaatttggcctggattctgttgagctagcacattatgatgtcctgttgtcctacccaaataagactcatcccaactacatctcaataattaatgaagatggaaatgagattttcaacacatcattatttgaaccacctcctccaggatatgaaaatgtttcggatattgtaccacctttcagtgctttctctcctcaaggaatgccagagggcgatctagtgtatgttaactatgcacgaactgaagacttctttaaattggaacgggacatgaaaatcaattgctctgggaaaattgtaattgccagatatgggaaagttttcagaggaaataagaatatgcttataggcgtggaattgcagaggctgttggtcttccaagtattcctgttcatccaattggatactatgatgcacagaagctcctagaaaaaatgggtggctcagcaccaccagatagcagctggagaggaagtctcaaagtgccctacaatgttggacctggctttactggaaacttttctacacaaaaagtcaagatgcacatccactctaccaatgaagtgacaagaatttacaatgtgataggtactctcagaggagcagtggaaccagacagatatgtcattctgggaggtcaccgggactcatgggtgtttggtggtattgaccctcagagtggagcagctgttgttcatgaaattgtgaggagctttggaacactgaaaaaggaagggtggagacctagaagaacaattttgtttgcaagctgggatgcagaagaatttggtcttcttggttctactgagtgggcagaggagaattcaagactccttcaagagcgtggcgtggcttatattaatgctgactcatctatagaaggaaactacactctgagagttgattgtacaccgctgatgtacagcttggtacacaacctaacaaaagagctgaaaagccctgatgaaggctttgaaggcaaatctctttatgaaagttggactaaaaaaagtccttccccagagttcagtggcatgcccaggataagcaaattgggatctggaaatgattttgaggtgttcttccaacgacttggaattgcttcaggcagagcacggtatactaaaaattgggaaacaaacaaattcagcggctatccactgtatcacagtgtctatgaaacatatgagttggtggaaaagtttaattttcatttttaaattttaccttattgttactatgttttgatgttatttttgtttaatatttcacataactattttttttttttttttctttaatactttattgtataatctttcttttcacattactac

SEQ ID NO: 79311 - DNA, 1828 bp, Homo sapiens
ctcaaaaggggccggatttccttctcctggaggcagatgttgcctctctctctcgctcggattggttcagtgcactctagaaacactgctgtggtggagaaactggaccccaggtctggagcgaattccagcctgcagggctgataagcgaggcattagtgagattgagagagactttaccccgccgtggtggttggagggcgcgcagtagagcagcagcacaggcgcgggtcccgggaggccggctctgctcgcgccgagatgtggaatctccttcacgaaaccgactcggctgtggccaccgcgcgccgcccgcgctggctgtgcgctggggcgctggtgctggcgggtggcttctttctcctcggcttcctcttcgggtggtttataaaatcctccaatgaagctactaacattactccaaagcataatatgaaagcatttttggatgaattgaaagctgagaacatcaagaagttcttatataattttacacagataccacatttagcaggaacagaacaaaactttcagcttgcaaagcaaattcaatcccagtggaaagaatttggcctggattctgttgagctagcacattatgatgtcctgttgtcctacccaaataagactcatcccaactacatctcaataattaatgaagatggaaatgagattttcaacacatcattatttgaaccacctcctccaggatatgaaaatgtttcggatattgtaccacctttcagtgctttctctcctcaaggaatgccagagggcgatctagtgtatgttaactatgcacgaactgaagacttctttaaattggaacgggacatgaaaatcaattgctctgggaaaattgtaattgccagatatgggaaagttttcagaggaaataagaatatgcttataggcgtggaattgcagaggctgttggtcttccaagtattcctgttcatccaattggatactatgatgcacagaagctcctagaaaaaatgggtggctcagcaccaccagatagcagctggagaggaagtctcaaagtgccctacaatgttggacctggctttactggaaacttttctacacaaaaagtcaagatgcacatccactctaccaatgaagtgacaagaatttacaatgtgataggtactctcagaggagcagtggaaccagacagatatgtcattctgggaggtcaccgggactcatgggtgtttggtggtattgaccctcagagtggagcagctgttgttcatgaaattgtgaggagctttggaacactgaaaaaggaagggtggagacctagaagaacaattttgtttgcaagctgggatgcagaagaatttggtcttcttggttctactgagtgggcagaggagaattcaagactccttcaagagcgtggcgtggcttatattaatgctgactcatctatagaaggaaactacactctgagagttgattgtacaccgctgatgtacagcttggtacacaacctaacaaaagaggtactgtaaaatctgaggcaactagcgattggagtcgaccccccagcacaacacagcagccctgcagaaaagtggctagactgtttaaaaaaaaaaaaaagaaaagaaaaaaaaggacaagctccactcaaaggtcaccaacctcaaagattgaaggcagataagcccacaaagatgagaaaggatcagtacaagaacattgaaaactcaaaatgccacagtgccctctttcctccaaatgactgcatcacttctccagcaaggtttcggaaccgggttgaggctgagatgcctgaaatgacagaagtagaatt

SEQ ID NO: 79312 - DNA, 1162 bp, Homo sapiens
ctcaaaaggggccggatttccttctcctggaggcagatgttgcctctctctctcgctcggattggttcagtgcactctagaaacactgctgtggtggagaaactggaccccaggtctggagcgaattccagcctgcagggctgataagcgaggcattagtgagattgagagagactttaccccgccgtggtggttggagggcgcgcagtagagcagcagcacaggcgcgggtcccgggaggccggctctgctcgcgccgagatgtggaatctccttcacgaaaccgactcggctgtggccaccgcgcgccgcccgcgctggctgtgcgctggggcgctggtgctggcgggtggcttctttctcctcggcttcctcttcgggtggtttataaaatcctccaatgaagctactaacattactccaaagcataatatgaaagcatttttggatgaattgaaagctgagaacatcaagaagttcttatataattttacacagataccacatttagcaggaacagaacaaaactttcagcttgcaaagcaaattcaatcccagtggaaagaatttggcctggattctgttgagctagcacattatgatgtcctgttgtcctacccaaataagactcatcccaactacatctcaataattaatgaagatggaaatgagattttcaacacatcattatttgaaccacctcctccaggatatgaaaatgtttcggatattgtaccacctttcagtgctttctctcctcaaggaatgccagagggcgatctagtgtatgttaactatgcacgaactgaagacttctttaaattggaacgggacatgaaaatcaattgctctgggaaaattgtaattgccagatatgggaaagttttcagaggaaataaggttaaaaatgcccagctggcaggggccaaaggagtcattctctactccgaccctgctgactactttgctcctggggtgaagtcctatccagatggttggaatcttcctggaggtggtgtccagcgtggaaatatcctaaatctgaatggtgcaggagaccctctcacaccaggttacccagcaaatggtgaatgatcaatccttgaatatcataggaaacttaacatttgaaagagactttattaaagaatttcctttggta

SEQ ID NO: 79313 - DNA, 527 bp, Homo sapiens
catgtaagttccaagaagtataggtcttaagaaagaatatgataatctaccatacgaggttatagtaataggattacacataatgatacaaaaatcagtttctccgatttttctcttgatttagtacaaattagagcataaaaatttcaaagcagactttgaaaatctatttcatgcaataatactaccactttaattttttaacgtatcacacttcaaagtacttttgtgtaactctgctttactttgttgatttggaataaaagttgattaaacattaatatctaaccactttcaatttttgttcaccagtaattttacacagataccacatttagcaggaacagaacaaaactttcagcttgcaaagcaaattcaatcccagtggaaagaatttggcctggattctgttgagctagctcattatgatgtcctgttgtcctacccaaataagactcatcccaactacatctcaataattaatgaagatggaaatgaggtaaaaaataaataaataaataaaagaa

SEQ ID NO: 79314 - DNA, 886 bp, Homo sapiens
agaaaagtaaataataatcgttggataggcttcaaaaaagaaatgcatttgagatggaccttgacaagcagataaaatcttgatttagttgaaggactccatctggggaaacattaatgaaagtgcttaaattttcaatgctaattaaaatgtttatttttaaaatgtttcctttgatcctgtttttctttattaaataataccctggacaggaattaagagcacagcctgaagtgattgtgatgtccaagaagtactactcatggaacaaatagacaacttgtcatatttcaaaattaaatgctgactgcactatgaatatagaaaagtacagttgtaaacactatattctgtaccatgtaacatcttatgtatgatttcagttctttttaagaccaccagactacagttacaagaaagccaagatcagactgactcaatttgcattacatacatgttcagggaaagcctaattagggaaaacagaaacttcaaatttcactcttttaaactgaataggagagtatcttacatccactgccagaaaatatcaccccagaagtgaaaatttacatgttttaatttctgaaataatgactttgaggaaaacagttagaaattataaaacatacaaattcctatttgtcacactatggagactttggagaatatgattctccaagtatcttggtgtttaaacaaataaaaatatagttcagccaaaaataaactagctcacatgaaaaagctgtagtattaaaaactgctacatcagaaagtcgaagtgagtattcagtaaatttattaacaagatatcactggattaatgattctatctcaagtcaaaaacattttgccaaagtgacagcactaacacctaccacca

SEQ ID NO: 79315 - DNA, 563 bp, Homo sapiens
  misc_feature (385)..(385): n is a, c, g, or t
cccacgcatgcggccaggtaccctctgacgagaacagcccgagaaatcgtcccacacgcagccacgtaccttccaacgagaacagcctgagaaatcgtcccacacgtggccaggtaccatccgacgagaacaacccgagaaatcgtaccccacgcggccaggtaccatccgacgagaacaacccgagaaatcgtaccccacgcggccaggtaccttccgacgagaatgacccgagaaatcatcccacacgcagccatgtaccttccaatgacaacaacccgagaaatcatcccacacacggccacataccttccgacgagaactaggtaccttccgacaagaacaacccgagaaatcattccacacatgcaaccagatcacctcnatccaggaaggcgtctttgacaatgccacagggctgctctggattgctctccacggcaaccagatcaccagtgataaggtgggcaggaaggtcttctgccaagctgaggcacctggagaggctgtacctggaccacaacaacctgacccggatgcccgccgcagcctcaggtgccggt

SEQ ID NO: 79316 - DNA, 828 bp, Homo sapiens
accctcagtagggcggggccggggccgggccgcggggcagggacttctgcgcgccgctgctcgcctggcccactgggcttttcgcatctggggatctggggccagtggaggtcagccaggtccgcgagcaacctgtgctcaggccagcggaagcctgactccaggattcggtggtgccacagacagttactgaacgccaattttgtgcctgctttaagcgaacaggacagttcctgaccctcagttctttccaggctcttcactactctgcctgccctggaacttctcagatcacgtcagctccctctgcccaggggaaaagctacaaaaggaagagttccaagactgccaaataaagataaaccaatacgctttaaaaagtagaatgtattggtttatcagatttggggatgatgcctttcttcaaactgccctttcctgtttcacccaagagacctggtttctaggcccttctccagagtttgccctgtgtccacatccttctcactgtggtccttgcgactggacattccccttcagctggctcttttttgggagcccacctggcttatccttctctcataacgtttattgaactttattttacctggcctcctgtccaggctacatctgagaccatgcaggagctgtggagattaacggtaaaaggaacagcacattcaagactcttctaggaggtggggcaagatagccaaatagaaccctccagtgatcctcctcctcctcttccctggcaggaacaccaaactgaacaactatccacacaagaaagcaccttcatgagaaccaaaactcaggtagcaatca

SEQ ID NO: 79317 - DNA, 540 bp, Homo sapiens
gcggcccctactactactactaaattcgcggccgcgtcgacgtgatcaaaattaacgtcaccagtgataagtcattcagatttgttctagataatctttctaaaaattcataatcccaatctaattatgagctaaaacatccagcaaactcaagttgaaggacattctacaaaatatccctggggtattttagagtattcctcaaaactgtaaaaatcatggaaaataagggaatcctgagaaacaatcacagaccacatgagactaaggagacatgtgagccaaatgcaatgtgcttcttggatcagatcctggaacagaaaaagatcagtaatgaaaaaactgatgaagtctgaatagaatctggagtatttttaacagtagtgttgatttcttaatcttgacaaatatagcagggtaatgtaagatgataacgttagagaaactgaaactgggtgagggctatctaggaattctctgtactatcttaccaaattttcggtaagtctaagaaagcaatgcaaaataaaaagtgtcttg

SEQ ID NO: 79318 - DNA, 2124 bp, Homo sapiens
gatgaaacaaatacttcatcctgctctggaaaccactgcaatgacattattcccagtgctgttgttcctggttgctgggctgcttccatcttttccagcaaatgaagataaggatcccgcttttactgctttgttaaccacccaaacacaagtgcaaagggagattgtgaataagcacaatgaactgaggagagcagtatctccccctgccagaaacatgctgaagatggaatggaacaaagaggctgcagcaaatgcccaaaagtgggcaaaccagtgcaattacagacacagtaacccaaaggatcgaatgacaagtctaaaatgtggtgagaatctctacatgtcaagtgcccccagctcatggtcacaagcaatccaaagctggtttgatgagtacaatgattttgactttggtgtagggccaaagactcccaactcagtggttggacattatacacaggttgtttggtactcttcatacctcgttggatgtggaaatgcctactgtcccaatcaaaaagttctaaaatactactatgtttgccaatattgtcctgctggtaattgggctaatagactatatgtcccttatgaacaaggagcaccttgtgccagttgcccagataactgtgacgatggactatgcaccaatggttgcaagtacgaagatctctatagtaactgtaaaagtttgaagctcacattaacctgtaaacatcagttggtcagggacagttgcaaggcctcctgcaattgttcaaacagcatttattaaatacgcattacacaccgagtagggctatgtagagaggagtcagattatctacttagatttggcatctacttagatttaacatatactagctgagaaattgtaggcatgtttgatacacatttgatttcaaatgtttttcttctggatctgctttttattttacaaaaatatttttcatacaaatggttaaaaagaaacaaaatctataacaacaactttggatttttatatataaactttgtgatttaaatttactgaatttaattagggtgaaaattttgaaagttgtattctcatatgactaagttcactaaaaccctggattgaaagtgaaaattatgttcctagaacaaaatgtacaaaaagaacaatataattttcacatgaacccttggctgtagttgcctttcctagctccactctaaggctaagcatcttcaaagacgttttcccatatgctgtcttaattcttttcactcattcacccttcttcccaatcatctggctggcatcctcacaattgagttgaagctgttcctcctaaaacaatcctgacttttattttgccaaaatcaatacaatcctttgaattttttatctgcataaattttacagtagaatatgatcaaaccttcatttttaaacctctcttctctttgacaaaacttccttaaaaaagaatacaagataatataggtaaataccctccactcaaggaggtagaactcagtcctctcccttgtgagtcttcactaaaatcagtgactcacttccaaagagtggagtatggaaagggaaacatagtaactttacaggggagaaaaatgacaaatgacgtcttcaccaagtgatcaaaattaacgtcaccagtgataagtcattcagatttgttctagataatctttctaaaaattcataatcccaatctaattatgagctaaaacatccagcaaactcaagttgaaggacattctacaaaatatccctggggtattttagagtattcctcaaaactgtaaaaatcatggaaaataagggaatcctgagaaacaatcacagaccacatgagactaaggagacatgtgagccaaatgcaatgtgcttcttggatcagatcctggaacagaaaaagatcagtaatgaaaaaactgatgaagtctgaatagaatctggagtatttttaacagtagtgttgatttcttaatcttgacaaatatagcagggtaatgtaagatgataacgttagagaaactgaaactgggtgagggctatctaggaattctctgtactatcttaccaaattttcggtaagtctaagaaagcaatgcaaaataaaaagtgtcttg

SEQ ID NO: 79319 - DNA, 438 bp, Homo sapiens
gcggcccctactactactactaaattcgcggccgcgtcgacgcaaactcaagttgaaggacattctacaaaatatccctggggtattttagagtattcctcaaaactgtaaaaatcatggaaaataagggaatcctgagaaacaatcacagaccacatgagactaaggagacatgtgagccaaatgcaatgtgcttcttggatcagatcctggaacagaaaaagatcagtaatgaaaaaactgatgaagtctgaatagaatctggagtatttttaacagtagtgttgatttcttaatcttgacaaatatagcagggtaatgtaagatgataacgttagagaaactgaaactgggtgagggctatctaggaattctctgtactatcttaccaaattttcggtaagtctaagaaagcaatgcaaaataaaaagtgtcttg

SEQ ID NO: 79320 - DNA, 2092 bp, Homo sapiens
gatgaaacaaatacttcatcctgctctggaaaccactgcaatgacattattcccagtgctgttgttcctggttgctgggctgcttccatcttttccagcaaatgaagataaggatcccgcttttactgctttgttaaccacccaaacacaagtgcaaagggagattgtgaataagcacaatgaactgaggagagcagtatctccccctgccagaaacatgctgaagatggaatggaacaaagaggctgcagcaaatgcccaaaagtgggcaaaccagtgcaattacagacacagtaacccaaaggatcgaatgacaagtctaaaatgtggtgagaatctctacatgtcaagtgcccccagctcatggtcacaagcaatccaaagctggtttgatgagtacaatgattttgactttggtgtagggccaaagactcccaactcagtggttggacattatacacaggttgtttggtactcttcatacctcgttggatgtggaaatgcctactgtcccaatcaaaaagttctaaaatactactatgtttgccaatattgtcctgctggtaattgggctaatagactatatgtcccttatgaacaaggagcaccttgtgccagttgcccagataactgtgacgatggactatgcaccaatggttgcaagtacgaagatctctatagtaactgtaaaagtttgaagctcacattaacctgtaaacatcagttggtcagggacagttgcaaggcctcctgcaattgttcaaacagcatttattaaatacgcattacacaccgagtagggctatgtagagaggagtcagattatctacttagatttggcatctacttagatttaacatatactagctgagaaattgtaggcatgtttgatacacatttgatttcaaatgtttttcttctggatctgctttttattttacaaaaatatttttcatacaaatggttaaaaagaaacaaaatctataacaacaactttggatttttatatataaactttgtgatttaaatttactgaatttaattagggtgaaaattttgaaagttgtattctcatatgactaagttcactaaaaccctggattgaaagtgaaaattatgttcctagaacaaaatgtacaaaaagaacaatataattttcacatgaacccttggctgtagttgcctttcctagctccactctaaggctaagcatcttcaaagacgttttcccatatgctgtcttaattcttttcactcattcacccttcttcccaatcatctggctggcatcctcacaattgagttgaagctgttcctcctaaaacaatcctgacttttattttgccaaaatcaatacaatcctttgaattttttatctgcataaattttacagtagaatatgatcaaaccttcatttttaaacctctcttctctttgacaaaacttccttaaaaaagaatacaagataatataggtaaataccctccactcaaggaggtagaactcagtcctctcccttgtgagtcttcactaaaatcagtgactcacttccaaagagtggagtatggaaagggaaacatagtaactttacaggggagaaaaatgacaaatgacgtcttcaccaagtgatcaaaattaacgtcaccagtgataagtcattcagatttgttctagataatctttctaaaaattcataatcccaatctaattatgagctaaaacatccagcaaactcaagttgaaggacattctacaaaatatccctggggtattttagagtattcctcaaaactgtaaaaatcatggaaaataagggaatcctgagaaacaatcacagaccacatgagactaaggagacatgtgagccaaatgcaatgtgcttcttggatcagatcctggaacagaaaaagatcagtaatgaaaaaactgatgaagtctgaatagaatctggagtatttttaacagtagtgttgatttcttagacttaccgaaaatttggtaagatagtacagagaattcctagatagccctcacccagtttcagtttctctaacgttatcatcttacattaccctgctatatttgtcaagat

SEQ ID NO: 79321 - DNA, 460 bp, Homo sapiens
gcggcccctactactactactaaattcgcggccgcgtcgacgaattatgagctaaaacatccagcaaactcaagttgaaggacattctacaaaatatccctggggtattttagagtattcctcaaaactgtaaaaatcatggaaaataagggaatcctgagaaacaatcacagaccacatgagactaaggagacatgtgagccaaatgcaatgtgcttcttggatcagatcctggaacagaaaaagatcagtaatgaaaaaactgatgaagtctgaatagaatctggagtatttttaacagtagtgttgatttcttaatcttgacaaatatagcagggtaatgtaagatgataacgttagagaaactgaaactgggtgagggctatctaggaattctctgtactatcttaccaaattttcggtaagtctaagaaagcaatgcaaaataaaaagtgtcttg

SEQ ID NO: 79322 - DNA, 526 bp, Homo sapiens
ccagtgctggcttcaccaaagccagacaggggtggacactgctagcagctcctgtattctgcccgtgggaagcaccagggtatggatggaaggctgagctgcctcctgcagccccctgaagctgtctctgctccaaggcacaaaaatcagaggtcacagctctttgcagagggtgaccttgtgcgttcatgtccctctggatttcagcaccaacttgtgccccttgttgccttcagtgcagaaagcagccacagctcagtggcgactccttcccctgccactgccctgtccctggtggtgtccccagattcacccttttgcaaacagagcctttgaaagtagccttgcctgactggcttcttctccaaatgacatctgtttcctggtgggaccctgtcatggtgatagaaaatgttcaaggttttggtgaattcgagagggcaagttctacccaaagttctagatgttaaaaaataaaagtaaaaacaaacactgggcaaagcaagaaatccatgccctctgacta

SEQ ID NO: 79323 - DNA, 746 bp, Homo sapiens
agcggcctacttttttaaagccatcatcttatcttctagctgtacctatttttttaaatatatgttttatttcaacagcttttgggatacaagtggtttttggttacatggatgaattgtctagtggtgaagtctgagattttgctacactcttcacccgagtgaccccagtagtgtacattgtatctaatatgtagtttttttatcctttatcccctcccaccctgtatctatttttaattgctttgtgaactaaggcaaatgtgataaagaggcatctgatgtacctgcttctagcatacaagaaaacatatttcttgagcatgctgttacatgcttgacactttatatacactatttcatttaacatcccaacaatcctaaaacctgggttttgttattgaagaacccaaggctctgagagttaactaacttgcccaaggtcacacagttagcaagttgtgtgggcaggatataagcccagtctggctgcaaagctatgttctttacactgtaacttactcctgaaggaaggaggcttaaaaataatccatgcagaatttgtatcagcttgatatgtgtgccttattattattattattattattattttgagacggagtcttactctgttgcccaggctggagtgcaggggcgtaatctcggctcactgcaacctccacctcctgggttcaagccattctcctgtctcagcctcctgagtagctgggattatgggcgcccac

SEQ ID NO: 79324 - DNA, 146 bp, Homo sapiens
tttatactctatatttcaaccattagaggaagagagacttccctcaagtttatttgtctgttttggcctcaagttcaaactctcagggaatgattatattggctgtgttgcagtcgggtgtcttactcttgcacatctgtgagaag

SEQ ID NO: 79325 - DNA, 393 bp, Homo sapiens
gggaaaatggaaataaactataaaagccaaagtaaaacccaggccctgcatggtacattagtacttccccaaggacactgaattgaacaaaatttagtaactctgggtatactggaaaaccctttacaaattaacccagacagaaaaaaacatcaaggcctctgcaggtgtttggatatagccagagggatggtgtctgccgggggtggaaggtctgtggcttggataagcagcatatcaaagccaggtctggtaggcagggagctggccccatatctacagatcagaatggcagcatcgttggacatggggtattgtaagaggtgcccagaccaaccttctagaaaagttattaaagttttccagttgccttctgacatatatctgtgtagc

SEQ ID NO: 79326 - DNA, 674 bp, Homo sapiens
ggagttatttaaggcaaagaataaagtgaaaatcctggggtattttcaatattaagccactcaaaacattgtactgttacaatgcaagtttactgtgaactgacttttttttagatagcaatagctatttaggtttttttcccttatgatctcttcaggtcctcattgagatatagtttaggatctgtcagaagcaagccagtttgcatggaagtcattgtttcaggttcactgtgaccagatgtggtcttcctttaaattggtgttaattggaaaaagtaacacttttagaattaagaaaagctctgaatccattttctcctcgaagcaattgtgattggtctcacctcacccccactgatgtgcatgtggaaggttctgcctttctgcattaagtgacagcggagagctgcctacatcccccacccttcaggctgtttacagacactgagctgtgggactgattcacgggcatcattgaaaactgtctgagatactgcttttatcactagttgaagttggatagataacatttggtgctttaagtagttcatgtaaaatcttcatacatttcacgagtgcacttttagaaaaacaataatgtgacctgatgatgtcattctgagtttctcaactgctcagaagaaccgtggagctcttaaatttgaaattat

SEQ ID NO: 79327 - DNA, 976 bp, Homo sapiens
ctgcgccctccttcccaggtggacggcggctctcctcgccatcctctccacttccagcctatcatctgtctgcctgttacatgtttgtaacttttgacctttaaattggtataaaaatggtactgtaagttcactgaaccaagaaaatctgctgaaggaagggggtcagtcacacccttttggggtttccagtgtatgaatggagggggtggcggtggtggagggacagggagcaatgagagttgccagccttattgctgtcctgacccctggctggggacgactcccctgtctccacctgaattgaagctgggctgtgaaaagtagtaagaaccctcggtttttggttcctttttcaaccagcaatcagccatgaagtgcctgaccacttgagagctacagcaggtgctgtctcggagagggcacaggaaactgggcccttcccaattttagcccaagggtgccgaaaagtcagggagctgctggcctccacactccttcccattggtgtggtccgaattcccctttagccagacatttccaatgtccagaggcccaggaggggacagctggaagccagaagcccacctgacgccatcaggaatttccatgaatgacctggaaacctctcagactaaaccaatgccgcccaatctgggaatccaggagggctggtcccatagagtggtggggacatggtgctgagacggacagcctcgcctcatccgctctttcccacttgccagccgggaggcctgggcaaaatcactttctccccagggaagtggaggctcactgtgcagtccacgcggagcaatggggtgaagtttccagagcagggcagggcatgtggggaggctcaggaatgccacccttgccctcaggcctgggcacagcatagcccccatgacgcttctctcatcctggacccatcagcccggaagactctggaagcagcagtggcagcaccttcctg

SEQ ID NO: 79328 - DNA, 401 bp, Homo sapiens
aaatgtctgtcaggtctatctggtgtatagcgttgctcaagtcctctatttctttgaacaacagtatacaccaaatagatgtgatagacaccaactaggcgtgatagaaaaaaacagcagaatatatactcttttcaagtacatatggaacattccccaggatagattatatgctagggcataaaacaagtctgaataaatttttaaaaaattatacaaagtatggtctccaaccacagtggaatgaaatgagaaatcagtaacagaaggaaatttagaaattcacaattatgtggaaattaagcaacacactcttgagtaatcaatggtctgaaaaatgccagaaagattagaaaatgctatgagagaaatgaaaatgaagataaaacatacgaaaaatt

SEQ ID NO: 79329 - DNA, 444 bp, Homo sapiens
gtccgtcaagctgccctgcaccagctgtttgaaaaggagcatcagcagtaccagcaggaactaaatcagatgggcaaagctttttatgtagagagattctgatggcatccaaaacactgctcttccattctcaacatgcctgctaacctagccttctagaacctctaccaccttgaacctccttcccaaaacatacctggatcttgctatctgtcagggacttaagacagcacttccactctcacttctccactctctcgttaatcctttgccgctatttgggaaacaatctatgaaacaacagtaacaacaagagtgacgccttgtggtcatagtgggatttactatgttgatgtaagggggcaggggtggggaggggtggacaatgagagttgagaatcctgatttggtataacaaataaatttacttcctaaaggctcaaa

SEQ ID NO: 79330 - DNA, 737 bp, Homo sapiens
taaatagaggcaagggtctctacgttggccaggccggtctcaaactcctggcctcaaatgactctcctgcctcggcctctcaaagtgctgggattacaggtgtgagccagtatgcttggccttttcttttttcttcttcttctttttatttttcgagacagggtctcgctctgtcacccaggctagagtgcagtggcacaatcttggctcgctacaacctctgcctgccgggttcaagtgattcttgtgcctcagcctccaagtagctgggattacaggcacctgccaccatgcccagctaatttttgtatttttagtagagacgagggtttcaccatgttggctaggctggtctcgaactcctgacctcaagtgatccgcccgcctcagcctcccaaagtgctggaattacaggtgtgagccaccgtgcccagctccctggccttaaaagtcatgtaatttaatgatcagaccccagtcacagccataggatacaaagaagcaaaggcaaagagccctgtgtcctgggcacggttacaggccagtgtagggaaagagcttctgcttgccagtgtgaagaacagaggagtttaggaagtgtgagtcaggctcagcttagtcaggcagagaccagtgggcatgggttacctgggggtaacgcgggccaggtgggcgggctggcagcctggggcccatttcctgccaaagcacctctgaccatccttctcttcacccag

SEQ ID NO: 79331 - DNA, 176 bp, Homo sapiens
ggctgtgggtccctgagcctgccctttgatttcagagctgttgactgacacagggctgaatggttcctgccagagtcctgaatctggtggcctgtgtcttttctgtgccccattcccgcaggggggtgagccatggtgtagttctcacagctcgccctcctgggcagagaaggtac

SEQ ID NO: 79332 - DNA, 745 bp, Homo sapiens
gtatacgccagcagtggagctcgtggccacccagcccctgctcagacaggaggctgcggcccaggactgtgtggctggtgggggccaggttgggccaggcctggggctgccccgtccttgcctccctgggcccatgagcatcaacgtctctatagagaccaaggaccctggattcctccagtgacaggggtttggcctctggacagagaggtcccggatgttacaggtcagagccctccagacccccaaggactgtactcactgcccagaaatagctgctgcctctgggcaaccttgtaggcaccttctccacccaggacatgggcacccgtgacgatgtccccgaagccaaggtcctggtccccgtggccgtgtactgcgggagcatccctcggaccagtgctgggccccgggtgctcccgcctggaagcatcaactccagtctgcctcatggagaaggttctctccagcctgagccaagagccctgctgaacaacgaggaaccgtcacagctcctgcgtggactcggacagctgggtggcctcaagctggacaccccttccaagggctggcaggcaaggaatggtcaccccaggaacctcagggccttgtctttgggggaccagcccctggtgctcctcccttctccggagtcagaggccaacagcgtggccagggacaccatccagattaaggacaagctcaagaaaaggaggctctcagagggcttggcagcgtcttcccg

SEQ ID NO: 79333 - DNA, 399 bp, Homo sapiens
agcacttctctgcagaaagtaggccttgccttgtgtcttgaccatctctttgacttgactggaaacattctctagttgtagtccagctttgctttagatttactttgcttttttgttttttggtataagtggccctaaatacagcagtcaaactggagtaatgagaaataagttacctcattgtaagtttcctttggatgttctgcttaaaacattggctttgatgaaaagaaaggaaaaacacatgaaaatgtaatgcggggagacaagtttattaaaagccgtgactacggaaaatagcatccttaagcttgatgacttaatttcctctctgcttttattgatcactttattatataaggcaggattgatagcaggatgcatcggatttccaattat

SEQ ID NO: 79334 - DNA, 359 bp, Homo sapiens
cttctaagtagctaggactacaggcccccactatcatacccagctaattatttatttttcctagagatgggtcttgctatattgcccaggcctcaagtgatccaccagccttggcctcccaaagtgttggaattacaggtgtgagccatggtgcctggcccaaattctttttttctaatgcataagtattactttgtttttgaaagtggtatggtgtttaaattgctgaagaaatgataatgataaggtgattactttagccttcacctggcttttcatctgggaattagtacattcttttagtgaagcaataagtgtgtggtgtcaccttattatatattttgtagtactgaaaaatg

SEQ ID NO: 79335 - DNA, 538 bp, Homo sapiens
ggaagagcaatcttgttaggacctagggcagcttgtgtttcttctccgctcgccatcctccaatgcctttccgtcttcttcagagtcaaagctaaggctctatgaacaggctgcccccctgcaggcccctccctcgcaccgctctctccttcctctccagccagcgctcaccttccagcctccccaggctttgcttctgtccaagcacaggccacactcaggctccttgcttcactctctattctattttcctacgttacttttcttgagaacaacatcaacgtggttctatttggttttgatttttaaatctaactctcccactagaagataagctgcatgatgctgggcactcttttgtagtcacggctgtgtctctagcccctagaacaggagcttacagaaagcgggcattcgatacatatctgtgaatgagtgagagtgtagaaagagaggaagatgcagtgaaccaaacaggattccataaacccagcaggaagcagggtcgatatggctaaatgaaatcaactggcttcca

SEQ ID NO: 79336 - DNA, 754 bp, Homo sapiens
cggagtctggaggacccctgattccagacgttggtgtttaaaagttaaggcgaatgtggaaacacccgaggggaactttctcatgcattagcgcacctcgaggtgggaggggaagcggtgactgtcctccctccaccagccgtcgcgggaacccgtggggttcagtgaagggtccagcagttcaggtgcccgccccgggcctgggccttggctccgggctacagtgtgagatcccgggctaggtggcccgcctggggcaggtcgccgggacaaccccaccgccccgcaagtccagcccggcctcgggcacgccaaaggattcctagcaagtacaagcttctgacttcacagagaggccatggtaaacatcccaaggagtgcatcagccatgggttcagggatttcagccactgcatagaagacaagctgtaacctaattcaatcacacttggcagcaaccggtgaagaggcagtctgggctctggggagctcccccgtgacagatggaaggggcccctacatctggagaggctctagaacctcctcccagtgaggctaacgtggtctgaaggggtctctttgcccagtgacattctggggttgggatctgggatttcctccattgcttccttacatcaacatttgctaaagctcaaaagaagaccttccacgtaatgacatcaaacagatctgaaaccacagttaaagtaacgtccacttaacacttggtcagcactcatgtttcattttgtgt

SEQ ID NO: 79337 - DNA, 557 bp, Homo sapiens
gtttccccagggcccctccccttgaagaaattagacaggaagctggagtagatggttccctctttcccacctctcacactcccaagctctggttaactctctgtgggccagtggctagattccccaacacagatgacaactgaacaatacacatgcagcgtaagaatgttgtcactgccaccagccacttacagatacaccattgctaaggtccacccaactggactgtttcccccttccatagactaagccccaaaggccaaaaataaaaccccctaccccaaacctgcctataactgtttgaccagaggccagctgtcccaggatgcggttaagatgtctaccttgcacaacagaactggcaagaaaaacatctccaggaagcggtcagatacacggcacaaaggactcccccctccccgcttttccttttccttcaccctgacccagttctacgccctgtaagacgttgctccagcctataagtggggctgcctcctctgcttttgtcaagagatagcccggcaggactgacaataaatcagtttgcctgaact

SEQ ID NO: 79338 - DNA, 136 bp, Homo sapiens
ccagccccagccaactcccggcactgaacactacagggaatggacttccggcagatctcacccaccacctgcaccaccccagccagcagcagctctgcagccccgcccaccccagccagcagcagctctgcagccc

SEQ ID NO: 79339 - DNA, 573 bp, Homo sapiens
attttctataatttggatgttatgtatgtccactgtgtctgtgtggagggaggccaccacgtgatggtttgctcgtgcgtgtctcttcctgactctgagctcgacaccgtcaggttgatagctggaaatgggccacggtgtgaatatttacaccattgcaattggcaaatgctgtaaatcaaggcttgacttatggttctgttgattattcttcacagtgatgttagtaatacagattaaacttaacagtgcattgtacctgtagccattccattgtgaataacacaaaaagtggaggaaatatttttctcgcatttggaaattattctgtgattcagcaaagaagttgttcatgtcattaacaagttcagaaatacatgctgccaaagccaaaaagagtcttcagtttaataaaaataattaacaggaaggtgagaaatggtttaccagctgttcacttactggatttaaggttacttgttggggaaagagcagagtaagatgcaactctgtcaaatcatggctgaatatgtttggcaaaaaatcaataaaaattctgtgagcatcaaactg

SEQ ID NO: 79340 - DNA, 486 bp, Homo sapiens
gagcacttagtcatagctagactggtcctgcaggggtggtggaaaatgactggattctggatatgttttgaaccgacatccaacaagaatcactgttgaattagacatcaagtgtgaacaaaagaaaggagtctttgaaagagtcttctttgaaaatactgcaaatgagcttttatttctgattttgatcctaatcctaggggagttcaacatgatggagacattgtttaggcattaggcattagactgttgtttcctaaattgcttcctgagtaaaccaattaaaattataatgtgggtctccaggagaaaagggaaggagccaaacttggtacaatttcacctcttaaatgccacttaacggcacttttctcctattgcttggggtaatgaaatttctgggcaaataggggcaaaatgaacacaggggccctcatgtaggcagcccatccctatttactcacagctgtaatgctacctgatggt

SEQ ID NO: 79341 - DNA, 222 bp, Homo sapiens
ggccctgcccagattccccagctgcgatgctcaggaactcagggggagaaaggtgaccaggtctcatggagaggattaatgtgcggaacacgcagccgctccagatcccctggagaggatctcgttcccgtgaagctggcagctcccggagggctgagtgcttgtttctgctctcactgtgttagctgcctacaagcgtccccgctggcctttgccttaccg

SEQ ID NO: 79342 - DNA, 392 bp, Homo sapiens
tccccccgccacttccctcctcctgctccagcctgcctttcctgcacagcttctggctgcttctaggcactggaggaggaattcatcaggggctgacaagtggcaaatgacattagctgccaactatatttttttaaatgtgaacacaaccggggtaatgtcttattcccttctccctgtttccagtccctgtgcctaacaatagtgcctgaatcctggtaggcacatggtatttcgaattcctccgcggtgggcatttgtcattttcggctatctctcgttcctttcctcttcttctgttatcaaatgcctttcttttcttttgaggagccactcccttccttcaatttatgtggttctggggattaaaggagctaattctgtcaaattct

SEQ ID NO: 79343 - DNA, 170 bp, Homo sapiens
gtgacagaattcactgtcaccgttgtctttaataactcctatttttactgttcacatctagcactgcaccaatggatgagctgagaacctcttcaaaaggaacttgtgaaaaatgtaaaggaaatattactgctaaataggcaaggctaatgttcttgcaattgtggaaa

SEQ ID NO: 79344 - DNA, 377 bp, Homo sapiens
  misc_feature (48)..(48): n is a, c, g, or t
gagatgaggtctgacgctgtcactcaggctggagtgcagtggcacgantcatagctcactgcagcctcaaactcctggcctcaagtgattcccctgactttgtctcctaagtaactaggactataggcatgcaccatggacttccagctaagaatttaagttaaaaaaaacatacatatatacgtgtattaatgtagacaaacaaacctgaaactgtctttaaaaactttgttttgctattatgtgaaatttaaaattgctgtctaaaatatttattcacaggtatataatagtaaatataacctctatataggcagttatgtataataaaaacagcttttattctattcttacacaagatatttttagctaaccac

SEQ ID NO: 79345 - DNA, 431 bp, Homo sapiens
gacgccaggaacctctccaaatactttagtattttaattcaaaaagctgaatccttacaacagccatatgtggtatttttcagatgagaaaactgatgtacatatagtaattaatttccctatggtcacactactagtgagatgaatccagcatttgaagccagatagactgcttccagaagccagatttgtaactctcaccaattcacttcctggctaaaaaccttcaatatctccctgtcttttacagaataaactaccctcttattagaagagcaaaaaagtccgctgcattttatgactcctacatatattttcagatacttatcttttggatccccaaagccattctcatcttgaaacatttgtcattctaacacacactgttttatcatgccactatgtgtatatgttttctctgcttgagaggc

SEQ ID NO: 79346 - DNA, 2985 bp, Homo sapiens
ctaaagcagaccgcgggttaggggcttcatctctctgcgttctcagttgtgggaggccttggtgattcggccacagcctcagcctccgtcgctctgtgacctgcgggtattggatgattggtagctaagactcccgaatacttcagaagtggggaaatggaactcttaacattcagggatgtggccatagaattctctccagaagagtggaaatgcctggaccctgaccagcagaatttgtatagagatgtgatgttggagaactacaggaacctggtctccctgggtgttgctatctctaacccagacctggtcacctgtctggagcaaagaaaagagccctacaatgtgaagatacataagatcgtagccagacccccagctatgtgttctcatttcacccaagaccattggccagtgcagggcatagaagattcattccacaaacttatactgagaagatatgagaaatgtggacatgataatttacaattaagaaaaggctgtaaaagtttgaatgagtgtaagttgcagaaaggaggttataatgaatttaatgaatgcttgtcaactacccagagcaaaatacttcagtgtaaagcaagtgtcaaagttgttagtaaattttcaaattcaaacaaacgtaagacaagacatactggagagaaacactttaaagaatgtggcaaatcatttcagaagttttcacacctaactcaacataaggtaattcatgctggagagaaaccctacacttgtgaagaatgtggcaaagcctttaaatggtctttaatatttaatgaacataagagaattcatactggagagaaaccttttacttgtgaagaatgtggcagcatctttaccacatcctcacactttgctaagcataaaataattcatactggagaaaaaccctataaatgtgaagaatgtggcaaagcctttaataggttcacaacccttactaaacataagagaattcatgctggagagaaacccatcacatgtgaagaatgtaggaaaatctttacctcatcctcaaactttgccaaacataagcgaattcatactggagagaaaccctacaaatgtgaagaatgtggcaaagcctttaataggtccacaacccttactaaacataagagaattcatactggagagaaaccctacacatgtgaagaatgtggcaaagcttttagacagtcctcaaaactgaatgaacataagaaagttcatactggagagcggccctacaaatgtgatgaatgtggcaaagcctttggacggtccagggtcctgaatgaacataaaaaaattcatactggagagaaaccctacaaatgtgaagaatgtggcaaagcctttagacggtccacagatcggagtcaacataagaaaattcatagtgcagataaaccctacaaatgtaaagaatgtgacaaagcctttaaacaattttcgctcctgagtcaacataagaaaattcatactgtagataaaccctacaaatgtaaagattgtgacaaagcctttaaacggttctcacacctgaataaacataagaaaattcatacttgagagaaatcctacaaatgtaaagaatgtggcaaacctttggatgatccacaaaccttaatgaacatgagaaaatttatactgtagagaaaccctggaaatgtgaagaacgtggcaaagttctttacctcattctcaaaccttgataaacataagagaattcataccggagagaaactgtacaaatgtgaagaatatgcaaagcctgtgaatggtccacaaacctgaatgagcagaagaaaattattactggagataaaccctgcaaatgtaaagagtgtaacaaaacctttaaacagccctcaccggtgaataaacataagaaaaatcatgctggagggaagccctacacatgtggcagaatgtggcaaagcatttaattggtcctcaatgcttaataaatataattcatgctggagagaaacttcacatgtgaaccgtgtgcaaagcctttaaatggtcctcaacccttaatgaacgtaagtgaattcatgctggagcaaaaatgcttcacatgcgaagaatgtggcacagtctttaccacatcctcaaactttgttaaacataagagaatttataccagagagaaaccctacacatgtaaagaagtgtgcaaagccttcaataggttctcaacccttactgtgcacaagataattcattctggggaaaaaaatgctacaaatgtgaaaaacgtggcagagccttcagaccatccacaaacctttatgaaaattcatatttgagagtagaagaatcattccacaaacttacattgagaagatatgaaagatgaatataagaattcatcctagatataaaaccatagaaatgtaaaagatgtgacaaaacctttaagccatactccaggcttcttaaacataatgagaactcatactggaggaaagtcttacaaatgtgaagaatgtggcagtctttaaatcttcctcagtcttttctaaatcatgaagataattcacactgaagagaaactgcaaacgtggagaagtgtgacaaagcttgcaaccacactcaatctattctaaatataagagaaagtatattggtgagaagccaccaaaaatattgaaaaatgtgcaaagccttcaaatgcttgtcacatcttactgtatatatataattcctactgaagaaatcccctggaaatgcaaaaaatgtggcaggatttttaccaatgctcatctttttgcacatgatatcctttatattcgagaaaagttatagaaatataaaaaatatagaaaagtcatatctcctcacattttactaactagcaatgttcatacttaataaaaacattataaatgtaatttctgttgaaagacttcagaaaatataggcctttaaagtgaagaagagtattcttaagacaacaatacactttag

SEQ ID NO: 79347 - DNA, 487 bp, Homo sapiens
aagccctggaaaccatctctcattcttccaaagatgttcatcttgttgcaaaggctcctgagtggccaactgcagcctcagcatgagatgggtttgacactgagtctccccttgcagcaggagactcccagtgcttggtcctttaaaaataaaaataaaaaacctcctctcctttataccccaagtctgtgacctgtttctgcctgtggttctgttttctaggtaagaatgagctctgtgggttaatcagataagaacctcacatcatctgtttcccattaatctgtcacagctcccaggagacagatcccaaggcgtgcatgtgtctagaaggcccttaggtctcggctgagggagatttcttaggcaggtcagcctgtcagcctctgcactctgtgtgggtagctgcctctaaggggccttccatcagactggaattgacaggtgtgtccaacccctgtcccccctggacccctctgccacaaaa

SEQ ID NO: 79348 - DNA, 247 bp, Homo sapiens
gtctccccaggccaccacctggctgcctaaggcccacgcacctgcaggctctgtgttcttaggtgtctggtggcagattctcatgcctttgtgtgagacttgtctttttcttctgaaagttttgtgggacttttttcatctccctgctcagggcttggtgggccctttgcattcgaagattcttgtctgcctttagctctgggaagcggctggcgccgttcagggctgggagccgctctgtcaggat

SEQ ID NO: 79349 - DNA, 363 bp, Homo sapiens
cctctgactcattgtgatgagtagggcggagggcttcactgcctcagtttccccaactttggaccttaaatcctctcctgatgcctctcagcccagccaggaaggagagctaagaccaagagggatttaacagatgcaggacacacagccttgtcctcagaccccccaagtctgagagaagcaaaacactcaccttgagagccctcggacttggaggtgaggtgcagaacccaggctgggtgtgtgctgaggggtggtgggggtgggtggtgctgggtggctggcctgggaatactttcttaagctaaggctggggcttaggggaggccagaggaagggtaatagtttgcctgggggtgctgg

SEQ ID NO: 79350 - DNA, 295 bp, Homo sapiens
tctcaatactactttgccaatatttgagtcttaccataatccaatcacaacattctagttccgacatctacatttaaacatctataatatcatcaaattgtcttgcaatatttctctcatgcttaagacgtgcaaccttgcatttccaaggaaaaatccataaacttttttagaagcatatgttcaaacaattcagttagaaaataggcaacggacatgaaaagatatttcactagagagcataaagatagaacataagtacatgaaaagatgttcaatatcattagccatcagg

SEQ ID NO: 79351 - DNA, 366 bp, Homo sapiens
caaaattataaagaaaatactgcatattgcttcagcagtgggtgctacagtcagactattccgactaacatcctgcctctgacactttctagtcatgtaacctcgggcaagtttcttcagtgtccccacttaaagaataggaataatcacagggcttatcatacagcatctatgttataattacaccaggcaatgcatgcaaaacacttaacagtgtctagcacataatggcgcttaataagtgttagctactagtaaacattagctgttaatcattagcctcattgttaggtccacgttctcactccagctgttttactttctgccttgacattcaatttattacttcttctgttgcatgtatcc

SEQ ID NO: 79352 - DNA, 407 bp, Homo sapiens
  misc_feature (34)..(34): n is a, c, g, or t
  misc_feature (53)..(53): n is a, c, g, or t
  misc_feature (61)..(61): n is a, c, g, or t
  misc_feature (272)..(272): n is a, c, g, or t
  misc_feature (345)..(345): n is a, c, g, or t
  misc_feature (397)..(397): n is a, c, g, or t
gcggggcctgctcccagacccccggctctctccntccccagttcttccaggangggctggntagcctttagacacttgacccctgcacccctgtctttccccatagctcagtgaagagaggaaggacaggatctttcaaagggaactttactaagaaacaaagcaggatgggatgaaagctgaggagggtgatggtacagcactgagatcccgggccctgcctgccccacacgggtcatgatgagtggtcgttgttaccttttctgctgggnctgggtcctgcctaggagctgaagacacagtcagccacgcctcttccagcccacgtgttcccctgagcaaagnttcttcctgcagaaagaatggggggagattccccaggacatcaaaagtcaanccttcagaat

SEQ ID NO: 79353 - DNA, 690 bp, Homo sapiens
atcattaaaatgctttatctcattggttaactgtgtgtctctaaaatttttactattttaagccttaggtagaatttggtcatacctcactttgcctctctttataaggtataatactgcatattcacatatgtataaatatctatatctaaagaagtattttaaagagtatcttaaactttctggcttttgtacactattctatatataacctttaatgaaagttttattgtaatcgtatgctacagtggtacatttaatcggtgtaaaaaattgttttgtggaaaaagattcagatttttgcatttaattccatagctggaattcgtgggttgatcagtagttcagtgttttgaaatctgtgttcctcagctactttgctgatgttaccagtaaaacattgtgttttgtttctttctttgtttttgagacagggtcttgctctgtcatccaggctagagtgagctgagatcacaccactgcactccagcctgggtgacagagtgagaccccatctaaaaaaaaaatcagttaatcctgagtacagaaaccacccagaagcactttataatcaaattgattaaagtcagtgataaagaaaaaaacaacagaaaaccaaagacaaattatgcacagaggaacaaagagaggatgacagcaggtttttcatctgaaaccttgctgtggata

SEQ ID NO: 79354 - DNA, 4657 bp, Homo sapiens
  misc_feature (1043)..(1043): n is a, c, g, or t
  misc_feature (1140)..(1140): n is a, c, g, or t
gttcttgcactcgctggaaagcggctccgagccaggggctattgcaaagccagggtgcgctaccggacggagaggggagagccctgagcagagtgagcaacatcgcagccaaggcggaggccgaagaggggcgccaggcaccaatctccgcgttgcctcagccccggaggcgccccagagcgcttcttgtcccagcagagccactctgcctgcgcctgcctctcagtgtctccaactttgcgctggaagaaaaacttcccgcgcgccggcagaactgcagcgcctccttttagtgactccgggagcttcggctgtagccggctctgcgcgcccttccaacgaataatagaaattgttaattttaacaatccagagcaggccaacgaggctttgctctcccgacccgaactaaagctccctcgctccgtgcgctgctacgagcggtgtctcctggggctccaatgcagcgagctgtgcccgaggggttcggaaggcgcaagctgggcagcgacatggggaacgcggagcgggctccggggtctcggagctttgggcccgtacccacgctgctgctgctcgccgcggcgctactggccgtgtcggacgcactcgggcgcccctccgaggaggacgaggagctagtggtgccggagctggagcgcgccccgggacacgggaccacgcgcctccgcctgcacgcctttgaccagcagctggatctggagctgcggcccgacagcagctttttggcgcccggcttcacgctccagaacgtggggcgcaaatccgggtccgagacgccgcttccggaaaccgacctggcgcactgcttctactccggcaccgtgaatggcgatcccagctcggctgccgccctcagcctctgcgagggcgtgcgcggcgccttctacctgctgggggaggcgtatttcatccagccgctgcccgccgccagcgagcgcctcgccaccgccgccccaggggagaagccgccggcaccactacagttccacctcctgcggcggaatcggcagggcgacgtnggcggcacgtgcggggtcgtggacgacgagccccggccgactgggaaagcggagaccgaagacgaggacgaagggactgagggcgaggacgaagggnctcagtggtcgccgcaggacccggcactgcaaggcgtaggacagcccacaggaactggaagcataagaaagaagcgatttgtgtccagtcaccgctatgtggaaaccatgcttgtggcagaccagtcgatggcagaattccacggcagtggtctaaagcattaccttctcacgttgttttcggtggcagccagattgtacaaacaccccagcattcgtaattcagttagcctggtggtggtgaagatcttggtcatccacgatgaacagaaggggccggaagtgacctccaatgctgccctcactctgcggaacttttgcaactggcagaagcagcacaacccacccagtgaccgggatgcagagcactatgacacagcaattcttttcaccagacaggacttgtgtgggtcccagacatgtgatactcttgggatggctgatgttggaactgtgtgtgatccgagcagaagctgctccgtcatagaagatgatggtttacaagctgccttcaccacagcccatgaattaggccacgtgtttaacatgccacatgatgatgcaaagcagtgtgccagccttaatggtgtgaaccaggattcccacatgatggcgtcaatgctttccaacctggaccacagccagccttggtctccttgcagtgcctacatgattacatcatttctggataatggtcatggggaatgtttgatggacaagcctcagaatcccatacagctcccaggcgatctccctggcacctcgtacgatgccaaccggcagtgccagtttacatttggggaggactccaaacactgccccgatgcagccagcacatgtagcaccttgtggtgtaccggcacctctggtggggtgctggtgtgtcaaaccaaacacttcccgtgggcggatggcaccagctgtggagaagggaaatggtgtatcaacggcaagtgtgtgaacaaaaccgacagaaagcattttgatacgccttttcatggaagctggggaatgtgggggccttggggagactgttcgagaacgtgcggtggaggagtccagtacacgatgagggaatgtgacaacccagtcccaaagaatggagggaagtactgtgaaggcaaacgagtgcgctacagatcctgtaaccttgaggactgtccagacaataatggaaaaacctttagagaggaacaatgtgaagcacacaacgagttttcaaaagcttcctttgggagtgggcctgcggtggaatggattcccaagtacgctggcgtctcaccaaaggacaggtgcaagctcatctgccaagccaaaggcattggctacttcttcgttttgcagcccaaggttgtagatggtactccatgtagcccagattccacctctgtctgtgtgcaaggacagtgtgtaaaagctggttgtgatcgcatcatagactccaaaaagaagtttgataaatgtggtgtttgcgggggaaatggatctacttgtaaaaaaatatcaggatcagttactagtgcaaaacctggatatcatgatatcatcacaattccaactggagccaccaacatcgaagtgaaacagcggaaccagaggggatccaggaacaatggcagctttcttgccatcaaagctgctgatggcacatatattcttaatggtgactacactttgtccaccttagagcaagacattatgtacaaaggtgttgtcttgaggtacagcggctcctctgcggcattggaaagaattcgcagctttagccctctcaaagagcccttgaccatccaggttcttactgtgggcaatgcccttcgacctaaaattaaatacacctacttcgtaaagaagaagaaggaatctttcaatgctatccccactttttcagcatgggtcattgaagagtggggcgaatgttctaagtcatgtgaattgggttggcagagaagactggtagaatgccgagacattaatggacagcctgcttccgagtgtgcaaaggaagtgaagccagccagcaccagaccttgtgcagaccatccctgcccccagtggcagctgggggagtggtcatcatgttctaagacctgtgggaagggttacaaaaaaagaagcttgaagtgtctgtcccatgatggaggggtgttatctcatgagagctgtgatcctttaaagaaacctaaacatttcatagacttttgcacaatggcagaatgcagttaagtggtttaagtggtgttagctttgagggcaaggcaaagtgaggaagggctggtgcagggaaagcaagaaggctggagggatccagcgtatcttgccagtaaccagtgaggtgtatcagtaaggtgggattatgggggtagatagaaaaggagttgaatcatcagagtaaactgccagttgcaaatttgataggatagttagtgaggattattaacctctgagcagtgatatagcataataaagccccgggcattattattattatttcttttgttacatctattacaagtttagaaaaaacaaagcaattgtcaaaaaaagttagaactattacaacccctgtttcctggtacttatcaaatacttagtatcatgggggttgggaaatgaaaagtaggagaaaagtgagattttactaagacctgttttactttacctcactaacaatggggggagaaaggagtacaaataggatctttgaccagcactgtttatggctgctatggtttcagagaatgtttatacattatttctaccgagaattaaaacttcagattgttcaacatgagagaaaggctcagcaacgtgaaataacgcaaatggcttcctctttccttttttggaccatctcagtctttatttgtgtaattcattttgaggaaaaaacaactccatgtatttattcaagtgcattaaagtctacaatggaaaaaaagcagtgaagcattagatgctggtaaaagctagaggagacacaatgagcttagtacctccaacttcctttctttcctaccatgtaaccctgctttgggaatatggatgtaaagaagtaacttgtgtctcatgaaaatcagtacaatcacacaaggaggatgaaacgccggaacaaaaatgaggtgtgtagaacagggtcccacaggtttggggacattgagatcacttgtcttgtggtggggaggctgctgaggggtagcaggtccatctccagcagctggtccaacagtcgtatcctggtgaatgtctgttcagctcttctgtgagaatatgattttttccatatgtatatagtaaaatatgttactataaattacatgtactttataagtattggtttgggtgttccttccaagaaggactatagttagtaataaatgcctataataacatatttatttttatacatttatttctaatgaaaaaaacttttaaattatatcgcttttgtggaagtgcatataaaatagagtatttatacaatatatgttactagaaataaaagaacacttttggaa

SEQ ID NO: 79355 - DNA, 4711 bp, Homo sapiens
  misc_feature (1043)..(1043): n is a, c, g, or t
  misc_feature (1140)..(1140): n is a, c, g, or t
  misc_feature (4665)..(4667): n is a, c, g, or t
  misc_feature (4675)..(4675): n is a, c, g, or t
gttcttgcactcgctggaaagcggctccgagccaggggctattgcaaagccagggtgcgctaccggacggagaggggagagccctgagcagagtgagcaacatcgcagccaaggcggaggccgaagaggggcgccaggcaccaatctccgcgttgcctcagccccggaggcgccccagagcgcttcttgtcccagcagagccactctgcctgcgcctgcctctcagtgtctccaactttgcgctggaagaaaaacttcccgcgcgccggcagaactgcagcgcctccttttagtgactccgggagcttcggctgtagccggctctgcgcgcccttccaacgaataatagaaattgttaattttaacaatccagagcaggccaacgaggctttgctctcccgacccgaactaaagctccctcgctccgtgcgctgctacgagcggtgtctcctggggctccaatgcagcgagctgtgcccgaggggttcggaaggcgcaagctgggcagcgacatggggaacgcggagcgggctccggggtctcggagctttgggcccgtacccacgctgctgctgctcgccgcggcgctactggccgtgtcggacgcactcgggcgcccctccgaggaggacgaggagctagtggtgccggagctggagcgcgccccgggacacgggaccacgcgcctccgcctgcacgcctttgaccagcagctggatctggagctgcggcccgacagcagctttttggcgcccggcttcacgctccagaacgtggggcgcaaatccgggtccgagacgccgcttccggaaaccgacctggcgcactgcttctactccggcaccgtgaatggcgatcccagctcggctgccgccctcagcctctgcgagggcgtgcgcggcgccttctacctgctgggggaggcgtatttcatccagccgctgcccgccgccagcgagcgcctcgccaccgccgccccaggggagaagccgccggcaccactacagttccacctcctgcggcggaatcggcagggcgacgtnggcggcacgtgcggggtcgtggacgacgagccccggccgactgggaaagcggagaccgaagacgaggacgaagggactgagggcgaggacgaagggnctcagtggtcgccgcaggacccggcactgcaaggcgtaggacagcccacaggaactggaagcataagaaagaagcgatttgtgtccagtcaccgctatgtggaaaccatgcttgtggcagaccagtcgatggcagaattccacggcagtggtctaaagcattaccttctcacgttgttttcggtggcagccagattgtacaaacaccccagcattcgtaattcagttagcctggtggtggtgaagatcttggtcatccacgatgaacagaaggggccggaagtgacctccaatgctgccctcactctgcggaacttttgcaactggcagaagcagcacaacccacccagtgaccgggatgcagagcactatgacacagcaattcttttcaccagacaggacttgtgtgggtcccagacatgtgatactcttgggatggctgatgttggaactgtgtgtgatccgagcagaagctgctccgtcatagaagatgatggtttacaagctgccttcaccacagcccatgaattaggccacgtgtttaacatgccacatgatgatgcaaagcagtgtgccagccttaatggtgtgaaccaggattcccacatgatggcgtcaatgctttccaacctggaccacagccagccttggtctccttgcagtgcctacatgattacatcatttctggataatggtcatggggaatgtttgatggacaagcctcagaatcccatacagctcccaggcgatctccctggcacctcgtacgatgccaaccggcagtgccagtttacatttggggaggactccaaacactgccccgatgcagccagcacatgtagcaccttgtggtgtaccggcacctctggtggggtgctggtgtgtcaaaccaaacacttcccgtgggcggatggcaccagctgtggagaagggaaatggtgtatcaacggcaagtgtgtgaacaaaaccgacagaaagcattttgatacgccttttcatggaagctggggaatgtgggggccttggggagactgttcgagaacgtgcggtggaggagtccagtacacgatgagggaatgtgacaacccagtcccaaagaatggagggaagtactgtgaaggcaaacgagtgcgctacagatcctgtaaccttgaggactgtccagacaataatggaaaaacctttagagaggaacaatgtgaagcacacaacgagttttcaaaagcttcctttgggagtgggcctgcggtggaatggattcccaagtacgctggcgtctcaccaaaggacaggtgcaagctcatctgccaagccaaaggcattggctacttcttcgttttgcagcccaaggttgtagatggtactccatgtagcccagattccacctctgtctgtgtgcaaggacagtgtgtaaaagctggttgtgatcgcatcatagactccaaaaagaagtttgataaatgtggtgtttgcgggggaaatggatctacttgtaaaaaaatatcaggatcagttactagtgcaaaacctggatatcatgatatcatcacaattccaactggagccaccaacatcgaagtgaaacagcggaaccagaggggatccaggaacaatggcagctttcttgccatcaaagctgctgatggcacatatattcttaatggtgactacactttgtccaccttagagcaagacattatgtacaaaggtgttgtcttgaggtacagcggctcctctgcggcattggaaagaattcgcagctttagccctctcaaagagcccttgaccatccaggttcttactgtgggcaatgcccttcgacctaaaattaaatacacctacttcgtaaagaagaagaaggaatctttcaatgctatccccactttttcagcatgggtcattgaagagtggggcgaatgttctaagtcatgtgaattgggttggcagagaagactggtagaatgccgagacattaatggacagcctgcttccgagtgtgcaaaggaagtgaagccagccagcaccagaccttgtgcagaccatccctgcccccagtggcagctgggggagtggtcatcatgttctaagacctgtgggaagggttacaaaaaaagaagcttgaagtgtctgtcccatgatggaggggtgttatctcatgagagctgtgatcctttaaagaaacctaaacatttcatagacttttgcacaatggcagaatgcagttaagtggtttaagtggtgttagctttgagggcaaggcaaagtgaggaagggctggtgcagggaaagcaagaaggctggagggatccagcgtatcttgccagtaaccagtgaggtgtatcagtaaggtgggattatgggggtagatagaaaaggagttgaatcatcagagtaaactgccagttgcaaatttgataggatagttagtgaggattattaacctctgagcagtgatatagcataataaagccccgggcattattattattatttcttttgttacatctattacaagtttagaaaaaacaaagcaattgtcaaaaaaagttagaactattacaacccctgtttcctggtacttatcaaatacttagtatcatgggggttgggaaatgaaaagtaggagaaaagtgagattttactaagacctgttttactttacctcactaacaatggggggagaaaggagtacaaataggatctttgaccagcactgtttatggctgctatggtttcagagaatgtttatacattatttctaccgagaattaaaacttcagattgttcaacatgagagaaaggctcagcaacgtgaaataacgcaaatggcttcctctttccttttttggaccatctcagtctttatttgtgtaattcattttgaggaaaaaacaactccatgtatttattcaagtgcattaaagtctacaatggaaaaaaagcagtgaagcattagatgctggtaaaagctagaggagacacaatgagcttagtacctccaacttcctttctttcctaccatgtaaccctgctttgggaatatggatgtaaagaagtaacttgtgtctcatgaaaatcagtacaatcacacaaggaggatgaaacgccggaacaaaaatgaggtgtgtagaacagggtcccacaggtttggggacattgagatcacttgtcttgtggtggggaggctgctgaggggtagcaggtccatctccagcagctggtccaacagtcgtatcctggtgaatgtctgttcagctcttctgtgagaatatgattttttccatatgtatatagtaaaatatgttactataaattacatgtactttataagtattggtttgggtgttccttccaagaaggactatagttagtaataaatgcctataataacatatttatttttatacatttatttctaatgaaaaaaacttttaaattatatcgcttttgtggaagtgcatataaaatagagtatttatacaatatatgttactagaaataaaagaacacttttggaaaaaaaaannntgcctgtngacgtgcagaaagaacagacacgaccagataggtca

SEQ ID NO: 79356 - DNA, 4593 bp, Homo sapiens
aacatggtcatttttattaaagtaaaaaataagatagtagtagctctggacatttggaaatgtgtatgtttgtttacaccctgtgaaaagtagacatggtctgcaaaagagccaatctcctaaatatatttctttctctagaaatgttattttgggacaaatgaatgaatccctgttgggaaaaaagaacctgctgcatatcatccatattttattttattattattttttttgagatggagtctcactctgtctcccaggctggagtggagtggcacaatctcggctcactgcaacttctgcctcctgggttcaagcgattctgctgcctcagcatgcccagtagctgggattacaggtgcatgccaccacacccggctaatttttgtatttttagtagagacggggtttcactatgttggccatgctggtcttgaactcctgacctcaagtgatccacccgcctcggcttctggaattacaggtgtgagccaccgcacccagccatgatccatactttaatgtgggttctggattgcttcctaggccacgtgtttaacatgccacatgatgatgcaaagcagtgtgccagccttaatggtgtgaaccaggattcccacatgatggcgtcaatgctttccaacctggaccacagccagccttggtctccttgcagtgcctacatgattacatcatttctggataatggtcatggggaatgtttgatggacaagcctcagaatcccatacagctcccaggcgatctccctggcacctcgtacgatgccaaccggcagtgccagtttacatttggggaggactccaaacactgccccgatgcagccagcacatgtagcaccttgtggtgtaccggcacctctggtggggtgctggtgtgtcaaaccaaacacttcccgtgggcggatggcaccagctgtggagaagggaaatggtgtatcaacggcaagtgtgtgaacaaaaccgacagaaagcattttgatgtgagtttttctactgaaacacattcagaattgaaaagaacaaagtgatggtaaaagatatgataccaagttaaacatccccatccgtgtcctctagcaggaatgcgagatagcttatttttagaactgattctttgtcccatgtggctttctttgataccctaaaagttctctttagataattctaatgctgatgatttatgtctccatttagacgccttttcatggaagctggggaatgtgggggccttggggagactgttcgagaacgtgcggtggaggagtccagtacacgatgagggaatgtgacaacccagtcccaaagaatggagggaagtactgtgaaggcaaacgagtgcgctacagatcctgtaaccttgaggactgtccagacaataatggaaaaacctttagagaggaacaatgtgaagcacacaacgagttttcaaaagcttcctttgggagtgggcctgcggtggaatggattcccaagtacgctggcgtctcaccaaaggacaggtgcaagctcatctgccaagccaaaggcattggctacttcttcgttttgcagcccaaggtagttcgtttttaccttatttttacctaaaaatcaaggcctgggcttgctaccttttcaaacaatttttgttatactttctttgctttccatattaacatatcttcaatttcaaatttgaactccttttcttttacattaattggcaactgcctgctttgagtttagtgttttcagttatgaatgaagcttaaatctaacacttcacatgcttgcaattgctcgctattactcttttatatgcaaagaaaagctttttggacagtcaagcgctcctctgtgcgactaggcttcacatacagctcatagttagatacattttatattcacacagtaaccagtagttttggaaaatagtctatgcatggtccaaaatacttgttactgggtaactagcagtagcaggtgcaaacagaataatagaagtggtagtctgagtattgattatttttatgtttgaaaacacatattgaactaggaaaagcatcatttcttttgctgttttgctaagggaatacatctggatctgagacagaaaatggaatttaatgtgattgagatgatcgtgtgtcattagcaccataggctatgaaaatattcccaagttgcagattcaatattcagcaagtgatttctgaagcacttactcttgccagatactaattattctaggctctgaagatacagcagtaaacaaagtgacaaacagctctactttcattgaccttagctggaggagacataggtcaatagataaataatttttaaaaatatctaatttcttcagatgtctatacgtagtactgaaaaatatgccaaagtgaagggtaaatgcatgaaatgcataatgtgtagagggtactgtgtttaattagcatggtcaggaaagtagagagaaaatgtttacacttatcattgcagcatctccttcctttgcttgtatgtaacactagacatgtgtccttttttcaggttgtagatggtactccatgtagcccagattccacctctgtctgtgtgcaaggacagtgtgtaaaagctggttgtgatcgcatcatagactccaaaaagaagtttgataaatgtggtgtttgcgggggaaatggatctacttgtaaaaaaatatcaggatcagttactagtgcaaaacctggatatcatgatatcatcacaattccaactggagccaccaacatcgaagtgaaacagcggaaccagaggggatccaggaacaatggcagctttcttgccatcaaagctgctgatggcacatatattcttaatggtgactacactttgtccaccttagagcaagacattatgtacaaaggtgttgtcttgaggtacagcggctcctctgcggcattggaaagaattcgcagctttagccctctcaaagagcccttgaccatccaggttcttactgtgggcaatgcccttcgacctaaaattaaatacacctacttcgtaaagaagaagaaggaatctttcaatgctatccccactttttcagcatgggtcattgaagagtggggcgaatgttctaagtcatgtgaattgggttggcagagaagactggtagaatgccgagacattaatggacagcctgcttccgagtgtgcaaaggaagtgaagccagccagcaccagaccttgtgcagaccatccctgcccccagtggcagctgggggagtggtcatcatgttctaagacctgtgggaagggttacaaaaaaagaagcttgaagtgtctgtcccatgatggaggggtgttatctcatgagagctgtgatcctttaaagaaacctaaacatttcatagacttttgcacaatggcagaatgcagttaagtggtttaagtggtgttagctttgagggcaaggcaaagtgaggaagggctggtgcagggaaagcaagaaggctggagggatccagcgtatcttgccagtaaccagtgaggtgtatcagtaaggtgggattatgggggtagatagaaaaggagttgaatcatcagagtaaactgccagttgcaaatttgataggatagttagtgaggattattaacctctgagcagtgatatagcataataaagccccgggcattattattattatttcttttgttacatctattacaagtttagaaaaaacaaagcaattgtcaaaaaaagttagaactattacaacccctgtttcctggtacttatcaaatacttagtatcatgggggttgggaaatgaaaagtaggagaaaagtgagattttactaagacctgttttactttacctcactaacaatggggggagaaaggagtacaaataggatctttgaccagcactgtttatggctgctatggtttcagagaatgtttatacattatttctaccgagaattaaaacttcagattgttcaacatgagagaaaggctcagcaacgtgaaataacgcaaatggcttcctctttccttttttggaccatctcagtctttatttgtgtaattcattttgaggaaaaaacaactccatgtatttattcaagtgcattaaagtctacaatggaaaaaaagcagtgaagcattagatgctggtaaaagctagaggagacacaatgagcttagtacctccaacttcctttctttcctaccatgtaaccctgctttgggaatatggatgtaaagaagtaacttgtgtctcatgaaaatcagtacaatcacacaaggaggatgaaacgccggaacaaaaatgaggtgtgtagaacagggtcccacaggtttggggacattgagatcacttgtcttgtggtggggaggctgctgaggggtagcaggtccatctccagcagctggtccaacagtcgtatcctggtgaatgtctgttcagctcttctgtgagaatatgattttttccatatgtatatagtaaaatatgttactataaattacatgtactttataagtattggtttgggtgttccttccaagaaggactatagttagtaataaatgcctataataacat

SEQ ID NO: 79357 - DNA, 404 bp, Homo sapiens
  misc_feature (67)..(67): n is a, c, g, or t
aaaggaaagaggaagccatttgcgttatttcacgttgctgagcctttctctcatgttgaacaatctnaagttttaattctcggtagaaataatgtataaacattctctgaaaccatagcagccataaacagtgctggtcaaagatcctatttgtactcctttctccccccattgttagtgaggtaaagtaaaacaggtcttagtaaaatctcacttttctcctacttttcatttcccaacccccatgatactaactattacaacccctgtttcctggtacttatcaaatacttagtatcatgggggttgggaaatgaaaagtaggagaaaagtaccaggaaacaggggttgtaatagttctaacttttttgacaattgctttgttttttctaaacttgtaatag

SEQ ID NO: 79358 - DNA, 4871 bp, Homo sapiens
  misc_feature (1043)..(1043): n is a, c, g, or t
  misc_feature (1140)..(1140): n is a, c, g, or t
gttcttgcactcgctggaaagcggctccgagccaggggctattgcaaagccagggtgcgctaccggacggagaggggagagccctgagcagagtgagcaacatcgcagccaaggcggaggccgaagaggggcgccaggcaccaatctccgcgttgcctcagccccggaggcgccccagagcgcttcttgtcccagcagagccactctgcctgcgcctgcctctcagtgtctccaactttgcgctggaagaaaaacttcccgcgcgccggcagaactgcagcgcctccttttagtgactccgggagcttcggctgtagccggctctgcgcgcccttccaacgaataatagaaattgttaattttaacaatccagagcaggccaacgaggctttgctctcccgacccgaactaaagctccctcgctccgtgcgctgctacgagcggtgtctcctggggctccaatgcagcgagctgtgcccgaggggttcggaaggcgcaagctgggcagcgacatggggaacgcggagcgggctccggggtctcggagctttgggcccgtacccacgctgctgctgctcgccgcggcgctactggccgtgtcggacgcactcgggcgcccctccgaggaggacgaggagctagtggtgccggagctggagcgcgccccgggacacgggaccacgcgcctccgcctgcacgcctttgaccagcagctggatctggagctgcggcccgacagcagctttttggcgcccggcttcacgctccagaacgtggggcgcaaatccgggtccgagacgccgcttccggaaaccgacctggcgcactgcttctactccggcaccgtgaatggcgatcccagctcggctgccgccctcagcctctgcgagggcgtgcgcggcgccttctacctgctgggggaggcgtatttcatccagccgctgcccgccgccagcgagcgcctcgccaccgccgccccaggggagaagccgccggcaccactacagttccacctcctgcggcggaatcggcagggcgacgtnggcggcacgtgcggggtcgtggacgacgagccccggccgactgggaaagcggagaccgaagacgaggacgaagggactgagggcgaggacgaagggnctcagtggtcgccgcaggacccggcactgcaaggcgtaggacagcccacaggaactggaagcataagaaagaagcgatttgtgtccagtcaccgctatgtggaaaccatgcttgtggcagaccagtcgatggcagaattccacggcagtggtctaaagcattaccttctcacgttgttttcggtggcagccagattgtacaaacaccccagcattcgtaattcagttagcctggtggtggtgaagatcttggtcatccacgatgaacagaaggggccggaagtgacctccaatgctgccctcactctgcggaacttttgcaactggcagaagcagcacaacccacccagtgaccgggatgcagagcactatgacacagcaattcttttcaccagacaggacttgtgtgggtcccagacatgtgatactcttgggatggctgatgttggaactgtgtgtgatccgagcagaagctgctccgtcatagaagatgatggtttacaagctgccttcaccacagcccatgaattaggccacgtgtttaacatgccacatgatgatgcaaagcagtgtgccagccttaatggtgtgaaccaggattcccacatgatggcgtcaatgctttccaacctggaccacagccagccttggtctccttgcagtgcctacatgattacatcatttctggataatggtcatggggaatgtttgatggacaagcctcagaatcccatacagctcccaggcgatctccctggcacctcgtacgatgccaaccggcagtgccagtttacatttggggaggactccaaacactgccccgatgcagccagcacatgtagcaccttgtggtgtaccggcacctctggtggggtgctggtgtgtcaaaccaaacacttcccgtgggcggatggcaccagctgtggagaagggaaatggtgtatcaacggcaagtgtgtgaacaaaaccgacagaaagcattttgatgtgagtttttctactgaaacacattcagaattgaaaagaacaaagtgatggtaaaagatatgataccaagttaaacatccccatccgtgtcctctagcaggaatgcgagatagcttatttttagaactgattctttgtcccatgtggctttctttgataccctaaaagttctctttagataattctaatgctgatgatttatgtctccatttagacgccttttcatggaagctggggaatgtgggggccttggggagactgttcgagaacgtgcggtggaggagtccagtacacgatgagggaatgtgacaacccagtcccaaagaatggagggaagtactgtgaaggcaaacgagtgcgctacagatcctgtaaccttgaggactgtccagacaataatggaaaaacctttagagaggaacaatgtgaagcacacaacgagttttcaaaagcttcctttgggagtgggcctgcggtggaatggattcccaagtacgctggcgtctcaccaaaggacaggtgcaagctcatctgccaagccaaaggcattggctacttcttcgttttgcagcccaaggttgtagatggtactccatgtagcccagattccacctctgtctgtgtgcaaggacagtgtgtaaaagctggttgtgatcgcatcatagactccaaaaagaagtttgataaatgtggtgtttgcgggggaaatggatctacttgtaaaaaaatatcaggatcagttactagtgcaaaacctggatatcatgatatcatcacaattccaactggagccaccaacatcgaagtgaaacagcggaaccagaggggatccaggaacaatggcagctttcttgccatcaaagctgctgatggcacatatattcttaatggtgactacactttgtccaccttagagcaagacattatgtacaaaggtgttgtcttgaggtacagcggctcctctgcggcattggaaagaattcgcagctttagccctctcaaagagcccttgaccatccaggttcttactgtgggcaatgcccttcgacctaaaattaaatacacctacttcgtaaagaagaagaaggaatctttcaatgctatccccactttttcagcatgggtcattgaagagtggggcgaatgttctaagtcatgtgaattgggttggcagagaagactggtagaatgccgagacattaatggacagcctgcttccgagtgtgcaaaggaagtgaagccagccagcaccagaccttgtgcagaccatccctgcccccagtggcagctgggggagtggtcatcatgttctaagacctgtgggaagggttacaaaaaaagaagcttgaagtgtctgtcccatgatggaggggtgttatctcatgagagctgtgatcctttaaagaaacctaaacatttcatagacttttgcacaatggcagaatgcagttaagtggtttaagtggtgttagctttgagggcaaggcaaagtgaggaagggctggtgcagggaaagcaagaaggctggagggatccagcgtatcttgccagtaaccagtgaggtgtatcagtaaggtgggattatgggggtagatagaaaaggagttgaatcatcagagtaaactgccagttgcaaatttgataggatagttagtgaggattattaacctctgagcagtgatatagcataataaagccccgggcattattattattatttcttttgttacatctattacaagtttagaaaaaacaaagcaattgtcaaaaaaagttagaactattacaacccctgtttcctggtacttatcaaatacttagtatcatgggggttgggaaatgaaaagtaggagaaaagtgagattttactaagacctgttttactttacctcactaacaatggggggagaaaggagtacaaataggatctttgaccagcactgtttatggctgctatggtttcagagaatgtttatacattatttctaccgagaattaaaacttcagattgttcaacatgagagaaaggctcagcaacgtgaaataacgcaaatggcttcctctttccttttttggaccatctcagtctttatttgtgtaattcattttgaggaaaaaacaactccatgtatttattcaagtgcattaaagtctacaatggaaaaaaagcagtgaagcattagatgctggtaaaagctagaggagacacaatgagcttagtacctccaacttcctttctttcctaccatgtaaccctgctttgggaatatggatgtaaagaagtaacttgtgtctcatgaaaatcagtacaatcacacaaggaggatgaaacgccggaacaaaaatgaggtgtgtagaacagggtcccacaggtttggggacattgagatcacttgtcttgtggtggggaggctgctgaggggtagcaggtccatctccagcagctggtccaacagtcgtatcctggtgaatgtctgttcagctcttctgtgagaatatgattttttccatatgtatatagtaaaatatgttactataaattacatgtactttataagtattggtttgggtgttccttccaagaaggactatagttagtaataaatgcctataataacatatttatttttatacatttatttctaatgaaaaaaacttttaaattatatcgcttttgtggaagtgcatataaaatagagtatttatacaatatatgttactagaaataaaagaacacttttggaa

SEQ ID NO: 79359 - DNA, 3532 bp, Homo sapiens
aacatggtcatttttattaaagtaaaaaataagatagtagtagctctggacatttggaaatgtgtatgtttgtttacaccctgtgaaaagtagacatggtctgcaaaagagccaatctcctaaatatatttctttctctagaaatgttattttgggacaaatgaatgaatccctgttgggaaaaaagaacctgctgcatatcatccatattttattttattattattttttttgagatggagtctcactctgtctcccaggctggagtggagtggcacaatctcggctcactgcaacttctgcctcctgggttcaagcgattctgctgcctcagcatgcccagtagctgggattacaggtgcatgccaccacacccggctaatttttgtatttttagtagagacggggtttcactatgttggccatgctggtcttgaactcctgacctcaagtgatccacccgcctcggcttctggaattacaggtgtgagccaccgcacccagccatgatccatactttaatgtgggttctggattgcttcctaggccacgtgtttaacatgccacatgatgatgcaaagcagtgtgccagccttaatggtgtgaaccaggattcccacatgatggcgtcaatgctttccaacctggaccacagccagccttggtctccttgcagtgcctacatgattacatcatttctggataatggtcatggggaatgtttgatggacaagcctcagaatcccatacagctcccaggcgatctccctggcacctcgtacgatgccaaccggcagtgccagtttacatttggggaggactccaaacactgccccgatgcagccagcacatgtagcaccttgtggtgtaccggcacctctggtggggtgctggtgtgtcaaaccaaacacttcccgtgggcggatggcaccagctgtggagaagggaaatggtgtatcaacggcaagtgtgtgaacaaaaccgacagaaagcattttgatacgccttttcatggaagctggggaatgtgggggccttggggagactgttcgagaacgtgcggtggaggagtccagtacacgatgagggaatgtgacaacccagtcccaaagaatggagggaagtactgtgaaggcaaacgagtgcgctacagatcctgtaaccttgaggactgtccagacaataatggaaaaacctttagagaggaacaatgtgaagcacacaacgagttttcaaaagcttcctttgggagtgggcctgcggtggaatggattcccaagtacgctggcgtctcaccaaaggacaggtgcaagctcatctgccaagccaaaggcattggctacttcttcgttttgcagcccaaggttgtagatggtactccatgtagcccagattccacctctgtctgtgtgcaaggacagtgtgtaaaagctggttgtgatcgcatcatagactccaaaaagaagtttgataaatgtggtgtttgcgggggaaatggatctacttgtaaaaaaatatcaggatcagttactagtgcaaaacctggatatcatgatatcatcacaattccaactggagccaccaacatcgaagtgaaacagcggaaccagaggggatccaggaacaatggcagctttcttgccatcaaagctgctgatggcacatatattcttaatggtgactacactttgtccaccttagagcaagacattatgtacaaaggtgttgtcttgaggtacagcggctcctctgcggcattggaaagaattcgcagctttagccctctcaaagagcccttgaccatccaggttcttactgtgggcaatgcccttcgacctaaaattaaatacacctacttcgtaaagaagaagaaggaatctttcaatgctatccccactttttcagcatgggtcattgaagagtggggcgaatgttctaagtcatgtgaattgggttggcagagaagactggtagaatgccgagacattaatggacagcctgcttccgagtgtgcaaaggaagtgaagccagccagcaccagaccttgtgcagaccatccctgcccccagtggcagctgggggagtggtcatcatgttctaagacctgtgggaagggttacaaaaaaagaagcttgaagtgtctgtcccatgatggaggggtgttatctcatgagagctgtgatcctttaaagaaacctaaacatttcatagacttttgcacaatggcagaatgcagttaagtggtttaagtggtgttagctttgagggcaaggcaaagtgaggaagggctggtgcagggaaagcaagaaggctggagggatccagcgtatcttgccagtaaccagtgaggtgtatcagtaaggtgggattatgggggtagatagaaaaggagttgaatcatcagagtaaactgccagttgcaaatttgataggatagttagtgaggattattaacctctgagcagtgatatagcataataaagccccgggcattattattattatttcttttgttacatctattacaagtttagaaaaaacaaagcaattgtcaaaaaaagttagaactattacaacccctgtttcctggtacttatcaaatacttagtatcatgggggttgggaaatgaaaagtaggagaaaagtgagattttactaagacctgttttactttacctcactaacaatggggggagaaaggagtacaaataggatctttgaccagcactgtttatggctgctatggtttcagagaatgtttatacattatttctaccgagaattaaaacttcagattgttcaacatgagagaaaggctcagcaacgtgaaataacgcaaatggcttcctctttccttttttggaccatctcagtctttatttgtgtaattcattttgaggaaaaaacaactccatgtatttattcaagtgcattaaagtctacaatggaaaaaaagcagtgaagcattagatgctggtaaaagctagaggagacacaatgagcttagtacctccaacttcctttctttcctaccatgtaaccctgctttgggaatatggatgtaaagaagtaacttgtgtctcatgaaaatcagtacaatcacacaaggaggatgaaacgccggaacaaaaatgaggtgtgtagaacagggtcccacaggtttggggacattgagatcacttgtcttgtggtggggaggctgctgaggggtagcaggtccatctccagcagctggtccaacagtcgtatcctggtgaatgtctgttcagctcttctgtgagaatatgattttttccatatgtatatagtaaaatatgttactataaattacatgtactttataagtattggtttgggtgttccttccaagaaggactatagttagtaataaatgcctataataacatatttatttttatacatttatttctaatgaaaaaaacttttaaattatatcgcttttgtggaagtgcatataaaatagagtatttatacaatatatgttactagaaataaaagaacacttttggaa

SEQ ID NO: 79360 - DNA, 3026 bp, Homo sapiens
aggtatacaccgttatccgctcaatgatgccaacgctgatatacgaatgccgcactgaattattgctgtgacaatgtttccatgcttaatgattgcaccaggataccaacatgagttgtcgtcatggtttcgcctgctgagaccacaaacagcgctgtgtactgttacaacccttacgtgattacatcatttctggataatggtcatggggaatgtttgatggacaagcctcagaatcccatacagctcccaggcgatctccctggcacctcgtacgatgccaaccggcagtgccagtttacatttggggaggactccaaacactgccccgatgcagccagcacatgtagcaccttgtggtgtaccggcacctctggtggggtgctggtgtgtcaaaccaaacacttcccgtgggcggatggcaccagctgtggagaagggaaatggtgtatcaacggcaagtgtgtgaacaaaaccgacagaaagcattttgatacgccttttcatggaagctggggaatgtgggggccttggggagactgttcgagaacgtgcggtggaggagtccagtacacgatgagggaatgtgacaacccagtcccaaagaatggagggaagtactgtgaaggcaaacgagtgcgctacagatcctgtaaccttgaggactgtccagacaataatggaaaaacctttagagaggaacaatgtgaagcacacaacgagttttcaaaagcttcctttgggagtgggcctgcggtggaatggattcccaagtacgctggcgtctcaccaaaggacaggtgcaagctcatctgccaagccaaaggcattggctacttcttcgttttgcagcccaaggttgtagatggtactccatgtagcccagattccacctctgtctgtgtgcaaggacagtgtgtaaaagctggttgtgatcgcatcatagactccaaaaagaagtttgataaatgtggtgtttgcgggggaaatggatctacttgtaaaaaaatatcaggatcagttactagtgcaaaacctggatatcatgatatcatcacaattccaactggagccaccaacatcgaagtgaaacagcggaaccagaggggatccaggaacaatggcagctttcttgccatcaaagctgctgatggcacatatattcttaatggtgactacactttgtccaccttagagcaagacattatgtacaaaggtgttgtcttgaggtacagcggctcctctgcggcattggaaagaattcgcagctttagccctctcaaagagcccttgaccatccaggttcttactgtgggcaatgcccttcgacctaaaattaaatacacctacttcgtaaagaagaagaaggaatctttcaatgctatccccactttttcagcatgggtcattgaagagtggggcgaatgttctaagtcatgtgaattgggttggcagagaagactggtagaatgccgagacattaatggacagcctgcttccgagtgtgcaaaggaagtgaagccagccagcaccagaccttgtgcagaccatccctgcccccagtggcagctgggggagtggtcatcatgttctaagacctgtgggaagggttacaaaaaaagaagcttgaagtgtctgtcccatgatggaggggtgttatctcatgagagctgtgatcctttaaagaaacctaaacatttcatagacttttgcacaatggcagaatgcagttaagtggtttaagtggtgttagctttgagggcaaggcaaagtgaggaagggctggtgcagggaaagcaagaaggctggagggatccagcgtatcttgccagtaaccagtgaggtgtatcagtaaggtgggattatgggggtagatagaaaaggagttgaatcatcagagtaaactgccagttgcaaatttgataggatagttagtgaggattattaacctctgagcagtgatatagcataataaagccccgggcattattattattatttcttttgttacatctattacaagtttagaaaaaacaaagcaattgtcaaaaaaagttagaactattacaacccctgtttcctggtacttatcaaatacttagtatcatgggggttgggaaatgaaaagtaggagaaaagtgagattttactaagacctgttttactttacctcactaacaatggggggagaaaggagtacaaataggatctttgaccagcactgtttatggctgctatggtttcagagaatgtttatacattatttctaccgagaattaaaacttcagattgttcaacatgagagaaaggctcagcaacgtgaaataacgcaaatggcttcctctttccttttttggaccatctcagtctttatttgtgtaattcattttgaggaaaaaacaactccatgtatttattcaagtgcattaaagtctacaatggaaaaaaagcagtgaagcattagatgctggtaaaagctagaggagacacaatgagcttagtacctccaacttcctttctttcctaccatgtaaccctgctttgggaatatggatgtaaagaagtaacttgtgtctcatgaaaatcagtacaatcacacaaggaggatgaaacgccggaacaaaaatgaggtgtgtagaacagggtcccacaggtttggggacattgagatcacttgtcttgtggtggggaggctgctgaggggtagcaggtccatctccagcagctggtccaacagtcgtatcctggtgaatgtctgttcagctcttctgtgagaatatgattttttccatatgtatatagtaaaatatgttactataaattacatgtactttataagtattggtttgggtgttccttccaagaaggactatagttagtaataaatgcctataataacatatttatttttatacatttatttctaatgaaaaaaacttttaaattatatcgcttttgtggaagtgcatataaaatagagtatttatacaatatatgttactagaaataaaagaacacttttggaa

SEQ ID NO: 79361 - DNA, 5843 bp, Homo sapiens
  misc_feature (1043)..(1043): n is a, c, g, or t
  misc_feature (1140)..(1140): n is a, c, g, or t
gttcttgcactcgctggaaagcggctccgagccaggggctattgcaaagccagggtgcgctaccggacggagaggggagagccctgagcagagtgagcaacatcgcagccaaggcggaggccgaagaggggcgccaggcaccaatctccgcgttgcctcagccccggaggcgccccagagcgcttcttgtcccagcagagccactctgcctgcgcctgcctctcagtgtctccaactttgcgctggaagaaaaacttcccgcgcgccggcagaactgcagcgcctccttttagtgactccgggagcttcggctgtagccggctctgcgcgcccttccaacgaataatagaaattgttaattttaacaatccagagcaggccaacgaggctttgctctcccgacccgaactaaagctccctcgctccgtgcgctgctacgagcggtgtctcctggggctccaatgcagcgagctgtgcccgaggggttcggaaggcgcaagctgggcagcgacatggggaacgcggagcgggctccggggtctcggagctttgggcccgtacccacgctgctgctgctcgccgcggcgctactggccgtgtcggacgcactcgggcgcccctccgaggaggacgaggagctagtggtgccggagctggagcgcgccccgggacacgggaccacgcgcctccgcctgcacgcctttgaccagcagctggatctggagctgcggcccgacagcagctttttggcgcccggcttcacgctccagaacgtggggcgcaaatccgggtccgagacgccgcttccggaaaccgacctggcgcactgcttctactccggcaccgtgaatggcgatcccagctcggctgccgccctcagcctctgcgagggcgtgcgcggcgccttctacctgctgggggaggcgtatttcatccagccgctgcccgccgccagcgagcgcctcgccaccgccgccccaggggagaagccgccggcaccactacagttccacctcctgcggcggaatcggcagggcgacgtnggcggcacgtgcggggtcgtggacgacgagccccggccgactgggaaagcggagaccgaagacgaggacgaagggactgagggcgaggacgaagggnctcagtggtcgccgcaggacccggcactgcaaggcgtaggacagcccacaggaactggaagcataagaaagaagcgatttgtgtccagtcaccgctatgtggaaaccatgcttgtggcagaccagtcgatggcagaattccacggcagtggtctaaagcattaccttctcacgttgttttcggtggcagccagattgtacaaacaccccagcattcgtaattcagttagcctggtggtggtgaagatcttggtcatccacgatgaacagaaggggccggaagtgacctccaatgctgccctcactctgcggaacttttgcaactggcagaagcagcacaacccacccagtgaccgggatgcagagcactatgacacagcaattcttttcaccagacaggacttgtgtgggtcccagacatgtgatactcttgggatggctgatgttggaactgtgtgtgatccgagcagaagctgctccgtcatagaagatgatggtttacaagctgccttcaccacagcccatgaattaggccacgtgtttaacatgccacatgatgatgcaaagcagtgtgccagccttaatggtgtgaaccaggattcccacatgatggcgtcaatgctttccaacctggaccacagccagccttggtctccttgcagtgcctacatgattacatcatttctggataatggtcatggggaatgtttgatggacaagcctcagaatcccatacagctcccaggcgatctccctggcacctcgtacgatgccaaccggcagtgccagtttacatttggggaggactccaaacactgccccgatgcagccagcacatgtagcaccttgtggtgtaccggcacctctggtggggtgctggtgtgtcaaaccaaacacttcccgtgggcggatggcaccagctgtggagaagggaaatggtgtatcaacggcaagtgtgtgaacaaaaccgacagaaagcattttgatgtgagtttttctactgaaacacattcagaattgaaaagaacaaagtgatggtaaaagatatgataccaagttaaacatccccatccgtgtcctctagcaggaatgcgagatagcttatttttagaactgattctttgtcccatgtggctttctttgataccctaaaagttctctttagataattctaatgctgatgatttatgtctccatttagacgccttttcatggaagctggggaatgtgggggccttggggagactgttcgagaacgtgcggtggaggagtccagtacacgatgagggaatgtgacaacccagtcccaaagaatggagggaagtactgtgaaggcaaacgagtgcgctacagatcctgtaaccttgaggactgtccagacaataatggaaaaacctttagagaggaacaatgtgaagcacacaacgagttttcaaaagcttcctttgggagtgggcctgcggtggaatggattcccaagtacgctggcgtctcaccaaaggacaggtgcaagctcatctgccaagccaaaggcattggctacttcttcgttttgcagcccaaggtagttcgtttttaccttatttttacctaaaaatcaaggcctgggcttgctaccttttcaaacaatttttgttatactttctttgctttccatattaacatatcttcaatttcaaatttgaactccttttcttttacattaattggcaactgcctgctttgagtttagtgttttcagttatgaatgaagcttaaatctaacacttcacatgcttgcaattgctcgctattactcttttatatgcaaagaaaagctttttggacagtcaagcgctcctctgtgcgactaggcttcacatacagctcatagttagatacattttatattcacacagtaaccagtagttttggaaaatagtctatgcatggtccaaaatacttgttactgggtaactagcagtagcaggtgcaaacagaataatagaagtggtagtctgagtattgattatttttatgtttgaaaacacatattgaactaggaaaagcatcatttcttttgctgttttgctaagggaatacatctggatctgagacagaaaatggaatttaatgtgattgagatgatcgtgtgtcattagcaccataggctatgaaaatattcccaagttgcagattcaatattcagcaagtgatttctgaagcacttactcttgccagatactaattattctaggctctgaagatacagcagtaaacaaagtgacaaacagctctactttcattgaccttagctggaggagacataggtcaatagataaataatttttaaaaatatctaatttcttcagatgtctatacgtagtactgaaaaatatgccaaagtgaagggtaaatgcatgaaatgcataatgtgtagagggtactgtgtttaattagcatggtcaggaaagtagagagaaaatgtttacacttatcattgcagcatctccttcctttgcttgtatgtaacactagacatgtgtccttttttcaggttgtagatggtactccatgtagcccagattccacctctgtctgtgtgcaaggacagtgtgtaaaagctggttgtgatcgcatcatagactccaaaaagaagtttgataaatgtggtgtttgcgggggaaatggatctacttgtaaaaaaatatcaggatcagttactagtgcaaaacctggatatcatgatatcatcacaattccaactggagccaccaacatcgaagtgaaacagcggaaccagaggggatccaggaacaatggcagctttcttgccatcaaagctgctgatggcacatatattcttaatggtgactacactttgtccaccttagagcaagacattatgtacaaaggtgttgtcttgaggtacagcggctcctctgcggcattggaaagaattcgcagctttagccctctcaaagagcccttgaccatccaggttcttactgtgggcaatgcccttcgacctaaaattaaatacacctacttcgtaaagaagaagaaggaatctttcaatgctatccccactttttcagcatgggtcattgaagagtggggcgaatgttctaagtcatgtgaattgggttggcagagaagactggtagaatgccgagacattaatggacagcctgcttccgagtgtgcaaaggaagtgaagccagccagcaccagaccttgtgcagaccatccctgcccccagtggcagctgggggagtggtcatcatgttctaagacctgtgggaagggttacaaaaaaagaagcttgaagtgtctgtcccatgatggaggggtgttatctcatgagagctgtgatcctttaaagaaacctaaacatttcatagacttttgcacaatggcagaatgcagttaagtggtttaagtggtgttagctttgagggcaaggcaaagtgaggaagggctggtgcagggaaagcaagaaggctggagggatccagcgtatcttgccagtaaccagtgaggtgtatcagtaaggtgggattatgggggtagatagaaaaggagttgaatcatcagagtaaactgccagttgcaaatttgataggatagttagtgaggattattaacctctgagcagtgatatagcataataaagccccgggcattattattattatttcttttgttacatctattacaagtttagaaaaaacaaagcaattgtcaaaaaaagttagaactattacaacccctgtttcctggtacttatcaaatacttagtatcatgggggttgggaaatgaaaagtaggagaaaagtgagattttactaagacctgttttactttacctcactaacaatggggggagaaaggagtacaaataggatctttgaccagcactgtttatggctgctatggtttcagagaatgtttatacattatttctaccgagaattaaaacttcagattgttcaacatgagagaaaggctcagcaacgtgaaataacgcaaatggcttcctctttccttttttggaccatctcagtctttatttgtgtaattcattttgaggaaaaaacaactccatgtatttattcaagtgcattaaagtctacaatggaaaaaaagcagtgaagcattagatgctggtaaaagctagaggagacacaatgagcttagtacctccaacttcctttctttcctaccatgtaaccctgctttgggaatatggatgtaaagaagtaacttgtgtctcatgaaaatcagtacaatcacacaaggaggatgaaacgccggaacaaaaatgaggtgtgtagaacagggtcccacaggtttggggacattgagatcacttgtcttgtggtggggaggctgctgaggggtagcaggtccatctccagcagctggtccaacagtcgtatcctggtgaatgtctgttcagctcttctgtgagaatatgattttttccatatgtatatagtaaaatatgttactataaattacatgtactttataagtattggtttgggtgttccttccaagaaggactatagttagtaataaatgcctataataacatatttatttttatacatttatttctaatgaaaaaaacttttaaattatatcgcttttgtggaagtgcatataaaatagagtatttatacaatatatgttactagaaataaaagaacacttttggaa

SEQ ID NO: 79362 - DNA, 4532 bp, Homo sapiens
  misc_feature (1043)..(1043): n is a, c, g, or t
  misc_feature (1140)..(1140): n is a, c, g, or t
gttcttgcactcgctggaaagcggctccgagccaggggctattgcaaagccagggtgcgctaccggacggagaggggagagccctgagcagagtgagcaacatcgcagccaaggcggaggccgaagaggggcgccaggcaccaatctccgcgttgcctcagccccggaggcgccccagagcgcttcttgtcccagcagagccactctgcctgcgcctgcctctcagtgtctccaactttgcgctggaagaaaaacttcccgcgcgccggcagaactgcagcgcctccttttagtgactccgggagcttcggctgtagccggctctgcgcgcccttccaacgaataatagaaattgttaattttaacaatccagagcaggccaacgaggctttgctctcccgacccgaactaaagctccctcgctccgtgcgctgctacgagcggtgtctcctggggctccaatgcagcgagctgtgcccgaggggttcggaaggcgcaagctgggcagcgacatggggaacgcggagcgggctccggggtctcggagctttgggcccgtacccacgctgctgctgctcgccgcggcgctactggccgtgtcggacgcactcgggcgcccctccgaggaggacgaggagctagtggtgccggagctggagcgcgccccgggacacgggaccacgcgcctccgcctgcacgcctttgaccagcagctggatctggagctgcggcccgacagcagctttttggcgcccggcttcacgctccagaacgtggggcgcaaatccgggtccgagacgccgcttccggaaaccgacctggcgcactgcttctactccggcaccgtgaatggcgatcccagctcggctgccgccctcagcctctgcgagggcgtgcgcggcgccttctacctgctgggggaggcgtatttcatccagccgctgcccgccgccagcgagcgcctcgccaccgccgccccaggggagaagccgccggcaccactacagttccacctcctgcggcggaatcggcagggcgacgtnggcggcacgtgcggggtcgtggacgacgagccccggccgactgggaaagcggagaccgaagacgaggacgaagggactgagggcgaggacgaagggnctcagtggtcgccgcaggacccggcactgcaaggcgtaggacagcccacaggaactggaagcataagaaagaagcgatttgtgtccagtcaccgctatgtggaaaccatgcttgtggcagaccagtcgatggcagaattccacggcagtggtctaaagcattaccttctcacgttgttttcggtggcagccagattgtacaaacaccccagcattcgtaattcagttagcctggtggtggtgaagatcttggtcatccacgatgaacagaaggggccggaagtgacctccaatgctgccctcactctgcggaacttttgcaactggcagaagcagcacaacccacccagtgaccgggatgcagagcactatgacacagcaattcttttcaccagacaggacttgtgtgggtcccagacatgtgatactcttgggatggctgatgttggaactgtgtgtgatccgagcagaagctgctccgtcatagaagatgatggtttacaagctgccttcaccacagcccatgaattaggccacgtgtttaacatgccacatgatgatgcaaagcagtgtgccagccttaatggtgtgaaccaggattcccacatgatggcgtcaatgctttccaacctggaccacagccagccttggtctccttgcagtgcctacatgattacatcatttctggataatggtcatggggaatgtttgatggacaagcctcagaatcccatacagctcccaggcgatctccctggcacctcgtacgatgccaaccggcagtgccagtttacatttggggaggactccaaacactgccccgatgcagccagcacatgtagcaccttgtggtgtaccggcacctctggtggggtgctggtgtgtcaaaccaaacacttcccgtgggcggatggcaccagctgtggagaagggaaatggtgtatcaacggcaagtgtgtgaacaaaaccgacagaaagcattttgatacgccttttcatggaagctggggaatgtgggggccttggggagactgttcgagaacgtgcggtggaggagtccagtacacgatgagggaatgtgacaacccagtcccaaagaatggagggaagtactgtgaaggcaaacgagtgcgctacagatcctgtaaccttgaggactgtccagacaataatggaaaaacctttagagaggaacaatgtgaagcacacaacgagttttcaaaagcttcctttgggagtgggcctgcggtggaatggattcccaagtacgctggcgtctcaccaaaggacaggtgcaagctcatctgccaagccaaaggcattggctacttcttcgttttgcagcccaaggttgtagatggtactccatgtagcccagattccacctctgtctgtgtgcaaggacagtgtgtaaaagctggttgtgatcgcatcatagactccaaaaagaagtttgataaatgtggtgtttgcgggggaaatggatctacttgtaaaaaaatatcaggatcagttactagtgcaaaacctggatatcatgatatcatcacaattccaactggagccaccaacatcgaagtgaaacagcggaaccagaggggatccaggaacaatggcagctttcttgccatcaaagctgctgatggcacatatattcttaatggtgactacactttgtccaccttagagcaagacattatgtacaaaggtgttgtcttgaggtacagcggctcctctgcggcattggaaagaattcgcagctttagccctctcaaagagcccttgaccatccaggttcttactgtgggcaatgcccttcgacctaaaattaaatacacctacttcgtaaagaagaagaaggaatctttcaatgctatccccactttttcagcatgggtcattgaagagtggggcgaatgttctaagtcatgtgaattgggttggcagagaagactggtagaatgccgagacattaatggacagcctgcttccgagtgtgcaaaggaagtgaagccagccagcaccagaccttgtgcagaccatccctgcccccagtggcagctgggggagtggtcatcatgttctaagacctgtgggaagggttacaaaaaaagaagcttgaagtgtctgtcccatgatggaggggtgttatctcatgagagctgtgatcctttaaagaaacctaaacatttcatagacttttgcacaatggcagaatgcagttaagtggtttaagtggtgttagctttgagggcaaggcaaagtgaggaagggctggtgcagggaaagcaagaaggctggagggatccagcgtatcttgccagtaaccagtgaggtgtatcagtaaggtgggattatgggggtagatagaaaaggagttgaatcatcagagtaaactgccagttgcaaatttgataggatagttagtgaggattattaacctctgagcagtgatatagcataataaagccccgggcattattattattatttcttttgttacatctattacaagtttagaaaaaacaaagcaattgtcaaaaaaagttagaactattacaacccctgtttcctggtacttatcaaatacttagtatcatgggggttgggaaatgaaaagtaggagaaaagtgagattttactaagacctgttttactttacctcactaacaatggggggagaaaggagtacaaataggatctttgaccagcactgtttatggctgctatggtttcagagaatgtttatacattatttctaccgagaattaaaacttcagattgttcaacatgagagaaaggctcagcaacgtgaaataacgcaaatggcttcctctttccttttttggaccatctcagtctttatttgtgtaattcattttgaggaaaaaacaactccatgtatttattcaagtgcattaaagtctacaatggaaaaaaagcagtgaagcattagatgctggtaaaagctagaggagacacaatgagcttagtacctccaacttcctttctttcctaccatgtaaccctgctttgggaatatggatgtaaagaagtaacttgtgtctcatgaaaatcagtacaatcacacaaggaggatgaaacgccggaacaaaaatgaggtgtgtagaacagggtcccacaggtttggggacattgagatcacttgtcttgtggtggggaggctgctgaggggtagcaggtccatctccagcagctggtccaacagtcgtatcctggtgaatgtctgttcagctcttctgtgagaatatgattttttccatatgtatatagtaaaatatgttactataaattacatgtactttataagtattggtttgggtgttccttccaagaaggactatagttagtaataaatgcctataataacat

SEQ ID NO: 79363 - DNA, 4603 bp, Homo sapiens
  misc_feature (1043)..(1043): n is a, c, g, or t
  misc_feature (1140)..(1140): n is a, c, g, or t
gttcttgcactcgctggaaagcggctccgagccaggggctattgcaaagccagggtgcgctaccggacggagaggggagagccctgagcagagtgagcaacatcgcagccaaggcggaggccgaagaggggcgccaggcaccaatctccgcgttgcctcagccccggaggcgccccagagcgcttcttgtcccagcagagccactctgcctgcgcctgcctctcagtgtctccaactttgcgctggaagaaaaacttcccgcgcgccggcagaactgcagcgcctccttttagtgactccgggagcttcggctgtagccggctctgcgcgcccttccaacgaataatagaaattgttaattttaacaatccagagcaggccaacgaggctttgctctcccgacccgaactaaagctccctcgctccgtgcgctgctacgagcggtgtctcctggggctccaatgcagcgagctgtgcccgaggggttcggaaggcgcaagctgggcagcgacatggggaacgcggagcgggctccggggtctcggagctttgggcccgtacccacgctgctgctgctcgccgcggcgctactggccgtgtcggacgcactcgggcgcccctccgaggaggacgaggagctagtggtgccggagctggagcgcgccccgggacacgggaccacgcgcctccgcctgcacgcctttgaccagcagctggatctggagctgcggcccgacagcagctttttggcgcccggcttcacgctccagaacgtggggcgcaaatccgggtccgagacgccgcttccggaaaccgacctggcgcactgcttctactccggcaccgtgaatggcgatcccagctcggctgccgccctcagcctctgcgagggcgtgcgcggcgccttctacctgctgggggaggcgtatttcatccagccgctgcccgccgccagcgagcgcctcgccaccgccgccccaggggagaagccgccggcaccactacagttccacctcctgcggcggaatcggcagggcgacgtnggcggcacgtgcggggtcgtggacgacgagccccggccgactgggaaagcggagaccgaagacgaggacgaagggactgagggcgaggacgaagggnctcagtggtcgccgcaggacccggcactgcaaggcgtaggacagcccacaggaactggaagcataagaaagaagcgatttgtgtccagtcaccgctatgtggaaaccatgcttgtggcagaccagtcgatggcagaattccacggcagtggtctaaagcattaccttctcacgttgttttcggtggcagccagattgtacaaacaccccagcattcgtaattcagttagcctggtggtggtgaagatcttggtcatccacgatgaacagaaggggccggaagtgacctccaatgctgccctcactctgcggaacttttgcaactggcagaagcagcacaacccacccagtgaccgggatgcagagcactatgacacagcaattcttttcaccagacaggacttgtgtgggtcccagacatgtgatactcttgggatggctgatgttggaactgtgtgtgatccgagcagaagctgctccgtcatagaagatgatggtttacaagctgccttcaccacagcccatgaattaggccacgtgtttaacatgccacatgatgatgcaaagcagtgtgccagccttaatggtgtgaaccaggattcccacatgatggcgtcaatgctttccaacctggaccacagccagccttggtctccttgcagtgcctacatgattacatcatttctggataatggtcatggggaatgtttgatggacaagcctcagaatcccatacagctcccaggcgatctccctggcacctcgtacgatgccaaccggcagtgccagtttacatttggggaggactccaaacactgccccgatgcagccagcacatgtagcaccttgtggtgtaccggcacctctggtggggtgctggtgtgtcaaaccaaacacttcccgtgggcggatggcaccagctgtggagaagggaaatggtgtatcaacggcaagtgtgtgaacaaaaccgacagaaagcattttgatacgccttttcatggaagctggggaatgtgggggccttggggagactgttcgagaacgtgcggtggaggagtccagtacacgatgagggaatgtgacaacccagtcccaaagaatggagggaagtactgtgaaggcaaacgagtgcgctacagatcctgtaaccttgaggactgtccagacaataatggaaaaacctttagagaggaacaatgtgaagcacacaacgagttttcaaaagcttcctttgggagtgggcctgcggtggaatggattcccaagtacgctggcgtctcaccaaaggacaggtgcaagctcatctgccaagccaaaggcattggctacttcttcgttttgcagcccaaggttgtagatggtactccatgtagcccagattccacctctgtctgtgtgcaaggacagtgtgtaaaagctggttgtgatcgcatcatagactccaaaaagaagtttgataaatgtggtgtttgcgggggaaatggatctacttgtaaaaaaatatcaggatcagttactagtgcaaaacctggatatcatgatatcatcacaattccaactggagccaccaacatcgaagtgaaacagcggaaccagaggggatccaggaacaatggcagctttcttgccatcaaagctgctgatggcacatatattcttaatggtgactacactttgtccaccttagagcaagacattatgtacaaaggtgttgtcttgaggtacagcggctcctctgcggcattggaaagaattcgcagctttagccctctcaaagagcccttgaccatccaggttcttactgtgggcaatgcccttcgacctaaaattaaatacacctacttcgtaaagaagaagaaggaatctttcaatgctatccccactttttcagcatgggtcattgaagagtggggcgaatgttctaagtcatgtgaattgggttggcagagaagactggtagaatgccgagacattaatggacagcctgcttccgagtgtgcaaaggaagtgaagccagccagcaccagaccttgtgcagaccatccctgcccccagtggcagctgggggagtggtcatcatgttctaagacctgtgggaagggttacaaaaaaagaagcttgaagtgtctgtcccatgatggaggggtgttatctcatgagagctgtgatcctttaaagaaacctaaacatttcatagacttttgcacaatggcagaatgcagttaagtggtttaagtggtgttagctttgagggcaaggcaaagtgaggaagggctggtgcagggaaagcaagaaggctggagggatccagcgtatcttgccagtaaccagtgaggtgtatcagtaaggtgggattatgggggtagatagaaaaggagttgaatcatcagagtaaactgccagttgcaaatttgataggatagttagtgaggattattaacctctgagcagtgatatagcataataaagccccgggcattattattattatttcttttgttacatctattacaagtttagaaaaaacaaagcaattgtcaaaaaaagttagaactattacaacccctgtttcctggtacttatcaaatacttagtatcatgggggttgggaaatgaaaagtaggagaaaagtgagattttactaagacctgttttactttacctcactaacaatggggggagaaaggagtacaaataggatctttgaccagcactgtttatggctgctatggtttcagagaatgtttatacattatttctaccgagaattaaaacttcagattgttcaacatgagagaaaggctcagcaacgtgaaataacgcaaatggcttcctctttccttttttggaccatctcagtctttatttgtgtaattcattttgaggaaaaaacaactccatgtatttattcaagtgcattaaagtctacaatggaaaaaaagcagtgaagcattagatgctggtacatgtaaccctgctttgggaatatggatgtaaagaagtaacttgtgtctcatgaaaatcagtacaatcacacaaggaggatgaaacgccggaacaaaaatgaggtgtgtagaacagggtcccacaggtttggggacattgagatcacttgtcttgtggtggggaggctgctgaggggtagcaggtccatctccagcagctggtccaacagtcgtatcctggtgaatgtctgttcagctcttctgtgagaatatgattttttccatatgtatatagtaaaatatgttactataaattacatgtactttataagtattggtttgggtgttccttccaagaaggactatagttagtaataaatgcctataataacatatttatttttatacatttatttctaatgaaaaaaacttttaaattatatcgcttttgtggaagtgcatataaaatagagtatttatacaatatatgttactagaaataaaagaacacttttggaa

SEQ ID NO: 79364 - DNA, 1897 bp, Homo sapiens
aacatggtcatttttattaaagtaaaaaataagatagtagtagctctggacatttggaaatgtgtatgtttgtttacaccctgtgaaaagtagacatggtctgcaaaagagccaatctcctaaatatatttctttctctagaaatgttattttgggacaaatgaatgaatccctgttgggaaaaaagaacctgctgcatatcatccatattttattttattattattttttttgagatggagtctcactctgtctcccaggctggagtggagtggcacaatctcggctcactgcaacttctgcctcctgggttcaagcgattctgctgcctcagcatgcccagtagctgggattacaggtgcatgccaccacacccggctaatttttgtatttttaccagcaccagaccttgtgcagaccatccctgcccccagtggcagctgggggagtggtcatcatgttctaagacctgtgggaagggttacaaaaaaagaagcttgaagtgtctgtcccatgatggaggggtgttatctcatgagagctgtgatcctttaaagaaacctaaacatttcatagacttttgcacaatggcagaatgcagttaagtggtttaagtggtgttagctttgagggcaaggcaaagtgaggaagggctggtgcagggaaagcaagaaggctggagggatccagcgtatcttgccagtaaccagtgaggtgtatcagtaaggtgggattatgggggtagatagaaaaggagttgaatcatcagagtaaactgccagttgcaaatttgataggatagttagtgaggattattaacctctgagcagtgatatagcataataaagccccgggcattattattattatttcttttgttacatctattacaagtttagaaaaaacaaagcaattgtcaaaaaaagttagaactattacaacccctgtttcctggtacttatcaaatacttagtatcatgggggttgggaaatgaaaagtaggagaaaagtgagattttactaagacctgttttactttacctcactaacaatggggggagaaaggagtacaaataggatctttgaccagcactgtttatggctgctatggtttcagagaatgtttatacattatttctaccgagaattaaaacttcagattgttcaacatgagagaaaggctcagcaacgtgaaataacgcaaatggcttcctctttccttttttggaccatctcagtctttatttgtgtaattcattttgaggaaaaaacaactccatgtatttattcaagtgcattaaagtctacaatggaaaaaaagcagtgaagcattagatgctggtaaaagctagaggagacacaatgagcttagtacctccaacttcctttctttcctaccatgtaaccctgctttgggaatatggatgtaaagaagtaacttgtgtctcatgaaaatcagtacaatcacacaaggaggatgaaacgccggaacaaaaatgaggtgtgtagaacagggtcccacaggtttggggacattgagatcacttgtcttgtggtggggaggctgctgaggggtagcaggtccatctccagcagctggtccaacagtcgtatcctggtgaatgtctgttcagctcttctgtgagaatatgattttttccatatgtatatagtaaaatatgttactataaattacatgtactttataagtattggtttgggtgttccttccaagaaggactatagttagtaataaatgcctataataacatatttatttttatacatttatttctaatgaaaaaaacttttaaattatatcgcttttgtggaagtgcatataaaatagagtatttatacaatatatgttactagaaataaaagaacacttttggaa

SEQ ID NO: 79365 - DNA, 4105 bp, Homo sapiens
  misc_feature (1043)..(1043): n is a, c, g, or t
  misc_feature (1140)..(1140): n is a, c, g, or t
gttcttgcactcgctggaaagcggctccgagccaggggctattgcaaagccagggtgcgctaccggacggagaggggagagccctgagcagagtgagcaacatcgcagccaaggcggaggccgaagaggggcgccaggcaccaatctccgcgttgcctcagccccggaggcgccccagagcgcttcttgtcccagcagagccactctgcctgcgcctgcctctcagtgtctccaactttgcgctggaagaaaaacttcccgcgcgccggcagaactgcagcgcctccttttagtgactccgggagcttcggctgtagccggctctgcgcgcccttccaacgaataatagaaattgttaattttaacaatccagagcaggccaacgaggctttgctctcccgacccgaactaaagctccctcgctccgtgcgctgctacgagcggtgtctcctggggctccaatgcagcgagctgtgcccgaggggttcggaaggcgcaagctgggcagcgacatggggaacgcggagcgggctccggggtctcggagctttgggcccgtacccacgctgctgctgctcgccgcggcgctactggccgtgtcggacgcactcgggcgcccctccgaggaggacgaggagctagtggtgccggagctggagcgcgccccgggacacgggaccacgcgcctccgcctgcacgcctttgaccagcagctggatctggagctgcggcccgacagcagctttttggcgcccggcttcacgctccagaacgtggggcgcaaatccgggtccgagacgccgcttccggaaaccgacctggcgcactgcttctactccggcaccgtgaatggcgatcccagctcggctgccgccctcagcctctgcgagggcgtgcgcggcgccttctacctgctgggggaggcgtatttcatccagccgctgcccgccgccagcgagcgcctcgccaccgccgccccaggggagaagccgccggcaccactacagttccacctcctgcggcggaatcggcagggcgacgtnggcggcacgtgcggggtcgtggacgacgagccccggccgactgggaaagcggagaccgaagacgaggacgaagggactgagggcgaggacgaagggnctcagtggtcgccgcaggacccggcactgcaaggcgtaggacagcccacaggaactggaagcataagaaagaagcgatttgtgtccagtcaccgctatgtggaaaccatgcttgtggcagaccagtcgatggcagaattccacggcagtggtctaaagcattaccttctcacgttgttttcggtggcagccagattgtacaaacaccccagcattcgtaattcagttagcctggtggtggtgaagatcttggtcatccacgatgaacagaaggggccggaagtgacctccaatgctgccctcactctgcggaacttttgcaactggcagaagcagcacaacccacccagtgaccgggatgcagagcactatgacacagcaattcttttcaccagacaggacttgtgtgggtcccagacatgtgatactcttgggatggctgatgttggaactgtgtgtgatccgagcagaagctgctccgtcatagaagatgatggtttacaagctgccttcaccacagcccatgaattaggccacgtgtttaacatgccacatgatgatgcaaagcagtgtgccagccttaatggtgtgaaccaggattcccacatgatggcgtcaatgctttccaacctggaccacagccagccttggtctccttgcagtgcctacatgattacatcatttctggataatggtcatggggaatgtttgatggacaagcctcagaatcccatacagctcccaggcgatctccctggcacctcgtacgatgccaaccggcagtgccagtttacatttggggaggactccaaacactgccccgatgcagccagcacatgtagcaccttgtggtgtaccggcacctctggtggggtgctggtgtgtcaaaccaaacacttcccgtgggcggatggcaccagctgtggagaagggaaatggtgtatcaacggcaagtgtgtgaacaaaaccgacagaaagcattttgatacgccttttcatggaagctggggaatgtgggggccttggggagactgttcgagaacgtgcggtggaggagtccagtacacgatgagggaatgtgacaacccagtcccaaagaatggagggaagtactgtgaaggcaaacgagtgcgctacagatcctgtaaccttgaggactgtccagacaataatggaaaaacctttagagaggaacaatgtgaagcacacaacgagttttcaaaagcttcctttgggagtgggcctgcggtggaatggattcccaagtacgctggcgtctcaccaaaggacaggtgcaagctcatctgccaagccaaaggcattggctacttcttcgttttgcagcccaaggttgtagatggtactccatgtagcccagattccacctctgtctgtgtgcaaggacagtgtgtaaaagctggttgtgatcgcatcatagactccaaaaagaagtttgataaatgtggtgtttgcgggggaaatggatctacttgtaaaaaaatatcaggatcagttactagtgcaaaacctggatatcatgatatcatcacaattccaactggagccaccaacatcgaagtgaaacagcggaaccagaggggatccaggaacaatggcagctttcttgccatcaaagctgctgatggcacatatattcttaatggtgactacactttgtccaccttagagcaagacattatgtacaaaggtgttgtcttgaggtacagcggctcctctgcggcattggaaagaattcgcagctttagccctctcaaagagcccttgaccatccaggttcttactgtgggcaatgcccttcgacctaaaattaaatacacctacttcgtaaagaagaagaaggaatctttcaatgctatccccactttttcagcatgggtcattgaagagtggggcgaatgttctaagtcatgtgaattgggttggcagagaagactggtagaatgccgagacattaatggacagcctgcttccgagtgtgcaaaggaagtgaagccagccagcaccagaccttgtgcagaccatccctgcccccagtggcagctgggggagtggtcatcatgttctaagacctgtgggaagggttacaaaaaaagaagcttgaagtgtctgtcccatgatggaggggtgttatctcatgagagctgtgatcctttaaagaaacctaaacatttcatagacttttgcacaatggcagaatgcagttaagtggtttaagtggtgttagctttgagggcaaggcaaagtgaggaagggctggtgcagggaaagcaagaaggctggagggatccagcgtatcttgccagtaaccagtgaggtgtatcagtaaggtgggattatgggggtagatagaaaaggagttgaatcatcagagtaaactgccagttgcaaatttgataggatagttagtgaggattattaacctctgagcagtgatatagcataataaagccccgggcattattattattatttcttttgttacatctattacaagtttagaaaaaacaaagcaattgtcaaaaaaagttagaactattacaacccctgtttcctggtacttatcaaatacttagtatcatgggggttgggaaatgaaaagtaggagaaaagtgagattttactaagacctgttttactttacctcactaacaatggggggagaaaggagtacaaataggatctttgaccagcactgtttatggctgctatggtttcagagaatgtttatacattatttctaccgagaattaaaacttcagattgttcaacatgagagaaaggctcagcaacgtgaaataacgcaaatggcttcctctttccttttttggaccacagccagccttggtctccttgcagtgcctacatgattacatcatttctggataatagtcatggggaatgtttgatggacaagcctcaagaatcccatacagctcccaagcgat

SEQ ID NO: 79366 - DNA, 3179 bp, Homo sapiens
  misc_feature (1043)..(1043): n is a, c, g, or t
  misc_feature (1140)..(1140): n is a, c, g, or t
gttcttgcactcgctggaaagcggctccgagccaggggctattgcaaagccagggtgcgctaccggacggagaggggagagccctgagcagagtgagcaacatcgcagccaaggcggaggccgaagaggggcgccaggcaccaatctccgcgttgcctcagccccggaggcgccccagagcgcttcttgtcccagcagagccactctgcctgcgcctgcctctcagtgtctccaactttgcgctggaagaaaaacttcccgcgcgccggcagaactgcagcgcctccttttagtgactccgggagcttcggctgtagccggctctgcgcgcccttccaacgaataatagaaattgttaattttaacaatccagagcaggccaacgaggctttgctctcccgacccgaactaaagctccctcgctccgtgcgctgctacgagcggtgtctcctggggctccaatgcagcgagctgtgcccgaggggttcggaaggcgcaagctgggcagcgacatggggaacgcggagcgggctccggggtctcggagctttgggcccgtacccacgctgctgctgctcgccgcggcgctactggccgtgtcggacgcactcgggcgcccctccgaggaggacgaggagctagtggtgccggagctggagcgcgccccgggacacgggaccacgcgcctccgcctgcacgcctttgaccagcagctggatctggagctgcggcccgacagcagctttttggcgcccggcttcacgctccagaacgtggggcgcaaatccgggtccgagacgccgcttccggaaaccgacctggcgcactgcttctactccggcaccgtgaatggcgatcccagctcggctgccgccctcagcctctgcgagggcgtgcgcggcgccttctacctgctgggggaggcgtatttcatccagccgctgcccgccgccagcgagcgcctcgccaccgccgccccaggggagaagccgccggcaccactacagttccacctcctgcggcggaatcggcagggcgacgtnggcggcacgtgcggggtcgtggacgacgagccccggccgactgggaaagcggagaccgaagacgaggacgaagggactgagggcgaggacgaagggnctcagtggtcgccgcaggacccggcactgcaaggcgtaggacagcccacaggaactggaagcataagaaagaagcgatttgtgtccagtcaccgctatgtggaaaccatgcttgtggcagaccagtcgatggcagaattccacggcagtggtctaaagcattaccttctcacgttgttttcggtggcagccagattgtacaaacaccccagcattcgtaattcagttagcctggtggtggtgaagatcttggtcatccacgatgaacagaaggggccggaagtgacctccaatgctgccctcactctgcggaacttttgcaactggcagaagcagcacaacccacccagtgaccgggatgcagagcactatgacacagcaattcttttcaccagacaggacttgtgtgggtcccagacatgtgatactcttgggatggctgatgttggaactgtgtgtgatccgagcagaagctgctccgtcatagaagatgatggtttacaagctgccttcaccacagcccatgaattaggccacgtgtttaacatgccacatgatgatgcaaagcagtgtgccagccttaatggtgtgaaccaggattcccacatgatggcgtcaatgctttccaacctggaccacagccagccttggtctccttgcagtgcctacatgattacatcatttctggataatggtcatggggaatgtttgatggacaagcctcagaatcccatacagctcccaggcgatctccctggcacctcgtacgatgccaaccggcagtgccagtttacatttggggaggactccaaacactgccccgatgcagccagcacatgtagcaccttgtggtgtaccggcacctctggtggggtgctggtgtgtcaaaccaaacacttcccgtgggcggatggcaccagctgtggagaagggaaatggtgtatcaacggcaagtgtgtgaacaaaaccgacagaaagcattttgatacgccttttcatggaagctggggaatgtgggggccttggggagactgttcgagaacgtgcggtggaggagtccagtacacgatgagggaatgtgacaacccagtcccaaagaatggagggaagtactgtgaaggcaaacgagtgcgctacagatcctgtaaccttgaggactgtccagacaataatggaaaaacctttagagaggaacaatgtgaagcacacaacgagttttcaaaagcttcctttgggagtgggcctgcggtggaatggattcccaagtacgctggcgtctcaccaaaggacaggtgcaagctcatctgccaagccaaaggcattggctacttcttcgttttgcagcccaaggttgtagatggtactccatgtagcccagattccacctctgtctgtgtgcaaggacagtgtgtaaaagctggttgtgatcgcatcatagactccaaaaagaagtttgataaatgtggtgtttgcgggggaaatggatctacttgtaaaaaaatatcaggatcagttactagtgcaaaacctggatatcatgatatcatcacaattccaactggagccaccaacatcgaagtgaaacagcggaaccagaggggatccaggaacaatggcagctttcttgccatcaaagctgctgatggcacatatattcttaatggtgactacactttgtccaccttagagcaagacattatgtacaaaggtgttgtcttgaggtacagcggctccagcagctggtccaacagtcgtatcctggtgaatgtctgttcagctcttctgtgagaatatgattttttccatatgtatatagtaaaatatgttactataaattacatgtactttataagtattggtttgggtgttccttccaagaaggactatagttagtaataaatgcctataataacatatttatttttatacatttatttctaatgaaaaaaacttttaaattatatcgcttttgtggaagtgcatataaaatagagtatttatacaatatatgttactagaaataaaagaacacttttggaa

SEQ ID NO: 79367 - DNA, 684 bp, Homo sapiens
ctcttgttgcccaggctggagtgcaatggcatgatctctgctcaccgcaacctccgcctcccgggttcaagcaattctcctacttcagcctcccgagtagctgggattacaggcatgtgccaccatgcctggctacttttctgtatttttagtagagacagagtttctccatgttggtcaggctggtcttgaactcacaacctccggtgatctgcctgcctcggcctcccatagtgctgggattacaggcatgagccaccatgcctgcccatgaaagcacttttaaaaagagagcacctctgctgcctggtcatattctgtacctgttcccaaaccctgaaaccagtgatgtcaatggctgcgtgggcattgaacgtgtacatgattcctgcagctttcctgttgagccagaccatgttcatcaatgctttttggtacattaattctacatcttcttcggtgaccacagtttatgtttatttcatttttcaggaatatccagccactggtgcacagccattgccacttgtgcccccaggggatcttgtcaactccagtatgtccccccagcactgtgttatctggcataataaatgtagttgggctgtagttgtagtgactcctcccaaaacaacccaggagtttaatactgtttggccaccggttacagacattgctgcccct

SEQ ID NO: 79368 - DNA, 1181 bp, Homo sapiens
  misc_feature (1065)..(1065): n is a, c, g, or t
  misc_feature (1069)..(1069): n is a, c, g, or t
  misc_feature (1072)..(1072): n is a, c, g, or t
  misc_feature (1105)..(1105): n is a, c, g, or t
aaccagcagccctaaaaaattaatcttcgtttggcttctaccaaaagtcatggtctacacaaagccctgcctactagaggcaataaggaaccatgaccaccacccccatttattcaaattacccactggaatgcaccgagtggggtttcaccctctgctgcttgtatgtttctcaacccatgttctaatcccatgcagtcatcattcaggaatccctgaggatcccctgattcaacttctcttttttgaatagattagaaattcctatcttctttcacttttactgtgacttttcagcttcctgttttccattcctgagggctatgaatcatatttccaaaataaatgatgatctatggagaggattttgcatttccaacatccttagctaattttaatgaattatcatggtcacatgatcctaaggcttcaggaatcggaggaagtggctgacactgacttaccattttaaccaaacaatcactgcacttaagcttggataagggtcaaataaaactaacagggctcttatgcaagcccttccagtctggtaagttatgagtatttatgttttatttccccccaaaaacaataagaccctcagaggcaaggaactcatcttggtttttgtcccttacacacctatctcagtccagtggtatgatgggcactggaaacaaaccacctggttcaaatcctggcttggtcacttattggccaagtggcctgatatggtttggctgtgtccccacccaaatctcatcttgaattgttagctcccataattcccatgtgttgtgggagggacctggtgggagagaattgaatcatgggggcggtttcccccatattgttctcgtggtagtgaatatgtctcacgagatctgagggttttataaggggtttctcctcttgcttggctctcattcttgttttgcctgccaccatgtaagatgtggctttgctcctccttgcctttgtcatgattgtgaggcctccccagccctccccaggtgacacattggaactgtgagtcaattaaacctttcctatataaattaaaanaaanaanaaaaaaaactcgagggggggcgccgtacccaantcggcctatagggagtcggactacaatttaattgcccgccgttttacaacggtctgactgggaggcggataacgat

SEQ ID NO: 79369 - DNA, 1127 bp, Homo sapiens
  misc_feature (1011)..(1011): n is a, c, g, or t
  misc_feature (1015)..(1015): n is a, c, g, or t
  misc_feature (1018)..(1018): n is a, c, g, or t
  misc_feature (1051)..(1051): n is a, c, g, or t
aaccagcagccctaaaaaattaatcttcgtttggcttctaccaaaagtcatggtctacacaaagccctgcctactagaggcaataaggaaccatgaccaccacccccatttattcaaattacccactggaatgcaccgagtggggtttcaccctctgctgcttgtatgtttctcaacccatgttctaatcccatgcagtcatcattcaggaatccctgaggatcccctgattcaacttctcttttttgaatagattagaaattcctatcttctttcacttttactgtgacttttcagcttcctgttttccattcctgagggctatgaatcatatttccaaaataaatgatgatctatggagaggattttgcatttccaacatccttagctaattttaatgaattatcatggtcacatgatcctaaggcttcaggaatcggaggaagtggctgacactgacttaccattttaaccaaacaatcactgcacttaagcttggataagggtcaaataaaactaacagggctcttatgcaagcccttccagtctggtaagttatgagtatttatgttttatttccccccacacctatctcagtccagtggtatgatgggcactggaaacaaaccacctggttcaaatcctggcttggtcacttattggccaagtggcctgatatggtttggctgtgtccccacccaaatctcatcttgaattgttagctcccataattcccatgtgttgtgggagggacctggtgggagagaattgaatcatgggggcggtttcccccatattgttctcgtggtagtgaatatgtctcacgagatctgagggttttataaggggtttctcctcttgcttggctctcattcttgttttgcctgccaccatgtaagatgtggctttgctcctccttgcctttgtcatgattgtgaggcctccccagccctccccaggtgacacattggaactgtgagtcaattaaacctttcctatataaattaaaanaaanaanaaaaaaaactcgagggggggcgccgtacccaantcggcctatagggagtcggactacaatttaattgcccgccgttttacaacggtctgactgggaggcggataacgat

SEQ ID NO: 79370 - DNA, 1016 bp, Homo sapiens
tgctgagtttatggtacacgcatattaactaagagaaagtgtcctatataggcagttagaaagtgagacactctagagagcttacagtactagatagaactttgtttagttttcggtggtagaaaatgaagctctctttctagaaaagaggagtcctgattcgtacatagcgtttttttcttctgatgaaaacaaatacataaacaagatgtgatttttgatatttttcagcacattttaacttaaaaattattttaaagaatttgtgtaagtaaaaatatgtgttaattatgagaacatcaaaactatagtgattaatgaacatttccatatagtaaattatggctgcaaatgaaggaagtcacagcccactgtttcatgtggcatctagtctcatacattcagagaataatactgaattctggttttgtattctaattagagcactaacaagatagtattcattagaagaagacaaagtgtctaaaaatcaggccatagaaagtacagctagattggaagaataaattctgttttatagaagtatagggtgactataattaacaacaatttattatatattttcaaatagctagaaaagagaatttagaatgtttccaacacaaagaaatgataaatgtttgaggtgatggatatgctactgatatgatcattacacattgtatacctgtgtcaaaatatcacactgtaatccataaatatgtatgattgttattaatatgtatcaacaaaaaataaaagaaaaaaattgccattcaaggtactaaaatttttaaaagaatgtcaattcaaatgggttattcacctttgaaaagaggtgactatagtttataataatatattatatatttcaaaatagctagaagacaataattggaatgtttttagcataaagaaaagacaaacatttaacatgatggatatcccaattacaccgatttgatctttacaaatcacatgaatgtatcaaattatcacatgtaccttccccttcc

SEQ ID NO: 79371 - DNA, 409 bp, Homo sapiens
gtgtgccaccacacccggttcatttttttgtatttttagtagagatggggtctcatgatgttgtcctgggtggtcttgaactcctgagctcaggtgatccacacttcggcctaccaaagtgctgggattacaggcgtgagccaccgcgcccggctaaaagaaaggagattctaatgcatgctacaacaccgatgaaccttgaggacatgacgttacgtgaaataagccaggaacaaaagacgaaggctatatgaatccactcatatgaagtacctcgattagccaaatccatacagaaagtagaacagtggttgccgcggggaggggaaatggaaagcctatatttaatgagtccagaagctttttttggtttgtttttagacggagtctcgctctgttgcccaggctg

SEQ ID NO: 79372 - DNA, 308 bp, Homo sapiens
aagatttttttgcccttggtaaaaagtctgctcatgattttatgaatagcataaaatgaggctagtggtgaaataccccaactttcgtgtagacagtaactttgaactttaaaacaaagagggagaaaagcattgaatatgctgactatgaactgtcctttatacacataaacacatgaatacaatagtgctaaggtgagcagtgcacagcatagctgttgggttatttttagaaatggcaaaaataaagccacatgcttttacccagtctctttgtgagacaaataatcagaaagcagtctgcgaaa

SEQ ID NO: 79373 - DNA, 339 bp, Homo sapiens
aagccaaagggatttgctgccatgctgtgacatggaaggcagggtgcactcagcactgtattgatgacgttcttaagtctgaaggacttaatgcagtttctggatgtgcctcctcatcaccacacctgttcaagggggaaactgggacccaccccaagagtcagctctatagaagtttttcctgacaatactctctactcctggaggtagactgtgtttttctcctgtactctcctctaacacagaacttgcgtgttactatatgcaacttgtttatctgccccctggactgtgaacccttgaggacagggatattgtcttatcactctttgaattctc

SEQ ID NO: 79374 - DNA, 1199 bp, Homo sapiens
tatatatttaagtagtttgctacatattgtattggatttatttcatgctaaaataattattttcttttttgtttacattgtccatgggaaaatgctaagtcacagatgaatacagcaagattaaatattgcagacctagggatccaaatgaagaactagatgttttagattttatgagattatatcagactatctaaaaagctacatttataaaaagtactggaatacagtaggcataaaacaaacttggtttctattgcatttattacaaattttagaacaaaaccatgtcctttgcagcaacatggatgcagctagaggtcatcctaagcaaattaatgcaggaacagaaaaccaaatattgcatgtcctcacttataagtgggagctaaacattgaatacacatagacaaaaatgggaacaacagacactggggaccactagacagaagggagaatgaggctatgggctgaaaaactaactgttgggtactatgctcatcacttgggtgacaggaccatccatatcccaaacctcagcatcatgcagtatacccaggtaacaactctacacctgtactctttcactaccccctcaaaaaacactggggagtacaatttgctggatcatatggtagaagtatgtttaattttgaaggaaactgccaaattattccaagtggctatactgctttgcatttgcaccaagcagtgaatgagagctcctattactccacatcctggccagcatttggtggtgtcagtattttggattatactattatgaagtggtatctcattttgatttccaattacctgatgacataaaatgttgaacattatgcttgtttgctatctgtatgtcttctctgataaggtgcctgtttataccattggcccattttaaaaatcttccttttgttgttgttttgttttcttattaagttttaagagtgctttgaatatttggaataacaatcttttgttaggtatgtctcttgcaaatattttctcccagtctgttgcttgtcttctcattctcttgacagtgtgttctgcagaggatatttatttttaaaaacaaaatcagggcacctctataagataatatagccacttcaaatgatactacagaatattagcatagacatgtactcacagtgtattttgaataaagcatgcaagtattttaaaaaaat

SEQ ID NO: 79375 - DNA, 433 bp, Homo sapiens
gtggagaagagataaggtgggactcgggaaggaaatcagtaatttggttttggccttgctaagtttgcaatctgagtatagatgtccagtaggcagttgaatacatgcatctggagttcctgggagaggtccaggctgaagatacaaatttggaagctgccagcctgtaaatggtgtgtaatggcatgggaatgaatgagatcatctagggagcaagtgtgggtaaacaaaggaagagtactaaagacaagcctggaaagctcccagcttttagagatttggttaaaagcaagaggcgctagcaaagaaaatgagcaatgagtgaggctggagtgaaatcagaggagtgtgggtccttgaaatgtagagtggagaaagaacttagtttggtgaactgtgatgaatctgtggcaggttaggttaaaaaaaaaaa

SEQ ID NO: 79376 - DNA, 489 bp, Homo sapiens
tggaaatatgcgtaaggtaagtggctgctgaagtgaagaaacatctaagtcagagtgaggggctcataataaggcacctaccttcattcttatcctcttattttcatgattgatctcccttggtggtcacctttcacttcgtggttcaaggtcctctattcttttctcactgctgtctcttcaagtatggatggaccagagatcattcaattatattaatcctcataatattcaatacattctttaggcacttggctcatgaaagtagatgtgttgttgtgaaaatattgtttcaacttgtattttattttagctgttgtttatttttcttctgtgaaagcccttggttaaaaaaaatagagtatcagagttgggagtacagggaagagagctgaagcagtgttaggtctgtcaaacataataataaaaggccagttaggtagtggtgactttgaaaataaacctcatctagccactgatcatcgggag

SEQ ID NO: 79377 - DNA, 480 bp, Homo sapiens
ttgctcctgctcttgtccaactcacaatcatcgctctcccgtacttgaacatctgagtcatgttcctctctacttcctacttcccatctccagccatttcccacatagcagccaagggatctgttaaagatctaagtcgggccaggtggggtgactcacacctgtaatctctgtgctttgggatggatcacctgaggtcaggagttcgagaccagcctggccaatatgatgaaactctgcctctactaaaaatacaaaatttaaccaggcgtggtggcaggtgcctgtaatcccagctactcaggaggctggggcaggagaatcacttgaacccaggaggcagaggttgtagtgagctgagatcgtgctactgcactctggtctgtgcaacagagcgagactccatctcaaaaaaaaaaagggagagagagaaaaggaagaatcggcatacctgtaaactcctccttctaaatgttccag

SEQ ID NO: 79378 - DNA, 470 bp, Homo sapiens
ctgtaccaattattaagcctttagcatgtaccaggtattgtgctaaggatttgatgtgtcttacttcatttaagccttttagcaaccccaggagaaaaaatacaggttgaccatttcttatctgaaaatctgaaattcaaaatgcccccaaatctgaaactttttgaataccaacatgacactcaaaggaagtgctcattggagtatttcagatttttggattagggatgcttaacagctaagtgtaatgcacatattccaaaatgttaaaaaaaaatccaaaatcctaagtacttctatcccaaatgtttgtttgattgattgatcgagacagggtctcactctgtaatcccagctactcaggaggctgaggcaggagaatcgcttgaacctgggaggcagaggttgtggtgagctgagatcatgccattgcactccagcctgggcaacaagagcaaaattccgtctca

SEQ ID NO: 79379 - DNA, 1082 bp, Homo sapiens
cccagccagcaggccactcagggcctacaggccgcatcttgcccacccaagagttccctgtctctgtccgctgggcacccagagctggggacctgggggtcaccctggattcttcactccctcttctttacgtctctccaaggcacgaacgtgtctccctcctgaagccaccgatgtggtccaggcctctgggattcctcaccatgacgacaggggtccagttccccaccccctacacccaaccactgccacagtgaccttcttataagcaaatgtgatcacaccctctccctgcttaaaaatcttcacagcccccagcccttcaaataaagcccaaattctccagcagggtatatgaattcctccccagtctgccccaatccacgtccctgcctcacccccaacccacgaagctcacgcagcctctgcagctcactcaaggccctcttgggccaccatgcttttgcatatgctgtccctggtcccggaagcaccctctgccagcctgcctcgagcacatgcctaattgcccttccatgctctgcctaagtgccgctcctctgggagtcctccccgcctggaatattgttggacgctcccctggtgtccccacagagtctgtatgtatctgtgccatgccagttcacagcaccccattgtaactgtatttgcgtgtctgtccccgttactccacccccatgtccctatgcccatgaggccccagagggccaggactgtggcttgttcatttgcactgtgcctggcactcagtagggactcagtgaatgaatgtggaatgtggttcacacagccagggagaatgggataccagccagggcaagaacagtctactgggtggggcaggatccaggacaaggaggtgagcagcccttcctccggccactcaagtagtggggactgggaggaggggcgctttgtctacgcagtcttcttatggctcatcaccgtacagacagggcacctgcctcctgccacgctgacttcaggactggtcgagccccagggaacatttgcagggcagcccaactttggccctggccctggcgctggccctggctctg

SEQ ID NO: 79380 - DNA, 86 bp, Homo sapiens
  misc_feature (41)..(41): n is a, c, g, or t
atgattctggggtctattactgtgccacctgggacaggcanaaattattataagaaactctttggcagtggaacaacacttgttgt

SEQ ID NO: 79381 - DNA, 382 bp, Homo sapiens
cctcctattaaaggtgagataaaccataccagagtgacagtacctcaaaaagaagaggtacaagattagtagaagttaacctggatacaagtactagtcagacgggatagagaagctaatggagaggtggaggaaacatatcatatgggaaatacaaaaacaggggaaaaagaaagtggtaacatatcagctattcttcaatttgccatagttcctgaaccttccaactgcttcactccctgctcatctgagcttcaacttcatctttctctcaaaagttcttctcctttagtgatctaagattcatgtttgtacctagtcctatcatctcctgatcctttttccctccgcttctaccctgtattctttaccagtttaaaga

SEQ ID NO: 79382 - DNA, 638 bp, Homo sapiens
caaagttcttccaacaatttaagccaggaattgccccactgtttccgaggtgatgagagcctctgagagatgagaaaactgaggcacatagggttaagtagattgtccaaggtcactgctgataactgcagcactgggatttgaagcactgaactctgctgactcctgagaagcatacctctaacagctgagatttccaaggctttttggccaatgtgtttgtcaacatctgcaacaaatttccagaactcaggccagagccctgggcaaagcctccttttttgtctcctctttttatctcccagtgcagtaggaagccatcagatgattttaaatggagaagtaagacacttggatctgtgcctaaaagaatcactctgctgttgagttcctgagaagcagactctgagatagagatcattttgtgggaagcttattgggaggtgctcttgggatccacacctgtagaagcctctttgctccccacacttcaggactggctctttaagatccaaaggagaagccaaccaaatgaaagcattcttggcaaccaggtattcctgaccagtccccggctctctgacaagctgtgtcacaatattgatccagtgattaaatttcatgctgaactgactcaa

SEQ ID NO: 79383 - DNA, 1008 bp, Homo sapiens
ctttccactggtttccaaattagatatgctagttatataaagttagtggttttctttcaggtttcataaggcttcatcttttaaacaaaaagcagcacttttgataactatttttagataattatatttctgattctcttgagatattttatctcaagagaaagatgttcatacctgcccaccaacttttataatagagcagatattttcgaaaagtcttatgttttcatctgagtatcagaatttttcctaaccagccacaacaataagatgcataacatgttttcctttgacaacacagctatacagttctgtgatctactcaaagccccttatattaatgcctttttccagaaatttactttcctggcacactagcatttaatcactaccgcataatgaactttacattgttttaagaactcagtgcaaatttaagcaacagtttttatatttggccattcaccacattctttctttcttctttggaaggatgttctcctcttgattgctactacaattattagtcaaaaatctcaaaattagattacttcatgtgtttaccaaccaacattctcttggattttctcaaccaccttcttcatccattttattcacagctaacagtaccatctaaatctaaactttcaaaaggtaagattttctcacggttctcactgcccacagaaacagctacaaaacctttcttttaccgggcatggtggctcatgcctgtaatcccagcactttgggaggacaaggcaggcagatcatgaggtcaggagttcaagaagagcctggccaacacggtgaaaccccatctctactaaaaatacaaaaattagctgggtgtggtggcgcactcccatagtcccagctacttgggaggctgaggcaggataattgcttgaacctgggaggcggagattgcagtgagccaagactgcaccattgcattacagcctgggcaacagagtgagactctgtctcaaaaaacaaaaaacaaaa

SEQ ID NO: 79384 - DNA, 327 bp, Homo sapiens
tataaaattatttttttcttaatttattgaaaaaaccatatggacagatgttatttgacggtgcttctcaaggtgttcatccacctgtgactcaagcttcctactgttgctccaagtcttggaaattgttttgggtttttgttgtcgttgtttttgttgaggcagtgtctcgctcttttgcctaggctggagtgcagtagtatgatttatggctcactgcagccttgacttcccaggctcaggtgatcctcccacctcagcctcccaagtagctgggactacaggcacatgtcaccatgtccagattttgtttttaatatttggcag

SEQ ID NO: 79385 - DNA, 372 bp, Homo sapiens
ggtattttttttggggggtcgggggcacagggtctcactatcacccaagctgaagtgcaatggcatgacatagctcacactgcagccttgaaccctgggatcaagtgatcctcccatcttagccccctgaatagctgggactataggtgagcaccaccacacccagctaatttttaaatttttgtgtagagatagggtctcgctacgttgcctaggctggtcttgaactcctgaactcaagcgctattcctcctaccttggctgcccaaagtgctgtgattatagccgttaaccaccatgccttactttttaagcacggctctacaaggctaaaatatattggagtgattttaaaccaccccctttgttttc

SEQ ID NO: 79386 - DNA, 3092 bp, Homo sapiens
gcgcgaggtggctcagccgcaagatggcggcgctggcggaggagcagacggaggtggcggtcaagctagagcctgagggaccgccaacgctgctacctccgcaggcgggggacggcgcaggcgagggtagcggcggcactaccaacaacggccccaacggcggcggcgggaacgttgcggcgtcgtcgtccactggcggggatggcgggacccccaagcccacggtggctgtctccgccgctgccccggcgggggcggccccggtgcccgccgctgctccggacgccggcgctccgcatgaccgacagactctactggccgtgctgcagttcctacggcagagcaaactccgcgaggccgaagaggcgctgcgccgtgaggccgggctgctggaggaggcagtggcgggcgccggagccccgggagaggtggacagcgccggcgctgaggtgaccagcgcgcttctcagccgggtgaccgcctcggcccctggccctgcggcccccgaccctccgggcactggcgcttcgggggccacggtcgtctcaggttcagcctcaggtcctgcggctccgggtaaagttggaagtgttgctgtggaagaccagccagatgtcagtgccgtgttgtcagcctacaaccaacaaggagatcccacaatgtatgaagaatactatagtggactgaaacacttcattgaatgttccctggactgccatcgggcagagttgtcccaacttttttatcctctgtttgtgcacatgtacttggagctagtctacaatcaacatgagaatgaagcaaagtcattctttgagaagttccatggagatcaggaatgttattaccaggatgacctacgagtattatctagtcttaccaaaaaggaacacatgaaagggaatgagaccatgttggattttcgaacaagtaaatttgttctgcgtatttcccgtgactcgtaccaactcttgaagaggcatcttcaggagaaacagaacaatcagatatggaacatagttcaggagcacctctacattgacatctttgatgggatgccgcgtagtaagcaacagatagatgcgatggtgggaagtttggcaggagaggctaaacgagaggcaaacaaatcaaaggtattttttggtttattaaaagaaccagaaattgaggtacctttggatgacgaggatgaagagggagaaaatgaagaaggaaaacctaaaaagaagaagcctaaaaaagatagtattggatccaaaagcaaaaaacaagatcccaatgctccacctcagaacagaatccctcttcctgagttgaaagattcagataagttggataagataatgaatatgaaagaaaccaccaaacgagtgcgccttgggccggactgcttaccctccatttgtttctatacatttctcaatgcttaccagggtctcactgcagtggatgtcactgatgattctagtctgattgctggaggttttgcagattcaactgtcagagtgtggtcggtaacacccaaaaagcttcgtagtgtcaaacaagcatcagatcttagtcttatagacaaagaatcagatgatgtcttagaaagaatcatggatgagaaaacagcaagtgagttgaagattttgtatggtcacagtgggcctgtctacggagccagcttcagtccggataggaactatctgctttcctcttcagaggacggaactgttagattgtggagccttcaaacatttacttgtttggtgggatataaaggacacaactatccagtatgggacacacaattttctccatatggatattattttgtgtcagggggccatgaccgagtagctcggctctgggctacagaccactatcagcctttaagaatatttgccggccatcttgctgatgtgaattgtaccagattccatccaaattctaattatgttgctacgggctctgcagacagaactgtgcggctctgggacgtcctgaatggtaactgtgtaaggatcttcactggacacaagggaccaattcattccttgacattttctcccaatgggagattcctggctacaggagcaacagatggcagagtgcttctttgggatattggacatggtttgatggttggagaattaaaaggccacactgatacagtctgttcacttaggtttagtagagatggtgaaattttggcatcaggttcaatggataatacagttcgattatgggatgctatcaaagcctttgaagatttagagaccgatgactttactacagccactgggcatataaatttacctgagaattcacaggagttattgttgggaacatatatgaccaaatcaacaccagttgtacaccttcattttactcgaagaaacctggttctagctgcaggagcttatagtccacaataaaccatcggtattaaagaccttttggaagctactgtttttaaaaagggagactaaaagcaaatacctcagtgattaatatttaagctacagagaatgtttttgtctatatggatctggaagtatgctgcttggaaaaatctgaacaggacagttccacgtttctatagcaaccacatttgactaatttccgttagttgaataagaggtattatgatcatggaggggacatttatggtgctttggattgtgtggaaactatgcatttctgttcaaatgctattttaatttattacatttagaaaaaaagttgatttcaataattcatcctgcttcaagattcaaattcagaaatatactatcatcttgaattttagctgaagaatcctatagcatgtatgtttctgctgtaaaaacgtagttactgtatggcactcaaaaactatgttaaatgatccactaactttttttttcttggcccatgattaatggaatgtatgtaactaggtagggttcctttcttagatctagaggaagtacagccacccactgacatctgaatttatatacctgttgagttttgagtgcacccaaacactcgataaaccaggtgaagaaatttagcttccatgttctacttcagctaaaacagctacatcgacagcaacg

SEQ ID NO: 79387 - DNA, 2445 bp, Homo sapiens
gcgcgaggtggctcagccgcaagatggcggcgctggcggaggagcagacggaggtggcggtcaagctagagcctgagggaccgccaacgctgctacctccgcaggcgggggacggcgcaggcgagggtagcggcggcactaccaacaacggccccaacggcggcggcgggaacgttgcggcgtcgtcgtccactggcggggatggcgggacccccaagcccacggtggctgtctccgccgctgccccggcgggggcggccccggtgcccgccgctgctccggacgccggcgctccgcatgaccgacagactctactggccgtgctgcagttcctacggcagagcaaactccgcgaggccgaagaggcgctgcgccgtgaggccgggctgctggaggaggcagtggcgggcgccggagccccgggagaggtggacagcgccggcgctgaggtgaccagcgcgcttctcagccgggtgaccgcctcggcccctggccctgcggcccccgaccctccgggcactggcgcttcgggggccacggtcgtctcaggttcagcctcaggtcctgcggctccgggtaaagttggaagtgttgctgtggaagaccagccagatgtcagtgccgtgttgtcagcctacaaccaacaaggagatcccacaatgtatgaagaatactatagtggactgaaacacttcattgaatgttccctggactgccatcgggcagagttgtcccaacttttttatcctctgtttgtgcacatgtacttggagctagtctacaatcaacatgagaatgaagcaaagtcattctttgagaagttccatggagatcaggaatgttattaccaggatgacctacgagtattatctagtcttaccaaaaaggaacacatgaaagggaatgagaccatgttggattttcgaacaagtaaatttgttctgcgtatttcccgtgactcgtaccaactcttgaagaggcatcttcaggagaaacagaacaatcagatatggaacatagttcaggagcacctctacattgacatctttgatgggatgccgcgtagtaagcaacagatagatgcgatggtgggaagtttggcaggagaggctaaacgagaggcaaacaaatcaaaggtattttttggtttattaaaagaaccagaaattgaggtacctttggatgacgaggatgaagagggagaaaatgaagaaggaaaacctaaaaagaagaagcctaaaaaagatagtattggatccaaaagcaaaaaacaagatcccaatgctccacctcagaacagaatccctcttcctgagttgaaagattcagataagttggataagataatgaatatgaaagaaaccaccaaacgagtgcgccttgggccggactgcttaccctccatttgtttctatacatttctcaatgcttaccagggtctcactgcagtggatgtcactgatgattctagtctgattgctggaggttttgcagattcaactgtcagagtgtggtcggtaacacccaaaaagcttcgtagtgtcaaacaagcatcagatcttagtcttatagacaaagaatcagatgatgtcttagaaagaatcatggatgagaaaacagcaagtgagttgaagattttgtatggtcacagtgggcctgtctacggagccagcttcagtccggataggaactatctgctttcctcttcagaggacggaactgttagattgtggagccttcaaacatttacttgtttggtgggatataaaggacacaactatccagtatgggacacacaattttctccatatggatattattttgtgtcagggggccatgaccgagtagctcggctctgggctacagaccactatcagcctttaagaatatttgccggccatcttgctgatgtgaattgtaccagattccatccaaattctaattatgttgctacgggctctgcagacagaactgtgcggctctgggacgtcctgaatggtaactgtgtaaggatcttcactggacacaagggaccaattcattccttgacattttctcccaatgggagattcctggctacaggagcaacagatggcagagtgcttctttgggatattggacatggtttgatggttggagaattaaaaggccacactgatacagtctgttcacttaggtttagtagagatggtgaaattttggcatcaggttcaatggataatacagttcgattatgggatgctatcaaagcctttgaagatttagagaccgatgactttactacagccactgggcatataaatttacctgagaattcacaggagttattgttgggaacatatatgaccaaatcaacaccagttgtacaccttcattttactcgaagaaacctggttctagctgcaggagcttatagtccacaataaaccatcggtattaaagacc

SEQ ID NO: 79388 - DNA, 3111 bp, Homo sapiens
gcgcgaggtggctcagccgcaagatggcggcgctggcggaggagcagacggaggtggcggtcaagctagagcctgagggaccgccaacgctgctacctccgcaggcgggggacggcgcaggcgagggtagcggcggcactaccaacaacggccccaacggcggcggcgggaacgttgcggcgtcgtcgtccactggcggggatggcgggacccccaagcccacggtggctgtctccgccgctgccccggcgggggcggccccggtgcccgccgctgctccggacgccggcgctccgcatgaccgacagactctactggccgtgctgcagttcctacggcagagcaaactccgcgaggccgaagaggcgctgcgccgtgaggccgggctgctggaggaggcagtggcgggcgccggagccccgggagaggtggacagcgccggcgctgaggtgaccagcgcgcttctcagccgggtgaccgcctcggcccctggccctgcggcccccgaccctccgggcactggcgcttcgggggccacggtcgtctcaggttcagcctcaggtcctgcggctccgggtaaaggtgagccgtggggtcccggttggaagtgttgctgtggaagaccagccagatgtcagtgccgtgttgtcagcctacaaccaacaaggagatcccacaatgtatgaagaatactatagtggactgaaacacttcattgaatgttccctggactgccatcgggcagagttgtcccaacttttttatcctctgtttgtgcacatgtacttggagctagtctacaatcaacatgagaatgaagcaaagtcattctttgagaagttccatggagatcaggaatgttattaccaggatgacctacgagtattatctagtcttaccaaaaaggaacacatgaaagggaatgagaccatgttggattttcgaacaagtaaatttgttctgcgtatttcccgtgactcgtaccaactcttgaagaggcatcttcaggagaaacagaacaatcagatatggaacatagttcaggagcacctctacattgacatctttgatgggatgccgcgtagtaagcaacagatagatgcgatggtgggaagtttggcaggagaggctaaacgagaggcaaacaaatcaaaggtattttttggtttattaaaagaaccagaaattgaggtacctttggatgacgaggatgaagagggagaaaatgaagaaggaaaacctaaaaagaagaagcctaaaaaagatagtattggatccaaaagcaaaaaacaagatcccaatgctccacctcagaacagaatccctcttcctgagttgaaagattcagataagttggataagataatgaatatgaaagaaaccaccaaacgagtgcgccttgggccggactgcttaccctccatttgtttctatacatttctcaatgcttaccagggtctcactgcagtggatgtcactgatgattctagtctgattgctggaggttttgcagattcaactgtcagagtgtggtcggtaacacccaaaaagcttcgtagtgtcaaacaagcatcagatcttagtcttatagacaaagaatcagatgatgtcttagaaagaatcatggatgagaaaacagcaagtgagttgaagattttgtatggtcacagtgggcctgtctacggagccagcttcagtccggataggaactatctgctttcctcttcagaggacggaactgttagattgtggagccttcaaacatttacttgtttggtgggatataaaggacacaactatccagtatgggacacacaattttctccatatggatattattttgtgtcagggggccatgaccgagtagctcggctctgggctacagaccactatcagcctttaagaatatttgccggccatcttgctgatgtgaattgtaccagattccatccaaattctaattatgttgctacgggctctgcagacagaactgtgcggctctgggacgtcctgaatggtaactgtgtaaggatcttcactggacacaagggaccaattcattccttgacattttctcccaatgggagattcctggctacaggagcaacagatggcagagtgcttctttgggatattggacatggtttgatggttggagaattaaaaggccacactgatacagtctgttcacttaggtttagtagagatggtgaaattttggcatcaggttcaatggataatacagttcgattatgggatgctatcaaagcctttgaagatttagagaccgatgactttactacagccactgggcatataaatttacctgagaattcacaggagttattgttgggaacatatatgaccaaatcaacaccagttgtacaccttcattttactcgaagaaacctggttctagctgcaggagcttatagtccacaataaaccatcggtattaaagaccttttggaagctactgtttttaaaaagggagactaaaagcaaatacctcagtgattaatatttaagctacagagaatgtttttgtctatatggatctggaagtatgctgcttggaaaaatctgaacaggacagttccacgtttctatagcaaccacatttgactaatttccgttagttgaataagaggtattatgatcatggaggggacatttatggtgctttggattgtgtggaaactatgcatttctgttcaaatgctattttaatttattacatttagaaaaaaagttgatttcaataattcatcctgcttcaagattcaaattcagaaatatactatcatcttgaattttagctgaagaatcctatagcatgtatgtttctgctgtaaaaacgtagttactgtatggcactcaaaaactatgttaaatgatccactaactttttttttcttggcccatgattaatggaatgtatgtaactaggtagggttcctttcttagatctagaggaagtacagccacccactgacatctgaatttatatacctgttgagttttgagtgcacccaaacactcgataaaccaggtgaagaaatttagcttccatgttctacttcagctaaaacagctacatcgacagcaacg

SEQ ID NO: 79389 - DNA, 867 bp, Homo sapiens
ctcaaagattttttttttctccttaatttggcctcttttcctatctgtctttttacttatccactgttttcctttagtggtaaactgatacaactgttttcctattcaagcatagcctctttattttcctataatcccatgtataattttcataatttcctttcctcaaatctttaaaaaaatttggttaaattttcttctttctgtgtgagttacaagtgtttctgtgcttcctttccttaaaatggtaaaatatactactcaattcttaacctagcacttttatgttttctcagcattggctcagagctcccggtgcaggcaggttgtgaatcctgaggggaaagacagtgacagacagacagacatggacagacaagcgacatctgccttgccttttgtgaccaaacctcagaattcacagtgtcacttcctctatactctattaattgaggcagttacaaagtcccacccccggtcccactgagggagggaagcagccctctttaggtggaatgtcattgtccccctaagaagagcaggtgggatgggatgtagactggtgtggcccatctttgaaaaataacatccggcatgcctctcctccattttaaatatacatttggtcttcccaggaatagaactgtgtataatgcctatataaaacagaggtatacctgtatttcagtattaaagtgtgaattttaaaaaactaattaaatggattgttactgttggcacttctctttacaaatggcagtttcatgaaaatttaatattcagtttaatagccctgcaccagacaattatgacagttcttcaaaatctttttgtttatgggtttcacaatttaccttaaaaaaaaaa

SEQ ID NO: 79390 - DNA, 755 bp, Homo sapiens
tgtactcccacccattattagcagtttggtgggggtttccagattgttttctgggtacacattttctatgtgtgctctcatcggcatgtgtgtaacttctgaggcttcgtgcttagaaagactttccttaaaatggtaaaatatactactcaattcttaacctagcacttttatgttttctcagcattggctcagagctcccggtgcaggcaggttgtgaatcctgaggggaaagacagtgacagacagacagacatggacagacaagcgacatctgccttgccttttgtgaccaaacctcagaattcacagtgtcacttcctctatactctattaattgaggcagttacaaagtcccacccccggtcccactgagggagggaagcagccctctttaggtggaatgtcattgtccccctaagaagagcaggtgggatgggatgtagactggtgtggcccatctttgaaaaataacatccggcatgcctctcctccattttaaatatacatttggtcttcccaggaatagaactgtgtataatgcctatataaaacagaggtatacctgtatttcagtattaaagtgtgaattttaaaaaactaattaaatggattgttactgttggcacttctctttacaaatggcagtttcatgaaaatttaatattcagtttaatagccctgcaccagacaattatgacagttcttcaaaatctttttgtttatgggtttcacaatttaccttaaaaaaaaaa

SEQ ID NO: 79391 - DNA, 440 bp, Homo sapiens
gcgaagactttggcagagcgcacagcaggccaggagaggctggcgccccttctcccaagaatactgtcagatgctgatcctgacaccacctggaattccttctcccggaccttccttcgtgtcctctgggcccgggcccagttgtccccactcagtgtggccctgttcttcgcctgccttcgcgacagtgcggtgggaccgccgtcggcccgggcctcccctgccacccagcggccacctcgggcacaggagaggggcatagcggcttcaagtaggggtagcccggaggcccggagctttggaggagcaccctttgagtccagaaactttttaacttgtcctctatgccagcatgttcagcaaacgtcttgttgttattgttgtcgttgttgttgttgtaaggggaggaataaaccttccacttatccgcctccaaatgg

SEQ ID NO: 79392 - DNA, 342 bp, Homo sapiens
cctggcttcatacagaatgtgacaagggcataagcccaggtcctgctgcctccctttcacacaatgcccaacttattgtcttcctcgtgtcatcaaaacctgcccattccctgacccaaccagaagctttctgtcctaatcatataccagaggacagacaatgtgatttgctttttccaaatctcagtggctgattctgaacaactgtggtctcttttatcttaagggtctcttttaactgctagagctctccatttctcctcctaaaagagaaggatttcttttcttttaagtctcctatttcttcacacagttcaaggaaatgagcaataaatgttttaa

SEQ ID NO: 79393 - DNA, 538 bp, Homo sapiens
cacgtgtgcaactctggggtgaaagacaccagcttcttctgcagattacctgtatcatttgggtttgaagcatattctgatgtgtctttgtgaataccagtttattctcaaggattttaggttgtcttttcttttctttttttttttttttctatttcgtttagagcttttcttcctgatggcttatctaccgatcaaagcaacttctacctcaccagcagatacagaggcaacttcttccatagatttcttcaccagttttccttagctgtctccttggtaagtgacttttctctgatgcttcaaccgtctcctggaactttacttcacccactttccccagaattttgtaaggcataaatccttataatgtgttttattttatatcactcacagttgttctggttccatgattgaatcctaacctatacttatggtaaataatttaaagtgttcatctagcaactataaatagatggtgtgtctagaggagaggatgaatgtggggagtagcagaaaataaagccagaaagaaacc

SEQ ID NO: 79394 - DNA, 867 bp, Homo sapiens
gaagaggcaagatttcagggaaaaaataggtaaaaagatgtttagagcaagaggctattgcagttttatgtgaagggcaatgagtagacattcctcttgatgagatcggcacctaaaactgtgtgggtgctaaagccactaaatcaagggttaaaaacttaggaaatctcagttcaagtagaagaataagtcttcttcttccttccaattcttgtatcttccctcatcagttctgccctccctccttcccttacactttgccttcctcctttccttcttttcttccttcttcccttcctttcttcttttctatccttccaagtatgtactaaacctctatttgccacaagtctttgtaattgagcaaagcaatgcagcccatggtacatgttcttcaaagaacttataaaccagttgatgagacatgacagaaacatgaaaaaataaaacaaccaagacatattatgatgcagtataataatggctgtaagttttcaggagagtgaaatcaatgcgagttagcatagttaaaaaaatacgtgatgttcaagttgtcaataaattgaatggagcaatttgaataagaattagggagttggggcaaaagatatttctgggaggaagcggcatcagcaaagatatgacgatgggaatatatgtggcaggttttaggaaagcacattagatcagtccagttatagatgaacattcaaataaagaaaagggcttaggttttaaagttagaaatgaaaataagttttgatagctaggatggcgacagataatatgaaatgtgggcctatatttagtatacaatcactaataaaacctctagtagcacttgagagtttacaaaagcttgttccc

SEQ ID NO: 79395 - DNA, 924 bp, Homo sapiens
taggagatatgcctaatgttaaatgacgagttaattggtccagcacaccaacaaggcacatgtatacatatgtaacaaacctgcacattgtgcacatgtaccctaaaacttaaagtataatataaataaataaataaataaaatgatgcaataattaaataaaaatacagtataaagttgctggttaaatgatgaaagaatagtttctgaactgcacatgtgatttctgtagaaaaatttgtattactcgtttattgcttatttcttgaacaggagtagatatttagaattactgtttgtaactaaggtgttcctcacaatccaagccagaactgcgtctcgaatgtatttcccaccatttctctgagctccagccctctccaaatcctactctttatcagtgcagcttctcaccattgctcagtcacacaggattgggggagagaagagggcagaaggggtggctttgcacctccccattgggcaggcctttcctctgcctgaactgtgctttgctagttctctacctaacaatttcctactcattctttaattcgctaaaatggtgcctttgagctgtctccagctgccccacccagcttcccctggctccctccgtggtgccctcacaaactgtttacaaatttccaacatagcaattattgcacactgtgagctcttccctttgtgttccctatgcttactatagccatgttgctgcctaagggacacacgtagggaaataagactcagcaacacatcccattcaacaacagccagcataagaaatggtaagcttttaagccaggtgcagtggctcctgcctgtagtcgcagctacttgggaggctgaggtgagagaattgcttgagcccaggggtttgagcctagcctgggcaacataatgagaccctggctctttaaa

SEQ ID NO: 79396 - DNA, 211 bp, Homo sapiens
gtcgacaaatgattgggttgctgcccatactgaatgggaaaagtccaaaggggatattctggcaacaaaaagaaggcagcaacctagaaaaaaaaaatcaacaggtaaactaaaaagaatctctaagaaaacaagtcaagtaaaaaacaaaacaagccagacagggaagattggaataaataacctttcaatgcaaagacatagaaagaca

SEQ ID NO: 79397 - DNA, 255 bp, Homo sapiens
ttaagtcttctattcaagtcactaaactttatattcatataaggtttaatccacagcatgtcatgatgctggcctttgataacttttttcaagagtccttggacagatgactgtgaccattgtggccatattcttacctaatccacacattggagaacgtgtttatcaagtttatgagttatatttccactaatcttcgtaaaagtaattatcttgcttattattacatgaaataaatgttgcacgtgaacaagc

SEQ ID NO: 79398 - DNA, 3854 bp, Homo sapiens
gtttccacaataaaactttttctaccagatggtatggaagcccggctccgctcagatgtcatccatgcaccattaccaagtcctgttgacaaagttgctgctaacactccaagtatgtactctcaggaactattccagctttctcagtatctacaggaggccttacatcgggaacaaatgttggaacagaagttagccacgcttcagcggctactagccatcacccaagaggcttcagataccagttggcaggctttaatagatgaagatagactcttatcacggttagaagttatgggaaaccaattacaggcatgctccaaaaatcaaacagaagatagtttacgaaaggaacttatagcattacaagaggataaacataactatgagacaacagccaaagagtccctgaggcgggttcttcaggagaaaattgaagtggttagaaaactttcagaagttgagcgaagtctgagtaatactgaagatgaatgtacccatctgaaagaaatgaatgaaaggactcaggaagaattaagagaattagccaacaaatataatggagcagttaatgagattaaagatttatctgataaattaaaggtagcagagggaaaacaagaggaaatccaacagaagggacaggctgagaaaaaagaattacaacataaaatagatgaaatggaagaaaaagaacaggagctccaggcaaaaatagaagctttgcaagctgataatgatttcaccaatgaaaggctaacagctttacaagagcacttgctttcaaagagtggcggggactgcacttttattcatcaattcatagaatgccagaagaagctgatcgtcgaagggcatctaaccaaagcggtagaagaaacaaagctttcaaaagaaaatcagacaagagcaaaagaatctgatttttcagatactctgagtccaagcaaggaaaaaagcagtgacgacactacagacgcccaaatggatgagcaagacctaaatgagcctcttgccaaagtgtcccttttaaaagatgacttgcagggtgcacagtcagaaattgaggcaaagcaagaaatacagcatcttcgaaaggaattgatcgaagcccaggagctagctagaacaagtaaacaaaaatgctttgaacttcaagctcttttggaagaagaaagaaaagcctatcgaaatcaagttgaggaatccactaaacaaatacaggttcttcaagcccaattgcagaggttacacatcgatactgagaatctccgggaggagaaggacagtgaaatcacaagtactagagatgaattgcttagtgcccgagatgaaattttgctccttcatcaagcagcagcaaaggttgcctctgagcgggacactgacattgcttctttacaagaagagcttaagaaggtgagagctgagcttgagcggtggcggaaagcagcgtctgaatatgagaaagaaatcacaagtctgcaaaacagttttcagcttagatgtcaacagtgtgaggaccagcagagagaagaagcaacaaggttgcaaggtgaactagagaagttgagaaaggaatggaatgcattggaaaccgaatgccattctctaaaaagggaaaatgttttgctatcatcagaactgcaacggcaagaaaaagaattgcacaattctcagaagcagagtttagagcttaccagtgatctcagcatccttcaaatgtctaggaaagaacttgagaatcaagtgggatccttgaaagaacagcatcttcgggattcagctgatttaaaaactcttctcagtaaggcagaaaaccaagcaaaggatgtgcagaaagagtatgaaaagacacagactgtactctcagaactgaagttgaagtttgaaatgactgagcaggaaaagcagtcaatcacagatgagctcaaacagtgtaaaaacaacctgaagctgctccgagagaaaggaaataataaaccctggccctggatgcccatgttggctgccctggttgcagtaacagccatcgtgctgtacgtgccaggtctggccagagcttctccatgagagcgttccttgagtccgtacaccgtcctccctctagaagctggcatcacactcatgctggggacaaacagaaccattttcttcctctttacctcttaaaacagcagaagtacaagaatacagctgtagggtcattgctttaaattatataaaatgtatctgtctataaagaagatataaaattgtgactttattctactgtaagcaataatttgcttgcaatttttcatgtaatttttaaattagtatgttaagattctgaatattatggtggcctaaagtaggcttcttggtacaccagattatttataacattaaatttatgagtattttactctgaattctgatcaccagataattcatttttctgatttgataactacccaaaccaaacaaccaatacatacatgggaagagaggccctgtgtgctcagtgcctatcagtttgaaatatatacacatatatatattttttacatatttacgccatttttacttgttatgaaaccactgagctattgggaacaagacttagagacaactatttgcgtggattttttttttttttaaggaaaaatacgtttggaaaataaactgttatggtgataatttggggaatatgtgcacgcttgttcagccttaatgtgacttgaagatgtggaggacatcaactttgaaaaactttccatgagagtgtattttcttgagcaaactgaagtatttctgggagcaaaaacatagtaattacacaatttcagtgcagtcaaccaaaatgttgagtcaattggaatgtaatttattaaaccatgtatttaaagagatatttttctttaaaagccaagttactttctcatatacagcattttaggaagcatgattttttttttctatcatctattcctccaagcatgtttaattgaagaaagtattaatatctctttagataagcttgtattgacctaatttggtttatgatgtgtcagagctaattcatgttcagggtgagcgttgtacctaccaacaaatttcctggttgggtatgcaaatggttattttctttttattgttgttaattgggactttctgttaatgaaaagcactattcccaagattaatagtgttctatgcacaatgaagcacctaaaaacactgcttgatattataaatttaaaacacaagtgaaagtttagccatggttttgtgcggcatcatagttatgtcaataaagtttatttaggtcatagaatatcctaaagtatcacatagttaaatttttcagtcagtgaagaccgggagggaatgtcagtgaattggcttgaatgttctgtggcaatccacaggtctagccaaatattgaaataggagtttagggtataatttgccttgtgatgtttggcagtcactgtttatactttaaaggttatattttaagctatttgagattgcttttgggaagatcactagatttatggaggaattagtcacaaatgacttgtagaaaatactgtcatatagttcatttcatcattttctgttgcaggaagccactccaccacagaatgctaatatgccagtggtacccagtacctcttgtatataggttattgcaaatattgttctgaaatgcttaacttcagaattacattttttaaagtaaataattgttttaaatctattttgtaaagatataaagtacaatagaatttctggagtacagattaaactatttgcactaacacacgtgacgtgcatgatttaataaaataactttactctcccta

SEQ ID NO: 79399 - DNA, 3995 bp, Homo sapiens
gtttccacaataaaactttttctaccagatggtatggaagcccggctccgctcagatgtcatccatgcaccattaccaagtcctgttgacaaagttgctgctaacactccaagtatgtactctcaggaactattccagctttctcagtatctacaggaggccttacatcgggaacaaatgttggaacagaagttagccacgcttcagcggctactagccatcacccaagaggcttcagataccagttggcaggctttaatagatgaagatagactcttatcacggttagaagttatgggaaaccaattacaggcatgctccaaaaatcaaacagaagatagtttacgaaaggaacttatagcattacaagaggataaacataactatgagacaacagccaaagagtccctgaggcgggttcttcaggagaaaattgaagtggttagaaaactttcagaagttgagcgaagtctgagtaatactgaagatgaatgtacccatctgaaagaaatgaatgaaaggactcaggaagaattaagagaattagccaacaaatataatggagcagttaatgagattaaagatttatctgataaattaaaggtagcagagggaaaacaagaggaaatccaacagaagggacaggctgagaaaaaagaattacaacataaaatagatgaaatggaagaaaaagaacaggagctccaggcaaaaatagaagctttgcaagctgataatgatttcaccaatgaaaggctaacagctttacaagtacggttagaacatcttcaggagaaaactcttaaagaatgcagcagcttggagcacttgctttcaaagagtggcggggactgcacttttattcatcaattcatagaatgccagaagaagctgatcgtcgaagggcatctaaccaaagcggtagaagaaacaaagctttcaaaagaaaatcagacaagagcaaaagaatctgatttttcagatactctgagtccaagcaaggaaaaaagcagtgacgacactacagacgcccaaatggatgagcaagacctaaatgagcctcttgccaaagtgtcccttttaaaagatgacttgcagggtgcacagtcagaaattgaggcaaagcaagaaatacagcatcttcgaaaggaattgatcgaagcccaggagctagctagaacaagtaaacaaaaatgctttgaacttcaagctcttttggaagaagaaagaaaagcctatcgaaatcaagttgaggaatccactaaacaaatacaggttcttcaagcccaattgcagaggttacacatcgatactgagaatctccgggaggagaaggacagtgaaatcacaagtactagagatgaattgcttagtgcccgagatgaaattttgctccttcatcaagcagcagcaaaggttgcctctgagcgggacactgacattgcttctttacaagaagagcttaagaaggtgagagctgagcttgagcggtggcggaaagcagcgtctgaatatgagaaagaaatcacaagtctgcaaaacagttttcagcttagatgtcaacagtgtgaggaccagcagagagaagaagcaacaaggttgcaaggtgaactagagaagttgagaaaggaatggaatgcattggaaaccgaatgccattctctaaaaagggaaaatgttttgctatcatcagaactgcaacggcaagaaaaagaattgcacaattctcagaagcagagtttagagcttaccagtgatctcagcatccttcaaatgtctaggaaagaacttgagaatcaagtgggatccttgaaagaacagcatcttcgggattcagctgatttaaaaactcttctcagtaaggcagaaaaccaagcaaaggatgtgcagaaagagtatgaaaagacacagactgtactctcagaactgaagttgaagtttgaaatgactgagcaggaaaagcagtcaatcacagatgagctcaaacagtgtaaaaacaacctgaagctgctccgagagaaaggaaataatccttccatattacaacccgtcccagccgtattcatcggcctattcctggctttcctgttttggtgtttcggtccattgtggtagagaaagaaaccctggccctggatgcccatgttggctgccctggttgcagtaacagccatcgtgctgtacgtgccaggtctggccagagcttctccatgagagcgttccttgagtccgtacaccgtcctccctctagaagctggcatcacactcatgctggggacaaacagaaccattttcttcctctttacctcttaaaacagcagaagtacaagaatacagctgtagggtcattgctttaaattatataaaatgtatctgtctataaagaagatataaaattgtgactttattctactgtaagcaataatttgcttgcaatttttcatgtaatttttaaattagtatgttaagattctgaatattatggtggcctaaagtaggcttcttggtacaccagattatttataacattaaatttatgagtattttactctgaattctgatcaccagataattcatttttctgatttgataactacccaaaccaaacaaccaatacatacatgggaagagaggccctgtgtgctcagtgcctatcagtttgaaatatatacacatatatatattttttacatatttacgccatttttacttgttatgaaaccactgagctattgggaacaagacttagagacaactatttgcgtggattttttttttttttaaggaaaaatacgtttggaaaataaactgttatggtgataatttggggaatatgtgcacgcttgttcagccttaatgtgacttgaagatgtggaggacatcaactttgaaaaactttccatgagagtgtattttcttgagcaaactgaagtatttctgggagcaaaaacatagtaattacacaatttcagtgcagtcaaccaaaatgttgagtcaattggaatgtaatttattaaaccatgtatttaaagagatatttttctttaaaagccaagttactttctcatatacagcattttaggaagcatgattttttttttctatcatctattcctccaagcatgtttaattgaagaaagtattaatatctctttagataagcttgtattgacctaatttggtttatgatgtgtcagagctaattcatgttcagggtgagcgttgtacctaccaacaaatttcctggttgggtatgcaaatggttattttctttttattgttgttaattgggactttctgttaatgaaaagcactattcccaagattaatagtgttctatgcacaatgaagcacctaaaaacactgcttgatattataaatttaaaacacaagtgaaagtttagccatggttttgtgcggcatcatagttatgtcaataaagtttatttaggtcatagaatatcctaaagtatcacatagttaaatttttcagtcagtgaagaccgggagggaatgtcagtgaattggcttgaatgttctgtggcaatccacaggtctagccaaatattgaaataggagtttagggtataatttgccttgtgatgtttggcagtcactgtttatactttaaaggttatattttaagctatttgagattgcttttgggaagatcactagatttatggaggaattagtcacaaatgacttgtagaaaatactgtcatatagttcatttcatcattttctgttgcaggaagccactccaccacagaatgctaatatgccagtggtacccagtacctcttgtatataggttattgcaaatattgttctgaaatgcttaacttcagaattacattttttaaagtaaataattgttttaaatctattttgtaaagatataaagtacaatagaatttctggagtacagattaaactatttgcactaacacacgtgacgtgcatgatttaataaaataactttactctcccta

SEQ ID NO: 79400 - DNA, 4665 bp, Homo sapiens
gtttccacaataaaactttttctaccagatggtatggaagcccggctccgctcagatgtcatccatgcaccattaccaagtcctgttgacaaagttgctgctaacactccaagtatgtactctcaggaactattccagctttctcagtatctacaggaggccttacatcgggaacaaatgttggaacagaagttagccacgcttcagcggctactagccatcacccaagaggcttcagataccagttggcaggctttaatagatgaagatagactcttatcacggttagaagttatgggaaaccaattacaggcatgctccaaaaatcaaacagaagatagtttacgaaaggaacttatagcattacaagaggataaacataactatgagacaacagccaaagagtccctgaggcgggttcttcaggagaaaattgaagtggttagaaaactttcagaagttgagcgaagtctgagtaatactgaagatgaatgtacccatctgaaagaaatgaatgaaaggactcaggaagaattaagagaattagccaacaaatataatggagcagttaatgagattaaagatttatctgataaattaaaggtagcagagggaaaacaagaggaaatccaacagaagggacaggctgagaaaaaagaattacaacataaaatagatgaaatggaagaaaaagaacaggagctccaggcaaaaatagaagctttgcaagctgataatgatttcaccaatgaaaggctaacagctttacaagaaaatcagacaagagcaaaagaatctgatttttcagatactctgagtccaagcaaggaaaaaagcagtgacgacactacagacgcccaaatggatgagcaagacctaaatgagcctcttgccaaagtgtcccttttaaaagatgacttgcagggtgcacagtcagaaattgaggcaaagcaagaaatacagcatcttcgaaaggaattgatcgaagcccaggagctagctagaacaagtaaacaaaaatgctttgaacttcaagctcttttggaagaagaaagaaaagcctatcgaaatcaagttgaggaatccactaaacaaatacaggttcttcaagcccaattgcagaggttacacatcgatactgagaatctccgggaggagaaggacagtgaaatcacaagtactagagatgaattgcttagtgcccgagatgaaattttgctccttcatcaagcagcagcaaaggttgcctctgagcgggacactgacattgcttctttacaagaagagcttaagaaggtgagagctgagcttgagcggtggcggaaagcagcgtctgaatatgagaaagaaatcacaagtctgcaaaacagttttcagcttagatgtcaacagtgtgaggaccagcagagagaagaagcaacaaggttgcaaggtgaactagagaagttgagaaaggaatggaatgcattggaaaccgaatgccattctctaaaaagggaaaatgttttgctatcatcagaactgcaacggcaagaaaaagaattgcacaattctcagaagcagagtttagagcttaccagtgatctcagcatccttcaaatgtctaggaaagaacttgagaatcaagtgggatccttgaaagaacagcatcttcgggattcagctgatttaaaaactcttctcagtaaggcagaaaaccaagcaaaggatgtgcagaaagagtatgaaaagacacagactgtactctcagaactgaagttgaagtttgaaatgactgagcaggaaaagcagtcaatcacagatgagctcaaacagtgtaaaaacaacctgaagctgctccgagagaaaggaaataatccttccatattacaacccgtcccagccgtattcatcggcctattcctggctttcctgttttggtgtttcggtccattgtggtagagaaagaaaccctggccctggatgcccatgttggctgccctggttgcagtaacagccatcgtgctgtacgtgccaggtctggccagagcttctccatgagagcgttccttgagtccgtacaccgtcctccctctagaagctggcatcacactcatgctggggacaaacagaaccattttcttcctctttacctcttaaaacagcagaagtacaagaatacagctgtagggtcattgctttaaattatataaaatgtatctgtctataaagaagatataaaattgtgactttattctactgtaagcaataatttgcttgcaatttttcatgtaatttttaaattagtatgttaagattctgaatattatggtggcctaaagtaggcttcttggtacaccagattatttataacattaaatttatgagtattttactctgaattctgatcaccagataattcatttttctgatttgataactacccaaaccaaacaaccaatacatacatgggaagagaggccctgtgtgctcagtgcctatcagtttgaaatatatacacatatatatattttttacatatttacgccatttttacttgttatgaaaccactgagctattgggaacaagacttagagacaactatttgcgtggattttttttttttttaaggaaaaatacgtttggaaaataaactgttatggtgataatttggggaatatgtgcacgcttgttcagccttaatgtgacttgaagatgtggaggacatcaactttgaaaaactttccatgagagtgtattttcttgagcaaactgaagtatttctgggagcaaaaacatagtaattacacaatttcagtgcagtcaaccaaaatgttgagtcaattggaatgtaatttattaaaccatgtatttaaagagatatttttctttaaaagccaagttactttctcatatacagcattttaggaagcatgattttttttttctatcatctattcctccaagcatgtttaattgaagaaagtattaatatctctttagataagcttgtattgacctaatttggtttatgatgtgtcagagctaattcatgttcagggtgagcgttgtacctaccaacaaatttcctggttgggtatgcaaatggttattttctttttattgttgttaattgggactttctgttaatgaaaagcactattcccaagattaatagtgttctatgcacaatgaagcacctaaaaacactgcttgatattataaatttaaaacacaagtgaaagtttagccatggttttgtgcggcatcatagttatgtcaataaagtttatttaggtcatagaatatcctaaagtatcacatagttaaatttttcagtcagtgaagaccgggagggaatgtcagtgaattggcttgaatgttctgtggcaatccacaggtctagccaaatattgaaataggagtttagggtataatttgccttgtgatgtttggcagtcactgtttatactttaaaggttatattttaagctatttgagattgcttttgggaagatcactagatttatggaggaattagtcacaaatgacttgtagaaaatactgtcatatagttcatttcatcattttctgttgcaggaagccactccaccacagaatgctaatatgccagtggtacccagtacctcttgtatataggttattgcaaatattgttctgaaatgcttaacttcagaattacattttttaaagtaaataattgttttaaatctattttgtaaagatataaagtacaatagaatttctggagtacagattaaactatttgcactaacacacgtgacgtgcatgatttaataaaataactttactctccctacgcatgtttgagttgaatatcattgaagttcttaatgctgactctactattgggttgttaatagtcttctcttgacatgactctttatgcaacataacatacatttggtattcttcagggtttaaaagaaaacactgagctgtttcctccaagttttattaaccttttatttaacttactgctttatttttttctcttttaatatggttattgttaaaatgagagtcacttgctagactggtctctttaaatgtaaggtctagtatcaatatttacttcattcaagtggaataaatggctttttgtagttacttccagttttcctcaagaatagaaataagtctgttcataagcaataccttcagttttgttcagttcacttccacgttaaataaagaataggattattcactggtaataatagagtcattaagaaatattaagcattgcagctaaaaattgaacaaccctgtaatgatacatttaagaattattcaaaggtgctacatggcagggttagagaataaaaagaacgtggtgtttgaagcaaaacagatctgtattggcatcttggttctaccttttatcagatgttgttgccttgtgcaaatcacattttctctgagtctccattttctcatttataacatgcggagaataatacttatatttgtggtagtagtgtgaacattaaaaagataatgtatgtgaagtaccattcgagtggtgaatacgtttttatgagaatgtcatactgaaaaaatattgcaaatattaaagttttaggtaagcctaaactttaatctactttaattaaatgaattgattgactcaaccattcaga

SEQ ID NO: 79401 - DNA, 4296 bp, Homo sapiens
gtttccacaataaaactttttctaccagatggtatggaagcccggctccgctcagatgtcatccatgcaccattaccaagtcctgttgacaaagttgctgctaacactccaagtatgtactctcaggaactattccagctttctcagtatctacaggaggccttacatcgggaacaaatgttggaacagaagttagccacgcttcagcggctactagccatcacccaagaggcttcagataccagttggcaggctttaatagatgaagatagactcttatcacggttagaagttatgggaaaccaattacaggcatgctccaaaaatcaaacagaagatagtttacgaaaggaacttatagcattacaagaggataaacataactatgagacaacagccaaagagtccctgaggcgggttcttcaggagaaaattgaagtggttagaaaactttcagaagttgagcgaagtctgagtaatactgaagatgaatgtacccatctgaaagaaatgaatgaaaggactcaggaagaattaagagaattagccaacaaatataatggagcagttaatgagattaaagatttatctgataaattaaaggtagcagagggaaaacaagaggaaatccaacagaagggacaggctgagaaaaaagaattacaacataaaatagatgaaatggaagaaaaagaacaggagctccaggcaaaaatagaagctttgcaagctgataatgatttcaccaatgaaaggctaacagctttacaagaaaatcagacaagagcaaaagaatctgatttttcagatactctgagtccaagcaaggaaaaaagcagtgacgacactacagacgcccaaatggatgagcaagacctaaatgagcctcttgccaaagtgtcccttttaaaagatgacttgcagggtgcacagtcagaaattgaggcaaagcaagaaatacagcatcttcgaaaggaattgatcgaagcccaggagctagctagaacaagtaaacaaaaatgctttgaacttcaagctcttttggaagaagaaagaaaagcctatcgaaatcaagttgaggaatccactaaacaaatacaggttcttcaagcccaattgcagaggttacacatcgatactgagaatctccgggaggagaaggacagtgaaatcacaagtactagagatgaattgcttagtgcccgagatgaaattttgctccttcatcaagcagcagcaaaggttgcctctgagcgggacactgacattgcttctttacaagaagagcttaagaaggtgagagctgagcttgagcggtggcggaaagcagcgtctgaatatgagaaagaaatcacaagtctgcaaaacagttttcagcttagatgtcaacagtgtgaggaccagcagagagaagaagcaacaaggttgcaaggtgaactagagaagttgagaaaggaatggaatgcattggaaaccgaatgccattctctaaaaagggaaaatgttttgctatcatcagaactgcaacggcaagaaaaagaattgcacaattctcagaagcagagtttagagcttaccagtgatctcagcatccttcaaatgtctaggaaagaacttgagaatcaagtgggatccttgaaagaacagcatcttcgggattcagctgatttaaaaactcttctcagtaaggcagaaaaccaagcaaaggatgtgcagaaagagtatgaaaagacacagactgtactctcagaactgaagttgaagtttgaaatgactgagcaggaaaagcagtcaatcacagatgagctcaaacagtgtaaaaacaacctgaagctgctccgagagaaaggaaataatccttccatattacaacccgtcccagccgtattcatcggcctattcctggctttcctgttttggtgtttcggtccattgtggtagagaaagaaaccctggccctggatgcccatgttggctgccctggttgcagtaacagccatcgtgctgtacgtgccaggtctggccagagcttctccatgagagcgttccttgagtccgtacaccgtcctccctctagaagctggcatcacactcatgctggggacaaacagaaccattttcttcctctttacctcttaaaacagcagaagtacaagaatacagctgtagggtcattgctttaaattatataaaatgtatctgtctataaagaagatataaaattgtgactttattctactgtaagcaataatttgcttgcaatttttcatgtaatttttaaattagtatgttaagattctgaatattatggtggcctaaagtaggcttcttggtacaccagattatttataacattaaatttatgagtattttactctgaattctgatcaccagataattcatttttctgatttgataactacccaaaccaaacaaccaatacatacatgggaagagaggccctgtgtgctcagtgcctatcagtttgaaatatatacacatatatatattttttacatatttacgccatttttacttgttatgaaaccactgagctattgggaacaagacttagagacaactatttgcgtggattttttttttttttaaggaaaaatacgtttggaaaataaactgttatggtgataatttggggaatatgtgcacgcttgttcagccttaatgtgacttgaagatgtggaggacatcaactttgaaaaactttccatgagagtgtattttcttgagcaaactgaagtatttctgggagcaaaaacatagtaattacacaatttcagtgcagtcaaccaaaatgttgagtcaattggaatgtaatttattaaaccatgtatttaaagagatatttttctttaaaagccaagttactttctcatatacagcattttaggaagcatgattttttttttctatcatctattcctccaagcatgtttaattgaagaaagtattaatatctctttagataagcttgtattgacctaatttggtttatgatgtgtcagagctaattcatgttcagggtgagcgttgtacctaccaacaaatttcctggttgggtatgcaaatggttattttctttttattgttgttaattgggactttctgttaatgaaaagcactattcccaagattaatagtgttctatgcacaatgaagcacctaaaaacactgcttgatattataaatttaaaacacaagtgaaagtttagccatggttttgtgcggcatcatagttatgtcaataaagtttatttaggtcatagaatatcctaaagtatcacatagttaaatttttcagtcagtgaagaccgggagggaatgtcagtgaattggcttgaatgttctgtggcaatccacaggtctagccaaatattgaaataggagtttagggtataatttgccttgtgatgtttggcagtcactgtttatactttaaaggttatattttaagctatttgagattgcttttgggaagatcactagatttatggaggaattagtcacaaatgacttgtagaaaatactgtcatatagttcatttcatcattttctgttgcaggaagccactccaccacagaatgctaatatgccagtggtacccagtacctcttgtatataggttattgcaaatattgttctgaaatgcttaacttcagaattacattttttaaagtaaataattgttttaaatctattttgtaaagatataaagtacaatagaatttctggagtacagattaaactatttgcactaacacacgtgacgtgcatgatttaataaaataactttactctccctaaaaaaaaaaaaaaaaaaaaaaaaaaaaaaaaaaaaaaaaacaaaaaaaaaaaaaaaaaacaacacaaaaacagcccaaaaaaacaaaaacaaatcaaaaaaaaaaaaaaaaaaactaggaacagacttcaaaataaaaaaagctaagagacacacgagaaacagttagatatactaaacaaccagcacagacaagaaccgcaaagactgtcactacatagaacacatctacgagaggaacaccaaaatcaaccgagaacagaccacacagcatccgaccaacgctcacctcgacaacagaaataaccaatcgaaagccacaacacatacaccaagcacaagaacagtcacctcccacacagaaccacatacacctagcacgacaacacataacactcgacatgagaacaaacacatcttcccaaggatacacaaaacaaaaaacataaaaaacaaacaaaacacatacaaaacag

SEQ ID NO: 79402 - DNA, 3047 bp, Homo sapiens
ccagctcagggaaatgctgctcagtttgggcttggatggtaacgtttattttccttggcagagaagctgatcgtcgaagggcatctaaccaaagcggtagaagaaacaaagctttcaaaagaaaatcagacaagagcaaaagaatctgatttttcagatactctgagtccaagcaaggaaaaaagcagtgacgacactacagacgcccaaatggatgagcaagacctaaatgagcctcttgccaaagtgtcccttttaaaagctcttttggaagaagaaagaaaagcctatcgaaatcaagttgaggaatccactaaacaaatacaggttcttcaagcccaattgcagaggttacacatcgatactgagaatctccgggaggagaaggacagtgaaatcacaagtactagagatgaattgcttagtgcccgagatgaaattttgctccttcatcaagcagcagcaaaggttgcctctgagcgggacactgacattgcttctttacaagaagagcttaagaaggtgagagctgagcttgagcggtggcggaaagcagcgtctgaatatgagaaagaaatcacaagtctgcaaaacagttttcagcttagatgtcaacagtgtgaggaccagcagagagaagaagcaacaaggttgcaaggtgaactagagaagttgagaaaggaatggaatgcattggaaaccgaatgccattctctaaaaagggaaaatgttttgctatcatcagaactgcaacggcaagaaaaagaattgcacaattctcagaagcagagtttagagcttaccagtgatctcagcatccttcaaatgtctaggaaagaacttgagaatcaagtgggatccttgaaagaacagcatcttcgggattcagctgatttaaaaactcttctcagtaaggcagaaaaccaagcaaaggatgtgcagaaagagtatgaaaagacacagactgtactctcagaactgaagttgaagtttgaaatgactgagcaggaaaagcagtcaatcacagatgagctcaaacagtgtaaaaacaacctgaagctgctccgagagaaaggaaataatccttccatattacaacccgtcccagccgtattcatcggcctattcctggctttcctgttttggtgtttcggtccattgtggtagagaaagaaaccctggccctggatgcccatgttggctgccctggttgcagtaacagccatcgtgctgtacgtgccaggtctggccagagcttctccatgagagcgttccttgagtccgtacaccgtcctccctctagaagctggcatcacactcatgctggggacaaacagaaccattttcttcctctttacctcttaaaacagcagaagtacaagaatacagctgtagggtcattgctttaaattatataaaatgtatctgtctataaagaagatataaaattgtgactttattctactgtaagcaataatttgcttgcaatttttcatgtaatttttaaattagtatgttaagattctgaatattatggtggcctaaagtaggcttcttggtacaccagattatttataacattaaatttatgagtattttactctgaattctgatcaccagataattcatttttctgatttgataactacccaaaccaaacaaccaatacatacatgggaagagaggccctgtgtgctcagtgcctatcagtttgaaatatatacacatatatatattttttacatatttacgccatttttacttgttatgaaaccactgagctattgggaacaagacttagagacaactatttgcgtggattttttttttttttaaggaaaaatacgtttggaaaataaactgttatggtgataatttggggaatatgtgcacgcttgttcagccttaatgtgacttgaagatgtggaggacatcaactttgaaaaactttccatgagagtgtattttcttgagcaaactgaagtatttctgggagcaaaaacatagtaattacacaatttcagtgcagtcaaccaaaatgttgagtcaattggaatgtaatttattaaaccatgtatttaaagagatatttttctttaaaagccaagttactttctcatatacagcattttaggaagcatgattttttttttctatcatctattcctccaagcatgtttaattgaagaaagtattaatatctctttagataagcttgtattgacctaatttggtttatgatgtgtcagagctaattcatgttcagggtgagcgttgtacctaccaacaaatttcctggttgggtatgcaaatggttattttctttttattgttgttaattgggactttctgttaatgaaaagcactattcccaagattaatagtgttctatgcacaatgaagcacctaaaaacactgcttgatattataaatttaaaacacaagtgaaagtttagccatggttttgtgcggcatcatagttatgtcaataaagtttatttaggtcatagaatatcctaaagtatcacatagttaaatttttcagtcagtgaagaccgggagggaatgtcagtgaattggcttgaatgttctgtggcaatccacaggtctagccaaatattgaaataggagtttagggtataatttgccttgtgatgtttggcagtcactgtttatactttaaaggttatattttaagctatttgagattgcttttgggaagatcactagatttatggaggaattagtcacaaatgacttgtagaaaatactgtcatatagttcatttcatcattttctgttgcaggaagccactccaccacagaatgctaatatgccagtggtacccagtacctcttgtatataggttattgcaaatattgttctgaaatgcttaacttcagaattacattttttaaagtaaataattgttttaaatctattttgtaaagatataaagtacaatagaatttctggagtacagattaaactatttgcactaacacacgtgacgtgcatgatttaataaaataactttactctcccta

SEQ ID NO: 79403 - DNA, 3957 bp, Homo sapiens
gtttccacaataaaactttttctaccagatggtatggaagcccggctccgctcagatgtcatccatgcaccattaccaagtcctgttgacaaagttgctgctaacactccaagtatgtactctcaggaactattccagctttctcagtatctacaggaggccttacatcgggaacaaatgttggaacagaagttagccacgcttcagcggctactagccatcacccaagaggcttcagataccagttggcaggctttaatagatgaagatagactcttatcacggttagaagttatgggaaaccaattacaggcatgctccaaaaatcaaacagaagatagtttacgaaaggaacttatagcattacaagaggataaacataactatgagacaacagccaaagagtccctgaggcgggttcttcaggagaaaattgaagtggttagaaaactttcagaagttgagcgaagtctgagtaatactgaagatgaatgtacccatctgaaagaaatgaatgaaaggactcaggaagaattaagagaattagccaacaaatataatggagcagttaatgagattaaagatttatctgataaattaaaggtagcagagggaaaacaagaggaaatccaacagaagggacaggctgagaaaaaagaattacaacataaaatagatgaaatggaagaaaaagaacaggagctccaggcaaaaatagaagctttgcaagctgataatgatttcaccaatgaaaggctaacagctttacaagtacggttagaacatcttcaggagaaaactcttaaagaatgcagcagcttggagcacttgctttcaaagagtggcggggactgcacttttattcatcaattcatagaatgccagaagaagctgatcgtcgaagggcatctaaccaaagcggtagaagaaacaaagctttcaaaagaaaatcagacaagagcaaaagaatctgatttttcagatactctgagtccaagcaaggaaaaaagcagtgacgacactacagacgcccaaatggatgagcaagacctaaatgagcctcttgccaaagtgtcccttttaaaagatgacttgcagggtgcacagtcagaaattgaggcaaagcaagaaatacagcatcttcgaaaggaattgatcgaagcccaggagctagctagaacaagtaaacaaaaatgctttgaacttcaagctcttttggaagaagaaagaaaagcctatcgaaatcaagttgaggaatccactaaacaaatacaggttcttcaagcccaattgcagaggttacacatcgatactgagaatctccgggaggagaaggacagtgaaatcacaagtactagagatgaattgcttagtgcccgagatgaaattttgctccttcatcaagcagcagcaaaggttgcctctgagcgggacactgacattgcttctttacaagaagagcttaagaaggtgagagctgagcttgagcggtggcggaaagcagcgtctgaatatgagaaagaaatcacaagtctgcaaaacagttttcagcttagatgtcaacagtgtgaggaccagcagagagaagaagcaacaaggttgcaaggtgaactagagaagttgagaaaggaatggaatgcattggaaaccgaatgccattctctaaaaagggaaaatgttttgctatcatcagaactgcaacggcaagaaaaagaattgcacaattctcagaagcagagtttagagcttaccagtgatctcagcatccttcaaatgtctaggaaagaacttgagaatcaagtgggatccttgaaagaacagcatcttcgggattcagctgatttaaaaactcttctcagtaaggcagaaaaccaagcaaaggatgtgcagaaagagtatgaaaagacacagactgtactctcagaactgaagttgaagtttgaaatgactgagcaggaaaagcagtcaatcacagatgagctcaaacagtgtaccttccatattacaacccgtcccagccgtattcatcggcctattcctggctttcctgttttggtgtttcggtccattgtggtagagaaagaaaccctggccctggatgcccatgttggctgccctggttgcagtaacagccatcgtgctgtacgtgccaggtctggccagagcttctccatgagagcgttccttgagtccgtacaccgtcctccctctagaagctggcatcacactcatgctggggacaaacagaaccattttcttcctctttacctcttaaaacagcagaagtacaagaatacagctgtagggtcattgctttaaattatataaaatgtatctgtctataaagaagatataaaattgtgactttattctactgtaagcaataatttgcttgcaatttttcatgtaatttttaaattagtatgttaagattctgaatattatggtggcctaaagtaggcttcttggtacaccagattatttataacattaaatttatgagtattttactctgaattctgatcaccagataattcatttttctgatttgataactacccaaaccaaacaaccaatacatacatgggaagagaggccctgtgtgctcagtgcctatcagtttgaaatatatacacatatatatattttttacatatttacgccatttttacttgttatgaaaccactgagctattgggaacaagacttagagacaactatttgcgtggattttttttttttttaaggaaaaatacgtttggaaaataaactgttatggtgataatttggggaatatgtgcacgcttgttcagccttaatgtgacttgaagatgtggaggacatcaactttgaaaaactttccatgagagtgtattttcttgagcaaactgaagtatttctgggagcaaaaacatagtaattacacaatttcagtgcagtcaaccaaaatgttgagtcaattggaatgtaatttattaaaccatgtatttaaagagatatttttctttaaaagccaagttactttctcatatacagcattttaggaagcatgattttttttttctatcatctattcctccaagcatgtttaattgaagaaagtattaatatctctttagataagcttgtattgacctaatttggtttatgatgtgtcagagctaattcatgttcagggtgagcgttgtacctaccaacaaatttcctggttgggtatgcaaatggttattttctttttattgttgttaattgggactttctgttaatgaaaagcactattcccaagattaatagtgttctatgcacaatgaagcacctaaaaacactgcttgatattataaatttaaaacacaagtgaaagtttagccatggttttgtgcggcatcatagttatgtcaataaagtttatttaggtcatagaatatcctaaagtatcacatagttaaatttttcagtcagtgaagaccgggagggaatgtcagtgaattggcttgaatgttctgtggcaatccacaggtctagccaaatattgaaataggagtttagggtataatttgccttgtgatgtttggcagtcactgtttatactttaaaggttatattttaagctatttgagattgcttttgggaagatcactagatttatggaggaattagtcacaaatgacttgtagaaaatactgtcatatagttcatttcatcattttctgttgcaggaagccactccaccacagaatgctaatatgccagtggtacccagtacctcttgtatataggttattgcaaatattgttctgaaatgcttaacttcagaattacattttttaaagtaaataattgttttaaatctattttgtaaagatataaagtacaatagaatttctggagtacagattaaactatttgcactaacacacgtgacgtgcatgatttaataaaataactttactctcccta

SEQ ID NO: 79404 - DNA, 3860 bp, Homo sapiens
gtttccacaataaaactttttctaccagatggtatggaagcccggctccgctcagatgtcatccatgcaccattaccaagtcctgttgacaaagttgctgctaacactccaagtatgtactctcaggaactattccagctttctcagtatctacaggaggccttacatcgggaacaaatgttggaacagaagttagccacgcttcagcggctactagccatcacccaagaggcttcagataccagttggcaggctttaatagatgaagatagactcttatcacggttagaagttatgggaaaccaattacaggcatgctccaaaaatcaaacagaagatagtttacgaaaggaacttatagcattacaagaggataaacataactatgagacaacagccaaagagtccctgaggcgggttcttcaggagaaaattgaagtggttagaaaactttcagaagttgagcgaagtctgagtaatactgaagatgaatgtacccatctgaaagaaatgaatgaaaggactcaggaagaattaagagaattagccaacaaatataatggagcagttaatgagattaaagatttatctgataaattaaaggtagcagagggaaaacaagaggaaatccaacagaagggacaggctgagaaaaaagaattacaacataaaatagatgaaatggaagaaaaagaacaggagctccaggcaaaaatagaagctttgcaagctgataatgatttcaccaatgaaaggctaacagctttacaagtacggttagaacatcttcaggagaaaactcttaaagaatgcagcagcttggagcacttgctttcaaagagtggcggggactgcacttttattcatcaattcatagaatgccagaagaagctgatcgtcgaagggcatctaaccaaagcggtagaagaaacaaagctttcaaaagaaaatcagacaagagcaaaagaatctgatttttcagatactctgagtccaagcaaggaaaaaagcagtgacgacactacagacgcccaaatggatgagcaagacctaaatgagcctcttgccaaagtgtcccttttaaaagatgacttgcagggtgcacagtcagaaattgaggcaaagcaagaaatacagcatcttcgaaaggaattgatcgaagcccaggagctagctagaacaagtaaacaaaaatgctttgaacttcaagctcttttggaagaagaaagaaaagcctatcgaaatcaagttgaggaatccactaaacaaatacaggttcttcaagcccaattgcagaggttacacatcgatactgagaatctccgggaggagaaggacagtgaaatcacaagtactagagatgaattgcttagtgcccgagatgaaattttgctccttcatcaagcagcagcaaaggttgcctctgagcgggacactgacattgcttctttacaagaagagcttaagaaggtgagagctgagcttgagcggtggcggaaagcagcgtctgaatatgagaaagaaatcacaagtctgcaaaacagttttcagcttagatgtcaacagtgtgaggaccagcagagagaagaagcaacaaggttgcaaggtgaactagagaagttgagaaaggaatggaatgcattggaaaccgaatgccattctctaaaaagggaaaatgttttgctatcatcagaactgcaacggcaagaaaaagaattgcacaattctcagaagcagagtttagagcttaccagtgatctcagcatccttcaaatgtctaggaaagaacttgagaatcaagtgggatccttgaaagaacagcatcttcgggattcagctgatttaaaaactcttctcagtaaggcagaaaaccaagcaaaggatgtgcagaaagagccttccatattacaacccgtcccagccgtattcatcggcctattcctggctttcctgttttggtgtttcggtccattgtggtagagaaagaaaccctggccctggatgcccatgttggctgccctggttgcagtaacagccatcgtgctgtacgtgccaggtctggccagagcttctccatgagagcgttccttgagtccgtacaccgtcctccctctagaagctggcatcacactcatgctggggacaaacagaaccattttcttcctctttacctcttaaaacagcagaagtacaagaatacagctgtagggtcattgctttaaattatataaaatgtatctgtctataaagaagatataaaattgtgactttattctactgtaagcaataatttgcttgcaatttttcatgtaatttttaaattagtatgttaagattctgaatattatggtggcctaaagtaggcttcttggtacaccagattatttataacattaaatttatgagtattttactctgaattctgatcaccagataattcatttttctgatttgataactacccaaaccaaacaaccaatacatacatgggaagagaggccctgtgtgctcagtgcctatcagtttgaaatatatacacatatatatattttttacatatttacgccatttttacttgttatgaaaccactgagctattgggaacaagacttagagacaactatttgcgtggattttttttttttttaaggaaaaatacgtttggaaaataaactgttatggtgataatttggggaatatgtgcacgcttgttcagccttaatgtgacttgaagatgtggaggacatcaactttgaaaaactttccatgagagtgtattttcttgagcaaactgaagtatttctgggagcaaaaacatagtaattacacaatttcagtgcagtcaaccaaaatgttgagtcaattggaatgtaatttattaaaccatgtatttaaagagatatttttctttaaaagccaagttactttctcatatacagcattttaggaagcatgattttttttttctatcatctattcctccaagcatgtttaattgaagaaagtattaatatctctttagataagcttgtattgacctaatttggtttatgatgtgtcagagctaattcatgttcagggtgagcgttgtacctaccaacaaatttcctggttgggtatgcaaatggttattttctttttattgttgttaattgggactttctgttaatgaaaagcactattcccaagattaatagtgttctatgcacaatgaagcacctaaaaacactgcttgatattataaatttaaaacacaagtgaaagtttagccatggttttgtgcggcatcatagttatgtcaataaagtttatttaggtcatagaatatcctaaagtatcacatagttaaatttttcagtcagtgaagaccgggagggaatgtcagtgaattggcttgaatgttctgtggcaatccacaggtctagccaaatattgaaataggagtttagggtataatttgccttgtgatgtttggcagtcactgtttatactttaaaggttatattttaagctatttgagattgcttttgggaagatcactagatttatggaggaattagtcacaaatgacttgtagaaaatactgtcatatagttcatttcatcattttctgttgcaggaagccactccaccacagaatgctaatatgccagtggtacccagtacctcttgtatataggttattgcaaatattgttctgaaatgcttaacttcagaattacattttttaaagtaaataattgttttaaatctattttgtaaagatataaagtacaatagaatttctggagtacagattaaactatttgcactaacacacgtgacgtgcatgatttaataaaataactttactctcccta

SEQ ID NO: 79405 - DNA, 3900 bp, Homo sapiens
gtttccacaataaaactttttctaccagatggtatggaagcccggctccgctcagatgtcatccatgcaccattaccaagtcctgttgacaaagttgctgctaacactccaagtatgtactctcaggaactattccagctttctcagtatctacaggaggccttacatcgggaacaaatgttggaacagaagttagccacgcttcagcggctactagccatcacccaagaggcttcagataccagttggcaggctttaatagatgaagatagactcttatcacggttagaagttatgggaaaccaattacaggcatgctccaaaaatcaaacagaagatagtttacgaaaggaacttatagcattacaagaggataaacataactatgagacaacagccaaagagtccctgaggcgggttcttcaggagaaaattgaagtggttagaaaactttcagaagttgagcgaagtctgagtaatactgaagatgaatgtacccatctgaaagaaatgaatgaaaggactcaggaagaattaagagaattagccaacaaatataatggagcagttaatgagattaaagatttatctgataaattaaaggtagcagagggaaaacaagaggaaatccaacagaagggacaggctgagaaaaaagaattacaacataaaatagatgaaatggaagaaaaagaacaggagctccaggcaaaaatagaagctttgcaagctgataatgatttcaccaatgaaaggctaacagctttacaagaaaatcagacaagagcaaaagaatctgatttttcagatactctgagtccaagcaaggaaaaaagcagtgacgacactacagacgcccaaatggatgagcaagacctaaatgagcctcttgccaaagtgtcccttttaaaagatgacttgcagggtgcacagtcagaaattgaggcaaagcaagaaatacagcatcttcgaaaggaattgatcgaagcccaggagctagctagaacaagtaaacaaaaatgctttgaacttcaagctcttttggaagaagaaagaaaagcctatcgaaatcaagttgaggaatccactaaacaaatacaggttcttcaagcccaattgcagaggttacacatcgatactgagaatctccgggaggagaaggacagtgaaatcacaagtactagagatgaattgcttagtgcccgagatgaaattttgctccttcatcaagcagcagcaaaggttgcctctgagcgggacactgacattgcttctttacaagaagagcttaagaaggtgagagctgagcttgagcggtggcggaaagcagcgtctgaatatgagaaagaaatcacaagtctgcaaaacagttttcagcttagatgtcaacagtgtgaggaccagcagagagaagaagcaacaaggttgcaaggtgaactagagaagttgagaaaggaatggaatgcattggaaaccgaatgccattctctaaaaagggaaaatgttttgctatcatcagaactgcaacggcaagaaaaagaattgcacaattctcagaagcagagtttagagcttaccagtgatctcagcatccttcaaatgtctaggaaagaacttgagaatcaagtgggatccttgaaagaacagcatcttcgggattcagctgatttaaaaactcttctcagtaaggcagaaaaccaagcaaaggatgtgcagaaagagtatgaaaagacacagactgtactctcagaactgaagttgaagtttgaaatgactgagcaggaaaagcagtcaatcacagatgagctcaaacagtgtaaaaacaacctgaagctgctccgagagaaaggaaataatccttccatattacaacccgtcccagccgtattcatcggcctattcctggctttcctgttttggtgtttcggtccattgtggtagagaaagaaaccctggccctggatgcccatgttggctgccctggttgcagtaacagccatcgtgctgtacgtgccaggtctggccagagcttctccatgagagcgttccttgagtccgtacaccgtcctccctctagaagctggcatcacactcatgctggggacaaacagaaccattttcttcctctttacctcttaaaacagcagaagtacaagaatacagctgtagggtcattgctttaaattatataaaatgtatctgtctataaagaagatataaaattgtgactttattctactgtaagcaataatttgcttgcaatttttcatgtaatttttaaattagtatgttaagattctgaatattatggtggcctaaagtaggcttcttggtacaccagattatttataacattaaatttatgagtattttactctgaattctgatcaccagataattcatttttctgatttgataactacccaaaccaaacaaccaatacatacatgggaagagaggccctgtgtgctcagtgcctatcagtttgaaatatatacacatatatatattttttacatatttacgccatttttacttgttatgaaaccactgagctattgggaacaagacttagagacaactatttgcgtggattttttttttttttaaggaaaaatacgtttggaaaataaactgttatggtgataatttggggaatatgtgcacgcttgttcagccttaatgtgacttgaagatgtggaggacatcaactttgaaaaactttccatgagagtgtattttcttgagcaaactgaagtatttctgggagcaaaaacatagtaattacacaatttcagtgcagtcaaccaaaatgttgagtcaattggaatgtaatttattaaaccatgtatttaaagagatatttttctttaaaagccaagttactttctcatatacagcattttaggaagcatgattttttttttctatcatctattcctccaagcatgtttaattgaagaaagtattaatatctctttagataagcttgtattgacctaatttggtttatgatgtgtcagagctaattcatgttcagggtgagcgttgtacctaccaacaaatttcctggttgggtatgcaaatggttattttctttttattgttgttaattgggactttctgttaatgaaaagcactattcccaagattaatagtgttctatgcacaatgaagcacctaaaaacactgcttgatattataaatttaaaacacaagtgaaagtttagccatggttttgtgcggcatcatagttatgtcaataaagtttatttaggtcatagaatatcctaaagtatcacatagttaaatttttcagtcagtgaagaccgggagggaatgtcagtgaattggcttgaatgttctgtggcaatccacaggtctagccaaatattgaaataggagtttagggtataatttgccttgtgatgtttggcagtcactgtttatactttaaaggttatattttaagctatttgagattgcttttgggaagatcactagatttatggaggaattagtcacaaatgacttgtagaaaatactgtcatatagttcatttcatcattttctgttgcaggaagccactccaccacagaatgctaatatgccagtggtacccagtacctcttgtatatagtgagcaaatactgtcatatagttcatttcatcattttctgttgcaggaagccactgcaaccacagaatgctaatatgtccagtggtaccctatgtacctcttgtatataggagcaaatactgtcatatagttcatttctatcattttctgttgcaggaagccactgcaccacagaatgctaatatgccagtggtacccagtacctcttgtatataggagaaaatactgctcatatagtgcatttcatcattttcctgttc

SEQ ID NO: 79406 - DNA, 1938 bp, Homo sapiens
gggttaataggtatgaaaagagaggggagaatgtgatattgactcttggtttctttccacacagaaaccctggccctggatgcccatgttggctgccctggttgcagtaacagccatcgtgctgtacgtgccaggtctggccagagcttctccatgagagcgttccttgagtccgtacaccgtcctccctctagaagctggcatcacactcatgctggggacaaacagaaccattttcttcctctttacctcttaaaacagcagaagtacaagaatacagctgtagggtcattgctttaaattatataaaatgtatctgtctataaagaagatataaaattgtgactttattctactgtaagcaataatttgcttgcaatttttcatgtaatttttaaattagtatgttaagattctgaatattatggtggcctaaagtaggcttcttggtacaccagattatttataacattaaatttatgagtattttactctgaattctgatcaccagataattcatttttctgatttgataactacccaaaccaaacaaccaatacatacatgggaagagaggccctgtgtgctcagtgcctatcagtttgaaatatatacacatatatatattttttacatatttacgccatttttacttgttatgaaaccactgagctattgggaacaagacttagagacaactatttgcgtggattttttttttttttaaggaaaaatacgtttggaaaataaactgttatggtgataatttggggaatatgtgcacgcttgttcagccttaatgtgacttgaagatgtggaggacatcaactttgaaaaactttccatgagagtgtattttcttgagcaaactgaagtatttctgggagcaaaaacatagtaattacacaatttcagtgcagtcaaccaaaatgttgagtcaattggaatgtaatttattaaaccatgtatttaaagagatatttttctttaaaagccaagttactttctcatatacagcattttaggaagcatgattttttttttctatcatctattcctccaagcatgtttaattgaagaaagtattaatatctctttagataagcttgtattgacctaatttggtttatgatgtgtcagagctaattcatgttcagggtgagcgttgtacctaccaacaaatttcctggttgggtatgcaaatggttattttctttttattgttgttaattgggactttctgttaatgaaaagcactattcccaagattaatagtgttctatgcacaatgaagcacctaaaaacactgcttgatattataaatttaaaacacaagtgaaagtttagccatggttttgtgcggcatcatagttatgtcaataaagtttatttaggtcatagaatatcctaaagtatcacatagttaaatttttcagtcagtgaagaccgggagggaatgtcagtgaattggcttgaatgttctgtggcaatccacaggtctagccaaatattgaaataggagtttagggtataatttgccttgtgatgtttggcagtcactgtttatactttaaaggttatattttaagctatttgagattgcttttgggaagatcactagatttatggaggaattagtcacaaatgacttgtagaaaatactgtcatatagttcatttcatcattttctgttgcaggaagccactccaccacagaatgctaatatgccagtggtacccagtacctcttgtatataggttattgcaaatattgttctgaaatgcttaacttcagaattacattttttaaagtaaataattgttttaaatctattttgtaaagatataaagtacaatagaatttctggagtacagattaaactatttgcactaacacacgtgacgtgcatgatttaataaaataactttactctcccta

SEQ ID NO: 79407 - DNA, 1629 bp, Homo sapiens
attcctggactacggcgcgggagagggggtaggagggcccttgaagggtgcgcgttcccgtggcggtgcaccgggtaggtttcagtcagagtcactatggcggccggcgctggcaaggtcggaaagtttcctgcctcgtcgggcgcagcttgagcttgccccatcggccgcgatcggtggaggctgcggcggatccagcccggggcctcaaggcctctccccaacctccgggccagtctccctcccccaccttctcgtccgccgggagctgcggctgccgtccctgagatgcgaccctcgcgggggcgaccctgaggggaggcggcccatgtgctgagcggcggcccagaagcctaggcgtccggggaccaacttcctgccgcctgggaactcgagcctcccggtgtcgcgcctcgctcggtccgcaccggcctgcggagccgggtccccgccctggtcgcggggacgctcgccaggtgcccaggagtcccgacttggccactgcccgcgccccgccggcctccacgcctcgcgcggagaacctcagccaccgccgtctcggatcgtgccaggccggggaccgcgtcccccttcccggggcggcctccgctcagcaggggcgatgcagactgtcccgccggccgtctagagcccctccgtctccgtcacctctcgccccttcactccgggcgaggactggcggtggctgcccagaggtgcccagccacaccttccttcggcccaaaaggactttcctggccgcgccgaaccgacccttcattcatgctgcagtgctgcaacgtttccgccaccaagggggaaaagcggccgcgatctcaaaccaaacacaagaattggcgtgtgactcatctgcttggatacctccagtccccaaactgtgttccaggagttttcttggccgaagctgcccgatgtttgagccttttcttcccagagaagaagatggactgaaagctgccagttggggactttttgtgatcacggcgttgcagcgttttaaaggaggtgatggggcttgcgctggcttgtcttcccacccaagtgaagagttgatgttcactggttatgcttagacaatgtgcagtttgtgttaatttaaaattttgggtgggataggggcataggcttgtgaagggcagtccggatccggaggaactcctctttgtccctggtaggagagacacccccagtctatcctcgatgccgtcagccttggccatcttcacttgccgcccgaactcgcacccgtttcaggagcgtcatgtctacctggacgagcccatcaaaatcggccgctcagtggcccgctgtcgaccagcgcagaataatgccacttttgattgcaaagtgctatcaaggaaccacgctctcgtctggtttgatcacaagacgggcaagttttatcttcaagacactaaaagtagtaatggtacttttataaatagccagagattgagtcgaggctctgaagaaagtccaccatgtgaaattctttccggtgacattatccagtttggagtagacgtgacagagaatacacggaaagttacccatgggtgtattgtttccacaataaaactttttctaccagatggtatggaagcccgg

SEQ ID NO: 79408 - DNA, 1926 bp, Homo sapiens
gtttccacaataaaactttttctaccagatggtatggaagcccggctccgctcagatgtcatccatgcaccattaccaagtcctgttgacaaagttgctgctaacactccaagtatgtactctcaggaactattccagctttctcagtatctacaggaggccttacatcgggaacaaatgttggaacagaagttagccacgcttcagcggctactagccatcacccaagaggcttcagataccagttggcaggctttaatagatgaagatagactcttatcacggttagaagttatgggaaaccaattacaggcatgctccaaaaatcaaacagaagatagtttacgaaaggaacttatagcattacaagaggataaacataactatgagacaacagccaaagagtccctgaggcgggttcttcaggagaaaattgaagtggttagaaaactttcagaagttgagcgaagtctgagtaatactgaagatgaatgtacccatctgaaagaaatgaatgaaaggactcaggaagaattaagagaattagccaacaaatataatggagcagttaatgagattaaagatttatctgataaattaaaggtagcagagggaaaacaagaggaaatccaacagaagggacaggctgagaaaaaagaattacaacataaaatagatgaaatggaagaaaaagaacaggagctccaggcaaaaatagaagctttgcaagctgataatgatttcaccaatgaaaggctaacagctttacaagtacggttagaacatcttcaggagaaaactcttaaagaatgcagcagcttggagcacttgctttcaaagagtggcggggactgcacttttattcatcaattcatagaatgccagaagaagctgatcgtcgaagggcatctaaccaaagcggtagaagaaacaaagctttcaaaagaaaatcagacaagagcaaaagaatctgatttttcagatactctgagtccaagcaaggaaaaaagcagtgacgacactacagacgcccaaatggatgagcaagacctaaatgagcctcttgccaaagtgtcccttttaaaagatgacttgcagggtgcacagtcagaaattgaggcaaagcaagaaatacagcatcttcgaaaggaattgatcgaagcccaggagctagctagaacaagtaaacaaaaatgctttgaacttcaagctcttttggaagaagaaagaaaagcctatcgaaatcaagttgaggaatccactaaacaaatacaggttcttcaagcccaattgcagaggttacacatcgatactgagaatctccgggaggagaaggacagtgaaatcacaagtactagagatgaattgcttagtgcccgagatgaaattttgctccttcatcaagcagcagcaaaggttgcctctgagcgggacactgacattgcttctttacaagaagagcttaagaaggtgagagctgagcttgagcggtggcggaaagcagcgtctgaatatgagaaagaaatcacaagtctgcaaaacagttttcagcttagatgtcaacagtgtgaggaccagcagagagaagaagcaacaaggttgcaaggtgaactagagaagttgagaaaggaatggaatgcattggaaaccgaatgccattctctaaaaagggaaaatgttttgctatcatcagaactgcaacggcaagaaaaagaattgcacaagtatgcaagaactactctgtttttcagatataaatattttacaggagcaaatgttcagcccatctctgtttggctatttggcaggttaaccatactgaataaatacttcagcttttttttttcctgccaccaccattatcctacatgtcctttccttgtactcatggaatacagattcattaaatgtcccaaagaaaccctg

SEQ ID NO: 79409 - DNA, 1691 bp, Homo sapiens
gtttccacaataaaactttttctaccagatggtatggaagcccggctccgctcagatgtcatccatgcaccattaccaagtcctgttgacaaagttgctgctaacactccaagtatgtactctcaggaactattccagctttctcagtatctacaggaggccttacatcgggaacaaatgttggaacagaagttagccacgcttcagcggctactagccatcacccaagaggcttcagataccagttggcaggctttaatagatgaagatagactcttatcacggttagaagttatgggaaaccaattacaggcatgctccaaaaatcaaacagaagatagtttacgaaaggaacttatagcattacaagaggataaacataactatgagacaacagccaaagagtccctgaggcgggttcttcaggagaaaattgaagtggttagaaaactttcagaagttgagcgaagtctgagtaatactgaagatgaatgtacccatctgaaagaaatgaatgaaaggactcaggaagaattaagagaattagccaacaaatataatggagcagttaatgagattaaagatttatctgataaattaaaggtagcagagggaaaacaagaggaaatccaacagaagggacaggctgagaaaaaagaattacaacataaaatagatgaaatggaagaaaaagaacaggagctccaggcaaaaatagaagctttgcaagctgataatgatttcaccaatgaaaggctaacagctttacaagtacggttagaacatcttcaggagaaaactcttaaagaatgcagcagcttggagcacttgctttcaaagagtggcggggactgcacttttattcatcaattcatagaatgccagaagaagctgatcgtcgaagggcatctaaccaaagcggtagaagaaacaaagctttcaaaagaaaatcagacaagagcaaaagaatctgatttttcagatactctgagtccaagcaaggaaaaaagcagtgacgacactacagacgcccaaatggatgagcaagacctaaatgagcctcttgccaaagtgtcccttttaaaaggtactttaacatgtttttatgacatcgtaaaccagggtatcaaatcaccctttgccataaaatctgttctagatattatgtgaagttttaatttttagttaagagattaagataggttctgtaaagtagcagggactaaaaatttaaagttttggtgtttatacccaatatttcaaactattgttgaataatttggatcagtcaagattacgagggacaaagtgttaagtggtagaatatgaaatgcagctgtgttttttgtttacccttgtgtctctaataggaatttattagcgcttttaacataattagaataaggtgaaaatcttaactttcttgaaagactcaccggtttactctgttatcatatggtagcagttgtaaatttccttattttctggtcttcttcatcttctaataaatatccccaggttcttatgacactcttctagaaattttgggctaagaaactttaggtggatggccaggcatggtggctcacgcctgtaatctcagcactttgggaggctgaggcaggtggatcatctgaggtcaggagtttgagaccagcctgaccaacatggagaaaccctgtctctactaa

SEQ ID NO: 79410 - DNA, 385 bp, Homo sapiens
gtttccacaataaaactttttctaccagatggtatggaagcccggctccgctcagatgtcatccatgcaccattaccaagtcctgttgacaaagttgctgctaacactccaagtatgtactctcaggaactattccagctttctcagtatctacagatagagtaactgagaggcaggaagatttaataatttatacagtatcacatatcaagtatatggtagagctgggatttgaacctggacagccagacctcagattttctgctttgtgtaactactgtgctgtgctgctggattcacagaataatttcttggtgtagagcagatactgcttcaagttaatgccatatttaaagaaccgtataaatctttaaaaagcaaacaa

SEQ ID NO: 79411 - DNA, 430 bp, Homo sapiens
gggctggcgggggtctggctggagggggcgacggctgaggcgggcgggctgaggcgcctgacggccgtttgttttgatgttttccccaccaggtcggaaagtttcctgcctcgtcgggcgcagcttgagcttgccccatcggccgcgatcggtggaggctgcggcggatccagcccggggcctcaaggcctctccccaacctccgggccagtctccctcccccaccttctcgtccgccgggagctgcggctgccgtccctgagatgcgaccctcgcgggggcgaccctgaggggaggcggcccatgtgctgagcggcggcccagaagcctaggcgtccggggaccaacttcctgccgcctgggaactcgagcctcccggtgtcgcgcctcgctcggtccgcaccggcctgcggagccgggtccccgccct

SEQ ID NO: 79412 - DNA, 3821 bp, Homo sapiens
gtttccacaataaaactttttctaccagatggtatggaagcccggctccgctcagatgtcatccatgcaccattaccaagtcctgttgacaaagttgctgctaacactccaagtatgtactctcaggaactattccagctttctcagtatctacaggaggccttacatcgggaacaaatgttggaacagaagttagccacgcttcagcggctactagccatcacccaagaggcttcagataccagttggcaggctttaatagatgaagatagactcttatcacggttagaagttatgggaaaccaattacaggcatgctccaaaaatcaaacagaagatagtttacgaaaggaacttatagcattacaagaggataaacataactatgagacaacagccaaagagtccctgaggcgggttcttcaggagaaaattgaagtggttagaaaactttcagaagttgagcgaagtctgagtaatactgaagatgaatgtacccatctgaaagaaatgaatgaaaggactcaggaagaattaagagaattagccaacaaatataatggagcagttaatgagattaaagatttatctgataaattaaaggtagcagagggaaaacaagaggaaatccaacagaagggacaggctgagaaaaaagaattacaacataaaatagatgaaatggaagaaaaagaacaggagctccaggcaaaaatagaagctttgcaagctgataatgatttcaccaatgaaaggctaacagctttacaagaaaatcagacaagagcaaaagaatctgatttttcagatactctgagtccaagcaaggaaaaaagcagtgacgacactacagacgcccaaatggatgagcaagacctaaatgagcctcttgccaaagtgtcccttttaaaagatgacttgcagggtgcacagtcagaaattgaggcaaagcaagaaatacagcatcttcgaaaggaattgatcgaagcccaggagctagctagaacaagtaaacaaaaatgctttgaacttcaagctcttttggaagaagaaagaaaagcctatcgaaatcaagttgaggaatccactaaacaaatacaggttcttcaagcccaattgcagaggttacacatcgatactgagaatctccgggaggagaaggacagtgaaatcacaagtactagagatgaattgcttagtgcccgagatgaaattttgctccttcatcaagcagcagcaaaggttgcctctgagcgggacactgacattgcttctttacaagaagagcttaagaaggtgagagctgagcttgagcggtggcggaaagcagcgtctgaatatgagaaagaaatcacaagtctgcaaaacagttttcagcttagatgtcaacagtgtgaggaccagcagagagaagaagcaacaaggttgcaaggtgaactagagaagttgagaaaggaatggaatgcattggaaaccgaatgccattctctaaaaagggaaaatgttttgctatcatcagaactgcaacggcaagaaaaagaattgcacaattctcagaagcagagtttagagcttaccagtgatctcagcatccttcaaatgtctaggaaagaacttgagaatcaagtgggatccttgaaagaacagcatcttcgggattcagctgatttaaaaactcttctcagtaaggcagaaaaccaagcaaaggatgtgcagaaagagtatgaaaagacacagactgtactctcagaactgaagttgaagtttgaaatgactgagcaggaaaagcagtcaatcacagatgagctcaaacagtgtaaaaacaacctgaagctgctccgagagaaaggaaataatccttccatattacaacccgtcccagccgtattcatcggcctattcctggctttcctgttttggtgtttcggtccattgtggtagagaaagaaaccctggccctggatgcccatgttggctgccctggttgcagtaacagccatcgtgctgtacgtgccaggtctggccagagcttctccatgagagcgttccttgagtccgtacaccgtcctccctctagaagctggcatcacactcatgctggggacaaacagaaccattttcttcctctttacctcttaaaacagcagaagtacaagaatacagctgtagggtcattgctttaaattatataaaatgtatctgtctataaagaagatataaaattgtgactttattctactgtaagcaataatttgcttgcaatttttcatgtaatttttaaattagtatgttaagattctgaatattatggtggcctaaagtaggcttcttggtacaccagattatttataacattaaatttatgagtattttactctgaattctgatcaccagataattcatttttctgatttgataactacccaaaccaaacaaccaatacatacatgggaagagaggccctgtgtgctcagtgcctatcagtttgaaatatatacacatatatatattttttacatatttacgccatttttacttgttatgaaaccactgagctattgggaacaagacttagagacaactatttgcgtggattttttttttttttaaggaaaaatacgtttggaaaataaactgttatggtgataatttggggaatatgtgcacgcttgttcagccttaatgtgacttgaagatgtggaggacatcaactttgaaaaactttccatgagagtgtattttcttgagcaaactgaagtatttctgggagcaaaaacatagtaattacacaatttcagtgcagtcaaccaaaatgttgagtcaattggaatgtaatttattaaaccatgtatttaaagagatatttttctttaaaagccaagttactttctcatatacagcattttaggaagcatgattttttttttctatcatctattcctccaagcatgtttaattgaagaaagtattaatatctctttagataagcttgtattgacctaatttggtttatgatgtgtcagagctaattcatgttcagggtgagcgttgtacctaccaacaaatttcctggttgggtatgcaaatggttattttctttttattgttgttaattgggactttctgttaatgaaaagcactattcccaagattaatagtgttctatgcacaatgaagcacctaaaaacactgcttgatattataaatttaaaacacaagtgaaagtttagccatggttttgtgcggcatcatagttatgtcaataaagtttatttaggtcatagaatatcctaaagtatcacatagttaaatttttcagtcagtgaagaccgggagggaatgtcagtgaattggcttgaatgttctgtggcaatccacaggtctagccaaatattgaaataggagtttagggtataatttgccttgtgatgtttggcagtcactgtttatactttaaaggttatattttaagctatttgagattgcttttgggaagatcactagatttatggaggaattagtcacaaatgacttgtagaaaatactgtcatatagttcatttcatcattttctgttgcaggaagccactccaccacagaatgctaatatgccagtggtacccagtacctcttgtatataggttattgcaaatattgttctgaaatgcttaacttcagaattacattttttaaagtaaataattgttttaaatctattttgtaaagatataaagtacaatagaatttctggagtacagattaaactatttgcactaacacacgtgacgtgcatgatttaataaaataactttactctcccta

SEQ ID NO: 79413 - DNA, 3944 bp, Homo sapiens
gtttccacaataaaactttttctaccagatggtatggaagcccggctccgctcagatgtcatccatgcaccattaccaagtcctgttgacaaagttgctgctaacactccaagtatgtactctcaggaactattccagctttctcagtatctacaggaggccttacatcgggaacaaatgttggaacagaagttagccacgcttcagcggctactagccatcacccaagaggcttcagataccagttggcaggctttaatagatgaagatagactcttatcacggttagaagttatgggaaaccaattacaggcatgctccaaaaatcaaacagaagatagtttacgaaaggaacttatagcattacaagaggataaacataactatgagacaacagccaaagagtccctgaggcgggttcttcaggagaaaattgaagtggttagaaaactttcagaagttgagcgaagtctgagtaatactgaagatgaatgtacccatctgaaagaaatgaatgaaaggactcaggaagaattaagagaattagccaacaaatataatggagcagttaatgagattaaagatttatctgataaattaaaggtagcagagggaaaacaagaggaaatccaacagaagggacaggctgagaaaaaagaattacaacataaaatagatgaaatggaagaaaaagaacaggagctccaggcaaaaatagaagctttgcaagctgataatgatttcaccaatgaaaggctaacagctttacaagagcacttgctttcaaagagtggcggggactgcacttttattcatcaattcatagaatgccagaagaagctgatcgtcgaagggcatctaaccaaagcggtagaagaaacaaagctttcaaaagaaaatcagacaagagcaaaagaatctgatttttcagatactctgagtccaagcaaggaaaaaagcagtgacgacactacagacgcccaaatggatgagcaagacctaaatgagcctcttgccaaagtgtcccttttaaaagatgacttgcagggtgcacagtcagaaattgaggcaaagcaagaaatacagcatcttcgaaaggaattgatcgaagcccaggagctagctagaacaagtaaacaaaaatgctttgaacttcaagctcttttggaagaagaaagaaaagcctatcgaaatcaagttgaggaatccactaaacaaatacaggttcttcaagcccaattgcagaggttacacatcgatactgagaatctccgggaggagaaggacagtgaaatcacaagtactagagatgaattgcttagtgcccgagatgaaattttgctccttcatcaagcagcagcaaaggttgcctctgagcgggacactgacattgcttctttacaagaagagcttaagaaggtgagagctgagcttgagcggtggcggaaagcagcgtctgaatatgagaaagaaatcacaagtctgcaaaacagttttcagcttagatgtcaacagtgtgaggaccagcagagagaagaagcaacaaggttgcaaggtgaactagagaagttgagaaaggaatggaatgcattggaaaccgaatgccattctctaaaaagggaaaatgttttgctatcatcagaactgcaacggcaagaaaaagaattgcacaattctcagaagcagagtttagagcttaccagtgatctcagcatccttcaaatgtctaggaaagaacttgagaatcaagtgggatccttgaaagaacagcatcttcgggattcagctgatttaaaaactcttctcagtaaggcagaaaaccaagcaaaggatgtgcagaaagagtatgaaaagacacagactgtactctcagaactgaagttgaagtttgaaatgactgagcaggaaaagcagtcaatcacagatgagctcaaacagtgtaaaaacaacctgaagctgctccgagagaaaggaaataatccttccatattacaacccgtcccagccgtattcatcggcctattcctggctttcctgttttggtgtttcggtccattgtggtagagaaagaaaccctggccctggatgcccatgttggctgccctggttgcagtaacagccatcgtgctgtacgtgccaggtctggccagagcttctccatgagagcgttccttgagtccgtacaccgtcctccctctagaagctggcatcacactcatgctggggacaaacagaaccattttcttcctctttacctcttaaaacagcagaagtacaagaatacagctgtagggtcattgctttaaattatataaaatgtatctgtctataaagaagatataaaattgtgactttattctactgtaagcaataatttgcttgcaatttttcatgtaatttttaaattagtatgttaagattctgaatattatggtggcctaaagtaggcttcttggtacaccagattatttataacattaaatttatgagtattttactctgaattctgatcaccagataattcatttttctgatttgataactacccaaaccaaacaaccaatacatacatgggaagagaggccctgtgtgctcagtgcctatcagtttgaaatatatacacatatatatattttttacatatttacgccatttttacttgttatgaaaccactgagctattgggaacaagacttagagacaactatttgcgtggattttttttttttttaaggaaaaatacgtttggaaaataaactgttatggtgataatttggggaatatgtgcacgcttgttcagccttaatgtgacttgaagatgtggaggacatcaactttgaaaaactttccatgagagtgtattttcttgagcaaactgaagtatttctgggagcaaaaacatagtaattacacaatttcagtgcagtcaaccaaaatgttgagtcaattggaatgtaatttattaaaccatgtatttaaagagatatttttctttaaaagccaagttactttctcatatacagcattttaggaagcatgattttttttttctatcatctattcctccaagcatgtttaattgaagaaagtattaatatctctttagataagcttgtattgacctaatttggtttatgatgtgtcagagctaattcatgttcagggtgagcgttgtacctaccaacaaatttcctggttgggtatgcaaatggttattttctttttattgttgttaattgggactttctgttaatgaaaagcactattcccaagattaatagtgttctatgcacaatgaagcacctaaaaacactgcttgatattataaatttaaaacacaagtgaaagtttagccatggttttgtgcggcatcatagttatgtcaataaagtttatttaggtcatagaatatcctaaagtatcacatagttaaatttttcagtcagtgaagaccgggagggaatgtcagtgaattggcttgaatgttctgtggcaatccacaggtctagccaaatattgaaataggagtttagggtataatttgccttgtgatgtttggcagtcactgtttatactttaaaggttatattttaagctatttgagattgcttttgggaagatcactagatttatggaggaattagtcacaaatgacttgtagaaaatactgtcatatagttcatttcatcattttctgttgcaggaagccactccaccacagaatgctaatatgccagtggtacccagtacctcttgtatataggttattgcaaatattgttctgaaatgcttaacttcagaattacattttttaaagtaaataattgttttaaatctattttgtaaagatataaagtacaatagaatttctggagtacagattaaactatttgcactaacacacgtgacgtgcatgatttaataaaataactttactctcccta

SEQ ID NO: 79414 - DNA, 3872 bp, Homo sapiens
gtttccacaataaaactttttctaccagatggtatggaagcccggctccgctcagatgtcatccatgcaccattaccaagtcctgttgacaaagttgctgctaacactccaagtatgtactctcaggaactattccagctttctcagtatctacaggaggccttacatcgggaacaaatgttggaacagaagttagccacgcttcagcggctactagccatcacccaagaggcttcagataccagttggcaggctttaatagatgaagatagactcttatcacggttagaagttatgggaaaccaattacaggcatgctccaaaaatcaaacagaagatagtttacgaaaggaacttatagcattacaagaggataaacataactatgagacaacagccaaagagtccctgaggcgggttcttcaggagaaaattgaagtggttagaaaactttcagaagttgagcgaagtctgagtaatactgaagatgaatgtacccatctgaaagaaatgaatgaaaggactcaggaagaattaagagaattagccaacaaatataatggagcagttaatgagattaaagatttatctgataaattaaaggtagcagagggaaaacaagaggaaatccaacagaagggacaggctgagaaaaaagaattacaacataaaatagatgaaatggaagaaaaagaacaggagctccaggcaaaaatagaagctttgcaagctgataatgatttcaccaatgaaaggctaacagctttacaagtacggttagaacatcttcaggagaaaactcttaaagaatgcagcagcttggagcacttgctttcaaagagtggcggggactgcacttttattcatcaattcatagaatgccagaagaagctgatcgtcgaagggcatctaaccaaagcggtagaagaaacaaagctttcaaaagaaaatcagacaagagcaaaagaatctgatttttcagatactctgagtccaagcaaggaaaaaagcagtgacgacactacagacgcccaaatggatgagcaagacctaaatgagcctcttgccaaagtgtcccttttaaaagctcttttggaagaagaaagaaaagcctatcgaaatcaagttgaggaatccactaaacaaatacaggttcttcaagcccaattgcagaggttacacatcgatactgagaatctccgggaggagaaggacagtgaaatcacaagtactagagatgaattgcttagtgcccgagatgaaattttgctccttcatcaagcagcagcaaaggttgcctctgagcgggacactgacattgcttctttacaagaagagcttaagaaggtgagagctgagcttgagcggtggcggaaagcagcgtctgaatatgagaaagaaatcacaagtctgcaaaacagttttcagcttagatgtcaacagtgtgaggaccagcagagagaagaagcaacaaggttgcaaggtgaactagagaagttgagaaaggaatggaatgcattggaaaccgaatgccattctctaaaaagggaaaatgttttgctatcatcagaactgcaacggcaagaaaaagaattgcacaattctcagaagcagagtttagagcttaccagtgatctcagcatccttcaaatgtctaggaaagaacttgagaatcaagtgggatccttgaaagaacagcatcttcgggattcagctgatttaaaaactcttctcagtaaggcagaaaaccaagcaaaggatgtgcagaaagagtatgaaaagacacagactgtactctcagaactgaagttgaagtttgaaatgactgagcaggaaaagcagtcaatcacagatgagctcaaacagtgtaaaaacaacctgaagctgctccgagagaaaggaaataatccttccatattacaacccgtcccagccgtattcatcggcctattcctggctttcctgttttggtgtttcggtccattgtggtagagaaagaaaccctggccctggatgcccatgttggctgccctggttgcagtaacagccatcgtgctgtacgtgccaggtctggccagagcttctccatgagagcgttccttgagtccgtacaccgtcctccctctagaagctggcatcacactcatgctggggacaaacagaaccattttcttcctctttacctcttaaaacagcagaagtacaagaatacagctgtagggtcattgctttaaattatataaaatgtatctgtctataaagaagatataaaattgtgactttattctactgtaagcaataatttgcttgcaatttttcatgtaatttttaaattagtatgttaagattctgaatattatggtggcctaaagtaggcttcttggtacaccagattatttataacattaaatttatgagtattttactctgaattctgatcaccagataattcatttttctgatttgataactacccaaaccaaacaaccaatacatacatgggaagagaggccctgtgtgctcagtgcctatcagtttgaaatatatacacatatatatattttttacatatttacgccatttttacttgttatgaaaccactgagctattgggaacaagacttagagacaactatttgcgtggattttttttttttttaaggaaaaatacgtttggaaaataaactgttatggtgataatttggggaatatgtgcacgcttgttcagccttaatgtgacttgaagatgtggaggacatcaactttgaaaaactttccatgagagtgtattttcttgagcaaactgaagtatttctgggagcaaaaacatagtaattacacaatttcagtgcagtcaaccaaaatgttgagtcaattggaatgtaatttattaaaccatgtatttaaagagatatttttctttaaaagccaagttactttctcatatacagcattttaggaagcatgattttttttttctatcatctattcctccaagcatgtttaattgaagaaagtattaatatctctttagataagcttgtattgacctaatttggtttatgatgtgtcagagctaattcatgttcagggtgagcgttgtacctaccaacaaatttcctggttgggtatgcaaatggttattttctttttattgttgttaattgggactttctgttaatgaaaagcactattcccaagattaatagtgttctatgcacaatgaagcacctaaaaacactgcttgatattataaatttaaaacacaagtgaaagtttagccatggttttgtgcggcatcatagttatgtcaataaagtttatttaggtcatagaatatcctaaagtatcacatagttaaatttttcagtcagtgaagaccgggagggaatgtcagtgaattggcttgaatgttctgtggcaatccacaggtctagccaaatattgaaataggagtttagggtataatttgccttgtgatgtttggcagtcactgtttatactttaaaggttatattttaagctatttgagattgcttttgggaagatcactagatttatggaggaattagtcacaaatgacttgtagaaaatactgtcatatagttcatttcatcattttctgttgcaggaagccactccaccacagaatgctaatatgccagtggtacccagtacctcttgtatataggttattgcaaatattgttctgaaatgcttaacttcagaattacattttttaaagtaaataattgttttaaatctattttgtaaagatataaagtacaatagaatttctggagtacagattaaactatttgcactaacacacgtgacgtgcatgatttaataaaataactttactctcccta

SEQ ID NO: 79415 - DNA, 2796 bp, Homo sapiens
aacccaggttatgcattagctacaatcctgtatggattattcttttattctaatgggccaagaaaatgatggatatacttttgcagcccaattgcagaggttacacatcgatactgagaatctccgggaggagaaggacagtgaaatcacaagtactagagatgaattgcttagtgcccgagatgaaattttgctccttcatcaagcagcagcaaaggttgcctctgagcgggacactgacattgcttctttacaagaagagcttaagaaggtgagagctgagcttgagcggtggcggaaagcagcgtctgaatatgagaaagaaatcacaagtctgcaaaacagttttcagcttagatgtcaacagtgtgaggaccagcagagagaagaagcaacaaggttgcaaggtgaactagagaagttgagaaaggaatggaatgcattggaaaccgaatgccattctctaaaaagggaaaatgttttgctatcatcagaactgcaacggcaagaaaaagaattgcacaattctcagaagcagagtttagagcttaccagtgatctcagcatccttcaaatgtctaggaaagaacttgagaatcaagtgggatccttgaaagaacagcatcttcgggattcagctgatttaaaaactcttctcagtaaggcagaaaaccaagcaaaggatgtgcagaaagagtatgaaaagacacagactgtactctcagaactgaagttgaagtttgaaatgactgagcaggaaaagcagtcaatcacagatgagctcaaacagtgtaaaaacaacctgaagctgctccgagagaaaggaaataatccttccatattacaacccgtcccagccgtattcatcggcctattcctggctttcctgttttggtgtttcggtccattgtggtagagaaagaaaccctggccctggatgcccatgttggctgccctggttgcagtaacagccatcgtgctgtacgtgccaggtctggccagagcttctccatgagagcgttccttgagtccgtacaccgtcctccctctagaagctggcatcacactcatgctggggacaaacagaaccattttcttcctctttacctcttaaaacagcagaagtacaagaatacagctgtagggtcattgctttaaattatataaaatgtatctgtctataaagaagatataaaattgtgactttattctactgtaagcaataatttgcttgcaatttttcatgtaatttttaaattagtatgttaagattctgaatattatggtggcctaaagtaggcttcttggtacaccagattatttataacattaaatttatgagtattttactctgaattctgatcaccagataattcatttttctgatttgataactacccaaaccaaacaaccaatacatacatgggaagagaggccctgtgtgctcagtgcctatcagtttgaaatatatacacatatatatattttttacatatttacgccatttttacttgttatgaaaccactgagctattgggaacaagacttagagacaactatttgcgtggattttttttttttttaaggaaaaatacgtttggaaaataaactgttatggtgataatttggggaatatgtgcacgcttgttcagccttaatgtgacttgaagatgtggaggacatcaactttgaaaaactttccatgagagtgtattttcttgagcaaactgaagtatttctgggagcaaaaacatagtaattacacaatttcagtgcagtcaaccaaaatgttgagtcaattggaatgtaatttattaaaccatgtatttaaagagatatttttctttaaaagccaagttactttctcatatacagcattttaggaagcatgattttttttttctatcatctattcctccaagcatgtttaattgaagaaagtattaatatctctttagataagcttgtattgacctaatttggtttatgatgtgtcagagctaattcatgttcagggtgagcgttgtacctaccaacaaatttcctggttgggtatgcaaatggttattttctttttattgttgttaattgggactttctgttaatgaaaagcactattcccaagattaatagtgttctatgcacaatgaagcacctaaaaacactgcttgatattataaatttaaaacacaagtgaaagtttagccatggttttgtgcggcatcatagttatgtcaataaagtttatttaggtcatagaatatcctaaagtatcacatagttaaatttttcagtcagtgaagaccgggagggaatgtcagtgaattggcttgaatgttctgtggcaatccacaggtctagccaaatattgaaataggagtttagggtataatttgccttgtgatgtttggcagtcactgtttatactttaaaggttatattttaagctatttgagattgcttttgggaagatcactagatttatggaggaattagtcacaaatgacttgtagaaaatactgtcatatagttcatttcatcattttctgttgcaggaagccactccaccacagaatgctaatatgccagtggtacccagtacctcttgtatataggttattgcaaatattgttctgaaatgcttaacttcagaattacattttttaaagtaaataattgttttaaatctattttgtaaagatataaagtacaatagaatttctggagtacagattaaactatttgcactaacacacgtgacgtgcatgatttaataaaataactttactctcccta

SEQ ID NO: 79416 - DNA, 3742 bp, Homo sapiens
gtttccacaataaaactttttctaccagatggtatggaagcccggctccgctcagatgtcatccatgcaccattaccaagtcctgttgacaaagttgctgctaacactccaagtatgtactctcaggaactattccagctttctcagtatctacaggaggccttacatcgggaacaaatgttggaacagaagttagccacgcttcagcggctactagccatcacccaagaggcttcagataccagttggcaggctttaatagatgaagatagactcttatcacggttagaagttatgggaaaccaattacaggcatgctccaaaaatcaaacagaagatagtttacgaaaggaacttatagcattacaagaggataaacataactatgagacaacagccaaagagtccctgaggcgggttcttcaggagaaaattgaagtggttagaaaactttcagaagttgagcgaagtctgagtaatactgaagatgaatgtacccatctgaaagaaatgaatgaaaggactcaggaagaattaagagaattagccaacaaatataatggagcagttaatgagattaaagatttatctgataaattaaaggtagcagagggaaaacaagaggaaatccaacagaagggacaggctgagaaaaaagaattacaacataaaatagatgaaatggaagaaaaagaacaggagctccaggcaaaaatagaagctttgcaagctgataatgatttcaccaatgaaaggctaacagctttacaagaaaatcagacaagagcaaaagaatctgatttttcagatactctgagtccaagcaaggaaaaaagcagtgacgacactacagacgcccaaatggatgagcaagacctaaatgagcctcttgccaaagtgtcccttttaaaagatgacttgcagggtgcacagtcagaaattgaggcaaagcaagaaatacagcatcttcgaaaggaattgatcgaagcccaggagctagctagaacaagtaaacaaaaatgctttgaacttcaagctcttttggaagaagaaagaaaagcctatcgaaatcaagttgaggaatccactaaacaaatacaggttcttcaagcccaattgcagaggttacacatcgatactgagaatctccgggaggagaaggacagtgaaatcacaagtactagagatgaattgcttagtgcccgagatgaaattttgctccttcatcaagcagcagcaaaggttgcctctgagcgggacactgacattgcttctttacaagaagagcttaagaaggtgagagctgagcttgagcggtggcggaaagcagcgtctgaatatgagaaagaaatcacaagtctgcaaaacagttttcagcttagatgtcaacagtgtgaggaccagcagagagaagaagcaacaaggttgcaaggtgaactagagaagttgagaaaggaatggaatgcattggaaaccgaatgccattctctaaaaagggaaaatgttttgctatcatcagaactgcaacggcaagaaaaagaattgcacaattctcagaagcagagtttagagcttaccagtgatctcagcatccttcaaatgtctaggaaagaacttgagaatcaagtgggatccttgaaagaacagcatcttcgggattcagctgatttaaaaactcttctcagtaaggcagaaaaccaagcaaaggatgtgcagaaagagtatgaaaagacacagactgtactctcagaactgaagttgaagtttgaaatgactgagcaggaaaagcagtcaatcacagatgagctcaaacagtgtaaaaacaacctgaagctgctccgagagaaaggaaataatccttccatattacaacccgtcccagccgtattcatcggcctattcctggctttcctgttttggtgtttcggtccattgtggtagagaaagaaaccctggccctggatgcccatgttggctgccctggttgcagtaacagccatcgtgctgtacgtgccaggtctggccagagcttctccatgagagcgttccttgagtccgtacaccgtcctccctctagaagctggcatcacactcatgctggggacaaacagaaccattttcttcctctttacctcttaaaacagcagaagtacaagaatacagctgtagggtcattgctttaaattatataaaatgtatctgtctataaagaagatataaaattgtgactttattctactgtaagcaataatttgcttgcaatttttcatgtaatttttaaattagtatgttaagattctgaatattatggtggcctaaagtaggcttcttggtacaccagattatttataacattaaatttatgagtattttactctgaattctgatcaccagataattcatttttctgatttgataactacccaaaccaaacaaccaatacatacatgggaagagaggccctgtgtgctcagtgcctatcagtttgaaatatatacacatatatatattttttacatatttacgccatttttacttgttatgaaaccactgagctattgggaacaagacttagagacaactatttgcgtggattttttttttttttaaggaaaaatacgtttggaaaataaactgttatggtgataatttggggaatatgtgcacgcttgttcagccttaatgtgacttgaagatgtggaggacatcaactttgaaaaactttccatgagagtgtattttcttgagcaaactgaagtatttctgggagcaaaaacatagtaattacacaatttcagtgcagtcaaccaaaatgttgagtcaattggaatgtaatttattaaaccatgtatttaaagagatatttttctttaaaagccaagttactttctcatatacagcattttaggaagcatgattttttttttctatcatctattcctccaagcatgtttaattgaagaaagtattaatatctctttagataagcttgtattgacctaatttggtttatgatgtgtcagagctaattcatgttcagggtgagcgttgtacctaccaacaaatttcctggttgggtatgcaaatggttattttctttttattgttgttaattgggactttctgttaatgaaaagcactattcccaagattaatagtgttctatgcacaatgaagcacctaaaaacactgcttgatattataaatttaaaacacaagtgaaagtttagccatggttttgtgcggcatcatagttatgtcaataaagtttatttaggtcatagaatatcctaaagtatcacatagttaaatttttcagtcagtgaagaccgggagggaatgtcagtgaattggcttgaatgttctgtggcaatccacaggtctagccaaatattgaaataggagtttagggtataatttgccttgtgatgtttggcagtcactgtttatactttaaaggttatattttaagctatttgagattgcttttgggaagatcactagatttatggaggaattagtcacaaatgacttgtagaaaatactgtcatatagttcatttcatcattttctgttgcaggaagccactccaccacagaatgctaatatgccagtggtacccagtacctcttgtatataggttattgcaaatattgttctgaaatgcttaacttcagaattacattttttaaagtaaataattgttttaaatgtcgacgcggccgcgaatttagtagtagta

SEQ ID NO: 79417 - DNA, 2237 bp, Homo sapiens
gtttccacaataaaactttttctaccagatggtatggaagcccggctccgctcagatgtcatccatgcaccattaccaagtcctgttgacaaagttgctgctaacactccaagtatgtactctcaggaactattccagctttctcagtatctacaggaggccttacatcgggaacaaatgttggaacagaagttagccacgcttcagcggctactagccatcacccaagaggcttcagataccagttggcaggctttaatagatgaagatagactcttatcacggttagaagttatgggaaaccaattacaggcatgctccaaaaatcaaacagaagatagtttacgaaaggaacttatagcattacaagaggataaacataactatgagacaacagccaaagagtccctgaggcgggttcttcaggagaaaattgaagtggttagaaaactttcagaagttgagcgaagtctgagtaatactgaagatgaatgtacccatctgaaagaaatgaatgaaaggactcaggaagaattaagagaattagccaacaaatataatggagcagttaatgagattaaagatttatctgataaattaaaggtagcagagggaaaacaagaggaaatccaacagaagggacaggctgagaaaaaagaattacaacataaaatagatgaaatggaagaaaaagaacaggagctccaggcaaaaatagaagctttgcaagctgataatgatttcaccaatgaaaggctaacagctttacaagaaaatcagacaagagcaaaagaatctgatttttcagatactctgagtccaagcaaggaaaaaagcagtgacgacactacagacgcccaaatggatgagcaagacctaaatgagcctcttgccaaagtgtcccttttaaaagatgacttgcagggtgcacagtcagaaattgaggcaaagcaagaaatacagcatcttcgaaaggaattgatcgaagcccaggagctagctagaacaagtaaacaaaaatgctttgaacttcaagctcttttggaagaagaaagaaaagcctatcgaaatcaagttgaggaatccactaaacaaatacaggttcttcaagcccaattgcagaggttacacatcgatactgagaatctccgggaggagaaggacagtgaaatcacaagtactagagatgaattgcttagtgcccgagatgaaattttgctccttcatcaagcagcaactgtcccgccggccgtctagagcccctccgtctccgtcacctctcgccccttcactccgggcgaggactggcggtggctgcccagaggtgcccagccacaccttccttcggcccaaaaggactttcctggccgcgccgaaccgacccttcattcatgctgcagtgctgcaacgtttccgccaccaagggggaaaagcggccgcgatctcaaaccaaacacaagaattggcgtgtgactcatctgcttggatacctccagtccccaaactgtgttccaggagttttcttggccgaagctgcccgatgtttgagccttttcttcccagagaagaagatggactgaaagctgccagttggggactttttgtgatcacggcgttgcagcgttttaaaggaggtgatggggcttgcgctggcttgtcttcccacccaagtgaagagttgatgttcactggttatgcttagacaatgtgcagtttgtgttaatttaaaattttgggtgggataggggcataggcttgtgaagggcagtccggatccggaggaactcctctttgtccctggtaggagagacacccccagtctatcctcgatgccgtcagccttggccatcttcacttgccgcccgaactcgcacccgtttcaggagcgtcatgtctacctggacgagcccatcaaaatcggccgctcagtggcccgctgtcgaccagcgcagaataatgccacttttgattgcaaagtgctatcaaggaaccacgctctcgtctggtttgatcacaagacgggcaagttttatcttcaagacactaaaagtagtaatggtacttttataaatagccagagattgagtcgaggctctgaagaaagtccaccatgtgaaattctttccggtgacattatccagtttggagtagacgtgacagagaatacacggaaagttacccatgggtgtattgtttccacaataaaactttttctaccagatggtatggaagcccgg

SEQ ID NO: 79418 - DNA, 2729 bp, Homo sapiens
gtttccacaataaaactttttctaccagatggtatggaagcccggctccgctcagatgtcatccatgcaccattaccaagtcctgttgacaaagttgctgctaacactccaagtatgtactctcaggaactattccagctttctcagtatctacaggaggccttacatcgggaacaaatgttggaacagaagttagccacgcttcagcggctactagccatcacccaagaggcttcagataccagttggcaggctttaatagatgaagatagactcttatcacggttagaagttatgggaaaccaattacaggcatgctccaaaaatcaaacagaagatagtttacgaaaggaacttatagcattacaagaggataaacataactatgagacaacagccaaagagtccctgaggcgggttcttcaggagaaaattgaagtggttagaaaactttcagaagttgagcgaagtctgagtaatactgaagatgaatgtacccatctgaaagaaatgaatgaaaggactcaggaagaattaagagaattagccaacaaatataatggagcagttaatgagattaaagatttatctgataaattaaaggtagcagagggaaaacaagaggaaatccaacagaagggacaggctgagaaaaaagaattacaacataaaatagatgaaatggaagaaaaagaacaggagctccaggcaaaaatagaagctttgcaagctgataatgatttcaccaatgaaaggctaacagctttacaagtacggttagaacatcttcaggagaaaactcttaaagaatgcagcagcttggagcacttgctttcaaagagtggcggggactgcacttttattcatcaattcatagaatgccagaagaagctgatcgtcgaagggcatctaaccaaagcggtagaagaaacaaagctttcaaaagaaaatcagacaagagcaaaagaatctgatttttcagatactctgagtccaagcaaggaaaaaagcagtgacgacactacagacgcccaaatggatgagcaagacctaaatgagcctcttgccaaagtgtcccttttaaaagatgacttgcagggtgcacagtcagaaattgaggcaaagcaagaaatacagcatcttcgaaaggaattgatcgaagcccaggagctagctagaacaagtaaacaaaaatgctttgaacttcaagctcttttggaagaagaaagaaaagcctatcgaaatcaagttgaggaatccactaaacaaatacaggttcttcaagcccaattgcagaggttacacatcgatactgagaatctccgggaggagaaggacagtgaaatcacaagtactagagatgaattgcttagtgcccgagatgaaattttgctccttcatcaagcagcagcaaaggttgcctctgagcgggacactgacattgcttctttacaagaagagcttaagaaggtgagagctgagcttgagcggtggcggaaagcagcgtctgaatatgagaaagaaatcacaagtctgcaaaacagttttcagcttagatgtcaacagtgtgaggaccagcagagagaagaagcaacaaggttgcaaggtgaactagagaagttgagaaaggaatggaatgcattggaaaccgaatgccattctctaaaaagggaaaatgttttgctatcatcagaactgcaacggcaagaaaaagaattgcacaattctcagaagcagagtttagagcttaccagtgatctcagcatccttcaaatgtctaggaaagaacttgagaatcaagtgggatccttgaaagaacagcatcttcgggattcagctgatttaaaaactcttctcagtaaggcagaaaaccaagcaaaggatgtgcagaaagagtatgaaaagacacagactgtactctcagaactgaagttgaagtttgaaatgactgagcaggaaaagcagtcaatcacagatgagctcaaacagtgtaaaaacaacctgaagctgctccgagagaaaggaaataatccttccatattacaacccgtcccagccgtattcatcggcctattcctggctttcctgttttggtgtttcggtccattgtggtagagaaaggtacaagcactattgttgagtccttgtctgtttgtccccgtcacctttttgtgccatatttgtaatatagtgcatggcaagaacacacaggtattttgttacctgaagcaaacccttcatttagtatgccgtgtatttgtgtcataccaatgaactgaacagtcaactaatcccataactttttgtcttgtttactttgtagtaatgctaaccatgagttaattccaacctaaccagttgttaatatgcttccattaactgagtctttatctctagcaaactggagtgcactatgaatttctgcaatattagtaccctctttccaattatgtgtttaatcagatttgaatgagaaatgaagagtttgcctccttgaagttttcagccagccttcttccccttcctccttatcctcttccttttcatagtgtagattttctttgtttcaaccctttgcctgtttatactatggctatgaagatgaaaaataatgagattaacataatgaaccattggctcacaatctcaaccctattgtgtacttgcaaggatataaatgtatcccatttctttctgagccctgacttgcaaccatcagaatatttctt

SEQ ID NO: 79419 - DNA, 3308 bp, Homo sapiens
aggcatgcgcagtagctaaagtcaccagcgtgcgcgggaagctgggccgcgtctgcttatgattggttgccgcggcagactcccacccaccgaaacgcagccctggaagctgattgggtgtggtcgccgtggccggacgccgctcgggggacgtgggaggggaggcgggaaacagcttagtgggtgtggggtcgcgcattttcttcaaccaggaggtgaggaggtttcgacatggcggtgcagccgaaggagacgctgcagttggagagcgcggccgaggtcggcttcgtgcgcttctttcagggcatgccggagaagccgaccaccacagtgcgccttttcgaccggggcgacttctatacggcgcacggcgaggacgcgctgctggccgcccgggaggtgttcaagacccagggggtgatcaagtacatggggccggcaggagcaaagaatctgcagagtgttgtgcttagtaaaatgaattttgaatcttttgtaaaagatcttcttctggttcgtcagtatagagttgaagtttataagaatagagctggaaataaggcatccaaggagaatgattggtatttggcatataaggcttctcctggcaatctctctcagtttgaagacattctctttggtaacaatgatatgtcagcttccattggtgttgtgggtgttaaaatgtccgcagttgatggccagagacaggttggagttgggtatgtggattccatacagaggaaactaggactgtgtgaattccctgataatgatcagttctccaatcttgaggctctcctcatccagattggaccaaaggaatgtgttttacccggaggagagactgctggagacatggggaaactgagacagataattcaaagaggaggaattctgatcacagaaagaaaaaaagctgacttttccacaaaagacatttatcaggacctcaaccggttgttgaaaggcaaaaagggagagcagatgaatagtgctgtattgccagaaatggagaatcaggttgcagtttcatcactgtctgcggtaatcaagtttttagaactcttatcagatgattccaactttggacagtttgaactgactacttttgacttcagccagtatatgaaattggatattgcagcagtcagagcccttaacctttttcagggttctgttgaagataccactggctctcagtctctggctgccttgctgaataagtgtaaaacccctcaaggacaaagacttgttaaccagtggattaagcagcctctcatggataagaacagaatagaggagagattgaatttagtggaagcttttgtagaagatgcagaattgaggcagactttacaagaagatttacttcgtcgattcccagatcttaaccgacttgccaagaagtttcaaagacaagcagcaaacttacaagattgttaccgactctatcagggtataaatcaactacctaatgttatacaggctctggaaaaacatgaaggaaaacaccagaaattattgttggcagtttttgtgactcctcttactgatcttcgttctgacttctccaagtttcaggaaatgatagaaacaactttagatatggatcaggtggaaaaccatgaattccttgtaaaaccttcatttgatcctaatctcagtgaattaagagaaataatgaatgacttggaaaagaagatgcagtcaacattaataagtgcagccagagatcttggcttggaccctggcaaacagattaaactggattccagtgcacagtttggatattactttcgtgtaacctgtaaggaagaaaaagtccttcgtaacaataaaaactttagtactgtagatatccagaagaatggtgttaaatttaccaacagcaaattgacttctttaaatgaagagtataccaaaaataaaacagaatatgaagaagcccaggatgccattgttaaagaaattgtcaatatttcttcaggctatgtagaaccaatgcagacactcaatgatgtgttagctcagctagatgctgttgtcagctttgctcacgtgtcaaatggagcacctgttccatatgtacgaccagccattttggagaaaggacaaggaagaattatattaaaagcatccaggcatgcttgtgttgaagttcaagatgaaattgcatttattcctaatgacgtatactttgaaaaagataaacagatgttccacatcattactggccccaatatgggaggtaaatcaacatatattcgacaaactggggtgatagtactcatggcccaaattgggtgttttgtgccatgtgagtcagcagaagtgtccattgtggactgcatcttagcccgagtaggggctggtgacagtcaattgaaaggagtctccacgttcatggctgaaatgttggaaactgcttctatcctcaggtctgcaaccaaagattcattaataatcatagatgaattgggaagaggaacttctacctacgatggatttgggttagcatgggctatatcagaatacattgcaacaaagattggtgctttttgcatgtttgcaacccattttcatgaacttactgccttggccaatcagataccaactgttaataatctacatgtcacagcactcaccactgaagagaccttaactatgctttatcaggtgaagaaaggtgtctgtgatcaaagttttgggattcatgttgcagagcttgctaatttccctaagcatgtaatagagtgtgctaaacagaaagccctggaacttgaggagtttcagtatattggagaatcgcaaggatatgatatcatggaaccagcagcaaagaagtgctatctggaaagagagcaaggtgaaaaaattattcaggagttcctgtccaaggtgaaacaaatgccctttactgaaatgtcagaagaaaacatcacaataaagttaaaacagctaaaagctgaagtaatagcaaagaataatagctttgtaaatgaaatcatttcacgaataaaagttactacgtgaaaaatcccagtaatggaatgaaggtaatattgataagctattgtctgtaatagttttatattgttttatattaaccctttttccatagtgttaactgtcagtgcccatgggctatcaacttaataagatatttagtaatattttactttgaggacattttcaaagatttttattttgaaaaatgagagctgtaactgaggactgtttgcaattgacataggcaataataagtgatgtgctgaattttataaataaaatcatgtagtttgtgg

SEQ ID NO: 79420 - DNA, 901 bp, Homo sapiens
  misc_feature (833)..(833): n is a, c, g, or t
  misc_feature (885)..(885): n is a, c, g, or t
  misc_feature (897)..(897): n is a, c, g, or t
  misc_feature (901)..(901): n is a, c, g, or t
aggcatgcgcagtagctaaagtcaccagcgtgcgcgggaagctgggccgcgtctgcttatgattggttgccgcggcagactcccacccaccgaaacgcagccctggaagctgattgggtgtggtcgccgtggccggacgccgctcgggggacgtgggaggggaggcgggaaacagcttagtgggtgtggggtcgcgcattttcttcaaccaggaggtgaggaggtttcgacatggcggtgcagccgaaggagacgctgcagttggagagcgcggccgaggtcggcttcgtgcgcttctttcagggcatgccggagaagccgaccaccacagtgcgccttttcgaccggggcgacttctatacggcgcacggcgaggacgcgctgctggccgcccgggaggtgttcaagacccagggggtgatcaagtacatggggccggcaggagcaaagaatctgcagagtgttgtgcttagtaaaatgaattttgaatcttttgtaaaagatcttcttctggttcgtcagtatagagttgaagtttataagaatagagctggaaataaggcatccaaggagaatgattggtatttggcatataaggcttctcctggcaatctctctcagtttgaagacattctctttggtaacaatgatatgtcagcttccattggtgttgtgggtgttaaaatgtccgcagttgatggccagagacaggttggagttgggtatgtggattccatacagaggaaactaggactgtgtgaattccctgataatgatcagttctccaatcttgaggctctcctcatccagattggaccaaaagggaaatgttntttttacccccgggaaaggaaaaaaactggcttggggaaaaccttggggggnaaaacttggaanaacn

SEQ ID NO: 79421 - DNA, 3253 bp, Homo sapiens
aggcatgcgcagtagctaaagtcaccagcgtgcgcgggaagctgggccgcgtctgcttatgattggttgccgcggcagactcccacccaccgaaacgcagccctggaagctgattgggtgtggtcgccgtggccggacgccgctcgggggacgtgggaggggaggcgggaaacagcttagtgggtgtggggtcgcgcattttcttcaaccaggaggtgaggaggtttcgacatggcggtgcagccgaaggagacgctgcagttggagagcgcggccgaggtcggcttcgtgcgcttctttcagggcatgccggagaagccgaccaccacagtgcgccttttcgaccggggcgacttctatacggcgcacggcgaggacgcgctgctggccgcccgggaggtgttcaagacccagggggtgatcaagtacatggggccggcaggagcaaagaatctgcagagtgttgtgcttagtaaaatgaattttgaatcttttgtaaaagatcttcttctggttcgtcagtatagagttgaagtttataagaatagagctggaaataaggcatccaaggagaatgattggtatttggcatataaggcttctcctggcaatctctctcagtttgaagacattctctttggtaacaatgatatgtcagcttccattggtgttgtgggtgttaaaataggaaactaggactgtgtgaattccctgataatgatcagttctccaatcttgaggctctcctcatccagattggaccaaaggaatgtgttttacccggaggagagactgctggagacatggggaaactgagacagataattcaaagaggaggaattctgatcacagaaagaaaaaaagctgacttttccacaaaagacatttatcaggacctcaaccggttgttgaaaggcaaaaagggagagcagatgaatagtgctgtattgccagaaatggagaatcaggttgcagtttcatcactgtctgcggtaatcaagtttttagaactcttatcagatgattccaactttggacagtttgaactgactacttttgacttcagccagtatatgaaattggatattgcagcagtcagagcccttaacctttttcagggttctgttgaagataccactggctctcagtctctggctgccttgctgaataagtgtaaaacccctcaaggacaaagacttgttaaccagtggattaagcagcctctcatggataagaacagaatagaggagagattgaatttagtggaagcttttgtagaagatgcagaattgaggcagactttacaagaagatttacttcgtcgattcccagatcttaaccgacttgccaagaagtttcaaagacaagcagcaaacttacaagattgttaccgactctatcagggtataaatcaactacctaatgttatacaggctctggaaaaacatgaaggaaaacaccagaaattattgttggcagtttttgtgactcctcttactgatcttcgttctgacttctccaagtttcaggaaatgatagaaacaactttagatatggatcaggtggaaaaccatgaattccttgtaaaaccttcatttgatcctaatctcagtgaattaagagaaataatgaatgacttggaaaagaagatgcagtcaacattaataagtgcagccagagatcttggcttggaccctggcaaacagattaaactggattccagtgcacagtttggatattactttcgtgtaacctgtaaggaagaaaaagtccttcgtaacaataaaaactttagtactgtagatatccagaagaatggtgttaaatttaccaacagcaaattgacttctttaaatgaagagtataccaaaaataaaacagaatatgaagaagcccaggatgccattgttaaagaaattgtcaatatttcttcaggctatgtagaaccaatgcagacactcaatgatgtgttagctcagctagatgctgttgtcagctttgctcacgtgtcaaatggagcacctgttccatatgtacgaccagccattttggagaaaggacaaggaagaattatattaaaagcatccaggcatgcttgtgttgaagttcaagatgaaattgcatttattcctaatgacgtatactttgaaaaagataaacagatgttccacatcattactggccccaatatgggaggtaaatcaacatatattcgacaaactggggtgatagtactcatggcccaaattgggtgttttgtgccatgtgagtcagcagaagtgtccattgtggactgcatcttagcccgagtaggggctggtgacagtcaattgaaaggagtctccacgttcatggctgaaatgttggaaactgcttctatcctcaggtctgcaaccaaagattcattaataatcatagatgaattgggaagaggaacttctacctacgatggatttgggttagcatgggctatatcagaatacattgcaacaaagattggtgctttttgcatgtttgcaacccattttcatgaacttactgccttggccaatcagataccaactgttaataatctacatgtcacagcactcaccactgaagagaccttaactatgctttatcaggtgaagaaaggtgtctgtgatcaaagttttgggattcatgttgcagagcttgctaatttccctaagcatgtaatagagtgtgctaaacagaaagccctggaacttgaggagtttcagtatattggagaatcgcaaggatatgatatcatggaaccagcagcaaagaagtgctatctggaaagagagcaaggtgaaaaaattattcaggagttcctgtccaaggtgaaacaaatgccctttactgaaatgtcagaagaaaacatcacaataaagttaaaacagctaaaagctgaagtaatagcaaagaataatagctttgtaaatgaaatcatttcacgaataaaagttactacgtgaaaaatcccagtaatggaatgaaggtaatattgataagctattgtctgtaatagttttatattgttttatattaaccctttttccatagtgttaactgtcagtgcccatgggctatcaacttaataagatatttagtaatattttactttgaggacattttcaaagatttttattttgaaaaatgagagctgtaactgaggactgtttgcaattgacataggcaataataagtgatgtgctgaattttataaataaaatcatgtagtttgtgg

SEQ ID NO: 79422 - DNA, 679 bp, Homo sapiens
aggcatgcgcagtagctaaagtcaccagcgtgcgcgggaagctgggccgcgtctgcttatgattggttgccgcggcagactcccacccaccgaaacgcagccctggaagctgattgggtgtggtcgccgtggccggacgccgctcgggggacgtgggaggggaggcgggaaacagcttagtgggtgtggggtcgcgcattttcttcaaccaggaggtgaggaggtttcgacatggcggtgcagccgaaggagacgctgcagttggagagcgcggccgaggtcggcttcgtgcgcttctttcagggcatgccggagaagccgaccaccacagtgcgccttttcgaccggggcgacttctatacggcgcacggcgaggacgcgctgctggccgcccgggaggtgttcaagacccagggggtgatcaagtacatggggccggcaggtgagggcggggacggcgcgtgctggggagggacccggggccttgtggcgcggctcctttcccgcctcagagagtgggcggtgagcagcctctccagtgcggaggcacgggggcggaacgttggtgcttgtgcggattccgccgtccccaggttctgcttggctccggagggacgcccccctcagccctgaaacccgtgcctctccagccgccccggatctgaacttgtgatcacgg

SEQ ID NO: 79423 - DNA, 3255 bp, Homo sapiens
aggcatgcgcagtagctaaagtcaccagcgtgcgcgggaagctgggccgcgtctgcttatgattggttgccgcggcagactcccacccaccgaaacgcagccctggaagctgattgggtgtggtcgccgtggccggacgccgctcgggggacgtgggaggggaggcgggaaacagcttagtgggtgtggggtcgcgcattttcttcaaccaggaggtgaggaggtttcgacatggcggtgcagccgaaggagacgctgcagttggagagcgcggccgaggtcggcttcgtgcgcttctttcagggcatgccggagaagccgaccaccacagtgcgccttttcgaccggggcgacttctatacggcgcacggcgaggacgcgctgctggccgcccgggaggtgttcaagacccagggggtgatcaagtacatggggccggcaggagcaaagaatctgcagagtgttgtgcttagtaaaatgaattttgaatcttttagctggaaataaggcatccaaggagaatgattggtatttggcatataaggcttctcctggcaatctctctcagtttgaagacattctctttggtaacaatgatatgtcagcttccattggtgttgtgggtgttaaaatgtccgcagttgatggccagagacaggttggagttgggtatgtggattccatacagaggaaactaggactgtgtgaattccctgataatgatcagttctccaatcttgaggctctcctcatccagattggaccaaaggaatgtgttttacccggaggagagactgctggagacatggggaaactgagacagataattcaaagaggaggaattctgatcacagaaagaaaaaaagctgacttttccacaaaagacatttatcaggacctcaaccggttgttgaaaggcaaaaagggagagcagatgaatagtgctgtattgccagaaatggagaatcaggttgcagtttcatcactgtctgcggtaatcaagtttttagaactcttatcagatgattccaactttggacagtttgaactgactacttttgacttcagccagtatatgaaattggatattgcagcagtcagagcccttaacctttttcagggttctgttgaagataccactggctctcagtctctggctgccttgctgaataagtgtaaaacccctcaaggacaaagacttgttaaccagtggattaagcagcctctcatggataagaacagaatagaggagagattgaatttagtggaagcttttgtagaagatgcagaattgaggcagactttacaagaagatttacttcgtcgattcccagatcttaaccgacttgccaagaagtttcaaagacaagcagcaaacttacaagattgttaccgactctatcagggtataaatcaactacctaatgttatacaggctctggaaaaacatgaaggaaaacaccagaaattattgttggcagtttttgtgactcctcttactgatcttcgttctgacttctccaagtttcaggaaatgatagaaacaactttagatatggatcaggtggaaaaccatgaattccttgtaaaaccttcatttgatcctaatctcagtgaattaagagaaataatgaatgacttggaaaagaagatgcagtcaacattaataagtgcagccagagatcttggcttggaccctggcaaacagattaaactggattccagtgcacagtttggatattactttcgtgtaacctgtaaggaagaaaaagtccttcgtaacaataaaaactttagtactgtagatatccagaagaatggtgttaaatttaccaacagcaaattgacttctttaaatgaagagtataccaaaaataaaacagaatatgaagaagcccaggatgccattgttaaagaaattgtcaatatttcttcaggctatgtagaaccaatgcagacactcaatgatgtgttagctcagctagatgctgttgtcagctttgctcacgtgtcaaatggagcacctgttccatatgtacgaccagccattttggagaaaggacaaggaagaattatattaaaagcatccaggcatgcttgtgttgaagttcaagatgaaattgcatttattcctaatgacgtatactttgaaaaagataaacagatgttccacatcattactggccccaatatgggaggtaaatcaacatatattcgacaaactggggtgatagtactcatggcccaaattgggtgttttgtgccatgtgagtcagcagaagtgtccattgtggactgcatcttagcccgagtaggggctggtgacagtcaattgaaaggagtctccacgttcatggctgaaatgttggaaactgcttctatcctcaggtctgcaaccaaagattcattaataatcatagatgaattgggaagaggaacttctacctacgatggatttgggttagcatgggctatatcagaatacattgcaacaaagattggtgctttttgcatgtttgcaacccattttcatgaacttactgccttggccaatcagataccaactgttaataatctacatgtcacagcactcaccactgaagagaccttaactatgctttatcaggtgaagaaaggtgtctgtgatcaaagttttgggattcatgttgcagagcttgctaatttccctaagcatgtaatagagtgtgctaaacagaaagccctggaacttgaggagtttcagtatattggagaatcgcaaggatatgatatcatggaaccagcagcaaagaagtgctatctggaaagagagcaaggtgaaaaaattattcaggagttcctgtccaaggtgaaacaaatgccctttactgaaatgtcagaagaaaacatcacaataaagttaaaacagctaaaagctgaagtaatagcaaagaataatagctttgtaaatgaaatcatttcacgaataaaagttactacgtgaaaaatcccagtaatggaatgaaggtaatattgataagctattgtctgtaatagttttatattgttttatattaaccctttttccatagtgttaactgtcagtgcccatgggctatcaacttaataagatatttagtaatattttactttgaggacattttcaaagatttttattttgaaaaatgagagctgtaactgaggactgtttgcaattgacataggcaataataagtgatgtgctgaattttataaataaaatcatgtagtttgtgg

SEQ ID NO: 79424 - DNA, 278 bp, Homo sapiens
gcaaaatctgtcaaatcatttcacgcttattttctggggagaaaaatagaaaattacaccttgtttacaaatgaaatagtttcacttaaatgggactctagccaaggcagttaattagtcaaaagatccacagctgtcatatagtcacacattgtttattctatttgctatgtcgaccactgatgtgtatttaatattctgcatccttcacaggaaatgacaaatgccctgaattatttgcaaatagaattgctaatgaaaaagaaaaaaaatgttga

SEQ ID NO: 79425 - DNA, 368 bp, Homo sapiens
cagccctgcccagcatttgatggtgctatttttaatctttgatttttacaggtaaaaataatttatataatacatatgtatatatgcatgaaagaaagtctggaagtctaaaaaaccaaaatgggaatggtggtattatagacaatcttgttttctgtgtttaaatttgtatttgcgtatttatgggattgaacctactttaatgtctattcattacttatatttatgttgtgaattgcctcttgatagcctttatatataagtgctttctttatattaaagatgttaacccttgtgtattcattccttcagtgtgtaattttgactgagtgcctactgtgtgccacacacttttccaggtggttagg

SEQ ID NO: 79426 - DNA, 420 bp, Homo sapiens
aaatctcttatgggccaggcacagtggctcctgcctgtaatatcctagcactttgggagactgaggcaggcagatcgcttgagcccaggagtttgagaccagcccgggcagcaaagtaagaatgctatgaaaatatgatcataagttcaaaaagaaaacatcctcaaagaatgtgagcatggtttgggggcaatgaacacaatcctctctgagaaaaagctgaatggatccctgcagcacgtctgcagctgatctacaaatgctgggagcagttataggaggggatcttcaagttcacaatgcaactagaagaggcccaggtttgcaatcccaagacccacagaatctatttatttcagtgacgacaaaagctacttaaatcaacaatctgaggggaaacaaacagtaaagatacacaag

SEQ ID NO: 79427 - DNA, 480 bp, Homo sapiens
gacctgttgcccaggctggagtgcagcggctcaatctcggctcactgcaagctccgcctcctgggctcaagcgatctgcctgcctcagtctcccaaagtgctaggatattacaggcaggagccactgtgcctggcccataagagatttttttatttcagagaaataaggtacaaagtaagaatgctatgaaaatatgatcataagttcaaaaagaaaacatcctcaaagaatgtgagcatggtttgggggcaatgaacacaatcctctctgagaaaaagctgaatggatccctgcagcacgtctgcagctgatctacaaatgctgggagcagttataggaggggatcttcaagttcacaatgcaactagaagaggcccaggtttgcaatcccaagacccacagaatctatttatttcagtgacgacaaaagctacttaaatcaacaatctgaggggaaacaaacagtaaagatacacaag

SEQ ID NO: 79428 - DNA, 365 bp, Homo sapiens
cggaaaagaactagaagaaaatttagaacatacagattttctatataaagaaaatttattttgtatataaagttggggatggctaaaacttttctaagattgacaacaaaactagaaaccttaaagaataatatggataaatttgactttattaaaatacacacacacacacatcgtattaaaccttcctgtaagaaaaagaaaaagactgcaaacaaaattgaatgacaaatgacaaacagaaaaatatctataattgggaggccgaggcgggaggatttcttgagcctaggagtttgaggttttagtgagctgtgatcgcgccactgcgttccagcctgggtgacagagcaagaccctttctc

SEQ ID NO: 79429 - DNA, 203 bp, Homo sapiens
tgcccctttttgcctgattttcttctagagaaatcagagtccccacctctcacttgctggaccttccttagccagttaccactccttacctgccagtgctccaggccagctgcctcagcccttcactgccctcctccagccccaccactgctcattgctctctgcagcaggccttgcctcctaacactcaggagaaaaactct

SEQ ID NO: 79430 - DNA, 474 bp, Homo sapiens
ctacacaacggtgaaccattctatggaactggtctggggagatatctgactttagaaagaaaacttgatgggatggctgtggaatcagagtaagggtttagtttttctttggggaaagagagcgggattggagatttctgagtgtcaggaaggaagaagtaatttttgtatatttaaagctaagatggccgggcgcggtggctcaggcctgtaatcccagcactttgggaggctaaggcgggtggatcacctgaggtcaggagttcgagaccaacctggccaacatggcaaaaccccctctttacttaaaaaacacaaaaattagccaggcatggtggtgcgcacctgtagtcccagctattttgaaggcagaggcaggagaattgcttcaactcgggaggcagaggttgcagtgagccgagatcaccccattgcactccagcctggttgacagagcgagactcggtctcaaaa

SEQ ID NO: 79431 - DNA, 523 bp, Homo sapiens
aacgcagtttcttaaacaaatgcagcattttccaatagtttcgactaaagagaatgcagtaggaaacaactgtttacagaggcaaaaataagtaaatgtatattaaatgtatgtattatgtatcaacagacaaacatgtcacagggaagttcagacacctattctaacgtgtccaccctgaagtacttcttccatccagaaacaccacttttttcagtttaattcacctgcaatagagactcaagtaactgaatctacttccaccccaagattacacacagcaggtaattcagtatcaatgttcaacagaaacttgccctaaaggagacaggcagaagagccgtccagccccagccctttctctggagaaagtcggtcagccaagctcagtgagtgaagagtttgtttcagtacttggctcccaccttgggtttttcctttttgtctctgttctctgacttgggagttttgtgggacaggagagtctgaatttctttccagtcttggtctagcttctccgtga

SEQ ID NO: 79432 - DNA, 838 bp, Homo sapiens
tgaagaccttatttcccaggcttcatatgtgcagattagcagtggttcttgtttagcattgggctaaaataatgtacagtgaagtcaggtttggctaatatgacacaaaaatgtagagttttccctgcaaatgctatacataattgaatcactgaattacttagggggttatagtcattaccacacatctccaatttgttttctggaatctctgaagccacttattacaaatagacatttagttcctaatgatttcattgggggctgctacaatttttcatttgtagctttttcacctattgctacctaatacctttctctctctctctctctctctctctctctctctctcgtacctcttatttgatattgtgtttccagaattaattaatttagatgactttcacgtagtaacttttatccacaagtaatactttaagcagaaatatataacttggtttttctaaaataattaatttaacatatcaagaatggtattaagaaaaatatttggggatttttaaatgaaatttaaagtggaaatgtattacttgaggtagaaaaaccaattctatacatattcttaatagttaaatctcctagctcactgaagtttaaatttttggtatctcaattattcagaaaactgctgagattttggatgtaattgaaaatgctactgaattgagatcaaaagggataagtaagttatattcagaatagtgtcactggagatgcctctgagccaccaaaattaccatcataatgattatttaacttttgagaagtactcttggcttttggactcttaccttacataattttctgtcagtcttta

SEQ ID NO: 79433 - DNA, 477 bp, Homo sapiens
ggggagaatcacttcccgcacatttgggctgtgggcagaattcaattccttgtggttgtaggacggaggttgccattttcctgctggatgagggccattcccagcttctagaagccatctgcatgccttggtttgaggacccttcgactatcttcaaaaccagcaagggtaggtcagacccttctcacaggctcttcttccttcctttttatggactcatctcattaggtttgcagccacttgaataatcccagatcatttctctattttaaggtcagctgatcaggtcaactgaattctacctataaccttaattattttttgccatgtacggtaacgtatgcatagattctggggattagtatggagacatactaattacactgtagctagatatttgtgtcggagggggggcattattctgtacctagaagagaggggatttgtggggctgcagggtgtgtacatgttcagtgt

SEQ ID NO: 79434 - DNA, 357 bp, Homo sapiens
ttcacaggtcataaaatacaggagggactggctcagcgagcagcggatatgtgggcaaattctccacataatcagattacacaatgcaataaccaaccaaaacaaacatcgagataaattcatcacatcgactcaaatatgccactgtttataaagcattacacagtgtccaaggcaaatcacatacaacaaatggtaggtactgttgtcattattgttattaattccagaaaaatatttaaaatatgtagaactgcctgggcacagtggctcaggcctgtaatcccagcactttgggaggccgaggcaggcggatcacttgaggtcaggagttcgagaccagcctggccaacgtgg

SEQ ID NO: 79435 - DNA, 90 bp, Homo sapiens
cggatcctaggggcgcggggctggccccgctccccgctggcctcgcggcaactgggcctccccctcgctgcacgcagccctccaagctcc

SEQ ID NO: 79436 - DNA, 801 bp, Homo sapiens
gtgactcctaagctcagcgtggaagcttttccctgtcctgacccgatggagcagccggtaagtgaagagcacagctggaagcagagacaccttatgactcaaactgggcaaacaatcggaacgtcatgcagaaggaatggcctgactcctgcagtgcagattggaggccccagaactcctatgaactactgagagtctactggtttttaacttgttcctctgtctactgtgtgtttgggggtgacatctaaattccatttcttcttcttgtttaaatggtgcagagagaaaggttgcccagacatccaccagcttactgtgttgacagatttgggagcagcttttgatgaagttccacccatgagggtccatgtggcaagtagggccacagggcagcacctggttacaacttgctggtgggttttatgttgtgcaatactaggaggaggaggcaggtgatctatgctgatctatgatcacctgcttcagtagaatttttctgtagagtgttgtttgaattttgagcctccaggttagaggctccaagcagacaaagaagaaagtttgtagacacaatattctaacattgcacaagttgatgagatatcaagttttgaatattattcaggaagcactttggagaatgtgggagtcctactgttttgcactagtctgtaatttgttacctctccccattcgataatatagtaactcagaattttcatataaaattgaattctactcattagagtactttttaaaagtacagcagaaagaaaagaagtggaacataagcattca

SEQ ID NO: 79437 - DNA, 1361 bp, Homo sapiens
caggctggtgacatacttcgctggcgcatctccttactcactcttacttttccgacccctcaccattccctctcctgtggcttggtaaatacacctgccctccgtggaaggtgagtcctggactggcgttgccaggttcgcatgtcctccccagaacctccgtctggctccagggactctcactgagcgggtctagagcacccagcacttttcaaggaacagccgcggttcctttgtcccgcggctccagccccgttcggcccagctctcagggaaacgaagcgctcagtaagaacttttgatattagtttgtatgggtatttacactctggtgaggggagctgagtacggaagttccattaatcataccccaaccttgggtttagatattcagtttatgggttgggagagggagtttgccggaaagaaagcatcaaggttggccgctgactccagagaaatgaaaagggttaggtcgttttctgtttctggaaatcaagaattaggaatgggcaactacaggtgctaaccaacagaccacttttttgttttttggtagccctttggcagggatagtttttccacctttgcccgatacaatttaaaaaaaaaaatccttttattatggaatttgtcaaacacacacacaagcataacaaacccctaggtacccatctccaagttttgacccctattataatttcatcttcagtgttttattatccacttcctctctctctatctttagtattttaaagtaaatcccagatagcatcacatcatttcacccccaccataggatttcaaagatctgttatatttcaagattgagtaaaagggcttgaaattgggttattgcaatgaaactctagaaaaagcttgagggttcacccaggagtaagctggacaaaaaaggggtttgaggggtggacccatcttgcctaaaaatcttgtctcatctttctaaaaattacatatgaaagaggaagatttatgttacttttttatatgagagaatcgtcctttaatagaaaatttctattgctgcatcagaattatggaggaacacaaaaaacatacctcagtccttagtgtgtcctaaattaacacatattcacttattagtgggtaaatgactatatttcatttcagcacaacttctcccctggtagaaacacaaaagaaatttctaatgattaaactaggaaagtttgcactgaattgatggcttatcagagcaaccgcagttttcaggaagaaattcaatgccatgcggttgaaaatatccccctagcaataagggattatttttaaaaaagaatgaataaagatgttctggttttttttgttttaatctggta

SEQ ID NO: 79438 - DNA, 333 bp, Homo sapiens
cctgtttatttgaatactgctttccttaatgctttagaaatcaaaattgtatcattaattatacttacatttgtctggactctaaaaataatataatgcccaacagttgttttagccgccacaagttcctccacttccagaatgcatagccctttgcaatgtgactttgctacttttcccacccagaagtggaatcttctccatcccttggaatgtggcctggtcttgccagttgctttggcttatgggatattgcggaagtaagtatgttgcacaggttctggaatctagaccccaaggagcttttgcagcttccatctttgtcttctagaa

SEQ ID NO: 79439 - DNA, 260 bp, Homo sapiens
agtctttttcaagccatttgattaagtcaaggagaaagtctctgttgggtgcttctgtcttgaacactttctgacatttgtttatcttcctttccatgccttcagctggaaacagtgtggagccaaatagaaccaaatggctccgttcggtttcattgtatttatttgtgtggttatctacctatttggaattggcaccatcttttccatttatgacagtgatatgttttctttctaaataaataatcatcagttttttt

SEQ ID NO: 79440 - DNA, 376 bp, Homo sapiens
gtgggagggatggttttgggatgaaactgttccaactcagatcatcaggcattaattagattttcataaggagtacaacctagatccctcacatgcacaattcacagtagggtttgtgttactgtgagaatctaatgcctctgcggctctgacaggagactgagctcagtagcaatgctcacctgcctgctgctcacctcctgctgtgcggcccaggtcctaataggttaccagtcctaactggtacctaacagggtacaaagtccacagcctgggggttgggaacccctgctctagaccagcactgatggtaggttttatacatcagtggagtttcacgtaaaagtttggggaaaaaaatgattcttctaccagg

SEQ ID NO: 79441 - DNA, 351 bp, Homo sapiens
gagacagagtttcgctctgttgcccacgctggagtgcagtggcacgatcacggctcactgcaacctctgcctcctgggttcaagcaattctcctgtcttggcctccccagtagctgggattacaggcgtgcgccaccatgcccagctaattttcgtatttttagtagagacgggtttcaccatgttggctaggctggtcttgaattcatgacctcaggcgatccaaagtgctgggactacaggcgtgagccaccacggcctggccccttagaaaaaaaaccagggtctcactctgtcactcagaatgaagcgcagtggtgcgatcatagctcactgcagcctcaaactcct

SEQ ID NO: 79442 - DNA, 603 bp, Homo sapiens
tcagagacagggcctcattctgtttcccaggctgtagtgcagtggtgtgagcatagctcactgtaacctcaaatgcctgggctcaagcatagctagaactacaggcatgcatcaccatgcccaactacttcttttgttaattttgttaattttttggcagagaaagggtcctgctatgttgcgcagactgatctcaaactcctggcctcaagtggtcctcctgcctcagcctctccaagtgctgtgattacaagcatgagccactgcacccagccaaaattttatcatcttaaaaagtatggtccctaggccctagactgtgattaaaatactactcccattcaaggaaacaggcttccatagagatatggttgatttcaggtctgaggcaggaaatgtacaaaatgggcctggaatattgtataccagaaagcaattaactaactaactaccaaaggggttgaaaaaaacaaaaccacaacaaaaaatatgaagttacttagccaaaatggaacaatttgagcactacaaaaattataaagacaactgactgaaaaatataaaacacattaaaagcccaccacaataatatcaaaatcaaac

SEQ ID NO: 79443 - DNA, 1165 bp, Homo sapiens
gaattagcaagtattccttcttcatatattatgtcggaagagtttgagaagaaatggtattaattcttttttaaatgttaggttgactcaccagttaatgcagctatatggtcataaatgtttctttgttaatcgctttcgattactaattcaatatcctaggttataggtctattcatattttctctttcttctggagccactttcgtagtttgtatctttctagtgattcgtccatttcatccagggcagctaatttgttgttagacagttgttcacagtatactcctgtaatccttttgtatttctgtaaagttggtagtaatggctctgctttcatttattattttaataattagtcttccatcttttgctcagtcaatatagtgaaaggcttgatctttcaaataatctatgtttattcattctactgctctccaaacttctattttattgatttatgctctaattatgctctctattatttctttcatactgctagctttggatttagtcttattttgtcttcttccactgcctttaggtatagagtgaggatgttgatttcagatttttcttaaatgtagttgtttatatccatacattttcctttgaactctactttcactgcattcaataagttttggtatgttttgtttttattttaatttatctcaagatattttataattttgcttgtgatttatttttttcactcactggtagttgaagactgtattgtttaatttccacattttcgtgaattttccagttttcacttatttatctgttgtttcttccattgtggttgtaaattatattttgtatgatttcaaacttttaaaaatgattaggacatattttgtggacgaagatatggcccatcctagagaacttccatatacacttgaaaggaatgtatattctgctgttgttggatggactgtcctgtatatgcgtattagctctcagtggcttataccgttgtttaactcttgtatttctcatgaagcttctgtctggtttttctatccattaattaaaatgaggtattgaagtgtccaactgtgactatagaactgtgggtttatcctttcaatcctgttaattatttcagctttactgaggtgtaatagagaaataaaaattgtacgtgatgcgttta

SEQ ID NO: 79444 - DNA, 173 bp, Homo sapiens
gggaaagcggcccggttcgggctttctcctccttgttcaggagaaaggaaaggctccaacacaggccaaactgagccacagagtgggggcggtccccagatccccgcaccagtacattctgagagccacacagacccggcggcgggcagattagctcccacctcctgccagag

SEQ ID NO: 79445 - DNA, 346 bp, Homo sapiens
ttcagccacttgcagagacagccagagagtgcttcaaggactgcgtggagctctggagaagcagggaattcagggccctcttttgtgaggcatgagaaatttaggcaggatcatgtctacaaaagaggctgtcactttggcttatcaatattttcacctcgttaccccttccagatcagaatgggtgctttatttgtttttatggattattgtgtcaaccaaaacgagagttcagagtcactctaaagatttgaaactccttcaagatttgatgaatgcgcattttgatgccacatctatttttagaaagctgtggctgaataaagcattttattgtatagcatta

SEQ ID NO: 79446 - DNA, 261 bp, Homo sapiens
tgtcttgtttagtaagaaatcccttgccttgggatcatgaagaaaagtatttgtatttttttctacaaaattgattggctaaagcatttcacatttagatctatagtctatctagaattggtttgtatgtaaattcatttttcccttatatcctcgattttccaagcacaatgcattcaaaacatgatccctcactcacccactgctctgcagccaactttgtcatacatcagaatccatgtgtgcaagtgtctgtgtctg

SEQ ID NO: 79447 - DNA, 389 bp, Homo sapiens
gcagtattcatagcacctcagggctggccctgtggccttatcttggcttcctgcttacatcctgtgactgtctccatcctcagagtgtcccctcctagtttgagtaactgcagtgaatctgagaagtcctgcagtctttccagtctgtccttgtcatctaaaacatctccataggtgtcgtgacaaccagatgtttgtaggtatttctttttagttgtcattcattgactgcttatctggttattattattttttaaattataatttttttgagaaggagtctcactctgttgcccaggctggagtgcagtggtgtgatcttggctcactgcaactaccacctcctgggttcgagcagttctctgcctcagcctcccgagtagctggga

SEQ ID NO: 79448 - DNA, 414 bp, Homo sapiens
cagtgagatgaacccagttcctcagttggaaatgcagaaatcagctgtcttctgtgtcgctcacactgggagctgcagactggagctgttcctatttggccatcttggaaccctgccttcttcattcatatgtaatacaaaacttctaaggttttagtggagaagagatagagtaaaaggatttctatagacagaagaaacagttggtcatcaactctttcccttgtggcttcacatctcccctaaggacttcttatgttggtttggtcttacagtatagtcagtggcagtttccctcttcccattccttcctctgtctgatttaaaatgctgtttcaagtatcgatataagtattttgcctgtttcttttagcgtggctgtgaagggctgacattttcagaaggcacttactg

SEQ ID NO: 79449 - DNA, 838 bp, Homo sapiens
ttactcaagatgtaacaccttagtaagcctttctgactcctgatgggaaaagcagtttctattctacccactgccttatttcattagttaactttttaaaaatgtctctccaggccaggcatggtgactcccacctgtagtcccagggatttgggaggccgaggcaggaggatcccttgaggtcaggagttcaagaccagccttgacaacaaaacaagatcacatctctacaaaaaatattttaaaattagcagggtatggtggtgtgcacctgtagtcccacctactcaggaggctgaggtgggaggattgtttgatcccaggaatttgaggttacagtgtgctatgattgcaccactgcactccagcctgggcaacagagtgagatcctgtctcagaagaaaagtttctccttggtcataagtgtcatgacttcaaaaaaagttttacacacagaagtatagaaaattaagaaagccattttccctttttcctgtgtctctccttccctggcttagcatcattatgaattcagcataggtacttccagattattttatatacacatgcacttatttctttcatttggagtaccttatcttcagaagattataagctcattaaaggtaggaacctgtggcttttgcatttggttttcccacaaagcctcacacagaaatgggaggtgttcagtaaatgcttattgattgacagagttttaagggaagagttaggccaggtgtggtggcttacgcctgtaatcctagcactttgggaggctgaggcaggaggatcacttaagcccaggacttcaagaccagcttaggcaacattagtg

SEQ ID NO: 79450 - DNA, 309 bp, Homo sapiens
ctgagtatccccctcctatctgaatccagggtgatggcaaaggtttagaacacattattttcaaagactaaatctaaaacccagagtaaacatcaatgctcagagttagcataatttggagctattcaggaattgcagagaaatgcattttcacagaaatcaagatgttatttttgtatactatatcacttagacaactgtgtttcatttgctgtaatcagtttttaaaagtcagatggaaagagcaactgaagtcctagaaaatagaaatgtaattttaaactattccaataaagctggaggaggaag

SEQ ID NO: 79451 - DNA, 352 bp, Homo sapiens
  misc_feature (4)..(4): n is a, c, g, or t
tacncagttcgacggagactctccccattcatcaaccccctttccgtgccactggtgaatagggattgatgaatgggaagagttgagtcagaccagtaagcccgtcctgggttccttgaacatgttcccatgtaggaggtaaaaccaattctggaagtgtctatgaacttccataaataactttaattttagtataatgatggtcttggattgtctgacctcagtagctattaaataacatcaagtaacatctgtatcaggccctacatagaacatacagttgagtgggagtaaacaaaaagataaacatgcgtgttaatggctgttctctccgtcgacctggggatcctca

SEQ ID NO: 79452 - DNA, 262 bp, Homo sapiens
cgtccttcatcatacctaccctaaatctaaaacccagagtaaacatcaatgctcagagttagcataatttggagctattcaggaattgcagagaaatgcattttcacagaaatcaagatgttatttttgtatactatatcacttagacaactgtgtttcatttgctgtaatcagtttttaaaagtcagatggaaagagcaactgaagtcctagaaaatagaaatgtaattttaaactattccaataaagctggaggaggaag

SEQ ID NO: 79453 - DNA, 287 bp, Homo sapiens
tctactactaaattcgcggccgcgtcgatgttatttttgtatactatatcacttagacaactgtgtttcatttgctgtaatcagtttttaaaagtcagatggaaagagcaactgaagtcctagaaaatagaaatgtaattttaaactattccaataaagctggaggaggaaggggagtttgactaaagttctttttgtttgtttcaaattttcattaatgtatatagtgcaaaataccatcttgatttctgtgaaaatgcatttctctggtcgacgcggccgcgaat

SEQ ID NO: 79454 - DNA, 145 bp, Homo sapiens
ctagaggatcccacatgatggtccacgctccaactgtgtttcatttgctgtaatcagtttttaaaagtcagatggaaagagcaactgaagtcctagaaaatagaaatgtaattttaaactattccaataaagctggaggaggaag

SEQ ID NO: 79455 - DNA, 3377 bp, Homo sapiens
  misc_feature (2489)..(2489): n is a, c, g, or t
  misc_feature (3374)..(3374): n is a, c, g, or t
ggctctgattggactgccgaaccccgcgcgctgattggccgcgtgggcgaggcggaggagagccgtgcgcagcggcgtatgtggggccgtgtgcagacccgcgtgtggcgcaggcaaggaccctcaaaataaacagcctctaccttgcgagccgtcttccccaggcctgcgtccgagtctccgccgctgcgggcccgctccgacgcggaagatctgactgcagccatgagcagcaatgagtgcttcaagtgtggacgatctggccactgggcccgggaatgtcctactggtggaggccgtggtcgtggaatgagaagccgtggcagaggtttccagtttgtttcctcgtctcttccagatatttgttatcgctgtggtgagtctggtcatcttgccaaggattgtgatcttcaggaggatgcctgctataactgcggtagaggtggccacattgccaaggactgcaaggagcccaagagagagcgagagcaatgctgctacaactgtggcaaaccaggccatctggctcgtgactgcgaccatgcagatgagcagaaatgctattcttgtggagaattcggacacattcaaaaagactgcaccaaagtgaagtgctataggtgtggtgaaactggtcatgtagccatcaactgcagcaagacaagtgaagtcaactgttaccgctgtggcgagtcagggcaccttgcacgggaatgcacaattgaggctacagcctaattattttcctttgtcgcccctcctttttctgattgatggttgtattattttctctgaatcctcttcactggccaaaggttggcagatagaggcaactcccaggccagtgagctttacttgccgtgtaaaaggaggaaaggggtggaaaaaaaccgactttctgcatttaactacaaaaaaagtttatgtttagtttggtagaggtgttatgtataatgctttgttaaagaaccccctttccgtgccactggtgaatagggattgatgaatgggaagagttgagtcagaccagtaagcccgtcctgggttccttgaacatgttcccatgtaggaggtaaaaccaattctggaagtgtctatgaacttccataaataactttaattttagtataatgatggtcttggattgtctgacctcagtagctattaaataacatcaagtaacatctgtatcaggccctacatagaacatacagttgagtgggagtaaacaaaaagataaacatgcgtgttaatggctgttcgagagaaatcggaataaaagcctaaacaggaacaacttcatcacagtgttgatgttggacacatagatggtgatggcaaaggtttagaacacattattttcaaagactaaatctaaaacccagagtaaacatcaatgctcagagttagcataatttggagctattcaggaattgcagagaaatgcattttcacagaaatcaagatgttatttttgtatactatatcacttagacaactgtgtttcatttgctgtaatcagtttttaaaagtcagatggaaagagcaactgaagtcctagaaaatagaaatgtaattttaaactattccaataaagctggaggaggaaggggagtttgactaaagttctttttgtttgtttcaaattttcattaatgtatatagtgcaaaataccatattaaagaggggaatgtggaggactgaaagctgacagtttggacttttctttttgtacttaagtcatgtcttcaataatgaaaattgctgttaaaaggatgtatgggatttagatacttttgcaaagctatagaaaattcactttgtaatctgttataataatgcccttgagttctgtgttcagtctgaacaggttttttggtggtggtggttttgttttgttttggagacggagtctcactcttgtcgcccaggctggagtgcaggcttggctcactgcaacctccacctcccgggttcaagcaattctcctgcctcagcctcctgagtagctgggattacaggcacccgccaccaccccccgctaattttttgtatttttatttttattttatttttttatttttttttgagacagagtgtcgctctgttgcccaggctggagtgtagtggtgcgatctcggctcactgcaagctccgcctcctgggttcgcgccattctcctgcctcagcctcctgagtagctggggctacaggtacccgccaccgcgcccagctaattttttttttttgtatttttagtaaagacggggtttcacggtgttagccaggatggtctcaatctcctgacctcgtgatccgcccgccttggcctcccaaagtgctgggatcacaggcgtgagccaccgcgcccggcctattttttgtatttttagtagagactgggtttcatcatgttggtcgggctggtctccaactcctgacctcaggtgatccacctgccccgccccccaaagtgctagtgttacangtgcgagccaccgtgtccggccgattctgaacagttttaataccattgctatttttgtgtttttcctgggcctttttttttttttttttttttttgagacagtctcgctctgttgcccaggctagagtgcaatggtgcaatctcagctcactgcaacctccaccccccacccccacaccccgttcaagtaattctcctgcctcagcctcccaaatagctgggattacaggtgtccgccaccacacccagctaatttttgttatttttagtagagatggggtttcactgtgttggtcaggctggtctccaactgttgccctcaggtgagccactgtgccccaccttttcctgggtttcataaggatctgaagtggtggattccttgtttttgctagtatctcatttagagttgagatggaccttaaaactcatctgttttaactcactttttaatagatgagttaaacttaatttacttaaggatgtacagttagagcctggaacttcaaccattattcactccccatgccctgtttccccccacttcgaaattaaatgcggttagcatcatatagttcattttccccctccatgctgctgtgtgattcttgactttgggtatgagtttttcatccttcatgcagggttctgtcagttcatggtatagtgattcagtgttaaaatggtggtgtctcagctgtgctgtgcacattccaaccttgtcaaattaatagtcctgagcaagcaagaaaaagaggtaataacatacccatttctttatgaatataagcttataatattttttcatgtgctatttttactgagcaaattgtatgtctcacatgttaacacaataaatatcttgacaattttattttctaccanaaa

SEQ ID NO: 79456 - DNA, 3399 bp, Homo sapiens
  misc_feature (2511)..(2511): n is a, c, g, or t
  misc_feature (3396)..(3396): n is a, c, g, or t
ggctctgattggactgccgaaccccgcgcgctgattggccgcgtgggcgaggcggaggagagccgtgcgcagcggcgtatgtggggccgtgtgcagacccgcgtgtggcgcaggcaaggaccctcaaaataaacagcctctaccttgcgagccgtcttccccaggcctgcgtccgagtctccgccgctgcgggcccgctccgacgcggaagatctgactgcagccatgagcagcaatgagtgcttcaagtgtggacgatctggccactgggcccgggaatgtcctactggtggaggccgtggtcgtggaatgagaagccgtggcagaggttggttttacctcggatagaggtttccagtttgtttcctcgtctcttccagatatttgttatcgctgtggtgagtctggtcatcttgccaaggattgtgatcttcaggaggatgcctgctataactgcggtagaggtggccacattgccaaggactgcaaggagcccaagagagagcgagagcaatgctgctacaactgtggcaaaccaggccatctggctcgtgactgcgaccatgcagatgagcagaaatgctattcttgtggagaattcggacacattcaaaaagactgcaccaaagtgaagtgctataggtgtggtgaaactggtcatgtagccatcaactgcagcaagacaagtgaagtcaactgttaccgctgtggcgagtcagggcaccttgcacgggaatgcacaattgaggctacagcctaattattttcctttgtcgcccctcctttttctgattgatggttgtattattttctctgaatcctcttcactggccaaaggttggcagatagaggcaactcccaggccagtgagctttacttgccgtgtaaaaggaggaaaggggtggaaaaaaaccgactttctgcatttaactacaaaaaaagtttatgtttagtttggtagaggtgttatgtataatgctttgttaaagaaccccctttccgtgccactggtgaatagggattgatgaatgggaagagttgagtcagaccagtaagcccgtcctgggttccttgaacatgttcccatgtaggaggtaaaaccaattctggaagtgtctatgaacttccataaataactttaattttagtataatgatggtcttggattgtctgacctcagtagctattaaataacatcaagtaacatctgtatcaggccctacatagaacatacagttgagtgggagtaaacaaaaagataaacatgcgtgttaatggctgttcgagagaaatcggaataaaagcctaaacaggaacaacttcatcacagtgttgatgttggacacatagatggtgatggcaaaggtttagaacacattattttcaaagactaaatctaaaacccagagtaaacatcaatgctcagagttagcataatttggagctattcaggaattgcagagaaatgcattttcacagaaatcaagatgttatttttgtatactatatcacttagacaactgtgtttcatttgctgtaatcagtttttaaaagtcagatggaaagagcaactgaagtcctagaaaatagaaatgtaattttaaactattccaataaagctggaggaggaaggggagtttgactaaagttctttttgtttgtttcaaattttcattaatgtatatagtgcaaaataccatattaaagaggggaatgtggaggactgaaagctgacagtttggacttttctttttgtacttaagtcatgtcttcaataatgaaaattgctgttaaaaggatgtatgggatttagatacttttgcaaagctatagaaaattcactttgtaatctgttataataatgcccttgagttctgtgttcagtctgaacaggttttttggtggtggtggttttgttttgttttggagacggagtctcactcttgtcgcccaggctggagtgcaggcttggctcactgcaacctccacctcccgggttcaagcaattctcctgcctcagcctcctgagtagctgggattacaggcacccgccaccaccccccgctaattttttgtatttttatttttattttatttttttatttttttttgagacagagtgtcgctctgttgcccaggctggagtgtagtggtgcgatctcggctcactgcaagctccgcctcctgggttcgcgccattctcctgcctcagcctcctgagtagctggggctacaggtacccgccaccgcgcccagctaattttttttttttgtatttttagtaaagacggggtttcacggtgttagccaggatggtctcaatctcctgacctcgtgatccgcccgccttggcctcccaaagtgctgggatcacaggcgtgagccaccgcgcccggcctattttttgtatttttagtagagactgggtttcatcatgttggtcgggctggtctccaactcctgacctcaggtgatccacctgccccgccccccaaagtgctagtgttacangtgcgagccaccgtgtccggccgattctgaacagttttaataccattgctatttttgtgtttttcctgggcctttttttttttttttttttttttgagacagtctcgctctgttgcccaggctagagtgcaatggtgcaatctcagctcactgcaacctccaccccccacccccacaccccgttcaagtaattctcctgcctcagcctcccaaatagctgggattacaggtgtccgccaccacacccagctaatttttgttatttttagtagagatggggtttcactgtgttggtcaggctggtctccaactgttgccctcaggtgagccactgtgccccaccttttcctgggtttcataaggatctgaagtggtggattccttgtttttgctagtatctcatttagagttgagatggaccttaaaactcatctgttttaactcactttttaatagatgagttaaacttaatttacttaaggatgtacagttagagcctggaacttcaaccattattcactccccatgccctgtttccccccacttcgaaattaaatgcggttagcatcatatagttcattttccccctccatgctgctgtgtgattcttgactttgggtatgagtttttcatccttcatgcagggttctgtcagttcatggtatagtgattcagtgttaaaatggtggtgtctcagctgtgctgtgcacattccaaccttgtcaaattaatagtcctgagcaagcaagaaaaagaggtaataacatacccatttctttatgaatataagcttataatattttttcatgtgctatttttactgagcaaattgtatgtctcacatgttaacacaataaatatcttgacaattttattttctaccanaaa

SEQ ID NO: 79457 - DNA, 3318 bp, Homo sapiens
  misc_feature (2430)..(2430): n is a, c, g, or t
  misc_feature (3315)..(3315): n is a, c, g, or t
atccttaattaaattaattcccccccccccccccgagacccgcgtgtggcgcaggcaaggaccctcaaaataaacagcctctaccttgcgagccgtcttccccaggcctgcgtccgagtctccgccgctgcgggcccgctccgacgcggaagatctgactgcagccatgagcagcaatgagtgcttcaagtgtggacgatctggccactgggcccgggaatgtcctactggtggaggccgtggtcgtggaatgagaagccgtggcagaggtttccagtttgtttcctcgtctcttccagatatttgttatcgctgtggtgagtctggtcatcttgccaaggattgtgatcttcaggaggatgcctgctataactgcggtagaggtggccacattgccaaggactgcaaggagcccaagagagagcgagagcaatgctgctacaactgtggcaaaccaggccatctggctcgtgactgcgaccatgcagatgagcagaaatgctattcttgtggagaattcggacacattcaaaaagactgcaccaaagtgaagtgctataggtgtggtgaaactggtcatgtagccatcaactgcagcaagacaagtgaagtcaactgttaccgctgtggcgagtcagggcaccttgcacgggaatgcacaattgaggctacagcctaattattttcctttgtcgcccctcctttttctgattgatggttgtattattttctctgaatcctcttcactggccaaaggttggcagatagaggcaactcccaggccagtgagctttacttgccgtgtaaaaggaggaaaggggtggaaaaaaaccgactttctgcatttaactacaaaaaaagtttatgtttagtttggtagaggtgttatgtataatgctttgttaaagaaccccctttccgtgccactggtgaatagggattgatgaatgggaagagttgagtcagaccagtaagcccgtcctgggttccttgaacatgttcccatgtaggaggtaaaaccaattctggaagtgtctatgaacttccataaataactttaattttagtataatgatggtcttggattgtctgacctcagtagctattaaataacatcaagtaacatctgtatcaggccctacatagaacatacagttgagtgggagtaaacaaaaagataaacatgcgtgttaatggctgttcgagagaaatcggaataaaagcctaaacaggaacaacttcatcacagtgttgatgttggacacatagatggtgatggcaaaggtttagaacacattattttcaaagactaaatctaaaacccagagtaaacatcaatgctcagagttagcataatttggagctattcaggaattgcagagaaatgcattttcacagaaatcaagatgttatttttgtatactatatcacttagacaactgtgtttcatttgctgtaatcagtttttaaaagtcagatggaaagagcaactgaagtcctagaaaatagaaatgtaattttaaactattccaataaagctggaggaggaaggggagtttgactaaagttctttttgtttgtttcaaattttcattaatgtatatagtgcaaaataccatattaaagaggggaatgtggaggactgaaagctgacagtttggacttttctttttgtacttaagtcatgtcttcaataatgaaaattgctgttaaaaggatgtatgggatttagatacttttgcaaagctatagaaaattcactttgtaatctgttataataatgcccttgagttctgtgttcagtctgaacaggttttttggtggtggtggttttgttttgttttggagacggagtctcactcttgtcgcccaggctggagtgcaggcttggctcactgcaacctccacctcccgggttcaagcaattctcctgcctcagcctcctgagtagctgggattacaggcacccgccaccaccccccgctaattttttgtatttttatttttattttatttttttatttttttttgagacagagtgtcgctctgttgcccaggctggagtgtagtggtgcgatctcggctcactgcaagctccgcctcctgggttcgcgccattctcctgcctcagcctcctgagtagctggggctacaggtacccgccaccgcgcccagctaattttttttttttgtatttttagtaaagacggggtttcacggtgttagccaggatggtctcaatctcctgacctcgtgatccgcccgccttggcctcccaaagtgctgggatcacaggcgtgagccaccgcgcccggcctattttttgtatttttagtagagactgggtttcatcatgttggtcgggctggtctccaactcctgacctcaggtgatccacctgccccgccccccaaagtgctagtgttacangtgcgagccaccgtgtccggccgattctgaacagttttaataccattgctatttttgtgtttttcctgggcctttttttttttttttttttttttgagacagtctcgctctgttgcccaggctagagtgcaatggtgcaatctcagctcactgcaacctccaccccccacccccacaccccgttcaagtaattctcctgcctcagcctcccaaatagctgggattacaggtgtccgccaccacacccagctaatttttgttatttttagtagagatggggtttcactgtgttggtcaggctggtctccaactgttgccctcaggtgagccactgtgccccaccttttcctgggtttcataaggatctgaagtggtggattccttgtttttgctagtatctcatttagagttgagatggaccttaaaactcatctgttttaactcactttttaatagatgagttaaacttaatttacttaaggatgtacagttagagcctggaacttcaaccattattcactccccatgccctgtttccccccacttcgaaattaaatgcggttagcatcatatagttcattttccccctccatgctgctgtgtgattcttgactttgggtatgagtttttcatccttcatgcagggttctgtcagttcatggtatagtgattcagtgttaaaatggtggtgtctcagctgtgctgtgcacattccaaccttgtcaaattaatagtcctgagcaagcaagaaaaagaggtaataacatacccatttctttatgaatataagcttataatattttttcatgtgctatttttactgagcaaattgtatgtctcacatgttaacacaataaatatcttgacaattttattttctaccanaaa

SEQ ID NO: 79458 - DNA, 3277 bp, Homo sapiens
  misc_feature (2389)..(2389): n is a, c, g, or t
  misc_feature (3274)..(3274): n is a, c, g, or t
ttagctagtacgaggctgggttggaacaataaacagcctctaccttgcgagccgtcttccccaggcctgcgtccgagtctccgccgctgcgggcccgctccgacgcggaagatctgactgcagccatgagcagcaatgagtgcttcaagtgtggacgatctggccactgggcccgggaatgtcctactggtggaggccgtggtcgtggaatgagaagccgtggcagaggtttccagtttgtttcctcgtctcttccagatatttgttatcgctgtggtgagtctggtcatcttgccaaggattgtgatcttcaggaggatgcctgctataactgcggtagaggtggccacattgccaaggactgcaaggagcccaagagagagcgagagcaatgctgctacaactgtggcaaaccaggccatctggctcgtgactgcgaccatgcagatgagcagaaatgctattcttgtggagaattcggacacattcaaaaagactgcaccaaagtgaagtgctataggtgtggtgaaactggtcatgtagccatcaactgcagcaagacaagtgaagtcaactgttaccgctgtggcgagtcagggcaccttgcacgggaatgcacaattgaggctacagcctaattattttcctttgtcgcccctcctttttctgattgatggttgtattattttctctgaatcctcttcactggccaaaggttggcagatagaggcaactcccaggccagtgagctttacttgccgtgtaaaaggaggaaaggggtggaaaaaaaccgactttctgcatttaactacaaaaaaagtttatgtttagtttggtagaggtgttatgtataatgctttgttaaagaaccccctttccgtgccactggtgaatagggattgatgaatgggaagagttgagtcagaccagtaagcccgtcctgggttccttgaacatgttcccatgtaggaggtaaaaccaattctggaagtgtctatgaacttccataaataactttaattttagtataatgatggtcttggattgtctgacctcagtagctattaaataacatcaagtaacatctgtatcaggccctacatagaacatacagttgagtgggagtaaacaaaaagataaacatgcgtgttaatggctgttcgagagaaatcggaataaaagcctaaacaggaacaacttcatcacagtgttgatgttggacacatagatggtgatggcaaaggtttagaacacattattttcaaagactaaatctaaaacccagagtaaacatcaatgctcagagttagcataatttggagctattcaggaattgcagagaaatgcattttcacagaaatcaagatgttatttttgtatactatatcacttagacaactgtgtttcatttgctgtaatcagtttttaaaagtcagatggaaagagcaactgaagtcctagaaaatagaaatgtaattttaaactattccaataaagctggaggaggaaggggagtttgactaaagttctttttgtttgtttcaaattttcattaatgtatatagtgcaaaataccatattaaagaggggaatgtggaggactgaaagctgacagtttggacttttctttttgtacttaagtcatgtcttcaataatgaaaattgctgttaaaaggatgtatgggatttagatacttttgcaaagctatagaaaattcactttgtaatctgttataataatgcccttgagttctgtgttcagtctgaacaggttttttggtggtggtggttttgttttgttttggagacggagtctcactcttgtcgcccaggctggagtgcaggcttggctcactgcaacctccacctcccgggttcaagcaattctcctgcctcagcctcctgagtagctgggattacaggcacccgccaccaccccccgctaattttttgtatttttatttttattttatttttttatttttttttgagacagagtgtcgctctgttgcccaggctggagtgtagtggtgcgatctcggctcactgcaagctccgcctcctgggttcgcgccattctcctgcctcagcctcctgagtagctggggctacaggtacccgccaccgcgcccagctaattttttttttttgtatttttagtaaagacggggtttcacggtgttagccaggatggtctcaatctcctgacctcgtgatccgcccgccttggcctcccaaagtgctgggatcacaggcgtgagccaccgcgcccggcctattttttgtatttttagtagagactgggtttcatcatgttggtcgggctggtctccaactcctgacctcaggtgatccacctgccccgccccccaaagtgctagtgttacangtgcgagccaccgtgtccggccgattctgaacagttttaataccattgctatttttgtgtttttcctgggcctttttttttttttttttttttttgagacagtctcgctctgttgcccaggctagagtgcaatggtgcaatctcagctcactgcaacctccaccccccacccccacaccccgttcaagtaattctcctgcctcagcctcccaaatagctgggattacaggtgtccgccaccacacccagctaatttttgttatttttagtagagatggggtttcactgtgttggtcaggctggtctccaactgttgccctcaggtgagccactgtgccccaccttttcctgggtttcataaggatctgaagtggtggattccttgtttttgctagtatctcatttagagttgagatggaccttaaaactcatctgttttaactcactttttaatagatgagttaaacttaatttacttaaggatgtacagttagagcctggaacttcaaccattattcactccccatgccctgtttccccccacttcgaaattaaatgcggttagcatcatatagttcattttccccctccatgctgctgtgtgattcttgactttgggtatgagtttttcatccttcatgcagggttctgtcagttcatggtatagtgattcagtgttaaaatggtggtgtctcagctgtgctgtgcacattccaaccttgtcaaattaatagtcctgagcaagcaagaaaaagaggtaataacatacccatttctttatgaatataagcttataatattttttcatgtgctatttttactgagcaaattgtatgtctcacatgttaacacaataaatatcttgacaattttattttctaccanaaa

SEQ ID NO: 79459 - DNA, 1850 bp, Homo sapiens
ggctctgattggactgccgaaccccgcgcgctgattggccgcgtgggcgaggcggaggagagccgtgcgcagcggcgtatgtggggccgtgtgcagacccgcgtgtggcgcaggcaaggaccctcaaaataaacagcctctaccttgcgagccgtcttccccaggcctgcgtccgagtctccgccgctgcgggcccgctccgacgcggaagatctgactgcagccatgagcagcaatgagtgcttcaagtgtggacgatctggccactgggcccgggaatgtcctactggtggaggccgtggtcgtggaatgagaagccgtggcagaggttggttttacctcggatagaggtttccagtttgtttcctcgtctcttccagatatttgttatcgctgtggtgagtctggtcatcttgccaaggattgtgatcttcaggaggatgcctgctataactgcggtagaggtggccacattgccaaggactgcaaggagcccaagagagagcgagagcaatgctgctacaactgtggcaaaccaggccatctggctcgtgactgcgaccatgcagatgagcagaaatgctattcttgtggagaattcggacacattcaaaaagactgcaccaaagtgaagtgctataggtgtggtgaaactggtcatgtagccatcaactgcagcaagacaagtgaagtcaactgttaccgctgtggcgagtcagggcaccttgcacgggaatgcacaattgaggctacagcctaattattttcctttgtcgcccctcctttttctgattgatggttgtattattttctctgaatcctcttcactggccaaaggttggcagatagaggcaactcccaggccagtgagctttacttgccgtgtaaaaggaggaaaggggtggaaaaaaaccgactttctgcatttaactacaaaaaaagtttatgtttagtttggtagaggtgttatgtataatgctttgttaaagaaccccctttccgtgccactggtgaatagggattgatgaatgggaagagttgagtcagaccagtaagcccgtcctgggttccttgaacatgttcccatgtaggaggtaaaaccaattctggaagtgtctatgaacttccataaataactttaattttagtataatgatggtcttggattgtctgacctcagtagctattaaataacatcaagtaacatctgtatcaggccctacatagaacatacagttgagtgggagtaaacaaaaagataaacatgcgtgttaatggctgttcgagagaaatcggaataaaagcctaaacaggaacaacttcatcacagtgttgatgttggacacatagatggtgatggcaaaggtttagaacacattattttcaaagactaaatctaaaacccagagtaaacatcaatgctcagagttagcataatttggagctattcaggaattgcagagaaatgcattttcacagaaatcaagatgttatttttgtatactatatcacttagacaactgtgtttcatttgctgtaatcagtttttaaaagtcagatggaaagagcaactgaagtcctagaaaatagaaatgtaattttaaactattccaataaagctggaggaggaagggcgcacaaaaaaaacaaaaaaaaaaaaaaatttggggggccgcgcctcgaagattttcaaccttctggggccgcggccggttagtgaacgggctacggtcccaagaccggtcagacggggggtccccaaaaacccgggccggttcaaacccggttggtcttggtctccgcctcgcccctctcggcccgcgagcacccaaataggcaaaacaggggga

SEQ ID NO: 79460 - DNA, 1646 bp, Homo sapiens
ggctctgattggactgccgaaccccgcgcgctgattggccgcgtgggcgaggcggaggagagccgtgcgcagcggcgtatgtggggccgtgtgcagacccgcgtgtggcgcaggcaaggaccctcaaaataaacagcctctaccttgcgagccgtcttccccaggcctgcgtccgagtctccgccgctgcgggcccgctccgacgcggaagatctgactgcagccatgagcagcaatgagtgcttcaagtgtggacgatctggccactgggcccgggaatgtcctactggtggaggccgtggtcgtggaatgagaagccgtggcagaggttggttttacctcggatagaggtttccagtttgtttcctcgtctcttccagatatttgttatcgctgtggtgagtctggtcatcttgccaaggattgtgatcttcaggaggatgcctgctataactgcggtagaggtggccacattgccaaggactgcaaggagcccaagagagagcgagagcaatgctgctacaactgtggcaaaccaggccatctggctcgtgactgcgaccatgcagatgagcagaaatgctattcttgtggagaattcggacacattcaaaaagactgcaccaaagtgaagtgctataggtgtggtgaaactggtcatgtagccatcaactgcagcaagacaagtgaagtcaactgttaccgctgtggcgagtcagggcaccttgcacgggaatgcacaattgaggctacagcctaattattttcctttgtcgcccctcctttttctgattgatggttgtattattttctctgaatcctcttcactggccaaaggttggcagatagaggcaactcccaggccagtgagctttacttgccgtgtaaaaggaggaaaggggtggaaaaaaaccgactttctgcatttaactacaaaaaaagtttatgtttagtttggtagaggtgttatgtataatgctttgttaaagaaccccctttccgtgccactggtgaatagggattgatgaatgggaagagttgagtcagaccagtaagcccgtcctgggttccttgaacatgttcccatgtaggaggtaaaaccaattctggaagtgtctatgaacttccataaataactttaattttagtataatgatggtcttggattgtctgacctcagtagctattaaataacatcaagtaacatctgtatcaggccctacatagaacatacagttgagtgggagtaaacaaaaagataaacatgcgtgttaatggctgttcgagagaaatcggaataaaagcctaaacaggaacaacttcatcacagtgttgatgttggacacatagatggtgatggcaaaggtttagaacacattattttcaaagactaaatctaaaacccagagtaaacatcaatgctcagagttagcataatttggagctattcaggaattgcagagaaatgcattttcacagaaatcaagatgttatttttgtatactatatcacttagacaactgtgtttcatttgctgtaatcagtttttaaaagtcagatggaaagagcccctacagtcctcgccccccccctcgctttttccctccacccccacaaaaaaacaaaagaaaagggggtttgcctaa

SEQ ID NO: 79461 - DNA, 3345 bp, Homo sapiens
  misc_feature (2457)..(2457): n is a, c, g, or t
  misc_feature (3342)..(3342): n is a, c, g, or t
ggctctgattggactgccgaaccccgcgcgctgattggccgcgtgggcgaggcggaggagagccgtgcgcagcggcgtatgtggggccgtgtgcagacccgcgtgtggcgcaggcaaggaccctcaaaataaacagcctctaccttgcgagccgtcttccccaggcctgcgtccgagtctccgccgctgcgggcccgctccgacgcggaagatctgactgcagccatgagcagcaatgagtgcttcaagtgtggacgatctggccactgggcccgggaatgtcctactggtggaggccgtggtcgtggaatgagaagccgtggcagaggttggttttacctcggatagaggtttccagtttgtttcctcgtctcttccagatatttgttatcgctgtggtgagtctggtcatcttgccaaggattgtgatcttcaggaggatgcctgctataactgcggtagaggtggccacattgccaaggactgcaaggagcccaagagagagcgagagcaatgctgctacaactgtggcaaaccaggccatctggctcgtgactgcgaccatgcagatgagcagaaatgctattcttgtggagaattcggacacattcaaaaagactgcaccaaagtgaagtgctataggtgtggtgaaactggtcatgtagccatcaactgcagcaagacaagtgaagtcaactgttaccgctgtggcgagtcagggcaccttgcacgggaatgcacaattgaggctacagcctaattattttcctttgtcgcccctcctttttctgattgatggttgtattattttctctgaatcctcttcactggccaaaggttggcagatagaggcaactcccaggccagtgagctttacttgccgtgtaaaaggaggaaaggggtggaaaaaaaccgactttctgcatttaactacaaaccccctttccgtgccactggtgaatagggattgatgaatgggaagagttgagtcagaccagtaagcccgtcctgggttccttgaacatgttcccatgtaggaggtaaaaccaattctggaagtgtctatgaacttccataaataactttaattttagtataatgatggtcttggattgtctgacctcagtagctattaaataacatcaagtaacatctgtatcaggccctacatagaacatacagttgagtgggagtaaacaaaaagataaacatgcgtgttaatggctgttcgagagaaatcggaataaaagcctaaacaggaacaacttcatcacagtgttgatgttggacacatagatggtgatggcaaaggtttagaacacattattttcaaagactaaatctaaaacccagagtaaacatcaatgctcagagttagcataatttggagctattcaggaattgcagagaaatgcattttcacagaaatcaagatgttatttttgtatactatatcacttagacaactgtgtttcatttgctgtaatcagtttttaaaagtcagatggaaagagcaactgaagtcctagaaaatagaaatgtaattttaaactattccaataaagctggaggaggaaggggagtttgactaaagttctttttgtttgtttcaaattttcattaatgtatatagtgcaaaataccatattaaagaggggaatgtggaggactgaaagctgacagtttggacttttctttttgtacttaagtcatgtcttcaataatgaaaattgctgttaaaaggatgtatgggatttagatacttttgcaaagctatagaaaattcactttgtaatctgttataataatgcccttgagttctgtgttcagtctgaacaggttttttggtggtggtggttttgttttgttttggagacggagtctcactcttgtcgcccaggctggagtgcaggcttggctcactgcaacctccacctcccgggttcaagcaattctcctgcctcagcctcctgagtagctgggattacaggcacccgccaccaccccccgctaattttttgtatttttatttttattttatttttttatttttttttgagacagagtgtcgctctgttgcccaggctggagtgtagtggtgcgatctcggctcactgcaagctccgcctcctgggttcgcgccattctcctgcctcagcctcctgagtagctggggctacaggtacccgccaccgcgcccagctaattttttttttttgtatttttagtaaagacggggtttcacggtgttagccaggatggtctcaatctcctgacctcgtgatccgcccgccttggcctcccaaagtgctgggatcacaggcgtgagccaccgcgcccggcctattttttgtatttttagtagagactgggtttcatcatgttggtcgggctggtctccaactcctgacctcaggtgatccacctgccccgccccccaaagtgctagtgttacangtgcgagccaccgtgtccggccgattctgaacagttttaataccattgctatttttgtgtttttcctgggcctttttttttttttttttttttttgagacagtctcgctctgttgcccaggctagagtgcaatggtgcaatctcagctcactgcaacctccaccccccacccccacaccccgttcaagtaattctcctgcctcagcctcccaaatagctgggattacaggtgtccgccaccacacccagctaatttttgttatttttagtagagatggggtttcactgtgttggtcaggctggtctccaactgttgccctcaggtgagccactgtgccccaccttttcctgggtttcataaggatctgaagtggtggattccttgtttttgctagtatctcatttagagttgagatggaccttaaaactcatctgttttaactcactttttaatagatgagttaaacttaatttacttaaggatgtacagttagagcctggaacttcaaccattattcactccccatgccctgtttccccccacttcgaaattaaatgcggttagcatcatatagttcattttccccctccatgctgctgtgtgattcttgactttgggtatgagtttttcatccttcatgcagggttctgtcagttcatggtatagtgattcagtgttaaaatggtggtgtctcagctgtgctgtgcacattccaaccttgtcaaattaatagtcctgagcaagcaagaaaaagaggtaataacatacccatttctttatgaatataagcttataatattttttcatgtgctatttttactgagcaaattgtatgtctcacatgttaacacaataaatatcttgacaattttattttctaccanaaa

SEQ ID NO: 79462 - DNA, 3277 bp, Homo sapiens
  misc_feature (2389)..(2389): n is a, c, g, or t
  misc_feature (3274)..(3274): n is a, c, g, or t
agctagtacgaggctgggtgttaattggccgaggcttcccccggctgtgttcgagtctccgcgctgcgggccgctccgacgtcgggaagatctgactgcagccatgagcagcaatgagtgcttcaagtgtggacgatctggccactgggcccgggaatgtcctactggtggaggccgtggtcgtggaatgagaagccgtggcagaggttggttttacctcggatagaggtttccagtttgtttcctcgtctcttccagatatttgttatcgctgtggtgagtctggtcatcttgccaaggattgtgatcttcaggaggatgcctgctataactgcggtagaggtggccacattgccaaggactgcaaggagcccaagagagagcgagagcaatgctgctacaactgtggcaaaccaggccatctggctcgtgactgcgaccatgcagatgagcagaaatgctattcttgtggagaattcggacacattcaaaaagactgcaccaaagtgaagtgctataggtgtggtgaaactggtcatgtagccatcaactgcagcaagacaagtgaagtcaactgttaccgctgtggcgagtcagggcaccttgcacgggaatgcacaattgaggctacagcctaattattttcctttgtcgcccctcctttttctgattgatggttgtattattttctctgaatcctcttcactggccaaaggttggcagatagaggcaactcccaggccagtgagctttacttgccgtgtaaaaggaggaaaggggtggaaaaaaaccgactttctgcatttaactacaaaaaaagtttatgtttagtttggtagaggtgttatgtataatgctttgttaaagaaccccctttccgtgccactggtgaatagggattgatgaatgggaagagttgagtcagaccagtaagcccgtcctgggttccttgaacatgttcccatgtaggaggtaaaaccaattctggaagtgtctatgaacttccataaataactttaattttagtataatgatggtcttggattgtctgacctcagtagctattaaataacatcaagtaacatctgtatcaggccctacatagaacatacagttgagtgggagtaaacaaaaagataaacatgcgtgttaatggctgttcgagagaaatcggaataaaagcctaaacaggaacaacttcatcacagtgttgatgttggacacatagatggtgatggcaaaggtttagaacacattattttcaaagactaaatctaaaacccagagtaaacatcaatgctcagagttagcataatttggagctattcaggaattgcagagaaatgcattttcacagaaatcaagatgttatttttgtatactatatcacttagacaactgtgtttcatttgctgtaatcagtttttaaaagtcagatggaaagagcaactgaagtcctagaaaatagaaatgtaattttaaactattccaataaagctggaggaggaaggggagtttgactaaagttctttttgtttgtttcaaattttcattaatgtatatagtgcaaaataccatattaaagaggggaatgtggaggactgaaagctgacagtttggacttttctttttgtacttaagtcatgtcttcaataatgaaaattgctgttaaaaggatgtatgggatttagatacttttgcaaagctatagaaaattcactttgtaatctgttataataatgcccttgagttctgtgttcagtctgaacaggttttttggtggtggtggttttgttttgttttggagacggagtctcactcttgtcgcccaggctggagtgcaggcttggctcactgcaacctccacctcccgggttcaagcaattctcctgcctcagcctcctgagtagctgggattacaggcacccgccaccaccccccgctaattttttgtatttttatttttattttatttttttatttttttttgagacagagtgtcgctctgttgcccaggctggagtgtagtggtgcgatctcggctcactgcaagctccgcctcctgggttcgcgccattctcctgcctcagcctcctgagtagctggggctacaggtacccgccaccgcgcccagctaattttttttttttgtatttttagtaaagacggggtttcacggtgttagccaggatggtctcaatctcctgacctcgtgatccgcccgccttggcctcccaaagtgctgggatcacaggcgtgagccaccgcgcccggcctattttttgtatttttagtagagactgggtttcatcatgttggtcgggctggtctccaactcctgacctcaggtgatccacctgccccgccccccaaagtgctagtgttacangtgcgagccaccgtgtccggccgattctgaacagttttaataccattgctatttttgtgtttttcctgggcctttttttttttttttttttttttgagacagtctcgctctgttgcccaggctagagtgcaatggtgcaatctcagctcactgcaacctccaccccccacccccacaccccgttcaagtaattctcctgcctcagcctcccaaatagctgggattacaggtgtccgccaccacacccagctaatttttgttatttttagtagagatggggtttcactgtgttggtcaggctggtctccaactgttgccctcaggtgagccactgtgccccaccttttcctgggtttcataaggatctgaagtggtggattccttgtttttgctagtatctcatttagagttgagatggaccttaaaactcatctgttttaactcactttttaatagatgagttaaacttaatttacttaaggatgtacagttagagcctggaacttcaaccattattcactccccatgccctgtttccccccacttcgaaattaaatgcggttagcatcatatagttcattttccccctccatgctgctgtgtgattcttgactttgggtatgagtttttcatccttcatgcagggttctgtcagttcatggtatagtgattcagtgttaaaatggtggtgtctcagctgtgctgtgcacattccaaccttgtcaaattaatagtcctgagcaagcaagaaaaagaggtaataacatacccatttctttatgaatataagcttataatattttttcatgtgctatttttactgagcaaattgtatgtctcacatgttaacacaataaatatcttgacaattttattttctaccanaaa

SEQ ID NO: 79463 - DNA, 1392 bp, Homo sapiens
ggctctgattggactgccgaaccccgcgcgctgattggccgcgtgggcgaggcggaggagagccgtgcgcagcggcgtatgtggggccgtgtgcagacccgcgtgtggcgcaggcaaggaccctcaaaataaacagcctctaccttgcgagccgtcttccccaggcctgcgtccgagtctccgccgctgcgggcccgctccgacgcggaagatctgactgcagccatgagcagcaatgagtgcttcaagtgtggacgatctggccactgggcccgggaatgtcctactggtggaggccgtggtcgtggaatgagaagccgtggcagaggttggttttacctcggatagaggtttccagtttgtttcctcgtctcttccagatatttgttatcgctgtggtgagtctggtcatcttgccaaggattgtgatcttcaggaggatgcctgctataactgcggtagaggtggccacattgccaaggactgcaaggagcccaagagagagcgagagcaatgctgctacaactgtggcaaaccaggccatctggctcgtgactgcgaccatgcagatgagcagaaatgctattcttgtggagaattcggacacattcaaaaagactgcaccaaagtgaagtgctataggtgtggtgaaactggtcatgtagccatcaactgcagcaagacaagtgaagtcaactgttaccgctgtggcgagtcagggcaccttgcacgggaatgcacaattgaggctacagcctaattattttcctttgtcgcccctcctttttctgattgatggttgtattattttctctgaatcctcttcactggccaaaggttggcagatagaggcaactcccaggccagtgagctttacttgccgtgtaaaaggaggaaaggggtggaaaaaaaccgactttctgcatttaactacaaaaaaagtttatgtttagtttggtagaggtgttatgtataatgctttgttaaagaaccccctttccgtgccactggtgaatagggattgatgaatgggaagagttgagtcagaccagtaagcccgtcctgggttccttgaacatgttcccatgtaggaggtaaaaccaattctggaagtgtctatgaacttccataaataactttaattttagtataatgatggtcttggattgtctgacctcagtagctattaaataacatcaagtaacatctgtatcaggccctacatagaacatacagttgagtgggagtaaacaaaaagataaacatgcgtgttaatggctgttcgagagaaatcggaataaaagcctaaacaggaacaacttcatcacagtgttgatgttggacacatagataggcggaggtggaaagggcccggttaccggcctcgtgccg

SEQ ID NO: 79464 - DNA, 3212 bp, Homo sapiens
  misc_feature (2324)..(2324): n is a, c, g, or t
  misc_feature (3209)..(3209): n is a, c, g, or t
aagcagtggtatcaacgcagagtgcccattacggccgggtgagcagcaatgagtgcttcaagtgtggacgatctggccactgggcccgggaatgtcctactggtggaggccgtggtcgtggaatgagaagccgtggcagaggttggttttacctcggatagaggtttccagtttgtttcctcgtctcttccagatatttgttatcgctgtggtgagtctggtcatcttgccaaggattgtgatcttcaggaggatgcctgctataactgcggtagaggtggccacattgccaaggactgcaaggagcccaagagagagcgagagcaatgctgctacaactgtggcaaaccaggccatctggctcgtgactgcgaccatgcagatgagcagaaatgctattcttgtggagaattcggacacattcaaaaagactgcaccaaagtgaagtgctataggtgtggtgaaactggtcatgtagccatcaactgcagcaagacaagtgaagtcaactgttaccgctgtggcgagtcagggcaccttgcacgggaatgcacaattgaggctacagcctaattattttcctttgtcgcccctcctttttctgattgatggttgtattattttctctgaatcctcttcactggccaaaggttggcagatagaggcaactcccaggccagtgagctttacttgccgtgtaaaaggaggaaaggggtggaaaaaaaccgactttctgcatttaactacaaaaaaagtttatgtttagtttggtagaggtgttatgtataatgctttgttaaagaaccccctttccgtgccactggtgaatagggattgatgaatgggaagagttgagtcagaccagtaagcccgtcctgggttccttgaacatgttcccatgtaggaggtaaaaccaattctggaagtgtctatgaacttccataaataactttaattttagtataatgatggtcttggattgtctgacctcagtagctattaaataacatcaagtaacatctgtatcaggccctacatagaacatacagttgagtgggagtaaacaaaaagataaacatgcgtgttaatggctgttcgagagaaatcggaataaaagcctaaacaggaacaacttcatcacagtgttgatgttggacacatagatggtgatggcaaaggtttagaacacattattttcaaagactaaatctaaaacccagagtaaacatcaatgctcagagttagcataatttggagctattcaggaattgcagagaaatgcattttcacagaaatcaagatgttatttttgtatactatatcacttagacaactgtgtttcatttgctgtaatcagtttttaaaagtcagatggaaagagcaactgaagtcctagaaaatagaaatgtaattttaaactattccaataaagctggaggaggaaggggagtttgactaaagttctttttgtttgtttcaaattttcattaatgtatatagtgcaaaataccatattaaagaggggaatgtggaggactgaaagctgacagtttggacttttctttttgtacttaagtcatgtcttcaataatgaaaattgctgttaaaaggatgtatgggatttagatacttttgcaaagctatagaaaattcactttgtaatctgttataataatgcccttgagttctgtgttcagtctgaacaggttttttggtggtggtggttttgttttgttttggagacggagtctcactcttgtcgcccaggctggagtgcaggcttggctcactgcaacctccacctcccgggttcaagcaattctcctgcctcagcctcctgagtagctgggattacaggcacccgccaccaccccccgctaattttttgtatttttatttttattttatttttttatttttttttgagacagagtgtcgctctgttgcccaggctggagtgtagtggtgcgatctcggctcactgcaagctccgcctcctgggttcgcgccattctcctgcctcagcctcctgagtagctggggctacaggtacccgccaccgcgcccagctaattttttttttttgtatttttagtaaagacggggtttcacggtgttagccaggatggtctcaatctcctgacctcgtgatccgcccgccttggcctcccaaagtgctgggatcacaggcgtgagccaccgcgcccggcctattttttgtatttttagtagagactgggtttcatcatgttggtcgggctggtctccaactcctgacctcaggtgatccacctgccccgccccccaaagtgctagtgttacangtgcgagccaccgtgtccggccgattctgaacagttttaataccattgctatttttgtgtttttcctgggcctttttttttttttttttttttttgagacagtctcgctctgttgcccaggctagagtgcaatggtgcaatctcagctcactgcaacctccaccccccacccccacaccccgttcaagtaattctcctgcctcagcctcccaaatagctgggattacaggtgtccgccaccacacccagctaatttttgttatttttagtagagatggggtttcactgtgttggtcaggctggtctccaactgttgccctcaggtgagccactgtgccccaccttttcctgggtttcataaggatctgaagtggtggattccttgtttttgctagtatctcatttagagttgagatggaccttaaaactcatctgttttaactcactttttaatagatgagttaaacttaatttacttaaggatgtacagttagagcctggaacttcaaccattattcactccccatgccctgtttccccccacttcgaaattaaatgcggttagcatcatatagttcattttccccctccatgctgctgtgtgattcttgactttgggtatgagtttttcatccttcatgcagggttctgtcagttcatggtatagtgattcagtgttaaaatggtggtgtctcagctgtgctgtgcacattccaaccttgtcaaattaatagtcctgagcaagcaagaaaaagaggtaataacatacccatttctttatgaatataagcttataatattttttcatgtgctatttttactgagcaaattgtatgtctcacatgttaacacaataaatatcttgacaattttattttctaccanaaa

SEQ ID NO: 79465 - DNA, 3365 bp, Homo sapiens
  misc_feature (2477)..(2477): n is a, c, g, or t
  misc_feature (3362)..(3362): n is a, c, g, or t
ggctctgattggactgccgaaccccgcgcgctgattggccgcgtgggcgaggcggaggagagccgtgcgcagcggcgtatgtggggccgtgtgcagacccgcgtgtggcgcaggcaaggaccctcaaaataaacagcctctaccttgcgagccgtcttccccaggcctgcgtccgagtctccgccgctgcgggcccgctccgacgcggaagatctgactgcagccatgagcagcaatgagtgcttcaagtgtggacgatctggccactgggcccgggaatgtcctactggtggaggccgtggtcgtggaatgagaagccgtggcagaggttggttttacctcggatagaggtgttatcgctgtggtgagtctggtcatcttgccaaggattgtgatcttcaggaggatgcctgctataactgcggtagaggtggccacattgccaaggactgcaaggagcccaagagagagcgagagcaatgctgctacaactgtggcaaaccaggccatctggctcgtgactgcgaccatgcagatgagcagaaatgctattcttgtggagaattcggacacattcaaaaagactgcaccaaagtgaagtgctataggtgtggtgaaactggtcatgtagccatcaactgcagcaagacaagtgaagtcaactgttaccgctgtggcgagtcagggcaccttgcacgggaatgcacaattgaggctacagcctaattattttcctttgtcgcccctcctttttctgattgatggttgtattattttctctgaatcctcttcactggccaaaggttggcagatagaggcaactcccaggccagtgagctttacttgccgtgtaaaaggaggaaaggggtggaaaaaaaccgactttctgcatttaactacaaaaaaagtttatgtttagtttggtagaggtgttatgtataatgctttgttaaagaaccccctttccgtgccactggtgaatagggattgatgaatgggaagagttgagtcagaccagtaagcccgtcctgggttccttgaacatgttcccatgtaggaggtaaaaccaattctggaagtgtctatgaacttccataaataactttaattttagtataatgatggtcttggattgtctgacctcagtagctattaaataacatcaagtaacatctgtatcaggccctacatagaacatacagttgagtgggagtaaacaaaaagataaacatgcgtgttaatggctgttcgagagaaatcggaataaaagcctaaacaggaacaacttcatcacagtgttgatgttggacacatagatggtgatggcaaaggtttagaacacattattttcaaagactaaatctaaaacccagagtaaacatcaatgctcagagttagcataatttggagctattcaggaattgcagagaaatgcattttcacagaaatcaagatgttatttttgtatactatatcacttagacaactgtgtttcatttgctgtaatcagtttttaaaagtcagatggaaagagcaactgaagtcctagaaaatagaaatgtaattttaaactattccaataaagctggaggaggaaggggagtttgactaaagttctttttgtttgtttcaaattttcattaatgtatatagtgcaaaataccatattaaagaggggaatgtggaggactgaaagctgacagtttggacttttctttttgtacttaagtcatgtcttcaataatgaaaattgctgttaaaaggatgtatgggatttagatacttttgcaaagctatagaaaattcactttgtaatctgttataataatgcccttgagttctgtgttcagtctgaacaggttttttggtggtggtggttttgttttgttttggagacggagtctcactcttgtcgcccaggctggagtgcaggcttggctcactgcaacctccacctcccgggttcaagcaattctcctgcctcagcctcctgagtagctgggattacaggcacccgccaccaccccccgctaattttttgtatttttatttttattttatttttttatttttttttgagacagagtgtcgctctgttgcccaggctggagtgtagtggtgcgatctcggctcactgcaagctccgcctcctgggttcgcgccattctcctgcctcagcctcctgagtagctggggctacaggtacccgccaccgcgcccagctaattttttttttttgtatttttagtaaagacggggtttcacggtgttagccaggatggtctcaatctcctgacctcgtgatccgcccgccttggcctcccaaagtgctgggatcacaggcgtgagccaccgcgcccggcctattttttgtatttttagtagagactgggtttcatcatgttggtcgggctggtctccaactcctgacctcaggtgatccacctgccccgccccccaaagtgctagtgttacangtgcgagccaccgtgtccggccgattctgaacagttttaataccattgctatttttgtgtttttcctgggcctttttttttttttttttttttttgagacagtctcgctctgttgcccaggctagagtgcaatggtgcaatctcagctcactgcaacctccaccccccacccccacaccccgttcaagtaattctcctgcctcagcctcccaaatagctgggattacaggtgtccgccaccacacccagctaatttttgttatttttagtagagatggggtttcactgtgttggtcaggctggtctccaactgttgccctcaggtgagccactgtgccccaccttttcctgggtttcataaggatctgaagtggtggattccttgtttttgctagtatctcatttagagttgagatggaccttaaaactcatctgttttaactcactttttaatagatgagttaaacttaatttacttaaggatgtacagttagagcctggaacttcaaccattattcactccccatgccctgtttccccccacttcgaaattaaatgcggttagcatcatatagttcattttccccctccatgctgctgtgtgattcttgactttgggtatgagtttttcatccttcatgcagggttctgtcagttcatggtatagtgattcagtgttaaaatggtggtgtctcagctgtgctgtgcacattccaaccttgtcaaattaatagtcctgagcaagcaagaaaaagaggtaataacatacccatttctttatgaatataagcttataatattttttcatgtgctatttttactgagcaaattgtatgtctcacatgttaacacaataaatatcttgacaattttattttctaccanaaa

SEQ ID NO: 79466 - DNA, 3343 bp, Homo sapiens
  misc_feature (2455)..(2455): n is a, c, g, or t
  misc_feature (3340)..(3340): n is a, c, g, or t
ggctctgattggactgccgaaccccgcgcgctgattggccgcgtgggcgaggcggaggagagccgtgcgcagcggcgtatgtggggccgtgtgcagacccgcgtgtggcgcaggcaaggaccctcaaaataaacagcctctaccttgcgagccgtcttccccaggcctgcgtccgagtctccgccgctgcgggcccgctccgacgcggaagatctgactgcagccatgagcagcaatgagtgcttcaagtgtggacgatctggccactgggcccgggaatgtcctactggtggaggccgtggtcgtggaatgagaagccgtggcagaggtgttatcgctgtggtgagtctggtcatcttgccaaggattgtgatcttcaggaggatgcctgctataactgcggtagaggtggccacattgccaaggactgcaaggagcccaagagagagcgagagcaatgctgctacaactgtggcaaaccaggccatctggctcgtgactgcgaccatgcagatgagcagaaatgctattcttgtggagaattcggacacattcaaaaagactgcaccaaagtgaagtgctataggtgtggtgaaactggtcatgtagccatcaactgcagcaagacaagtgaagtcaactgttaccgctgtggcgagtcagggcaccttgcacgggaatgcacaattgaggctacagcctaattattttcctttgtcgcccctcctttttctgattgatggttgtattattttctctgaatcctcttcactggccaaaggttggcagatagaggcaactcccaggccagtgagctttacttgccgtgtaaaaggaggaaaggggtggaaaaaaaccgactttctgcatttaactacaaaaaaagtttatgtttagtttggtagaggtgttatgtataatgctttgttaaagaaccccctttccgtgccactggtgaatagggattgatgaatgggaagagttgagtcagaccagtaagcccgtcctgggttccttgaacatgttcccatgtaggaggtaaaaccaattctggaagtgtctatgaacttccataaataactttaattttagtataatgatggtcttggattgtctgacctcagtagctattaaataacatcaagtaacatctgtatcaggccctacatagaacatacagttgagtgggagtaaacaaaaagataaacatgcgtgttaatggctgttcgagagaaatcggaataaaagcctaaacaggaacaacttcatcacagtgttgatgttggacacatagatggtgatggcaaaggtttagaacacattattttcaaagactaaatctaaaacccagagtaaacatcaatgctcagagttagcataatttggagctattcaggaattgcagagaaatgcattttcacagaaatcaagatgttatttttgtatactatatcacttagacaactgtgtttcatttgctgtaatcagtttttaaaagtcagatggaaagagcaactgaagtcctagaaaatagaaatgtaattttaaactattccaataaagctggaggaggaaggggagtttgactaaagttctttttgtttgtttcaaattttcattaatgtatatagtgcaaaataccatattaaagaggggaatgtggaggactgaaagctgacagtttggacttttctttttgtacttaagtcatgtcttcaataatgaaaattgctgttaaaaggatgtatgggatttagatacttttgcaaagctatagaaaattcactttgtaatctgttataataatgcccttgagttctgtgttcagtctgaacaggttttttggtggtggtggttttgttttgttttggagacggagtctcactcttgtcgcccaggctggagtgcaggcttggctcactgcaacctccacctcccgggttcaagcaattctcctgcctcagcctcctgagtagctgggattacaggcacccgccaccaccccccgctaattttttgtatttttatttttattttatttttttatttttttttgagacagagtgtcgctctgttgcccaggctggagtgtagtggtgcgatctcggctcactgcaagctccgcctcctgggttcgcgccattctcctgcctcagcctcctgagtagctggggctacaggtacccgccaccgcgcccagctaattttttttttttgtatttttagtaaagacggggtttcacggtgttagccaggatggtctcaatctcctgacctcgtgatccgcccgccttggcctcccaaagtgctgggatcacaggcgtgagccaccgcgcccggcctattttttgtatttttagtagagactgggtttcatcatgttggtcgggctggtctccaactcctgacctcaggtgatccacctgccccgccccccaaagtgctagtgttacangtgcgagccaccgtgtccggccgattctgaacagttttaataccattgctatttttgtgtttttcctgggcctttttttttttttttttttttttgagacagtctcgctctgttgcccaggctagagtgcaatggtgcaatctcagctcactgcaacctccaccccccacccccacaccccgttcaagtaattctcctgcctcagcctcccaaatagctgggattacaggtgtccgccaccacacccagctaatttttgttatttttagtagagatggggtttcactgtgttggtcaggctggtctccaactgttgccctcaggtgagccactgtgccccaccttttcctgggtttcataaggatctgaagtggtggattccttgtttttgctagtatctcatttagagttgagatggaccttaaaactcatctgttttaactcactttttaatagatgagttaaacttaatttacttaaggatgtacagttagagcctggaacttcaaccattattcactccccatgccctgtttccccccacttcgaaattaaatgcggttagcatcatatagttcattttccccctccatgctgctgtgtgattcttgactttgggtatgagtttttcatccttcatgcagggttctgtcagttcatggtatagtgattcagtgttaaaatggtggtgtctcagctgtgctgtgcacattccaaccttgtcaaattaatagtcctgagcaagcaagaaaaagaggtaataacatacccatttctttatgaatataagcttataatattttttcatgtgctatttttactgagcaaattgtatgtctcacatgttaacacaataaatatcttgacaattttattttctaccanaaa

SEQ ID NO: 79467 - DNA, 3494 bp, Homo sapiens
  misc_feature (2606)..(2606): n is a, c, g, or t
  misc_feature (3491)..(3491): n is a, c, g, or t
ggctctgattggactgccgaaccccgcgcgctgattggccgcgtgggcgaggcggaggagagccgtgcgcagcggcgtatgtggggccgtgtgcagacccgcgtgtggcgcaggcaaggaccctcaaaataaacagcctctaccttgcgagccgtcttccccaggcctgcgtccgagtctccgccgctgcgggcccgctccgacgcggaagatctgactgcagccatgagcagcaatgagtgcttcaagtgtggacgatctggccactgggcccgggaatgtcctactggtggaggccgtggtcgtggaatgagaagccgtggcagaggttggttttacctcggatagaggtattttgtcgaatagaaaaatttgaagtacttcagtatttgttagtatcaagactggtctgactagccgaattctttgtttttgctcaaaacaggtttccagtttgtttcctcgtctcttccagatatttgttatcgctgtggtgagtctggtcatcttgccaaggattgtgatcttcaggaggatgcctgctataactgcggtagaggtggccacattgccaaggactgcaaggagcccaagagagagcgagagcaatgctgctacaactgtggcaaaccaggccatctggctcgtgactgcgaccatgcagatgagcagaaatgctattcttgtggagaattcggacacattcaaaaagactgcaccaaagtgaagtgctataggtgtggtgaaactggtcatgtagccatcaactgcagcaagacaagtgaagtcaactgttaccgctgtggcgagtcagggcaccttgcacgggaatgcacaattgaggctacagcctaattattttcctttgtcgcccctcctttttctgattgatggttgtattattttctctgaatcctcttcactggccaaaggttggcagatagaggcaactcccaggccagtgagctttacttgccgtgtaaaaggaggaaaggggtggaaaaaaaccgactttctgcatttaactacaaaaaaagtttatgtttagtttggtagaggtgttatgtataatgctttgttaaagaaccccctttccgtgccactggtgaatagggattgatgaatgggaagagttgagtcagaccagtaagcccgtcctgggttccttgaacatgttcccatgtaggaggtaaaaccaattctggaagtgtctatgaacttccataaataactttaattttagtataatgatggtcttggattgtctgacctcagtagctattaaataacatcaagtaacatctgtatcaggccctacatagaacatacagttgagtgggagtaaacaaaaagataaacatgcgtgttaatggctgttcgagagaaatcggaataaaagcctaaacaggaacaacttcatcacagtgttgatgttggacacatagatggtgatggcaaaggtttagaacacattattttcaaagactaaatctaaaacccagagtaaacatcaatgctcagagttagcataatttggagctattcaggaattgcagagaaatgcattttcacagaaatcaagatgttatttttgtatactatatcacttagacaactgtgtttcatttgctgtaatcagtttttaaaagtcagatggaaagagcaactgaagtcctagaaaatagaaatgtaattttaaactattccaataaagctggaggaggaaggggagtttgactaaagttctttttgtttgtttcaaattttcattaatgtatatagtgcaaaataccatattaaagaggggaatgtggaggactgaaagctgacagtttggacttttctttttgtacttaagtcatgtcttcaataatgaaaattgctgttaaaaggatgtatgggatttagatacttttgcaaagctatagaaaattcactttgtaatctgttataataatgcccttgagttctgtgttcagtctgaacaggttttttggtggtggtggttttgttttgttttggagacggagtctcactcttgtcgcccaggctggagtgcaggcttggctcactgcaacctccacctcccgggttcaagcaattctcctgcctcagcctcctgagtagctgggattacaggcacccgccaccaccccccgctaattttttgtatttttatttttattttatttttttatttttttttgagacagagtgtcgctctgttgcccaggctggagtgtagtggtgcgatctcggctcactgcaagctccgcctcctgggttcgcgccattctcctgcctcagcctcctgagtagctggggctacaggtacccgccaccgcgcccagctaattttttttttttgtatttttagtaaagacggggtttcacggtgttagccaggatggtctcaatctcctgacctcgtgatccgcccgccttggcctcccaaagtgctgggatcacaggcgtgagccaccgcgcccggcctattttttgtatttttagtagagactgggtttcatcatgttggtcgggctggtctccaactcctgacctcaggtgatccacctgccccgccccccaaagtgctagtgttacangtgcgagccaccgtgtccggccgattctgaacagttttaataccattgctatttttgtgtttttcctgggcctttttttttttttttttttttttgagacagtctcgctctgttgcccaggctagagtgcaatggtgcaatctcagctcactgcaacctccaccccccacccccacaccccgttcaagtaattctcctgcctcagcctcccaaatagctgggattacaggtgtccgccaccacacccagctaatttttgttatttttagtagagatggggtttcactgtgttggtcaggctggtctccaactgttgccctcaggtgagccactgtgccccaccttttcctgggtttcataaggatctgaagtggtggattccttgtttttgctagtatctcatttagagttgagatggaccttaaaactcatctgttttaactcactttttaatagatgagttaaacttaatttacttaaggatgtacagttagagcctggaacttcaaccattattcactccccatgccctgtttccccccacttcgaaattaaatgcggttagcatcatatagttcattttccccctccatgctgctgtgtgattcttgactttgggtatgagtttttcatccttcatgcagggttctgtcagttcatggtatagtgattcagtgttaaaatggtggtgtctcagctgtgctgtgcacattccaaccttgtcaaattaatagtcctgagcaagcaagaaaaagaggtaataacatacccatttctttatgaatataagcttataatattttttcatgtgctatttttactgagcaaattgtatgtctcacatgttaacacaataaatatcttgacaattttattttctaccanaaa

SEQ ID NO: 79468 - DNA, 1380 bp, Homo sapiens
ggctctgattggactgccgaaccccgcgcgctgattggccgcgtgggcgaggcggaggagagccgtgcgcagcggcgtatgtggggccgtgtgcagacccgcgtgtggcgcaggcaaggaccctcaaaataaacagcctctaccttgcgagccgtcttccccaggcctgcgtccgagtctccgccgctgcgggcccgctccgacgcggaagatctgactgcagccatgagcagcaatgagtgcttcaagtgtggacgatctggccactgggcccgggaatgtcctactggtggaggccgtggtcgtggaatgagaagccgtggcagaggttggttttacctcggatagaggtttccagtttgtttcctcgtctcttccagatatttgttatcgctgtggtgagtctggtcatcttgccaaggattgtgatcttcaggaggatgcctgctataactgcggtagaggtggccacattgccaaggactgcaaggagcccaagagagagcgagagcaatgctgctacaactgtggcaaaccaggccatctggctcgtgactgcgaccatgcagatgagcagaaatgctattcttgtggagaattcggacacattcaaaaagactgcaccaaagtgaagtgctataggtgtggtgaaactggtcatgtagccatcaactgcagcaagacaagtgaagtcaactgttaccgctgtggcgagtcagggcaccttgcacgggaatgcacaattgaggctacagcctaattattttcctttgtcgcccctcctttttctgattgatggttgtattattttctctgaatcctcttcactggccaaaggttggcagatagaggcaactcccaggccagtgagctttacttgccgtgtaaaaggaggaaaggggtggaaaaaaaccgactttctgcatttaactacaaaaaaagtttatgtttagtttggtagaggtgttatgtataatgctttgttaaagaaccccctttccgtgccactggtgaatagggattgatgaatgggaagagttgagtcagaccagtaagcccgtcctgggttccttgaacatgttcccatgtaggaggtaaaaccaattctggaagtgtctatgaacttccataaataactttaattttagtataatgatggtcttggattgtctgacctcagtagctattaaataacatcaagtaacatctgtatcaggccctacatagaacatacagttgagtgggagtaaacaaaaagataaacatgcgtgttaatggctgttcaggcaagggaatcacttgaacccgggggacagaggttgcagtgagccaagatcgcacactgtactcagacctagtgacagagcaagactccatctc

SEQ ID NO: 79469 - DNA, 3339 bp, Homo sapiens
  misc_feature (2451)..(2451): n is a, c, g, or t
  misc_feature (3336)..(3336): n is a, c, g, or t
ggctctgattggactgccgaaccccgcgcgctgattggccgcgtgggcgaggcggaggagagccgtgcgcagcggcgtatgtggggccgtgtgcagacccgcgtgtggcgcaggcaaggaccctcaaaataaacagcctctaccttgcgagccgtcttccccaggcctgcgtccgagtctccgccgctgcgggcccgctccgacgcggaagatctgactgcagccatgagcagcaatgagtgcttcaagtgtggacgatctggccactgggcccgggaatgtcctactggtggaggccgtggtcgtggaatgagaagccgtggcagaggttggttttacctcggatagaggtttccagtttgtttcctcgtctcttccagatatttgttatcgctgtggtgagtctggtcatcttgccaaggactgcaaggagcccaagagagagcgagagcaatgctgctacaactgtggcaaaccaggccatctggctcgtgactgcgaccatgcagatgagcagaaatgctattcttgtggagaattcggacacattcaaaaagactgcaccaaagtgaagtgctataggtgtggtgaaactggtcatgtagccatcaactgcagcaagacaagtgaagtcaactgttaccgctgtggcgagtcagggcaccttgcacgggaatgcacaattgaggctacagcctaattattttcctttgtcgcccctcctttttctgattgatggttgtattattttctctgaatcctcttcactggccaaaggttggcagatagaggcaactcccaggccagtgagctttacttgccgtgtaaaaggaggaaaggggtggaaaaaaaccgactttctgcatttaactacaaaaaaagtttatgtttagtttggtagaggtgttatgtataatgctttgttaaagaaccccctttccgtgccactggtgaatagggattgatgaatgggaagagttgagtcagaccagtaagcccgtcctgggttccttgaacatgttcccatgtaggaggtaaaaccaattctggaagtgtctatgaacttccataaataactttaattttagtataatgatggtcttggattgtctgacctcagtagctattaaataacatcaagtaacatctgtatcaggccctacatagaacatacagttgagtgggagtaaacaaaaagataaacatgcgtgttaatggctgttcgagagaaatcggaataaaagcctaaacaggaacaacttcatcacagtgttgatgttggacacatagatggtgatggcaaaggtttagaacacattattttcaaagactaaatctaaaacccagagtaaacatcaatgctcagagttagcataatttggagctattcaggaattgcagagaaatgcattttcacagaaatcaagatgttatttttgtatactatatcacttagacaactgtgtttcatttgctgtaatcagtttttaaaagtcagatggaaagagcaactgaagtcctagaaaatagaaatgtaattttaaactattccaataaagctggaggaggaaggggagtttgactaaagttctttttgtttgtttcaaattttcattaatgtatatagtgcaaaataccatattaaagaggggaatgtggaggactgaaagctgacagtttggacttttctttttgtacttaagtcatgtcttcaataatgaaaattgctgttaaaaggatgtatgggatttagatacttttgcaaagctatagaaaattcactttgtaatctgttataataatgcccttgagttctgtgttcagtctgaacaggttttttggtggtggtggttttgttttgttttggagacggagtctcactcttgtcgcccaggctggagtgcaggcttggctcactgcaacctccacctcccgggttcaagcaattctcctgcctcagcctcctgagtagctgggattacaggcacccgccaccaccccccgctaattttttgtatttttatttttattttatttttttatttttttttgagacagagtgtcgctctgttgcccaggctggagtgtagtggtgcgatctcggctcactgcaagctccgcctcctgggttcgcgccattctcctgcctcagcctcctgagtagctggggctacaggtacccgccaccgcgcccagctaattttttttttttgtatttttagtaaagacggggtttcacggtgttagccaggatggtctcaatctcctgacctcgtgatccgcccgccttggcctcccaaagtgctgggatcacaggcgtgagccaccgcgcccggcctattttttgtatttttagtagagactgggtttcatcatgttggtcgggctggtctccaactcctgacctcaggtgatccacctgccccgccccccaaagtgctagtgttacangtgcgagccaccgtgtccggccgattctgaacagttttaataccattgctatttttgtgtttttcctgggcctttttttttttttttttttttttgagacagtctcgctctgttgcccaggctagagtgcaatggtgcaatctcagctcactgcaacctccaccccccacccccacaccccgttcaagtaattctcctgcctcagcctcccaaatagctgggattacaggtgtccgccaccacacccagctaatttttgttatttttagtagagatggggtttcactgtgttggtcaggctggtctccaactgttgccctcaggtgagccactgtgccccaccttttcctgggtttcataaggatctgaagtggtggattccttgtttttgctagtatctcatttagagttgagatggaccttaaaactcatctgttttaactcactttttaatagatgagttaaacttaatttacttaaggatgtacagttagagcctggaacttcaaccattattcactccccatgccctgtttccccccacttcgaaattaaatgcggttagcatcatatagttcattttccccctccatgctgctgtgtgattcttgactttgggtatgagtttttcatccttcatgcagggttctgtcagttcatggtatagtgattcagtgttaaaatggtggtgtctcagctgtgctgtgcacattccaaccttgtcaaattaatagtcctgagcaagcaagaaaaagaggtaataacatacccatttctttatgaatataagcttataatattttttcatgtgctatttttactgagcaaattgtatgtctcacatgttaacacaataaatatcttgacaattttattttctaccanaaa

SEQ ID NO: 79470 - DNA, 2872 bp, Homo sapiens
  misc_feature (1984)..(1984): n is a, c, g, or t
  misc_feature (2869)..(2869): n is a, c, g, or t
gctgacctgaggttccctttctctgatcgctcgaccatgcagatgagcagaaatgctattcttgtggagaattcggacacattcaaaaagactgcaccaaagtgaagtgctataggtgtggtgaaactggtcatgtagccatcaactgcagcaagacaagtgaagtcaactgttaccgctgtggcgagtcagggcaccttgcacgggaatgcacaattgaggctacagcctaattattttcctttgtcgcccctcctttttctgattgatggttgtattattttctctgaatcctcttcactggccaaaggttggcagatagaggcaactcccaggccagtgagctttacttgccgtgtaaaaggaggaaaggggtggaaaaaaaccgactttctgcatttaactacaaaaaaagtttatgtttagtttggtagaggtgttatgtataatgctttgttaaagaaccccctttccgtgccactggtgaatagggattgatgaatgggaagagttgagtcagaccagtaagcccgtcctgggttccttgaacatgttcccatgtaggaggtaaaaccaattctggaagtgtctatgaacttccataaataactttaattttagtataatgatggtcttggattgtctgacctcagtagctattaaataacatcaagtaacatctgtatcaggccctacatagaacatacagttgagtgggagtaaacaaaaagataaacatgcgtgttaatggctgttcgagagaaatcggaataaaagcctaaacaggaacaacttcatcacagtgttgatgttggacacatagatggtgatggcaaaggtttagaacacattattttcaaagactaaatctaaaacccagagtaaacatcaatgctcagagttagcataatttggagctattcaggaattgcagagaaatgcattttcacagaaatcaagatgttatttttgtatactatatcacttagacaactgtgtttcatttgctgtaatcagtttttaaaagtcagatggaaagagcaactgaagtcctagaaaatagaaatgtaattttaaactattccaataaagctggaggaggaaggggagtttgactaaagttctttttgtttgtttcaaattttcattaatgtatatagtgcaaaataccatattaaagaggggaatgtggaggactgaaagctgacagtttggacttttctttttgtacttaagtcatgtcttcaataatgaaaattgctgttaaaaggatgtatgggatttagatacttttgcaaagctatagaaaattcactttgtaatctgttataataatgcccttgagttctgtgttcagtctgaacaggttttttggtggtggtggttttgttttgttttggagacggagtctcactcttgtcgcccaggctggagtgcaggcttggctcactgcaacctccacctcccgggttcaagcaattctcctgcctcagcctcctgagtagctgggattacaggcacccgccaccaccccccgctaattttttgtatttttatttttattttatttttttatttttttttgagacagagtgtcgctctgttgcccaggctggagtgtagtggtgcgatctcggctcactgcaagctccgcctcctgggttcgcgccattctcctgcctcagcctcctgagtagctggggctacaggtacccgccaccgcgcccagctaattttttttttttgtatttttagtaaagacggggtttcacggtgttagccaggatggtctcaatctcctgacctcgtgatccgcccgccttggcctcccaaagtgctgggatcacaggcgtgagccaccgcgcccggcctattttttgtatttttagtagagactgggtttcatcatgttggtcgggctggtctccaactcctgacctcaggtgatccacctgccccgccccccaaagtgctagtgttacangtgcgagccaccgtgtccggccgattctgaacagttttaataccattgctatttttgtgtttttcctgggcctttttttttttttttttttttttgagacagtctcgctctgttgcccaggctagagtgcaatggtgcaatctcagctcactgcaacctccaccccccacccccacaccccgttcaagtaattctcctgcctcagcctcccaaatagctgggattacaggtgtccgccaccacacccagctaatttttgttatttttagtagagatggggtttcactgtgttggtcaggctggtctccaactgttgccctcaggtgagccactgtgccccaccttttcctgggtttcataaggatctgaagtggtggattccttgtttttgctagtatctcatttagagttgagatggaccttaaaactcatctgttttaactcactttttaatagatgagttaaacttaatttacttaaggatgtacagttagagcctggaacttcaaccattattcactccccatgccctgtttccccccacttcgaaattaaatgcggttagcatcatatagttcattttccccctccatgctgctgtgtgattcttgactttgggtatgagtttttcatccttcatgcagggttctgtcagttcatggtatagtgattcagtgttaaaatggtggtgtctcagctgtgctgtgcacattccaaccttgtcaaattaatagtcctgagcaagcaagaaaaagaggtaataacatacccatttctttatgaatataagcttataatattttttcatgtgctatttttactgagcaaattgtatgtctcacatgttaacacaataaatatcttgacaattttattttctaccanaaa

SEQ ID NO: 79471 - DNA, 3264 bp, Homo sapiens
  misc_feature (2376)..(2376): n is a, c, g, or t
  misc_feature (3261)..(3261): n is a, c, g, or t
atccttaattaaattaattcccccccccccccccgagacccgcgtgtggcgcaggcaaggaccctcaaaataaacagcctctaccttgcgagccgtcttccccaggcctgcgtccgagtctccgccgctgcgggcccgctccgacgcggaagatctgactgcagccatgagcagcaatgagtgcttcaagtgtggacgatctggccactgggcccgggaatgtcctactggtggaggccgtggtcgtggaatgagaagccgtggcagaggtttccagtttgtttcctcgtctcttccagatatttgttatcgctgtggtgagtctggtcatcttgccaaggattgtgatcttcaggaggatgcctgctataactgcggtagaggtggccacattgccaaggactgcaaggagcccaagagagagcgagagcaatgctgctacaactgtggcaaaccaggccatctggctcgtgactgcgaccatgcagatgagcagaaatgctattcttgtggagaattcggacacattcaaaaagactgcaccaaagtgaagtgctataggtgtggtgaaactggtcatgtagccatcaactgcagcaagacaagtgaagtcaactgttaccgctgtggcgagtcagggcaccttgcacgggaatgcacaattgaggctacagcctaattattttcctttgtcgcccctcctttttctgattgatggttgtattattttctctgaatcctcttcactggccaaaggttggcagatagaggcaactcccaggccagtgagctttacttgccgtgtaaaaggaggaaaggggtggaaaaaaaccgactttctgcatttaactacaaaccccctttccgtgccactggtgaatagggattgatgaatgggaagagttgagtcagaccagtaagcccgtcctgggttccttgaacatgttcccatgtaggaggtaaaaccaattctggaagtgtctatgaacttccataaataactttaattttagtataatgatggtcttggattgtctgacctcagtagctattaaataacatcaagtaacatctgtatcaggccctacatagaacatacagttgagtgggagtaaacaaaaagataaacatgcgtgttaatggctgttcgagagaaatcggaataaaagcctaaacaggaacaacttcatcacagtgttgatgttggacacatagatggtgatggcaaaggtttagaacacattattttcaaagactaaatctaaaacccagagtaaacatcaatgctcagagttagcataatttggagctattcaggaattgcagagaaatgcattttcacagaaatcaagatgttatttttgtatactatatcacttagacaactgtgtttcatttgctgtaatcagtttttaaaagtcagatggaaagagcaactgaagtcctagaaaatagaaatgtaattttaaactattccaataaagctggaggaggaaggggagtttgactaaagttctttttgtttgtttcaaattttcattaatgtatatagtgcaaaataccatattaaagaggggaatgtggaggactgaaagctgacagtttggacttttctttttgtacttaagtcatgtcttcaataatgaaaattgctgttaaaaggatgtatgggatttagatacttttgcaaagctatagaaaattcactttgtaatctgttataataatgcccttgagttctgtgttcagtctgaacaggttttttggtggtggtggttttgttttgttttggagacggagtctcactcttgtcgcccaggctggagtgcaggcttggctcactgcaacctccacctcccgggttcaagcaattctcctgcctcagcctcctgagtagctgggattacaggcacccgccaccaccccccgctaattttttgtatttttatttttattttatttttttatttttttttgagacagagtgtcgctctgttgcccaggctggagtgtagtggtgcgatctcggctcactgcaagctccgcctcctgggttcgcgccattctcctgcctcagcctcctgagtagctggggctacaggtacccgccaccgcgcccagctaattttttttttttgtatttttagtaaagacggggtttcacggtgttagccaggatggtctcaatctcctgacctcgtgatccgcccgccttggcctcccaaagtgctgggatcacaggcgtgagccaccgcgcccggcctattttttgtatttttagtagagactgggtttcatcatgttggtcgggctggtctccaactcctgacctcaggtgatccacctgccccgccccccaaagtgctagtgttacangtgcgagccaccgtgtccggccgattctgaacagttttaataccattgctatttttgtgtttttcctgggcctttttttttttttttttttttttgagacagtctcgctctgttgcccaggctagagtgcaatggtgcaatctcagctcactgcaacctccaccccccacccccacaccccgttcaagtaattctcctgcctcagcctcccaaatagctgggattacaggtgtccgccaccacacccagctaatttttgttatttttagtagagatggggtttcactgtgttggtcaggctggtctccaactgttgccctcaggtgagccactgtgccccaccttttcctgggtttcataaggatctgaagtggtggattccttgtttttgctagtatctcatttagagttgagatggaccttaaaactcatctgttttaactcactttttaatagatgagttaaacttaatttacttaaggatgtacagttagagcctggaacttcaaccattattcactccccatgccctgtttccccccacttcgaaattaaatgcggttagcatcatatagttcattttccccctccatgctgctgtgtgattcttgactttgggtatgagtttttcatccttcatgcagggttctgtcagttcatggtatagtgattcagtgttaaaatggtggtgtctcagctgtgctgtgcacattccaaccttgtcaaattaatagtcctgagcaagcaagaaaaagaggtaataacatacccatttctttatgaatataagcttataatattttttcatgtgctatttttactgagcaaattgtatgtctcacatgttaacacaataaatatcttgacaattttattttctaccanaaa

SEQ ID NO: 79472 - DNA, 2540 bp, Homo sapiens
  misc_feature (1652)..(1652): n is a, c, g, or t
  misc_feature (2537)..(2537): n is a, c, g, or t
catgcctcatccagggcattccagtgtcatgccctcatccagtgggaaaaaaaccgactttctgcatttaactacaaaaaaagtttatgtttagtttggtagaggtgttatgtataatgctttgttaaagaaccccctttccgtgccactggtgaatagggattgatgaatgggaagagttgagtcagaccagtaagcccgtcctgggttccttgaacatgttcccatgtaggaggtaaaaccaattctggaagtgtctatgaacttccataaataactttaattttagtataatgatggtcttggattgtctgacctcagtagctattaaataacatcaagtaacatctgtatcaggccctacatagaacatacagttgagtgggagtaaacaaaaagataaacatgcgtgttaatggctgttcgagagaaatcggaataaaagcctaaacaggaacaacttcatcacagtgttgatgttggacacatagatggtgatggcaaaggtttagaacacattattttcaaagactaaatctaaaacccagagtaaacatcaatgctcagagttagcataatttggagctattcaggaattgcagagaaatgcattttcacagaaatcaagatgttatttttgtatactatatcacttagacaactgtgtttcatttgctgtaatcagtttttaaaagtcagatggaaagagcaactgaagtcctagaaaatagaaatgtaattttaaactattccaataaagctggaggaggaaggggagtttgactaaagttctttttgtttgtttcaaattttcattaatgtatatagtgcaaaataccatattaaagaggggaatgtggaggactgaaagctgacagtttggacttttctttttgtacttaagtcatgtcttcaataatgaaaattgctgttaaaaggatgtatgggatttagatacttttgcaaagctatagaaaattcactttgtaatctgttataataatgcccttgagttctgtgttcagtctgaacaggttttttggtggtggtggttttgttttgttttggagacggagtctcactcttgtcgcccaggctggagtgcaggcttggctcactgcaacctccacctcccgggttcaagcaattctcctgcctcagcctcctgagtagctgggattacaggcacccgccaccaccccccgctaattttttgtatttttatttttattttatttttttatttttttttgagacagagtgtcgctctgttgcccaggctggagtgtagtggtgcgatctcggctcactgcaagctccgcctcctgggttcgcgccattctcctgcctcagcctcctgagtagctggggctacaggtacccgccaccgcgcccagctaattttttttttttgtatttttagtaaagacggggtttcacggtgttagccaggatggtctcaatctcctgacctcgtgatccgcccgccttggcctcccaaagtgctgggatcacaggcgtgagccaccgcgcccggcctattttttgtatttttagtagagactgggtttcatcatgttggtcgggctggtctccaactcctgacctcaggtgatccacctgccccgccccccaaagtgctagtgttacangtgcgagccaccgtgtccggccgattctgaacagttttaataccattgctatttttgtgtttttcctgggcctttttttttttttttttttttttgagacagtctcgctctgttgcccaggctagagtgcaatggtgcaatctcagctcactgcaacctccaccccccacccccacaccccgttcaagtaattctcctgcctcagcctcccaaatagctgggattacaggtgtccgccaccacacccagctaatttttgttatttttagtagagatggggtttcactgtgttggtcaggctggtctccaactgttgccctcaggtgagccactgtgccccaccttttcctgggtttcataaggatctgaagtggtggattccttgtttttgctagtatctcatttagagttgagatggaccttaaaactcatctgttttaactcactttttaatagatgagttaaacttaatttacttaaggatgtacagttagagcctggaacttcaaccattattcactccccatgccctgtttccccccacttcgaaattaaatgcggttagcatcatatagttcattttccccctccatgctgctgtgtgattcttgactttgggtatgagtttttcatccttcatgcagggttctgtcagttcatggtatagtgattcagtgttaaaatggtggtgtctcagctgtgctgtgcacattccaaccttgtcaaattaatagtcctgagcaagcaagaaaaagaggtaataacatacccatttctttatgaatataagcttataatattttttcatgtgctatttttactgagcaaattgtatgtctcacatgttaacacaataaatatcttgacaattttattttctaccanaaa

SEQ ID NO: 79473 - DNA, 2198 bp, Homo sapiens
  misc_feature (1310)..(1310): n is a, c, g, or t
  misc_feature (2195)..(2195): n is a, c, g, or t
ctcaactgtatgttctatgtagggccttgatacagttgagtgggagtaaacaaaaagataaacatgcgtgttaatggctgttcgagagaaatcggaataaaagcctaaacaggaacaacttcatcacagtgttgatgttggacacatagatggtgatggcaaaggtttagaacacattattttcaaagactaaatctaaaacccagagtaaacatcaatgctcagagttagcataatttggagctattcaggaattgcagagaaatgcattttcacagaaatcaagatgttatttttgtatactatatcacttagacaactgtgtttcatttgctgtaatcagtttttaaaagtcagatggaaagagcaactgaagtcctagaaaatagaaatgtaattttaaactattccaataaagctggaggaggaaggggagtttgactaaagttctttttgtttgtttcaaattttcattaatgtatatagtgcaaaataccatattaaagaggggaatgtggaggactgaaagctgacagtttggacttttctttttgtacttaagtcatgtcttcaataatgaaaattgctgttaaaaggatgtatgggatttagatacttttgcaaagctatagaaaattcactttgtaatctgttataataatgcccttgagttctgtgttcagtctgaacaggttttttggtggtggtggttttgttttgttttggagacggagtctcactcttgtcgcccaggctggagtgcaggcttggctcactgcaacctccacctcccgggttcaagcaattctcctgcctcagcctcctgagtagctgggattacaggcacccgccaccaccccccgctaattttttgtatttttatttttattttatttttttatttttttttgagacagagtgtcgctctgttgcccaggctggagtgtagtggtgcgatctcggctcactgcaagctccgcctcctgggttcgcgccattctcctgcctcagcctcctgagtagctggggctacaggtacccgccaccgcgcccagctaattttttttttttgtatttttagtaaagacggggtttcacggtgttagccaggatggtctcaatctcctgacctcgtgatccgcccgccttggcctcccaaagtgctgggatcacaggcgtgagccaccgcgcccggcctattttttgtatttttagtagagactgggtttcatcatgttggtcgggctggtctccaactcctgacctcaggtgatccacctgccccgccccccaaagtgctagtgttacangtgcgagccaccgtgtccggccgattctgaacagttttaataccattgctatttttgtgtttttcctgggcctttttttttttttttttttttttgagacagtctcgctctgttgcccaggctagagtgcaatggtgcaatctcagctcactgcaacctccaccccccacccccacaccccgttcaagtaattctcctgcctcagcctcccaaatagctgggattacaggtgtccgccaccacacccagctaatttttgttatttttagtagagatggggtttcactgtgttggtcaggctggtctccaactgttgccctcaggtgagccactgtgccccaccttttcctgggtttcataaggatctgaagtggtggattccttgtttttgctagtatctcatttagagttgagatggaccttaaaactcatctgttttaactcactttttaatagatgagttaaacttaatttacttaaggatgtacagttagagcctggaacttcaaccattattcactccccatgccctgtttccccccacttcgaaattaaatgcggttagcatcatatagttcattttccccctccatgctgctgtgtgattcttgactttgggtatgagtttttcatccttcatgcagggttctgtcagttcatggtatagtgattcagtgttaaaatggtggtgtctcagctgtgctgtgcacattccaaccttgtcaaattaatagtcctgagcaagcaagaaaaagaggtaataacatacccatttctttatgaatataagcttataatattttttcatgtgctatttttactgagcaaattgtatgtctcacatgttaacacaataaatatcttgacaattttattttctaccanaaa

SEQ ID NO: 79474 - DNA, 2076 bp, Homo sapiens
  misc_feature (1188)..(1188): n is a, c, g, or t
  misc_feature (2073)..(2073): n is a, c, g, or t
ctgagtatccccctcctatctgaatccagggtgatggcaaaggtttagaacacattattttcaaagactaaatctaaaacccagagtaaacatcaatgctcagagttagcataatttggagctattcaggaattgcagagaaatgcattttcacagaaatcaagatgttatttttgtatactatatcacttagacaactgtgtttcatttgctgtaatcagtttttaaaagtcagatggaaagagcaactgaagtcctagaaaatagaaatgtaattttaaactattccaataaagctggaggaggaaggggagtttgactaaagttctttttgtttgtttcaaattttcattaatgtatatagtgcaaaataccatattaaagaggggaatgtggaggactgaaagctgacagtttggacttttctttttgtacttaagtcatgtcttcaataatgaaaattgctgttaaaaggatgtatgggatttagatacttttgcaaagctatagaaaattcactttgtaatctgttataataatgcccttgagttctgtgttcagtctgaacaggttttttggtggtggtggttttgttttgttttggagacggagtctcactcttgtcgcccaggctggagtgcaggcttggctcactgcaacctccacctcccgggttcaagcaattctcctgcctcagcctcctgagtagctgggattacaggcacccgccaccaccccccgctaattttttgtatttttatttttattttatttttttatttttttttgagacagagtgtcgctctgttgcccaggctggagtgtagtggtgcgatctcggctcactgcaagctccgcctcctgggttcgcgccattctcctgcctcagcctcctgagtagctggggctacaggtacccgccaccgcgcccagctaattttttttttttgtatttttagtaaagacggggtttcacggtgttagccaggatggtctcaatctcctgacctcgtgatccgcccgccttggcctcccaaagtgctgggatcacaggcgtgagccaccgcgcccggcctattttttgtatttttagtagagactgggtttcatcatgttggtcgggctggtctccaactcctgacctcaggtgatccacctgccccgccccccaaagtgctagtgttacangtgcgagccaccgtgtccggccgattctgaacagttttaataccattgctatttttgtgtttttcctgggcctttttttttttttttttttttttgagacagtctcgctctgttgcccaggctagagtgcaatggtgcaatctcagctcactgcaacctccaccccccacccccacaccccgttcaagtaattctcctgcctcagcctcccaaatagctgggattacaggtgtccgccaccacacccagctaatttttgttatttttagtagagatggggtttcactgtgttggtcaggctggtctccaactgttgccctcaggtgagccactgtgccccaccttttcctgggtttcataaggatctgaagtggtggattccttgtttttgctagtatctcatttagagttgagatggaccttaaaactcatctgttttaactcactttttaatagatgagttaaacttaatttacttaaggatgtacagttagagcctggaacttcaaccattattcactccccatgccctgtttccccccacttcgaaattaaatgcggttagcatcatatagttcattttccccctccatgctgctgtgtgattcttgactttgggtatgagtttttcatccttcatgcagggttctgtcagttcatggtatagtgattcagtgttaaaatggtggtgtctcagctgtgctgtgcacattccaaccttgtcaaattaatagtcctgagcaagcaagaaaaagaggtaataacatacccatttctttatgaatataagcttataatattttttcatgtgctatttttactgagcaaattgtatgtctcacatgttaacacaataaatatcttgacaattttattttctaccanaaa

SEQ ID NO: 79475 - DNA, 2029 bp, Homo sapiens
  misc_feature (1141)..(1141): n is a, c, g, or t
  misc_feature (2026)..(2026): n is a, c, g, or t
cgtccttcatcatacctaccctaaatctaaaacccagagtaaacatcaatgctcagagttagcataatttggagctattcaggaattgcagagaaatgcattttcacagaaatcaagatgttatttttgtatactatatcacttagacaactgtgtttcatttgctgtaatcagtttttaaaagtcagatggaaagagcaactgaagtcctagaaaatagaaatgtaattttaaactattccaataaagctggaggaggaaggggagtttgactaaagttctttttgtttgtttcaaattttcattaatgtatatagtgcaaaataccatattaaagaggggaatgtggaggactgaaagctgacagtttggacttttctttttgtacttaagtcatgtcttcaataatgaaaattgctgttaaaaggatgtatgggatttagatacttttgcaaagctatagaaaattcactttgtaatctgttataataatgcccttgagttctgtgttcagtctgaacaggttttttggtggtggtggttttgttttgttttggagacggagtctcactcttgtcgcccaggctggagtgcaggcttggctcactgcaacctccacctcccgggttcaagcaattctcctgcctcagcctcctgagtagctgggattacaggcacccgccaccaccccccgctaattttttgtatttttatttttattttatttttttatttttttttgagacagagtgtcgctctgttgcccaggctggagtgtagtggtgcgatctcggctcactgcaagctccgcctcctgggttcgcgccattctcctgcctcagcctcctgagtagctggggctacaggtacccgccaccgcgcccagctaattttttttttttgtatttttagtaaagacggggtttcacggtgttagccaggatggtctcaatctcctgacctcgtgatccgcccgccttggcctcccaaagtgctgggatcacaggcgtgagccaccgcgcccggcctattttttgtatttttagtagagactgggtttcatcatgttggtcgggctggtctccaactcctgacctcaggtgatccacctgccccgccccccaaagtgctagtgttacangtgcgagccaccgtgtccggccgattctgaacagttttaataccattgctatttttgtgtttttcctgggcctttttttttttttttttttttttgagacagtctcgctctgttgcccaggctagagtgcaatggtgcaatctcagctcactgcaacctccaccccccacccccacaccccgttcaagtaattctcctgcctcagcctcccaaatagctgggattacaggtgtccgccaccacacccagctaatttttgttatttttagtagagatggggtttcactgtgttggtcaggctggtctccaactgttgccctcaggtgagccactgtgccccaccttttcctgggtttcataaggatctgaagtggtggattccttgtttttgctagtatctcatttagagttgagatggaccttaaaactcatctgttttaactcactttttaatagatgagttaaacttaatttacttaaggatgtacagttagagcctggaacttcaaccattattcactccccatgccctgtttccccccacttcgaaattaaatgcggttagcatcatatagttcattttccccctccatgctgctgtgtgattcttgactttgggtatgagtttttcatccttcatgcagggttctgtcagttcatggtatagtgattcagtgttaaaatggtggtgtctcagctgtgctgtgcacattccaaccttgtcaaattaatagtcctgagcaagcaagaaaaagaggtaataacatacccatttctttatgaatataagcttataatattttttcatgtgctatttttactgagcaaattgtatgtctcacatgttaacacaataaatatcttgacaattttattttctaccanaaa

SEQ ID NO: 79476 - DNA, 1821 bp, Homo sapiens
  misc_feature (933)..(933): n is a, c, g, or t
  misc_feature (1818)..(1818): n is a, c, g, or t
ggctgatcgagggttcctatacacctatacacacaccttctcattttagtgaaggggagtttgactaaagttctttttgtttgtttcaaattttcattaatgtatatagtgcaaaataccatattaaagaggggaatgtggaggactgaaagctgacagtttggacttttctttttgtacttaagtcatgtcttcaataatgaaaattgctgttaaaaggatgtatgggatttagatacttttgcaaagctatagaaaattcactttgtaatctgttataataatgcccttgagttctgtgttcagtctgaacaggttttttggtggtggtggttttgttttgttttggagacggagtctcactcttgtcgcccaggctggagtgcaggcttggctcactgcaacctccacctcccgggttcaagcaattctcctgcctcagcctcctgagtagctgggattacaggcacccgccaccaccccccgctaattttttgtatttttatttttattttatttttttatttttttttgagacagagtgtcgctctgttgcccaggctggagtgtagtggtgcgatctcggctcactgcaagctccgcctcctgggttcgcgccattctcctgcctcagcctcctgagtagctggggctacaggtacccgccaccgcgcccagctaattttttttttttgtatttttagtaaagacggggtttcacggtgttagccaggatggtctcaatctcctgacctcgtgatccgcccgccttggcctcccaaagtgctgggatcacaggcgtgagccaccgcgcccggcctattttttgtatttttagtagagactgggtttcatcatgttggtcgggctggtctccaactcctgacctcaggtgatccacctgccccgccccccaaagtgctagtgttacangtgcgagccaccgtgtccggccgattctgaacagttttaataccattgctatttttgtgtttttcctgggcctttttttttttttttttttttttgagacagtctcgctctgttgcccaggctagagtgcaatggtgcaatctcagctcactgcaacctccaccccccacccccacaccccgttcaagtaattctcctgcctcagcctcccaaatagctgggattacaggtgtccgccaccacacccagctaatttttgttatttttagtagagatggggtttcactgtgttggtcaggctggtctccaactgttgccctcaggtgagccactgtgccccaccttttcctgggtttcataaggatctgaagtggtggattccttgtttttgctagtatctcatttagagttgagatggaccttaaaactcatctgttttaactcactttttaatagatgagttaaacttaatttacttaaggatgtacagttagagcctggaacttcaaccattattcactccccatgccctgtttccccccacttcgaaattaaatgcggttagcatcatatagttcattttccccctccatgctgctgtgtgattcttgactttgggtatgagtttttcatccttcatgcagggttctgtcagttcatggtatagtgattcagtgttaaaatggtggtgtctcagctgtgctgtgcacattccaaccttgtcaaattaatagtcctgagcaagcaagaaaaagaggtaataacatacccatttctttatgaatataagcttataatattttttcatgtgctatttttactgagcaaattgtatgtctcacatgttaacacaataaatatcttgacaattttattttctaccanaaa

SEQ ID NO: 79477 - DNA, 515 bp, Homo sapiens
  misc_feature (475)..(475): n is a, c, g, or t
ggctctgattggactgccgaaccccgcgcgctgattggccgcgtgggcgaggcggaggagagccgtgcgcagcggcgtatgtggggccgtgtgcagacccgcgtgtggcgcaggcaaggaccctcaaaataaacagcctctaccttgcgagccgtcttccccaggcctgcgtccgagtctccgccgctgcgggcccgctccgacgcggaagatctgactgcagccatgagcagcaatgagtgcttcaagtgtggacgatctggccactgggcccgggaatgtcctactggtggaggccgtggtcgtggaatgagaagccgtggcagaggttggttttacctcggatagaggtttccagtttgtttcctcgtctcttccagatatttgttatcgctgtggtgagtctggtcatcttgccaaggattgtgatcttcaggaggatggtaagtatttaacacttccttttcataccccnctagagcttgagaggtgagcacatgcaactgtgtatagca

SEQ ID NO: 79478 - DNA, 373 bp, Homo sapiens
ggctctgattggactgccgaaccccgcgcgctgattggccgcgtgggcgaggcggaggagagccgtgcgcagcggcgtatgtggggccgtgtgcagacccgcgtgtggcgcaggcaaggaccctcaaaataaacagcctctaccttgcgagccgtcttccccaggcctgcgtccgagtctccgccgctgcgggcccgctccgacgcggaagatctgactgcagccatgagcagcaatgagtgcttcaagtgtggacgatctggccactgggcccgggaatgtcctactggtggaggccgtggtcgtggaatgagaagccgtggcagaggtcagggtcgacgcggccgcgaatttagtagtagtaggcggccgc

SEQ ID NO: 79479 - DNA, 2873 bp, Homo sapiens
  misc_feature (2870)..(2870): n is a, c, g, or t
ggctctgattggactgccgaaccccgcgcgctgattggccgcgtgggcgaggcggaggagagccgtgcgcagcggcgtatgtggggccgtgtgcagacccgcgtgtggcgcaggcaaggaccctcaaaataaacagcctctaccttgcgagccgtcttccccaggcctgcgtccgagtctccgccgctgcgggcccgctccgacgcggaagatctgactgcagccatgagcagcaatgagtgcttcaagtgtggacgatctggccactgggcccgggaatgtcctactggtggaggccgtggtcgtggaatgagaagccgtggcagaggtttccagtttgtttcctcgtctcttccagatatttgttatcgctgtggtgagtctggtcatcttgccaaggattgtgatcttcaggaggatgcctgctataactgcggtagaggtggccacattgccaaggactgcaaggagcccaagagagagcgagagcaatgctgctacaactgtggcaaaccaggccatctggctcgtgactgcgaccatgcagatgagcagaaatgctattcttgtggagaattcggacacattcaaaaagactgcaccaaagtgaagtgctataggtgtggtgaaactggtcatgtagccatcaactgcagcaagacaagtgaagtcaactgttaccgctgtggcgagtcagggcaccttgcacgggaatgcacaattgaggctacagcctaattattttcctttgtcgcccctcctttttctgattgatggttgtattattttctctgaatcctcttcactggccaaaggttggcagatagaggcaactcccaggccagtgagctttacttgccgtgtaaaaggaggaaaggggtggaaaaaaaccgactttctgcatttaactacaaaaaaagtttatgtttagtttggtagaggtgttatgtataatgctttgttaaagaaccccctttccgtgccactggtgaatagggattgatgaatgggaagagttgagtcagaccagtaagcccgtcctgggttccttgaacatgttcccatgtaggaggtaaaaccaattctggaagtgtctatgaacttccataaataactttaattttagtataatgatggtcttggattgtctgacctcagtagctattaaataacatcaagtaacatctgtatcaggccctacatagaacatacagttgagtgggagtaaacaaaaagataaacatgcgtgttaatggctgttcgagagaaatcggaataaaagcctaaacaggaacaacttcatcacagtgttgatgttggacacatagatggtgatggcaaaggtttagaacacattattttcaaagactaaatctaaaacccagagtaaacatcaatgctcagagttagcataatttggagctattcaggaattgcagagaaatgcattttcacagaaatcaagatgttatttttgtatactatatcacttagacaactgtgtttcatttgctgtaatcagtttttaaaagtcagatggaaagagcaactgaagtcctagaaaatagaaatgtaattttaaactattccaataaagctggaggaggaaggggagtttgactaaagttctttttgtttgtttcaaattttcattaatgtatatagtgcaaaataccatattaaagaggggaatgtggaggactgaaagctgacagtttggacttttctttttgtacttaagtcatgtcttcaataatgaaaattgctgttaaaaggatgtatgggatttagatacttttgcaaagctatagaaaattcactttgtaatctgttataataatgcccttgagttctgtgttcagtctgaacaggttttttggtggtggtggttttgttttgttttggagacggagtctcactcttgtcgcccaggctggagtgcaggcttggctcactgcaacctccacctcccgggttcaagcaattctcctgcctcagcctcctgagtagctgggattacaggcacccgccaccaccccccgctaattttttgtatttttatttttattttatttttttatttttttttgagacagagtgtcgctctgttgcccaggctggagtgtagtggtgcgatctcggctcactgcaagctccgcctcctgggttcgcgccattctcctgcctcagcctcccaaatagctgggattacaggtgtccgccaccacacccagctaatttttgttatttttagtagagatggggtttcactgtgttggtcaggctggtctccaactgttgccctcaggtgagccactgtgccccaccttttcctgggtttcataaggatctgaagtggtggattccttgtttttgctagtatctcatttagagttgagatggaccttaaaactcatctgttttaactcactttttaatagatgagttaaacttaatttacttaaggatgtacagttagagcctggaacttcaaccattattcactccccatgccctgtttccccccacttcgaaattaaatgcggttagcatcatatagttcattttccccctccatgctgctgtgtgattcttgactttgggtatgagtttttcatccttcatgcagggttctgtcagttcatggtatagtgattcagtgttaaaatggtggtgtctcagctgtgctgtgcacattccaaccttgtcaaattaatagtcctgagcaagcaagaaaaagaggtaataacatacccatttctttatgaatataagcttataatattttttcatgtgctatttttactgagcaaattgtatgtctcacatgttaacacaataaatatcttgacaattttattttctaccanaaa

SEQ ID NO: 79480 - DNA, 1632 bp, Homo sapiens
ggctctgattggactgccgaaccccgcgcgctgattggccgcgtgggcgaggcggaggagagccgtgcgcagcggcgtatgtggggccgtgtgcagacccgcgtgtggcgcaggcaaggaccctcaaaataaacagcctctaccttgcgagccgtcttccccaggcctgcgtccgagtctccgccgctgcgggcccgctccgacgcggaagatctgactgcagccatgagcagcaatgagtgcttcaagtgtggacgatctggccactgggcccgggaatgtcctactggtggaggccgtggtcgtggaatgagaagccgtggcagaggttggttttacctcggatagaggtttccagtttgtttcctcgtctcttccagatatttgttatcgctgtggtgagtctggtcatcttgccaaggattgtgatcttcaggaggatgcctgctataactgcggtagaggtggccacattgccaaggactgcaaggagcccaagagagagcgagagcaatgctgctacaactgtggcaaaccaggccatctggctcgtgactgcgaccatgcagatgagcagaaatgctattcttgtggagaattcggacacattcaaaaagactgcaccaaagtgaagtgctataggtgtggtgaaactggtcatgtagccatcaactgcagcaagacaagtgaagtcaactgttaccgctgtggcgagtcagggcaccttgcacgggaatgcacaattgaggctacagcctaattattttcctttgtcgcccctcctttttctgattgatggttgtattattttctctgaatcctcttcactggccaaaggttggcagatagaggcaactcccaggccagtgagctttacttgccgtgtaaaaggaggaaaggggtggaaaaaaaccgactttctgcatttaactacaaaaaaagtttatgtttagtttggtagaggtgttatgtataatgctttgttaaagaaccccctttccgtgccactggtgaatagggattgatgaatgggaagagttgagtcagaccagtaagcccgtcctgggttccttgaacatgttcccatgtaggaggtaaaaccaattctggaagtgtctatgaacttccataaataactttaattttagtataatgatggtcttggattgtctgacctcagtagctattaaataacatcaagtaacatctgtatcaggccctacatagaacatacagttgagtgggagtaaacaaaaagataaacatgcgtgttaatggctgttcgagagaaatcggaataaaagcctaaacaggaacaacttcatcacagtgttgatgttggacacatagatggtgatggcaaaggtttagaacacattattttcaaagactaaatctaaaacccagagtaaacatcaatgctcagagttagcataatttggagctattcaggaattgcagagaaatgcattttcacagaaatcaagatgttatttttgtatactatatcacttagacaactgtgtttcatttgctgtaatcagtttttaaaagtcagatggaaagagcaactgaagtcctagaaaatagaaatgtaattttaaactattccaataaagctggaggaggaag

SEQ ID NO: 79481 - DNA, 2076 bp, Homo sapiens
  misc_feature (2076)..(2076): n is a, c, g, or t
ggctctgattggactgccgaaccccgcgcgctgattggccgcgtgggcgaggcggaggagagccgtgcgcagcggcgtatgtggggccgtgtgcagacccgcgtgtggcgcaggcaaggaccctcaaaataaacagcctctaccttgcgagccgtcttccccaggcctgcgtccgagtctccgccgctgcgggcccgctccgacgcggaagatctgactgcagccatgagcagcaatgagtgcttcaagtgtggacgatctggccactgggcccgggaatgtcctactggtggaggccgtggtcgtggaatgagaagccgtggcagaggttggttttacctcggatagaggtttccagtttgtttcctcgtctcttccagatatttgttatcgctgtggtgagtctggtcatcttgccaaggattgtgatcttcaggaggatgcctgctataactgcggtagaggtggccacattgccaaggactgcaaggagcccaagagagagcgagagcaatgctgctacaactgtggcaaaccaggccatctggctcgtgactgcgaccatgcagatgagcagaaatgctattcttgtggagaattcggacacattcaaaaagactgcaccaaagtgaagtgctataggtgtggtgaaactggtcatgtagccatcaactgcagcaagacaagtgaagtcaactgttaccgctgtggcgagtcagggcaccttgcacgggaatgcacaattgaggctacagcctaattattttcctttgtcgcccctcctttttctgattgatggttgtattattttctctgaatcctcttcactggccaaaggttggcagatagaggcaactcccaggccagtgagctttacttgccgtgtaaaaggaggaaaggggtggaaaaaaaccgactttctgcatttaactacaaaaaaagtttatgtttagtttggtagaggtgttatgtataatgctttgttaaagaaccccctttccgtgccactggtgaatagggattgatgaatgggaagagttgagtcagaccagtaagcccgtcctgggttccttgaacatgttcccatgtaggaggtaaaaccaattctggaagtgtctatgaacttccataaataactttaattttagtataatgatggtcttggattgtctgacctcagtagctattaaataacatcaagtaacatctgtatcaggccctacatagaacatacagttgagtgggagtaaacaaaaagataaacatgcgtgttaatggctgttcgagagaaatcggaataaaagcctaaacaggaacaacttcatcacagtgttgatgttggacacatagatggtgatggcaaaggtttagaacacattattttcaaagactaaatctaaaacccagagtaaacatcaatgctcagagttagcataatttggagctattcaggaattgcagagaaatgcattttcacagaaatcaagatgttatttttgtatactatatcacttagacaactgtgtttcatttgctgtaatcagtttttaaaagtcagatggaaagagcaactgaagtcctagaaaatagaaatgtaattttaaactattccaataaagctggaggaggaagaaaaaaaaaaaaaaaaaaaaaaaaaaaaaaaacaacaaaacaacaaacacacaaaaaaaaaaaaaacaaaaaaaaaaacacaaaaaaaaacaaacaaacaaaaaaaaaaaaaaacaacacaaacaaaaaaaaaaaaagagggggggagcctaaaaaatcacgcaagagaaccaataaatagtgaatcagacgagtttattgagaaaaaggagggccctataaaatggggaagaatttataattacaggacgacgacgcgttaaaacacactgatgggggaaaaaataagagtggggtattatgagaaaacacatctggtgggatgaaaattgagaacatcgccaagaggagtaagccagcagaaaaaaaaagggagattagtggaaccaataattgggcgaaaaaatggactggttattgaatttagggggtcgtattatatgn

SEQ ID NO: 79482 - DNA, 3296 bp, Homo sapiens
  misc_feature (2408)..(2408): n is a, c, g, or t
  misc_feature (3293)..(3293): n is a, c, g, or t
gccaagaagacaacaagggtacccaataaacagcctctaccttgcgagccgtcttccccaggcctgcgtccgagtctccgccgctgcgggcccgctccgacgcggaagatctgactgcagccatgagcagcaatgagtgcttcaagtgtggacgatctggccactgggcccgggaatgtcctactggtggaggccgtggtcgtggaatgagaagccgtggcagaggttggttttacctcggatagaggtttccagtttgtttcctcgtctcttccagatatttgttatcgctgtggtgagtctggtcatcttgccaaggattgtgatcttcaggaggatgcctgctataactgcggtagaggtggccacattgccaaggactgcaaggagcccaagagagagcgagagcaatgctgctacaactgtggcaaaccaggccatctggctcgtgactgcgaccatgcagatgagcagaaatgctattcttgtggagaattcggacacattcaaaaagactgcaccaaagtgaagtgctataggtgtggtgaaactggtcatgtagccatcaactgcagcaagacaagtgaagtcaactgttaccgctgtggcgagtcagggcaccttgcacgggaatgcacaattgaggctacagcctaattattttcctttgtcgcccctcctttttctgattgatggttgtattattttctctgaatcctcttcactggccaaaggttggcagatagaggcaactcccaggccagtgagctttacttgccgtgtaaaaggaggaaaggggtggaaaaaaaccgactttctgcatttaactacaaaaaaagtttatgtttagtttggtagaggtgttatgtataatgctttgttaaagaaccccctttccgtgccactggtgaatagggattgatgaatgggaagagttgagtcagaccagtaagcccgtcctgggttccttgaacatgttcccatgtaggaggtaaaaccaattctggaagtgtctatgaacttccataaataactttaattttagtataatgatggtcttggattgtctgacctcagtagctattaaataacatcaagtaacatctgtatcaggccctacatagaacatacagttgagtgggagtaaacaaaaagataaacatgcgtgttaatggctgttcgagagaaatcggaataaaagcctaaacaggaacaacttcatcacagtgttgatgttggacacatagatggtgatggcaaaggtttagaacacattattttcaaagactaaatctaaaacccagagtaaacatcaatgctcagagttagcataatttggagctattcaggaattgcagagaaatgcattttcacagaaatcaagatgttatttttgtatactatatcacttagacaactgtgtttcatttgctgtaatcagtttttaaaagtcagatggaaagagcaactgaagtcctagaaaatagaaatgtaattttaaactattccaataaagctggaggaggaaggggagtttgactaaagttctttttgtttgtttcaaattttcattaatgtatatagtgcaaaataccatattaaagaggggaatgtggaggactgaaagctgacagtttggacttttctttttgtacttaagtcatgtcttcaataatgaaaattgctgttaaaaggatgtatgggatttagatacttttgcaaagctatagaaaattcactttgtaatctgttataataatgcccttgagttctgtgttcagtctgaacaggttttttggtggtggtggttttgttttgttttggagacggagtctcactcttgtcgcccaggctggagtgcaggcttggctcactgcaacctccacctcccgggttcaagcaattctcctgcctcagcctcctgagtagctgggattacaggcacccgccaccaccccccgctaattttttgtatttttatttttattttatttttttatttttttttgagacagagtgtcgctctgttgcccaggctggagtgtagtggtgcgatctcggctcactgcaagctccgcctcctgggttcgcgccattctcctgcctcagcctcctgagtagctggggctacaggtacccgccaccgcgcccagctaattttttttttttgtatttttagtaaagacggggtttcacggtgttagccaggatggtctcaatctcctgacctcgtgatccgcccgccttggcctcccaaagtgctgggatcacaggcgtgagccaccgcgcccggcctattttttgtatttttagtagagactgggtttcatcatgttggtcgggctggtctccaactcctgacctcaggtgatccacctgccccgccccccaaagtgctagtgttacangtgcgagccaccgtgtccggccgattctgaacagttttaataccattgctatttttgtgtttttcctgggcctttttttttttttttttttttttgagacagtctcgctctgttgcccaggctagagtgcaatggtgcaatctcagctcactgcaacctccaccccccacccccacaccccgttcaagtaattctcctgcctcagcctcccaaatagctgggattacaggtgtccgccaccacacccagctaatttttgttatttttagtagagatggggtttcactgtgttggtcaggctggtctccaactgttgccctcaggtgagccactgtgccccaccttttcctgggtttcataaggatctgaagtggtggattccttgtttttgctagtatctcatttagagttgagatggaccttaaaactcatctgttttaactcactttttaatagatgagttaaacttaatttacttaaggatgtacagttagagcctggaacttcaaccattattcactccccatgccctgtttccccccacttcgaaattaaatgcggttagcatcatatagttcattttccccctccatgctgctgtgtgattcttgactttgggtatgagtttttcatccttcatgcagggttctgtcagttcatggtatagtgattcagtgttaaaatggtggtgtctcagctgtgctgtgcacattccaaccttgtcaaattaatagtcctgagcaagcaagaaaaagaggtaataacatacccatttctttatgaatataagcttataatattttttcatgtgctatttttactgagcaaattgtatgtctcacatgttaacacaataaatatcttgacaattttattttctaccanaaa

SEQ ID NO: 79483 - DNA, 1394 bp, Homo sapiens
ggctctgattggactgccgaaccccgcgcgctgattggccgcgtgggcgaggcggaggagagccgtgcgcagcggcgtatgtggggccgtgtgcagacccgcgtgtggcgcaggcaaggaccctcaaaataaacagcctctaccttgcgagccgtcttccccaggcctgcgtccgagtctccgccgctgcgggcccgctccgacgcggaagatctgactgcagccatgagcagcaatgagtgcttcaagtgtggacgatctggccactgggcccgggaatgtcctactggtggaggccgtggtcgtggaatgagaagccgtggcagaggttggttttacctcggatagaggtttccagtttgtttcctcgtctcttccagatatttgttatcgctgtggtgagtctggtcatcttgccaaggattgtgatcttcaggaggatgcctgctataactgcggtagaggtggccacattgccaaggactgcaaggagcccaagagagagcgagagcaatgctgctacaactgtggcaaaccaggccatctggctcgtgactgcgaccatgcagatgagcagaaatgctattcttgtggagaattcggacacattcaaaaagactgcaccaaagtgaagtgctataggtgtggtgaaactggtcatgtagccatcaactgcagcaagacaagtgaagtcaactgttaccgctgtggcgagtcagggcaccttgcacgggaatgcacaattgaggctacagcctaattattttcctttgtcgcccctcctttttctgattgatggttgtattattttctctgaatcctcttcactggccaaaggttggcagatagaggcaactcccaggccagtgagctttacttgccgtgtaaaaggaggaaaggggtggaaaaaaaccgactttctgcatttaactacaaaaaaagtttatgtttagtttggtagaggtgttatgtataatgctttgttaaagaaccccctttccgtgccactggtgaatagggattgatgaatgggaagagttgagtcagaccagtaagcccgtcctgggttccttgaacatgttcccatgtaggaggtaaaaccaattctggaagtgtctatgaacttccataaataactttaattttagtataatgatggtcttggattgtctgacctcagtagctattaaataacatcaagtaacatctgtatcaggccctacatagaacatacagttgagtgggagtaaacaaaaagataaacatgcgtgttaatggctgttcttaatcccagggggataaagctagctagggagtgtggggtggggttgcgtggaggggagatgttggagtggtaggtgtgtgggtggtgtgggtggtgtgtggtgagtgga

SEQ ID NO: 79484 - DNA, 3284 bp, Homo sapiens
  misc_feature (2396)..(2396): n is a, c, g, or t
  misc_feature (3281)..(3281): n is a, c, g, or t
ggctctgattggactgccgaaccccgcgcgctgattggccgcgtgggcgaggcggaggagagccgtgcgcagcggcgtatgtggggccgtgtgcagacccgcgtgtggcgcaggcaaggaccctcaaaataaacagcctctaccttgcgagccgtcttccccaggcctgcgtccgagtctccgccgctgcgggcccgctccgacgcggaagatctgactgcagccatgagcagcaatgagtgcttcaagtgtggacgatctggccactgggcccgggaatgtcctactggtggaggccgtggtcgtggaatgagaagccgtggcagaggtttccagtttgtttcctcgtctcttccagatatttaggactgcaaggagcccaagagagagcgagagcaatgctgctacaactgtggcaaaccaggccatctggctcgtgactgcgaccatgcagatgagcagaaatgctattcttgtggagaattcggacacattcaaaaagactgcaccaaagtgaagtgctataggtgtggtgaaactggtcatgtagccatcaactgcagcaagacaagtgaagtcaactgttaccgctgtggcgagtcagggcaccttgcacgggaatgcacaattgaggctacagcctaattattttcctttgtcgcccctcctttttctgattgatggttgtattattttctctgaatcctcttcactggccaaaggttggcagatagaggcaactcccaggccagtgagctttacttgccgtgtaaaaggaggaaaggggtggaaaaaaaccgactttctgcatttaactacaaaaaaagtttatgtttagtttggtagaggtgttatgtataatgctttgttaaagaaccccctttccgtgccactggtgaatagggattgatgaatgggaagagttgagtcagaccagtaagcccgtcctgggttccttgaacatgttcccatgtaggaggtaaaaccaattctggaagtgtctatgaacttccataaataactttaattttagtataatgatggtcttggattgtctgacctcagtagctattaaataacatcaagtaacatctgtatcaggccctacatagaacatacagttgagtgggagtaaacaaaaagataaacatgcgtgttaatggctgttcgagagaaatcggaataaaagcctaaacaggaacaacttcatcacagtgttgatgttggacacatagatggtgatggcaaaggtttagaacacattattttcaaagactaaatctaaaacccagagtaaacatcaatgctcagagttagcataatttggagctattcaggaattgcagagaaatgcattttcacagaaatcaagatgttatttttgtatactatatcacttagacaactgtgtttcatttgctgtaatcagtttttaaaagtcagatggaaagagcaactgaagtcctagaaaatagaaatgtaattttaaactattccaataaagctggaggaggaaggggagtttgactaaagttctttttgtttgtttcaaattttcattaatgtatatagtgcaaaataccatattaaagaggggaatgtggaggactgaaagctgacagtttggacttttctttttgtacttaagtcatgtcttcaataatgaaaattgctgttaaaaggatgtatgggatttagatacttttgcaaagctatagaaaattcactttgtaatctgttataataatgcccttgagttctgtgttcagtctgaacaggttttttggtggtggtggttttgttttgttttggagacggagtctcactcttgtcgcccaggctggagtgcaggcttggctcactgcaacctccacctcccgggttcaagcaattctcctgcctcagcctcctgagtagctgggattacaggcacccgccaccaccccccgctaattttttgtatttttatttttattttatttttttatttttttttgagacagagtgtcgctctgttgcccaggctggagtgtagtggtgcgatctcggctcactgcaagctccgcctcctgggttcgcgccattctcctgcctcagcctcctgagtagctggggctacaggtacccgccaccgcgcccagctaattttttttttttgtatttttagtaaagacggggtttcacggtgttagccaggatggtctcaatctcctgacctcgtgatccgcccgccttggcctcccaaagtgctgggatcacaggcgtgagccaccgcgcccggcctattttttgtatttttagtagagactgggtttcatcatgttggtcgggctggtctccaactcctgacctcaggtgatccacctgccccgccccccaaagtgctagtgttacangtgcgagccaccgtgtccggccgattctgaacagttttaataccattgctatttttgtgtttttcctgggcctttttttttttttttttttttttgagacagtctcgctctgttgcccaggctagagtgcaatggtgcaatctcagctcactgcaacctccaccccccacccccacaccccgttcaagtaattctcctgcctcagcctcccaaatagctgggattacaggtgtccgccaccacacccagctaatttttgttatttttagtagagatggggtttcactgtgttggtcaggctggtctccaactgttgccctcaggtgagccactgtgccccaccttttcctgggtttcataaggatctgaagtggtggattccttgtttttgctagtatctcatttagagttgagatggaccttaaaactcatctgttttaactcactttttaatagatgagttaaacttaatttacttaaggatgtacagttagagcctggaacttcaaccattattcactccccatgccctgtttccccccacttcgaaattaaatgcggttagcatcatatagttcattttccccctccatgctgctgtgtgattcttgactttgggtatgagtttttcatccttcatgcagggttctgtcagttcatggtatagtgattcagtgttaaaatggtggtgtctcagctgtgctgtgcacattccaaccttgtcaaattaatagtcctgagcaagcaagaaaaagaggtaataacatacccatttctttatgaatataagcttataatattttttcatgtgctatttttactgagcaaattgtatgtctcacatgttaacacaataaatatcttgacaattttattttctaccanaaa

SEQ ID NO: 79485 - DNA, 777 bp, Homo sapiens
ggctctgattggactgccgaaccccgcgcgctgattggccgcgtgggcgaggcggaggagagccgtgcgcagcggcgtatgtggggccgtgtgcagacccgcgtgtggcgcaggcaaggaccctcaaaataaacagcctctaccttgcgagccgtcttccccaggcctgcgtccgagtctccgccgctgcgggcccgctccgacgcggaagatctgactgcagccatgagcagcaatgagtgcttcaagtgtggacgatctggccactgggcccgggaatgtcctactggtggaggccgtggtcgtggaatgagaagccgtggcagaggttggttttacctcggatagaggtttccagtttgtttcctcgtctcttccagatatttgttatcgctgtggtgagtctggtcatcttgccaaggattgtgatcttcaggaggatgcctgctataactgcggtagaggtggccacattgccaaggactgcaaggagcccaagagagagcgagagcaatgctgctacaactgtggcaaaccaggccatctggctcgtgactgcgaccatgcagatgagcagaaatgctattcttgtggagaattcggacacattcaaaaagactgcaccaaagtgaagtgctataggtgtggtgaaactggtcatgtagccatcaactgcagcaagacaagtgaagtcaactgttaccgctgtggcgagtcagggcaccttgcacgggaaataatctagctgtaacctcaattgtgcattcccgtgcagtc

SEQ ID NO: 79486 - DNA, 820 bp, Homo sapiens
ctctgaagcacgttgggtgagagaaagaaagaaatcatatcctttatcctcccacacagccaaagattcctgaagacagagctgatgccatgtactcaagtgggtctctgcctctcagaggtggccttggtcttcaagtttcagcaattctgggaagccaaggacacctccatctcctcctccctgatctgcaactcatctgagagcagctttctcattggaatgtcttgtgtttaaggaacaagaatccctgtttccggtttgggtgcccaagtgcacctactggatccaacccaggattggagatactttgcagaacacaacatcatctggcacatgaccagccatggtgtttcactttcacaatttcagcttccttcactgattgcagcataatcgtggttcagcagcctccaagaccagggctgatgtgggcggctacagggagaaattcaagaggaagttcttggtggtgccctccatgagtacaaagaagcctcagtccccaggacacccttccgtgcatggtgtcactgacatctttatttcttttgtcacgttctgtaaatcacaatgaatggggtattcttcttctattatatatttgttaagtcttttttggcatctttaaaaaaaactggtaactttatcctatgtaatatccctgttaagtcctaaaagtcttttctgatgtctattttgtctgaaatttgcacagctactatagctttatttcggttcatattttcataatccatgttttctcatccttttatatttgtgaatgtgtaaagtaactttcttgtgcatagctaagagt

SEQ ID NO: 79487 - DNA, 751 bp, Homo sapiens
aatgggtttttgtttatctgtattttattcagagttccttggtttgaacctggtgtcctgttccaggcatccagccaggatactacattatgtttagtcattgtgtgttcttaggctcctcttggctgtactagtttcttagaatttcctcgtttttgattgtctggacatgatgatcttgacagttttgaggaaaagtggtcaggtattttgtagaatgtccctcatatgataaaaagttttttagttctttgtgcatttcttgcccccactaacacaaaatagactgtgaaagtgccattattaaagatacattaaagtatgagagaaagataaattcttataagaatctgggaaggcttttcatcacaagtaatgttgtccatgaagtaattagttgtgtttgtgatagaatagggggtgtcacgtgaaaatcaagagtgcaggtcatgttctagtaacagactaatagaattgcaatgtgatgcgagtaaggtgcaattagaagtaacagtgttaaagtttggcaggggcctgagagcttttttccctcctgacaccaaataaatggtatcttttccaacaacacttctctaactctctgacatcaactatgtgtcctacaattctgacactaactacccagaattaggatcagattccacagattcaagggctcagtcctacaagattgccctcatttctgatgccagttgcaagtattaggcccccagattagtcaggcattctc

SEQ ID NO: 79488 - DNA, 869 bp, Homo sapiens
caatcactgaagtgagtaagggatgcagtggtgttatttgttgggcagaataaataagtgaattttggcatagagtttctgaaggcataactatgaaggcaagagaataggcaggcaggataatgcattctaggtgctttccaaggagtcagtgttgtttaggcagctattcctgccaccagggagaggagttaattcttgaaaaaaaatttaattttttatgagaacagaagttgattcaatatccttcttagagttgctcatcagaacataaatgtcactttctagtaacatttttgatggtttccaaaccaaaacaagttccaggagggcattcgagatgtatacatcatcaataattactcttatgttaaaagttgctgttttcccgtagctttgccaccatttataactcaaaagcctgatagtgctagggaatgtaaagatgtttctgtctgctaagtgttatactaatcgaagagaaggagaacttttatgataaagtgacatgtacagaacctagccaagttacaatttttggtcaaaatacttgaaactctttaactctaaaagtttaaggtcaataggtgcattataaagtaaattttaagccaggcaaatttctagtcattaagtcagtattcattgccttagtcagccattggctgtatataatccttaatataaaaaccatctaatgactaatatctcttgcatattgtgaagtaagttacctatagaaattctgtagtaccataaagaaaagccttttgagattgcagtgagctgagattgtgccactgcactccagtctgggcaacagagccagactccattgaaaaaaaaaaaaaaggctcttgaatgatgta

SEQ ID NO: 79489 - DNA, 896 bp, Homo sapiens
ttttttttcaatggagtctggctctgtggcccagactggagtgcagtggccaatctcagctcactgcaatctcaaaaggcttttctttatggtactacagagtttctgaaggcataactatgaaggcaagagaataggcaggcaggataatgcattctaggtgctttccaaggagtcagtgttgtttaggcagctattcctgccaccagggagaggagttaattcttgaaaaaaaatttaattttttatgagaacagaagttgattcaatatccttcttagagttgctcatcagaacataaatgtcactttctagtaacatttttgatggtttccaaaccaaaacaagttccaggagggcattcgagatgtatacatcatcaataattactcttatgttaaaagttgctgttttcccgtagctttgccaccatttataactcaaaagcctgatagtgctagggaatgtaaagatgtttctgtctgctaagtgttatactaatcgaagagaaggagaacttttatgataaagtgacatgtacagaacctagccaagttacaatttttggtcaaaatacttgaaactctttaactctaaaagtttaaggtcaataggtgcattataaagtaaattttaagccaggcaaatttctagtcattaagtcagtattcattgccttagtcagccattggctgtatataatccttaatataaaaaccatctaatgactaatatctcttgcatattgtgaagtaagttacctatagaaattctgtagtaccataaagaaaagccttttgagattgcagtgagctgagattgtgccactgcactccagtctgggcaacagagccagactccattgaaaaaaaaaaaaaaggctcttgaatgatgta

SEQ ID NO: 79490 - DNA, 547 bp, Homo sapiens
agaatcaatattagggaattgcgccccagagccaaggattccgcacgaagggaccgagtaaataggggtagaatagaatagaccgtctacagcgttcctggacgctaagcctaagaattgcttcgtgaaactccagtttcgttttatgaacgcgtgtgtgcgggaggcgacgtgaactgacttgactgtgggtacgaaaagcccaaagccaccgcccaggaagaaccgcgcttggctgcggcccgggaagaaacatccacggccgcgttagaaagagggtcgcacgctgccgccgaggtagaggggtccccgagtcctggggcctcgcgccccacagcccgagtcccttccccgcggggctggtggctttgggtaggacgcgcgcttggcgcggccagccctgcggcaggagctgagcggcgcagggacacgggcagctgggaggggcgcctggtgatttactcacttccctcctagccagagaagtgcagcaattccaaacagttctcataggagcgtccctgacaacttcatgttataaaaaaaa

SEQ ID NO: 79491 - DNA, 701 bp, Homo sapiens
gaaggttgaggaattgagcctgccctgtgaggggactttggcaaaagggtggaaggtatttgcagcttgccaacaacgtgttctgcttgccaaggacagatctcccttaatgtacacaattcacagaattcagaggccaaggataattttccttggaattagagggtctgaggcttgtgtacatggcagagaataatgaacgaaatttttgaaccacttaacttgaactatatacagtcattggtttccataggccctttcccataaacttacagtattgctggactatgacacctaccagatgcttacttaactctggtctgccttggaccagagtgctttgattcttttttaaaaatatctgtgattcgttactttggggctaggagggcgtgtggttaagtactattgcaagaatctgtaagctgcccggcgcggtggctcatgcctgtaatcccagcactttgggaggcgggtggatcacttgaggtcaggagttcgagaccagtctgggcaacacggcgaagccctgtctctactaaaaatagaaaaaattagctgggcggggtggcacccgcctgtaatcccagctactcaggaagctgaggcacgagaatggcttgaacctggcggaggttacagtgagatcatgccactgcactccagcctgggtgacagagccagactctgtctcaaaaaaa

SEQ ID NO: 79492 - DNA, 358 bp, Homo sapiens
tataatttgggtgggaatccagcactcttgaaatagtcatggccagagagtatcatcaaattaactacttagctcagttcacaagacttcatttgtgctcagcaaggactatcactgaatagggaacagcctgaatgtagcaagctttccactgaattaagatagtgtatatatcttaaggtatgttgcttgtctgtcttctaagaattttttaagctacatttgaaaaaacatgataatacaattgtgagtctccttagtgttaaatttataattagataggcaaaatagtaagtatatgtgtgttagagattcaagtaaaaaaaaaaaaaaaacaaggcccagcttgtgacatagc

SEQ ID NO: 79493 - DNA, 700 bp, Homo sapiens
acaaagccaattggaaatgggtctggttgacagaggaatcagaccatcacttcctccaccaggtcccacccaccagcgaggctgcagttcttgttggacagctacacttccctgttgctccatcctcttgtccttctctgatctctttttagaatcacttctccctctatctttgttgctgacagattcaaatctacactcgttaaagaaaggaataaatctcctggttaccatttgctagatagtttatccaggaatcacttaactctactacttaagtcaattctgtagttaggaccaaatttttaaaattacaacgccatcacctcctttaaaacaaagtaaattcaaacaggaaagctcaaagtgttgttgcagaaacatataactcctcttggtttgatcccaatgacaaggtgtttttttttaaggaaaagaaatattgattcagttctgaggggtatcttattcaagagaagtccagactttctttcttgtgggtggggacactttaaattcttttaaatgataactttattgaagatataacttaacatgatttatgccctggtctggacctatagattcttagaggtgtgccagggtgggtcagtgggaagctggctgtgctgcagcttccgtgtggctgctgagcggactgagagtgggattctgatgtcttccagtgaaacagggactg

SEQ ID NO: 79494 - DNA, 293 bp, Homo sapiens
ttgaaatgttatacgctaaccagacacctcattcttcattcaaacctaggctaaatgacattggaaatggagactcttgtgattgttacctctatgcaacagaatgttaagcaaccctcttagagtgtaatcaatagcagccaatcaaatcttacacatgagcctttgtagaggaaacgtaattctgttcaacaccaccattttgttttgttttgatttgtataaacaatcctcattttttcccacacttggtgcaactgatcaccattcttgggtgtagctctgcttccctg

SEQ ID NO: 79495 - DNA, 464 bp, Homo sapiens
ggggacgggtccctcatggtttggttctgtccttgccatagtgagtgagttctcacaagatctggttgtttagaagtgtgcggcacctccctcctctctcttgccctggctgtcaccatgtacgcctgctcccctcttgccttccccgtgaataaaagctccctgaggcctccccagaagccaagtagatacgggtgctatgcttcctgtacagcctgcagagccataagccaattaaacctcttttctttgtaaattactcagtctcagatatttctttatagcaatgcaaaaatggactaacacacttgagttctgtctttttcttatggcatattttaatctaggccagacacagtggctcatgcctgtaatcccagcactttggaggccaaggcgggtggatcacttgaggtcaggagtttaagaccagcctggccaacatggggaaaccctgtctctac

SEQ ID NO: 79496 - DNA, 857 bp, Homo sapiens
attgaaattctaaccccaactaccacacagagtgaccttatttggaaatagagtctttatgaagacaattaagatgtggtcattacagtgggctctaatacgatttgactggtgtccttgtaagaaggggaaatttgaacatagacacatacatagatagggaaggaaatgcgaagacacacagaaagatgaccatcttacaagccaacaagagaggtcttaagcagatcctctcacaacctcagaaggcaccaacactgccaacatttcactctctgacttccagcctccagaagtgtgagacataattttctgtttaaggcgcctgattaataataatttgttgcagcagccacggcaaacggaaacatttgggtttctaaagacggaagcagctgggcgcggagactcaggactgtaatcccagcactttgggaggccgaggcaggcgaatcatgaggtcaggagatccaggaccatcctggataacacagtgaaaccccatctctactaaaaatacaaaatattagctgggcatggtggcgggcgcctgcctgtagtctcagttactctggaggctgacgcaggagaatcacttaaaccagggaggcggaggttgcagtgagctgagatcacaccactgcactccagctagcatgacagagcgagactccgtctcaaaaagaaataataataaaataaagaaggatgctctgaaaagggaaaggagaaaagggaggcatttgtggagtaggtgctcatcactttctcaaggatatttacaaatgtaatcatatttaccgcacagaatcctcgtaaaagtgacttaacttcctgacagagcatgagcaccatca

SEQ ID NO: 79497 - DNA, 530 bp, Homo sapiens
  misc_feature (451)..(451): n is a, c, g, or t
  misc_feature (505)..(505): n is a, c, g, or t
  misc_feature (515)..(515): n is a, c, g, or t
cacatcgccactaggtggcaggctctaacagcttaacactgagaagggcaaaatgagatgaaaaatgtttctaataatgaaaaccaaataacctttaaagatcaagcccacacataagaaccatctttgaaaatgatgagatttatcactaacatttttacaaatctatgagtcttaaagccatgtgatatttccagtgatgttcattttgtaattgtgttgctttgaatcttcctctttctaagcttaatcctcagactttacgagacatgtcttgagggtgaaaatgcagtaaaataaaattcttgtttttttaaagaagagatccacaatgtctggtgtttcctaatgtaaacaaaatgatcagatttgatgtgttagaactcctaagcattttgaaggaatttccctaagcagttggggaagagcaaattgtatgcatgtagggcanaggttttgaaggtacatttgcaagaggtatttgtttaaccaaaatatttgggangtaacatttnaggcctttaattttc

SEQ ID NO: 79498 - DNA, 331 bp, Homo sapiens
gaaaaaagtaattttcaaaatatgtagagcatgataccatccaggcaaattagaaaagtaaagctgtatatgttttccacataaacatgtatgtaaaagtataaaaaagacatttgaaggttataagcaatttcagaacagtggttgtttctaagggcagagaaggagaatcaggatgtggatagtaatcaggagggcctttagtgttatttgtagtgttcttttttttttatttttacaaatgtatggtgtaacatgaattttattacatgtatgtaatttatagtgatgaagttagggtatttagagtgtcagtcacccaagtacaata

SEQ ID NO: 79499 - DNA, 555 bp, Homo sapiens
ttctttaagacctatcagatttcttctttcagacatagttacatttacctctatttgtaaagactgctctcctggttcttctcttcctgtctggcatctagcttttttctcctctgtttacatttcatggtgtgtggtcctcagctgcctccagcttcattcacattttagctgtatctgtggctgctattttctctaagtcatattcactgtgttttatcaaaaaatcagacacaaagaatttatgcattcattagcaaagctagtttcttataatatgactgtaaattcttaagtgcttttaaaataaatgttctatctcatctggtactcctaacatttgtgttgccgtggtaatttattttctggatgtgtttattacagtgttatcacatattttgtaaaaggtcctttacttttaatgtttttaaaaattatttaaaaataaaatcgtttttcgttctcaaaacacaactgattttctaatgtaagacattaattcagatcaacaaggtatatgatggataacactgttatcattgcattattcatgct

SEQ ID NO: 79500 - DNA, 273 bp, Homo sapiens
cacatgtatgcataagaatgctcaccaaactgttaatgctagtaatctgtgggtggcggtattcaggagtttttacttttttatattgtttgaatttttaaaaataatatatattttttgtaacctgaaaaaattttttaaataagtaagtaaaacaagtccgggtgcggtggctcacgcctgtaatcccagcactttgggacgccgaggcaggcagatcacgaggtcaggagatcgagaccatcctggctaacatggtgaaacccctgtctc

SEQ ID NO: 79501 - DNA, 2066 bp, Homo sapiens
  misc_feature (851)..(851): n is a, c, g, or t
  misc_feature (853)..(853): n is a, c, g, or t
ctgcccccaaccccacaaaccattttctcagttgttcttaaggtattcatttaattcatcaactttttattgagtttaggaccaaatgccagcaattcagccaagttctaaagacacacatttaaattaaacagttatcttcaaggagcttggtgtctgcagttcagtagacacttataacaccaacagtaccattcatttgctgtgccctctgccgggttgctcttctcccagtgtttcatatggctggctacttcttatcctttaagatctctttttaagattctttctttctttttttttttttttttttttttgagacggagtcgtgctctgtcacccactgcacttcagcatgggcaacacagtgaaactccgtctcaaaataaatagtgaaataaaatcttaggaaaatgtgcacattaattcattcagtgttcttctaacacatgtgctaagtgacccctgtgttcccagatagttctaggtgatgcgaatatacagtgatgaataaaggagatatggtctttagacttttgagagtttaagtcatagtggaaggagatagacagtaaacaagtaagctaataaaagagcacctgatagtgatgagtgctgtgaagaaaataaaatattagtgtgaaaataacaggggccgggcgtggtggctcaggcctgtaatcccagcactttgggaggcccaggcgggcgaatcacctgaggtcaggagttcaagacaagcctgaccaacatggagaaaccccatctctactaaaaatacaaaattagccggggtggtggcacatgcctgtaatcccagctactcaggaggccgaggcaggagaatcacntnaacctcccaggcccaagcagtcctcccacatggtgagctttgaatgggcatagacagggttcccagcccaatagtcgggattggggtataggttctacatgggaaagtatccagtctcttgctttactcagtgtcctgtgaccaccagaggcatgagagggacaacacactcttttcgctctaccacaaggggtgactagaagatgagcaagtctaataaaaagatacggccttatttgttatttgtctgacaaccatccttacgatggtaatcctgtgagtgcctgatggacatctatctttgtgtttttctcaaaccatggaaggttgagaggaatatacagtatctgggggctgacttactctactagctaggagcatcacagcagagagataggacagagaccagagtcatgccagcttggggtcttgggaagagaggcagatggttactctgttctggaatgggactctgcagctctatgcagtggccaacattctgagcactttgtgcaaatgcttgtagagctcaagaacatctccatccagaaccccttccccatctgcagagaccatgtccaggcctttcttgtgtctgcagaggtgaagtgcacatgtggaaagggatcaaatgtagcacagtgtaaagaaagacagcaacacaggtagagggacccagtgtgtgctgggaggtggctgtggaaggtaagtatagacctacatctctgttggggaggtggtcagggcagaatggcctgggtgtttagcagcttctaggggtgagggtggcaggaccccaaaaccaaggccctctgcatcgttgttgtaataatcagctctggcatattcagctgcaactgtccctgaagaagaggtttctgagctggctgaccccatgtaggagggtgttaccttgtagaaaaagctggagggacctggtgggacagtgcagtgaggcagggtagaaatggtcagttgtttagggccagtggccacataccaaaataccaccaatgtgcccagggccaaactgccttaattctgagtgctgtgtgttctgcaggtgacagtttcctgaggagaggggtgtatccaggcttacctcccagcaggagtggtaccatatggtgtttatgtactactctatagaactcttggcttgcacttctacagctctgtacatttataagaataaatgcaatcacactagttg

SEQ ID NO: 79502 - DNA, 110 bp, Homo sapiens
atttgaagataatatttgaagatattatattacaataaatttctgttcttactcattggagcttgatgcccctaaaaacttcgtcattggaaccacctctggtgctttaa

SEQ ID NO: 79503 - DNA, 470 bp, Homo sapiens
ccaacagcaccgggtgcttctctggggtcatgcacagctcgttgtagaaggtgtggtgccagatcttctccatgtcatcccagatggtgatgatgccatgctcgatagggtacttcagggtcaggatgtcgtgcttgctctgggcctcatggcccatgtaggagtccttctggcccatgcccaccatcacaccctggtgccggggtcacctgatgatggaggggaacacagctcaggggccatccatccccagcaaagccagctttgcacatgccagagccattgtcaatgatgagcgcggcgatctctatttccattgcaacctgtggaagagcagggcggtggagccatgggaagacacggtgtgggggctggtggcagcaagtgactgtattactggattttgaagttaacaattagccaaatactgatttttgatggaaatttattctgaattattttcttttaga

SEQ ID NO: 79504 - DNA, 455 bp, Homo sapiens
tgctggggagcagaagatgggttgctctgacactgtattctcctgtgaccaatagcctgtgttgtcacagctttaccaataataggtccccttgctggagagccacttcacagctttccctattgaattcaggtcaggtctccacttcttactttaacccaatcttttacggttctccagtctgcttgcaaactcctagaattaattacatatttataagtactgtgcatattttatattttctacatttgatgtgatttttgttggtattctgtttcgtattttcaactctgataataacatttctcataaagaagactatccttacaacatgtcttcatttagaaaaagtattgctgtagatgaaattcagtgagtttcaatttgatgattttgtattaaaatgcatttctttaggcatcaatattgcagtaacaattattgatgtgttacaa

SEQ ID NO: 79505 - DNA, 227 bp, Homo sapiens
gaagggtggaaacacattagatagagttcttgaagcgggtacttttcacagctacttacattgcattggccaaagccagtcagacagccaagccttacagtgtggttgggaaagtaaaccctgaccccagagaggctctgtgggagtgtgggtgtgtgttctgccttcagaaaaagagcagtgaatcactgagggcagtaacacaatctaccacagaagggagttac

SEQ ID NO: 79506 - DNA, 622 bp, Homo sapiens
agctcacaaagcacctactcacttcatccccacaacaggcgtaaagaggtagatatttggacctcgtttcacagacaaagaaactaggcccaggaaagtggcgttgctctcaaggtcacgcagctacaacgggaaacgggctgagccgggactcaaaccaattacccagattgagaattccgggctccgaaaaaaactggaaacagaaagggagggaaaaaaaaccataaccagggtctgcccaagtggaaaggtggtctcgaatagaatagaactgttttgtgctatggaagagcaagggtgagatgaggggaaatgggagtgactgctaataggtatgggatttcgttttgggataataaaaatgttctaaaaaaaaaaacaaaaaaaaaaaaagagcacaaacagaacgaaaagaaaaaaaacaaaagaaacagaacagaagaaagagaaagagagcagggagcgcggaggggcaggagacgccacacactgaacgagaaggatgagctaggaaggtaggacagggggtgggtggaagaggagaagagggagggaggagagagtggggagaaaacaatactgaggtgtgcggtggtgcggagggagaagttgggagaag

SEQ ID NO: 79507 - DNA, 145 bp, Homo sapiens
tccgaaagtgctgggattacaggtgtgagccatcgcgcccggcctgtagttttcagtgtataagtcttgcacttcttttgttcctaatttttcaagtcactgttatatggactttctgatacataaggccaaattgaactcatga

SEQ ID NO: 79508 - DNA, 286 bp, Homo sapiens
tttggggggctgcgatggaaccccaatctccgtggtggtaccgaggtgtcaggcacactgaccgactccttggggtcccaggagctgagcggctcgtcccccaagcgacggcgggcagaggacaaggacgaaggcataggctccccggacatctgggaggacgagaaggcggaggacctgcggcgggagatgattgagctgcggcagcagctggacaaggagcgctcggtgcgcatgatgctggaggagcagccttgccaacattccactaacccccgatacaggg

SEQ ID NO: 79509 - DNA, 769 bp, Homo sapiens
taatttctaagcagcactgggactgtcatcttcccagaatggatttttcaacttaacagaggggttttgaaagtttgttcctgggtcaggcgtggtggcttatgcctgtaatcccgggacttttggaggttgaggcaggaagattgcctgaggtcaggagttcgagatcagcttgggcaacatagcaagaaccccctcgtctctaccaaaaatacagaagttagctggggatggtggcgcacccctgtggttccagctactagggagggagcagtaggaggatcgctggagcccaggagtctgactgcagtaagctatgatcatgccactgcactctagcctgggtgatatagcgagagcttgtctccaaaaaaaaagtaaaaggagtttgtttttcctgtactctagcgggcctcccctgctgctttgccaggcttttttctgggctatgtgttttgggggtgacagtggctggctgagagcccccactgtctcctggctggccatgtatccccggccgagccttctcagtggttcgtccctgtccaggcaatccagcacatcgagggcacccaggaaaagcaggagctggaggaggagcagcggcgagctgtcatcgtgaagcctgtccgcagctgcccggaggcccccacctctgacaccgcctccgactccgaggcctcagacagtgacgccatggaccagagccgggaggagccgtcgggggacggggagcttccctgactacccccccagccctcctctccct

SEQ ID NO: 79510 - DNA, 2153 bp, Homo sapiens
gacctgcaaacacacacacacacacacacacacacacacacacacacacacatacacacgcaccagggcagccgagagacctccctcccgcccctcccatgcccgcctccctcccctcgccgccgccgccgccgccagcatctgggaccggccgattctgcacctccgtccggcgctgccctttgattcggatttccatcttgcattctccggctgatcgcgggacctggctcgtgcagaggaggggggccgatcgctatggagtatttcatggtgcccactcagaaggtgccctctttgcaacatttcaggaaaacagagaaagaagtgataggagggctctgtagccttgccaacattccactaacccccgagactcagcgggaccaggagcggcggattcggcgggagatcgccaacagcaacgagcggagacgcatgcagagcatcaacgcgggattccagtccctcaagaccctcatcccccacacagacggagagaagctcagcaaggcagccattctccagcagacagccgagtacatcttctccctggagcaggagaagaccaggctcttgcagcagaacacacagctcaagcgcttcatccaggagctgagcggctcgtcccccaagcgacggcgggcagaggacaaggacgaaggcataggctccccggacatctgggaggacgagaaggcggaggacctgcggcgggagatgattgagctgcggcagcagctggacaaggagcgctcggtgcgcatgatgctggaggagcaggtgcgctcgctggaggcccacatgtacccggaaaagctcaaggtgattgcgcagcaggtgcagctgcagcagcagcaggaacaggtgaggctgctgcaccaggagaagctggagcgggaacagcagcagctgcggacccagcttctgccccctccggcccccacccaccaccccacggtgatcgtgccagcaccgcctcctcctccctcccaccacatcaatgtcgtcaccatgggcccctcctcggtcatcaactctgtttccacatcccggcaaaatctggacaccatcgtgcaggcaatccagcacatcgagggcacccaggaaaagcaggagctggaggaggagcagcggcgagctgtcatcgtgaagcctgtccgcagctgcccggaggcccccacctctgacaccgcctccgactccgaggcctcagacagtgacgccatggaccagagccgggaggagccgtcgggggacggggagcttccctgactacccccccagccctcctctcccttctgggggctggagggagccggggcagccacagggagagacatgggcgaatgagtgagaaatttttacaaaattacgatgtcatttgggtctcttttatgacctctttttcaatactgtaaatcgacctttgaacgaagccactcaacccgaggtcccggggctggggtgtcgcagagcgtgtgggagcatcggcaccccagggcggggcctcggccccgggggctggaggaagctgacacggagatgcctggcctctctctgccaaaaagcattttttcctttaaatatgttttttaagaacagggaaaattaaacaaaaccccaggttatttcttccctgcccagagccagcctgggattgtcagccttcaatcccctttccttcctctttttgggttttcttctttctcctttaagcacttacatggttgggggtaagactaggctggggcattctgggggcccggaggtctccgttgcttcttggttggggtttgctgctgctgtgcccccctcccccttccccatctcggcactagaattcgccactctcccaccccccagcccccacctctgcctccaggtctcatcttccaccccaaaaatgtctgtctctctctttttgttttgtttgttgttggttttttatttctttttggtttgctttctgtttttgttttgtttttcttttttttctttctttttttttttttttacaattttgaggtcttcgtgttcaaggagaagctattatattttgttaagaaagtggggagaaaaaaaccaagaggccaccgtgcctttgtaaagaaacaaaataaagtttgtactttgttttttaaaaaaaaaat

SEQ ID NO: 79511 - DNA, 2058 bp, Homo sapiens
gacctgcaaacacacacacacacacacacacacacacacacacacacacacatacacacgcaccagggcagccgagagacctccctcccgcccctcccatgcccgcctccctcccctcgccgccgccgccgccgccagcatctgggaccggccgattctgcacctccgtccggcgctgccctttgattcggatttccatcttgcattctccggctgatcgcgggacctggctcgtgcagaggaggggggccgatcgctatggagtatttcatggtgcccactcagaaggtgccctctttgcaacatttcaggaaaacagagaaagaagtgataggagggctctgtagccttgccaacattccactaacccccgagactcagcgggaccaggagcggcggattcggcgggagatcgccaacagcaacgagcggagacgcatgcagagcatcaacgcgggattccagtccctcaagaccctcatcccccacacagacggagagaagctcagcaaggcagccattctccagcagacagccgagtacatcttctccctggagcaggagaagaccaggctcttgcagcagaacacacagctcaagcgcttcatccaggagctgagcggctcgtcccccaagcgacggcgggcagaggacaaggacgaaggcataggctccccggacatctgggaggacgagaaggcggaggacctgcggcgggagatgattgagctgcggcagcagctggacaaggagcgctcggtgcgcatgatgctggaggagcaggtgcgctcgctggaggcccacatgtacccggaaaagctcaaggtgattgcgcagcaggtgcagctgcagcagcagcaggaacaggtgaggctgctgcaccaggagaagctggagcgggaacagcagcagctgcggacccagcttctgccccctccggcccccacccaccaccccacggtgatcgtgccagcaccgcctcctcctccctcccaccacatcaatgtcgtcaccatgggcccctcctcggtcatcaactctgtttccacatcccggcaaaatctggacaccatcgtgcaggcaatccagcacatcgagggcacccaggaaaagcaggagctggaggaggagcagcggcgagctgtcatcgtgaagcctgtccgcagctgcccggaggcccccacctctgacaccgcctccgactccgaggcctcagacagtgacgccatggaccagagccgggaggagccgtcgggggacggggagcttccctgactacccccccagccctcctctcccttctgggggctggagggagccggggcagccacagggagagacatgggcgaatgagtgagaaatttttacaaaattacgatgtcatttgggtctcttttatgacctctttttcaatactgtaaatcgacctttgaacgaagccactcaacccgaggtcccggggctggggtgtcgcagagcgtgtgggagcatcggcaccccagggcggggcctcggccccgggggctggaggaagctgacacggagatgcctggcctctctctgccaaaaagcattttttcctttaaatatgttttttaagaacagggaaaattaaacaaaaccccaggttatttcttccctgcccagagccagcctgggattgtcagccttcaatcccctttccttcctctttttgggttttcttctttctcctttaagcacttacatggttgggggtaagactagaattcgccactctcccaccccccagcccccacctctgcctccaggtctcatcttccaccccaaaaatgtctgtctctctctttttgttttgtttgttgttggttttttatttctttttggtttgctttctgtttttgttttgtttttcttttttttctttctttttttttttttttacaattttgaggtcttcgtgttcaaggagaagctattatattttgttaagaaagtggggagaaaaaaaccaagaggccaccgtgcctttgtaaagaaacaaaataaagtttgtactttgttttttaaaaaaaaaat

SEQ ID NO: 79512 - DNA, 394 bp, Homo sapiens
cacaaaatggtgttggagtttgtcaaatactttatctgcatctattaagatgatcatgcaattttaatttgttattgatagaatagaatgtattacattaatagatttttgtatgctaaaccagccttgcattcctgggagaagtttcacttggtcatggtgtataatgctttgtatatattgctgaatttggttttgtagtattttgctgaggattttcatgtctatatttagaagagatattggtctgtaattttctttttttgtggtatccttctctagttttgtcattagtgtaatactgactttattttatacataaattcataaattgcatatatttatggtgtacagtatgatgttttgaaatatattgacttcattaaaatgaggt

SEQ ID NO: 79513 - DNA, 1135 bp, Homo sapiens
cctttctgcacatttacattccactctctaaaccaaactattttagatcccttgacacattttgttattattattattttgatgactcacttttgatgtttaggcttaaacttctctaagcagccattttcttccatgtctcttcccccacgtctgtcctcacatccccacccctaagttttgaaggttgggtgctagcatcctttgctgcctctgtcagagcactttctgcaccatgcatggtaagttgtacggctgtgtcttcaattgtactgtaatacttttcagagtagagacagagtcttcttcctctgtatctccagtatctagcaaaagatacacctttggttttctgtgtttggtttcttaattttctaaattaatgagaaacattttgctgtttaggatcattggcccacggaatttttggcaaaccgtgttcatagacccaaaggaagaggagttaaaaagcctgttgccgagaactcagtctcttgcctgaacatatttagttctgttttccctgtcaaatttttcagtgcatggaaagcacaaaacggggccatagtgtgttgtaatcctgatcttgaggctcaggggaggctaggagtccactcgagtcctgggctcctgccctgtttggcctgtgcccatgctgggcttcagaacagaagctgcataagctccccaaatgagcttattctcctttgcctttcaactctcttcttccgttatcctcccaggtatttaggattatattaggttttcagttcttatcacctttcttctcaaggttctaagaagtccttcatgcagatttgtagtctctgagctttcatttccaggagctgtttgtgaagcactattacctactcgcccttacctcacagccctctctcctctagttttccctgtcacacaggtgacttttctccattcctgtgttcaaactgtctggatttcacagtgcttgacagaatcaataagaagaaaagctttcttgtttttctctctttgccaaaggacagatgaagacatcttggaaaagaagaaaagattgttgaggtgatgtttaaaagtggaactcgtgctgtgaagaaagcagcgggtagccatcctagagtacaggaaccaa

SEQ ID NO: 79514 - DNA, 1081 bp, Homo sapiens
cctttctgcacatttacattccactctctaaaccaaactattttagatcccttgacacattttgttattattattattttgatgactcacttttgatgtttaggcttaaacttctctaagcagccattttcttccatgtctcttcccccacgtctgtcctcacatccccacccctaagttttgaaggttgggtgctagcatcctttgctgcctctgtcagagcactttctgcaccatgcatggtaagttgtacggctgtgtcttcaattgtactgtaatacttttcagagtagagacagagtcttcttcctctgtatctccagtatctagcaaaagatacacctttggttttctgtgtttggtttcttaattttctaaattaatgagaaacattttgctgtttaggatcattggcccacggaatttttggcaaaccgtgttcatagacccaaaggaagaggagttaaaaagcctgttgccgagaactcagtctcttgcctgaacatatttagttctgttttccctgtcaaatttttcagtgcatggaaagcacgagtccactcgagtcctgggctcctgccctgtttggcctgtgcccatgctgggcttcagaacagaagctgcataagctccccaaatgagcttattctcctttgcctttcaactctcttcttccgttatcctcccaggtatttaggattatattaggttttcagttcttatcacctttcttctcaaggttctaagaagtccttcatgcagatttgtagtctctgagctttcatttccaggagctgtttgtgaagcactattacctactcgcccttacctcacagccctctctcctctagttttccctgtcacacaggtgacttttctccattcctgtgttcaaactgtctggatttcacagtgcttgacagaatcaataagaagaaaagctttcttgtttttctctctttgccaaaggacagatgaagacatcttggaaaagaagaaaagattgttgaggtgatgtttaaaagtggaactcgtgctgtgaagaaagcagcgggtagccatcctagagtacaggaaccaa

SEQ ID NO: 79515 - DNA, 191 bp, Homo sapiens
gggagggagggggagcccttggtctgagggggctgggagggcatggcttggctcccaaagggggtaggggcccggggcacccaggcaaggtggcccctccccgtctagccccctcctccccaaccctgcacttagtttctcctctggatcaaacacgtaataaagagaatgtttggaatctgaaaaaaatc

SEQ ID NO: 79516 - DNA, 784 bp, Homo sapiens
  misc_feature (783)..(783): n is a, c, g, or t
ccgctgacaaagcacttctctgtagtcattaccacacctacttaagatactggttaagacttgtgacttacacagccaaagaatcagatagactgatatcagacttacaaatcaatatggacacacttccctaagggtaactgtaatggagaatacccatgttacgatttttttaagtaatttttttttatttttttgagacaaggtctcaagcaatcctcccacctctgcctcccaaggagctgggtcctcaccatcatcaggcgctgagctggtgtgaaatcagttcttcccgtgccatgctcctgggcttttctcccactataaataactccagccttctgacagaccacatgatctctccaacgctggacaatattcccaacactagtgttcctctgcccacccatcaaaaaagaggcaagactgagcccactgtaaccaggagcaacaaagcaggcagacacgttggtgtcaggggcaaggacagaactcagcaaagccaggagggcttggctctctggctctggtccccactccaggaagccagacgatttcctcagcagtgcatcctccctgtggtttcctctccgagttcttaacacaatccagcaatggtgtaaattttctccctcatcttctcatcctgaaaaagcacttctctgtagtcattaccacacctacttaagatactggttaagacttgtgacttacacagccaaagaatcagatagactgatatcagacttacaaatcaatatggacacacttcctaagggtaana

SEQ ID NO: 79517 - DNA, 4398 bp, Homo sapiens
tcctggaattgcacgcgcttcctgaccaccaggctctggcccttgagaagccagcggggctttgtccctgttgctctccttgccaaacccagtctctctgctagtggtggtttcggttgcgacaccgtccaggttcccaggcaggaaccgctcggcctggctgcttagctacttttcactgaggaggtggtggaaggtgtcgcctgctctggctgagtaagggtggctggctgagccggcagcccccgccctaggcctggctcttcccggcctctgtactttgccctcgctgcctgacaggttctgctgtgggctctgctgaatggaagtcgctggtagtccttttccctttctccagtcggcccaccttgggacaccttgactccaagcccagcagtaagtccaacatgattcggggccgcaactcagccacctctgctgatgagcagccccacattggaaactaccggctcctcaagaccattggcaagggtaattttgccaaggtgaagttggcccgacacatcctgactgggaaagaggtagctgtgaagatcattgacaagactcaactgaactcctccagcctccagaaactattccgcgaagtaagaataatgaaggttttgaatcatcccaacatagttaaattatttgaagtgattgagactgagaaaacgctctaccttgtcatggagtacgctagtggcggagaggtatttgattacctagtggctcatggcaggatgaaagaaaaagaggctcgagccaaattccgccagatagtgtctgctgtgcagtactgtcaccagaagtttattgtccatagagacttaaaggcagaaaacctgctcttggatgctgatatgaacatcaagattgcagactttggcttcagcaatgaattcacctttgggaacaagctggacaccttctgtggcagtcccccttatgctgccccagaactcttccagggcaaaaaatatgatggacccgaggtggatgtgtggagcctaggagttatcctctatacactggtcagcggatccctgccttttgatggacagaacctcaaggagctgcgggaacgggtactgaggggaaaataccgtattccattctacatgtccacggactgtgaaaacctgcttaagaaatttctcattcttaatcccagcaagagaggcactttagagcaaatcatgaaagatcgatggatgaatgtgggtcacgaagatgatgaactaaagccttacgtggagccactccctgactacaaggacccccggcggacagagctgatggtgtccatgggttatacacgggaagagatccaggactcgctggtgggccagagatacaacgaggtgatggccacctatctgctcctgggctacaagagctccgagctggaaggcgacaccatcaccctgaaaccccggccttcagctgatctgaccaatagcagcgccccatccccatcccacaaggtacagcgcagcgtgtcggccaatcccaagcagcggcgcttcagcgaccaggctggtcctgccattcccacctctaattcttactctaagaagactcagagtaacaacgcagaaaataagcggcctgaggaggaccgggagtcagggcggaaagccagcagcacagccaaggtgcctgccagccccctgcccggtctggagaggaagaagaccaccccaaccccctccacgaacagcgtcctctccaccagcacaaatcgaagcaggaattccccacttttggagcgggccagcctcggccaggcctccatccagaatggcaaagacagcctaaccatgccagggtcccgggcctccacggcttctgcttctgccgcagtctctgcggcccggccccgccagcaccagaaatccatgtcggcctccgtgcaccccaacaaggcctctgggctgccccccacggagagtaactgtgaggtgccgcggcccagcacagccccccagcgtgtccctgttgcctccccatccgcccacaacatcagcagcagtggtggagccccagaccgaactaacttcccccggggtgtgtccagccgaagcaccttccatgctgggcagctccgacaggtgcgggaccagcagaatttgccctacggtgtgaccccagcctctccctctggccacagccagggccggcggggggcctctgggagcatcttcagcaagttcacctccaagtttgtacgcaggaacctgaatgaacctgaaagcaaagaccgagtggagacgctcagacctcacgtggtgggcagtggcggcaacgacaaagaaaaggaagaatttcgggaggccaagccccgctccctccgcttcacgtggagtatgaagaccacgagctccatggagcccaacgagatgatgcgggagatccgcaaggtgctggacgcgaacagctgccagagcgagctgcatgagaagtacatgctgctgtgcatgcacggcacgccgggccacgaggacttcgtgcagtgggagatggaggtgtgcaaactgccgcggctctctctcaacggggttcgatttaagcggatatcgggcacctccatggccttcaaaaacattgcctccaaaatagccaacgagctgaagctttaacaggctgccaggagcgggggcggcgggggcgggccagctggacgggctgccggccgctgcgccgccccacctgggcgagactgcagcgatggattggtgtgtctcccctgctggcacttctcccctccctggcccttctcagttttctccccacattcacccctgcccagagattcccccttctcctctcccctactggaggcaaaggaaggggagggtggatgggggggcagggctccccctcggtactgcggttgcacagagtatttcgcctaaaccaagaaattttttattaccaaaaagaaaaaagaaaaaaaaaatcccagcggccacctttcctccctgccccattgggacagtcgagactggatctgtggggtttcccgggagggtggctcagggctggaacactctcaggcaagagtggtggagctcccgtcaggccctccgccaggcccactgtgggcttctcccctctcctccctccttcccctccaagcaaaccaccagaggtggccttcccctgacctcaggcccctgggctggaggcctgggcggtggggcagggggcgggggtgctgcgcagccctgcagtgggtggggctgggggctgctccggggctgctgaggctggagggccggcacaaggctccgcctccctccacactgtaccctctgcccctcctccccagagctgggcatttccttccacaagctgctgtggggacgtgtgttccctcaaagtctgtgccatcttctcccacccctcccgggtagaaggaggggctgaccccagggctgggagaggggaggggactggagggcagactggcttctcggtccccagggggccgcttgggctgttggtctccagagcagggccactgggcactctgtgatgggggagcctttgtctgaaagcacagccccctcgcccttcctctccccatggcttccccttcattggcattaatctgggcaccagctctctccatagcagtgacttccctcaccactctcatctctcagccttgccttttcttcctgacactgtcgccccctcctctcaggagacactgccgagggccacctggcagaaggctgagttaggcagcagggccgggagcgtctgccctccacagggtgggggacagataggctaagcgactcccagcttgctaccctcagtggccagtgtgggcgtgggcggtttggggcgcttggctggtggtggccactgcatcccttaatttatttctctgctgtttctgttcttgagaaattgggggtgggagtcctacacagaggctgcccctaccctcacctgagttgtacatttttttgtgatgggttttattttttattattttattttatttttttttttttttgatttatgatgactccacccctcttcatcacccccgctcccaggccaggctcagcgattaagccgagcccttgcgtcctaggaaggggccttgccaacctcagccctcctgccccacactcctactgcggctcagaccaagggctccccctccctcccttcccccctcctgccctatggaacagcccgggtgctctgagggggctgggagggcatggcttggctcccaaagggggtaggggcccggggcacccaggcaaggtggcccctccccgtctagccccctcctccccaaccctgcacttagtttctcctctggatcaaacacgtaataaagagaatgtttggaatctgaaaaaaatc

SEQ ID NO: 79518 - DNA, 3573 bp, Homo sapiens
tcctggaattgcacgcgcttcctgaccaccaggctctggcccttgagaagccagcggggctttgtccctgttgctctccttgccaaacccagtctctctgctagtggtggtttcggttgcgacaccgtccaggttcccaggcaggaaccgctcggcctggctgcttagctacttttcactgaggaggtggtggaaggtgtcgcctgctctggctgagtaagggtggctggctgagccggcagcccccgccctaggcctggctcttcccggcctctgtactttgccctcgctgcctgacaggttctgctgtgggctctgctgaatggaagtcgctggtagtccttttccctttctccagtcggcccaccttgggacaccttgactccaagcccagcagtaagtccaacatgattcggggccgcaactcagccacctctgctgatgagcagccccacattggaaactaccggctcctcaagaccattggcaagggtaattttgccaaggtgaagttggcccgacacatcctgactgggaaagaggtagctgtgaagatcattgacaagactcaactgaactcctccagcctccagaaactattccgcgaagtaagaataatgaaggttttgaatcatcccaacatagttaaattatttgaagtgattgagactgagaaaacgctctaccttgtcatggagtacgctagtggcggagaggtatttgattacctagtggctcatggcaggatgaaagaaaaagaggctcgagccaaattccgccagatagtgtctgctgtgcagtactgtcaccagaagtttattgtccatagagacttaaaggcagaaaacctgctcttggatgctgatatgaacatcaagattgcagactttggcttcagcaatgaattcacctttgggaacaagctggacaccttctgtggcagtcccccttatgctgccccagaactcttccagggcaaaaaatatgatggacccgaggtggatgtgtggagcctaggagttatcctctatacactggtcagcggatccctgccttttgatggacagaacctcaaggagctgcgggaacgggtactgaggggaaaataccgtattccattctacatgtccacggactgtgaaaacctgcttaagaaatttctcattcttaatcccagcaagagaggcactttagagcaaatcatgaaagatcgatggatgaatgtgggtcacgaagatgatgaactaaagccttacgtggagccactccctgactacaaggacccccggcggacagagctgatggtgtccatgggttatacacgggaagagatccaggactcgctggtgggccagagatacaacgaggtgatggccacctatctgctcctgggctacaagagctccgagctggaaggcgacaccatcaccctgaaaccccggccttcagctgatctgaccaatagcagcgccccatccccatcccacaaggtacagcgcagcgtgtcggccaatcccaagcagcggcgcttcagcgaccaggctggtcctgccattcccacctctaattcttactctaagaagactcagagtaacaacgcagaaaataagcggcctgaggaggaccgggagtcagggcggaaagccagcagcacagccaaggtgcctgccagccccctgcccggtctggagaggaagaagaccaccccaaccccctccacgaacagcgtcctctccaccagcacaaatcgaagcaggaattccccacttttggagcgggccagcctcggccaggcctccatccagaatggcaaagacagcctaaccatgccagggtcccgggcctccacggcttctgcttctgccgcagtctctgcggcccggccccgccagcaccagaaatccatgtcggcctccgtgcaccccaacaaggcctctgggctgccccccacggagagtaactgtgaggtgccgcggcccagcacagccccccagcgtgtccctgttgcctccccatccgcccacaacatcagcagcagtggtggagccccagaccgaactaacttcccccggggtgtgtccagccgaagcaccttccatgctgggcagctccgacaggtgcgggaccagcagaatttgccctacggtgtgaccccagcctctccctctggccacagccagggccggcggggggcctctgggagcatcttcagcaagttcacctccaagtttgtacgcaggaacctgaatgaacctgaaagcaaagaccgagtggagacgctcagacctcacgtggtgggcagtggcggcaacgacaaagaaaaggaagaatttcgggaggccaagccccgctccctccgcttcacgtggagtatgaagaccacgagctccatggagcccaacgagatgatgcgggagatccgcaaggtgctggacgcgaacagctgccagagcgagctgcatgagaagtacatgctgctgtgcatgcacggcacgccgggccacgaggacttcgtgcagtgggagatggaggtgtgcaaactgccgcggctctctctcaacggggttcgatttaagcggatatcgggcacctccatggccttcaaaaacattgcctccaaaatagccaacgagctgaagctttaacaggctgccaggagcgggggcggcgggggcgggccagctggacgggctgccggccgctgcgccgccccacctgggcgagactgcagcgatggattggtgtgtctcccctgctggcacttctcccctccctggcccttctcagttttctccccacattcacccctgcccagagattcccccttctcctctcccctactggaggcaaaggaaggggagggtggatgggggggcagggctccccctcggtactgcggttgcacagagtatttcgcctaaaccaagaaattttttattaccaaaaagaaaaaagaaaaaaaaaatcccagcggccacctttcctccctgccccattgggacagtcgagactggatctgtggggtttcccgggagggtggctcagggctggaacactctcaggcaagagtggtggagctcccgtcaggccctccgccaggcccactgtgggcttctcccctctcctccctccttcccctccaagcaaaccaccagaggtggccttcccctgacctcaggcccctgggctggaggcctgggcggtggggcagggggcgggggtgctgcgcagccctgcagtgggtggggctgggggctgctccggggctgctgaggctggagggccggcacaaggctccgcctccctccacactgtaccctctgcccctcctccccagagctgggcatttccttccacaagctgctgtggggacgtgtgttccctcaaagtctgtgccatcttctcccacccctcccgggtagaaggaggggctgaccccagggctgggagaggggaggggactggagggcagactggcttctcggtccccagggggccgcttgggctgttggtctccagagcagcctctggagttgacagcctctgagtggcagccactagagttgtctcggt

SEQ ID NO: 79519 - DNA, 4560 bp, Homo sapiens
agggccggcggtggtggcggccatgttgggagcagcaggtccggcggcggctgcctgtgtgccgggcgcggagcagtgccgctgagggcaggggaggagcgaggcaggcggccggctgcggcggcagagagtaggcggagcggcgcggcccggccgaaaggcggcacagcccagccgggggtcgggggggtgcggtccggagccgctcggagccggcgcggcctagcccgagcggcgcatccccgggctggcgtgagcggctgcccggcctccccgcacccccggccggggcccatgcggcgggtgctcctgctgtgagaagccccgcccggccgggctccgcgccttcccttccctcccttcctccaagcttctcggttccctcccccgagataccggcgccatgtccagcgctcggacccccctacccacgctgaacgagagggacacggagcagcccaccttgggacaccttgactccaagcccagcagtaagtccaacatgattcggggccgcaactcagccacctctgctgatgagcagccccacattggaaactaccggctcctcaagaccattggcaagggtaattttgccaaggtgaagttggcccgacacatcctgactgggaaagaggtagctgtgaagatcattgacaagactcaactgaactcctccagcctccagaaactattccgcgaagtaagaataatgaaggttttgaatcatcccaacatagttaaattatttgaagtgattgagactgagaaaacgctctaccttgtcatggagtacgctagtggcggagaggtatttgattacctagtggctcatggcaggatgaaagaaaaagaggctcgagccaaattccgccagatagtgtctgctgtgcagtactgtcaccagaagtttattgtccatagagacttaaaggcagaaaacctgctcttggatgctgatatgaacatcaagattgcagactttggcttcagcaatgaattcacctttgggaacaagctggacaccttctgtggcagtcccccttatgctgccccagaactcttccagggcaaaaaatatgatggacccgaggtggatgtgtggagcctaggagttatcctctatacactggtcagcggatccctgccttttgatggacagaacctcaaggagctgcgggaacgggtactgaggggaaaataccgtattccattctacatgtccacggactgtgaaaacctgcttaagaaatttctcattcttaatcccagcaagagaggcactttagagcaaatcatgaaagatcgatggatgaatgtgggtcacgaagatgatgaactaaagccttacgtggagccactccctgactacaaggacccccggcggacagagctgatggtgtccatgggttatacacgggaagagatccaggactcgctggtgggccagagatacaacgaggtgatggccacctatctgctcctgggctacaagagctccgagctggaaggcgacaccatcaccctgaaaccccggccttcagctgatctgaccaatagcagcgccccatccccatcccacaaggtacagcgcagcgtgtcggccaatcccaagcagcggcgcttcagcgaccaggctggtcctgccattcccacctctaattcttactctaagaagactcagagtaacaacgcagaaaataagcggcctgaggaggaccgggagtcagggcggaaagccagcagcacagccaaggtgcctgccagccccctgcccggtctggagaggaagaagaccaccccaaccccctccacgaacagcgtcctctccaccagcacaaatcgaagcaggaattccccacttttggagcgggccagcctcggccaggcctccatccagaatggcaaagacagcctaaccatgccagggtcccgggcctccacggcttctgcttctgccgcagtctctgcggcccggccccgccagcaccagaaatccatgtcggcctccgtgcaccccaacaaggcctctgggctgccccccacggagagtaactgtgaggtgccgcggcccagcacagccccccagcgtgtccctgttgcctccccatccgcccacaacatcagcagcagtggtggagccccagaccgaactaacttcccccggggtgtgtccagccgaagcaccttccatgctgggcagctccgacaggtgcgggaccagcagaatttgccctacggtgtgaccccagcctctccctctggccacagccagggccggcggggggcctctgggagcatcttcagcaagttcacctccaagtttgtacgcaggaaatctgtctttcaggtttgccagaaggaacctgaatgaacctgaaagcaaagaccgagtggagacgctcagacctcacgtggtgggcagtggcggcaacgacaaagaaaaggaagaatttcgggaggccaagccccgctccctccgcttcacgtggagtatgaagaccacgagctccatggagcccaacgagatgatgcgggagatccgcaaggtgctggacgcgaacagctgccagagcgagctgcatgagaagtacatgctgctgtgcatgcacggcacgccgggccacgaggacttcgtgcagtgggagatggaggtgtgcaaactgccgcggctctctctcaacggggttcgatttaagcggatatcgggcacctccatggccttcaaaaacattgcctccaaaatagccaacgagctgaagctttaacaggctgccaggagcgggggcggcgggggcgggccagctggacgggctgccggccgctgcgccgccccacctgggcgagactgcagcgatggattggtgtgtctcccctgctggcacttctcccctccctggcccttctcagttttctcttacatgtttgtggggggtgggagattgttctccagccccccacattcacccctgcccagagattcccccttctcctctcccctactggaggcaaaggaaggggagggtggatgggggggcagggctccccctcggtactgcggttgcacagagtatttcgcctaaaccaagaaattttttattaccaaaaagaaaaaagaaaaaaaaaatcccagcggccacctttcctccctgccccattgggacagtcgagactggatctgtggggtttcccgggagggtggctcagggctggaacactctcaggcaagagtggtggagctcccgtcaggccctccgccaggcccactgtgggcttctcccctctcctccctccttcccctccaagcaaaccaccagaggtggccttcccctgacctcaggcccctgggctggaggcctgggcggtggggcagggggcgggggtgctgcgcagccctgcagtgggtggggctgggggctgctccggggctgctgaggctggagggccggcacaaggctccgcctccctccacactgtaccctctgcccctcctccccagagctgggcatttccttccacaagctgctgtggggacgtgtgttccctcaaagtctgtgccatcttctcccacccctcccgggtagaaggaggggctgaccccagggctgggagaggggaggggactggagggcagactggcttctcggtccccagggggccgcttgggctgttggtctccagagcagggccactgggcactctgtgatgggggagcctttgtctgaaagcacagccccctcgcccttcctctccccatggcttccccttcattggcattaatctgggcaccagctctctccatagcagtgacttccctcaccactctcatctctcagccttgccttttcttcctgacactgtcgccccctcctctcaggagacactgccgagggccacctggcagaaggctgagttaggcagcagggccgggagcgtctgccctccacagggtgggggacagataggctaagcgactcccagcttgctaccctcagtggccagtgtgggcgtgggcggtttggggcgcttggctggtggtggccactgcatcccttaatttatttctctgctgtttctgttcttgagaaattgggggtgggagtcctacacagaggctgcccctaccctcacctgagttgtacatttttttgtgatgggttttattttttattattttattttatttttttttttttttgatttatgatgactccacccctcttcatcacccccgctcccaggccaggctcagcgattaagccgagcccttgcgtcctaggaaggggccttgccaacctcagccctcctgccccacactcctactgcggctcagaccaagggctccccctccctcccttcccccctcctgccctatggaacagcccgggtgctctgagggggctgggagggcatggcttggctcccaaagggggtaggggcccggggcacccaggcaaggtggcccctccccgtctagccccctcctccccaaccctgcacttagtttctcctctggatcaaacacgtaataaagagaatgtttggaatctgaaaaaaatc

SEQ ID NO: 79520 - DNA, 3986 bp, Homo sapiens
  misc_feature (14)..(14): n is a, c, g, or t
atagcccgcggtantcggcacgaggcagaccattggcaagggtaattttgccaaggtgaagttggcccgacacatcctgactgggaaagaggtagctgtgaagatcattgacaagactcaactgaactcctccagcctccagaaactattccgcgaagtaagaataatgaaggttttgaatcatcccaacatagttaaattatttgaagtgattgagactgagaaaacgctctaccttgtcatggagtacgctagtggcggagaggtatttgattacctagtggctcatggcaggatgaaagaaaaagaggctcgagccaaattccgccagatagtgtctgctgtgcagtactgtcaccagaagtttattgtccatagagacttaaaggcagaaaacctgctcttggatgctgatatgaacatcaagattgcagactttggcttcagcaatgaattcacctttgggaacaagctggacaccttctgtggcagtcccccttatgctgccccagaactcttccagggcaaaaaatatgatggacccgaggtggatgtgtggagcctaggagttatcctctatacactggtcagcggatccctgccttttgatggacagaacctcaaggagctgcgggaacgggtactgaggggaaaataccgtattccattctacatgtccacggactgtgaaaacctgcttaagaaatttctcattcttaatcccagcaagagaggcactttagagcaaatcatgaaagatcgatggatgaatgtgggtcacgaagatgatgaactaaagccttacgtggagccactccctgactacaaggacccccggcggacagagctgatggtgtccatgggttatacacgggaagagatccaggactcgctggtgggccagagatacaacgaggtgatggccacctatctgctcctgggctacaagagctccgagctggaaggcgacaccatcaccctgaaaccccggccttcagctgatctgaccaatagcagcgccccatccccatcccacaaggtacagcgcagcgtgtcggccaatcccaagcagcggcgcttcagcgaccaggctggtcctgccattcccacctctaattcttactctaagaagactcagagtaacaacgcagaaaataagcggcctgaggaggaccgggagtcagggcggaaagccagcagcacagccaaggtgcctgccagccccctgcccggtctggagaggaagaagaccaccccaaccccctccacgaacagcgtcctctccaccagcacaaatcgaagcaggaattccccacttttggagcgggccagcctcggccaggcctccatccagaatggcaaagacagcctaaccatgccagggtcccgggcctccacggcttctgcttctgccgcagtctctgcggcccggccccgccagcaccagaaatccatgtcggcctccgtgcaccccaacaaggcctctgggctgccccccacggagagtaactgtgaggtgccgcggcccagcacagccccccagcgtgtccctgttgcctccccatccgcccacaacatcagcagcagtggtggagccccagaccgaactaacttcccccggggtgtgtccagccgaagcaccttccatgctgggcagctccgacaggtgcgggaccagcagaatttgccctacggtgtgaccccagcctctccctctggccacagccagggccggcggggggcctctgggagcatcttcagcaagttcacctccaagtttgtacgcaggaacctgaatgaacctgaaagcaaagaccgagtggagacgctcagacctcacgtggtgggcagtggcggcaacgacaaagaaaaggaagaatttcgggaggccaagccccgctccctccgcttcacgtggagtatgaagaccacgagctccatggagcccaacgagatgatgcgggagatccgcaaggtgctggacgcgaacagctgccagagcgagctgcatgagaagtacatgctgctgtgcatgcacggcacgccgggccacgaggacttcgtgcagtgggagatggaggtgtgcaaactgccgcggctctctctcaacggggttcgatttaagcggatatcgggcacctccatggccttcaaaaacattgcctccaaaatagccaacgagctgaagctttaacaggctgccaggagcgggggcggcgggggcgggccagctggacgggctgccggccgctgcgccgccccacctgggcgagactgcagcgatggattggtgtgtctcccctgctggcacttctcccctccctggcccttctcagttttctcttacatgtttgtggggggtgggagattgttctccagccccccacattcacccctgcccagagattcccccttctcctctcccctactggaggcaaaggaaggggagggtggatgggggggcagggctccccctcggtactgcggttgcacagagtatttcgcctaaaccaagaaattttttattaccaaaaagaaaaaagaaaaaaaaaatcccagcggccacctttcctccctgccccattgggacagtcgagactggatctgtggggtttcccgggagggtggctcagggctggaacactctcaggcaagagtggtggagctcccgtcaggccctccgccaggcccactgtgggcttctcccctctcctccctccttcccctccaagcaaaccaccagaggtggccttcccctgacctcaggcccctgggctggaggcctgggcggtggggcagggggcgggggtgctgcgcagccctgcagtgggtggggctgggggctgctccggggctgctgaggctggagggccggcacaaggctccgcctccctccacactgtaccctctgcccctcctccccagagctgggcatttccttccacaagctgctgtggggacgtgtgttccctcaaagtctgtgccatcttctcccacccctcccgggtagaaggaggggctgaccccagggctgggagaggggaggggactggagggcagactggcttctcggtccccagggggccgcttgggctgttggtctccagagcagggccactgggcactctgtgatgggggagcctttgtctgaaagcacagccccctcgcccttcctctccccatggcttccccttcattggcattaatctgggcaccagctctctccatagcagtgacttccctcaccactctcatctctcagccttgccttttcttcctgacactgtcgccccctcctctcaggagacactgccgagggccacctggcagaaggctgagttaggcagcagggccgggagcgtctgccctccacagggtgggggacagataggctaagcgactcccagcttgctaccctcagtggccagtgtgggcgtgggcggtttggggcgcttggctggtggtggccactgcatcccttaatttatttctctgctgtttctgttcttgagaaattgggggtgggagtcctacacagaggctgcccctaccctcacctgagttgtacatttttttgtgatgggttttattttttattattttattttatttttttttttttttgatttatgatgactccacccctcttcatcacccccgctcccaggccaggctcagcgattaagccgagcccttgcgtcctaggaaggggccttgccaacctcagccctcctgccccacactcctactgcggctcagaccaagggctccccctccctcccttcccccctcctgccctatggaacagcccgggtgctctgagggggctgggagggcatggcttggctcccaaagggggtaggggcccggggcacccaggcaaggtggcccctccccgtctagccccctcctccccaaccctgcacttagtttctcctctggatcaaacacgtaataaagagaatgtttggaatctgaaaaaaatc

SEQ ID NO: 79521 - DNA, 3180 bp, Homo sapiens
agggccggcggtggtggcggccatgttgggagcagcaggtccggcggcggctgcctgtgtgccgggcgcggagcagtgccgctgagggcaggggaggagcgaggcaggcggccggctgcggcggcagagagtaggcggagcggcgcggcccggccgaaaggcggcacagcccagccgggggtcgggggggtgcggtccggagccgctcggagccggcgcggcctagcccgagcggcgcatccccgggctggcgtgagcggctgcccggcctccccgcacccccggccggggcccatgcggcgggtgctcctgctgtgagaagccccgcccggccgggctccgcgccttcccttccctcccttcctccaagcttctcggttccctcccccgagataccggcgccatgtccagcgctcggacccccctacccacgctgaacgagagggacacggagcagcccaccttgggacaccttgactccaagcccagcagtaagtccaacatgattcggggccgcaactcagccacctctgctgatgagcagccccacattggaaactaccggctcctcaagaccattggcaagggtaattttgccaaggtgaagttggcccgacacatcctgactgggaaagaggtagctgtgaagatcattgacaagactcaactgaactcctccagcctccagaaactattccgcgaagtaagaataatgaaggttttgaatcatcccaacatagttaaattatttgaagtgattgagactgagaaaacgctctaccttgtcatggagtacgctagtggcggagaggtatttgattacctagtggctcatggcaggatgaaagaaaaagaggctcgagccaaattccgccagatagtgtctgctgtgcagtactgtcaccagaagtttattgtccatagagacttaaaggcagaaaacctgctcttggatgctgatatgaacatcaagattgcagactttggcttcagcaatgaattcacctttgggaacaagctggacaccttctgtggcagtcccccttatgctgccccagaactcttccagggcaaaaaatatgatggacccgaggtggatgtgtggagcctaggagttatcctctatacactggtcagcggatccctgccttttgatggacagaacctcaaggagctgcgggaacgggtactgaggggaaaataccgtattccattctacatgtccacggactgtgaaaacctgcttaagaaatttctcattcttaatcccagcaagagaggcactttagagcaaatcatgaaagatcgatggatgaatgtgggtcacgaagatgatgaactaaagccttacgtggagccactccctgactacaaggacccccggcggacagagctgatggtgtccatgggttatacacgggaagagatccaggactcgctggtgggccagagatacaacgaggtgatggccacctatctgctcctgggctacaagagctccgagctggaaggcgacaccatcaccctgaaaccccggccttcagctgatctgaccaatagcagcgccccatccccccccacattcacccctgcccagagattcccccttctcctctcccctactggaggcaaaggaaggggagggtggatgggggggcagggctccccctcggtactgcggttgcacagagtatttcgcctaaaccaagaaattttttattaccaaaaagaaaaaagaaaaaaaaaatcccagcggccacctttcctccctgccccattgggacagtcgagactggatctgtggggtttcccgggagggtggctcagggctggaacactctcaggcaagagtggtggagctcccgtcaggccctccgccaggcccactgtgggcttctcccctctcctccctccttcccctccaagcaaaccaccagaggtggccttcccctgacctcaggcccctgggctggaggcctgggcggtggggcagggggcgggggtgctgcgcagccctgcagtgggtggggctgggggctgctccggggctgctgaggctggagggccggcacaaggctccgcctccctccacactgtaccctctgcccctcctccccagagctgggcatttccttccacaagctgctgtggggacgtgtgttccctcaaagtctgtgccatcttctcccacccctcccgggtagaaggaggggctgaccccagggctgggagaggggaggggactggagggcagactggcttctcggtccccagggggccgcttgggctgttggtctccagagcagggccactgggcactctgtgatgggggagcctttgtctgaaagcacagccccctcgcccttcctctccccatggcttccccttcattggcattaatctgggcaccagctctctccatagcagtgacttccctcaccactctcatctctcagccttgccttttcttcctgacactgtcgccccctcctctcaggagacactgccgagggccacctggcagaaggctgagttaggcagcagggccgggagcgtctgccctccacagggtgggggacagataggctaagcgactcccagcttgctaccctcagtggccagtgtgggcgtgggcggtttggggcgcttggctggtggtggccactgcatcccttaatttatttctctgctgtttctgttcttgagaaattgggggtgggagtcctacacagaggctgcccctaccctcacctgagttgtacatttttttgtgatgggttttattttttattattttattttatttttttttttttttgatttatgatgactccacccctcttcatcacccccgctcccaggccaggctcagcgattaagccgagcccttgcgtcctaggaaggggccttgccaacctcagccctcctgccccacactcctactgcggctcagaccaagggctccccctccctcccttcccccctcctgccctatggaacagcccgggtgctctgagggggctgggagggcatggcttggctcccaaagggggtaggggcccggggcacccaggcaaggtggcccctccccgtctagccccctcctccccaaccctgcacttagtttctcctctggatcaaacacgtaataaagagaatgtttggaatctgaaaaaaatc

SEQ ID NO: 79522 - DNA, 2198 bp, Homo sapiens
  misc_feature (45)..(45): n is a, c, g, or t
tccaatgtggggctgctcatcagcagaggtggctgagttgcggcnccgaatcatgttggacttactgctgggcttggagtcaaggtgtcccaaggtgggcatcatcaggcgctgagctggtgtgaaatcagttcttcccgtgccatgctccatggagcccaacgagatgatgcgggagatccgcaaggtgctggacgcgaacagctgccagagcgagctgcatgagaagtacatgctgctgtgcatgcacggcacgccgggccacgaggacttcgtgcagtgggagatggaggtgtgcaaactgccgcggctctctctcaacggggttcgatttaagcggatatcgggcacctccatggccttcaaaaacattgcctccaaaatagccaacgagctgaagctttaacaggctgccaggagcgggggcggcgggggcgggccagctggacgggctgccggccgctgcgccgccccacctgggcgagactgcagcgatggattggtgtgtctcccctgctggcacttctcccctccctggcccttctcagttttctcttacatgtttgtggggggtgggagattgttctccagccccccacattcacccctgcccagagattcccccttctcctctcccctactggaggcaaaggaaggggagggtggatgggggggcagggctccccctcggtactgcggttgcacagagtatttcgcctaaaccaagaaattttttattaccaaaaagaaaaaagaaaaaaaaaatcccagcggccacctttcctccctgccccattgggacagtcgagactggatctgtggggtttcccgggagggtggctcagggctggaacactctcaggcaagagtggtggagctcccgtcaggccctccgccaggcccactgtgggcttctcccctctcctccctccttcccctccaagcaaaccaccagaggtggccttcccctgacctcaggcccctgggctggaggcctgggcggtggggcagggggcgggggtgctgcgcagccctgcagtgggtggggctgggggctgctccggggctgctgaggctggagggccggcacaaggctccgcctccctccacactgtaccctctgcccctcctccccagagctgggcatttccttccacaagctgctgtggggacgtgtgttccctcaaagtctgtgccatcttctcccacccctcccgggtagaaggaggggctgaccccagggctgggagaggggaggggactggagggcagactggcttctcggtccccagggggccgcttgggctgttggtctccagagcagggccactgggcactctgtgatgggggagcctttgtctgaaagcacagccccctcgcccttcctctccccatggcttccccttcattggcattaatctgggcaccagctctctccatagcagtgacttccctcaccactctcatctctcagccttgccttttcttcctgacactgtcgccccctcctctcaggagacactgccgagggccacctggcagaaggctgagttaggcagcagggccgggagcgtctgccctccacagggtgggggacagataggctaagcgactcccagcttgctaccctcagtggccagtgtgggcgtgggcggtttggggcgcttggctggtggtggccactgcatcccttaatttatttctctgctgtttctgttcttgagaaattgggggtgggagtcctacacagaggctgcccctaccctcacctgagttgtacatttttttgtgatgggttttattttttattattttattttatttttttttttttttgatttatgatgactccacccctcttcatcacccccgctcccaggccaggctcagcgattaagccgagcccttgcgtcctaggaaggggccttgccaacctcagccctcctgccccacactcctactgcggctcagaccaagggctccccctccctcccttcccccctcctgccctatggaacagcccgggtgctctgagggggctgggagggcatggcttggctcccaaagggggtaggggcccggggcacccaggcaaggtggcccctccccgtctagccccctcctccccaaccctgcacttagtttctcctctggatcaaacacgtaataaagagaatgtttggaatctgaaaaaaatc

SEQ ID NO: 79523 - DNA, 2144 bp, Homo sapiens
ccgtgacgcccgcctctgccctctccacagacctcacgtggtgggcagtggcggcaacgacaaagaaaaggaagaatttcgggaggccaagccccgctccctccgcttcacgtggagtatgaagaccacgagctccatggagcccaacgagatgatgcgggagatccgcaaggtgctggacgcgaacagctgccagagcgagctgcatgagaagtacatgctgctgtgcatgcacggcacgccgggccacgaggacttcgtgcagtgggagatggaggtgtgcaaactgccgcggctctctctcaacggggttcgatttaagcggatatcgggcacctccatggccttcaaaaacattgcctccaaaatagccaacgagctgaagctttaacaggctgccaggagcgggggcggcgggggcgggccagctggacgggctgccggccgctgcgccgccccacctgggcgagactgcagcgatggattggtgtgtctcccctgctggcacttctcccctccctggcccttctcagttttctccccacattcacccctgcccagagattcccccttctcctctcccctactggaggcaaaggaaggggagggtggatgggggggcagggctccccctcggtactgcggttgcacagagtatttcgcctaaaccaagaaattttttattaccaaaaagaaaaaagaaaaaaaaaatcccagcggccacctttcctccctgccccattgggacagtcgagactggatctgtggggtttcccgggagggtggctcagggctggaacactctcaggcaagagtggtggagctcccgtcaggccctccgccaggcccactgtgggcttctcccctctcctccctccttcccctccaagcaaaccaccagaggtggccttcccctgacctcaggcccctgggctggaggcctgggcggtggggcagggggcgggggtgctgcgcagccctgcagtgggtggggctgggggctgctccggggctgctgaggctggagggccggcacaaggctccgcctccctccacactgtaccctctgcccctcctccccagagctgggcatttccttccacaagctgctgtggggacgtgtgttccctcaaagtctgtgccatcttctcccacccctcccgggtagaaggaggggctgaccccagggctgggagaggggaggggactggagggcagactggcttctcggtccccagggggccgcttgggctgttggtctccagagcagggccactgggcactctgtgatgggggagcctttgtctgaaagcacagccccctcgcccttcctctccccatggcttccccttcattggcattaatctgggcaccagctctctccatagcagtgacttccctcaccactctcatctctcagccttgccttttcttcctgacactgtcgccccctcctctcaggagacactgccgagggccacctggcagaaggctgagttaggcagcagggccgggagcgtctgccctccacagggtgggggacagataggctaagcgactcccagcttgctaccctcagtggccagtgtgggcgtgggcggtttggggcgcttggctggtggtggccactgcatcccttaatttatttctctgctgtttctgttcttgagaaattgggggtgggagtcctacacagaggctgcccctaccctcacctgagttgtacatttttttgtgatgggttttattttttattattttattttatttttttttttttttgatttatgatgactccacccctcttcatcacccccgctcccaggccaggctcagcgattaagccgagcccttgcgtcctaggaaggggccttgccaacctcagccctcctgccccacactcctactgcggctcagaccaagggctccccctccctcccttcccccctcctgccctatggaacagcccgggtgctctgagggggctgggagggcatggcttggctcccaaagggggtaggggcccggggcacccaggcaaggtggcccctccccgtctagccccctcctccccaaccctgcacttagtttctcctctggatcaaacacgtaataaagagaatgtttggaatctgaaaaaaatc

SEQ ID NO: 79524 - DNA, 2159 bp, Homo sapiens
agggccggcggtggtggcggccatgttgggagcagcaggtccggcggcggctgcctgtgtgccgggcgcggagcagtgccgctgagggcaggggaggagcgaggcaggcggccggctgcggcggcagagagtaggcggagcggcgcggcccggccgaaaggcggcacagcccagccgggggtcgggggggtgcggtccggagccgctcggagccggcgcggcctagcccgagcggcgcatccccgggctggcgtgagcggctgcccggcctccccgcacccccggccggggcccatgcggcgggtgctcctgctgtgagaagccccgcccggccgggctccgcgccttcccttccctcccttcctccaagcttctcggttccctcccccgagataccggcgccatgtccagcgctcggacccccctacccacgctgaacgagagggacacggagcagcccaccttgggacaccttgactccaagcccagcagtaagtccaacatgattcggggccgcaactcagccacctctgctgatgagcagccccacattggaaactaccggctcctcaagaccattggcaagggtaattttgccaaggtgaagttggcccgacacatcctgactgggaaagaggtagctgtgaagatcattgacaagactcaactgaactcctccagcctccagaaactattccgcgaagtaagaataatgaaggttttgaatcatcccaacatagttaaattatttgaagtgattgagactgagaaaacgctctaccttgtcatggagtacgctagtggcggagaggtatttgattacctagtggctcatggcaggatgaaagaaaaagaggctcgagccaaattccgccagatagtgtctgctgtgcagtactgtcaccagaagtttattgtccatagagacttaaaggcagaaaacctgctcttggatgctgatatgaacatcaagattgcagactttggcttcagcaatgaattcacctttgggaacaagctggacaccttctgtggcagtcccccttatgctgccccagaactcttccagggcaaaaaatatgatggacccgaggtggatgtgtggagcctaggagttatcctctatacactggtcagcggatccctgccttttgatggacagaacctcaaggagctgcgggaacgggtactgaggggaaaataccgtattccattctacatgtccacggactgtgaaaacctgcttaagaaatttctcattcttaatcccagcaagagaggcactttagagcaaatcatgaaagatcgatggatgaatgtgggtcacgaagatgatgaactaaagccttacgtggagccactccctgactacaaggacccccggcggacagagctgatggtgtccatgggttatacacgggaagagatccaggactcgctggtgggccagagatacaacgaggtgatggccacctatctgctcctgggctacaagagctccgagctggaaggcgacaccatcaccctgaaaccccggccttcagctgatctgaccaatagcagcgccccatccccatcccacaaggtacagcgcagcgtgtcggccaatcccaagcagcggcgcttcagcgaccaggctggtcctgccattcccacctctaattcttactctaagaagactcagagtaacaacgcagaaaataagcggcctgaggaggaccgggagtcagggcggaaagccagcagcacagccaaggtgcctgccagccccctgcccggtctggagaggaagaagaccaccccaaccccctccacgaacagcgtcctctccaccagcacaaatcgaagcaggaattccccacttttggagcgggccagcctcggccaggcctccatccagaatggcaaagacaggtgagagacccgggccctgcctgcctcactccctaggagccatgtctcacagggtgatgtctgtcagcagcaccgtctcctgtccctgccagcgcattgctccctgctccctggagttccatcctggctgtgtccagtccagctttcccctcccctattccacgccattgcctcctccccatcttcctctgactgctacttgcagtttgccaagtgtggggctgaccgtggccatctcagctaca

SEQ ID NO: 79525 - DNA, 1921 bp, Homo sapiens
ctgcgaaggcgccaaagcccagacctcgcgcctccgcccgcgacggcggcactgggggcccggagcgggcgggagacgtggattactgcgggcttcggggccctagcctcgaccgcgacgttcgctcgcatcgcgtacggacagaaacccgtgagcgctgaagaaagaacacctgaatccggagccccagcccccgtcgctcgtttgcgcgaccccaaaacctggcgggacgagggtcgcccgatgtctagctgccgccacagacgacgcttttgcgtctgcgcagcgcgccgccttgtgggtaatctcagggtgaccccacattcacccctgcccagagattcccccttctcctctcccctactggaggcaaaggaaggggagggtggatgggggggcagggctccccctcggtactgcggttgcacagagtatttcgcctaaaccaagaaattttttattaccaaaaagaaaaaagaaaaaaaaaatcccagcggccacctttcctccctgccccattgggacagtcgagactggatctgtggggtttcccgggagggtggctcagggctggaacactctcaggcaagagtggtggagctcccgtcaggccctccgccaggcccactgtgggcttctcccctctcctccctccttcccctccaagcaaaccaccagaggtggccttcccctgacctcaggcccctgggctggaggcctgggcggtggggcagggggcgggggtgctgcgcagccctgcagtgggtggggctgggggctgctccggggctgctgaggctggagggccggcacaaggctccgcctccctccacactgtaccctctgcccctcctccccagagctgggcatttccttccacaagctgctgtggggacgtgtgttccctcaaagtctgtgccatcttctcccacccctcccgggtagaaggaggggctgaccccagggctgggagaggggaggggactggagggcagactggcttctcggtccccagggggccgcttgggctgttggtctccagagcagggccactgggcactctgtgatgggggagcctttgtctgaaagcacagccccctcgcccttcctctccccatggcttccccttcattggcattaatctgggcaccagctctctccatagcagtgacttccctcaccactctcatctctcagccttgccttttcttcctgacactgtcgccccctcctctcaggagacactgccgagggccacctggcagaaggctgagttaggcagcagggccgggagcgtctgccctccacagggtgggggacagataggctaagcgactcccagcttgctaccctcagtggccagtgtgggcgtgggcggtttggggcgcttggctggtggtggccactgcatcccttaatttatttctctgctgtttctgttcttgagaaattgggggtgggagtcctacacagaggctgcccctaccctcacctgagttgtacatttttttgtgatgggttttattttttattattttattttatttttttttttttttgatttatgatgactccacccctcttcatcacccccgctcccaggccaggctcagcgattaagccgagcccttgcgtcctaggaaggggccttgccaacctcagccctcctgccccacactcctactgcggctcagaccaagggctccccctccctcccttcccccctcctgccctatggaacagcccgggtgctctgagggggctgggagggcatggcttggctcccaaagggggtaggggcccggggcacccaggcaaggtggcccctccccgtctagccccctcctccccaaccctgcacttagtttctcctctggatcaaacacgtaataaagagaatgtttggaatctgaaaaaaatc

SEQ ID NO: 79526 - DNA, 1815 bp, Homo sapiens
agggccggcggtggtggcggccatgttgggagcagcaggtccggcggcggctgcctgtgtgccgggcgcggagcagtgccgctgagggcaggggaggagcgaggcaggcggccggctgcggcggcagagagtaggcggagcggcgcggcccggccgaaaggcggcacagcccagccgggggtcgggggggtgcggtccggagccgctcggagccggcgcggcctagcccgagcggcgcatccccgggctggcgtgagcggctgcccggcctccccgcacccccggccggggcccatgcggcgggtgctcctgctgtgagaagccccgcccggccgggctccgcgccttcccttccctcccttcctccaagcttctcggttccctcccccgagataccggcgccatgtccagcgctcggacccccctacccacgctgaacgagagggacacggagcagcccaccttgggacaccttgactccaagcccagcagtaagtccaacatgattcggggccgcaactcagccacctctgctgatgagcagccccacattggaaactaccggctcctcaagaccattggcaagggtaattttgccaaggtgaagttggcccgacacatcctgactgggaaagaggtagctgtgaagatcattgacaagactcaactgaactcctccagcctccagaaactattccgcgaagtaagaataatgaaggttttgaatcatcccaacatagttaaattatttgaagtgattgagactgagaaaacgctctaccttgtcatggagtacgctagtggcggagaggtatttgattacctagtggctcatggcaggatgaaagaaaaagaggctcgagccaaattccgccagatagtgtctgctgtgcagtactgtcaccagaagtttattgtccatagagacttaaaggcagaaaacctgctcttggatgctgatatgaacatcaagattgcagactttggcttcagcaatgaattcacctttgggaacaagctggacaccttctgtggcagtcccccttatgctgccccagaactcttccagggcaaaaaatatgatggacccgaggtggatgtgtggagcctaggagttatcctctatacactggtcagcggatccctgccttttgatggacagaacctcaaggagctgcgggaacgggtactgaggggaaaataccgtattccattctacatgtccacggactgtgaaaacctgcttaagaaatttctcattcttaatcccagcaagagaggcactttagagcaaatcatgaaagatcgatggatgaatgtgggtcacgaagatgatgaactaaagccttacgtggagccactccctgactacaaggacccccggcggacagagctgatggtgtccatgggttatacacgggaagagatccaggactcgctggtgggccagagatacaacgaggtgatggccacctatctgctcctgggctacaagagctccgagctggaaggcgacaccatcaccctgaaaccccggccttcagctgatctgaccaatagcagcgccccatccccatcccacaaggtacagcgcagcgtgtcggccaatcccaagcagcggcgcttcagcgaccaggctggtcctgccattcccacctctaattcttactctaagaagactcagagtaacaacgcagaaaataagcggcctgaggaggaccgggagtcagggcggaaagccagcagcacagccaaggtgcctgccagaccggccagggggctggcagcaccctcggccgatcagcccggctctca

SEQ ID NO: 79527 - DNA, 1566 bp, Homo sapiens
agggccggcggtggtggcggccatgttgggagcagcaggtccggcggcggctgcctgtgtgccgggcgcggagcagtgccgctgagggcaggggaggagcgaggcaggcggccggctgcggcggcagagagtaggcggagcggcgcggcccggccgaaaggcggcacagcccagccgggggtcgggggggtgcggtccggagccgctcggagccggcgcggcctagcccgagcggcgcatccccgggctggcgtgagcggctgcccggcctccccgcacccccggccggggcccatgcggcgggtgctcctgctgtgagaagccccgcccggccgggctccgcgccttcccttccctcccttcctccaagcttctcggttccctcccccgagataccggcgccatgtccagcgctcggacccccctacccacgctgaacgagagggacacggagcagcccaccttgggacaccttgactccaagcccagcagtaagtccaacatgattcggggccgcaactcagccacctctgctgatgagcagccccacattggaaactaccggctcctcaagaccattggcaagggtaattttgccaaggtgaagttggcccgacacatcctgactgggaaagaggtagctgtgaagatcattgacaagactcaactgaactcctccagcctccagaaactattccgcgaagtaagaataatgaaggttttgaatcatcccaacatagttaaattatttgaagtgattgagactgagaaaacgctctaccttgtcatggagtacgctagtggcggagaggtatttgattacctagtggctcatggcaggatgaaagaaaaagaggctcgagccaaattccgccagatagtgtctgctgtgcagtactgtcaccagaagtttattgtccatagagacttaaaggcagaaaacctgctcttggatgctgatatgaacatcaagattgcagactttggcttcagcaatgaattcacctttgggaacaagctggacaccttctgtggcagtcccccttatgctgccccagaactcttccagggcaaaaaatatgatggacccgaggtggatgtgtggagcctaggagttatcctctatacactggtcagcggatccctgccttttgatggacagaacctcaaggagctgcgggaacgggtactgaggggaaaataccgtattccattctacatgtccacggactgtgaaaacctgcttaagaaatttctcattcttaatcccagcaagagaggcactttagagcaaatcatgaaagatcgatggatgaatgtgggtcacgaagatgatgaactaaagccttacgtggagccactccctgactacaaggacccccggcggacagagctgatggtgtccatgggttatacacgggaagagatccaggactcgctggtgggccagagatacaacgaggtgatggccacctatctgctcctgggctacaagagctccgagctgaaggccggggtttcagggtgatggtgtcgccttccagctcggagctcttgtagcccagg

SEQ ID NO: 79528 - DNA, 888 bp, Homo sapiens
ggccacctgagaggagggggcgacagtgtcaggaagaaaaggcaaggctgagagatgagagtggtgagggaagtcactgctatggagagagctggtgcccagattaatgccaatgaaggggaagccatggggagaggaagggcgagggggctgtgctttcagacaaaggctcccccatcacagagtgcccagtggccctgctctggagacactgccgagggccacctggcagaaggctgagttaggcagcagggccgggagcgtctgccctccacagggtgggggacagataggctaagcgactcccagcttgctaccctcagtggccagtgtgggcgtgggcggtttggggcgcttggctggtggtggccactgcatcccttaatttatttctctgctgtttctgttcttgagaaattgggggtgggagtcctacacagaggctgcccctaccctcacctgagttgtacatttttttgtgatgggttttattttttattattttattttatttttttttttttttgatttatgatgactccacccctcttcatcacccccgctcccaggccaggctcagcgattaagccgagcccttgcgtcctaggaaggggccttgccaacctcagccctcctgccccacactcctactgcggctcagaccaagggctccccctccctcccttcccccctcctgccctatggaacagcccgggtgctctgagggggctgggagggcatggcttggctcccaaagggggtaggggcccggggcacccaggcaaggtggcccctccccgtctagccccctcctccccaaccctgcacttagtttctcctctggatcaaacacgtaataaagagaatgtttggaatctgaaaaaaatc

SEQ ID NO: 79529 - DNA, 413 bp, Homo sapiens
tctccagagaggttacaggttctgtggggacttgggtaacacaactaagtttcagtcctggttcagccacttattagtagtgtggctatgggcaagccacttcccttccctcgcctctgtggaatgggggcttgctgggttgttggccagccctgtaggaaatgagcatgcgtggggctggcactcagtggaccccttggccttacccattcccatcctccctctggcccagcagctggtcctgccattcccacctctaattcttactctaagaagactcagagtaacaacgcagaaaataagcggcctgaggaggaccgggagtcagggcggaaagccagcagcacagccaaggtgcctgccagccccctgcccggtctggagaggaagaagaccaccccaaccccctccac

SEQ ID NO: 79530 - DNA, 771 bp, Homo sapiens
  misc_feature (770)..(770): n is a, c, g, or t
cccacacagctggtgccttcttcaccagttcaataaaaggagattcaaaagtcagatgacactttcacaccacacatcacaaagaccagaatcaaggaagaagaaaatggtcatccttctcactcttccctcactcacagtggcctcggaaaacatggtccctagtctcacagttcatgggtcaatcaggaaaagcgactgatctgctctgagatgctcaaaggaaaatctgggtcctcaccatcatcaggcgctgagctggtgtgaaatcagttcttcccgtgccatgctcctgggcttttctcccactataaataactccagccttctgacagaccacatgatctctccaacgctggacaatattcccaacactagtgttcctctgcccacccatcaaaaaagaggcaagactgagcccactgtaaccaggagcaacaaagcaggcagacacgttggtgtcaggggcaaggacagaactcagcaaagccaggagggcttggctctctggctctggtccccactccaggaagccagacgatttcctcagcagtgcatcctccctgtggtttcctctccgagttcttaacacaatccagcaatggtgtaaattttctccctcatcttctcatcctgaaaaagcacttctctgtagtcattaccacacctacttaagatactggttaagacttgtgacttacacagccaaagaatcagatagactgatatcagacttacaaatcaatatggacacacttcctaagggtaana

SEQ ID NO: 79531 - DNA, 4296 bp, Homo sapiens
tcctggaattgcacgcgcttcctgaccaccaggctctggcccttgagaagccagcggggctttgtccctgttgctctccttgccaaacccagtctctctgctagtggtggtttcggttgcgacaccgtccaggttcccaggcaggaaccgctcggcctggctgcttagctacttttcactgaggaggtggtggaaggtgtcgcctgctctggctgagtaagggtggctggctgagccggcagcccccgccctaggcctggctcttcccggcctctgtactttgccctcgctgcctgacaggttctgctgtgggctctgctgaatggaagtcgctggtagtccttttccctttctccagtcggcccaccttgggacaccttgactccaagcccagcagtaagtccaacatgattcggggccgcaactcagccacctctgctgatgagcagccccacattggaaactaccggctcctcaagaccattggcaagggtaattttgccaaggtgaagttggcccgacacatcctgactgggaaagaggtagctgtgaagatcattgacaagactcaactgaactcctccagcctccagaaactattccgcgaagtaagaataatgaaggttttgaatcatcccaacatagttaaattatttgaagtgattgagactgagaaaacgctctaccttgtcatggagtacgctagtggcggagaggtatttgattacctagtggctcatggcaggatgaaagaaaaagaggctcgagccaaattccgccagatagtgtctgctgtgcagtactgtcaccagaagtttattgtccatagagacttaaaggcagaaaacctgctcttggatgctgatatgaacatcaagattgcagactttggcttcagcaatgaattcacctttgggaacaagctggacaccttctgtggcagtcccccttatgctgccccagaactcttccagggcaaaaaatatgatggacccgaggtggatgtgtggagcctaggagttatcctctatacactggtcagcggatccctgccttttgatggacagaacctcaaggagctgcgggaacgggtactgaggggaaaataccgtattccattctacatgtccacggactgtgaaaacctgcttaagaaatttctcattcttaatcccagcaagagaggcactttagagcaaatcatgaaagatcgatggatgaatgtgggtcacgaagatgatgaactaaagccttacgtggagccactccctgactacaaggacccccggcggacagagctgatggtgtccatgggttatacacgggaagagatccaggactcgctggtgggccagagatacaacgaggtgatggccacctatctgctcctgggctacaagagctccgagctggaaggcgacaccatcaccctgaaaccccggccttcagctgatctgaccaatagcagcgccccatccccatcccacaaggtacagcgcagcgtgtcggccaatcccaagcagcggcgcttcagcgaccaggctggtcctgccattcccacctctaattcttactctaagaagactcagagtaacaacgcagaaaataagcggcctgaggaggaccgggagtcagggcggaaagccagcagcacagccaaggtgcctgccagccccctgcccggtctggagaggaagaagaccaccccaaccccctccacgaacagcgtcctctccaccagcacaaatcgaagcaggaattccccacttttggagcgggccagcctcggccaggcctccatccagaatggcaaagacagcctaaccatgccagggtcccgggcctccacggcttctgcttctgccgcagtctctgcggcccggccccgccagcaccagaaatccatgtcggcctccgtgcaccccaacaaggcctctgggctgccccccacggagagtaactgtgaggtgccgcggcccagcacagccccccagcgtgtccctgttgcctccccatccgcccacaacatcagcagcagtggtggagccccagaccgaactaacttcccccggggtgtgtccagccgaagcaccttccatgctgggcagctccgacaggtgcgggaccagcagaatttgccctacggtgtgaccccagcctctccctctggccacagccagggccggcggggggcctctgggagcatcttcagcaagttcacctccaagtttgtacgcaggaacctgaatgaacctgaaagcaaagaccgagtggagacgctcagacctcacgtggtgggcagtggcggcaacgacaaagaaaaggaagaatttcgggaggccaagccccgctccctccgcttcacgtggagtatgaagaccacgagctccatggagcccaacgagatgatgcgggagatccgcaaggtgctggacgcgaacagctgccagagcgagctgcatgagaagtacatgctgctgtgcatgcacggcacgccgggccacgaggacttcgtgcagtgggagatggaggtgtgcaaactgccgcggctctctctcaacggggttcgatttaagcggatatcgggcacctccatggccttcaaaaacattgcctccaaaatagccaacgagctgaagctttaacaggctgccaggagcgggggcggcgggggcgggccagctggacgggctgccggccgctgcgccgccccacctgggcgagactgcagcgatggattggtgtgtctcccctgctggcacttctcccctccctggcccttctcagttttctccccacattcacccctgcccagagattcccccttctcctctcccctactggaggcaaaggaaggggagggtggatgggggggcagggctccccctcggtactgcggttgcacagagtatttcgcctaaaccaagaaattttttattaccaaaaagaaaaaagaaaaaaaaaatcccagcggccacctttcctccctgccccattgggacagtcgagactggatctgtggggtttcccgggagggtggctcagggctggaacactctcaggcaagagtggtggagctcccgtcaggccctccgccaggcccactgtgggcttctcccctctcctccctccttcccctccaagcaaaccaccagaggtggccttcccctgacctcaggcccctgggctggaggcctgggcggtggggcagggggcgggggtgctgcgcagccctgcagtgggtggggctgggggctgctccggggctgctgaggctggagggccggcacaaggctccgcctccctccacactgtaccctctgcccctcctccccagagctgggcatttccttccacaagtggagggcagactggcttctcggtccccagggggccgcttgggctgttggtctccagagcagggccactgggcactctgtgatgggggagcctttgtctgaaagcacagccccctcgcccttcctctccccatggcttccccttcattggcattaatctgggcaccagctctctccatagcagtgacttccctcaccactctcatctctcagccttgccttttcttcctgacactgtcgccccctcctctcaggagacactgccgagggccacctggcagaaggctgagttaggcagcagggccgggagcgtctgccctccacagggtgggggacagataggctaagcgactcccagcttgctaccctcagtggccagtgtgggcgtgggcggtttggggcgcttggctggtggtggccactgcatcccttaatttatttctctgctgtttctgttcttgagaaattgggggtgggagtcctacacagaggctgcccctaccctcacctgagttgtacatttttttgtgatgggttttattttttattattttattttatttttttttttttttgatttatgatgactccacccctcttcatcacccccgctcccaggccaggctcagcgattaagccgagcccttgcgtcctaggaaggggccttgccaacctcagccctcctgccccacactcctactgcggctcagaccaagggctccccctccctcccttcccccctcctgccctatggaacagcccgggtgctctgagggggctgggagggcatggcttggctcccaaagggggtaggggcccggggcacccaggcaaggtggcccctccccgtctagccccctcctccccaaccctgcacttagtttctcctctggatcaaacacgtaataaagagaatgtttggaatctgaaaaaaatc

SEQ ID NO: 79532 - DNA, 4236 bp, Homo sapiens
tcctggaattgcacgcgcttcctgaccaccaggctctggcccttgagaagccagcggggctttgtccctgttgctctccttgccaaacccagtctctctgctagtggtggtttcggttgcgacaccgtccaggttcccaggcaggaaccgctcggcctggctgcttagctacttttcactgaggaggtggtggaaggtgtcgcctgctctggctgagtaagggtggctggctgagccggcagcccccgccctaggcctggctcttcccggcctctgtactttgccctcgctgcctgacaggttctgctgtgggctctgctgaatggaagtcgctggtagtccttttccctttctccagtcggcccaccttgggacaccttgactccaagcccagcagtaagtccaacatgattcggggccgcaactcagccacctctgctgatgagcagccccacattggaaactaccggctcctcaagaccattggcaagggtaattttgccaaggtgaagttggcccgacacatcctgactgggaaagaggtagctgtgaagatcattgacaagactcaactgaactcctccagcctccagaaactattccgcgaagtaagaataatgaaggttttgaatcatcccaacatagttaaattatttgaagtgattgagactgagaaaacgctctaccttgtcatggagtacgctagtggcggagaggtatttgattacctagtggctcatggcaggatgaaagaaaaagaggctcgagccaaattccgccagatagtgtctgctgtgcagtactgtcaccagaagtttattgtccatagagacttaaaggcagaaaacctgctcttggatgctgatatgaacatcaagattgcagactttggcttcagcaatgaattcacctttgggaacaagctggacaccttctgtggcagtcccccttatgctgccccagaactcttccagggcaaaaaatatgatggacccgaggtggatgtgtggagcctaggagttatcctctatacactggtcagcggatccctgccttttgatggacagaacctcaaggagctgcgggaacgggtactgaggggaaaataccgtattccattctacatgtccacggactgtgaaaacctgcttaagaaatttctcattcttaatcccagcaagagaggcactttagagcaaatcatgaaagatcgatggatgaatgtgggtcacgaagatgatgaactaaagccttacgtggagccactccctgactacaaggacccccggcggacagagctgatggtgtccatgggttatacacgggaagagatccaggactcgctggtgggccagagatacaacgaggtgatggccacctatctgctcctgggctacaagagctccgagctggaaggcgacaccatcaccctgaaaccccggccttcagctgatctgaccaatagcagcgccccatccccatcccacaaggtacagcgcagcgtgtcggccaatcccaagcagcggcgcttcagcgaccaggctggtcctgccattcccacctctaattcttactctaagaagactcagagtaacaacgcagaaaataagcggcctgaggaggaccgggagtcagggcggaaagccagcagcacagccaaggtgcctgccagccccctgcccggtctggagaggaagaagaccaccccaaccccctccacgaacagcgtcctctccaccagcacaaatcgaagcaggaattccccacttttggagcgggccagcctcggccaggcctccatccagaatggcaaagacagcacagccccccagcgtgtccctgttgcctccccatccgcccacaacatcagcagcagtggtggagccccagaccgaactaacttcccccggggtgtgtccagccgaagcaccttccatgctgggcagctccgacaggtgcgggaccagcagaatttgccctacggtgtgaccccagcctctccctctggccacagccagggccggcggggggcctctgggagcatcttcagcaagttcacctccaagtttgtacgcaggaacctgaatgaacctgaaagcaaagaccgagtggagacgctcagacctcacgtggtgggcagtggcggcaacgacaaagaaaaggaagaatttcgggaggccaagccccgctccctccgcttcacgtggagtatgaagaccacgagctccatggagcccaacgagatgatgcgggagatccgcaaggtgctggacgcgaacagctgccagagcgagctgcatgagaagtacatgctgctgtgcatgcacggcacgccgggccacgaggacttcgtgcagtgggagatggaggtgtgcaaactgccgcggctctctctcaacggggttcgatttaagcggatatcgggcacctccatggccttcaaaaacattgcctccaaaatagccaacgagctgaagctttaacaggctgccaggagcgggggcggcgggggcgggccagctggacgggctgccggccgctgcgccgccccacctgggcgagactgcagcgatggattggtgtgtctcccctgctggcacttctcccctccctggcccttctcagttttctccccacattcacccctgcccagagattcccccttctcctctcccctactggaggcaaaggaaggggagggtggatgggggggcagggctccccctcggtactgcggttgcacagagtatttcgcctaaaccaagaaattttttattaccaaaaagaaaaaagaaaaaaaaaatcccagcggccacctttcctccctgccccattgggacagtcgagactggatctgtggggtttcccgggagggtggctcagggctggaacactctcaggcaagagtggtggagctcccgtcaggccctccgccaggcccactgtgggcttctcccctctcctccctccttcccctccaagcaaaccaccagaggtggccttcccctgacctcaggcccctgggctggaggcctgggcggtggggcagggggcgggggtgctgcgcagccctgcagtgggtggggctgggggctgctccggggctgctgaggctggagggccggcacaaggctccgcctccctccacactgtaccctctgcccctcctccccagagctgggcatttccttccacaagctgctgtggggacgtgtgttccctcaaagtctgtgccatcttctcccacccctcccgggtagaaggaggggctgaccccagggctgggagaggggaggggactggagggcagactggcttctcggtccccagggggccgcttgggctgttggtctccagagcagggccactgggcactctgtgatgggggagcctttgtctgaaagcacagccccctcgcccttcctctccccatggcttccccttcattggcattaatctgggcaccagctctctccatagcagtgacttccctcaccactctcatctctcagccttgccttttcttcctgacactgtcgccccctcctctcaggagacactgccgagggccacctggcagaaggctgagttaggcagcagggccgggagcgtctgccctccacagggtgggggacagataggctaagcgactcccagcttgctaccctcagtggccagtgtgggcgtgggcggtttggggcgcttggctggtggtggccactgcatcccttaatttatttctctgctgtttctgttcttgagaaattgggggtgggagtcctacacagaggctgcccctaccctcacctgagttgtacatttttttgtgatgggttttattttttattattttattttatttttttttttttttgatttatgatgactccacccctcttcatcacccccgctcccaggccaggctcagcgattaagccgagcccttgcgtcctaggaaggggccttgccaacctcagccctcctgccccacactcctactgcggctcagaccaagggctccccctccctcccttcccccctcctgccctatggaacagcccgggtgctctgagggggctgggagggcatggcttggctcccaaagggggtaggggcccggggcacccaggcaaggtggcccctccccgtctagccccctcctccccaaccctgcacttagtttctcctctggatcaaacacgtaataaagagaatgtttggaatctgaaaaaaatc

SEQ ID NO: 79533 - DNA, 4219 bp, Homo sapiens
cataagatagaggcccggggtgtacaagtcatctcggttccctcccccgagataccggcgccatgtccagcgctcggacccccctacccacgctgaacgagagggacacggagcagcccaccttgggacaccttgactccaagcccagcagtaagtccaacatgattcggggccgcaactcagccacctctgctgatgagcagccccacattggaaactaccggctcctcaagaccattggcaagggtaattttgccaaggtgaagttggcccgacacatcctgactgggaaagaggtagctgtgaagatcattgacaagactcaactgaactcctccagcctccagaaactattccgcgaagtaagaataatgaaggttttgaatcatcccaacatagttaaattatttgaagtgattgagactgagaaaacgctctaccttgtcatggagtacgctagtggcggagaggtatttgattacctagtggctcatggcaggatgaaagaaaaagaggctcgagccaaattccgccagatagtgtctgctgtgcagtactgtcaccagaagtttattgtccatagagacttaaaggcagaaaacctgctcttggatgctgatatgaacatcaagattgcagactttggcttcagcaatgaattcacctttgggaacaagctggacaccttctgtggcagtcccccttatgctgccccagaactcttccagggcaaaaaatatgatggacccgaggtggatgtgtggagcctaggagttatcctctatacactggtcagcggatccctgccttttgatggacagaacctcaaggagctgcgggaacgggtactgaggggaaaataccgtattccattctacatgtccacggactgtgaaaacctgcttaagaaatttctcattcttaatcccagcaagagaggcactttagagcaaatcatgaaagatcgatggatgaatgtgggtcacgaagatgatgaactaaagccttacgtggagccactccctgactacaaggacccccggcggacagagctgatggtgtccatgggttatacacgggaagagatccaggactcgctggtgggccagagatacaacgaggtgatggccacctatctgctcctgggctacaagagctccgagctggaaggcgacaccatcaccctgaaaccccggccttcagctgatctgaccaatagcagcgccccatccccatcccacaaggtacagcgcagcgtgtcggccaatcccaagcagcggcgcttcagcgaccaggctggtcctgccattcccacctctaattcttactctaagaagactcagagtaacaacgcagaaaataagcggcctgaggaggaccgggagtcagggcggaaagccagcagcacagccaaggtgcctgccagccccctgcccggtctggagaggaagaagaccaccccaaccccctccacgaacagcgtcctctccaccagcacaaatcgaagcaggaattccccacttttggagcgggccagcctcggccaggcctccatccagaatggcaaagacagcctaaccatgccagggtcccgggcctccacggcttctgcttctgccgcagtctctgcggcccggccccgccagcaccagaaatccatgtcggcctccgtgcaccccaacaaggcctctgggctgccccccacggagagtaactgtgaggtgccgcggcccagcacagccccccagcgtgtccctgttgcctccccatccgcccacaacatcagcagcagtggtggagccccagaccgaactaacttcccccggggtgtgtccagccgaagcaccttccatgctgggcagctccgacaggtgcgggaccagcagaatttgccctacggtgtgaccccagcctctccctctggccacagccagggccggcggggggcctctgggagcatcttcagcaagttcacctccaagtttgtacgcaggaaatctgtctttcaggtttgccagaaggaacctgaatgaacctgaaagcaaagaccgagtggagacgctcagacctcacgtggtgggcagtggcggcaacgacaaagaaaaggaagaatttcgggaggccaagccccgctccctccgcttcacgtggagtatgaagaccacgagctccatggagcccaacgagatgatgcgggagatccgcaaggtgctggacgcgaacagctgccagagcgagctgcatgagaagtacatgctgctgtgcatgcacggcacgccgggccacgaggacttcgtgcagtgggagatggaggtgtgcaaactgccgcggctctctctcaacggggttcgatttaagcggatatcgggcacctccatggccttcaaaaacattgcctccaaaatagccaacgagctgaagctttaacaggctgccaggagcgggggcggcgggggcgggccagctggacgggctgccggccgctgcgccgccccacctgggcgagactgcagcgatggattggtgtgtctcccctgctggcacttctcccctccctggcccttctcagttttctcttacatgtttgtggggggtgggagattgttctccagccccccacattcacccctgcccagagattcccccttctcctctcccctactggaggcaaaggaaggggagggtggatgggggggcagggctccccctcggtactgcggttgcacagagtatttcgcctaaaccaagaaattttttattaccaaaaagaaaaaagaaaaaaaaaatcccagcggccacctttcctccctgccccattgggacagtcgagactggatctgtggggtttcccgggagggtggctcagggctggaacactctcaggcaagagtggtggagctcccgtcaggccctccgccaggcccactgtgggcttctcccctctcctccctccttcccctccaagcaaaccaccagaggtggccttcccctgacctcaggcccctgggctggaggcctgggcggtggggcagggggcgggggtgctgcgcagccctgcagtgggtggggctgggggctgctccggggctgctgaggctggagggccggcacaaggctccgcctccctccacactgtaccctctgcccctcctccccagagctgggcatttccttccacaagctgctgtggggacgtgtgttccctcaaagtctgtgccatcttctcccacccctcccgggtagaaggaggggctgaccccagggctgggagaggggaggggactggagggcagactggcttctcggtccccagggggccgcttgggctgttggtctccagagcagggccactgggcactctgtgatgggggagcctttgtctgaaagcacagccccctcgcccttcctctccccatggcttccccttcattggcattaatctgggcaccagctctctccatagcagtgacttccctcaccactctcatctctcagccttgccttttcttcctgacactgtcgccccctcctctcaggagacactgccgagggccacctggcagaaggctgagttaggcagcagggccgggagcgtctgccctccacagggtgggggacagataggctaagcgactcccagcttgctaccctcagtggccagtgtgggcgtgggcggtttggggcgcttggctggtggtggccactgcatcccttaatttatttctctgctgtttctgttcttgagaaattgggggtgggagtcctacacagaggctgcccctaccctcacctgagttgtacatttttttgtgatgggttttattttttattattttattttatttttttttttttttgatttatgatgactccacccctcttcatcacccccgctcccaggccaggctcagcgattaagccgagcccttgcgtcctaggaaggggccttgccaacctcagccctcctgccccacactcctactgcggctcagaccaagggctccccctccctcccttcccccctcctgccctatggaacagcccgggtgctctgagggggctgggagggcatggcttggctcccaaagggggtaggggcccggggcacccaggcaaggtggcccctccccgtctagccccctcctccccaaccctgcacttagtttctcctctggatcaaacacgtaataaagagaatgtttggaatctgaaaaaaatc

SEQ ID NO: 79534 - DNA, 4220 bp, Homo sapiens
ttaggctaggtgcgaggctgggtggttgccagtctcggttccctcccccgagataccggcgccatgtccagcgctcggacccccctacccacgctgaacgagagggacacggagcagcccaccttgggacaccttgactccaagcccagcagtaagtccaacatgattcggggccgcaactcagccacctctgctgatgagcagccccacattggaaactaccggctcctcaagaccattggcaagggtaattttgccaaggtgaagttggcccgacacatcctgactgggaaagaggtagctgtgaagatcattgacaagactcaactgaactcctccagcctccagaaactattccgcgaagtaagaataatgaaggttttgaatcatcccaacatagttaaattatttgaagtgattgagactgagaaaacgctctaccttgtcatggagtacgctagtggcggagaggtatttgattacctagtggctcatggcaggatgaaagaaaaagaggctcgagccaaattccgccagatagtgtctgctgtgcagtactgtcaccagaagtttattgtccatagagacttaaaggcagaaaacctgctcttggatgctgatatgaacatcaagattgcagactttggcttcagcaatgaattcacctttgggaacaagctggacaccttctgtggcagtcccccttatgctgccccagaactcttccagggcaaaaaatatgatggacccgaggtggatgtgtggagcctaggagttatcctctatacactggtcagcggatccctgccttttgatggacagaacctcaaggagctgcgggaacgggtactgaggggaaaataccgtattccattctacatgtccacggactgtgaaaacctgcttaagaaatttctcattcttaatcccagcaagagaggcactttagagcaaatcatgaaagatcgatggatgaatgtgggtcacgaagatgatgaactaaagccttacgtggagccactccctgactacaaggacccccggcggacagagctgatggtgtccatgggttatacacgggaagagatccaggactcgctggtgggccagagatacaacgaggtgatggccacctatctgctcctgggctacaagagctccgagctggaaggcgacaccatcaccctgaaaccccggccttcagctgatctgaccaatagcagcgccccatccccatcccacaaggtacagcgcagcgtgtcggccaatcccaagcagcggcgcttcagcgaccaggctggtcctgccattcccacctctaattcttactctaagaagactcagagtaacaacgcagaaaataagcggcctgaggaggaccgggagtcagggcggaaagccagcagcacagccaaggtgcctgccagccccctgcccggtctggagaggaagaagaccaccccaaccccctccacgaacagcgtcctctccaccagcacaaatcgaagcaggaattccccacttttggagcgggccagcctcggccaggcctccatccagaatggcaaagacagcctaaccatgccagggtcccgggcctccacggcttctgcttctgccgcagtctctgcggcccggccccgccagcaccagaaatccatgtcggcctccgtgcaccccaacaaggcctctgggctgccccccacggagagtaactgtgaggtgccgcggcccagcacagccccccagcgtgtccctgttgcctccccatccgcccacaacatcagcagcagtggtggagccccagaccgaactaacttcccccggggtgtgtccagccgaagcaccttccatgctgggcagctccgacaggtgcgggaccagcagaatttgccctacggtgtgaccccagcctctccctctggccacagccagggccggcggggggcctctgggagcatcttcagcaagttcacctccaagtttgtacgcaggaaatctgtctttcaggtttgccagaaggaacctgaatgaacctgaaagcaaagaccgagtggagacgctcagacctcacgtggtgggcagtggcggcaacgacaaagaaaaggaagaatttcgggaggccaagccccgctccctccgcttcacgtggagtatgaagaccacgagctccatggagcccaacgagatgatgcgggagatccgcaaggtgctggacgcgaacagctgccagagcgagctgcatgagaagtacatgctgctgtgcatgcacggcacgccgggccacgaggacttcgtgcagtgggagatggaggtgtgcaaactgccgcggctctctctcaacggggttcgatttaagcggatatcgggcacctccatggccttcaaaaacattgcctccaaaatagccaacgagctgaagctttaacaggctgccaggagcgggggcggcgggggcgggccagctggacgggctgccggccgctgcgccgccccacctgggcgagactgcagcgatggattggtgtgtctcccctgctggcacttctcccctccctggcccttctcagttttctcttacatgtttgtggggggtgggagattgttctccagccccccacattcacccctgcccagagattcccccttctcctctcccctactggaggcaaaggaaggggagggtggatgggggggcagggctccccctcggtactgcggttgcacagagtatttcgcctaaaccaagaaattttttattaccaaaaagaaaaaagaaaaaaaaaatcccagcggccacctttcctccctgccccattgggacagtcgagactggatctgtggggtttcccgggagggtggctcagggctggaacactctcaggcaagagtggtggagctcccgtcaggccctccgccaggcccactgtgggcttctcccctctcctccctccttcccctccaagcaaaccaccagaggtggccttcccctgacctcaggcccctgggctggaggcctgggcggtggggcagggggcgggggtgctgcgcagccctgcagtgggtggggctgggggctgctccggggctgctgaggctggagggccggcacaaggctccgcctccctccacactgtaccctctgcccctcctccccagagctgggcatttccttccacaagctgctgtggggacgtgtgttccctcaaagtctgtgccatcttctcccacccctcccgggtagaaggaggggctgaccccagggctgggagaggggaggggactggagggcagactggcttctcggtccccagggggccgcttgggctgttggtctccagagcagggccactgggcactctgtgatgggggagcctttgtctgaaagcacagccccctcgcccttcctctccccatggcttccccttcattggcattaatctgggcaccagctctctccatagcagtgacttccctcaccactctcatctctcagccttgccttttcttcctgacactgtcgccccctcctctcaggagacactgccgagggccacctggcagaaggctgagttaggcagcagggccgggagcgtctgccctccacagggtgggggacagataggctaagcgactcccagcttgctaccctcagtggccagtgtgggcgtgggcggtttggggcgcttggctggtggtggccactgcatcccttaatttatttctctgctgtttctgttcttgagaaattgggggtgggagtcctacacagaggctgcccctaccctcacctgagttgtacatttttttgtgatgggttttattttttattattttattttatttttttttttttttgatttatgatgactccacccctcttcatcacccccgctcccaggccaggctcagcgattaagccgagcccttgcgtcctaggaaggggccttgccaacctcagccctcctgccccacactcctactgcggctcagaccaagggctccccctccctcccttcccccctcctgccctatggaacagcccgggtgctctgagggggctgggagggcatggcttggctcccaaagggggtaggggcccggggcacccaggcaaggtggcccctccccgtctagccccctcctccccaaccctgcacttagtttctcctctggatcaaacacgtaataaagagaatgtttggaatctgaaaaaaatc

SEQ ID NO: 79535 - DNA, 4370 bp, Homo sapiens
agggccggcggtggtggcggccatgttgggagcagcaggtccggcggcggctgcctgtgtgccgggcgcggagcagtgccgctgagggcaggggaggagcgaggcaggcggccggctgcggcggcagagagtaggcggagcggcgcggcccggccgaaaggcggcacagcccagccgggggtcgggggggtgcggtccggagccgctcggagccggcgcggcctagcccgagcggcgcatccccgggctggcgtgagcggctgcccggcctccccgcacccccggccggggcccatgcggcgggtgctcctgctgtgagaagccccgcccggccgggctccgcgccttcccttccctcccttcctccaagcttctcggttccctcccccgagataccggcgccatgtccagcgctcggacccccctacccacgctgaacgagagggacacggagcagcccaccttgggacaccttgactccaagcccagcagtaagtccaacatgattcggggccgcaactcagccacctctgctgatgagcagccccacattggaaactaccggctcctcaagaccattggcaagggtaattttgccaaggtgaagttggcccgacacatcctgactgggaaagaggtagctgtgaagatcattgacaagactcaactgaactcctccagcctccagaaactattccgcgaagtaagaataatgaaggttttgaatcatcccaacatagttaaattatttgaagtgattgagactgagaaaacgctctaccttgtcatggagtacgctagtggcggagaggtatttgattacctagtggctcatggcaggatgaaagaaaaagaggctcgagccaaattccgccagatagtgtctgctgtgcagtactgtcaccagaagtttattgtccatagagacttaaaggcagaaaacctgctcttggatgctgatatgaacatcaagattgcagactttggcttcagcaatgaattcacctttgggaacaagctggacaccttctgtggcagtcccccttatgctgccccagaactcttccagggcaaaaaatatgatggacccgaggtggatgtgtggagcctaggagttatcctctatacactggtcagcggatccctgccttttgatggacagaacctcaaggagctgcgggaacgggtactgaggggaaaataccgtattccattctacatgtccacggactgtgaaaacctgcttaagaaatttctcattcttaatcccagcaagagaggcactttagagcaaatcatgaaagatcgatggatgaatgtgggtcacgaagatgatgaactaaagccttacgtggagccactccctgactacaaggacccccggcggacagagctgatggtgtccatgggttatacacgggaagagatccaggactcgctggtgggccagagatacaacgaggtgatggccacctatctgctcctgggctacaagagctccgagctggaaggcgacaccatcaccctgaaaccccggccttcagctgatctgaccaatagcagcgccccatccccatcccacaaggtacagcgcagcgtgtcggccaatcccaagcagcggcgcttcagcgaccaggctggtcctgccattcccacctctaattcttactctaagaagactcagagtaacaacgcagaaaataagcggcctgaggaggaccgggagtcagggcggaaagccagcagcacagccaaggtgcctgccagccccctgcccggtctggagaggaagaagaccaccccaaccccctccacgaacagcgtcctctccaccagcacaaatcgaagcaggaattccccacttttggagcgggccagcctcggccaggcctccatccagaatggcaaagacagcacagccccccagcgtgtccctgttgcctccccatccgcccacaacatcagcagcagtggtggagccccagaccgaactaacttcccccggggtgtgtccagccgaagcaccttccatgctgggcagctccgacaggtgcgggaccagcagaatttgccctacggtgtgaccccagcctctccctctggccacagccagggccggcggggggcctctgggagcatcttcagcaagttcacctccaagtttgtacgcaggaacctgaatgaacctgaaagcaaagaccgagtggagacgctcagacctcacgtggtgggcagtggcggcaacgacaaagaaaaggaagaatttcgggaggccaagccccgctccctccgcttcacgtggagtatgaagaccacgagctccatggagcccaacgagatgatgcgggagatccgcaaggtgctggacgcgaacagctgccagagcgagctgcatgagaagtacatgctgctgtgcatgcacggcacgccgggccacgaggacttcgtgcagtgggagatggaggtgtgcaaactgccgcggctctctctcaacggggttcgatttaagcggatatcgggcacctccatggccttcaaaaacattgcctccaaaatagccaacgagctgaagctttaacaggctgccaggagcgggggcggcgggggcgggccagctggacgggctgccggccgctgcgccgccccacctgggcgagactgcagcgatggattggtgtgtctcccctgctggcacttctcccctccctggcccttctcagttttctcttacatgtttgtggggggtgggagattgttctccagccccccacattcacccctgcccagagattcccccttctcctctcccctactggaggcaaaggaaggggagggtggatgggggggcagggctccccctcggtactgcggttgcacagagtatttcgcctaaaccaagaaattttttattaccaaaaagaaaaaagaaaaaaaaaatcccagcggccacctttcctccctgccccattgggacagtcgagactggatctgtggggtttcccgggagggtggctcagggctggaacactctcaggcaagagtggtggagctcccgtcaggccctccgccaggcccactgtgggcttctcccctctcctccctccttcccctccaagcaaaccaccagaggtggccttcccctgacctcaggcccctgggctggaggcctgggcggtggggcagggggcgggggtgctgcgcagccctgcagtgggtggggctgggggctgctccggggctgctgaggctggagggccggcacaaggctccgcctccctccacactgtaccctctgcccctcctccccagagctgggcatttccttccacaagctgctgtggggacgtgtgttccctcaaagtctgtgccatcttctcccacccctcccgggtagaaggaggggctgaccccagggctgggagaggggaggggactggagggcagactggcttctcggtccccagggggccgcttgggctgttggtctccagagcagggccactgggcactctgtgatgggggagcctttgtctgaaagcacagccccctcgcccttcctctccccatggcttccccttcattggcattaatctgggcaccagctctctccatagcagtgacttccctcaccactctcatctctcagccttgccttttcttcctgacactgtcgccccctcctctcaggagacactgccgagggccacctggcagaaggctgagttaggcagcagggccgggagcgtctgccctccacagggtgggggacagataggctaagcgactcccagcttgctaccctcagtggccagtgtgggcgtgggcggtttggggcgcttggctggtggtggccactgcatcccttaatttatttctctgctgtttctgttcttgagaaattgggggtgggagtcctacacagaggctgcccctaccctcacctgagttgtacatttttttgtgatgggttttattttttattattttattttatttttttttttttttgatttatgatgactccacccctcttcatcacccccgctcccaggccaggctcagcgattaagccgagcccttgcgtcctaggaaggggccttgccaacctcagccctcctgccccacactcctactgcggctcagaccaagggctccccctccctcccttcccccctcctgccctatggaacagcccgggtgctctgagggggctgggagggcatggcttggctcccaaagggggtaggggcccggggcacccaggcaaggtggcccctccccgtctagccccctcctccccaaccctgcacttagtttctcctctggatcaaacacgtaataaagagaatgtttggaatctgaaaaaaatc

SEQ ID NO: 79536 - DNA, 4532 bp, Homo sapiens
agggccggcggtggtggcggccatgttgggagcagcaggtccggcggcggctgcctgtgtgccgggcgcggagcagtgccgctgagggcaggggaggagcgaggcaggcggccggctgcggcggcagagagtaggcggagcggcgcggcccggccgaaaggcggcacagcccagccgggggtcgggggggtgcggtccggagccgctcggagccggcgcggcctagcccgagcggcgcatccccgggctggcgtgagcggctgcccggcctccccgcacccccggccggggcccatgcggcgggtgctcctgctgtgagaagccccgcccggccgggctccgcgccttcccttccctcccttcctccaagcttctcggttccctcccccgagataccggcgccatgtccagcgctcggacccccctacccacgctgaacgagagggacacggagcagcccaccttgggacaccttgactccaagcccagcagtaagtccaacatgattcggggccgcaactcagccacctctgctgatgagcagccccacattggaaactaccggctcctcaagaccattggcaagggtaattttgccaaggtgaagttggcccgacacatcctgactgggaaagaggtagctgtgaagatcattgacaagactcaactgaactcctccagcctccagaaactattccgcgaagtaagaataatgaaggttttgaatcatcccaacatagttaaattatttgaagtgattgagactgagaaaacgctctaccttgtcatggagtacgctagtggcggagaggtatttgattacctagtggctcatggcaggatgaaagaaaaagaggctcgagccaaattccgccagatagtgtctgctgtgcagtactgtcaccagaagtttattgtccatagagacttaaaggcagaaaacctgctcttggatgctgatatgaacatcaagattgcagactttggcttcagcaatgaattcacctttgggaacaagctggacaccttctgtggcagtcccccttatgctgccccagaactcttccagggcaaaaaatatgatggacccgaggtggatgtgtggagcctaggagttatcctctatacactggtcagcggatccctgccttttgatggacagaacctcaaggagctgcgggaacgggtactgaggggaaaataccgtattccattctacatgtccacggactgtgaaaacctgcttaagaaatttctcattcttaatcccagcaagagaggcactttagagcaaatcatgaaagatcgatggatgaatgtgggtcacgaagatgatgaactaaagccttacgtggagccactccctgactacaaggacccccggcggacagagctgatggtgtccatgggttatacacgggaagagatccaggactcgctggtgggccagagatacaacgaggtgatggccacctatctgctcctgggctacaagagctccgagctggaaggcgacaccatcaccctgaaaccccggccttcagctgatctgaccaatagcagcgccccatccccatcccacaaggtacagcgcagcgtgtcggccaatcccaagcagcggcgcttcagcgaccaggctggtcctgccattcccacctctaattcttactctaagaagactcagagtaacaacgcagaaaataagcggcctgaggaggaccgggagtcagggcggaaagccagcagcacagccaaggtgcctgccagccccctgcccggtctggagaggaagaagaccaccccaaccccctccacgaacagcgtcctctccaccagcacaaatcgaagcaggaattccccacttttggagcgggccagcctcggccaggcctccatccagaatggcaaagacagcctaaccatgccagggtcccgggcctccacggcttctgcttctgccgcagtctctgcggcccggccccgccagcaccagaaatccatgtcggcctccgtgcaccccaacaaggcctctgggctgccccccacggagagtaactgtgaggtgccgcggcccagcacagccccccagcgtgtccctgttgcctccccatccgcccacaacatcagcagcagtggtggagccccagaccgaactaacttcccccggggtgtgtccagccgaagcaccttccatgctgggcagctccgacaggtgcgggaccagcagaatttgccctacggtgtgaccccagcctctccctctggccacagccagggccggcggggggcctctgggagcatcttcagcaagttcacctccaagtttgtacgcaggaacctgaatgaacctgaaagcaaagaccgagtggagacgctcagacctcacgtggtgggcagtggcggcaacgacaaagaaaaggaagaatttcgggaggccaagccccgctccctccgcttcacgtggagtatgaagaccacgagctccatggagcccaacgagatgatgcgggagatccgcaaggtgctggacgcgaacagctgccagagcgagctgcatgagaagtacatgctgctgtgcatgcacggcacgccgggccacgaggacttcgtgcagtgggagatggaggtgtgcaaactgccgcggctctctctcaacggggttcgatttaagcggatatcgggcacctccatggccttcaaaaacattgcctccaaaatagccaacgagctgaagctttaacaggctgccaggagcgggggcggcgggggcgggccagctggacgggctgccggccgctgcgccgccccacctgggcgagactgcagcgatggattggtgtgtctcccctgctggcacttctcccctccctggcccttctcagttttctcttacatgtttgtggggggtgggagattgttctccagccccccacattcacccctgcccagagattcccccttctcctctcccctactggaggcaaaggaaggggagggtggatgggggggcagggctccccctcggtactgcggttgcacagagtatttcgcctaaaccaagaaattttttattaccaaaaagaaaaaagaaaaaaaaaatcccagcggccacctttcctccctgccccattgggacagtcgagactggatctgtggggtttcccgggagggtggctcagggctggaacactctcaggcaagagtggtggagctcccgtcaggccctccgccaggcccactgtgggcttctcccctctcctccctccttcccctccaagcaaaccaccagaggtggccttcccctgacctcaggcccctgggctggaggcctgggcggtggggcagggggcgggggtgctgcgcagccctgcagtgggtggggctgggggctgctccggggctgctgaggctggagggccggcacaaggctccgcctccctccacactgtaccctctgcccctcctccccagagctgggcatttccttccacaagctgctgtggggacgtgtgttccctcaaagtctgtgccatcttctcccacccctcccgggtagaaggaggggctgaccccagggctgggagaggggaggggactggagggcagactggcttctcggtccccagggggccgcttgggctgttggtctccagagcagggccactgggcactctgtgatgggggagcctttgtctgaaagcacagccccctcgcccttcctctccccatggcttccccttcattggcattaatctgggcaccagctctctccatagcagtgacttccctcaccactctcatctctcagccttgccttttcttcctgacactgtcgccccctcctctcaggagacactgccgagggccacctggcagaaggctgagttaggcagcagggccgggagcgtctgccctccacagggtgggggacagataggctaagcgactcccagcttgctaccctcagtggccagtgtgggcgtgggcggtttggggcgcttggctggtggtggccactgcatcccttaatttatttctctgctgtttctgttcttgagaaattgggggtgggagtcctacacagaggctgcccctaccctcacctgagttgtacatttttttgtgatgggttttattttttattattttattttatttttttttttttttgatttatgatgactccacccctcttcatcacccccgctcccaggccaggctcagcgattaagccgagcccttgcgtcctaggaaggggccttgccaacctcagccctcctgccccacactcctactgcggctcagaccaagggctccccctccctcccttcccccctcctgccctatggaacagcccgggtgctctgagggggctgggagggcatggcttggctcccaaagggggtaggggcccggggcacccaggcaaggtggcccctccccgtctagccccctcctccccaaccctgcacttagtttctcctctggatcaaacacgtaataaagagaatgtttggaatctgaaaaaaatc

SEQ ID NO: 79537 - DNA, 4478 bp, Homo sapiens
agggccggcggtggtggcggccatgttgggagcagcaggtccggcggcggctgcctgtgtgccgggcgcggagcagtgccgctgagggcaggggaggagcgaggcaggcggccggctgcggcggcagagagtaggcggagcggcgcggcccggccgaaaggcggcacagcccagccgggggtcgggggggtgcggtccggagccgctcggagccggcgcggcctagcccgagcggcgcatccccgggctggcgtgagcggctgcccggcctccccgcacccccggccggggcccatgcggcgggtgctcctgctgtgagaagccccgcccggccgggctccgcgccttcccttccctcccttcctccaagcttctcggttccctcccccgagataccggcgccatgtccagcgctcggacccccctacccacgctgaacgagagggacacggagcagcccaccttgggacaccttgactccaagcccagcagtaagtccaacatgattcggggccgcaactcagccacctctgctgatgagcagccccacattggaaactaccggctcctcaagaccattggcaagggtaattttgccaaggtgaagttggcccgacacatcctgactgggaaagaggtagctgtgaagatcattgacaagactcaactgaactcctccagcctccagaaactattccgcgaagtaagaataatgaaggttttgaatcatcccaacatagttaaattatttgaagtgattgagactgagaaaacgctctaccttgtcatggagtacgctagtggcggagaggtatttgattacctagtggctcatggcaggatgaaagaaaaagaggctcgagccaaattccgccagatagtgtctgctgtgcagtactgtcaccagaagtttattgtccatagagacttaaaggcagaaaacctgctcttggatgctgatatgaacatcaagattgcagactttggcttcagcaatgaattcacctttgggaacaagctggacaccttctgtggcagtcccccttatgctgccccagaactcttccagggcaaaaaatatgatggacccgaggtggatgtgtggagcctaggagttatcctctatacactggtcagcggatccctgccttttgatggacagaacctcaaggagctgcgggaacgggtactgaggggaaaataccgtattccattctacatgtccacggactgtgaaaacctgcttaagaaatttctcattcttaatcccagcaagagaggcactttagagcaaatcatgaaagatcgatggatgaatgtgggtcacgaagatgatgaactaaagccttacgtggagccactccctgactacaaggacccccggcggacagagctgatggtgtccatgggttatacacgggaagagatccaggactcgctggtgggccagagatacaacgaggtgatggccacctatctgctcctgggctacaagagctccgagctggaaggcgacaccatcaccctgaaaccccggccttcagctgatctgaccaatagcagcgccccatccccatcccacaaggtacagcgcagcgtgtcggccaatcccaagcagcggcgcttcagcgaccaggctggtcctgccattcccacctctaattcttactctaagaagactcagagtaacaacgcagaaaataagcggcctgaggaggaccgggagtcagggcggaaagccagcagcacagccaaggtgcctgccagccccctgcccggtctggagaggaagaagaccaccccaaccccctccacgaacagcgtcctctccaccagcacaaatcgaagcaggaattccccacttttggagcgggccagcctcggccaggcctccatccagaatggcaaagacagcctaaccatgccagggtcccgggcctccacggcttctgcttctgccgcagtctctgcggcccggccccgccagcaccagaaatccatgtcggcctccgtgcaccccaacaaggcctctgggctgccccccacggagagtaactgtgaggtgccgcggcccagcacagccccccagcgtgtccctgttgcctccccatccgcccacaacatcagcagcagtggtggagccccagaccgaactaacttcccccggggtgtgtccagccgaagcaccttccatgctgggcagctccgacaggtgcgggaccagcagaatttgccctacggtgtgaccccagcctctccctctggccacagccagggccggcggggggcctctgggagcatcttcagcaagttcacctccaagtttgtacgcaggaacctgaatgaacctgaaagcaaagaccgagtggagacgctcagacctcacgtggtgggcagtggcggcaacgacaaagaaaaggaagaatttcgggaggccaagccccgctccctccgcttcacgtggagtatgaagaccacgagctccatggagcccaacgagatgatgcgggagatccgcaaggtgctggacgcgaacagctgccagagcgagctgcatgagaagtacatgctgctgtgcatgcacggcacgccgggccacgaggacttcgtgcagtgggagatggaggtgtgcaaactgccgcggctctctctcaacggggttcgatttaagcggatatcgggcacctccatggccttcaaaaacattgcctccggcgggccagctggacgggctgccggccgctgcgccgccccacctgggcgagactgcagcgatggattggtgtgtctcccctgctggcacttctcccctccctggcccttctcagttttctcttacatgtttgtggggggtgggagattgttctccagccccccacattcacccctgcccagagattcccccttctcctctcccctactggaggcaaaggaaggggagggtggatgggggggcagggctccccctcggtactgcggttgcacagagtatttcgcctaaaccaagaaattttttattaccaaaaagaaaaaagaaaaaaaaaatcccagcggccacctttcctccctgccccattgggacagtcgagactggatctgtggggtttcccgggagggtggctcagggctggaacactctcaggcaagagtggtggagctcccgtcaggccctccgccaggcccactgtgggcttctcccctctcctccctccttcccctccaagcaaaccaccagaggtggccttcccctgacctcaggcccctgggctggaggcctgggcggtggggcagggggcgggggtgctgcgcagccctgcagtgggtggggctgggggctgctccggggctgctgaggctggagggccggcacaaggctccgcctccctccacactgtaccctctgcccctcctccccagagctgggcatttccttccacaagctgctgtggggacgtgtgttccctcaaagtctgtgccatcttctcccacccctcccgggtagaaggaggggctgaccccagggctgggagaggggaggggactggagggcagactggcttctcggtccccagggggccgcttgggctgttggtctccagagcagggccactgggcactctgtgatgggggagcctttgtctgaaagcacagccccctcgcccttcctctccccatggcttccccttcattggcattaatctgggcaccagctctctccatagcagtgacttccctcaccactctcatctctcagccttgccttttcttcctgacactgtcgccccctcctctcaggagacactgccgagggccacctggcagaaggctgagttaggcagcagggccgggagcgtctgccctccacagggtgggggacagataggctaagcgactcccagcttgctaccctcagtggccagtgtgggcgtgggcggtttggggcgcttggctggtggtggccactgcatcccttaatttatttctctgctgtttctgttcttgagaaattgggggtgggagtcctacacagaggctgcccctaccctcacctgagttgtacatttttttgtgatgggttttattttttattattttattttatttttttttttttttgatttatgatgactccacccctcttcatcacccccgctcccaggccaggctcagcgattaagccgagcccttgcgtcctaggaaggggccttgccaacctcagccctcctgccccacactcctactgcggctcagaccaagggctccccctccctcccttcccccctcctgccctatggaacagcccgggtgctctgagggggctgggagggcatggcttggctcccaaagggggtaggggcccggggcacccaggcaaggtggcccctccccgtctagccccctcctccccaaccctgcacttagtttctcctctggatcaaacacgtaataaagagaatgtttggaatctgaaaaaaatc

SEQ ID NO: 79538 - DNA, 4439 bp, Homo sapiens
agggccggcggtggtggcggccatgttgggagcagcaggtccggcggcggctgcctgtgtgccgggcgcggagcagtgccgctgagggcaggggaggagcgaggcaggcggccggctgcggcggcagagagtaggcggagcggcgcggcccggccgaaaggcggcacagcccagccgggggtcgggggggtgcggtccggagccgctcggagccggcgcggcctagcccgagcggcgcatccccgggctggcgtgagcggctgcccggcctccccgcacccccggccggggcccatgcggcgggtgctcctgctgtgagaagccccgcccggccgggctccgcgccttcccttccctcccttcctccaagcttctcggttccctcccccgagataccggcgccatgtccagcgctcggacccccctacccacgctgaacgagagggacacggagcagcccaccttgggacaccttgactccaagcccagcagtaagtccaacatgattcggggccgcaactcagccacctctgctgatgagcagccccacattggaaactaccggctcctcaagaccattggcaagggtaattttgccaaggtgaagttggcccgacacatcctgactgggaaagaggtagctgtgaagatcattgacaagactcaactgaactcctccagcctccagaaactattccgcgaagtaagaataatgaaggttttgaatcatcccaacatagttaaattatttgaagtgattgagactgagaaaacgctctaccttgtcatggagtacgctagtggcggagaggtatttgattacctagtggctcatggcaggatgaaagaaaaagaggctcgagccaaattccgccagatagtgtctgctgtgcagtactgtcaccagaagtttattgtccatagagacttaaaggcagaaaacctgctcttggatgctgatatgaacatcaagattgcagactttggcttcagcaatgaattcacctttgggaacaagctggacaccttctgtggcagtcccccttatgctgccccagaactcttccagggcaaaaaatatgatggacccgaggtggatgtgtggagcctaggagttatcctctatacactggtcagcggatccctgccttttgatggacagaacctcaaggagctgcgggaacgggtactgaggggaaaataccgtattccattctacatgtccacggactgtgaaaacctgcttaagaaatttctcattcttaatcccagcaagagaggcactttagagcaaatcatgaaagatcgatggatgaatgtgggtcacgaagatgatgaactaaagccttacgtggagccactccctgactacaaggacccccggcggacagagctgatggtgtccatgggttatacacgggaagagatccaggactcgctggtgggccagagatacaacgaggtgatggccacctatctgctcctgggctacaagagctccgagctggaaggcgacaccatcaccctgaaaccccggccttcagctgatctgaccaatagcagcgccccatccccatcccacaaggtacagcgcagcgtgtcggccaatcccaagcagcggcgcttcagcgaccaggctggtcctgccattcccacctctaattcttactctaagaagactcagagtaacaacgcagaaaataagcggcctgaggaggaccgggagtcagggcggaaagccagcagcacagccaaggtgcctgccagccccctgcccggtctggagaggaagaagaccaccccaaccccctccacgaacagcgtcctctccaccagcacaaatcgaagcaggaattccccacttttggagcgggccagcctcggccaggcctccatccagaatggcaaagacagcctaaccatgccagggtcccgggcctccacggcttctgcttctgccgcagtctctgcggcccggccccgccagcaccagaaatccatgtcggcctccgtgcaccccaacaaggcctctgggctgccccccacggagagtaactgtgaggtgccgcggcccagcacagccccccagcgtgtccctgttgcctccccatccgcccacaacatcagcagcagtggtggagccccagaccgaactaacttcccccggggtgtgtccagccgaagcaccttccatgctgggcagctccgacaggtgcgggaccagcagaatttgccctacggtgtgaccccagcctctccctctggccacagccagggccggcggggggcctctgggagcatcttcagcaagttcacctccaagtttgtacgcaggaacctgaatgaacctgaaagcaaagaccgagtggagacgctcagacctcacgtggtgggcagtggcggcaacgacaaagaaaaggaagaatttcgggaggccaagccccgctccctccgcttcacgtggagtatgaagaccacgagctccatggagcccaacgagatgatgcgggagatccgcaaggtgctggacgcgaacagctgccagagcgagctgcatgagaagtacatgctgctgtgcatgcacggcacgccgggccacgaggacttcgtgcagtgggagatggaggtgtgcaaactgccgcggctctctctcaacggggttcgatttaagcggatatcgggcacctccatggccttcaaaaacattgcctccggcgggccagctggacgggctgccggccgctgcgccgccccacctgggcgagactgcagcgatggattggtgtgtctcccctgctggcacttctcccctccctggcccttctcagttttctccccacattcacccctgcccagagattcccccttctcctctcccctactggaggcaaaggaaggggagggtggatgggggggcagggctccccctcggtactgcggttgcacagagtatttcgcctaaaccaagaaattttttattaccaaaaagaaaaaagaaaaaaaaaatcccagcggccacctttcctccctgccccattgggacagtcgagactggatctgtggggtttcccgggagggtggctcagggctggaacactctcaggcaagagtggtggagctcccgtcaggccctccgccaggcccactgtgggcttctcccctctcctccctccttcccctccaagcaaaccaccagaggtggccttcccctgacctcaggcccctgggctggaggcctgggcggtggggcagggggcgggggtgctgcgcagccctgcagtgggtggggctgggggctgctccggggctgctgaggctggagggccggcacaaggctccgcctccctccacactgtaccctctgcccctcctccccagagctgggcatttccttccacaagctgctgtggggacgtgtgttccctcaaagtctgtgccatcttctcccacccctcccgggtagaaggaggggctgaccccagggctgggagaggggaggggactggagggcagactggcttctcggtccccagggggccgcttgggctgttggtctccagagcagggccactgggcactctgtgatgggggagcctttgtctgaaagcacagccccctcgcccttcctctccccatggcttccccttcattggcattaatctgggcaccagctctctccatagcagtgacttccctcaccactctcatctctcagccttgccttttcttcctgacactgtcgccccctcctctcaggagacactgccgagggccacctggcagaaggctgagttaggcagcagggccgggagcgtctgccctccacagggtgggggacagataggctaagcgactcccagcttgctaccctcagtggccagtgtgggcgtgggcggtttggggcgcttggctggtggtggccactgcatcccttaatttatttctctgctgtttctgttcttgagaaattgggggtgggagtcctacacagaggctgcccctaccctcacctgagttgtacatttttttgtgatgggttttattttttattattttattttatttttttttttttttgatttatgatgactccacccctcttcatcacccccgctcccaggccaggctcagcgattaagccgagcccttgcgtcctaggaaggggccttgccaacctcagccctcctgccccacactcctactgcggctcagaccaagggctccccctccctcccttcccccctcctgccctatggaacagcccgggtgctctgagggggctgggagggcatggcttggctcccaaagggggtaggggcccggggcacccaggcaaggtggcccctccccgtctagccccctcctccccaaccctgcacttagtttctcctctggatcaaacacgtaataaagagaatgtttggaatctgaaaaaaatc

SEQ ID NO: 79539 - DNA, 4490 bp, Homo sapiens
agggccggcggtggtggcggccatgttgggagcagcaggtccggcggcggctgcctgtgtgccgggcgcggagcagtgccgctgagggcaggggaggagcgaggcaggcggccggctgcggcggcagagagtaggcggagcggcgcggcccggccgaaaggcggcacagcccagccgggggtcgggggggtgcggtccggagccgctcggagccggcgcggcctagcccgagcggcgcatccccgggctggcgtgagcggctgcccggcctccccgcacccccggccggggcccatgcggcgggtgctcctgctgtgagaagccccgcccggccgggctccgcgccttcccttccctcccttcctccaagcttctcggttccctcccccgagataccggcgccatgtccagcgctcggacccccctacccacgctgaacgagagggacacggagcagcccaccttgggacaccttgactccaagcccagcagtaagtccaacatgattcggggccgcaactcagccacctctgctgatgagcagccccacattggaaactaccggctcctcaagaccattggcaagggtaattttgccaaggtgaagttggcccgacacatcctgactgggaaagaggtagctgtgaagatcattgacaagactcaactgaactcctccagcctccagaaactattccgcgaagtaagaataatgaaggttttgaatcatcccaacatagttaaattatttgaagtgattgagactgagaaaacgctctaccttgtcatggagtacgctagtggcggagaggtatttgattacctagtggctcatggcaggatgaaagaaaaagaggctcgagccaaattccgccagatagtgtctgctgtgcagtactgtcaccagaagtttattgtccatagagacttaaaggcagaaaacctgctcttggatgctgatatgaacatcaagattgcagactttggcttcagcaatgaattcacctttgggaacaagctggacaccttctgtggcagtcccccttatgctgccccagaactcttccagggcaaaaaatatgatggacccgaggtggatgtgtggagcctaggagttatcctctatacactggtcagcggatccctgccttttgatggacagaacctcaaggagctgcgggaacgggtactgaggggaaaataccgtattccattctacatgtccacggactgtgaaaacctgcttaagaaatttctcattcttaatcccagcaagagaggcactttagagcaaatcatgaaagatcgatggatgaatgtgggtcacgaagatgatgaactaaagccttacgtggagccactccctgactacaaggacccccggcggacagagctgatggtgtccatgggttatacacgggaagagatccaggactcgctggtgggccagagatacaacgaggtgatggccacctatctgctcctgggctacaagagctccgagctggaaggcgacaccatcaccctgaaaccccggccttcagctgatctgaccaatagcagcgccccatccccatcccacaaggtacagcgcagcgtgtcggccaatcccaagcagcggcgcttcagcgaccaggctggtcctgccattcccacctctaattcttactctaagaagactcagagtaacaacgcagaaaataagcggcctgaggaggaccgggagtcagggcggaaagccagcagcacagccaaggtgcctgccagccccctgcccggtctggagaggaagaagaccaccccaaccccctccacgaacagcgtcctctccaccagcacaaatcgaagcaggaattccccacttttggagcgggccagcctcggccaggcctccatccagaatggcaaagacagcctaaccatgccagggtcccgggcctccacggcttctgcttctgccgcagtctctgcggcccggccccgccagcaccagaaatccatgtcggcctccgtgcaccccaacaaggcctctgggctgccccccacggagagtaactgtgaggtgccgcggcccagcacagccccccagcgtgtccctgttgcctccccatccgcccacaacatcagcagcagtggtggagccccagaccgaactaacttcccccggggtgtgtccagccgaagcaccttccatgctgggcagctccgacaggtgcgggaccagcagaatttgccctacggtgtgaccccagcctctccctctggccacagccagggccggcggggggcctctgggagcatcttcagcaagttcacctccaagtttgtacgcaggagacctcacgtggtgggcagtggcggcaacgacaaagaaaaggaagaatttcgggaggccaagccccgctccctccgcttcacgtggagtatgaagaccacgagctccatggagcccaacgagatgatgcgggagatccgcaaggtgctggacgcgaacagctgccagagcgagctgcatgagaagtacatgctgctgtgcatgcacggcacgccgggccacgaggacttcgtgcagtgggagatggaggtgtgcaaactgccgcggctctctctcaacggggttcgatttaagcggatatcgggcacctccatggccttcaaaaacattgcctccaaaatagccaacgagctgaagctttaacaggctgccaggagcgggggcggcgggggcgggccagctggacgggctgccggccgctgcgccgccccacctgggcgagactgcagcgatggattggtgtgtctcccctgctggcacttctcccctccctggcccttctcagttttctcttacatgtttgtggggggtgggagattgttctccagccccccacattcacccctgcccagagattcccccttctcctctcccctactggaggcaaaggaaggggagggtggatgggggggcagggctccccctcggtactgcggttgcacagagtatttcgcctaaaccaagaaattttttattaccaaaaagaaaaaagaaaaaaaaaatcccagcggccacctttcctccctgccccattgggacagtcgagactggatctgtggggtttcccgggagggtggctcagggctggaacactctcaggcaagagtggtggagctcccgtcaggccctccgccaggcccactgtgggcttctcccctctcctccctccttcccctccaagcaaaccaccagaggtggccttcccctgacctcaggcccctgggctggaggcctgggcggtggggcagggggcgggggtgctgcgcagccctgcagtgggtggggctgggggctgctccggggctgctgaggctggagggccggcacaaggctccgcctccctccacactgtaccctctgcccctcctccccagagctgggcatttccttccacaagctgctgtggggacgtgtgttccctcaaagtctgtgccatcttctcccacccctcccgggtagaaggaggggctgaccccagggctgggagaggggaggggactggagggcagactggcttctcggtccccagggggccgcttgggctgttggtctccagagcagggccactgggcactctgtgatgggggagcctttgtctgaaagcacagccccctcgcccttcctctccccatggcttccccttcattggcattaatctgggcaccagctctctccatagcagtgacttccctcaccactctcatctctcagccttgccttttcttcctgacactgtcgccccctcctctcaggagacactgccgagggccacctggcagaaggctgagttaggcagcagggccgggagcgtctgccctccacagggtgggggacagataggctaagcgactcccagcttgctaccctcagtggccagtgtgggcgtgggcggtttggggcgcttggctggtggtggccactgcatcccttaatttatttctctgctgtttctgttcttgagaaattgggggtgggagtcctacacagaggctgcccctaccctcacctgagttgtacatttttttgtgatgggttttattttttattattttattttatttttttttttttttgatttatgatgactccacccctcttcatcacccccgctcccaggccaggctcagcgattaagccgagcccttgcgtcctaggaaggggccttgccaacctcagccctcctgccccacactcctactgcggctcagaccaagggctccccctccctcccttcccccctcctgccctatggaacagcccgggtgctctgagggggctgggagggcatggcttggctcccaaagggggtaggggcccggggcacccaggcaaggtggcccctccccgtctagccccctcctccccaaccctgcacttagtttctcctctggatcaaacacgtaataaagagaatgtttggaatctgaaaaaaatc

SEQ ID NO: 79540 - DNA, 2233 bp, Homo sapiens
atcttcagcaagttcacctccaagtttgtacgcaggaacctgaatgaacctgaaagcaaagaccgagtggagacgctcagacctcacgtggtgggcagtggcggcaacgacaaagaaaaggaagaatttcgggaggccaagccccgctccctccgcttcacgtggagtatgaagaccacgagctccatggagcccaacgagatgatgcgggagatccgcaaggtgctggacgcgaacagctgccagagcgagctgcatgagaagtacatgctgctgtgcatgcacggcacgccgggccacgaggacttcgtgcagtgggagatggaggtgtgcaaactgccgcggctctctctcaacggggttcgatttaagcggatatcgggcacctccatggccttcaaaaacattgcctccaaaatagccaacgagctgaagctttaacaggctgccaggagcgggggcggcgggggcgggccagctggacgggctgccggccgctgcgccgccccacctgggcgagactgcagcgatggattggtgtgtctcccctgctggcacttctcccctccctggcccttctcagttttctcttacatgtttgtggggggtgggagattgttctccagccccccacattcacccctgcccagagattcccccttctcctctcccctactggaggcaaaggaaggggagggtggatgggggggcagggctccccctcggtactgcggttgcacagagtatttcgcctaaaccaagaaattttttattaccaaaaagaaaaaagaaaaaaaaaatcccagcggccacctttcctccctgccccattgggacagtcgagactggatctgtggggtttcccgggagggtggctcagggctggaacactctcaggcaagagtggtggagctcccgtcaggccctccgccaggcccactgtgggcttctcccctctcctccctccttcccctccaagcaaaccaccagaggtggccttcccctgacctcaggcccctgggctggaggcctgggcggtggggcagggggcgggggtgctgcgcagccctgcagtgggtggggctgggggctgctccggggctgctgaggctggagggccggcacaaggctccgcctccctccacactgtaccctctgcccctcctccccagagctgggcatttccttccacaagctgctgtggggacgtgtgttccctcaaagtctgtgccatcttctcccacccctcccgggtagaaggaggggctgaccccagggctgggagaggggaggggactggagggcagactggcttctcggtccccagggggccgcttgggctgttggtctccagagcagggccactgggcactctgtgatgggggagcctttgtctgaaagcacagccccctcgcccttcctctccccatggcttccccttcattggcattaatctgggcaccagctctctccatagcagtgacttccctcaccactctcatctctcagccttgccttttcttcctgacactgtcgccccctcctctcaggagacactgccgagggccacctggcagaaggctgagttaggcagcagggccgggagcgtctgccctccacagggtgggggacagataggctaagcgactcccagcttgctaccctcagtggccagtgtgggcgtgggcggtttggggcgcttggctggtggtggccactgcatcccttaatttatttctctgctgtttctgttcttgagaaattgggggtgggagtcctacacagaggctgcccctaccctcacctgagttgtacatttttttgtgatgggttttattttttattattttattttatttttttttttttttgatttatgatgactccacccctcttcatcacccccgctcccaggccaggctcagcgattaagccgagcccttgcgtcctaggaaggggccttgccaacctcagccctcctgccccacactcctactgcggctcagaccaagggctccccctccctcccttcccccctcctgccctatggaacagcccgggtgctctgagggggctgggagggcatggcttggctcccaaagggggtaggggcccggggcacccaggcaaggtggcccctccccgtctagccccctcctccccaaccctgcacttagtttctcctctggatcaaacacgtaataaagagaatgtttggaatctgaaaaaaatc

SEQ ID NO: 79541 - DNA, 2340 bp, Homo sapiens
cccacacagctggtgccttcttcaccagttcaataaaaggagattcaaaagtcagatgacactttcacaccacacatcacaaagaccagaatcaaggaagaagaaaatggtcatccttctcactcttccctcactcacagtggcctcggaaaacatggtccctagtctcacagttcatgggtcaatcaggaaaagcgactgatctgctctgagatgctcaaaggaaaatctgggtcctcaccatcatcaggcgctgagctggtgtgaaatcagttcttcccgtgccatgctccatggagcccaacgagatgatgcgggagatccgcaaggtgctggacgcgaacagctgccagagcgagctgcatgagaagtacatgctgctgtgcatgcacggcacgccgggccacgaggacttcgtgcagtgggagatggaggtgtgcaaactgccgcggctctctctcaacggggttcgatttaagcggatatcgggcacctccatggccttcaaaaacattgcctccaaaatagccaacgagctgaagctttaacaggctgccaggagcgggggcggcgggggcgggccagctggacgggctgccggccgctgcgccgccccacctgggcgagactgcagcgatggattggtgtgtctcccctgctggcacttctcccctccctggcccttctcagttttctcttacatgtttgtggggggtgggagattgttctccagccccccacattcacccctgcccagagattcccccttctcctctcccctactggaggcaaaggaaggggagggtggatgggggggcagggctccccctcggtactgcggttgcacagagtatttcgcctaaaccaagaaattttttattaccaaaaagaaaaaagaaaaaaaaaatcccagcggccacctttcctccctgccccattgggacagtcgagactggatctgtggggtttcccgggagggtggctcagggctggaacactctcaggcaagagtggtggagctcccgtcaggccctccgccaggcccactgtgggcttctcccctctcctccctccttcccctccaagcaaaccaccagaggtggccttcccctgacctcaggcccctgggctggaggcctgggcggtggggcagggggcgggggtgctgcgcagccctgcagtgggtggggctgggggctgctccggggctgctgaggctggagggccggcacaaggctccgcctccctccacactgtaccctctgcccctcctccccagagctgggcatttccttccacaagctgctgtggggacgtgtgttccctcaaagtctgtgccatcttctcccacccctcccgggtagaaggaggggctgaccccagggctgggagaggggaggggactggagggcagactggcttctcggtccccagggggccgcttgggctgttggtctccagagcagggccactgggcactctgtgatgggggagcctttgtctgaaagcacagccccctcgcccttcctctccccatggcttccccttcattggcattaatctgggcaccagctctctccatagcagtgacttccctcaccactctcatctctcagccttgccttttcttcctgacactgtcgccccctcctctcaggagacactgccgagggccacctggcagaaggctgagttaggcagcagggccgggagcgtctgccctccacagggtgggggacagataggctaagcgactcccagcttgctaccctcagtggccagtgtgggcgtgggcggtttggggcgcttggctggtggtggccactgcatcccttaatttatttctctgctgtttctgttcttgagaaattgggggtgggagtcctacacagaggctgcccctaccctcacctgagttgtacatttttttgtgatgggttttattttttattattttattttatttttttttttttttgatttatgatgactccacccctcttcatcacccccgctcccaggccaggctcagcgattaagccgagcccttgcgtcctaggaaggggccttgccaacctcagccctcctgccccacactcctactgcggctcagaccaagggctccccctccctcccttcccccctcctgccctatggaacagcccgggtgctctgagggggctgggagggcatggcttggctcccaaagggggtaggggcccggggcacccaggcaaggtggcccctccccgtctagccccctcctccccaaccctgcacttagtttctcctctggatcaaacacgtaataaagagaatgtttggaatctgaaaaaaatc

SEQ ID NO: 79542 - DNA, 2036 bp, Homo sapiens
tgaggatcccgagaggtgggacacggggagctgcgggaacgggtactgaggggaaaataccgtattccattctacatgtccacggactgtgaaaacctgcttaagaaatttctcattcttaatcccagcaagagaggcactttagagcaaatcatgaaagatcgatggatgaatgtgggtcacgaagatgatgaactaaagccttacgtggagccactccctgactacaaggacccccggcggacagagctgatggtgtccatgggttatacacgggaagagatccaggactcgctggtgggccagagatacaacgaggtgatggccacctatctgctcctgggctacaagagctccgagctggaaggcgacaccatcaccctgaaaccccggccttcagctgatctgaccaatagcagcgccccatccccccccacattcacccctgcccagagattcccccttctcctctcccctactggaggcaaaggaaggggagggtggatgggggggcagggctccccctcggtactgcggttgcacagagtatttcgcctaaaccaagaaattttttattaccaaaaagaaaaaagaaaaaaaaaatcccagcggccacctttcctccctgccccattgggacagtcgagactggatctgtggggtttcccgggagggtggctcagggctggaacactctcaggcaagagtggtggagctcccgtcaggccctccgccaggcccactgtgggcttctcccctctcctccctccttcccctccaagcaaaccaccagaggtggccttcccctgacctcaggcccctgggctggaggcctgggcggtggggcagggggcgggggtgctgcgcagccctgcagtgggtggggctgggggctgctccggggctgctgaggctggagggccggcacaaggctccgcctccctccacactgtaccctctgcccctcctccccagagctgggcatttccttccacaagctgctgtggggacgtgtgttccctcaaagtctgtgccatcttctcccacccctcccgggtagaaggaggggctgaccccagggctgggagaggggaggggactggagggcagactggcttctcggtccccagggggccgcttgggctgttggtctccagagcagggccactgggcactctgtgatgggggagcctttgtctgaaagcacagccccctcgcccttcctctccccatggcttccccttcattggcattaatctgggcaccagctctctccatagcagtgacttccctcaccactctcatctctcagccttgccttttcttcctgacactgtcgccccctcctctcaggagacactgccgagggccacctggcagaaggctgagttaggcagcagggccgggagcgtctgccctccacagggtgggggacagataggctaagcgactcccagcttgctaccctcagtggccagtgtgggcgtgggcggtttggggcgcttggctggtggtggccactgcatcccttaatttatttctctgctgtttctgttcttgagaaattgggggtgggagtcctacacagaggctgcccctaccctcacctgagttgtacatttttttgtgatgggttttattttttattattttattttatttttttttttttttgatttatgatgactccacccctcttcatcacccccgctcccaggccaggctcagcgattaagccgagcccttgcgtcctaggaaggggccttgccaacctcagccctcctgccccacactcctactgcggctcagaccaagggctccccctccctcccttcccccctcctgccctatggaacagcccgggtgctctgagggggctgggagggcatggcttggctcccaaagggggtaggggcccggggcacccaggcaaggtggcccctccccgtctagccccctcctccccaaccctgcacttagtttctcctctggatcaaacacgtaataaagagaatgtttggaatctgaaaaaaatc

SEQ ID NO: 79543 - DNA, 1602 bp, Homo sapiens
agggccggcggtggtggcggccatgttgggagcagcaggtccggcggcggctgcctgtgtgccgggcgcggagcagtgccgctgagggcaggggaggagcgaggcaggcggccggctgcggcggcagagagtaggcggagcggcgcggcccggccgaaaggcggcacagcccagccgggggtcgggggggtgcggtccggagccgctcggagccggcgcggcctagcccgagcggcgcatccccgggctggcgtgagcggctgcccggcctccccgcacccccggccggggcccatgcggcgggtgctcctgctgtgagaagccccgcccggccgggctccgcgccttcccttccctcccttcctccaagcttctcggttccctcccccgagataccggcgccatgtccagcgctcggacccccctacccacgctgaacgagagggacacggagcagcccaccttgggacaccttgactccaagcccagcagtaagtccaacatgattcggggccgcaactcagccacctctgctgatgagcagccccacattggaaactaccggctcctcaagaccattggcaagggtaattttgccaaggtgaagttggcccgacacatcctgactgggaaagaggtagctgtgaagatcattgacaagactcaactgaactcctccagcctccagaaactattccgcgaagtaagaataatgaaggttttgaatcatcccaacatagttaaattatttgaagtgattgagactgagaaaacgctctaccttgtcatggagtacgctagtggcggagaggtatttgattacctagtggctcatggcaggatgaaagaaaaagaggctcgagccaaattccgccagatagtgtctgctgtgcagtactgtcaccagaagtttattgtccatagagacttaaaggcagaaaacctgctcttggatgctgatatgaacatcaagattgcagactttggcttcagcaatgaattcacctttgggaacaagctggacaccttctgtggcagtcccccttatgctgccccagaactcttccagggcaaaaaatatgatggacccgaggtggatgtgtggagcctaggagttatcctctatacactggtcagcggatccctgccttttgatggacagaacctcaaggagctgcgggaacgggtactgaggggaaaataccgtattccattctacatgtccacggactgtgaaaacctgcttaagaaatttctcattcttaatcccagcaagagaggcactttagagcaaatcatgaaagatcgatggatgaatgtgggtcacgaagatgatgaactaaagccttacgtggagccactccctgactacaaggacccccggcggacagagctgatggtgtccatgggttatacacgggaagagatccaggactcgctggtgggccagagatacaacgaggtgatggccacctatctgctcctgggctacaagagctccgagctggaaggcgacaccatcaccctgaaaccccggccttcagctgatctgaccaatagcagcgccccatccccgaagcagtgcacggggatcctctaggt

SEQ ID NO: 79544 - DNA, 1352 bp, Homo sapiens
agggccggcggtggtggcggccatgttgggagcagcaggtccggcggcggctgcctgtgtgccgggcgcggagcagtgccgctgagggcaggggaggagcgaggcaggcggccggctgcggcggcagagagtaggcggagcggcgcggcccggccgaaaggcggcacagcccagccgggggtcgggggggtgcggtccggagccgctcggagccggcgcggcctagcccgagcggcgcatccccgggctggcgtgagcggctgcccggcctccccgcacccccggccggggcccatgcggcgggtgctcctgctgtgagaagccccgcccggccgggctccgcgccttcccttccctcccttcctccaagcttctcggttccctcccccgagataccggcgccatgtccagcgctcggacccccctacccacgctgaacgagagggacacggagcagcccaccttgggacaccttgactccaagcccagcagtaagtccaacatgattcggggccgcaactcagccacctctgctgatgagcagccccacattggaaactaccggctcctcaagaccattggcaagggtaattttgccaaggtgaagttggcccgacacatcctgactgggaaagaggtagctgtgaagatcattgacaagactcaactgaactcctccagcctccagaaactattccgcgaagtaagaataatgaaggttttgaatcatcccaacatagttaaattatttgaagtgattgagactgagaaaacgctctaccttgtcatggagtacgctagtggcggagaggtatttgattacctagtggctcatggcaggatgaaagaaaaagaggctcgagccaaattccgccagatagtgtctgctgtgcagtactgtcaccagaagtttattgtccatagagacttaaaggcagaaaacctgctcttggatgctgatatgaacatcaagattgcagactttggcttcagcaatgaattcacctttgggaacaagctggacaccttctgtggcagtcccccttatgctgccccagaactcttccagggcaaaaaatatgatggacccgaggtggatgtgtggagcctaggagttatcctctatacactggtcagcggatccctgccttttgatggacagaacctcaaggagctgcgggaacgggtactgaggggaaaataccgtattccattctacatgtccacggactgtgaaaacctgcttaagaaatttctcattcttaatcccagcaagagaggcactttagagttgagagttgcatgctgcaacctaatggtcagcaatgaaataaatacttgtagaatgttca

SEQ ID NO: 79545 - DNA, 795 bp, Homo sapiens
agggccggcggtggtggcggccatgttgggagcagcaggtccggcggcggctgcctgtgtgccgggcgcggagcagtgccgctgagggcaggggaggagcgaggcaggcggccggctgcggcggcagagagtaggcggagcggcgcggcccggccgaaaggcggcacagcccagccgggggtcgggggggtgcggtccggagccgctcggagccggcgcggcctagcccgagcggcgcatccccgggctggcgtgagcggctgcccggcctccccgcacccccggccggggcccatgcggcgggtgctcctgctgtgagaagccccgcccggccgggctccgcgccttcccttccctcccttcctccaagcttctcggttccctcccccgagataccggcgccatgtccagcgctcggacccccctacccacgctgaacgagagggacacggagcagcccaccttgggacaccttgactccaagcccagcagtaagtccaacatgattcggggccgcaactcagccacctctgctgatgagcagccccacattggaaactaccggctcctcaagaccattggcaagggtaattttgccaaggtgaagttggcccgacacatcctgactgggaaagaggtagctgtgaagatcattgacaagactcaactgaactcctccagcctccagaaactattccgcgactagcgtactccatgacaaggtagagcgttttctcagtctcaatcacttcaaataatttaactatgttgggatgattcaaaaccttcattatt

SEQ ID NO: 79546 - DNA, 362 bp, Homo sapiens
acctacagccaccactttcccatcctctgaaagaaaattttgttgagtttactttctataatttacattaagaaaaaattgaaatagtcaaaacaatactctaccctggagaaataaccctgcttcttctatctccttttgagatctactagtatactgaaaaaatgtaatctgtttaagaagtatagggtacaggataccaataagagtcagcagaaatggctaacatagtagcctttggctttcctgtcatttttgagtaggatataacctatcagatgaatctgaggaaattaaactagttttcagtatccactttgcactcacacaggacccaagttcatggttttagatacactgaa

SEQ ID NO: 79547 - DNA, 334 bp, Homo sapiens
tgcgttgatcttccagctttgagtgcagcacatttcacagccacatctagaaaatggaagaactacaggaataaatatgagcagattagtcagtgagctgcttgagacagctcagtatagcattttgtttggagttgctttttttggtcttgcttaattttgttataagcaatagttatttgcattttataaattttattccttaatcaaattatgtatggcttgtaatatgaaaaccagtgctatgggaaaaatgcgtgattagtggcagatactatgatatgtattgttctaattagaagtgttgtcactccctgagggtgattttaagtct

SEQ ID NO: 79548 - DNA, 771 bp, Homo sapiens
caccaccaccatcaccatcaccaccaccaccatcaccatcaccatcaccactgctctgtgactccttggctcccctcatactaaggtcttcaaccgtctgcagcccaaatcctcgcacaaagccaccacagaccagatagtcccagaaaaacaccttgcaacaacactccagtcaccagccgtacatgggactggtggaaacaggaaactggaaacaggaaacagaagtgccactttagtgagctgctgtgaggacaatatcagcaaatgcgcctaggacagtccagcgcagccgcccaggctggggtagtcaatgcacattcccctctcctctcccttccctcccgtgtctccatatgaagtacttagaggctttcccagtgttcctccaagcagggtgctcccaggagttcttgcctagcagagtggtgttgccaccaaacgcctccagccaatgaaaaggaagcagccaagtgtgtgaccacaacatccatcaccctagaaacattgcccccacttcccaacagccagtggtcaggagagggacagcaccctgggcaggcacctctgtggatttcatgagctgaaccacacaaaaccttggcagcaggacctggcccagagcaagagctcaagcattgttggctgctgctaggagagtttttatttttttttattgttattatttttttaagatggagtttcactcttattgcccaggctggagtgcagtagcatgatctcagctcactgcaaactccgcccccacac

SEQ ID NO: 79549 - DNA, 337 bp, Homo sapiens
ctgcaacttataccttccatttactaaagtcccagtatgtgtcaaagtagttttcattcctcacagccatgttatgagctaaatatcactaactttccctttcaaaggtgaaataaactgagactctcgaagattaacttgcccaaggtcacctagctcgttaggaggcacaggtgggacttgaacccagttctttctgaattcaaaacctccaaaatgtctgtcacatcaagctgcttcaatgagatgctagaaaatcaggacagtgagcaagctggagataaaggaagatatggaggaacacgggaagtgtgatcctcacacacagaccctgcag

SEQ ID NO: 79550 - DNA, 352 bp, Homo sapiens
tcaaacaaaagcgtgaacatgaatgtttaaagtggcattactcataatagccaaaaagtggaaatgacccaaatgtccatccactgaggaatggataaacaaactttgatatatgcatacagtagggtattatttagccataaaaatggataaaatactgatacatgtaacattgatgaaccttgaaaatatgctaagtgaaaggagccaatcacaaaagaccacatattgtatgatttaatttatatgaaatgtcccaaacaggcaaatctataaaggtagaaagcagattagtggttgtcaaggctgggggctcaggggcaataggcatggggtttcttttggggatgat

SEQ ID NO: 79551 - DNA, 114 bp, Homo sapiens
cgcgccattgcactccagcctgggcgacagagcgatactcagtttcaaagaaaaaaaaggtagtttcaaaattgtgaaaccaggcacagtggctcatgcctgtaatcgcagcag

SEQ ID NO: 79552 - DNA, 255 bp, Homo sapiens
tacaggcctggtttccccagtcctccaggagtatgctggaagcctgaacctgcatcttaatacttttttggtaatagaataaatgatatttcataaacatcctataatgtactaagatacaacaaaactgttgagtggtaaatactaacacaagagttgtgataggaatagtaccacagagaaaggccctctacagatccacccgaggcctgcagctttcaaacatttttttatcacaacctgcagtgaagtact

SEQ ID NO: 79553 - DNA, 825 bp, Homo sapiens
gaataggggaaaagttccatgactttttaaaaaatatatgttatatatgtttaagacacattttatgttttaaaactaccaatagtgaagaattgattctgatcttattaattctgtagtgttgttcatttattttaaaaatcttatttttcatttttttcagattgaagataaaactttccaagtccttggtaatctttacagcgagggagactgcacttacctgaaatgttctgttaatggagttgctagtaaagcgaagctgattatcctggaaaacactatttacctattttccaaggaaggaagtattgagattgacattccagtccccaaatacttatcttctgtgagctcacaagaaactcagggcggccccttagctcctatgactggaaccattgaaaaggtgtttgtcaaagctggagacaaagtgaaagcgggagattccctcatggttatgatcgccatgaagatggagcataccataaagtctccaaaggatggcacagtaaagaaagtgttctacagagaaggtgctcaggccaacagacacactcctttagtcgagtttgaggaggaagaatcagacaaaagggaatcggaataaactccagcaaggaaatggccagttaagtagtgtcttctctctccaccaaaaagaggaagtgcctccagcttttctgggggtctcataaagagcagttttactaaatgattgtatgcttatgctgaacacctttcatattggagaatcatgcatttgggtcactaattatctcaaaatatttcatactaataaagttgaattattttttattggaa

SEQ ID NO: 79554 - DNA, 448 bp, Homo sapiens
agttggctacagttttcatttttggtctccctttcttgacttggtgtatactcagtcctcattagtattgcagctatcatttgtcctgtcatgtgtctctgcagcataccataaagtctccaaaggatggcacagtaaagaaagtgttctacagagaaggtgctcaggccaacagacacactcctttagtcgagtttgaggaggaagaatcagacaaaagggaatcggaataaactccagcaaggaaatggccagttaagtagtgtcttctctctccaccaaaaagaggaagtgcctccagcttttctgggggtctcataaagagcagttttactaaatgattgtatgcttatgctgaacacctttcatattggagaatcatgcatttgggtcactaattatctcaaaatatttcatactaataaagttgaattattttttattggaa

SEQ ID NO: 79555 - DNA, 298 bp, Homo sapiens
ccccaaatgatagactgttgccaagctgcatctgttttttaattttttgttttgcccaatactcaaatgagtagacaaaataatagtttttatttggctgcattgcaaaacctaaatgtacattttacctagaaaaaaagcaagaccattgatttactaagtctggtagccgctatacggtagatttcataagaaacactattctattgccagagcaggagaattgcttgaacctgggaggcagaggttgcagtgagccgagatcttgccactgcactccagcctgggtgacagagcg

SEQ ID NO: 79556 - DNA, 2360 bp, Homo sapiens
gaacgccaggctggtacggtctgggatgtttgggcatcgggtttggcgtgtgggacgcagctgcctctgtactggggagtcacggagtggccgggctccagggacatggcggcggcctctgcggtgtcggtgctgctggtggcggcggagaggaaccggtggcatcgtctcccgagcctgctcctgccgccgaggacatgggtgtggaggcaaagaaccatgaagtacacaacagccacagcagatgaagcatattccatcggccccgctccctcccagcagagctacctatctatggagaaaatcattcaagtggccaagacctctgctgcacaggctatccatccaggatgcggttttctttcagaaaacatggaatttgctgaactttgtaagcaagaaggaattatttttataggccctcctccatctgcaattagagacatgggtataaagagcacatccaaatccataatggctgctgctggagtacctgttgtggagggttatcatggtgaggaccaatcagaccagtgcctgaaggaacacgccaggagaattggctatcctgtcatgattaaagccgtccggggtggaggaggaaaaggaatgaggattgttagatcagaacaagaatttcaagaacagttagagtcagcacggagagaagctaagaagtctttcaatgatgatgctatgctgatcgagaagtttgtagacacaccgaggcatgtagaagtccaggtgtttggtgatcaccatggcaatgctgtgtacttgtttgaaagagactgtagtgtgcagaggcgacatcagaagatcattgaggaggccccagcgcctggtattaaatctgaagtaagaaaaaagctgggagaagctgcagtcagagctgctaaagctgtaaattatgttggagcagggactgtggagtttattatggactcaaaacataatttctgtttcatggagatgaatacaaggctgcaagtggaacatcctgttactgagatgatcacaggaactgacttggtggagtggcagcttagaattgcagcaggagagaagattcctttgagccaggaagaaataactctgcagggccatgccttcgaagctagaatatatgcagaagatcctagcaataacttcatgcctgtggcaggcccattagtgcacctctctactcctcgagcagacccttccaccaggattgaaactggagtacggcaaggagacgaagtttccgtgcattatgaccccatgattgcgaagctggtcgtgtgggcagcagatcgccaggcggcattgacaaaactgaggtacagccttcgtcagtacaatattgttggactgcccaccaacattgacttcttactcaacctgtctggccacccagagtttgaagctgggaacgtgcacactgatttcatccctcaacaccacaaacagttgttgctcagtcggaaggctgcagccaaagagtctttatgccaggcagccctgggtctcatcctcaaggagaaagccatgaccgacactttcactcttcaggcacatgatcaattctctccattttcgtctagcagtggaagaagactgaatatctcgtataccagaaacatgactcttaaagatggtaaaaacaatgtagccatagctgtaacgtataaccatgatgggtcttatagcatgcagattgaagataaaactttccaagtccttggtaatctttacagcgagggagactgcacttacctgaaatgttctgttaatggagttgctagtaaagcgaagctgattatcctggaaaacactatttacctattttccaaggaaggaagtattgagattgacattccagtccccaaatacttatcttctgtgagctcacaagaaactcagggcggccccttagctcctatgactggaaccattgaaaaggtgtttgtcaaagctggagacaaagtgaaagcgggagattccctcatggttatgatcgccatgaagatggagcataccataaagtctccaaaggatggcacagtaaagaaagtgttctacagagaaggtgctcaggccaacagacacactcctttagtcgagtttgaggaggaagaatcagacaaaagggaatcggaataaactccagcaaggaaatggccagttaagtagtgtcttctctctccaccaaaaagaggaagtgcctccagcttttctgggggtctcataaagagcagttttactaaatgattgtatgcttatgctgaacacctttcatattggagaatcatgcatttgggtcactaattatctcaaaatatttcatactaataaagttgaattattttttattggaa

SEQ ID NO: 79557 - DNA, 2362 bp, Homo sapiens
gtagcgaggcttgggtggcgaactcggcacgaggcccaaaggtaggctcaggctccgacggtggccggcgggggtcacgaggcttcgtagtggaggaacgggtttggcgtgtgggacgcagctgcctctgtactggggagtcacggagtggccgggctccagggacatggcggcggcctctgcggtgtcggtgctgctggtggcggcggagaggaaccggtggcatcgtctcccgagcctgctcctgccgccgaggacatgggtgtggaggcaaagaaccatgaagtacacaacagccacaggaagaaacattaccaaggtcctcattgcaaacagaggagaaattgcctgcagggtgatgcgcacagccaaaaaactgggtgtacagactgtggcggtttatagtgaggctgacagaaattccatgcatgtagatatggcagatgaagcatattccatcggccccgctccctcccagcagagctacctatctatggagaaaatcattcaagtggccaagacctctgctgcacaggctatccatccaggatgcggttttctttcagaaaacatggaatttgctgaactttgtaagcaagaaggaattaggaatgaggattgttagatcagaacaagaatttcaagaacagttagagtcagcacggagagaagctaagaagtctttcaatgatgatgctatgctgatcgagaagtttgtagacacaccgaggcatgtagaagtccaggtgtttggtgatcaccatggcaatgctgtgtacttgtttgaaagagactgtagtgtgcagaggcgacatcagaagatcattgaggaggccccagcgcctggtattaaatctgaagtaagaaaaaagctgggagaagctgcagtcagagctgctaaagctgtaaattatgttggagcagggactgtggagtttattatggactcaaaacataatttctgtttcatggagatgaatacaaggctgcaagtggaacatcctgttactgagatgatcacaggaactgacttggtggagtggcagcttagaattgcagcaggagagaagattcctttgagccaggaagaaataactctgcagggccatgccttcgaagctagaatatatgcagaagatcctagcaataacttcatgcctgtggcaggcccattagtgcacctctctactcctcgagcagacccttccaccaggattgaaactggagtacggcaaggagacgaagtttccgtgcattatgaccccatgattgcgaagctggtcgtgtgggcagcagatcgccaggcggcattgacaaaactgaggtacagccttcgtcagtacaatattgttggactgcccaccaacattgacttcttactcaacctgtctggccacccagagtttgaagctgggaacgtgcacactgatttcatccctcaacaccacaaacagttgttgctcagtcggaaggctgcagccaaagagtctttatgccaggcagccctgggtctcatcctcaaggagaaagccatgaccgacactttcactcttcaggcacatgatcaattctctccattttcgtctagcagtggaagaagactgaatatctcgtataccagaaacatgactcttaaagatggtaaaaacaatgtagccatagctgtaacgtataaccatgatgggtcttatagcatgcagattgaagataaaactttccaagtccttggtaatctttacagcgagggagactgcacttacctgaaatgttctgttaatggagttgctagtaaagcgaagctgattatcctggaaaacactatttacctattttccaaggaaggaagtattgagattgacattccagtccccaaatacttatcttctgtgagctcacaagaaactcagggcggccccttagctcctatgactggaaccattgaaaaggtgtttgtcaaagctggagacaaagtgaaagcgggagattccctcatggttatgatcgccatgaagatggagcataccataaagtctccaaaggatggcacagtaaagaaagtgttctacagagaaggtgctcaggccaacagacacactcctttagtcgagtttgaggaggaagaatcagacaaaagggaatcggaataaactccagcaaggaaatggccagttaagtagtgtcttctctctccaccaaaaagaggaagtgcctccagcttttctgggggtctcataaagagcagttttactaaatgattgtatgcttatgctgaacacctttcatattggagaatcatgcatttgggtcactaattatctcaaaatatttcatactaataaagttgaattattttttattggaa

SEQ ID NO: 79558 - DNA, 2656 bp, Homo sapiens
gtagcgaggcttgggtggcgaactcggcacgaggcccaaaggtaggctcaggctccgacggtggccggcgggggtcacgaggcttcgtagtggaggaacgggtttggcgtgtgggacgcagctgcctctgtactggggagtcacggagtggccgggctccagggacatggcggcggcctctgcggtgtcggtgctgctggtggcggcggagaggaaccggtggcatcgtctcccgagcctgctcctgccgccgaggacatgggtgtggaggcaaagaaccatgaagtacacaacagccacaggaagaaacattaccaaggtcctcattgcaaacagaggagaaattgcctgcagggtgatgcgcacagccaaaaaactgggtgtacagactgtggcggtttatagtgaggctgacagaaattccatgcatgtagatatggcagatgaagcatattccatcggccccgctccctcccagcagagctacctatctatggagaaaatcattcaagtggccaagacctctgctgcacaggctatccatccaggatgcggttttctttcagaaaacatggaatttgctgaactttgtaagcaagaaggaattatttttataggccctcctccatctgcaattagagacatgggtataaagagcacatccaaatccataatggctgctgctggagtacctgttgtggagggttatcatggtgaggaccaatcagaccagtgcctgaaggaacacgccaggagaattggctatcctgtcatgattaaagccgtccggggtggaggaggaaaaggaatgaggattgttagatcagaacaagaatttcaagaacagttagagtcagcacggagagaagctaagaagtctttcaatgatgatgctatgctgatcgagaagtttgtagacacaccgaggcatgtagaagtccaggtgtttggtgatcaccatggcaatgctgtgtacttgtttgaaagagactgtagtgtgcagaggcgacatcagaagatcattgaggaggccccagcgcctggtattaaatctgaagtaagaaaaaagctgggagaagctgcagtcagagctgctaaagctgtaaattatgttggagcagggactgtggagtttattatggactcaaaacataatttctgtttcatggagatgaatacaaggctgcaagtggaacatcctgttactgagatgatcacaggaactgacttggtggagtggcagcttagaattgcagcaggagagaagattcctttgagccaggaagaaataactctgcagggccatgccttcgaagctagaatatatgcagaagatcctagcaataacttcatgcctgtggcaggcccattagtgcacctctctactcctcgagcagacccttccaccaggattgaaactggagtacggcaaggagacgaagtttccgtgcattatgaccccatgattgcgaagctggtcgtgtgggcagcagatcgccaggcggcattgacaaaactgaggtacagccttcgtcagtacaatattgttggactgcccaccaacattgacttcttactcaacctgtctggccacccagagtttgaagctgggaacgtgcacactgatttcatccctcaacaccacaaacagttgttgctcagtcggaaggctgcagccaaagagtctttatgccaggcagccctgggtctcatcctcaaggagaaagccatgaccgacactttcactcttcaggcacatgatcaattctctccattttcgtctagcagtggaagaagactgaatatctcgtataccagaaacatgactcttaaagatggtaaaaacagttttcgtctcctcggataatcaaccatttccatactcatgtaatctaggcatactctggagttattacaggtttggttccagaccactacaataaaatgtagccatagctgtaacgtataaccatgatgggtcttatagcatgcagattgaagataaaactttccaagtccttggtaatctttacagcgagggagactgcacttacctgaaatgttctgttaatggagttgctagtaaagcgaagctgattatcctggaaaacactatttacctattttccaaggaaggaagtattgagattgacattccagtccccaaatacttatcttctgtgagctcacaagaaactcagggcggccccttagctcctatgactggaaccattgaaaaggtgtttgtcaaagctggagacaaagtgaaagcgggagattccctcatggttatgatcgccatgaagatggagcataccataaagtctccaaaggatggcacagtaaagaaagtgttctacagagaaggtgctcaggccaacagacacactcctttagtcgagtttgaggaggaagaatcagacaaaagggaatcggaataaactccagcaaggaaatggccagttaagtagtgtcttctctctccaccaaaaagaggaagtgcctccagcttttctgggggtctcataaagagcagttttactaaatgattgtatgcttatgctgaacacctttcatattggagaatcatgcatttgggtcactaattatctcaaaatatttcatactaataaagttgaattattttttattggaa

SEQ ID NO: 79559 - DNA, 2411 bp, Homo sapiens
gtagcgaggcttgggtggcgaactcggcacgaggcccaaaggtaggctcaggctccgacggtggccggcgggggtcacgaggcttcgtagtggaggaacgggtttggcgtgtgggacgcagctgcctctgtactggggagtcacggagtggccgggctccagggacatggcggcggcctctgcggtgtcggtgctgctggtggcggcggagaggaaccggtggcatcgtctcccgagcctgctcctgccgccgaggacatgggtgtggaggcaaagaaccatgaagtacacaacagccacaggaagaaacattaccaaggtcctcattgcaaacagaggagaaattgcctgcagggtgatgcgcacagccaaaaaactgggtgtacagactgtggcggtttatagtgaggctgacagaaattccatgcatgtagatatggcagatgaagcatattccatcggccccgctccctcccagcagagctacctatctatggagaaaatcattcaagtggccaagacctctgctgcacaggctatccatccaggatgcggttttctttcagaaaacatggaatttgctgaactttgtaagcaagaaggaattatttttataggccctcctccatctgcaattagagacatgggtataaagagcacatccaaatccataatggctgctgctggagtacctgttgtggagggttatcatggtgaggaccaatcagaccagtgcctgaaggaacacgccaggagaattggctatcctgtcatgattaaagccgtccggggtggaggaggaaaaggaatgaggattgttagatcagaacaagaatttcaagaacagttagagtcagcacggagagaagctaagaagtctttcaatgatgatgctatgctgatcgagaagtttgtagacacaccgaggcatgtagaagtccaggtgtttggtgatcaccatggcaatgctgtgtacttgtttgaaagagactgtagtgtgcagaggcgacatcagaagatcattgaggaggccccagcgcctggtattaaatctgaagtaagaaaaaagctgggagaagctgcagtcagagctgctaaagctgtaaattatgttggagcagggactgtggagtttattatggactcaaaacataatttctgtttcatggagatgaatacaaggctgcaagtggaacatcctgttactgagatgatcacaggaactgacttggtggagtggcagcttagaattgcagcaggagagaagattcctttgagccaggaagaaataactctgcagggccatgccttcgaagctagaatatatgcagaagatcctagcaataacttcatgcctgtggcaggcccattagtgcacctctctactcctcgagcagacccttccaccaggattgaaactggagtacggcaaggagacgaagtttccgtgcattatgaccccatgattgcgaagctggtcgtgtgggcagcagatcgccaggcggcattgacaaaactgaggtacagccttcgtcagtacaatattgttggactgcccaccaacattgacttcttactcaacctgtctggccacccagagtttgaagctgggaacgtgcacactgatttcatccctcaacaccacaaacagttgttgctcagtcggaaggctgcagccaaagagtctttatgccaggcagccctgggtctcatcctcaaggagaaagccatgaccgacactttcactcttcaggcacatgatcaattctctccattttcgtctagcagtggaagaagactgaatatctcgtataccagaaacatgactcttaaagatggtaaaaacaatgtagccatagctgtaacgtataaccatgatgggtcttatagcatgcagattgaagataaaactttccaagtccttggtaatctttacagcgagggagactgcacttacctgaaatgttctgttaatggagttgctagtaaagcgaagctgattatcctggaaaacactatttacctattttccaaggaaggaagtattgagattgacattccagtccccaaatacttatcttctgtgagctcacaagaaactcagggcggccccttagctcctatgactggaaccattgaaaaggtaatcacatgacatctgtagaatgatgttcagtaagttttaatacgtggctttgttaaacttgtcatttatgtccttttccctttctaaaccttgctcattggaaagcatccacttcacaaaaacaagaggatctattacagattcaaattgtttattacagtcctcactgaaaatacccatttacctaatttatgaaaaagactgctgtttttgaaggcaggcatttgcatcaaagtacaaataatctaaattgtctttttatgat

SEQ ID NO: 79560 - DNA, 702 bp, Homo sapiens
gaacgtgatataccctggtaggggcctattagcatgggcgattgaagataaaactttccaagtccttggtaatctttacagcgagggagactgcacttacctgaaatgttctgttaatggagttgctagtaaagcgaagctgattatcctggaaaacactatttacctattttccaaggaaggaagtattgagattgacattccagtccccaaatacttatcttctgtgagctcacaagaaactcagggcggccccttagctcctatgactggaaccattgaaaaggtgtttgtcaaagctggagacaaagtgaaagcgggagattccctcatggttatgatcgccatgaagatggagcataccataaagtctccaaaggatggcacagtaaagaaagtgttctacagagaaggtgctcaggccaacagacacactcctttagtcgagtttgaggaggaagaatcagacaaaagggaatcggaataaactccagcaaggaaatggccagttaagtagtgtcttctctctccaccaaaaagaggaagtgcctccagcttttctgggggtctcataaagagcagttttactaaatgattgtatgcttatgctgaacacctttcatattggagaatcatgcatttgggtcactaattatctcaaaatatttcatactaataaagttgaattattttttattggaa

SEQ ID NO: 79561 - DNA, 1674 bp, Homo sapiens
gtagcgaggcttgggtggcgaactcggcacgaggcccaaaggtaggctcaggctccgacggtggccggcgggggtcacgaggcttcgtagtggaggaacgggtttggcgtgtgggacgcagctgcctctgtactggggagtcacggagtggccgggctccagggacatggcggcggcctctgcggtgtcggtgctgctggtggcggcggagaggaaccggtggcatcgtctcccgagcctgctcctgccgccgaggacatgggtgtggaggcaaagaaccatgaagtacacaacagccacaggaagaaacattaccaaggtcctcattgcaaacagaggagaaattgcctgcagggtgatgcgcacagccaaaaaactgggtgtacagactgtggcggtttatagtgaggctgacagaaattccatgcatgtagatatggcagatgaagcatattccatcggccccgctccctcccagcagagctacctatctatggagaaaatcattcaagtggccaagacctctgctgcacaggctatccatccaggatgcggttttctttcagaaaacatggaatttgctgaactttgtaagcaagaaggaattatttttataggccctcctccatctgcaattagagacatgggtataaagagcacatccaaatccataatggctgctgctggagtacctgttgtggagggttatcatggtgaggaccaatcagaccagtgcctgaaggaacacgccaggagaattggctatcctgtcatgattaaagccgtccggggtggaggaggaaaaggaatgaggattgttagatcagaacaagaatttcaagaacagttagagtcagcacggagagaagctaagaagtctttcaatgatgatgctatgctgatcgagaagtttgtagacacaccgaggcatgtagaagtccaggtgtttggtgatcaccatggcaatgctgtgtacttgtttgaaagagactgtagtgtgcagaggcgacatcagaagatcattgaggaggccccagcgcctggtattaaatctgaagtaagaaaaaagctgggagaagctgcagtcagagctgctaaagctgtaaattatgttggagcagggactgtggagtttattatggactcaaaacataatttctgtttcatggagatgaatacaaggctgcaagtggaacatcctgttactgagatgatcacaggaactgacttggtggagtggcagcttagaattgcagcaggagagaagattcctttgagccaggaagaaataactctgcagggccatgccttcgaagctagaatatatgcagaagatcctagcaataacttcatgcctgtggcaggcccattagtgcacctctctactcctcgagcagacccttccaccaggattgaaactggagtacggcaaggagacgaagtttccgtgcattatgaccccatgattgcgaagctggtcgtgtgggcagcagatcgccaggcggcattgacaaaactgaggtacagccttcgtcagtacaatattgttggactggcaccaaattgattcttatcaactgttggccccaatttgaactggaacgtgcccggttttcctcaaccaaacgtgttgccgcgcaggggcaaagttttcggggcggtgttcccgggaac

SEQ ID NO: 79562 - DNA, 650 bp, Homo sapiens
gtagcgaggcttgggtggcgaactcggcacgaggcccaaaggtaggctcaggctccgacggtggccggcgggggtcacgaggcttcgtagtggaggaacgggtttggcgtgtgggacgcagctgcctctgtactggggagtcacggagtggccgggctccagggacatggcggcggcctctgcggtgtcggtgctgctggtggcggcggagaggaaccggtggcatcgtctcccgagcctgctcctgccgccgaggacatgggtgtggaggcaaagaaccatgaagtacacaacagccacaggaagaaacattaccaaggtcctcattgcaaacagaggagaaattgcctgcagggtgatgcgcacagccaaaaaactgggtgtacagactgtggcggtttatagtgaggctgacagaaattccatgcatgtagatatgggagtagctgggactacgggtgccgatcaccaggcccagctaattctcgcccggtattaactagtagaaatggggttacactggtgttagccaggacgtgtctcaaagctcctgagctcatgatccggccgaccttgagccttgactgggattacaggcagtgagctacgcatgcacggccagtctggatcatccttgaggagcctaccgc

SEQ ID NO: 79563 - DNA, 480 bp, Homo sapiens
gtagcgaggcttgggtggcgaactcggcacgaggcccaaaggtaggctcaggctccgacggtggccggcgggggtcacgaggcttcgtagtggaggaacgggtttggcgtgtgggacgcagctgcctctgtactggggagtcacggagtggccgggctccagggacatggcggcggcctctgcggtgtcggtgctgctggtggcggcggagaggaaccggtggcatcgtctcccgagcctgctcctgccgccgaggacatgggtgtggaggcaaagaaccatgaagtacacaacagccacaggaagaaacattaccaaggtcctcattgcaaacagaggagaaattgcctgcagggtgatgcgcacagccaaaaaactgggtgtacagactgtggcggtttatagtgaggctgacagaaattccatgcatgtagatatggtggtatgtgttaaaaattggaagccacgtcttacgtttat

SEQ ID NO: 79564 - DNA, 272 bp, Homo sapiens
atggtttttttgtgttttttttcctgagaattgtcctgttgccacatggtaccttagtaggttttttatttttcctaagagttgttcacagtagaaaatacttagataaaaagagcagatggttttctgaacatattgttttccccactcagcaggaactgggggtttattctcttcctagattgttggactgcccaccaacattgacttcttactcaacctgtctggccacccagagtttgaagctgggaacgtgcacactgatttcatcc

SEQ ID NO: 79565 - DNA, 482 bp, Homo sapiens
tagtacggaaactgaaagagtggaggggaggggaatgctaagggcagaaatgaggggaatgtgagagggtggagggagattgtgttgactttgaaaatgagaagggaaaagaagattcagaagaagataggacagggaaagccagcttgtgtgccattgaatcaccacgttagggcctggtgctgttgggtggcccacctcgttacacctggtgagttttcaaagccctctgaacctcagggtcctcatgaataaatttgtgttgttatttatcatgcaggggtttatgaggattaagcgtgaaatgtacataacaaaatgtcttgctcgttgtattttattccttcgtgttttgacttgaagaggttaccgtggttttcaatttcaggagacgaagtttccgtgcattatgaccccatgattgcgaagctggtcgtgtgggcagcagatcgccaggcggcattgacaaaactgaggtacag

SEQ ID NO: 79566 - DNA, 393 bp, Homo sapiens
tagagggagatgatttgtcggccccgccatgttcgtcttaagtcaccagtggagcatccagctggtaatgacaataatcggaggtcacctggagaaggaatgtcggggctggaaacagatttgagctggcagcatcaaaatgatcattgaagtatcagaagcagacaaattgattttgacctgtatattctaccccacaaaactttaggttttcgtctcctcggataatcaaccatttccatactcatgtaatctaggcatactctggagttattacaggtttggttccagaccactacaataaagtgagtcaaagtttttggtttcctcatgcatataaaagttatgtttatattatactttattgtgtgccaataacattatgtctaaata

SEQ ID NO: 79567 - DNA, 2559 bp, Homo sapiens
gtagcgaggcttgggtggcgaactcggcacgaggcccaaaggtaggctcaggctccgacggtggccggcgggggtcacgaggcttcgtagtggaggaacgggtttggcgtgtgggacgcagctgcctctgtactggggagtcacggagtggccgggctccagggacatggcggcggcctctgcggtgtcggtgctgctggtggcggcggagaggaaccggtggcatcgtctcccgagcctgctcctgccgccgaggacatgggtgtggaggcaaagaaccatgaagtacacaacagccacaggaagaaacattaccaaggtcctcattgcaaacagaggagaaattgcctgcagggtgatgcgcacagccaaaaaactgggtgtacagactgtggcggtttatagtgaggctgacagaaattccatgcatgtagatatggcagatgaagcatattccatcggccccgctccctcccagcagagctacctatctatggagaaaatcattcaagtggccaagacctctgctgcacaggctatccatccaggatgcggttttctttcagaaaacatggaatttgctgaactttgtaagcaagaaggaattatttttataggccctcctccatctgcaattagagacatgggtataaagagcacatccaaatccataatggctgctgctggagtacctgttgtggagggttatcatggtgaggaccaatcagaccagtgcctgaaggaacacgccaggagaattggctatcctgtcatgattaaagccgtccggggtggaggaggaaaaggaatgaggattgttagatcagaacaagaatttcaagaacagttagagtcagcacggagagaagctaagaagtctttcaatgatgatgctatgctgatcgagaagtttgtagacacaccgaggcatgtagaagtccaggtgtttggtgatcaccatggcaatgctgtgtacttgtttgaaagagactgtagtgtgcagaggcgacatcagaagatcattgaggaggccccagcgcctggtattaaatctgaagtaagaaaaaagctgggagaagctgcagtcagagctgctaaagctgtaaattatgttggagcagggactgtggagtttattatggactcaaaacataatttctgtttcatggagatgaatacaaggctgcaagtggaacatcctgttactgagatgatcacaggaactgacttggtggagtggcagcttagaattgcagcaggagagaagattcctttgagccaggaagaaataactctgcagggccatgccttcgaagctagaatatatgcagaagatcctagcaataacttcatgcctgtggcaggcccattagtgcacctctctactcctcgagcagacccttccaccaggattgaaactggagtacggcaaggagacgaagtttccgtgcattatgaccccatgattgcgaagctggtcgtgtgggcagcagatcgccaggcggcattgacaaaactgaggtacagccttcgtcagtacaatattgttggactgcccaccaacattgacttcttactcaacctgtctggccacccagagtttgaagctgggaacgtgcacactgatttcatccctcaacaccacaaacagttgttgctcagtcggaaggctgcagccaaagagtctttatgccaggcagccctgggtctcatcctcaaggagaaagccatgaccgacactttcactcttcaggcacatgatcaattctctccattttcgtctagcagtggaagaagactgaatatctcgtataccagaaacatgactcttaaagatggtaaaaacaatgtagccatagctgtaacgtataaccatgatgggtcttatagcatgcagattgaagataaaactttccaagtccttggtaatctttacagcgagggagactgcacttacctgaaatgttctgttaatggagttgctagtaaagcgaagctgattatcctggaaaacactatttacctattttccaaggaaggaagtattgagattgacattccagtccccaaatacttatcttctgtgagctcacaagaaactcagggcggccccttagctcctatgactggaaccattgaaaaggtgtttgtcaaagctggagacaaagtgaaagcgggagattccctcatggttatgatcgccatgaagatggagcataccataaagtctccaaaggatggcacagtaaagaaagtgttctacagagaaggtgctcaggccaacagacacactcctttagtcgagtttgaggaggaagaatcagacaaaagggaatcggaataaactccagcaaggaaatggccagttaagtagtgtcttctctctccaccaaaaagaggaagtgcctccagcttttctgggggtctcataaagagcagttttactaaatgattgtatgcttatgctgaacacctttcatattggagaatcatgcatttgggtcactaattatctcaaaatatttcatactaataaagttgaattattttttattggaa

SEQ ID NO: 79568 - DNA, 2153 bp, Homo sapiens
gtagcgaggcttgggtggcgaactcggcacgaggcccaaaggtaggctcaggctccgacggtggccggcgggggtcacgaggcttcgtagtggaggaacgggtttggcgtgtgggacgcagctgcctctgtactggggagtcacggagtggccgggctccagggacatggcggcggcctctgcggtgtcggtgctgctggtggcggcggagaggaaccggtggcatcgtctcccgagcctgctcctgccgccgaggacatgggtgtggaggcaaagaaccatgaagtacacaacagccacaggaagaaacattaccaaggtcctcattgcaaacagaggagaaattgcctgcagggtgatgcgcacagccaaaaaactgggtgtacagactgtggcggtttatagtgaggctgacagaaattccatgcatgtagatatggcagatgaagcatattccatcggccccgctccctcccagcagagctacctatctatggagaaaatcattcaagtggccaagacctctgctgcacaggctatccatccaggatgcggttttctttcagaaaacatggaatttgctgaactttgtaagcaagaaggaattatttttataggccctcctccatctgcaattagagacatgggtataaagagcacatccaaatccataatggctgctgctggagtacctgttgtggagggttatcatggtgaggaccaatcagaccagtgcctgaaggaacacgccaggagaattggctatcctgtcatgattaaagccgtccggggtggaggaggaaaaggaatgaggattgttagatcagaacaagaatttcaagaacagttagagtcagcacggagagaagctaagaagtctttcaatgatgatgctatgctgatcgagaagtttgtagacacaccgaggcatgtagaagtccaggtgtttggtgatcaccatggcaatgctgtgtacttgtttgaaagagactgtagtgtgcagaggcgacatcagaagatcattgaggaggccccagcgcctggtattaaatctgaagtaagaaaaaagctgggagaagctgcagtcagagctgctaaagctgtaaattatgttggagcagggactgtggagtttattatggactcaaaacataatttctgtttcatggagatgaatacaaggctgcaagtggaacatcctgttactgagatgatcacaggaactgacttggtggagtggcagcttagaattgcagcaggagagaagattcctttgagccaggaagaaataactctgcagggccatgccttcgaagctagaatatatgcagaagatcctagcaataacttcatgcctgtggcaggcccattagtgcacctctctactcctcgagcagacccttccaccaggattgaaactggagtacggcaaggagacgaagtttccgtgcattatgaccccatgattgcgaagctggtcgtgtgggcagcagatcgccaggcggcattgacaaaactgaggtacagccttcgtcagtacaatattgttggactgcccaccaacattgacttcttactcaacctgtctggccacccagagtttgaagctgggaacgtgcacactgatttcatccctcaacaccacaaacagttgttgctcagtcggaaggctgcagccaaagagtctttatgccaggcagccctgggtctcatcctcaaggagaaagccatgaccgacactttcactcttcaggcacatgatcaattctctccattttcgtctagcagtggaagaagactgaatatctcgtataccagaaacatgactcttaaagatggtaaaaacaatgtagccatagctgtaacgtataaccatgatgggtcttatagcatgcagattgaagataaaactttccaagtccttggtaatctttacagcgagggagactgcacttacctgaaatgttctgttaatggagttgctagtaaagcgaagctgattatcctggaaaacactatttacctattttccaaggaaggaagtattgagattgacattccagtccccaaatacttatcttctgtgagctcacaagaaataccgatgcgtcctggccttcaataattactctctctactcataaattagtctt

SEQ ID NO: 79569 - DNA, 877 bp, Homo sapiens
caacttcgaggatccccgctgtgcggaccatcctcaaggataaagccatgaccgacactttcactgttcaggcacatgatcaattctctccattttcgtctagcagtggaagaagactgaatatctcgtataccagaaacatgactcttaaagatggtaaaaacaatgtagccatagctgtaacgtataaccatgatgggtcttatagcatgcagattgaagataaaactttccaagtccttggtaatctttacagcgagggagactgcacttacctgaaatgttctgttaatggagttgctagtaaagcgaagctgattatcctggaaaacactatttacctattttccaaggaaggaagtattgagattgacattccagtccccaaatacttatcttctgtgagctcacaagaaactcagggcggccccttagctcctatgactggaaccattgaaaaggtgtttgtcaaagctggagacaaagtgaaagcgggagattccctcatggttatgatcgccatgaagatggagcataccataaagtctccaaaggatggcacagtaaagaaagtgttctacagagaaggtgctcaggccaacagacacactcctttagtcgagtttgaggaggaagaatcagacaaaagggaatcggaataaactccagcaaggaaatggccagttaagtagtgtcttctctctccaccaaaaagaggaagtgcctccagcttttctgggggtctcataaagagcagttttactaaatgattgtatgcttatgctgaacacctttcatattggagaatcatgcatttgggtcactaattatctcaaaatatttcatactaataaagttgaattattttttattggaa

SEQ ID NO: 79570 - DNA, 1010 bp, Homo sapiens
gtagcgaggcttgggtggcgaactcggcacgaggcccaaaggtaggctcaggctccgacggtggccggcgggggtcacgaggcttcgtagtggaggaacgggtttggcgtgtgggacgcagctgcctctgtactggggagtcacggagtggccgggctccagggacatggcggcggcctctgcggtgtcggtgctgctggtggcggcggagaggaaccggtggcatcgtctcccgagcctgctcctgccgccgaggacatgggtgtggaggcaaagaaccatgaagtacacaacagccacaggaagaaacattaccaaggtcctcattgcaaacagaggagaaattgcctgcagggtgatgcgcacagccaaaaaactgggtgtacagactgtggcggtttatagtgaggctgacagaaattccatgcatgtagatatggcagatgaagcatattccatcggccccgctccctcccagcagagctacctatctatggagaaaatcattcaagtggccaagacctctgctgcacagaggcttataggcggaagggacttgccttgtctcagacgagatgttggactgtggacttttgagttaatgctaaaataagttaagactttgagggactgttgggaaggcatgattggtttcaaaatgtgaggacatgagatttaggagggatgaggagcggaatgatatggtttggttctgtgtccccacccaaatctcatcttcaattgtaactctcacaattctcatgtatcgtgggaggaacccagtgggaggtgattgaattatgggggcaggtctttcctgcgctgttctcatggtcatgaatgagtctcatgagagctgatggttttaaaaatgagtgtttccctgcacaagctctctctttgcctgccaccatccatgtaagacatgaattcctcctccctgccttccgccatgattgcgaggcctccccagccatgtggaactgtgagtccaataaacttctttcttt

SEQ ID NO: 79571 - DNA, 311 bp, Homo sapiens
ggccctccggcagctccagagcacctcctgggtcaccacagagctaagccaggcctggtcactcctctgggcactaaggtctgaagctgggccacttgtctctgctcaaagttccctaggtaccccaccaagccaactctccccttcctcctggccgcagtgctgtcaaggtggctacagggaaagcagagggttttagcaactgcctaaagccataggtctccttccagttttcctgtctccaacctcggcaccagggagggcttcttcacgccttatgtgctttggaccccttctctgaacagtgtttt

SEQ ID NO: 79572 - DNA, 886 bp, Homo sapiens
tcccagagtgctggcattacaggcatgagccaccatgcccagccaattttctgttttagaaatacttttttgattactgaatagcttttgttgaacacagttgagaattaggttgtctattgttgccattctctatattgatgtttctggatatggtatgacattgttatttagagtatgttctaattcaaatatacttatttctaatcaacaggattatattttgtccgagtatattttgtctcttttttcatttatattttcacgtgtttgtgattttgaaaataacataattcaaacatttttctttaacctcagaacatatacttctttgttatccccccatttccacatataccctctttctagaacaaggaggaggacagatgtgggtttgggttttggggttttttttttaatactccttaatacttttttaaaaaatactcctttttaatactccttaaagttagctctaaatcccttgacattctgagcagtgtgtatagcaaaacttagctcttctagggggcagcatgaatgacttgctaagtcctaagggaaaaactgaaacatttaatctgtctttaaatcacttctgtttgtttgatcactctgagtgttatttacaaaattgcctttattagtgacaaataattaaattatataaaactaaacattcagttccttagacacactagctacatttcagatggtcagtaaccaccataccaaaaagaacagatgaagaatatttcctttatctcagaaagttctattagaaagtcctattctagactctaatgatggtaaaattgatcatatgagcagaagctcagactctgaaacctcatttgacaatatcctgaatgaattttctcagaaa

SEQ ID NO: 79573 - DNA, 863 bp, Homo sapiens
tcccagagtgctggcattacaggcatgagccaccatgcccagccaattttctgttttagaaatacttttttgattactgaatagcttttgttgaacacagttgagaattaggttgtctattgttgccattctctatattgatgtttctggatatggtatgacattgttatttagagtatgttctaattcaaatatacttatttctaatcaacaggattatattttgtccgagtatattttgtctcttttttcatttatattttcacgtgtttgtgattttgaaaataacataattcaaacatttttctttaacctcagaacatatacttctttgttatccccccatttccacatataccctctttctagaacaaggaggaggacagatgtgggtttgggttttggggttttttttttaatactccttaatacttttttaaaaaatactcctttttaatactccttaaagttagctctaaatcccttgacattctgagcagtgtgtatagcaaaacttagctcttctagggggcagcatgaatgacttgctaagtcctaagggaaaaactgaaacatttaatctgtctttaaatcacttctgtttgtttgatcactctgagtgttatttacaaaattgcctttattagtgacaaataattaaattgacataggaacattttctggaaattagagtgattggattttctttagaaatctccaaattggtggctgggcaaggtggcttacgcctgtattcccaccactttgggaggccgaggcaggcagatcacgaggtcaggcgttcgagaccagcctgactagcatggtgaaaccccgtctctactaaatatacaaaaaaaaaa

SEQ ID NO: 79574 - DNA, 455 bp, Homo sapiens
aaggaaaaaaaaaacctatttgaggtgatagcggctctaacaagaggtagatagatgggaggggtttgtgcctgacatcacaccatgagcaggggctgggggtgttccttcatctttaggacccaacatgtttcagtgtcacctgtacatcctgggcaactttgaggaagcttcctctctgtgacatacttagcagctaaacaggtttatgttttccatataaaactccctgagtcattaaaattttggagttccctgaggagcacagcaagttggcctgggggtgaaaaggaaagtccttttgttttgaaccagtggtctgggattaaagagactctgggagggttcatttggtgaagcaggagagagactgctctggttagaaactgctgatcagtttgaacactttgtcagttgtcatagtttcatgtttacttgccgtgaagtgctgcaaa

SEQ ID NO: 79575 - DNA, 892 bp, Homo sapiens
  misc_feature (440)..(440): n is a, c, g, or t
tttattccccctgcctacaaatgcattgcctgtggttgggtatgctgccaccaagtggttatagccaaagacccaggctgcagctaccaggaagtaagagcccttgtaaacttttaacaaagtgaaatcttgtaacagccttgtcttgcccacaaagggaaaatctgaagttgttttgtctctgctcttacacatgtctgcatatcaccaccaccaccaccaccaccaccaccaccattagctctgcctctgggccggtcactgagagtgcagtggcgcgatctcggctcactgcaacctctgcttcctgggttcaggcaatactgagatgagtattttaatgcatcatgccatttggttcttagaactaccctcagggaggtgatgcaatgagccccattttccagacaaggaaacagaggctgggaggtcaagtgacntcccaaggtcacagagagagacagtggctgggctaggatttgaccccaagtctacctgacatcaaagccatgacaaaagtctcccacttgggcacctgggtgtatgtctgggattggtgtgtgtcggtgtggatggcgggagttgggtagacagggtggtggggtaccaaggaatggtctggagcatggaatttcagaggaatcagaagtagagaccctcatggtgaggacctgcattctgggaagctgctgacagttcagagcccaaagaggaggtcagaggaatcctggggttgatcctctttctagcttcagggcgtctggtgacatctgggcacgggagcaaggttggattctacccttagacggcaggtccgctgcgaaggaggagctgggcttggggtttgggagtgggtagtggggctcctctggacttcagtgggacagggagg

SEQ ID NO: 79576 - DNA, 546 bp, Homo sapiens
cgagccaccactcccagccaggttgctattaaattttacctttttatccaggagcgtgggtcatcatttctttcaaataatgcttctatttatgagatttttctttgtagaaaatgtgggaaatgttaagagtataaggaagaaaataagtcgtgttaacgcaattgctgcatttttctttttttctttgcatatttcttttaaacttgagatcatgtaatgtcaacaagtttattggatttttctcctaatgtagtattagtatttccatgtgttgtaaagagcaagcttttaggtatcatttttaatgcaatataatgttgtaacatcctattgcaatgacagcttgtctttctcccaattttatctgcactattaggtattaagaatatttaatgtggccgggcatgaaggctcctgcctgtggtcccagcactttggcctcccgaggtgttgggattacagacacgagccaccactcccagccagttgctattaaattttaccttttatccaggaccgtggagccatcatctgggatcctct

SEQ ID NO: 79577 - DNA, 679 bp, Homo sapiens
cgagccaccactcccagccaggttgctattaaattttacctttttatccaggagcgtgggtcatcatttctttcaaataatgcttctatttatgagatttttctttgtagaaaatgtgggaaatgttaagagtataaggaagaaaataagtcgtgttaacgcaattgctgcatttttctttttttctttgcatatttcttttaaacttgagatcatgtaatgtcaacaagtttattggatttttctcctaatgtagtattagtatttccatgtgttgtaaagagcaagcttttaggtatcatttttaatgcaatataatgttgtaacatcctattgcaatgacagcttgtctttctcccaattttatctgcactattaggtattaagaatatttaatgtggccgggcatgaaggctcctgcctgtggtcccagcactttgggaggccgaggtgggtggaacacttgaggtcaggagttcgagaccagcttgggcaacatggtgaaaccgcatctccactcaaaatacaaaaattagctgggtgtggtgatgcatgcctctaatcccagctactcggaaggctaaggctggaaaatcatttgaacccaggaggtggaggttgcagtgagtcgagatcatgcactgcacttcagcctgggtaacagagccaaacactagct

SEQ ID NO: 79578 - DNA, 1632 bp, Homo sapiens
gtcatggaatacgcctctgacgcttcactggaccccgaagccccgtggcctcccgcgccccgcgctcgcgcctgccgcgtactgccttgggccctggtcgcggggctgctgctgctgctgctgctcgctgccgcctgcgccgtcttcctcgcctgcccctgggccgtgtccggggctcgcgcctcgcccggctccgcggccagcccgagactccgcgagggtcccgagctttcgcccgacgatcccgccggcctcttggacctgcggcagggcatgtttgcgcagctggtggcccaaaatgttctgctgatcgatgggcccctgagctggtacagtgacccaggcctggcaggcgtgtccctgacggggggcctgagctacaaagaggacacgaaggagctggtggtggccaaggctggagtctactatgtcttctttcaactagagctgcggcgcgtggtggccggcgagggctcaggctccgtttcacttgcgctgcacctgcagccactgcgctctgctgctggggccgccgccctggctttgaccgtggacctgccacccgcctcctccgaggctcggaactcggccttcggtttccagggccgcttgctgcacctgagtgccggccagcgcctgggcgtccatcttcacactgaggccagggcacgccatgcctggcagcttacccagggcgccacagtcttgggactcttccgggtgacccccgaaatcccagccggactcccttcaccgaggtcggaataacgcccagcctgggtgcagcccacctggacagagtccgaatcctactccatccttcatggagacccctggtgctgggtccctgctgctttctctacctcaaggggcttggcaggggtccctgctgctgacctccccttgaggaccctcctcacccactccttccccaagttggaccttgatatttattctgagcctgagctcagataatatattatatatattatatatatatatatatttctatttaaagaggatcctgagtttgtgaatggacttttttagaggagttgttttgggggggggggtcttcgacattgccgaggctggtcttgaactcctggacttagacgatcctcctgcctcagcctcccaagcaactgggattcatcctttctattaattcattgtacttatttgcttatttgtgtgtattgagcatctgtaatgtgccagcattgtgcccaggctagggggctatagaaacatctagaaatagactgaaagaaaatctgagttatggtaatacgtgaggaatttaaagactcatccccagcctctacctcctgtgtgatacttgggggctagcttttttctttctttcttttttttgagatggtcttgttctgtcaaccaggctagaatgcagcggtgcaatcatgagtcaatgcagcctccagcctcgacctcccgaggctcaggtgatcctcccatctcagcctctcgagtagctgggaccacagttgtgtgccaccacacttggctaactttttaatttttttgcggagacggtattgctatgttgccaaggttgtttacatgccagtacaatttataataaacactcatttttcctccctctggaga

SEQ ID NO: 79579 - DNA, 756 bp, Homo sapiens
  misc_feature (58)..(58): n is a, c, g, or t
  misc_feature (71)..(71): n is a, c, g, or t
ggggtcccccccccccccccccccctccccccccccccctcccccccccccccccccnagttggcccttgntatttttttttatctttttaaaaaataatatattatatatattatatatatatatatatttctatttaaagaggatcctgagtttgtgaatggacttttttagaggagttgttttgggggggggggtcttcgacattgccgaggctggtcttgaactcctggacttagacgatcctcctgcctcagcctcccaagcaactgggattcatcctttctattaattcattgtacttatttgcttatttgtgtgtattgagcatctgtaatgtgccagcattgtgcccaggctagggggctatagaaacatctagaaatagactgaaagaaaatctgagttatggtaatacgtgaggaatttaaagactcatccccagcctctacctcctgtgtgatacttgggggctagcttttttctttctttcttttttttgagatggtcttgttctgtcaaccaggctagaatgcagcggtgcaatcatgagtcaatgcagcctccagcctcgacctcccgaggctcaggtgatcctcccatctcagcctctcgagtagctgggaccacagttgtgtgccaccacacttggctaactttttaatttttttgcggagacggtattgctatgttgccaaggttgtttacatgccagtacaatttataataaacactcatttttcctccctctggaga

SEQ ID NO: 79580 - DNA, 769 bp, Homo sapiens
acgattctgccttattttctttctttcttttttctgagacagggtcttgctgtgccaaccaggctggagtacagtggcacaatcacagctcactgctgcctcaacctcctgggctcaagcaatcctcccacttcagcttccagagtagctgggaccacaggcatgtgccaccatacccagataatttttattttttcatagagatagggttttaccacattgccgaggctggtcttgaactcctggacttagacgatcctcctgcctcagcctcccaagcaactgggattcatcctttctattaattcattgtacttatttgcttatttgtgtgtattgagcatctgtaatgtgccagcattgtgcccaggctagggggctatagaaacatctagaaatagactgaaagaaaatctgagttatggtaatacgtgaggaatttaaagactcatccccagcctctacctcctgtgtgatacttgggggctagcttttttctttctttcttttttttgagatggtcttgttctgtcaaccaggctagaatgcagcggtgcaatcatgagtcaatgcagcctccagcctcgacctcccgaggctcaggtgatcctcccatctcagcctctcgagtagctgggaccacagttgtgtgccaccacacttggctaactttttaatttttttgcggagacggtattgctatgttgccaaggttgtttacatgccagtacaatttataataaacactcatttttcctccctctggaga

SEQ ID NO: 79581 - DNA, 715 bp, Homo sapiens
ctgaatagtatttttgtcttctgtatgactttattctactaggatttttgcgggggagcggtgtcctagtccattttgtgttgctataactgaataccatagactgggtgacttataaagaatggagatttatttagctcattgttctggaggctgggaagtcctagagcatggtaccagcatcttgtaagggccttcctgctgtgttgtgacatgatgggaggcatcacacggtaagacagagcaactgtgctagctctgtgtaactatacaattacatgtctacaaataattttttgttcaaatcttcttttctaatattgataacactccatacccactggcctaaactaataatgtcaataatgggcatttttgttgtatgtgtgtgtatattctgttctgtaacccttttatagctcaatacatgaggatgttttctactataagtattagtttctagtatcaattttattggccttgtactattccacaggatgtgtgtcactatatcacctagagaggggggagtatcccctctttgtcatttactcagggggccacaggagactattggggatggtgtcttccactgttgaaggagagttggacttggagtgaggtatcttttctggtcccagctggctctttcattcattcatttttctacacaaatagttatcaggtactaggtacctaggtactgggggtgggg

SEQ ID NO: 79582 - DNA, 589 bp, Homo sapiens
accctgtttgggatagatatttgtgaactcctcttgagctgatctacctcaagtaaattatataatccaggctcccagaaggtcagttccatgggtctcctccttggtaaagaataactctcagtgaccatttccatcccatcaaattttaaaaacatttttattttggatattttcttcaaacaagatgtagttgaatttgagtattttgaattttaaatttacattttaaatctaaaatgcatgtttttaaagagagctaaatgttgtaaatatgacatttgaaattttgaaatgtttagctcaaacattgtagaaataggaaaattctctcacaatcccaccacataaaggtgcctctattatagatgatgcacagtcctcaatatcctatgcatattctctgccaaagtgggatcacacaatacatactattttgctggttcgttgttgttgttgatgttgttgttgttttgtcatttaacatacctaaacgtcttttcatgccggtacacaatattattccttttacagctgtaaacttttatctttttaaaacccaaagttagaatcattcaggtcacttcat

SEQ ID NO: 79583 - DNA, 591 bp, Homo sapiens
ctccaggaagccaagccgctgcggtgcgctttggctacctgggagggaaaggggaaggaaattctctctaccccccggctttctcttcccttccccccatttgggaaacgagtagaggtattgaaatttaaaggagattttcaaaggccgctgtcgaaggatgctaataggagttgcaagacagacgcattaggaagagggaatttcccacggaaagctttgtaatgagctaacgagacgcgttcccccacctcacctttggaggggaggggaaaacagagcttgaattacgcatttaatttcccctgcgctcgttcccaaatgggaaaagctgatgggtctcgataggatcgggatttctggtttcaaggtttaacgttgtgcgcgctcccctgcttgcagaccccgcagctactcccaccgcacatcctctcgccggtcttcgcgtctgcgtctccctcccgctgttggcgcgttgcttcggctgcttttgcaccacaattgtgaagttcagaagttaccacagaatctatgtgatctgcagagaatcgcttgaacctgggaggcagaggttgcaggaggtggaggttg

SEQ ID NO: 79584 - DNA, 581 bp, Homo sapiens
cactaccactggggtaatgttccctgcgtcccaaaaccgggattcaggagctcttcctttgaagtcatgaatttataaaaggtgtttaataatcgttgctaccatacatattgttatgtatgaattgtgtcctccaaaatccatatgttgaggtcctaacccgcagcacctcagaaagtgatcttatttggaaacaaggcctttgcagatgtaattagtgaagtaaaggtgaggtcgttctggagctgagtagggttcctaatccaatatgaccggtgttcttttaagaagggaaaatttggccaggcacagtggctcacacctgtaatcccagcactttgggaggccgacgcaggcagatcacgaggtcaggagatcgagaccatcctggctaacatggtgaaaccccgtctctactaaaaatacaaaaaattacccaggcgtggtggcgggcgcctgtaatcccagctactcaggaggctgaggtaggagaacggcatgaacccgggaggtggagcttgaagtaagctgagattgcgccactgcactccagtctgggcgacggagcgagactccgtcta

SEQ ID NO: 79585 - DNA, 415 bp, Homo sapiens
gtttttcatttctccataattttctacaccctttatcagatatggcacatcagtagtcctctccaactaatgcatagcatatctctttttcatcatgtcatcaaagaactagaggttgaataaacatttgaacttcaatggctcgcttcttgcattgtaaagtaaccacttaggtgcaacttaaggttattctgtaacatttataaaccaacaagatgatgaaatgtcctgaggctgcaaaaagtagctgagagtaaactgcaagacagatctgttttaaaatacagggtcttccttccctttgacaaggagaagaaatgtcagctatctgtaagtctggctcttatggttgttaaaactgatgcggggatgaccaccaaatttatttcattaaaatcacctgaaacttctttta

SEQ ID NO: 79586 - DNA, 411 bp, Homo sapiens
ggctcaccgcaacctctgcctcccaggttcaagcaattatcctgcctcagcctcccgagtagctggactgcatgctaccacacccagccaatttttttttatttttagtagagacagggtttcactacattggccaggctggtgttgaactcctgacttaggtgatccgcctgcctcggcctctcacagtgctgggattacaggcgtaagacacagtgctcagccccaaatgggaaatggatccatctatatcaatatggagaacactcccaataaacctaccaggaaaaaaaaaattcacctaattctttaagtaaacaatctacagcaaaagtaacaacaaactctggcccagacattattttaaggcttaaatttataatttttctatgtctaattctccttacagga

SEQ ID NO: 79587 - DNA, 452 bp, Homo sapiens
cttacagataagaattaagacgtatgatagacatgagaagtctgcattttatgaggttagctagagaaaataaattttttggtccctgaaaagtgatcctgtttccagacaccagaaaaatgttcagagggccaactggctctgataactaaatctcatcatgaagagaaaggaactaaagaattgtggggtaaggaatggaatctaggacttaaaaaaataaggtttgaagtcgttaagaccctaaagttaatatgtgagtgttttttactggctggctttgaaggcattttgttgggctaaaaacccctgggcttcaattttctgaagcagattttgtcttcccatttagaaagtaaaaccctggcgattgattctctgggttccaggaggcctgtcctttcaagtgtccaatattgagttaaacaaaagtgtaaaatttgggtgaagat

SEQ ID NO: 79588 - DNA, 489 bp, Homo sapiens
tgctgacaaccaggtgtgattccctcacaatgtacaagcactgggcatttcagaggtgactttgtgctgtccttaccatgtagaggtaggcactgggcatctcaggggtgaccttgtgtttacaaccaggtgtgctgccctcatcatgcacaggtaggcgatgaacatctcagggtggaccccatcctgatcaccaggtgtgctctcctcactgtgcacaggttggggctggacatagcagggacccaggtgtgtgcaaggtgcagcgtttgttccatggggaggacctgcaggtcgtccagctccccattcctgtcctcagaaactcactggggcgcaatgcctgtagggcaaaaagctgcttgtgtgctgtgatgtgaacctcagggtgactccaaacgtgatcgtgctccatgttctgttaggctgctgtcaataaatgcaataaatgtgtgaacaattcctcgtagatgtctttggatattttta

SEQ ID NO: 79589 - DNA, 981 bp, Homo sapiens
tgccctggccaaggaggaggctgaaagagcctgagctgtgccctctccattccactgctgtggcagggtcagaaatcttggatagagaaaaccttttgcaaacgggaatgtatctttgtaattcctagcacgaaagactctaacaggtgttgctgtggccagttcaccaaccagcatatcccccctctgccaagtgcaacacccagcaaaaatgaagaggaaaacaaacaggtggagactcagcctgagaaatggtctgttgccaagcacacccagagctacccaacagattcctatggagttcttgaattccagggtggcggatattccaataaagccatggtgagaaaggcattcagacatggtgccactaggatcacagctttcattggcggccagtctcccagccccaaactgcagatacctggtcttcttcatggctgtggctcaatcttcctagatatttcattgaaaaacccaagagatatatctgtgcacatggcttttagccatgaggcttggaaactggacaccactgtaaagaacatctagtgtccgtaaatccataccaaagctctgaatccacaaaccaggctctggcccaaccctgcaaacacactcccattgctccatcttcagtaaaggaagacaaattcatttttctaataactgtggacctgcagcccccttagatgtgttgagagtctttggaaatattttcctctgaggtctgtccacagcttccctgggcctgcgctcagctggcccgagaaagaccaaggtccctcacatttgcatgtaaacagggagtgccctctgcccttccagtgagccctgccagcgtgggggaggcttcagctctgtgatccgttccagctcactctgaattacactcctacatgcccagtcacagactttttgcaatttcattttatttcactggcccaacatcattgttaaaataaaatttagttgtgttcc

SEQ ID NO: 79590 - DNA, 5689 bp, Homo sapiens
tgccctggccaaggaggaggctgaaagagcctgagctgtgccctctccattccactgctgtggcagggtcagaaatcttggatagagaaaaccttttgcaaacgggaatgtatctttgtaattcctagcacgaaagactctaacaggtgttgctgtggccagttcaccaaccagcatatcccccctctgccaagtgcaacacccagcaaaaatgaagaggaaaacaaacaggtggagactcagcctgagaaatggtctgttgccaagcacacccagagctacccaacagattcctatggagttcttgaattccagggtggcggatattccaataaagccatgtatatccgtgtatcctatgacaccaagccagactcactgctccatctcatggtgaaagattggcagctggaactccccaagctcttaatatctgtgcatggaggcctccagaactttgagatgcagcccaagctgaaacaagtctttgggaaaggcctgatcaaggctgctatgaccaccggggcctggatcttcaccgggggtgtcagcacaggtgttatcagccacgtaggggatgccttgaaagaccactcctccaagtccagaggccgggtttgtgctataggaattgctccatggggcatcgtggagaataaggaagacctggttggaaaggatgtaacaagagtgtaccagaccatgtccaaccctctaagtaagctctctgtgctcaacaactcccacacccacttcatcctggctgacaatggcaccctgggcaagtatggcgccgaggtgaagctgcgaaggctgctggaaaagcacatctccctccagaagatcaacacaagactggggcagggcgtgcccctcgtgggtctcgtggtggaggggggccctaacgtggtgtccatcgtcttggaatacctgcaagaagagcctcccatccctgtggtgatttgtgatggcagcggacgtgcctcggacatcctgtcctttgcgcacaagtactgtgaagaaggcggaataataaatgagtccctcagggagcagcttctagttaccattcagaaaacatttaattataataaggcacaatcacatcagctgtttgcaattataatggagtgcatgaagaagaaagaactcgtcactgtgttcagaatgggttctgagggccagcaggacatcgagatggcaattttaactgccctgctgaaaggaacaaacgtatctgctccagatcagctgagcttggcactggcttggaaccgcgtggacatagcacgaagccagatctttgtctttgggccccactggccgcccctgggaagcctggcacccccgacggacagcaaagccacggagaaggagaagaagccacccatggccaccaccaagggaggaagaggaaaagggaaaggcaagaagaaagggaaagtgaaagaggaagtggaggaagaaactgacccccggaagatagagctgctgaactgggtgaatgctttggagcaagcgatgctagatgctttagtcttagatcgtgtcgactttgtgaagctcctgattgaaaacggagtgaacatgcaacactttctgaccattccgaggctggaggagctctataacacaagactgggtccaccaaacacacttcatctgctggtgagggatgtgaaaaagagcaaccttccgcctgattaccacatcagcctcatagacatcgggctcgtgctggagtacctcatgggaggagcctaccgctgcaactacactcggaaaaactttcggaccctttacaacaacttgtttggaccaaagaggcctaaagctcttaaacttctgggaatggaagcctccagctaaagggaagaaaaaaaaaaaaaagaaaaaggaggaagagatcgacattgatgtggacgaccctgccgtgagtcggttccagtatcccttccacgagctgatggtgtgggcagtgctgatgaaacgccagaaaatggcagtgttcctctggcagcgaggggaagagagcatggccaaggccctggtggcctgcaagctctacaaggccatggcccacgagtcctccgagagtgatctggtggatgacatctcccaggacttggataacaattccaaagacttcggccagcttgctttggagttattagaccagtcctataagcatgacgagcagatcgctatgaaactcctgacctacgagctgaaaaactggagcaactcgacctgcctcaaactggccgtggcagccaaacaccgggacttcattgctcacacctgcagccagatgctgctgaccgatatgtggatgggaagactgcggatgcggaagaaccccggcctgaaggttatcatggggattcttctaccccccaccatcttgtttttggaatttcgcacatatgatgatttctcgtatcaaacatccaaggaaaacgaggatggcaaagaaaaagaagaggaaaatacggatgcaaatgcagatgctggctcaagaaagggggatgaggagaacgagcataaaaaacagagaagtattcccatcggaacaaagatctgtgaattctataacgcgcccattgtcaagttctggttttacacaatatcatacttgggctacctgctgctgtttaactacgtcatcctggtgcggatggatggctggccgtccctccaggagtggatcgtcatctcctacatcgtgagcctggcgttagagaagatacgagagatcctcatgtcagaaccaggcaaactcagccagaaaatcaaagtttggcttcaggagtactggaacatcacagatctcgtggccatttccacattcatgattggagcaattcttcgcctacagaaccagccctacatgggctatggccgggtgatctactgtgtggatatcatcttctggtacatccgtgtcctggacatctttggtgtcaacaagtatctggggccatacgtgatgatgattggaaagatgatgatcgacatgctgtactttgtggtcatcatgctggtcgtgctcatgagtttcggagtagcccgtcaagccattctgcatccagaggagaagccctcttggaaactggcccgaaacatcttctacatgccctactggatgatctatggagaggtgtttgcagaccagatagacctctacgccatggaaattaatcctccttgtggtgagaacctatatgatgaggagggcaagcggcttcctccctgtatccccggcgcctggctcactccagcactcatggcgtgctatctactggtcgccaacatcctgctggtgaacctgctgattgctgtgttcaacaataccttctttgaagtaaaatcaatatccaaccaggtgtggaagttccagcgatatcagctgattatgacatttcatgacaggccagtcctgcccccaccgatgatcattttaagccacatctacatcatcattatgcgtctcagcggccgctgcaggaaaaagagagaaggggaccaagaggaacgggatcgtggattgaagctcttccttagcgacgaggagctaaagaggctgcatgagttcgaggagcagtgcgtgcaggagcacttccgggagaaggaggatgagcagcagtcgtccagcgacgagcgcatccgggtcacttctgaaagagttgaaaatatgtcaatgaggttggaagaaatcaatgaaagagaaacttttatgaaaacttccctgcagactgttgaccttcgacttgctcagctagaagaattatctaacagaatggtgaatgctcttgaaaatcttgcgggaatcgacaggtctgacctgatccaggcacggtcccgggcttcttctgaatgtgaggcaacgtatcttctccggcaaagcagcatcaatagcgctgatggctacagcttgtatcgatatcattttaacggagaagagttattatttgaggatacatctctctccacgtcaccagggacaggagtcaggaaaaaaacctgttccttccgtataaaggaagagaaggacgtgaaaacgcacctagtcccagaatgtcagaacagtcttcacctttcactgggcacaagcacatcagcaaccccagatggcagtcaccttgcagtagatgacttaaagaacgctgaagagtcaaaattaggtccagatattgggatttcaaaggaagatgatgaaagacagacagactctaaaaaagaagaaactatttccccaagtttaaataaaacagatgtgatacatggacaggacaaatcagatgttcaaaacactcagctaacagtggaaacgacaaatatagaaggcactatttcctatcccctggaagaaaccaaaattacacgctatttccccgatgaaacgatcaatgcttgtaaaacaatgaagtccagaagcttcgtctattcccggggaagaaagctggtcggtggggttaaccaggatgtagagtacagttcaatcacggaccagcaattgacgacggaatggcaatgccaagttcaaaagatcacgcgctctcatagcacagatattccttacattgtgtcggaagctgcagtgcaagctgagcataaagagcagtttgcagatatgcaagatgaacaccatgtcgctgaagcaattcctcgaatccctcgcttgtccctaaccattactgacagaaatgggatggaaaacttactgtctgtgaagccagatcaaactttgggattcccatctctcaggtcaaaaagtttacatggacatcctaggaatgtgaaatccattcagggaaagttagacagatctggacatgccagtagtgtaagcagcttagtaattgtgtctggaatgacagcagaagaaaaaaaggttaagaaagagaaagcttccacagaaactgaatgctagtctgttttgtttctttaatttttttttttaacagtcagaaccactaatgggtgtcatcttggccatctaaacatcatcaatttctaaaaacattttccttaaaaaattttggaaattcagacttgatttacaatttaatgcactaaaagtagtattttgttagcatatgttagtaggcttagttttttcagttgcagtagtatcaaatgaaagtgatgatactgtaacgaagataaattggctaatcagtatacaagattatacaatctctttattactgagggccaccaaatagcctaggaagtgccctcgagcactgaagtcaccattaggtcacttaagaagtaagcaactagctgggcacagtggctcatgcctgtaatcctagcactttgggaggccaaggcagaaagatagcttgagtccaggagtttgagaccagcctgggcaacatagtgataccccatctcttaaaaaaaaaaaaaaaagtaagcaactgtgtaagaaagagaaactaaagagaaagcaaacatgaaaaaagggaggggtggaaagaagaaaaataaaattatgaggcacaataagtgggaaggagccacaaatatgtttttatggggtctttgttttctgttttaatgttttattttaaactacacaatgggaaaaaaagtacacaattatatcaaacatcatactctaataatttagggtgacctagagttttgttaatgtgcaaaaataaagtatccaatatgc

SEQ ID NO: 79591 - DNA, 4056 bp, Homo sapiens
ctgatatacaaccaatactattattttgcagtaattgttgaccctttcactgaactgaaaaacattattaacctagtccagatagagggaatctgatggcatcggtctaattagagcctgaaaaaccaaaagagcactgaatccaaaattatacttgccaccttctactactgttccttttctagctgggcctcattcaaattctgcaggtgctgcaactggtatttcctgagcggcctgctttaccatcgctgtgccgtcctggccttgctgagggtccaccatacaccgagacactgttctttattccagaaacctgcccccagttataggagagagagggtggccatcggctagtgtgcatgggttgttaaactagtgaatcccttctgtgtgggctgacagatagccactgccccatcctaccacagagatccccaagacctctgcaactgaaggggtaccacctggcatggcaaccctccatcccagtgtggtaccacagacagctgtgccattgggaaggctctgcgcacgcctgtgcatgctgcttgctaaatatcttccattttactctgtggaagtctccccttaagcagcagtgattttgaaaggataatatctcaagtaggggaaaacctggtctaactttcccctaatttctcatgtctaagttgcaaaggaattttgccaaatcaaaacatttcctagtggtattctgccatctccactgggtggactgcccctctgtggggccacgtggggctcatctatgctctagagttttcatcctgtgtgactctggaatgtggagtaacaggcacgtgtccagataattaaaaaagaaatcaaaatgcagctgctttaattacagccagaaggacataatttagaaggcatttcctgagtttgtaaaaccctgaatctaagaatagggaggattccgtggaatttccctttctagatatctctccctgcctgagaagaagagtgtttaaacgttttgagtaggaaaggggccagatgacctggaatgttccatcagtcttattgttccaagattctaagacaagacttctaatacggcatctcagtttattgttctttggggtttgttttcagatcctcatgtcagaaccaggcaaactcagccagaaaatcaaagtttggcttcaggagtactggaacatcacagatctcgtggccatttccacattcatgattggagcaattcttcgcctacagaaccagccctacatgggctatggccgggtgatctactgtgtggatatcatcttctggtacatccgtgtcctggacatctttggtgtcaacaagtatctggggccatacgtgatgatgattggaaagatgatgatcgacatgctgtactttgtggtcatcatgctggtcgtgctcatgagtttcggagtagcccgtcaagccattctgcatccagaggagaagccctcttggaaactggcccgaaacatcttctacatgccctactggatgatctatggagaggtgtttgcagaccagatagacctctacgccatggaaattaatcctccttgtggtgagaacctatatgatgaggagggcaagcggcttcctccctgtatccccggcgcctggctcactccagcactcatggcgtgctatctactggtcgccaacatcctgctggtgaacctgctgattgctgtgttcaacaataccttctttgaagtaaaatcaatatccaaccaggtgtggaagttccagcgatatcagctgattatgacatttcatgacaggccagtcctgcccccaccgatgatcattttaagccacatctacatcatcattatgcgtctcagcggccgctgcaggaaaaagagagaaggggaccaagaggaacgggatcgtggattgaagctcttccttagcgacgaggagctaaagaggctgcatgagttcgaggagcagtgcgtgcaggagcacttccgggagaaggaggatgagcagcagtcgtccagcgacgagcgcatccgggtcacttctgaaagagttgaaaatatgtcaatgaggttggaagaaatcaatgaaagagaaacttttatgaaaacttccctgcagactgttgaccttcgacttgctcagctagaagaattatctaacagaatggtgaatgctcttgaaaatcttgcgggaatcgacaggtctgacctgatccaggcacggtcccgggcttcttctgaatgtgaggcaacgtatcttctccggcaaagcagcatcaatagcgctgatggctacagcttgtatcgatatcattttaacggagaagagttattatttgaggatacatctctctccacgtcaccagggacaggagtcaggaaaaaaacctgttccttccgtataaaggaagagaaggacgtgaaaacgcacctagtcccagaatgtcagaacagtcttcacctttcactgggcacaagcacatcagcaaccccagatggcagtcaccttgcagtagatgacttaaagaacgctgaagagtcaaaattaggtccagatattgggatttcaaaggaagatgatgaaagacagacagactctaaaaaagaagaaactatttccccaagtttaaataaaacagatgtgatacatggacaggacaaatcagatgttcaaaacactcagctaacagtggaaacgacaaatatagaaggcactatttcctatcccctggaagaaaccaaaattacacgctatttccccgatgaaacgatcaatgcttgtaaaacaatgaagtccagaagcttcgtctattcccggggaagaaagctggtcggtggggttaaccaggatgtagagtacagttcaatcacggaccagcaattgacgacggaatggcaatgccaagttcaaaagatcacgcgctctcatagcacagatattccttacattgtgtcggaagctgcagtgcaagctgagcataaagagcagtttgcagatatgcaagatgaacaccatgtcgctgaagcaattcctcgaatccctcgcttgtccctaaccattactgacagaaatgggatggaaaacttactgtctgtgaagccagatcaaactttgggattcccatctctcaggtcaaaaagtttacatggacatcctaggaatgtgaaatccattcagggaaagttagacagatctggacatgccagtagtgtaagcagcttagtaattgtgtctggaatgacagcagaagaaaaaaaggttaagaaagagaaagcttccacagaaactgaatgctagtctgttttgtttctttaatttttttttttaacagtcagaaccactaatgggtgtcatcttggccatctaaacatcatcaatttctaaaaacattttccttaaaaaattttggaaattcagacttgatttacaatttaatgcactaaaagtagtattttgttagcatatgttagtaggcttagttttttcagttgcagtagtatcaaatgaaagtgatgatactgtaacgaagataaattggctaatcagtatacaagattatacaatctctttattactgagggccaccaaatagcctaggaagtgccctcgagcactgaagtcaccattaggtcacttaagaagtaagcaactagctgggcacagtggctcatgcctgtaatcctagcactttgggaggccaaggcagaaagatagcttgagtccaggagtttgagaccagcctgggcaacatagtgataccccatctcttaaaaaaaaaaaaaaaagtaagcaactgtgtaagaaagagaaactaaagagaaagcaaacatgaaaaaagggaggggtggaaagaagaaaaataaaattatgaggcacaataagtgggaaggagccacaaatatgtttttatggggtctttgttttctgttttaatgttttattttaaactacacaatgggaaaaaaagtacacaattatatcaaacatcatactctaataatttagggtgacctagagttttgttaatgtgcaaaaataaagtatccaatatgc

SEQ ID NO: 79592 - DNA, 4316 bp, Homo sapiens
cctaaaacattttctctagccccttttgcatgtttcctgttaatttctggttcagctacgtctggcaaacgagtgttatttttgctacatttgaagacctccctgaggaaataaactgtagaccttccctcttccatgatgttatttgtgtttagttttgggggaggttttgcttgtttgttttagttttgcagcgtcgcctcagttaaaggcttctaagtaaaactgctgacccaggggtgcaagttatccaaacagtatgccttctcagttcatttggttttagatagtttacttatcataataaacgtgtgcatcttttcaaaagaattcatatgcggagtggaaatgtaagatgtacttcagaagtctctttattacctctgacagaaagggttccctttctccaggagttctggaactctttgttgcatacttttatggcaaaaccatgaaatccatgtttctcccctcaggatgatgagcctccagctaaagggaagaaaaaaaaaaaaaagaaaaaggaggaagagatcgacattgatgtggacgaccctgccgtgagtcggttccagtatcccttccacgagctgatggtgtgggcagtgctgatgaaacgccagaaaatggcagtgttcctctggcagcgaggggaagagagcatggccaaggccctggtggcctgcaagctctacaaggccatggcccacgagtcctccgagagtgatctggtggatgacatctcccaggacttggataacaattccaaagacttcggccagcttgctttggagttattagaccagtcctataagcatgacgagcagatcgctatgaaactcctgacctacgagctgaaaaactggagcaactcgacctgcctcaaactggccgtggcagccaaacaccgggacttcattgctcacacctgcagccagatgctgctgaccgatatgtggatgggaagactgcggatgcggaagaaccccggcctgaaggttatcatggggattcttctaccccccaccatcttgtttttggaatttcgcacatatgatgatttctcgtatcaaacatccaaggaaaacgaggatggcaaagaaaaagaagaggaaaatacggatgcaaatgcagatgctggctcaagaaagggggatgaggagaacgagcataaaaaacagagaagtattcccatcggaacaaagatctgtgaattctataacgcgcccattgtcaagttctggttttacacaatatcatacttgggctacctgctgctgtttaactacgtcatcctggtgcggatggatggctggccgtccctccaggagtggatcgtcatctcctacatcgtgagcctggcgttagagaagatacgagagatcctcatgtcagaaccaggcaaactcagccagaaaatcaaagtttggcttcaggagtactggaacatcacagatctcgtggccatttccacattcatgattggagcaattcttcgcctacagaaccagccctacatgggctatggccgggtgatctactgtgtggatatcatcttctggtacatccgtgtcctggacatctttggtgtcaacaagtatctggggccatacgtgatgatgattggaaagatgatgatcgacatgctgtactttgtggtcatcatgctggtcgtgctcatgagtttcggagtagcccgtcaagccattctgcatccagaggagaagccctcttggaaactggcccgaaacatcttctacatgccctactggatgatctatggagaggtgtttgcagaccagatagacctctacgccatggaaattaatcctccttgtggtgagaacctatatgatgaggagggcaagcggcttcctccctgtatccccggcgcctggctcactccagcactcatggcgtgctatctactggtcgccaacatcctgctggtgaacctgctgattgctgtgttcaacaataccttctttgaagtaaaatcaatatccaaccaggtgtggaagttccagcgatatcagctgattatgacatttcatgacaggccagtcctgcccccaccgatgatcattttaagccacatctacatcatcattatgcgtctcagcggccgctgcaggaaaaagagagaaggggaccaagaggaacgggatcgtggattgaagctcttccttagcgacgaggagctaaagaggctgcatgagttcgaggagcagtgcgtgcaggagcacttccgggagaaggaggatgagcagcagtcgtccagcgacgagcgcatccgggtcacttctgaaagagttgaaaatatgtcaatgaggttggaagaaatcaatgaaagagaaacttttatgaaaacttccctgcagactgttgaccttcgacttgctcagctagaagaattatctaacagaatggtgaatgctcttgaaaatcttgcgggaatcgacaggtctgacctgatccaggcacggtcccgggcttcttctgaatgtgaggcaacgtatcttctccggcaaagcagcatcaatagcgctgatggctacagcttgtatcgatatcattttaacggagaagagttattatttgaggatacatctctctccacgtcaccagggacaggagtcaggaaaaaaacctgttccttccgtataaaggaagagaaggacgtgaaaacgcacctagtcccagaatgtcagaacagtcttcacctttcactgggcacaagcacatcagcaaccccagatggcagtcaccttgcagtagatgacttaaagaacgctgaagagtcaaaattaggtccagatattgggatttcaaaggaagatgatgaaagacagacagactctaaaaaagaagaaactatttccccaagtttaaataaaacagatgtgatacatggacaggacaaatcagatgttcaaaacactcagctaacagtggaaacgacaaatatagaaggcactatttcctatcccctggaagaaaccaaaattacacgctatttccccgatgaaacgatcaatgcttgtaaaacaatgaagtccagaagcttcgtctattcccggggaagaaagctggtcggtggggttaaccaggatgtagagtacagttcaatcacggaccagcaattgacgacggaatggcaatgccaagttcaaaagatcacgcgctctcatagcacagatattccttacattgtgtcggaagctgcagtgcaagctgagcataaagagcagtttgcagatatgcaagatgaacaccatgtcgctgaagcaattcctcgaatccctcgcttgtccctaaccattactgacagaaatgggatggaaaacttactgtctgtgaagccagatcaaactttgggattcccatctctcaggtcaaaaagtttacatggacatcctaggaatgtgaaatccattcagggaaagttagacagatctggacatgccagtagtgtaagcagcttagtaattgtgtctggaatgacagcagaagaaaaaaaggttaagaaagagaaagcttccacagaaactgaatgctagtctgttttgtttctttaatttttttttttaacagtcagaaccactaatgggtgtcatcttggccatctaaacatcatcaatttctaaaaacattttccttaaaaaattttggaaattcagacttgatttacaatttaatgcactaaaagtagtattttgttagcatatgttagtaggcttagttttttcagttgcagtagtatcaaatgaaagtgatgatactgtaacgaagataaattggctaatcagtatacaagattatacaatctctttattactgagggccaccaaatagcctaggaagtgccctcgagcactgaagtcaccattaggtcacttaagaagtaagcaactagctgggcacagtggctcatgcctgtaatcctagcactttgggaggccaaggcagaaagatagcttgagtccaggagtttgagaccagcctgggcaacatagtgataccccatctcttaaaaaaaaaaaaaaaagtaagcaactgtgtaagaaagagaaactaaagagaaagcaaacatgaaaaaagggaggggtggaaagaagaaaaataaaattatgaggcacaataagtgggaaggagccacaaatatgtttttatggggtctttgttttctgttttaatgttttattttaaactacacaatgggaaaaaaagtacacaattatatcaaacatcatactctaataatttagggtgacctagagttttgttaatgtgcaaaaataaagtatccaatatgc

SEQ ID NO: 79593 - DNA, 3795 bp, Homo sapiens
cctaaaacattttctctagccccttttgcatgtttcctgttaatttctggttcagctacgtctggcaaacgagtgttatttttgctacatttgaagacctccctgaggaaataaactgtagaccttccctcttccatgatgttatttgtgtttagttttgggggaggttttgcttgtttgttttagttttgcagcgtcgcctcagttaaaggcttctaagtaaaactgctgacccaggggtgcaagttatccaaacagtatgccttctcagttcatttggttttagatagtttacttatcataataaacgtgtgcatcttttcaaaagaattcatatgcggagtggaaatgtaagatgtacttcagaagtctctttattacctctgacagaaagggttccctttctccaggagttctggaactctttgttgcatacttttatggcaaaaccatgaaatccatgtttctcccctcaggatgatgacaatatgtctccatgtagaaaatgaaaagtcagggcccatatcgtgctgaagtataaaatgcctcccgtcctgcctccaggtcttctgtctgcactggtgaggtgcagtgaaggtttcctctcaatgagtcagtccagttggaaacaaagattcttttagatgtgtcaacctgaaagaaaacagcgtttcaaaatttgattgctatgtgattcccccaaacacggctaacagcttgtctttctttcagatatcatacttgggctacctgctgctgtttaactacgtcatcctggtgcggatggatggctggccgtccctccaggagtggatcgtcatctcctacatcgtgagcctggcgttagagaagatacgagagatcctcatgtcagaaccaggcaaactcagccagaaaatcaaagtttggcttcaggagtactggaacatcacagatctcgtggccatttccacattcatgattggagcaattcttcgcctacagaaccagccctacatgggctatggccgggtgatctactgtgtggatatcatcttctggtacatccgtgtcctggacatctttggtgtcaacaagtatctggggccatacgtgatgatgattggaaagatgatgatcgacatgctgtactttgtggtcatcatgctggtcgtgctcatgagtttcggagtagcccgtcaagccattctgcatccagaggagaagccctcttggaaactggcccgaaacatcttctacatgccctactggatgatctatggagaggtgtttgcagaccagatagacctctacgccatggaaattaatcctccttgtggtgagaacctatatgatgaggagggcaagcggcttcctccctgtatccccggcgcctggctcactccagcactcatggcgtgctatctactggtcgccaacatcctgctggtgaacctgctgattgctgtgttcaacaataccttctttgaagtaaaatcaatatccaaccaggtgtggaagttccagcgatatcagctgattatgacatttcatgacaggccagtcctgcccccaccgatgatcattttaagccacatctacatcatcattatgcgtctcagcggccgctgcaggaaaaagagagaaggggaccaagaggaacgggatcgtggattgaagctcttccttagcgacgaggagctaaagaggctgcatgagttcgaggagcagtgcgtgcaggagcacttccgggagaaggaggatgagcagcagtcgtccagcgacgagcgcatccgggtcacttctgaaagagttgaaaatatgtcaatgaggttggaagaaatcaatgaaagagaaacttttatgaaaacttccctgcagactgttgaccttcgacttgctcagctagaagaattatctaacagaatggtgaatgctcttgaaaatcttgcgggaatcgacaggtctgacctgatccaggcacggtcccgggcttcttctgaatgtgaggcaacgtatcttctccggcaaagcagcatcaatagcgctgatggctacagcttgtatcgatatcattttaacggagaagagttattatttgaggatacatctctctccacgtcaccagggacaggagtcaggaaaaaaacctgttccttccgtataaaggaagagaaggacgtgaaaacgcacctagtcccagaatgtcagaacagtcttcacctttcactgggcacaagcacatcagcaaccccagatggcagtcaccttgcagtagatgacttaaagaacgctgaagagtcaaaattaggtccagatattgggatttcaaaggaagatgatgaaagacagacagactctaaaaaagaagaaactatttccccaagtttaaataaaacagatgtgatacatggacaggacaaatcagatgttcaaaacactcagctaacagtggaaacgacaaatatagaaggcactatttcctatcccctggaagaaaccaaaattacacgctatttccccgatgaaacgatcaatgcttgtaaaacaatgaagtccagaagcttcgtctattcccggggaagaaagctggtcggtggggttaaccaggatgtagagtacagttcaatcacggaccagcaattgacgacggaatggcaatgccaagttcaaaagatcacgcgctctcatagcacagatattccttacattgtgtcggaagctgcagtgcaagctgagcataaagagcagtttgcagatatgcaagatgaacaccatgtcgctgaagcaattcctcgaatccctcgcttgtccctaaccattactgacagaaatgggatggaaaacttactgtctgtgaagccagatcaaactttgggattcccatctctcaggtcaaaaagtttacatggacatcctaggaatgtgaaatccattcagggaaagttagacagatctggacatgccagtagtgtaagcagcttagtaattgtgtctggaatgacagcagaagaaaaaaaggttaagaaagagaaagcttccacagaaactgaatgctagtctgttttgtttctttaatttttttttttaacagtcagaaccactaatgggtgtcatcttggccatctaaacatcatcaatttctaaaaacattttccttaaaaaattttggaaattcagacttgatttacaatttaatgcactaaaagtagtattttgttagcatatgttagtaggcttagttttttcagttgcagtagtatcaaatgaaagtgatgatactgtaacgaagataaattggctaatcagtatacaagattatacaatctctttattactgagggccaccaaatagcctaggaagtgccctcgagcactgaagtcaccattaggtcacttaagaagtaagcaactagctgggcacagtggctcatgcctgtaatcctagcactttgggaggccaaggcagaaagatagcttgagtccaggagtttgagaccagcctgggcaacatagtgataccccatctcttaaaaaaaaaaaaaaaagtaagcaactgtgtaagaaagagaaactaaagagaaagcaaacatgaaaaaagggaggggtggaaagaagaaaaataaaattatgaggcacaataagtgggaaggagccacaaatatgtttttatggggtctttgttttctgttttaatgttttattttaaactacacaatgggaaaaaaagtacacaattatatcaaacatcatactctaataatttagggtgacctagagttttgttaatgtgcaaaaataaagtatccaatatgc

SEQ ID NO: 79594 - DNA, 2798 bp, Homo sapiens
ctttcttcgtcctaattaagcactcgtgaagtgcttaattggagacagcaatataatgagccagggtgaacttggcccacaagccaagacagtgagagacaaatgttctccttactcagatgatcgacatgctgtactttgtggtcatcatgctggtcgtgctcatgagtttcggagtagcccgtcaagccattctgcatccagaggagaagccctcttggaaactggcccgaaacatcttctacatgccctactggatgatctatggagaggtgtttgcagaccagatagaccgtaagagtagaattcatactccttgtggtgagaacctatatgatgaggagggcaagcggcttcctccctgtatccccggcgcctggctcactccagcactcatggcgtgctatctactggtcgccaacatcctgctggtgaacctgctgattgctgtgttcaacaataccttctttgaagtaaaatcaatatccaaccaggtgtggaagttccagcgatatcagctgattatgacatttcatgacaggccagtcctgcccccaccgatgatcattttaagccacatctacatcatcattatgcgtctcagcggccgctgcaggaaaaagagagaaggggaccaagaggaacgggatcgtggattgaagctcttccttagcgacgaggagctaaagaggctgcatgagttcgaggagcagtgcgtgcaggagcacttccgggagaaggaggatgagcagcagtcgtccagcgacgagcgcatccgggtcacttctgaaagagttgaaaatatgtcaatgaggttggaagaaatcaatgaaagagaaacttttatgaaaacttccctgcagactgttgaccttcgacttgctcagctagaagaattatctaacagaatggtgaatgctcttgaaaatcttgcgggaatcgacaggtctgacctgatccaggcacggtcccgggcttcttctgaatgtgaggcaacgtatcttctccggcaaagcagcatcaatagcgctgatggctacagcttgtatcgatatcattttaacggagaagagttattatttgaggatacatctctctccacgtcaccagggacaggagtcaggaaaaaaacctgttccttccgtataaaggaagagaaggacgtgaaaacgcacctagtcccagaatgtcagaacagtcttcacctttcactgggcacaagcacatcagcaaccccagatggcagtcaccttgcagtagatgacttaaagaacgctgaagagtcaaaattaggtccagatattgggatttcaaaggaagatgatgaaagacagacagactctaaaaaagaagaaactatttccccaagtttaaataaaacagatgtgatacatggacaggacaaatcagatgttcaaaacactcagctaacagtggaaacgacaaatatagaaggcactatttcctatcccctggaagaaaccaaaattacacgctatttccccgatgaaacgatcaatgcttgtaaaacaatgaagtccagaagcttcgtctattcccggggaagaaagctggtcggtggggttaaccaggatgtagagtacagttcaatcacggaccagcaattgacgacggaatggcaatgccaagttcaaaagatcacgcgctctcatagcacagatattccttacattgtgtcggaagctgcagtgcaagctgagcataaagagcagtttgcagatatgcaagatgaacaccatgtcgctgaagcaattcctcgaatccctcgcttgtccctaaccattactgacagaaatgggatggaaaacttactgtctgtgaagccagatcaaactttgggattcccatctctcaggtcaaaaagtttacatggacatcctaggaatgtgaaatccattcagggaaagttagacagatctggacatgccagtagtgtaagcagcttagtaattgtgtctggaatgacagcagaagaaaaaaaggttaagaaagagaaagcttccacagaaactgaatgctagtctgttttgtttctttaatttttttttttaacagtcagaaccactaatgggtgtcatcttggccatctaaacatcatcaatttctaaaaacattttccttaaaaaattttggaaattcagacttgatttacaatttaatgcactaaaagtagtattttgttagcatatgttagtaggcttagttttttcagttgcagtagtatcaaatgaaagtgatgatactgtaacgaagataaattggctaatcagtatacaagattatacaatctctttattactgagggccaccaaatagcctaggaagtgccctcgagcactgaagtcaccattaggtcacttaagaagtaagcaactagctgggcacagtggctcatgcctgtaatcctagcactttgggaggccaaggcagaaagatagcttgagtccaggagtttgagaccagcctgggcaacatagtgataccccatctcttaaaaaaaaaaaaaaaagtaagcaactgtgtaagaaagagaaactaaagagaaagcaaacatgaaaaaagggaggggtggaaagaagaaaaataaaattatgaggcacaataagtgggaaggagccacaaatatgtttttatggggtctttgttttctgttttaatgttttattttaaactacacaatgggaaaaaaagtacacaattatatcaaacatcatactctaataatttagggtgacctagagttttgttaatgtgcaaaaataaagtatccaatatgc

SEQ ID NO: 79595 - DNA, 2369 bp, Homo sapiens
ctgatatacaaccaatactattattttgcagtaattgttgaccctttcactgaactgaaaaacattattaacctagtccagatagagggaatctgatggcatcggtctaattagagcctgaaaaaccaaaagagcactgaatccaaaattatacttgccaccttctactactgttccttttctagctgggcctcattcaaattctgcaggtgctgcaactggtatttcctgagcggcctgctttaccatcgctgtgccgtcctggccttgctgagggtccaccatacaccgagacactgttctttattccagaaacctgcccccagttataggagagagagggtggccatcggctagtgtgcatgggttgttaaactagtgaatcccttctgtgtgggctgacagatagccactgccccatcctaccacagagatccccaagacctctgcaactgaaggggtaccacctggcatggcaaccctccatcccagtgtggtaccacagacagctgtgccattgggaaggctctgcgcacgcctgtgcatgctgcttgctaaatatcttccattttactctgtggaagtctccccttaagcagcagtgattttgaaaggataatatctcaagtaggggaaaacctggtctaactttcccctaatttctcatgtctaagttgcaaaggaattttgccaaatcaaaacatttcctagtggtattctgccatctccactgggtggactgcccctctgtggggccacgtggggctcatctatgctctagagttttcatcctgtgtgactctggaatgtggagtaacaggcacgtgtccagataattaaaaaagaaatcaaaatgcagctgctttaattacagccagaaggacataatttagaaggcatttcctgagtttgtaaaaccctgaatctaagaatagggaggattccgtggaatttccctttctagatatctctccctgcctgagaagaagagtgtttaaacgttttgagtaggaaaggggccagatgacctggaatgttccatcagtcttattgttccaagattctaagacaagacttctaatacggcatctcagtttattgttctttggggtttgttttcagatcctcatgtcagaaccaggcaaactcagccagaaaatcaaagtttggcttcaggagtactggaacatcacagatctcgtggccatttccacattcatgattggagcaattcttcgcctacagaaccagccctacatgggctatggccgggtgatctactgtgtggatatcatcttctggtacatccgtgtcctggacatctttggtgtcaacaagtatctggggccatacgtgatgatgattggaaagatgatgatcgacatgctgtactttgtggtcatcatgctggtcgtgctcatgagtttcggagtagcccgtcaagccattctgcatccagaggagaagccctcttggaaactggcccgaaacatcttctacatgccctactggatgatctatggagaggtgtttgcagaccagatagacctctacgccatggaaattaatcctccttgtggtgagaacctatatgatgaggagggcaagcggcttcctccctgtatccccggcgcctggctcactccagcactcatggcgtgctatctactggtcgccaacatcctgctggtgaacctgctgattgctgtgttcaacaataccttctttgaagtaaaatcaatatccaaccaggtgtggaagttccagcgatatcagctgattatgacatttcatgacaggccagtcctgcccccaccgatgatcattttaagccacatctacatcatcattatgcgtctcagcggccgctgcaggaaaaagagagaaggggaccaagaggaacgggatcgtggattgagtatgtgcagggctcttcatttctaagttgggctgatttcaaaatagtgttcaaattggacatcctcacagaaatctcactcaactacttgctcgtgtgaaaagcaccacactcagtccaactgctgttcttttcaaaaggcttctcattttgtacccattttattctagtttcgttaatttgttagtaattaatattaggaaagccagctcatagagaccagaagttgagctaattctctaaaataactctactctgtaaatttctatataaattcaatgctcctttcaaaacgtcttaatttgttgcatctaaagaaaatgagaaaataatgctatacgtttgactctattcataaaaataagtgcaaaaagttttccaggaaatattacttggctttactttcccagtaaatgtaattttgttttttatgtttaaaagcgggccgttt

SEQ ID NO: 79596 - DNA, 1637 bp, Homo sapiens
tgccctggccaaggaggaggctgaaagagcctgagctgtgccctctccattccactgctgtggcagggtcagaaatcttggatagagaaaaccttttgcaaacgggaatgtatctttgtaattcctagcacgaaagactctaacaggtgttgctgtggccagttcaccaaccagcatatcccccctctgccaagtgcaacacccagcaaaaatgaagaggaaaacaaacaggtggagactcagcctgagaaatggtctgttgccaagcacacccagagctacccaacagattcctatggagttcttgaattccagggtggcggatattccaataaagccatgtatatccgtgtatcctatgacaccaagccagactcactgctccatctcatggtgaaagattggcagctggaactccccaagctcttaatatctgtgcatggaggcctccagaactttgagatgcagcccaagctgaaacaagtctttgggaaaggcctgatcaaggctgctatgaccaccggggcctggatcttcaccgggggtgtcagcacaggtgttatcagccacgtaggggatgccttgaaagaccactcctccaagtccagaggccgggtttgtgctataggaattgctccatggggcatcgtggagaataaggaagacctggttggaaaggatgtaacaagagtgtaccagaccatgtccaaccctctaagtaagctctctgtgctcaacaactcccacacccacttcatcctggctgacaatggcaccctgggcaagtatggcgccgaggtgaagctgcgaaggctgctggaaaagcacatctccctccagaagatcaacacaagactggggcagggcgtgcccctcgtgggtctcgtggtggaggggggccctaacgtggtgtccatcgtcttggaatacctgcaagaagagcctcccatccctgtggtgatttgtgatggcagcggacgtgcctcggacatcctgtcctttgcgcacaagtactgtgaagaaggcggaataataaatgagtccctcagggagcagcttctagttaccattcagaaaacatttaattataataaggcacaatcacatcagctgtttgcaattataatggagtgcatgaagaagaaagaactcgtcactgtgttcagaatgggttctgagggccagcaggacatcgagatggcaattttaactgccctgctgaaaggaacaaacgtatctgctccagatcagctgagcttggcactggcttggaaccgcgtggacatagcacgaagccagatctttgtctttgggccccactggccggtgaaactgttttttttcgattcatatcattgatcttgactttgtacaagtgacctattagtatgttctcccttgtgacatggaattcaggaaattatgtggggtttctgatgatatgatatgtaatctattaggctcattagaagatgtcactgtttaacttcaaagaaccaacaagaagtaattccacattcaaaccagtactcctgaagaaattaatcaccaaatattttatcgttgctgatgaaagtgggtttttacctttttaaagaaaaagaagaagaaataaaatagcttattaaaatttaaag

SEQ ID NO: 79597 - DNA, 501 bp, Homo sapiens
tgccccatactgcccaagactgtgttaaaaactaaatacatcaggatgctctaagccactgaagagccatgtttgccagtcacattatactgggcttctctggttatacaaagggacacctaatgaagatattctgttgatataaaagcagtctcatggacagtaatctttctatatccttaggcagccacaatactgcctgtcaaatataattaccagcagaagaacagaaaactaacacttacctattaccttgttaacatgtccacaatgagccaatatgaaatgaacataataatggtgtcatttgtggggaaaagcctgagagacatggtttatagtgctcaccaaggtctgaatgtcagaaagaatattatgtgataagactattttaacatgcaaatataatgggccaggttttccgtttggtttcctgctatatccaccacatctagaatagtatttggtactcaataaatatctgttcacttaatgaattga

SEQ ID NO: 79598 - DNA, 206 bp, Homo sapiens
gtaaaaacagtgttttgctaggcttaatttgaccatgttgtaaaatttattgtataccttgaaagaatcatttatgaaagatactgaattagctaatatatactctgtcttatgtagtttttgattaacaatacactttttaaatcattagctcatttgattttgcaaagaagaacaggtaacctaagaggcagacagaacaggca

SEQ ID NO: 79599 - DNA, 714 bp, Homo sapiens
gagactgagggagggcaggagagtggaaaggcagagagagaccttggttctgaggcttatttctgagacattttaattaaaaatacccagcatgccaaagcaccatattttggggtatagctttttgaaccccaacatttaggacttacatacttatacatatatgtagcaactactgaaatatcctgctgctgaagacattaatacttcagacagtataatgagtactagatatttgtagtacgtacgtgtgtgtgtgtgtgtgtgtctgtgtgtatctttgtgtgtctgtatgtgtgtgtggactcttgaagtgggacacaaattggttccaataaactcagtttctatgtccattgactaacctactttatcttcctcatttcttttcttttttaaactctttgccatgttgttagtgttaagaaattttgctgctcatgatactgttgtaggctcaaaaatgtattgccaatcatgtgtacaaagaaaatttagctgctttactgtaacaaatctattttattttcagtaaaccacctattctgaggtggtgtagggaattacagttgccagttcatgttattttagtctcttctaattttaaatgtcacttttggatgattctgtttctctcaggtgaatcctgagtcagattttctgcttctcctgctgttctatccaatgtggcatcaggatatattaaagattggt

SEQ ID NO: 79600 - DNA, 1981 bp, Homo sapiens
ttctgcttatcatggttaccaacaaaatgactgctgcctttagaaaccctagtgggaaacaggtggcgacagacaaagttgcagaaaagctgagctctactctctcatgggtgaagaacacagtatcgcatacagtcagtcagatggccagtcaggtggcaagtccatctacttcattacataccacatcctcatctaccacactatcaacaccagccctttcaccatcttccccatcacagttgagtccagacgacttagaactcctggctaaactggaagaacagaatagattgttagaaacggatagtaagtctttaagatctgtaaatgggtcaagaagaaacagtggctcttctcttgtgtcgagttcatcagcctctagcaacctcagtcaccttgaagaagattcttggattctttggggaagaattgttaatgaatgggaagatgtacgcaaaaagaaggaaaagcaagttaaggaacttgttcataaagggataccccatcactttagagcaatagtttggcaacttttatgcagtgcacaaagtatgccaattaaggatcagtattcagaactcctgaaaatgacctcgccttgtgaaaaattgatccgaagggacattgctagaacttaccctgaacacaacttttttaaggaaaaagatagccttggacaggaggttttatttaatgtaatgaaggcttactctttagtagatcgtgaggttggttactgtcaaggaagtgcttttatagttggattgttgcttatgcagatgccagaagaagaagctttctgtgtatttgttaaattaatgcaagattatagacttcgtgaactttttaaaccaagtatggcagaattgggcctttgtatgtaccagtttgaatgtatgatacaggagcatcttccagagctctttgtacattttcaatctcagagttttcatacctcaatgtatgcatcatcctggtttctgactatctttcttacaacttttccactaccagttgcaacaaggatatttgatatctttatgtctgagggtttagaaatagtgtttcgtgtaggattagcacttcttcagatgaatcaggcagaactgatgcaacttgacatggaagggatgttacagcactttcaaaaggtcattccacatcagtttgatggtgtcccagacaagctaatccaagcagcttaccaagtcaaatacaattcaaaaaaaatgaaaaagcttgaaaaggaatacactacaataaaaacgaaagaaatggaagagcaagttgaaattaaaaggttacgcacagaaaatagacttttaaaacagcgcatcgagacattagaaaaagacataaatgcagttccaactacaacgaagattttgtgctacagctagagaaggaattggtccaagcccgactgagtgaagctgagtctcagtgtgcattaaaagagatgcaggataaagtcttggatatagagaagaggaataactcccttcctgatgagaataatattgcaaggcttcaggaagaactcattgctgtgaaacttagagaagcagaagccattatgggtttgaaagaacttagacagcaagtcaaggatttagaggaacactggcagcgccacttagctcgtactactgggagatggaaagacccacccaagaaaaatgctatgaatgagttacaggatgaactgatgaccattcgacttagagaagctgaaacacaagcagaaataagagaaataaaacaaaggatgatggaaatggaaacacagttggttgaatccgcagatgtggagcctgcatatatgaagggctgaccgtatactctctgctccttccagagtatctggcatgtgatgagctcgccacaaacatttagtgattcgagtaaggctctggttgatttacagtttctactttcctgacactctgttgctggtttgaataaaaatttcttcctg

SEQ ID NO: 79601 - DNA, 2701 bp, Homo sapiens
agcgtggtgcttttgggaactcgggacgggcgacccgtggagccaggagcggggccgaggcgctgagacgcggcggcgcgctgccggctggatgggaagttaatgtttacggcgaagtctactcaacgtttccaagacagggtcttgctctgttgcccagactgtagtgcagtggggtgatcatggcttactgcaaccttgacctcctgggctcaagcaatcctcccacctcagcctcctgagtagctgggattacaggtggcgacagacaaagttgcagaaaagctgagctctactctctcatgggtgaagaacacagtatcgcatacagtcagtcagatggccagtcaggtggcaagtccatctacttcattacataccacatcctcatctaccacactatcaacaccagccctttcaccatcttccccatcacagttgagtccagacgacttagaactcctggctaaactggaagaacagaataggcttgagtacagtggcgtgaccacggctcactgcagctttgacctccttggctcaggtgatccttcgacctctgcctcccaagtggctgggactacagattgttagaaacggatagtaagtctttaagatctgtaaatgggtcaagaagaaacagtggctcttctcttgtgtcgagttcatcagcctctagcaacctcagtcaccttgaagaagattcttggattctttggggaagaattgttaatgaatgggaagatgtacgcaaaaagaaggaaaagcaagttaaggaacttgttcataaagggataccccatcactttagagcaatagtttggcaacttttatgcagtgcacaaagtatgccaattaaggatcagtattcagaactcctgaaaatgacctcgccttgtgaaaaattgatccgaagggacattgctagaacttaccctgaacacaacttttttaaggaaaaagatagccttggacaggaggttttatttaatgtaatgaaggcttactctttagtagatcgtgaggttggttactgtcaaggaagtgcttttatagttggattgttgcttatgcagatgccagaagaagaagctttctgtgtatttgttaaattaatgcaagattatagacttcgtgaactttttaaaccaagtatggcagaattgggcctttgtatgtaccagtttgaatgtatgatacaggagcatcttccagagctctttgtacattttcaatctcagagttttcatacctcaatgtatgcatcatcctggtttctgactatctttcttacaacttttccactaccagttgcaacaaggatatttgatatctttatgtctgagggtttagaaatagtgtttcgtgtaggattagcacttcttcagatgaatcaggcagaactgatgcaacttgacatggaagggatgttacaggtaagttcataatttattttctttttttttttttgagacagagtttagttctgttgcccaggctggagtgcagtggcgtgatcttggctcactgcaacctctgcctcccaggttcaagtgatcctcctaccgcttcagccttctgtgtagctggaattacaagcatgcaccactacacctggctaagttttgtatttttagtagaaacagggtttcatcatgttggccaggctggtcttgaactcctgacctgaagtgatccgcctgccttggcctcccaaaatgctgagattacaagcatgagccaccacgcccagcccataatttcttgaatgtctttggatttcactattaacagcactaagtcattcttatgttttttttttaattgtatcttagcactttcaaaaggtcattccacatcagtttgatggtgtcccagacaagctaatccaagcagcttaccaagtcaaatacaattcaaaaaaaatgaaaaagcttgaaaaggaatacactacaataaaaacgaaagaaatggaagagcaagttgaaattaaaaggttacgcacagaaaatagacttttaaaacagcgcatcgagacattagaaaaagagcttccttggcagatagattgatacagcataaatgcagttccaactacaacgaagattttgtgctacagctagagaaggaattggtccaagcccgactgagtgaagctgagtctcagtgtgcattaaaagagatgcaggataaagtcttggatatagagaagaggaataactcccttcctgatgagaataatattgcaaggcttcaggaagaactcattgctgtgaaacttagagaagcagaagccattatgggtttgaaagaacttagacagcaagtcaaggatttagaggaacactggcagcgccacttagctcgtactactgggagatggaaagacccacccaagaaaaatgctatgaatgagttacaggatgaactgatgaccattcgacttagagaagctgaaacacaagcagaaataagagaaataaaacaaaggatgatggaaatggaaacacagttggttgaatccgcagatgtggagcctgcatatatgaagggctgaccgtatactctctgctccttccagagtatctggcatgtgatgagctcgccacaaacatttagtgattcgagtaaggctctggttgatttacagtttctactttcctgacactctgttgctggtttgaataaaaatttcttcctg

SEQ ID NO: 79602 - DNA, 565 bp, Homo sapiens
agcgtggtgcttttgggaactcgggacgggcgacccgtggagccaggagcggggccgaggcgctgagacgcggcggcgcgctgccggctggatgggaagttaatgtttacggcgaagtctactcaacgtttccaagacagggtcttgctctgttgcccagactgtagtgcagtggggtgatcatggcttactgcaaccttgacctcctgggctcaagcaatcctcccacctcagcctcctgagtagctgggattacaggtggcgacagacaaagttgcagaaaagctgagctctactctctcatgggtgaagaacacagtatcgcatacagtcagtcagatggccagtcaggtggcaagtccatctacttcattacataccacatcctcatctaccacactatcaacaccagccctttcaccatcttccccatcacagttgagtccagacgacttagaactcctggctaaactggaagaacagaataggtgagtgaggttgcttagcttttttctctccaattatacaaatccggccattcaacgcgggccattcaacgcctccg

SEQ ID NO: 79603 - DNA, 380 bp, Homo sapiens
gcttactaagactgaagagttcctataaccagtaattaaaaatgggccagcctcctataaaccagctgttaaactccaatagcatgggggaaaagctcatcttattccatgtaggtagagaagaagcctagaaacataaacagtgattccttaagatcagagcccattttttgttgttgttcatctctctattccagaacatgcctgaatagaacattaattcacatggaagagattcaaaatacataggttatatgaccttcttaaagaatatgtcccagcctggcgtgtaagcctgtaatcccagcactttgggaggccgaggcgggcggatcacgaggttaggagttcgagaccagcccagccaatatgatgaaacc

SEQ ID NO: 79604 - DNA, 184 bp, Homo sapiens
tttttgtatttttagtagagacgggggtttcaccttgttagccaggatggtctcgatctcctgacctcatgatccacccgcctcggcctcccaaagtgctgggattacaggcgtgagccaccgcgcccggccttctttagttctttcaacatgtttataagagccaatttaaaatctttgttta

SEQ ID NO: 79605 - DNA, 390 bp, Homo sapiens
ctatgatcccattatatgaaatgtccagcatgggcaaatccttagggacagaaggtagactagtggttgtcagggcctgggtgagagggactgggggagtggagtgatggccaacatatacagggttacatgttttaggaggtgatgtacatgttctgaaattgattatggtgatagttacacaactctgtgaatatactaaaaaccatgaattgtacacttttttttttgttcttgttttttaaaaaatacagaatgcttcacaaatgtatatgtcatccttgcgcaggggccatgctaatcttctttgtatcattccaattttagtatatatgctgctgaagtgagcacaaattgtatattttaaactgtacactttagaaagttaaa

SEQ ID NO: 79606 - DNA, 400 bp, Homo sapiens
caaatcacgaggacaatcgacaaaaacaactaagcgcaaagccgcccgaatccatctccctctctgtgcgtgtgccttttcaactaactttgggaactcgtatagacccagcgtcgctccccgcgccgcctcgcctccactttggtttcccgcgtcctgcccgccctcttcggtgcctcctcttcctccgggacaaggatggaggatctctttagcccctcaattctgccgccggcgcccaacatttccgtgcccatcttgctgggctggggtctcaacctgaccttggggcaaggagcccctgcctctgggccgcccagccgccgcgtccgcctggtgttcctgggggtcatcctggtggtggcggtggcaggcaacaccacagtgctgtgccgcctgt

SEQ ID NO: 79607 - DNA, 463 bp, Homo sapiens
cgttgatctaaggatcccttgggctcattcaggggatggtggggtccagttttggggtctttgtctgtgaccctccaggggttctctggccagcagggctgctgtgggagtgaagaagggggtccttcaggggctcagaggcttgctggatggagtcctcagcacggtgggctccagctggaaagtcaggtcctgtcacagcagctgggagagtaggaggaggaggaacaaaggcattatgggggtgcgggctggcacctgcagcttggggcccagaggccagaatgtggcggcctagaggggcagtcttcagggtggtctctgcagcttggaggccccctgggcagacttctgccatcgccttccctggtggcccccaggccatctgtgtgcagcccccaggctcctcccgccctggcccagtactctgacctgggcctccctggagtgggcggggagcctg

SEQ ID NO: 79608 - DNA, 268 bp, Homo sapiens
tacaatgtcttttataattaagtttcccacatgtccttgctagtttattatgacccatttttgaaccatgctagaaagatacttttttattaggtaactagtgcttcaataaagcaagattctaattaatcaccactagttgtgtataccaaatacacatcctttaagacaatacagttcttaaaagaagaaaaattataattattctaatatttatacaaatcatataacgatttcacagaaccaaacacttacaagtagaattcta

SEQ ID NO: 79609 - DNA, 421 bp, Homo sapiens
tgttgctaccttgtgctgagacttgtgctagatagtgaggataccaagaaaaataagcacagggattttgtggtgttcatctttatctcctcagcatctaagataatacacaatgcatagtgggctctcagtagtgtttggtgaactaataagcgaaagatgtaatcgccgctgtgaaagcactcactcactatgtggtgggggccaacagacaggtacagatgtgttcctggtgtggagaaagtgccaaggtggctcagcgaagaaaaaagaattcttgtggtgctatcaagcaaggcttcatttgagggaaaagtaggatttctgtaggtggaaaaagagaagacattgatttgaaactccctggttgttttataaacttcatattagctatgtccacagagcctccaaaaggatataa

SEQ ID NO: 79610 - DNA, 232 bp, Homo sapiens
tggatgtttgaaggttcttggaccaagtaccaatcccaccttggctcagaccaggtgggcctgtgggcagctgcagagtgctcctgtgtgcatatgtgtgcacatgtatgtatatgcagcccattactgccacgtgggaacatgtgcctagtgacaccaaaccttctgattttcagagaggcccaaaatatctacattttgatgtagagactggctcagcaaactttttaaa

SEQ ID NO: 79611 - DNA, 279 bp, Homo sapiens
accctgtggtgtgaccactactatgtaaacaagccagagctagactgttgtgacaagagacacatggccaagccatcccatggccccagctgagactggaccaactaccagacatgtgagtgaggccaccctagatcatccattcccagccaagccactagctgaccacagtgattgaatgaaccagctgagaccagaactgccacgccagtgcacaaaatcataagaaagtataaacatttattatttaagttactgagtttgggtgattggtcacac

SEQ ID NO: 79612 - DNA, 275 bp, Homo sapiens
agtacgcacagacacgtctgctgcatgcctaggtacgaggctgtctccaggagaagcacttgtttgattatttgagttgccaattgaatttgctgctttttttcatggcttgccattttcactgaaaagaatgactaatgaaaaacgatgattggttattagatttggatgtttggcagacattttctcaaaattgaactaagttggcctcttcacggaaaacaactggtatttgttgtgccaatgataaaattggagatttctagcaaaatgta

SEQ ID NO: 79613 - DNA, 429 bp, Homo sapiens
gtattgacagattactagaagctgagggtagcctggctagaacattaaaaactccttgaagaccagactaagggggaatctcacacatttccaagtgttactacaatgatctcaaccaggttctcatgatgaagttcagaaaaactccctgaggtttggcactaccaacttcaggacttacattaagctacagtaacccaaatagtgtgaagttggtgaaaagagaaaacacacacatatagatgcatggaaaagaatacggagcccagaagcaggcctacatacagtccactgatcttccatggaggtttagagacaatttaaaacagcaaagatagcctttccaactagtggtgctagaacagctggacaaccacatgcaaaaaaaataaataaatccaggtatgcatgttatataccctttataaa

SEQ ID NO: 79614 - DNA, 254 bp, Homo sapiens
tctgcatgagaatcctgtttttattttgctgatgaaaaggttataaagtaagttagtggcaataccagaattcaaagcctagtatatttggtcccagaatgttctttctgctatatcatgatgctttccatagtagtagtgattatattctctagccattccttctctaccttttaggaaagtaggattgactagatgtattagtccatttccatactgccatgaagaaatacccaagactagataatttattt

SEQ ID NO: 79615 - DNA, 625 bp, Homo sapiens
gaaaaatagctcttaaatgaacttttaaagatggaggaatggtaacatgagctatgtgtgaattacttggaatgtcttattctattttgttttttcccaacttagttttaattaacttgtgaaaggtttctgactccttagatttgaacaggtaaaaatgtcataaagacatgaatgaagacttgttgctagcaaaaatgaagtaaatttgccataaagcctgtactcgagtttggaagggctgaggtttcacaggtgtaacaccttgaagccctgaggagaggagtgggacgtttaccctcacccacagcaggggccaaaagggctcttcagtcttacattcaggtctttcatggccacttctgaaaaaagggcagaagcctaaaagcagtaatccaggagaaaatgcaattcactgtcagaaatttctaaaactgagacagaatatagatgaactgaactaggaagatgttaaatagaagaagtagtgatttgtttgtgtcccctcctgagcccacacaagggagattactcaggccctcttacaatttggggaaggggaaagaagacaaaagagagtgggtttcataccgtctcctttattactagacactgccctccctcc

SEQ ID NO: 79616 - DNA, 285 bp, Homo sapiens
acagaagaaaatctgggtttctgtcagggacgtgttaagtttaagatctctgtcagaccaatcatatagcaggtcttacacagacagttactgtgttaattaatgaatttatatgtttcatatcagggatacatatatgtattcattagtatagtgtacatatatagagccttatagttttaattcttaagttcctatcttggtgtaaaacagtctctcatactggtaactattgtgcatatttgctgtattttcttccgttttctctataaaattgagatcata

SEQ ID NO: 79617 - DNA, 361 bp, Homo sapiens
tctcagggtgaagttattgttcgtattttacaatagtatgataatttaagcttaaggaagataagagctttacaatcacctattagatcatttttgtttagatttcctttaaattgttatctacttagaaaaattattctaaagattatagttatagttcacaacataataaaagatacttttgccttccttataaaatgttattttcagggttaggaaattacctaaaaaaataagctttaatcatgatttatgttctgagactttggaagagggtctatattaatataaatatttagaagaaaaaaatgtatcatcttgaaaggccctgaatattttcatggtggtgtttcttttttac

SEQ ID NO: 79618 - DNA, 4472 bp, Homo sapiens
acgacgaaggcggctgtggtagcggcggcggcggcggcggagccctgggtcggtgtctgcgcgctggtgtctgaggcccaggctgaggcctccgctattgctggagcgcaggcggcggagaggatgactgccgctgccattctctcttgagctagcgagccgccgccaccctccaccctcccccggcagggcggagaggagcggccggagtcagcgatggtgcccggcgaggagaaccaactggtcccgaaagagcaccactggatcataccagtgacaagtcacttctcgacgctaattttgagccaggaaagaagaactttctgcatttgacagataaagatggtgaacaacctcaaatactgctggaggattccagtgctggggaagacagtgttcatgacaggtttataggtccgcttccaagagaaggttctgtgggttctaccagtgattatgtcagccaaagctactcctactcatctattttgaataaatcagaaactggatatgtgggactagtaaaccaagcaatgacttgctatttgaatagccttttgcaaacactttttatgactcctgaatttaggaatgcattatataagtgggaatttgaagaatctgaagaagatccagtgacaagtattccataccaacttcaaaggctttttgttttgttacaaaccagcaaaaagagagcaattgaaaccacagatgttacaaggagctttggatgggatagtagtgaggcttggcagcagcatgatgtacaagaactatgcagagtcatgtttgatgctttggaacagaaatggaagcaaacagaacaggctgatcttataaatgagctatatcaaggcaagctgaaggactacgtgagatgtctggaatgtggttatgagggctggcgaatcgacacatatcttgatatcccattggtcatccgaccttatgggtccagccaagcatttgctagtgtggaagaagcattgcatgcatttattcagccagagattctggatggcccaaatcagtatttttgtgaacgttgtaagaagaagtgtgatgcacggaagggccttcggtttttgcattttccttatctgctgaccttacagctgaaaagattcgattttgattatacaaccatgcataggattaaactgaatgatcgaatgacatttcccgaggaactagatatgagtacttttattgatgttgaagatgagaaatctcctcagactgaaagttgcactgacagtggagcagaaaatgaaggtagttgtcacagtgatcagatgagcaacgatttctccaatgatgatggtgttgatgaaggaatctgtcttgaaaccaatagtggaactgaaaagatctcaaaatctggacttgaaaagaattccttgatctatgaacttttctctgttatggctcattctgggagcgctgctggtggtcattattatgcatgtataaagtcattcagtgatgagcagtggtacagcttcgatgatcaacatgtcagcaggataacacaagaggacattaagaaaacacatggtggatcttcaggaagcagaggatattattctagtgctttcgcaagttccacaaatgcatatatgctgatctatagactgaaggatccagccagaaatgcaaaatttctagaagtgggtgaatacccagaacatattaaaaacttggtgcagaaagagagagagttggaagaacaagaaaagagacaacgagaaattgagcgcaatacatgcaagataaaattattctgtttgcatcctacaaaacaagtaatgatggaaaataaattggaggttcataaggataagacattaaaggaagcagtagaaatggcttataagatgatggatttagaagaggtaatacccctggattgctgtcgccttgttaaatatgatgagtttcatgattatctagaacggtcatatgaaggagaagaagatacaccaatggggcttctactaggtggcgtcaagtcaacatatatgtttgatctgctgttggagacgagaaagcctgatcaggttttccaatcttataaacctggagaagtgatggtgaaagttcatgttgttgatctaaaggcagaatctgtagctgctcctataactgttcgtgcttacttaaatcagacagttacagaattcaaacaactgatttcaaaggccatccatttacctgctgaaacaatgagaatagtgctggaacgctgctacaatgatttgcgtcttctcagtgtctccagtaaaaccctgaaagctgaaggattttttagaagtaacaaggtgtttgttgaaagctccgagactttggattaccagatggcctttgcagactctcatttatggaaactcctggatcggcatgcaaatacaatcagattatttgttttgctacctgaacaatccccagtatcttattccaaaaggacagcataccagaaagctggaggcgattctggtaatgtggatgatgactgtgaaagagtcaaaggacctgtaggaagcctaaagtctgtggaagctattctagaagaaagcactgaaaaactcaaaagcttgtcactgcagcaacagcaggatggagataatggggacagcagcaaaagtactgagacaagtgactttgaaaacatcgaatcacctctcaatgagagggactcttcagcatcagtggataatagagaacttgaacagcatattcagacttctgatccagaaaattttcagtctgaagaacgatcagactcagatgtgaataatgacaggagtacaagttcagtggacagtgatattcttagctccagtcatagcagtgatactttgtgcaatgcagacaatgctcagatccctttggctaatggacttgactctcacagtatcacaagtagtagaagaacgaaagcaaatgaagggaaaaaagaaacatgggatacagcagaagaagactctggaactgatagtgaatatgatgagagtggcaagagtaggggagaaatgcagtacatgtatttcaaagctgaaccttatgctgcagatgaaggttctggggaaggacataaatggttgatggtgcatgttgataaaagaattactctggcagctttcaaacaacatttagagccctttgttggagttttgtcctctcacttcaaggtctttcgagtgtatgccagcaatcaagagtttgagagcgtccggctgaatgagacactttcatcattttctgatgacaataagattacaattagactggggagagcacttaaaaaaggagaatacagagttaaagtataccagcttttggtcaatgaacaagagccatgcaagtttctgctagatgctgtgtttgctaaaggaatgactgtacggcaatcaaaagaggaattaattcctcagctcagggagcaatgtggtttagagctcagtattgacaggtttcgtctaaggaaaaaaacatggaagaatcctggcactgtctttttggattatcatatttatgaagaagatattaatatttccagcaactgggaggttttccttgaagttcttgatggggtagagaagatgaagtccatgtcacagcttgcagttttgtcaagacggtggaagccttcagagatgaagttggatcccttccaggaggttgtattggaaagcagtagtgtggacgaattgcgagagaagcttagtgaaatcagtgggattcctttggatgatattgaatttgctaagggtagaggaacatttccctgtgatatttctgtccttgatattcatcaagatttagactggaatcctaaagtttctaccctgaatgtctggcctctttatatctgtgatgatggtgcggtcatattttatagggataaaacagaagaattaatggaattgacagatgagcaaagaaatgaactgatgaaaaaagaaagcagtcgactccagaagactggacatcgtgtaacatactcacctcgtaaagagaaagcactaaaaatatatctggatggagcaccaaataaagatctgactcaagactgactctgatagtgtagcattttccctgggggagttttggttttaattagatggttcactaccactgggtagtgccattttggccggacatggttggggtaacccagtgacaccagcactgattggactgccctacaccaatcagaagctcagtgcccaatgggccactgttttgactcggaatcatgttgtgcactatagtcaaatgtactgtaaagtgaaaagggatgtgcaaaaaaataaaaaaaaacaacaaaaaaagctaaccttctattagaaaaggggacaggggaatgagtaaacttcttttattgcggacaaatgtgcacatagccgctagtaaaactagcctcaaacaggatgctcatagcttaataataaaagctgtgcaaaggc

SEQ ID NO: 79619 - DNA, 2264 bp, Homo sapiens
cactgttggcctactggcataggtgcttctcgtatgtgaacaggtgtcattctacagatctgttatgtgttttcctgttgactcttaagagtccctgcatgtaaatctcaaagctgagcctggctcccagagtccaggctgacattacagcgcaagagtttgcaagtgtgtccagcatgcaccaactgtgcagaacttggctcggtaactttgcgtggaaaaataaagtacattttgaagtatcttgagggttgggtcaattgagacatttctagcattacttaatgacttgcattgtggtttttctgcaagcaactttaatgactttttttataccacatggtctcccagtttctagatgaatgcaacatgatgatggtgatgatgacgatgagtttaatcattgttcatttattgcctttagggctgagggaaagggaaggtttgtttttttttctccccattttcccccattctgtctttcttttggtgacttacaccacatgtaatgacgctatgactaattctgctcccaagcccttgtatcttgggcttcattttaggctcatgtgtcagatctgcatgcattgcttgcatttttctggtatctgaatgttggttccttgtccaggaattcaacattaattccaaaagtatcatgggacttgtgacaatacaagacatgaatctatgtataaaatttatcggcctttctcatttacctgctctagtattattgtattgtgtgtgcgtgcgtgtgtgatgtcaggctgccacgtaaaacttcagagaaaaatcttaaaagcagaccatccttttttgcatgctctattctaagtagaatgttcaatgtaactgactaaaattgcatgttaaagatatttaggtttttttgttttctttatttttatttgttttcagtttcctgtatatttgcttactgtgccgttttagtggttttaggataaaaatgcactggtgaagcaaatgtagtgccaacagaaggtgattttccagttgtaaatgtcatgcagcatttgaagggactgtgttttctaaaaaaaaaatcacagttacttctaaaccagatttcatttcttttattgttttatgtgccaaaccacgaagtgcattgggcttcaatctctgaacactgtagacccattagaagactgttccgattgttacaaattgtagtgcctgaaaacactcttaagctgattgtcttaacaaaatgaaagttctccaaagacaaaacagaacaattattataacaaaataattatggttgaaatgtctgtggttccttggaaatgctgcgctctttgtgttttccagatattaatatttccagcaactgggaggttttccttgaagttcttgatggggtagagaagatgaagtccatgtcacagcttgcagttttgtcaagacggtggaagccttcagagatgaagttggatcccttccaggaggttgtattggaaagcagtagtgtggacgaattgcgagagaagcttagtgaaatcagtgggattcctttggatgatattgaatttgctaagggtagaggaacatttccctgtgatatttctgtccttgatattcatcaagatttagactggaatcctaaagtttctaccctgaatgtctggcctctttatatctgtgatgatggtgcggtcatattttatagggataaaacagaagaattaatggaattgacagatgagcaaagaaatgaactgatgaaaaaagaaagcagtcgactccagaagactggacatcgtgtaacatactcacctcgtaaagagaaagcactaaaaatatatctggatggagcaccaaataaagatctgactcaagactgactctgatagtgtagcattttccctgggggagttttggttttaattagatggttcactaccactgggtagtgccattttggccggacatggttggggtaacccagtgacaccagcactgattggactgccctacaccaatcagaagctcagtgcccaatgggccactgttttgactcggaatcatgttgtgcactatagtcaaatgtactgtaaagtgaaaagggatgtgcaaaaaaataaaaaaaaacaacaaaaaaagctaaccttctattagaaaaggggacaggggaatgagtaaacttcttttattgcggacaaatgtgcacatagccgctagtaaaactagcctcaaacaggatgctcatagcttaataataaaagctgtgcaaaggc

SEQ ID NO: 79620 - DNA, 422 bp, Homo sapiens
atatcgtcgacccacgcgtccgaaaagtactcaatgaacacaattctacataaattttgacataccatctaatttataaaaatcaataaaaaaggttttggtaaaactttttcatgccagatgctgtttacaacaatgaacatgccaataaaacatttgttcattctaaaaaaaaaaaaaaaaaaaaaaaaaaaaaaaaaaaaaaaaaaaaaaaaaaaaaaaaaaaaaaaaaaaaaaaaaaaaaacccaaaaaaaaaaggaaaaaaaaaaaaaaaaaaactttttggcccccttggcccaagcaattttaaatttgggcaagttttttaaaggggcccgaatttgggtttaattggccaattccccttaaaggggggggttttacaattaaatggcccgtgtttaaaaaccgtttaattgga

SEQ ID NO: 79621 - DNA, 411 bp, Homo sapiens
ctatttctgtttgtggggtaaaaggaaaataacttttctaagcaagttaattttttaaatgaactcaaataaaatgttttattttacagcttagtgaaatcagtgggattcctttggatgatattgaatttgctaaggtaaagccctgagaatgttgcatctgtgtattgtgcatgataaacacagctagtggcatgatttattcattcattctttttctttttagggtagaggaacatttccctgtgatatttctgtccttgatattcatcaagatttagactggaatcctaaagtttctaccctgaatgtctggcctctttatatctgtgatgatggtgcggtcatattttataggatgagacagaagaattcatggactgacagatgcgcgaagcatgatctctatcg

SEQ ID NO: 79622 - DNA, 8339 bp, Homo sapiens
  misc_feature (6227)..(6227): n is a, c, g, or t
acgacgaaggcggctgtggtagcggcggcggcggcggcggagccctgggtcggtgtctgcgcgctggtgtctgaggcccaggctgaggcctccgctattgctggagcgcaggcggcggagaggatgactgccgctgccattctctcttgagctagcgagccgccgccaccctccaccctcccccggcagggcggagaggagcggccggagtcagcgatggtgcccggcgaggagaaccaactggtcccgaaagagatagaaaatgctgctgaagaacctagagtcttatgtattatacaagatactactaattcaaagacagtgaatgaacggatcactttaaatttaccagcatctactccagtcagaaagctctttgaagatgtggccaacaaagtaggctacataaatggaacctttgacttggtgtggggaaatggaatcaatactgctgatatggcaccactggatcataccagtgacaagtcacttctcgacgctaattttgagccaggaaagaagaactttctgcatttgacagataaagatggtgaacaacctcaaatactgctggaggattccagtgctggggaagacagtgttcatgacaggtttataggtccgcttccaagagaaggttctgtgggttctaccagtgattatgtcagccaaagctactcctactcatctattttgaataaatcagaaactggatatgtgggactagtaaaccaagcaatgacttgctatttgaatagccttttgcaaacactttttatgactcctgaatttaggaatgcattatataagtgggaatttgaagaatctgaagaagatccagtgacaagtattccataccaacttcaaaggctttttgttttgttacaaaccagcaaaaagagagcaattgaaaccacagatgttacaaggagctttggatgggatagtagtgaggcttggcagcagcatgatgtacaagaactatgcagagtcatgtttgatgctttggaacagaaatggaagcaaacagaacaggctgatcttataaatgagctatatcaaggcaagctgaaggactacgtgagatgtctggaatgtggttatgagggctggcgaatcgacacatatcttgatatcccattggtcatccgaccttatgggtccagccaagcatttgctagtgtggaagaagcattgcatgcatttattcagccagagattctggatggcccaaatcagtatttttgtgaacgttgtaagaagaagtgtgatgcacggaagggccttcggtttttgcattttccttatctgctgaccttacagctgaaaagattcgattttgattatacaaccatgcataggattaaactgaatgatcgaatgacatttcccgaggaactagatatgagtacttttattgatgttgaagatgagaaatctcctcagactgaaagttgcactgacagtggagcagaaaatgaaggtagttgtcacagtgatcagatgagcaacgatttctccaatgatgatggtgttgatgaaggaatctgtcttgaaaccaatagtggaactgaaaagatctcaaaatctggacttgaaaagaattccttgatctatgaacttttctctgttatggctcattctgggagcgctgctggtggtcattattatgcatgtataaagtcattcagtgatgagcagtggtacagcttcgatgatcaacatgtcagcaggataacacaagaggacattaagaaaacacatggtggatcttcaggaagcagaggatattattctagtgctttcgcaagttccacaaatgcatatatgctgatctatagactgaaggatccagccagaaatgcaaaatttctagaagtgggtgaatacccagaacatattaaaaacttggtgcagaaagagagagagttggaagaacaagaaaagagacaacgagaaattgagcgcaatacatgcaagataaaattattctgtttgcatcctacaaaacaagtaatgatggaaaataaattggaggttcataaggataagacattaaaggaagcagtagaaatggcttataagatgatggatttagaagaggtaatacccctggattgctgtcgccttgttaaatatgatgagtttcatgattatctagaacggtcatatgaaggagaagaagatacaccaatggggcttctactaggtggcgtcaagtcaacatatatgtttgatctgctgttggagacgagaaagcctgatcaggttttccaatcttataaacctggagaagtgatggtgaaagttcatgttgttgatctaaaggcagaatctgtagctgctcctataactgttcgtgcttacttaaatcagacagttacagaattcaaacaactgatttcaaaggccatccatttacctgctgaaacaatgagaatagtgctggaacgctgctacaatgatttgcgtcttctcagtgtctccagtaaaaccctgaaagctgaaggattttttagaagtaacaaggtgtttgttgaaagctccgagactttggattaccagatggcctttgcagactctcatttatggaaactcctggatcggcatgcaaatacaatcagattatttgttttgctacctgaacaatccccagtatcttattccaaaaggacagcataccagaaagctggaggcgattctggtaatgtggatgatgactgtgaaagagtcaaaggacctgtaggaagcctaaagtctgtggaagctattctagaagaaagcactgaaaaactcaaaagcttgtcactgcagcaacagcaggatggagataatggggacagcagcaaaagtactgagacaagtgactttgaaaacatcgaatcacctctcaatgagagggactcttcagcatcagtggataatagagaacttgaacagcatattcagacttctgatccagaaaattttcagtctgaagaacgatcagactcagatgtgaataatgacaggagtacaagttcagtggacagtgatattcttagctccagtcatagcagtgatactttgtgcaatgcagacaatgctcagatccctttggctaatggacttgactctcacagtatcacaagtagtagaagaacgaaagcaaatgaagggaaaaaagaaacatgggatacagcagaagaagactctggaactgatagtgaatatgatgagagtggcaagagtaggggagaaatgcagtacatgtatttcaaagctgaaccttatgctgcagatgaaggttctggggaaggacataaatggttgatggtgcatgttgataaaagaattactctggcagctttcaaacaacatttagagccctttgttggagttttgtcctctcacttcaaggtctttcgagtgtatgccagcaatcaagagtttgagagcgtccggctgaatgagacactttcatcattttctgatgacaataagattacaattagactggggagagcacttaaaaaaggagaatacagagttaaagtataccagcttttggtcaatgaacaagagccatgcaagtttctgctagatgctgtgtttgctaaaggaatgactgtacggcaatcaaaagaggaattaattcctcagctcagggagcaatgtggtttagagctcagtattgacaggtttcgtctaaggaaaaaaacatggaagaatcctggcactgtctttttggattatcatatttatgaagaagatattaatatttccagcaactgggaggttttccttgaagttcttgatggctgcttcaggtctaattcaaccataaatttaaatggttgaaattctgattaattgacaagttaagttgggaggggtagagaagatgaagtccatgtcacagcttgcagttttgtcaagacggtggaagccttcagagatgaagttggatcccttccaggaggttgtattggaaagcagtagtgtggacgaattgcgagagaagcttagtgaaatcagtgggattcctttggatgatattgaatttgctaagggtagaggaacatttccctgtgatatttctgtccttgatattcatcaagatttagactggaatcctaaagtttctaccctgaatgtctggcctctttatatctgtgatgatggtgcggtcatattttatagggataaaacagaagaattaatggaattgacagatgagcaaagaaatgaactgatgaaaaaagaaagcagtcgactccagaagactggacatcgtgtaacatactcacctcgtaaagagaaagcactaaaaatatatctggatggagcaccaaataaagatctgactcaagactgactctgatagtgtagcattttccctgggggagttttggttttaattagatggttcactaccactgggtagtgccattttggccggacatggttggggtaacccagtgacaccagcactgattggactgccctacaccaatcagaagctcagtgcccaatgggccactgttttgactcggaatcatgttgtgcactatagtcaaatgtactgtaaagtgaaaagggatgtgcaaaaaaataaaaaaaaacaacaaaaaaagctaaccttctattagaaaaggggacaggggaatgagtaaacttcttttattgcggacaaatgtgcacatagccgctagtaaaactagcctcaaacaggatgctcatagcttaataataaaagctgtgcaaaggccatgaatgaatgaattttctgtttatttcactgatgcacacattacctcattgacaattcagaagtaaatccaacgtgtgttgactcttggaaagcagcaaaaacaggagctgaagaaaagaaattcttggaaccagccgtaacccagtaaggaattgtgaagttgtgtttttattttgtttcattttttgcagagtattaagaacattattctggaacatcagaacgtttcccttagaccgatcccagcaggtggcagctcagattgctgcagtgttgtaattataactgattgtacttaagttatggatgtagagaatatgtttcattcatttattcagcatgtaaataaaattgatcctgttgagttatcataattgcagttcaactatctgccatgattattcttttcacgtatcattcattctgtacatttgtgtacattgagaagtatagcaatctatgtaaatgtaatcctcagtgaggttcctcagtgctaggtcccataggattgtcgttgcccttgttaatgaggtttctctgttcagcggcttcaatttttttctctttgtacatctagttttgaagatttacttcaagtttgaatcttctagaatgcttgtaagtccagttttaatttttagagtcaatttgtagttacatgtagtttaacttttgggaaacgtcttaacattgttctgaataaacttgctaatgaggtcaggtcatggtacagactgatgcagtcaacatgatttcattgcagagtttattagtatcagcaagtttttgctttgctaaataaaagtactcaatgaacacaattctacataaattttgacataccatctaatttataaaaatcaataaaaaaggttttggtaaaactttttcatgccagatgctgtttacaacaatgaacatgccaataaaacatttgttcattctgttgtgttattttagtcattaaacttctgtggatgaagaatctgggttaagaatagatttgtcatctttaaatatgacattttgtaatgtgtattggatatctcatttctatgataaaggtatatttacagtaaagttctcataagagaaatgaaaagctgtgttaatatctaactttggggaaccctgtcagtatttcagatccgatttttaccctttttttcttataagaaagataaaattagaaaatactgttagcaaatgtggctctgccatttgaatataatcaccgagaattccatgtcttaaaagtctcctggaatccacaatgaaaaaaaaaatcttttctaaggtatttttctggctaatttttatttgaagaaagctatagcatttagcgaaatttgactgaagtaatgttctgagtttgcattagtgggattggtgatgttctcagaagaaaattggaaacacttgtgatgaattgtctttcagatcacttagattttctgatgtaagaggacagctntttggttctgatacaggcctgcttacttgggatgtagggttagtaaatggggtttctgctttaaaggactgacttgctatcgcacaaaagaggcagacttgtaaacacaatgggctttggagtttggtctgattgggtttggtttagtattcctatgagcgtaaatggtaaaattcttctgatacccactctttagactgtgccttctgctctgttctttgttttatgtttaactgctgtttctaattgcaggtgtattacagatacaaataagagtaaagaaaatatatttcattatagaaaagaaaaaattaaaagcttcttgcttttcagtgcctgatagagtgaaaacacaaagttgcactttaataatttcaataaaagctaatctgtgtcagcctccctctgcttcagagagtcaggtgagcatccataacctaacaggcagagccctagcgatgtggatcaagtttcctgagcccgggggcggtggagcctcatgatctcttatcttttgaggctgaggcaggtcacatgcaacaaattgtgaccctgctccccacaagtcatgcaaaggttttgaagagcttttaccgtggggcagatgaacttgtgtcaaccatgcacaccctgtgagaaccaagtacctgtgtttctaaggcgggcactcaaggtgaggggtgcattctggccaaagaaacaaaagctgtggtttcaggaccatgccgtgtgtagctgatctgtacgggacgtgtatgtaaggaagagcaatcatgatagataagaacagtgtgtgaagcagccctcacactagagtgtttggtcatctcttataatgtaagggaaggtactttaaaattctgggaagatgcgatgaactcatgtcccagtcagaaaataatccaatgaaataagcattggttgccaggccacagttaggaattgtattgtgatacatctagaggccaagagagcaggagagagctaccaacttacactgtggtttaagctaaatgaccgcacagcatcatagcattgcagtgttgttactaaatctggaagtgacctgtgaatgtatggaatacaataaagtcttttattctggttcatttgctagtacttcctttttgattggatactgtagttcttcctctggattttattttgttcagcgtcaaggccctaattttgcaaatgtagtctaaaccacattacgtggactagaggatactctgaattagcaagttttttgtttgctgaataaaactattccatcttaacaattctgtgtaatttttgaaaaacatcaacattttggtcactagtagtccaaaatcttataaggcccatatgtcctgaaaggcaaaactctgtgtatgtgccgatttaccagggagatagtaggacagtttttatgagggtttcaaaggagttcatggcccaaatgaagcttgtggcccacctaggtttagtgtacatgaaattggaagatgcttcttgattgtagttcccatggggaagagggaggctgtgatcatttggttagatacagcattaattgtcacaacttgactttcagaaacaagaatactgcacaaactcaagcatgcattggagcatgtgttactatttagaaaagagtgcagccatcagtaggtcaagctaggagggcaaaagagagttgagaggaatgctctgccccttccccatcacagcactgcccctttccacctcctcaccagctcacctgtacaagagaattgatctcaactgagtgtcagctcaccaggtcagaaattgttattggaccctaaaaccttgcctcacaggtgggcaccaagctccccttccctctgctttccatgtttcccacctgccctctccccacctgttttcagcctcttttataatgcttaagtaacctgcttgaagagtataatttatggagataaaaatactcaatgcttacatttttttcataactgtgccaattgttttgtcaaatgcagttacccactgggcagtgggcttatcaagtgctcagtgcaatcctgtgacttttaagtcattttgcattattaagacaatcttatcttaaagttcagtggtttc

SEQ ID NO: 79623 - DNA, 8266 bp, Homo sapiens
  misc_feature (6154)..(6154): n is a, c, g, or t
acgacgaaggcggctgtggtagcggcggcggcggcggcggagccctgggtcggtgtctgcgcgctggtgtctgaggcccaggctgaggcctccgctattgctggagcgcaggcggcggagaggatgactgccgctgccattctctcttgagctagcgagccgccgccaccctccaccctcccccggcagggcggagaggagcggccggagtcagcgatggtgcccggcgaggagaaccaactggtcccgaaagagatagaaaatgctgctgaagaacctagagtcttatgtattatacaagatactactaattcaaagacagtgaatgaacggatcactttaaatttaccagcatctactccagtcagaaagctctttgaagatgtggccaacaaagtaggctacataaatggaacctttgacttggtgtggggaaatggaatcaatactgctgatatggcaccactggatcataccagtgacaagtcacttctcgacgctaattttgagccaggaaagaagaactttctgcatttgacagataaagatggtgaacaacctcaaatactgctggaggattccagtgctggggaagacagtgttcatgacaggtttataggtccgcttccaagagaaggttctgtgggttctaccagtgattatgtcagccaaagctactcctactcatctattttgaataaatcagaaactggatatgtgggactagtaaaccaagcaatgacttgctatttgaatagccttttgcaaacactttttatgactcctgaatttaggaatgcattatataagtgggaatttgaagaatctgaagaagatccagtgacaagtattccataccaacttcaaaggctttttgttttgttacaaaccagcaaaaagagagcaattgaaaccacagatgttacaaggagctttggatgggatagtagtgaggcttggcagcagcatgatgtacaagaactatgcagagtcatgtttgatgctttggaacagaaatggaagcaaacagaacaggctgatcttataaatgagctatatcaaggcaagctgaaggactacgtgagatgtctggaatgtggttatgagggctggcgaatcgacacatatcttgatatcccattggtcatccgaccttatgggtccagccaagcatttgctagtgtggaagaagcattgcatgcatttattcagccagagattctggatggcccaaatcagtatttttgtgaacgttgtaagaagaagtgtgatgcacggaagggccttcggtttttgcattttccttatctgctgaccttacagctgaaaagattcgattttgattatacaaccatgcataggattaaactgaatgatcgaatgacatttcccgaggaactagatatgagtacttttattgatgttgaagatgagaaatctcctcagactgaaagttgcactgacagtggagcagaaaatgaaggtagttgtcacagtgatcagatgagcaacgatttctccaatgatgatggtgttgatgaaggaatctgtcttgaaaccaatagtggaactgaaaagatctcaaaatctggacttgaaaagaattccttgatctatgaacttttctctgttatggctcattctgggagcgctgctggtggtcattattatgcatgtataaagtcattcagtgatgagcagtggtacagcttcgatgatcaacatgtcagcaggataacacaagaggacattaagaaaacacatggtggatcttcaggaagcagaggatattattctagtgctttcgcaagttccacaaatgcatatatgctgatctatagactgaaggatccagccagaaatgcaaaatttctagaagtgggtgaatacccagaacatattaaaaacttggtgcagaaagagagagagttggaagaacaagaaaagagacaacgagaaattgagcgcaatacatgcaagataaaattattctgtttgcatcctacaaaacaagtaatgatggaaaataaattggaggttcataaggataagacattaaaggaagcagtagaaatggcttataagatgatggatttagaagaggtaatacccctggattgctgtcgccttgttaaatatgatgagtttcatgattatctagaacggtcatatgaaggagaagaagatacaccaatggggcttctactaggtggcgtcaagtcaacatatatgtttgatctgctgttggagacgagaaagcctgatcaggttttccaatcttataaacctggagaagtgatggtgaaagttcatgttgttgatctaaaggcagaatctgtagctgctcctataactgttcgtgcttacttaaatcagacagttacagaattcaaacaactgatttcaaaggccatccatttacctgctgaaacaatgagaatagtgctggaacgctgctacaatgatttgcgtcttctcagtgtctccagtaaaaccctgaaagctgaaggattttttagaagtaacaaggtgtttgttgaaagctccgagactttggattaccagatggcctttgcagactctcatttatggaaactcctggatcggcatgcaaatacaatcagattatttgttttgctacctgaacaatccccagtatcttattccaaaaggacagcataccagaaagctggaggcgattctggtaatgtggatgatgactgtgaaagagtcaaaggacctgtaggaagcctaaagtctgtggaagctattctagaagaaagcactgaaaaactcaaaagcttgtcactgcagcaacagcaggatggagataatggggacagcagcaaaagtactgagacaagtgactttgaaaacatcgaatcacctctcaatgagagggactcttcagcatcagtggataatagagaacttgaacagcatattcagacttctgatccagaaaattttcagtctgaagaacgatcagactcagatgtgaataatgacaggagtacaagttcagtggacagtgatattcttagctccagtcatagcagtgatactttgtgcaatgcagacaatgctcagatccctttggctaatggacttgactctcacagtatcacaagtagtagaagaacgaaagcaaatgaagggaaaaaagaaacatgggatacagcagaagaagactctggaactgatagtgaatatgatgagagtggcaagagtaggggagaaatgcagtacatgtatttcaaagctgaaccttatgctgcagatgaaggttctggggaaggacataaatggttgatggtgcatgttgataaaagaattactctggcagctttcaaacaacatttagagccctttgttggagttttgtcctctcacttcaaggtctttcgagtgtatgccagcaatcaagagtttgagagcgtccggctgaatgagacactttcatcattttctgatgacaataagattacaattagactggggagagcacttaaaaaaggagaatacagagttaaagtataccagcttttggtcaatgaacaagagccatgcaagtttctgctagatgctgtgtttgctaaaggaatgactgtacggcaatcaaaagaggaattaattcctcagctcagggagcaatgtggtttagagctcagtattgacaggtttcgtctaaggaaaaaaacatggaagaatcctggcactgtctttttggattatcatatttatgaagaagatattaatatttccagcaactgggaggttttccttgaagttcttgatggggtagagaagatgaagtccatgtcacagcttgcagttttgtcaagacggtggaagccttcagagatgaagttggatcccttccaggaggttgtattggaaagcagtagtgtggacgaattgcgagagaagcttagtgaaatcagtgggattcctttggatgatattgaatttgctaagggtagaggaacatttccctgtgatatttctgtccttgatattcatcaagatttagactggaatcctaaagtttctaccctgaatgtctggcctctttatatctgtgatgatggtgcggtcatattttatagggataaaacagaagaattaatggaattgacagatgagcaaagaaatgaactgatgaaaaaagaaagcagtcgactccagaagactggacatcgtgtaacatactcacctcgtaaagagaaagcactaaaaatatatctggatggagcaccaaataaagatctgactcaagactgactctgatagtgtagcattttccctgggggagttttggttttaattagatggttcactaccactgggtagtgccattttggccggacatggttggggtaacccagtgacaccagcactgattggactgccctacaccaatcagaagctcagtgcccaatgggccactgttttgactcggaatcatgttgtgcactatagtcaaatgtactgtaaagtgaaaagggatgtgcaaaaaaataaaaaaaaacaacaaaaaaagctaaccttctattagaaaaggggacaggggaatgagtaaacttcttttattgcggacaaatgtgcacatagccgctagtaaaactagcctcaaacaggatgctcatagcttaataataaaagctgtgcaaaggccatgaatgaatgaattttctgtttatttcactgatgcacacattacctcattgacaattcagaagtaaatccaacgtgtgttgactcttggaaagcagcaaaaacaggagctgaagaaaagaaattcttggaaccagccgtaacccagtaaggaattgtgaagttgtgtttttattttgtttcattttttgcagagtattaagaacattattctggaacatcagaacgtttcccttagaccgatcccagcaggtggcagctcagattgctgcagtgttgtaattataactgattgtacttaagttatggatgtagagaatatgtttcattcatttattcagcatgtaaataaaattgatcctgttgagttatcataattgcagttcaactatctgccatgattattcttttcacgtatcattcattctgtacatttgtgtacattgagaagtatagcaatctatgtaaatgtaatcctcagtgaggttcctcagtgctaggtcccataggattgtcgttgcccttgttaatgaggtttctctgttcagcggcttcaatttttttctctttgtacatctagttttgaagatttacttcaagtttgaatcttctagaatgcttgtaagtccagttttaatttttagagtcaatttgtagttacatgtagtttaacttttgggaaacgtcttaacattgttctgaataaacttgctaatgaggtcaggtcatggtacagactgatgcagtcaacatgatttcattgcagagtttattagtatcagcaagtttttgctttgctaaataaaagtactcaatgaacacaattctacataaattttgacataccatctaatttataaaaatcaataaaaaaggttttggtaaaactttttcatgccagatgctgtttacaacaatgaacatgccaataaaacatttgttcattctgttgtgttattttagtcattaaacttctgtggatgaagaatctgggttaagaatagatttgtcatctttaaatatgacattttgtaatgtgtattggatatctcatttctatgataaaggtatatttacagtaaagttctcataagagaaatgaaaagctgtgttaatatctaactttggggaaccctgtcagtatttcagatccgatttttaccctttttttcttataagaaagataaaattagaaaatactgttagcaaatgtggctctgccatttgaatataatcaccgagaattccatgtcttaaaagtctcctggaatccacaatgaaaaaaaaaatcttttctaaggtatttttctggctaatttttatttgaagaaagctatagcatttagcgaaatttgactgaagtaatgttctgagtttgcattagtgggattggtgatgttctcagaagaaaattggaaacacttgtgatgaattgtctttcagatcacttagattttctgatgtaagaggacagctntttggttctgatacaggcctgcttacttgggatgtagggttagtaaatggggtttctgctttaaaggactgacttgctatcgcacaaaagaggcagacttgtaaacacaatgggctttggagtttggtctgattgggtttggtttagtattcctatgagcgtaaatggtaaaattcttctgatacccactctttagactgtgccttctgctctgttctttgttttatgtttaactgctgtttctaattgcaggtgtattacagatacaaataagagtaaagaaaatatatttcattatagaaaagaaaaaattaaaagcttcttgcttttcagtgcctgatagagtgaaaacacaaagttgcactttaataatttcaataaaagctaatctgtgtcagcctccctctgcttcagagagtcaggtgagcatccataacctaacaggcagagccctagcgatgtggatcaagtttcctgagcccgggggcggtggagcctcatgatctcttatcttttgaggctgaggcaggtcacatgcaacaaattgtgaccctgctccccacaagtcatgcaaaggttttgaagagcttttaccgtggggcagatgaacttgtgtcaaccatgcacaccctgtgagaaccaagtacctgtgtttctaaggcgggcactcaaggtgaggggtgcattctggccaaagaaacaaaagctgtggtttcaggaccatgccgtgtgtagctgatctgtacgggacgtgtatgtaaggaagagcaatcatgatagataagaacagtgtgtgaagcagccctcacactagagtgtttggtcatctcttataatgtaagggaaggtactttaaaattctgggaagatgcgatgaactcatgtcccagtcagaaaataatccaatgaaataagcattggttgccaggccacagttaggaattgtattgtgatacatctagaggccaagagagcaggagagagctaccaacttacactgtggtttaagctaaatgaccgcacagcatcatagcattgcagtgttgttactaaatctggaagtgacctgtgaatgtatggaatacaataaagtcttttattctggttcatttgctagtacttcctttttgattggatactgtagttcttcctctggattttattttgttcagcgtcaaggccctaattttgcaaatgtagtctaaaccacattacgtggactagaggatactctgaattagcaagttttttgtttgctgaataaaactattccatcttaacaattctgtgtaatttttgaaaaacatcaacattttggtcactagtagtccaaaatcttataaggcccatatgtcctgaaaggcaaaactctgtgtatgtgccgatttaccagggagatagtaggacagtttttatgagggtttcaaaggagttcatggcccaaatgaagcttgtggcccacctaggtttagtgtacatgaaattggaagatgcttcttgattgtagttcccatggggaagagggaggctgtgatcatttggttagatacagcattaattgtcacaacttgactttcagaaacaagaatactgcacaaactcaagcatgcattggagcatgtgttactatttagaaaagagtgcagccatcagtaggtcaagctaggagggcaaaagagagttgagaggaatgctctgccccttccccatcacagcactgcccctttccacctcctcaccagctcacctgtacaagagaattgatctcaactgagtgtcagctcaccaggtcagaaattgttattggaccctaaaaccttgcctcacaggtgggcaccaagctccccttccctctgctttccatgtttcccacctgccctctccccacctgttttcagcctcttttataatgcttaagtaacctgcttgaagagtataatttatggagataaaaatactcaatgcttacatttttttcataactgtgccaattgttttgtcaaatgcagttacccactgggcagtgggcttatcaagtgctcagtgcaatcctgtgacttttaagtcattttgcattattaagacaatcttatcttaaagttcagtggtttc

SEQ ID NO: 79624 - DNA, 4830 bp, Homo sapiens
  misc_feature (2718)..(2718): n is a, c, g, or t
cgtgtatgatgacaactcggtaatgctgcatactcccgagtgcgcggtggggaagccaaccttggagagcacttaaaaaaggagaatacagagttaaagtataccagcttttggtcaatgaacaagagccatgcaagtttctgctagatgctgtgtttgctaaaggaatgactgtacggcaatcaaaagaggaattaattcctcagctcagggagcaatgtggtttagagctcagtattgacaggtttcgtctaaggaaaaaaacatggaagaatcctggcactgtctttttggattatcatatttatgaagaagatattaatatttccagcaactgggaggttttccttgaagttcttgatggggtagagaagatgaagtccatgtcacagcttgcagttttgtcaagacggtggaagccttcagagatgaagttggatcccttccaggaggttgtattggaaagcagtagtgtggacgaattgcgagagaagcttagtgaaatcagtgggattcctttggatgatattgaatttgctaagggtagaggaacatttccctgtgatatttctgtccttgatattcatcaagatttagactggaatcctaaagtttctaccctgaatgtctggcctctttatatctgtgatgatggtgcggtcatattttatagggataaaacagaagaattaatggaattgacagatgagcaaagaaatgaactgatgaaaaaagaaagcagtcgactccagaagactggacatcgtgtaacatactcacctcgtaaagagaaagcactaaaaatatatctggatggagcaccaaataaagatctgactcaagactgactctgatagtgtagcattttccctgggggagttttggttttaattagatggttcactaccactgggtagtgccattttggccggacatggttggggtaacccagtgacaccagcactgattggactgccctacaccaatcagaagctcagtgcccaatgggccactgttttgactcggaatcatgttgtgcactatagtcaaatgtactgtaaagtgaaaagggatgtgcaaaaaaataaaaaaaaacaacaaaaaaagctaaccttctattagaaaaggggacaggggaatgagtaaacttcttttattgcggacaaatgtgcacatagccgctagtaaaactagcctcaaacaggatgctcatagcttaataataaaagctgtgcaaaggccatgaatgaatgaattttctgtttatttcactgatgcacacattacctcattgacaattcagaagtaaatccaacgtgtgttgactcttggaaagcagcaaaaacaggagctgaagaaaagaaattcttggaaccagccgtaacccagtaaggaattgtgaagttgtgtttttattttgtttcattttttgcagagtattaagaacattattctggaacatcagaacgtttcccttagaccgatcccagcaggtggcagctcagattgctgcagtgttgtaattataactgattgtacttaagttatggatgtagagaatatgtttcattcatttattcagcatgtaaataaaattgatcctgttgagttatcataattgcagttcaactatctgccatgattattcttttcacgtatcattcattctgtacatttgtgtacattgagaagtatagcaatctatgtaaatgtaatcctcagtgaggttcctcagtgctaggtcccataggattgtcgttgcccttgttaatgaggtttctctgttcagcggcttcaatttttttctctttgtacatctagttttgaagatttacttcaagtttgaatcttctagaatgcttgtaagtccagttttaatttttagagtcaatttgtagttacatgtagtttaacttttgggaaacgtcttaacattgttctgaataaacttgctaatgaggtcaggtcatggtacagactgatgcagtcaacatgatttcattgcagagtttattagtatcagcaagtttttgctttgctaaataaaagtactcaatgaacacaattctacataaattttgacataccatctaatttataaaaatcaataaaaaaggttttggtaaaactttttcatgccagatgctgtttacaacaatgaacatgccaataaaacatttgttcattctgttgtgttattttagtcattaaacttctgtggatgaagaatctgggttaagaatagatttgtcatctttaaatatgacattttgtaatgtgtattggatatctcatttctatgataaaggtatatttacagtaaagttctcataagagaaatgaaaagctgtgttaatatctaactttggggaaccctgtcagtatttcagatccgatttttaccctttttttcttataagaaagataaaattagaaaatactgttagcaaatgtggctctgccatttgaatataatcaccgagaattccatgtcttaaaagtctcctggaatccacaatgaaaaaaaaaatcttttctaaggtatttttctggctaatttttatttgaagaaagctatagcatttagcgaaatttgactgaagtaatgttctgagtttgcattagtgggattggtgatgttctcagaagaaaattggaaacacttgtgatgaattgtctttcagatcacttagattttctgatgtaagaggacagctntttggttctgatacaggcctgcttacttgggatgtagggttagtaaatggggtttctgctttaaaggactgacttgctatcgcacaaaagaggcagacttgtaaacacaatgggctttggagtttggtctgattgggtttggtttagtattcctatgagcgtaaatggtaaaattcttctgatacccactctttagactgtgccttctgctctgttctttgttttatgtttaactgctgtttctaattgcaggtgtattacagatacaaataagagtaaagaaaatatatttcattatagaaaagaaaaaattaaaagcttcttgcttttcagtgcctgatagagtgaaaacacaaagttgcactttaataatttcaataaaagctaatctgtgtcagcctccctctgcttcagagagtcaggtgagcatccataacctaacaggcagagccctagcgatgtggatcaagtttcctgagcccgggggcggtggagcctcatgatctcttatcttttgaggctgaggcaggtcacatgcaacaaattgtgaccctgctccccacaagtcatgcaaaggttttgaagagcttttaccgtggggcagatgaacttgtgtcaaccatgcacaccctgtgagaaccaagtacctgtgtttctaaggcgggcactcaaggtgaggggtgcattctggccaaagaaacaaaagctgtggtttcaggaccatgccgtgtgtagctgatctgtacgggacgtgtatgtaaggaagagcaatcatgatagataagaacagtgtgtgaagcagccctcacactagagtgtttggtcatctcttataatgtaagggaaggtactttaaaattctgggaagatgcgatgaactcatgtcccagtcagaaaataatccaatgaaataagcattggttgccaggccacagttaggaattgtattgtgatacatctagaggccaagagagcaggagagagctaccaacttacactgtggtttaagctaaatgaccgcacagcatcatagcattgcagtgttgttactaaatctggaagtgacctgtgaatgtatggaatacaataaagtcttttattctggttcatttgctagtacttcctttttgattggatactgtagttcttcctctggattttattttgttcagcgtcaaggccctaattttgcaaatgtagtctaaaccacattacgtggactagaggatactctgaattagcaagttttttgtttgctgaataaaactattccatcttaacaattctgtgtaatttttgaaaaacatcaacattttggtcactagtagtccaaaatcttataaggcccatatgtcctgaaaggcaaaactctgtgtatgtgccgatttaccagggagatagtaggacagtttttatgagggtttcaaaggagttcatggcccaaatgaagcttgtggcccacctaggtttagtgtacatgaaattggaagatgcttcttgattgtagttcccatggggaagagggaggctgtgatcatttggttagatacagcattaattgtcacaacttgactttcagaaacaagaatactgcacaaactcaagcatgcattggagcatgtgttactatttagaaaagagtgcagccatcagtaggtcaagctaggagggcaaaagagagttgagaggaatgctctgccccttccccatcacagcactgcccctttccacctcctcaccagctcacctgtacaagagaattgatctcaactgagtgtcagctcaccaggtcagaaattgttattggaccctaaaaccttgcctcacaggtgggcaccaagctccccttccctctgctttccatgtttcccacctgccctctccccacctgttttcagcctcttttataatgcttaagtaacctgcttgaagagtataatttatggagataaaaatactcaatgcttacatttttttcataactgtgccaattgttttgtcaaatgcagttacccactgggcagtgggcttatcaagtgctcagtgcaatcctgtgacttttaagtcattttgcattattaagacaatcttatcttaaagttcagtggtttc

SEQ ID NO: 79625 - DNA, 4418 bp, Homo sapiens
  misc_feature (2306)..(2306): n is a, c, g, or t
ctggctgacctgaggacccgaccagcatcctaaccaggaggttgtattggaaagcagtagtgtggacgaattgcgagagaagcttagtgaaatcagtgggattcctttggatgatattgaatttgctaagggtagaggaacatttccctgtgatatttctgtccttgatattcatcaagatttagactggaatcctaaagtttctaccctgaatgtctggcctctttatatctgtgatgatggtgcggtcatattttatagggataaaacagaagaattaatggaattgacagatgagcaaagaaatgaactgatgaaaaaagaaagcagtcgactccagaagactggacatcgtgtaacatactcacctcgtaaagagaaagcactaaaaatatatctggatggagcaccaaataaagatctgactcaagactgactctgatagtgtagcattttccctgggggagttttggttttaattagatggttcactaccactgggtagtgccattttggccggacatggttggggtaacccagtgacaccagcactgattggactgccctacaccaatcagaagctcagtgcccaatgggccactgttttgactcggaatcatgttgtgcactatagtcaaatgtactgtaaagtgaaaagggatgtgcaaaaaaataaaaaaaaacaacaaaaaaagctaaccttctattagaaaaggggacaggggaatgagtaaacttcttttattgcggacaaatgtgcacatagccgctagtaaaactagcctcaaacaggatgctcatagcttaataataaaagctgtgcaaaggccatgaatgaatgaattttctgtttatttcactgatgcacacattacctcattgacaattcagaagtaaatccaacgtgtgttgactcttggaaagcagcaaaaacaggagctgaagaaaagaaattcttggaaccagccgtaacccagtaaggaattgtgaagttgtgtttttattttgtttcattttttgcagagtattaagaacattattctggaacatcagaacgtttcccttagaccgatcccagcaggtggcagctcagattgctgcagtgttgtaattataactgattgtacttaagttatggatgtagagaatatgtttcattcatttattcagcatgtaaataaaattgatcctgttgagttatcataattgcagttcaactatctgccatgattattcttttcacgtatcattcattctgtacatttgtgtacattgagaagtatagcaatctatgtaaatgtaatcctcagtgaggttcctcagtgctaggtcccataggattgtcgttgcccttgttaatgaggtttctctgttcagcggcttcaatttttttctctttgtacatctagttttgaagatttacttcaagtttgaatcttctagaatgcttgtaagtccagttttaatttttagagtcaatttgtagttacatgtagtttaacttttgggaaacgtcttaacattgttctgaataaacttgctaatgaggtcaggtcatggtacagactgatgcagtcaacatgatttcattgcagagtttattagtatcagcaagtttttgctttgctaaataaaagtactcaatgaacacaattctacataaattttgacataccatctaatttataaaaatcaataaaaaaggttttggtaaaactttttcatgccagatgctgtttacaacaatgaacatgccaataaaacatttgttcattctgttgtgttattttagtcattaaacttctgtggatgaagaatctgggttaagaatagatttgtcatctttaaatatgacattttgtaatgtgtattggatatctcatttctatgataaaggtatatttacagtaaagttctcataagagaaatgaaaagctgtgttaatatctaactttggggaaccctgtcagtatttcagatccgatttttaccctttttttcttataagaaagataaaattagaaaatactgttagcaaatgtggctctgccatttgaatataatcaccgagaattccatgtcttaaaagtctcctggaatccacaatgaaaaaaaaaatcttttctaaggtatttttctggctaatttttatttgaagaaagctatagcatttagcgaaatttgactgaagtaatgttctgagtttgcattagtgggattggtgatgttctcagaagaaaattggaaacacttgtgatgaattgtctttcagatcacttagattttctgatgtaagaggacagctntttggttctgatacaggcctgcttacttgggatgtagggttagtaaatggggtttctgctttaaaggactgacttgctatcgcacaaaagaggcagacttgtaaacacaatgggctttggagtttggtctgattgggtttggtttagtattcctatgagcgtaaatggtaaaattcttctgatacccactctttagactgtgccttctgctctgttctttgttttatgtttaactgctgtttctaattgcaggtgtattacagatacaaataagagtaaagaaaatatatttcattatagaaaagaaaaaattaaaagcttcttgcttttcagtgcctgatagagtgaaaacacaaagttgcactttaataatttcaataaaagctaatctgtgtcagcctccctctgcttcagagagtcaggtgagcatccataacctaacaggcagagccctagcgatgtggatcaagtttcctgagcccgggggcggtggagcctcatgatctcttatcttttgaggctgaggcaggtcacatgcaacaaattgtgaccctgctccccacaagtcatgcaaaggttttgaagagcttttaccgtggggcagatgaacttgtgtcaaccatgcacaccctgtgagaaccaagtacctgtgtttctaaggcgggcactcaaggtgaggggtgcattctggccaaagaaacaaaagctgtggtttcaggaccatgccgtgtgtagctgatctgtacgggacgtgtatgtaaggaagagcaatcatgatagataagaacagtgtgtgaagcagccctcacactagagtgtttggtcatctcttataatgtaagggaaggtactttaaaattctgggaagatgcgatgaactcatgtcccagtcagaaaataatccaatgaaataagcattggttgccaggccacagttaggaattgtattgtgatacatctagaggccaagagagcaggagagagctaccaacttacactgtggtttaagctaaatgaccgcacagcatcatagcattgcagtgttgttactaaatctggaagtgacctgtgaatgtatggaatacaataaagtcttttattctggttcatttgctagtacttcctttttgattggatactgtagttcttcctctggattttattttgttcagcgtcaaggccctaattttgcaaatgtagtctaaaccacattacgtggactagaggatactctgaattagcaagttttttgtttgctgaataaaactattccatcttaacaattctgtgtaatttttgaaaaacatcaacattttggtcactagtagtccaaaatcttataaggcccatatgtcctgaaaggcaaaactctgtgtatgtgccgatttaccagggagatagtaggacagtttttatgagggtttcaaaggagttcatggcccaaatgaagcttgtggcccacctaggtttagtgtacatgaaattggaagatgcttcttgattgtagttcccatggggaagagggaggctgtgatcatttggttagatacagcattaattgtcacaacttgactttcagaaacaagaatactgcacaaactcaagcatgcattggagcatgtgttactatttagaaaagagtgcagccatcagtaggtcaagctaggagggcaaaagagagttgagaggaatgctctgccccttccccatcacagcactgcccctttccacctcctcaccagctcacctgtacaagagaattgatctcaactgagtgtcagctcaccaggtcagaaattgttattggaccctaaaaccttgcctcacaggtgggcaccaagctccccttccctctgctttccatgtttcccacctgccctctccccacctgttttcagcctcttttataatgcttaagtaacctgcttgaagagtataatttatggagataaaaatactcaatgcttacatttttttcataactgtgccaattgttttgtcaaatgcagttacccactgggcagtgggcttatcaagtgctcagtgcaatcctgtgacttttaagtcattttgcattattaagacaatcttatcttaaagttcagtggtttc

SEQ ID NO: 79626 - DNA, 5057 bp, Homo sapiens
acgacgaaggcggctgtggtagcggcggcggcggcggcggagccctgggtcggtgtctgcgcgctggtgtctgaggcccaggctgaggcctccgctattgctggagcgcaggcggcggagaggatgactgccgctgccattctctcttgagctagcgagccgccgccaccctccaccctcccccggcagggcggagaggagcggccggagtcagcgatggtgcccggcgaggagaaccaactggtcccgaaagagatagaaaatgctgctgaagaacctagagtcttatgtattatacaagatactactaattcaaagacagtgaatgaacggatcactttaaatttaccagcatctactccagtcagaaagctctttgaagatgtggccaacaaagtaggctacataaatggaacctttgacttggtgtggggaaatggaatcaatactgctgatatggcaccactggatcataccagtgacaagtcacttctcgacgctaattttgagccaggaaagaagaactttctgcatttgacagataaagatggtgaacaacctcaaatactgctggaggattccagtgctggggaagacagtgttcatgacaggtttataggtccgcttccaagagaaggttctgtgggttctaccagtgattatgtcagccaaagctactcctactcatctattttgaataaatcagaaactggatatgtgggactagtaaaccaagcaatgacttgctatttgaatagccttttgcaaacactttttatgactcctgaatttaggaatgcattatataagtgggaatttgaagaatctgaagaagatccagtgacaagtattccataccaacttcaaaggctttttgttttgttacaaaccagcaaaaagagagcaattgaaaccacagatgttacaaggagctttggatgggatagtagtgaggcttggcagcagcatgatgtacaagaactatgcagagtcatgtttgatgctttggaacagaaatggaagcaaacagaacaggctgatcttataaatgagctatatcaaggcaagctgaaggactacgtgagatgtctggaatgtggttatgagggctggcgaatcgacacatatcttgatatcccattggtcatccgaccttatgggtccagccaagcatttgctagtgtggaagaagcattgcatgcatttattcagccagagattctggatggcccaaatcagtatttttgtgaacgttgtaagaagaagtgtgatgcacggaagggccttcggtttttgcattttccttatctgctgaccttacagctgaaaagattcgattttgattatacaaccatgcataggattaaactgaatgatcgaatgacatttcccgaggaactagatatgagtacttttattgatgttgaagatgagaaatctcctcagactgaaagttgcactgacagtggagcagaaaatgaaggtagttgtcacagtgatcagatgagcaacgatttctccaatgatgatggtgttgatgaaggaatctgtcttgaaaccaatagtggaactgaaaagatctcaaaatctggacttgaaaagaattccttgatctatgaacttttctctgttatggctcattctgggagcgctgctggtggtcattattatgcatgtataaagtcattcagtgatgagcagtggtacagcttcgatgatcaacatgtcagcaggataacacaagaggacattaagaaaacacatggtggatcttcaggaagcagaggatattattctagtgctttcgcaagttccacaaatgcatatatgctgatctatagactgaaggatccagccagaaatgcaaaatttctagaagtgggtgaatacccagaacatattaaaaacttggtgcagaaagagagagagttggaagaacaagaaaagagacaacgagaaattgagcgcaatacatgcaagataaaattattctgtttgcatcctacaaaacaagtaatgatggaaaataaattggaggttcataaggataagacattaaaggaagcagtagaaatggcttataagatgatggatttagaagaggtaatacccctggattgctgtcgccttgttaaatatgatgagtttcatgattatctagaacggtcatatgaaggagaagaagatacaccaatggggcttctactaggtggcgtcaagtcaacatatatgtttgatctgctgttggagacgagaaagcctgatcaggttttccaatcttataaacctggagaagtgatggtgaaagttcatgttgttgatctaaaggcagaatctgtagctgctcctataactgttcgtgcttacttaaatcagacagttacagaattcaaacaactgatttcaaaggccatccatttacctgctgaaacaatgagaatagtgctggaacgctgctacaatgatttgcgtcttctcagtgtctccagtaaaaccctgaaagctgaaggattttttagaagtaacaaggtgtttgttgaaagctccgagactttggattaccagatggcctttgcagactctcatttatggaaactcctggatcggcatgcaaatacaatcagattatttgttttgctacctgaacaatccccagtatcttattccaaaaggacagcataccagaaagctggaggcgattctggtaatgtggatgatgactgtgaaagagtcaaaggacctgtaggaagcctaaagtctgtggaagctattctagaagaaagcactgaaaaactcaaaagcttgtcactgcagcaacagcaggatggagataatggggacagcagcaaaagtactgagacaagtgactttgaaaacatcgaatcacctctcaatgagagggactcttcagcatcagtggataatagagaacttgaacagcatattcagacttctgatccagaaaattttcagtctgaagaacgatcagactcagatgtgaataatgacaggagtacaagttcagtggacagtgatattcttagctccagtcatagcagtgatactttgtgcaatgcagacaatgctcagatccctttggctaatggacttgactctcacagtatcacaagtagtagaagaacgaaagcaaatgaagggaaaaaagaaacatgggatacagcagaagaagactctggaactgatagtgaatatgatgagagtggcaagagtaggggagaaatgcagtacatgtatttcaaagctgaaccttatgctgcagatgaaggttctggggaaggacataaatggttgatggtgcatgttgataaaagaattactctggcagctttcaaacaacatttagagccctttgttggagttttgtcctctcacttcaaggtctttcgagtgtatgccagcaatcaagagtttgagagcgtccggctgaatgagacactttcatcattttctgatgacaataagattacaattagactggggagagcacttaaaaaaggagaatacagagttaaagtataccagcttttggtcaatgaacaagagccatgcaagtttctgctagatgctgtgtttgctaaaggaatgactgtacggcaatcaaaagaggaattaattcctcagctcagggagcaatgtggtttagagctcagtattgacaggtttcgtctaaggaaaaaaacatggaagaatcctggcactgtctttttggattatcatatttatgaagaagatattaatatttccagcaactgggaggttttccttgaagttcttgatggggtagagaagatgaagtccatgtcacagcttgcagttttgtcaagacggtggaagccttcagagatgaagttggatcccttccaggaggttgtattggaaagcagtagtgtggacgaattgcgagagaagcttagtgaaatcagtgggattcctttggatgatattgaatttgctaagggtagaggaacatttccctgtgatatttctgtccttgatattcatcaagatttagactggaatcctaaagtttctaccctgaatgtctggcctctttatatctgtgatgatggtgcggtcatattttatagggataaaacagaagaattaatggaattgacagatgagcaaagaaatgaactgatgaaaaaagaaagcagtcgactccagaagactggacatcgtgtaacatactcacctcgtaaagagaaagcactaaaaatatatctggatggagcaccaaataaagatctgactcaagactgactctgatagtgtagcattttccctgggggagttttggttttaattagatggttcactaccactgggtagtgccattttggccggacatggttggggtaacccagtgacaccagcactgattggactgccctacaccaatcagaagctcagtgcccaatgggccactgttttgactcggaatcatgttgtgcactatagtcaaatgtactgtaaagtgaaaagggatgtgcaaaaaaataaaaaaaaacaacaaaaaaagctaaccttctattagaaaaggggacaggggaatgagtaaacttcttttattgcggacaaatgtgcacatagccgctagtaaaactagcctcaaacaggatgctcatagcttaataataaaagctgtgcaaaggccatgaatgaatgaattttctgtttatttcactgatgcacacattacctcattgacaattcagaagtaaatccaacgtgtgttgactcttggaaagcagcaaaaacaggagctgaagaaaagaaattcttggaaccagccgtaacccagtaaggaattgtgaagttgtgtttttattttgtttcattttttgcagagtattaagaacattattctggaacatcagaacgtttcccttagaccgatcccagcaggtggcagctcagattgctgcagtgttgtaattataactgattgtacttaagttatggatgtagagaatatgtttcattcatttattcagcatgtaaataaaattgatcctgttgagttatcataattg

SEQ ID NO: 79627 - DNA, 8212 bp, Homo sapiens
  misc_feature (6154)..(6154): n is a, c, g, or t
acgacgaaggcggctgtggtagcggcggcggcggcggcggagccctgggtcggtgtctgcgcgctggtgtctgaggcccaggctgaggcctccgctattgctggagcgcaggcggcggagaggatgactgccgctgccattctctcttgagctagcgagccgccgccaccctccaccctcccccggcagggcggagaggagcggccggagtcagcgatggtgcccggcgaggagaaccaactggtcccgaaagagatagaaaatgctgctgaagaacctagagtcttatgtattatacaagatactactaattcaaagacagtgaatgaacggatcactttaaatttaccagcatctactccagtcagaaagctctttgaagatgtggccaacaaagtaggctacataaatggaacctttgacttggtgtggggaaatggaatcaatactgctgatatggcaccactggatcataccagtgacaagtcacttctcgacgctaattttgagccaggaaagaagaactttctgcatttgacagataaagatggtgaacaacctcaaatactgctggaggattccagtgctggggaagacagtgttcatgacaggtttataggtccgcttccaagagaaggttctgtgggttctaccagtgattatgtcagccaaagctactcctactcatctattttgaataaatcagaaactggatatgtgggactagtaaaccaagcaatgacttgctatttgaatagccttttgcaaacactttttatgactcctgaatttaggaatgcattatataagtgggaatttgaagaatctgaagaagatccagtgacaagtattccataccaacttcaaaggctttttgttttgttacaaaccagcaaaaagagagcaattgaaaccacagatgttacaaggagctttggatgggatagtagtgaggcttggcagcagcatgatgtacaagaactatgcagagtcatgtttgatgctttggaacagaaatggaagcaaacagaacaggctgatcttataaatgagctatatcaaggcaagctgaaggactacgtgagatgtctggaatgtggttatgagggctggcgaatcgacacatatcttgatatcccattggtcatccgaccttatgggtccagccaagcatttgctagtgtggaagaagcattgcatgcatttattcagccagagattctggatggcccaaatcagtatttttgtgaacgttgtaagaagaagtgtgatgcacggaagggccttcggtttttgcattttccttatctgctgaccttacagctgaaaagattcgattttgattatacaaccatgcataggattaaactgaatgatcgaatgacatttcccgaggaactagatatgagtacttttattgatgttgaagatgagaaatctcctcagactgaaagttgcactgacagtggagcagaaaatgaaggtagttgtcacagtgatcagatgagcaacgatttctccaatgatgatggtgttgatgaaggaatctgtcttgaaaccaatagtggaactgaaaagatctcaaaatctggacttgaaaagaattccttgatctatgaacttttctctgttatggctcattctgggagcgctgctggtggtcattattatgcatgtataaagtcattcagtgatgagcagtggtacagcttcgatgatcaacatgtcagcaggataacacaagaggacattaagaaaacacatggtggatcttcaggaagcagaggatattattctagtgctttcgcaagttccacaaatgcatatatgctgatctatagactgaaggatccagccagaaatgcaaaatttctagaagtgggtgaatacccagaacatattaaaaacttggtgcagaaagagagagagttggaagaacaagaaaagagacaacgagaaattgagcgcaatacatgcaagataaaattattctgtttgcatcctacaaaacaagtaatgatggaaaataaattggaggttcataaggataagacattaaaggaagcagtagaaatggcttataagatgatggatttagaagaggtaatacccctggattgctgtcgccttgttaaatatgatgagtttcatgattatctagaacggtcatatgaaggagaagaagatacaccaatggggcttctactaggtggcgtcaagtcaacatatatgtttgatctgctgttggagacgagaaagcctgatcaggttttccaatcttataaacctggagaagtgatggtgaaagttcatgttgttgatctaaaggcagaatctgtagctgctcctataactgttcgtgcttacttaaatcagacagttacagaattcaaacaactgatttcaaaggccatccatttacctgctgaaacaatgagaatagtgctggaacgctgctacaatgatttgcgtcttctcagtgtctccagtaaaaccctgaaagctgaaggattttttagaagtaacaaggtgtttgttgaaagctccgagactttggattaccagatggcctttgcagactctcatttatggaaactcctggatcggcatgcaaatacaatcagattatttgttttgctacctgaacaatccccagtatcttattccaaaaggacagcataccagaaagctggaggcgattctggtaatgtggatgatgactgtgaaagagtcaaaggacctgtaggaagcctaaagtctgtggaagctattctagaagaaagcactgaaaaactcaaaagcttgtcactgcagcaacagcaggatggagataatggggacagcagcaaaagtactgagacaagtgactttgaaaacatcgaatcacctctcaatgagagggactcttcagcatcagtggataatagagaacttgaacagcatattcagacttctgatccagaaaattttcagtctgaagaacgatcagactcagatgtgaataatgacaggagtacaagttcagtggacagtgatattcttagctccagtcatagcagtgatactttgtgcaatgcagacaatgctcagatccctttggctaatggacttgactctcacagtatcacaagtagtagaagaacgaaagcaaatgaagggaaaaaagaaacatgggatacagcagaagaagactctggaactgatagtgaatatgatgagagtggcaagagtaggggagaaatgcagtacatgtatttcaaagctgaaccttatgctgcagatgaaggttctggggaaggacataaatggttgatggtgcatgttgataaaagaattactctggcagctttcaaacaacatttagagccctttgttggagttttgtcctctcacttcaaggtctttcgagtgtatgccagcaatcaagagtttgagagcgtccggctgaatgagacactttcatcattttctgatgacaataagattacaattagactggggagagcacttaaaaaaggagaatacagagttaaagtataccagcttttggtcaatgaacaagagccatgcaagtttctgctagatgctgtgtttgctaaaggaatgactgtacggcaatcaaaagaggaattaattcctcagctcagggagcaatgtggtttagagctcagtattgacaggtttcgtctaaggaaaaaaacatggaagaatcctggcactgtctttttggattatcatatttatgaagaagatattaatatttccagcaactgggaggttttccttgaagttcttgatggggtagagaagatgaagtccatgtcacagcttgcagttttgtcaagacggtggaagccttcagagatgaagttggatcccttccaggaggttgtattggaaagcagtagtgtggacgaattgcgagagaagcttagtgaaatcagtgggattcctttggatgatattgaatttgctaagggtagaggaacatttccctgtgatatttctgtccttgatattcatcaagatttagactggaatcctaaagtttctaccctgaatgtctggcctctttatatctgtgatgatggtgcggtcatattttatagggataaaacagaagaattaatggaattgacagatgagcaaagaaatgaactgatgaaaaaagaaagcagtcgactccagaagactggacatcgtgtaacatactcacctcgtaaagagaaagcactaaaaatatatctggatggagcaccaaataaagatctgactcaagactgactctgatagtgtagcattttccctgggggagttttggttttaattagatggttcactaccactgggtagtgccattttggccggacatggttggggtaacccagtgacaccagcactgattggactgccctacaccaatcagaagctcagtgcccaatgggccactgttttgactcggaatcatgttgtgcactatagtcaaatgtactgtaaagtgaaaagggatgtgcaaaaaaataaaaaaaaacaacaaaaaaagctaaccttctattagaaaaggggacaggggaatgagtaaacttcttttattgcggacaaatgtgcacatagccgctagtaaaactagcctcaaacaggatgctcatagcttaataataaaagctgtgcaaaggccatgaatgaatgaattttctgtttatttcactgatgcacacattacctcattgacaattcagaagtaaatccaacgtgtgttgactcttggaaagcagcaaaaacaggagctgaagaaaagaaattcttggaaccagccgtaacccagtaaggaattgtgaagttgtgtttttattttgtttcattttttgcagagtattaagaacattattctggaacatcagaacgtttcccttagaccgatcccagcaggtggcagctcagattgctgcagtgttgtaattataactgattgtacttaagttatggatgtagagaatatgtttcattcatttattcagcatgtaaataaaattgatcctgttgagttatcataattgcagttcaactatctgccatgattattcttttcacgtatcattcattctgtacatttgtgtacattgagaagtatagcaatctatgtaaatgtaatcctcagtgaggttcctcagtgctaggtcccataggattgtcgttgcccttgttaatgaggtttctctgttcagcggcttcaatttttttctctttgtacatctagttttgaagatttacttcaagtttgaatcttctagaatgcttgtaagtccagttttaatttttagagtcaatttgtagttacatgtagtttaacttttgggaaacgtcttaacattgttctgaataaacttgctaatgaggtcaggtcatggtacagactgatgcagtcaacatgatttcattgcagagtttattagtatcagcaagtttttgctttgctaaataaaagtactcaatgaacacaattctacataaattttgacataccatctaatttataaaaatcaataaaaaaggttttggtaaaactttttcatgccagatgctgtttacaacaatgaacatgccaataaaacatttgttcattctgttgtgttattttagtcattaaacttctgtggatgaagaatctgggttaagaatagatttgtcatctttaaatatgacattttgtaatgtgtattggatatctcatttctatgataaaggtatatttacagtaaagttctcataagagaaatgaaaagctgtgttaatatctaactttggggaaccctgtcagtatttcagatccgatttttaccctttttttcttataagaaagataaaattagaaaatactgttagcaaatgtggctctgccatttgaatataatcaccgagaattccatgtcttaaaagtctcctggaatccacaatgaaaaaaaaaatcttttctaaggtatttttctggctaatttttatttgaagaaagctatagcatttagcgaaatttgactgaagtaatgttctgagtttgcattagtgggattggtgatgttctcagaagaaaattggaaacacttgtgatgaattgtctttcagatcacttagattttctgatgtaagaggacagctntttggttctgatacaggcctgcttacttgggatgtagggttagtaaatggggtttctgctttaaaggactgacttgctatcgcacaaaagaggcagacttgtaaacacaatgggctttggagtttggtctgattgggtttggtttagtattcctatgagcgtaaatggtaaaattcttctgatacccactctttagactgtgccttctgctctgttctttgttttatgtttaactgctgtttctaattgcaggtgtattacagatacaaataagagtaaagaaaatatatttcattatagaaaagaaaaaattaaaagcttcttgcttttcagtgcctgatagagtgaaaacacaaagttgcactttaataatttcaataaaagctaatctgtgtcagcctccctctgcttcagagagtcaggtgagcatccataacctaacaggcagagccctagcgatgtggatcaagtttcctgagcccgggggcggtggagcctcatgatctcttatcttttgaggctgaggcaggtcacatgcaacaaattgtgaccctgctccccacaagtcatgcaaaggttttgaagagcttttaccgtggggcagatgaacttgtgtcaaccatgcacaccctgtgagaaccaagtacctgtgtttctaaggcgggcactcaaggtgaggggtgcattctggccaaagaaacaaaagctgtggtttcaggaccatgccgtgtgtagctgatctgtacgggacgtgtatgtaaggaagagcaatcatgatagataagaacagtgtgtgaagcagccctcacactagagtgtttggtcatctcttataatgtaagggaaggtactttaaaattctgggaagatgcgatgaactcatgtcccagtcagaaaataatccaatgaaataagcattggttgccaggccacagttaggaattgtattgtgatacatctagaggccaagagagcaggagagagctaccaacttacactgtggtttaagctaaatgaccgcacagcatcatagcattgcagtgtattctggttcatttgctagtacttcctttttgattggatactgtagttcttcctctggattttattttgttcagcgtcaaggccctaattttgcaaatgtagtctaaaccacattacgtggactagaggatactctgaattagcaagttttttgtttgctgaataaaactattccatcttaacaattctgtgtaatttttgaaaaacatcaacattttggtcactagtagtccaaaatcttataaggcccatatgtcctgaaaggcaaaactctgtgtatgtgccgatttaccagggagatagtaggacagtttttatgagggtttcaaaggagttcatggcccaaatgaagcttgtggcccacctaggtttagtgtacatgaaattggaagatgcttcttgattgtagttcccatggggaagagggaggctgtgatcatttggttagatacagcattaattgtcacaacttgactttcagaaacaagaatactgcacaaactcaagcatgcattggagcatgtgttactatttagaaaagagtgcagccatcagtaggtcaagctaggagggcaaaagagagttgagaggaatgctctgccccttccccatcacagcactgcccctttccacctcctcaccagctcacctgtacaagagaattgatctcaactgagtgtcagctcaccaggtcagaaattgttattggaccctaaaaccttgcctcacaggtgggcaccaagctccccttccctctgctttccatgtttcccacctgccctctccccacctgttttcagcctcttttataatgcttaagtaacctgcttgaagagtataatttatggagataaaaatactcaatgcttacatttttttcataactgtgccaattgttttgtcaaatgcagttacccactgggcagtgggcttatcaagtgctcagtgcaatcctgtgacttttaagtcattttgcattattaagacaatcttatcttaaagttcagtggtttc

SEQ ID NO: 79628 - DNA, 8247 bp, Homo sapiens
  misc_feature (6135)..(6135): n is a, c, g, or t
acgacgaaggcggctgtggtagcggcggcggcggcggcggagccctgggtcggtgtctgcgcgctggtgtctgaggcccaggctgaggcctccgctattgctggagcgcaggcggcggagaggatgactgccgctgccattctctcttgagctagcgagccgccgccaccctccaccctcccccggcagggcggagaggagcggccggagtcagcgatggtgcccggcgaggagaaccaactggtcccgaaagagatagaaaatgctgctgaagaacctagagtcttatgtattatacaagatactactaattcaaagacagtgaatgaacggatcactttaaatttaccagcatctactccagtcagaaagctctttgaagatgtggccaacaaagtaggctacataaatggaacctttgacttggtgtggggaaatggaatcaatactgctgatatggcaccactggatcataccagtgacaagtcacttctcgacgctaattttgagccaggaaagaagaactttctgcatttgacagataaagatggtgaacaacctcaaatactgctggaggattccagtgctggggaagacagtgttcatgacaggtttataggtccgcttccaagagaaggttctgtgggttctaccagtgattatgtcagccaaagctactcctactcatctattttgaataaatcagaaactggatatgtgggactagtaaaccaagcaatgacttgctatttgaatagccttttgcaaacactttttatgactcctgaatttaggaatgcattatataagtgggaatttgaagaatctgaagaagatccagtgacaagtattccataccaacttcaaaggctttttgttttgttacaaaccagcaaaaagagagcaattgaaaccacagatgttacaaggagctttggatgggatagtagtgaggcttggcagcagcatgatgtacaagaactatgcagagtcatgtttgatgctttggaacagaaatggaagcaaacagaacaggctgatcttataaatgagctatatcaaggcaagctgaaggactacgtgagatgtctggaatgtggttatgagggctggcgaatcgacacatatcttgatatcccattggtcatccgaccttatgggtccagccaagcatttgctagtgtggaagaagcattgcatgcatttattcagccagagattctggatggcccaaatcagtatttttgtgaacgttgtaagaagaagtgtgatgcacggaagggccttcggtttttgcattttccttatctgctgaccttacagctgaaaagattcgattttgattatacaaccatgcataggattaaactgaatgatcgaatgacatttcccgaggaactagatatgagtacttttattgatgttgaagatgagaaatctcctcagactgaaagttgcactgacagtggagcagaaaatgaaggtagttgtcacagtgatcagatgagcaacgatttctccaatgatgatggtgttgatgaaggaatctgtcttgaaaccaatagtggaactgaaaagatctcaaaatctggacttgaaaagaattccttgatctatgaacttttctctgttatggctcattctgggagcgctgctggtggtcattattatgcatgtataaagtcattcagtgatgagcagtggtacagcttcgatgatcaacatgtcagcaggataacacaagaggacattaagaaaacacatggtggatcttcaggaagcagaggatattattctagtgctttcgcaagttccacaaatgcatatatgctgatctatagactgaaggatccagccagaaatgcaaaatttctagaagtgggtgaatacccagaacatattaaaaacttggtgcagaaagagagagagttggaagaacaagaaaagagacaacgagaaattgagcgcaatacatgcaagataaaattattctgtttgcatcctacaaaacaagtaatgatggaaaataaattggaggttcataaggataagacattaaaggaagcagtagaaatggcttataagatgatggatttagaagaggtaatacccctggattgctgtcgccttgttaaatatgatgagtttcatgattatctagaacggtcatatgaaggagaagaagatacaccaatggggcttctactaggtggcgtcaagtcaacatatatgtttgatctgctgttggagacgagaaagcctgatcaggttttccaatcttataaacctggagaagtgatggtgaaagttcatgttgttgatctaaaggcagaatctgtagctgctcctataactgttcgtgcttacttaaatcagacagttacagaattcaaacaactgatttcaaaggccatccatttacctgctgaaacaatgagaatagtgctggaacgctgctacaatgatttgcgtcttctcagtgtctccagtaaaaccctgaaagctgaaggattttttagaagtaacaaggtgtttgttgaaagctccgagactttggattaccagatggcctttgcagactctcatttatggaaactcctggatcggcatgcaaatacaatcagattatttgttttgctacctgaacaatccccagtatcttattccaaaaggacagcataccagaaagctggaggcgattctggtaatgtggatgatgactgtgaaagagtcaaaggacctgtaggaagcctaaagtctgtggaagctattctagaagaaagcactgaaaaactcaaaagcttgtcactgcagcaacagcaggatggagataatggggacagcagcaaaagtactgagacaagtgactttgaaaacatcgaatcacctctcaatgagagggactcttcagcatcagtggataatagagaacttgaacagcatattcagacttctgatccagaaaattttcagtctgaagaacgatcagactcagatgtgaataatgacaggagtacaagttcagtggacagtgatattcttagctccagtcatagcagtgatactttgtgcaatgcagacaatgctcagatccctttggctaatggacttgactctcacagtatcacaagtagtagaagaacgaaagcaaatgaagggaaaaaagaaacatgggatacagcagaagaagactctggaactgatagtgaatatgatgagagtggcaagagtaggggagaaatgcagtacatgtatttcaaagctgaaccttatgctgcagatgaaggttctggggaaggacataaatggttgatggtgcatgttgataaaagaattactctggcagctttcaaacaacatttagagccctttgttggagttttgtcctctcacttcaaggtctttcgagtgtatgccagcaatcaagagtttgagagcgtccggctgaatgagacactttcatcattttctgatgacaataagattacaattagactggggagagcacttaaaaaaggagaatacagagttaaagtataccagcttttggtcaatgaacaagagccatgcaagtttctgctagatgctgtgtttgctaaaggaatgactgtacggcaatcaaaagaggaattaattcctcagctcagggagcaatgtggtttagagctcagtattgacaggtttcgtctaaggaaaaaaacatggaagaatcctggcactgtctttttggattatcatatttatgaagaagatattaatatttccagcaactgggaggttttccttgaagttcttgatggggtagagaagatgaagtccatgtcacagcttgcagttttgtcaagacggtggaagccttcagagatgaagttggatcccttccaggaggttgtattggaaagcagtagtgtggacgaattgcgagagaagcttagtgaaatcagtgggattcctttggatgatattgaatttgctaagggtagaggaacatttccctgtgatatttctgtccttgatattcatcaagatttagactggaatcctaaagtttctaccctgaatgtctggcctctttatatctgtgatgatgggataaaacagaagaattaatggaattgacagatgagcaaagaaatgaactgatgaaaaaagaaagcagtcgactccagaagactggacatcgtgtaacatactcacctcgtaaagagaaagcactaaaaatatatctggatggagcaccaaataaagatctgactcaagactgactctgatagtgtagcattttccctgggggagttttggttttaattagatggttcactaccactgggtagtgccattttggccggacatggttggggtaacccagtgacaccagcactgattggactgccctacaccaatcagaagctcagtgcccaatgggccactgttttgactcggaatcatgttgtgcactatagtcaaatgtactgtaaagtgaaaagggatgtgcaaaaaaataaaaaaaaacaacaaaaaaagctaaccttctattagaaaaggggacaggggaatgagtaaacttcttttattgcggacaaatgtgcacatagccgctagtaaaactagcctcaaacaggatgctcatagcttaataataaaagctgtgcaaaggccatgaatgaatgaattttctgtttatttcactgatgcacacattacctcattgacaattcagaagtaaatccaacgtgtgttgactcttggaaagcagcaaaaacaggagctgaagaaaagaaattcttggaaccagccgtaacccagtaaggaattgtgaagttgtgtttttattttgtttcattttttgcagagtattaagaacattattctggaacatcagaacgtttcccttagaccgatcccagcaggtggcagctcagattgctgcagtgttgtaattataactgattgtacttaagttatggatgtagagaatatgtttcattcatttattcagcatgtaaataaaattgatcctgttgagttatcataattgcagttcaactatctgccatgattattcttttcacgtatcattcattctgtacatttgtgtacattgagaagtatagcaatctatgtaaatgtaatcctcagtgaggttcctcagtgctaggtcccataggattgtcgttgcccttgttaatgaggtttctctgttcagcggcttcaatttttttctctttgtacatctagttttgaagatttacttcaagtttgaatcttctagaatgcttgtaagtccagttttaatttttagagtcaatttgtagttacatgtagtttaacttttgggaaacgtcttaacattgttctgaataaacttgctaatgaggtcaggtcatggtacagactgatgcagtcaacatgatttcattgcagagtttattagtatcagcaagtttttgctttgctaaataaaagtactcaatgaacacaattctacataaattttgacataccatctaatttataaaaatcaataaaaaaggttttggtaaaactttttcatgccagatgctgtttacaacaatgaacatgccaataaaacatttgttcattctgttgtgttattttagtcattaaacttctgtggatgaagaatctgggttaagaatagatttgtcatctttaaatatgacattttgtaatgtgtattggatatctcatttctatgataaaggtatatttacagtaaagttctcataagagaaatgaaaagctgtgttaatatctaactttggggaaccctgtcagtatttcagatccgatttttaccctttttttcttataagaaagataaaattagaaaatactgttagcaaatgtggctctgccatttgaatataatcaccgagaattccatgtcttaaaagtctcctggaatccacaatgaaaaaaaaaatcttttctaaggtatttttctggctaatttttatttgaagaaagctatagcatttagcgaaatttgactgaagtaatgttctgagtttgcattagtgggattggtgatgttctcagaagaaaattggaaacacttgtgatgaattgtctttcagatcacttagattttctgatgtaagaggacagctntttggttctgatacaggcctgcttacttgggatgtagggttagtaaatggggtttctgctttaaaggactgacttgctatcgcacaaaagaggcagacttgtaaacacaatgggctttggagtttggtctgattgggtttggtttagtattcctatgagcgtaaatggtaaaattcttctgatacccactctttagactgtgccttctgctctgttctttgttttatgtttaactgctgtttctaattgcaggtgtattacagatacaaataagagtaaagaaaatatatttcattatagaaaagaaaaaattaaaagcttcttgcttttcagtgcctgatagagtgaaaacacaaagttgcactttaataatttcaataaaagctaatctgtgtcagcctccctctgcttcagagagtcaggtgagcatccataacctaacaggcagagccctagcgatgtggatcaagtttcctgagcccgggggcggtggagcctcatgatctcttatcttttgaggctgaggcaggtcacatgcaacaaattgtgaccctgctccccacaagtcatgcaaaggttttgaagagcttttaccgtggggcagatgaacttgtgtcaaccatgcacaccctgtgagaaccaagtacctgtgtttctaaggcgggcactcaaggtgaggggtgcattctggccaaagaaacaaaagctgtggtttcaggaccatgccgtgtgtagctgatctgtacgggacgtgtatgtaaggaagagcaatcatgatagataagaacagtgtgtgaagcagccctcacactagagtgtttggtcatctcttataatgtaagggaaggtactttaaaattctgggaagatgcgatgaactcatgtcccagtcagaaaataatccaatgaaataagcattggttgccaggccacagttaggaattgtattgtgatacatctagaggccaagagagcaggagagagctaccaacttacactgtggtttaagctaaatgaccgcacagcatcatagcattgcagtgttgttactaaatctggaagtgacctgtgaatgtatggaatacaataaagtcttttattctggttcatttgctagtacttcctttttgattggatactgtagttcttcctctggattttattttgttcagcgtcaaggccctaattttgcaaatgtagtctaaaccacattacgtggactagaggatactctgaattagcaagttttttgtttgctgaataaaactattccatcttaacaattctgtgtaatttttgaaaaacatcaacattttggtcactagtagtccaaaatcttataaggcccatatgtcctgaaaggcaaaactctgtgtatgtgccgatttaccagggagatagtaggacagtttttatgagggtttcaaaggagttcatggcccaaatgaagcttgtggcccacctaggtttagtgtacatgaaattggaagatgcttcttgattgtagttcccatggggaagagggaggctgtgatcatttggttagatacagcattaattgtcacaacttgactttcagaaacaagaatactgcacaaactcaagcatgcattggagcatgtgttactatttagaaaagagtgcagccatcagtaggtcaagctaggagggcaaaagagagttgagaggaatgctctgccccttccccatcacagcactgcccctttccacctcctcaccagctcacctgtacaagagaattgatctcaactgagtgtcagctcaccaggtcagaaattgttattggaccctaaaaccttgcctcacaggtgggcaccaagctccccttccctctgctttccatgtttcccacctgccctctccccacctgttttcagcctcttttataatgcttaagtaacctgcttgaagagtataatttatggagataaaaatactcaatgcttacatttttttcataactgtgccaattgttttgtcaaatgcagttacccactgggcagtgggcttatcaagtgctcagtgcaatcctgtgacttttaagtcattttgcattattaagacaatcttatcttaaagttcagtggtttc

SEQ ID NO: 79629 - DNA, 4104 bp, Homo sapiens
  misc_feature (1992)..(1992): n is a, c, g, or t
gcggccgcccccggggagcccggcgggcgccggcgcgcccccccccacccccaccccacgtctcgtcgcgcgcgcgtccgcatctggatggagcaccaaataaagatctgactcaagactgactctgatagtgtagcattttccctgggggagttttggttttaattagatggttcactaccactgggtagtgccattttggccggacatggttggggtaacccagtgacaccagcactgattggactgccctacaccaatcagaagctcagtgcccaatgggccactgttttgactcggaatcatgttgtgcactatagtcaaatgtactgtaaagtgaaaagggatgtgcaaaaaaataaaaaaaaacaacaaaaaaagctaaccttctattagaaaaggggacaggggaatgagtaaacttcttttattgcggacaaatgtgcacatagccgctagtaaaactagcctcaaacaggatgctcatagcttaataataaaagctgtgcaaaggccatgaatgaatgaattttctgtttatttcactgatgcacacattacctcattgacaattcagaagtaaatccaacgtgtgttgactcttggaaagcagcaaaaacaggagctgaagaaaagaaattcttggaaccagccgtaacccagtaaggaattgtgaagttgtgtttttattttgtttcattttttgcagagtattaagaacattattctggaacatcagaacgtttcccttagaccgatcccagcaggtggcagctcagattgctgcagtgttgtaattataactgattgtacttaagttatggatgtagagaatatgtttcattcatttattcagcatgtaaataaaattgatcctgttgagttatcataattgcagttcaactatctgccatgattattcttttcacgtatcattcattctgtacatttgtgtacattgagaagtatagcaatctatgtaaatgtaatcctcagtgaggttcctcagtgctaggtcccataggattgtcgttgcccttgttaatgaggtttctctgttcagcggcttcaatttttttctctttgtacatctagttttgaagatttacttcaagtttgaatcttctagaatgcttgtaagtccagttttaatttttagagtcaatttgtagttacatgtagtttaacttttgggaaacgtcttaacattgttctgaataaacttgctaatgaggtcaggtcatggtacagactgatgcagtcaacatgatttcattgcagagtttattagtatcagcaagtttttgctttgctaaataaaagtactcaatgaacacaattctacataaattttgacataccatctaatttataaaaatcaataaaaaaggttttggtaaaactttttcatgccagatgctgtttacaacaatgaacatgccaataaaacatttgttcattctgttgtgttattttagtcattaaacttctgtggatgaagaatctgggttaagaatagatttgtcatctttaaatatgacattttgtaatgtgtattggatatctcatttctatgataaaggtatatttacagtaaagttctcataagagaaatgaaaagctgtgttaatatctaactttggggaaccctgtcagtatttcagatccgatttttaccctttttttcttataagaaagataaaattagaaaatactgttagcaaatgtggctctgccatttgaatataatcaccgagaattccatgtcttaaaagtctcctggaatccacaatgaaaaaaaaaatcttttctaaggtatttttctggctaatttttatttgaagaaagctatagcatttagcgaaatttgactgaagtaatgttctgagtttgcattagtgggattggtgatgttctcagaagaaaattggaaacacttgtgatgaattgtctttcagatcacttagattttctgatgtaagaggacagctntttggttctgatacaggcctgcttacttgggatgtagggttagtaaatggggtttctgctttaaaggactgacttgctatcgcacaaaagaggcagacttgtaaacacaatgggctttggagtttggtctgattgggtttggtttagtattcctatgagcgtaaatggtaaaattcttctgatacccactctttagactgtgccttctgctctgttctttgttttatgtttaactgctgtttctaattgcaggtgtattacagatacaaataagagtaaagaaaatatatttcattatagaaaagaaaaaattaaaagcttcttgcttttcagtgcctgatagagtgaaaacacaaagttgcactttaataatttcaataaaagctaatctgtgtcagcctccctctgcttcagagagtcaggtgagcatccataacctaacaggcagagccctagcgatgtggatcaagtttcctgagcccgggggcggtggagcctcatgatctcttatcttttgaggctgaggcaggtcacatgcaacaaattgtgaccctgctccccacaagtcatgcaaaggttttgaagagcttttaccgtggggcagatgaacttgtgtcaaccatgcacaccctgtgagaaccaagtacctgtgtttctaaggcgggcactcaaggtgaggggtgcattctggccaaagaaacaaaagctgtggtttcaggaccatgccgtgtgtagctgatctgtacgggacgtgtatgtaaggaagagcaatcatgatagataagaacagtgtgtgaagcagccctcacactagagtgtttggtcatctcttataatgtaagggaaggtactttaaaattctgggaagatgcgatgaactcatgtcccagtcagaaaataatccaatgaaataagcattggttgccaggccacagttaggaattgtattgtgatacatctagaggccaagagagcaggagagagctaccaacttacactgtggtttaagctaaatgaccgcacagcatcatagcattgcagtgttgttactaaatctggaagtgacctgtgaatgtatggaatacaataaagtcttttattctggttcatttgctagtacttcctttttgattggatactgtagttcttcctctggattttattttgttcagcgtcaaggccctaattttgcaaatgtagtctaaaccacattacgtggactagaggatactctgaattagcaagttttttgtttgctgaataaaactattccatcttaacaattctgtgtaatttttgaaaaacatcaacattttggtcactagtagtccaaaatcttataaggcccatatgtcctgaaaggcaaaactctgtgtatgtgccgatttaccagggagatagtaggacagtttttatgagggtttcaaaggagttcatggcccaaatgaagcttgtggcccacctaggtttagtgtacatgaaattggaagatgcttcttgattgtagttcccatggggaagagggaggctgtgatcatttggttagatacagcattaattgtcacaacttgactttcagaaacaagaatactgcacaaactcaagcatgcattggagcatgtgttactatttagaaaagagtgcagccatcagtaggtcaagctaggagggcaaaagagagttgagaggaatgctctgccccttccccatcacagcactgcccctttccacctcctcaccagctcacctgtacaagagaattgatctcaactgagtgtcagctcaccaggtcagaaattgttattggaccctaaaaccttgcctcacaggtgggcaccaagctccccttccctctgctttccatgtttcccacctgccctctccccacctgttttcagcctcttttataatgcttaagtaacctgcttgaagagtataatttatggagataaaaatactcaatgcttacatttttttcataactgtgccaattgttttgtcaaatgcagttacccactgggcagtgggcttatcaagtgctcagtgcaatcctgtgacttttaagtcattttgcattattaagacaatcttatcttaaagttcagtggtttc

SEQ ID NO: 79630 - DNA, 5625 bp, Homo sapiens
acgacgaaggcggctgtggtagcggcggcggcggcggcggagccctgggtcggtgtctgcgcgctggtgtctgaggcccaggctgaggcctccgctattgctggagcgcaggcggcggagaggatgactgccgctgccattctctcttgagctagcgagccgccgccaccctccaccctcccccggcagggcggagaggagcggccggagtcagcgatggtgcccggcgaggagaaccaactggtcccgaaagagatagaaaatgctgctgaagaacctagagtcttatgtattatacaagatactactaattcaaagacagtgaatgaacggatcactttaaatttaccagcatctactccagtcagaaagctctttgaagatgtggccaacaaagtaggctacataaatggaacctttgacttggtgtggggaaatggaatcaatactgctgatatggcaccactggatcataccagtgacaagtcacttctcgacgctaattttgagccaggaaagaagaactttctgcatttgacagataaagatggtgaacaacctcaaatactgctggaggattccagtgctggggaagacagtgttcatgacaggtttataggtccgcttccaagagaaggttctgtgggttctaccagtgattatgtcagccaaagctactcctactcatctattttgaataaatcagaaactggatatgtgggactagtaaaccaagcaatgacttgctatttgaatagccttttgcaaacactttttatgactcctgaatttaggaatgcattatataagtgggaatttgaagaatctgaagaagatccagtgacaagtattccataccaacttcaaaggctttttgttttgttacaaaccagcaaaaagagagcaattgaaaccacagatgttacaaggagctttggatgggatagtagtgaggcttggcagcagcatgatgtacaagaactatgcagagtcatgtttgatgctttggaacagaaatggaagcaaacagaacaggctgatcttataaatgagctatatcaaggcaagctgaaggactacgtgagatgtctggaatgtggttatgagggctggcgaatcgacacatatcttgatatcccattggtcatccgaccttatgggtccagccaagcatttgctagtgtggaagaagcattgcatgcatttattcagccagagattctggatggcccaaatcagtatttttgtgaacgttgtaagaagaagtgtgatgcacggaagggccttcggtttttgcattttccttatctgctgaccttacagctgaaaagattcgattttgattatacaaccatgcataggattaaactgaatgatcgaatgacatttcccgaggaactagatatgagtacttttattgatgttgaagatgagaaatctcctcagactgaaagttgcactgacagtggagcagaaaatgaaggtagttgtcacagtgatcagatgagcaacgatttctccaatgatgatggtgttgatgaaggaatctgtcttgaaaccaatagtggaactgaaaagatctcaaaatctggacttgaaaagaattccttgatctatgaacttttctctgttatggctcattctgggagcgctgctggtggtcattattatgcatgtataaagtcattcagtgatgagcagtggtacagcttcgatgatcaacatgtcagcaggataacacaagaggacattaagaaaacacatggtggatcttcaggaagcagaggatattattctagtgctttcgcaagttccacaaatgcatatatgctgatctatagactgaaggatccagccagaaatgcaaaatttctagaagtgggtgaatacccagaacatattaaaaacttggtgcagaaagagagagagttggaagaacaagaaaagagacaacgagaaattgagcgcaatacatgcaagataaaattattctgtttgcatcctacaaaacaagtaatgatggaaaataaattggaggttcataaggataagacattaaaggaagcagtagaaatggcttataagatgatggatttagaagaggtaatacccctggattgctgtcgccttgttaaatatgatgagtttcatgattatctagaacggtcatatgaaggagaagaagatacaccaatggggcttctactaggtggcgtcaagtcaacatatatgtttgatctgctgttggagacgagaaagcctgatcaggttttccaatcttataaacctggagaagtgatggtgaaagttcatgttgttgatctaaaggcagaatctgtagctgctcctataactgttcgtgcttacttaaatcagacagttacagaattcaaacaactgatttcaaaggccatccatttacctgctgaaacaatgagaatagtgctggaacgctgctacaatgatttgcgtcttctcagtgtctccagtaaaaccctgaaagctgaaggattttttagaagtaacaaggtgtttgttgaaagctccgagactttggattaccagatggcctttgcagactctcatttatggaaactcctggatcggcatgcaaatacaatcagattatttgttttgctacctgaacaatccccagtatcttattccaaaaggacagcataccagaaagctggaggcgattctggtaatgtggatgatgactgtgaaagagtcaaaggacctgtaggaagcctaaagtctgtggaagctattctagaagaaagcactgaaaaactcaaaagcttgtcactgcagcaacagcaggatggagataatggggacagcagcaaaagtactgagacaagtgactttgaaaacatcgaatcacctctcaatgagagggactcttcagcatcagtggataatagagaacttgaacagcatattcagacttctgatccagaaaattttcagtctgaagaacgatcagactcagatgtgaataatgacaggagtacaagttcagtggacagtgatattcttagctccagtcatagcagtgatactttgtgcaatgcagacaatgctcagatccctttggctaatggacttgactctcacagtatcacaagtagtagaagaacgaaagcaaatgaagggaaaaaagaaacatgggatacagcagaagaagactctggaactgatagtgaatatgatgagagtggcaagagtaggggagaaatgcagtacatgtatttcaaagctgaaccttatgctgcagatgaaggttctggggaaggacataaatggttgatggtgcatgttgataaaagaattactctggcagctttcaaacaacatttagagccctttgttggagttttgtcctctcacttcaaggtctttcgagtgtatgccagcaatcaagagtttgagagcgtccggctgaatgagacactttcatcattttctgatgacaataagattacaattagactggggagagcacttaaaaaaggagaatacagagttaaagtataccagcttttggtcaatgaacaagagccatgcaagtttctgctagatgctgtgtttgctaaaggaatgactgtacggcaatcaaaagaggaattaattcctcagctcagggagcaatgtggtttagagctcagtattgacaggtttcgtctaaggaaaaaaacatggaagaatcctggcactgtctttttggattatcatatttatgaagaagatattaatatttccagcaactgggaggttttccttgaagttcttgatggggtagagaagatgaagtccatgtcacagcttgcagttttgtcaagacggtggaagccttcagagatgaagttggatcccttccaggaggttgtattggaaagcagtagtgtggacgaattgcgagagaagcttagtgaaatcagtgggattcctttggatgatattgaatttgctaagggtagaggaacatttccctgtgatatttctgtccttgatattcatcaagatttagactggaatcctaaagtttctaccctgaatgtctggcctctttatatctgtgatgatggtgcggtcatattttatagggataaaacagaagaattaatggaattgacagatgagcaaagaaatgaactgatgaaaaaagaaagcagtcgactccagaagactggacatcgtgtaacatactcacctcgtaaagagaaagcactaaaaatatatctggatggagcaccaaataaagatctgactcaagactgactctgatagtgtagcattttccctgggggagttttggttttaattagatggttcactaccactgggtagtgccattttggccggacatggttggggtaacccagtgacaccagcactgattggactgccctacaccaatcagaagctcagtgcccaatgggccactgttttgactcggaatcatgttgtgcactatagtcaaatgtactgtaaagtgaaaagggatgtgcaaaaaaataaaaaaaaacaacaaaaaaagctaaccttctattagaaaaggggacaggggaatgagtaaacttcttttattgcggacaaatgtgcacatagccgctagtaaaactagcctcaaacaggatgctcatagcttaataataaaagctgtgcaaaggccatgaatgaatgaattttctgtttatttcactgatgcacacattacctcattgacaattcagaagtaaatccaacgtgtgttgactcttggaaagcagcaaaaacaggagctgaagaaaagaaattcttggaaccagccgtaacccagtaaggaattgtgaagttgtgtttttattttgtttcattttttgcagagtattaagaacattattctggaacatcagaacgtttcccttagaccgatcccagcaggtggcagctcagattgctgcagtgttgtaattataactgattgtacttaagttatggatgtagagaatatgtttcattcatttattcagcatgtaaataaaattgatcctgttgagttatcataattgcagttcaactatctgccatgattattcttttcacgtatcattcattctgtacatttgtgtacattgagaagtatagcaatctatgtaaatgtaatcctcagtgaggttcctcagtgctaggtcccataggattgtcgttgcccttgttaatgaggtttctctgttcagcggcttcaatttttttctctttgtacatctagttttgaagatttacttcaagtttgaatcttctagaatgcttgtaagtccagttttaatttttagagtcaatttgtagttacatgtagtttaacttttgggaaacgtcttaacattgttctgaataaacttgctaatgaggtcaggtcatggtacagactgatgcagtcaacatgatttcattgcagagtttattagtatcagcaagtttttgctttgctaaataaaagtactcaatgaacacaattctacataaattttgacataccatctaatttataaaaatcaataaaaaaggttttggtaaaactttttcatgccagatgctgtttacaacaatgaacatgccaataaaacatttgttcattct

SEQ ID NO: 79631 - DNA, 5880 bp, Homo sapiens
acgacgaaggcggctgtggtagcggcggcggcggcggcggagccctgggtcggtgtctgcgcgctggtgtctgaggcccaggctgaggcctccgctattgctggagcgcaggcggcggagaggatgactgccgctgccattctctcttgagctagcgagccgccgccaccctccaccctcccccggcagggcggagaggagcggccggagtcagcgatggtgcccggcgaggagaaccaactggtcccgaaagagatagaaaatgctgctgaagaacctagagtcttatgtattatacaagatactactaattcaaagacagtgaatgaacggatcactttaaatttaccagcatctactccagtcagaaagctctttgaagatgtggccaacaaagtaggctacataaatggaacctttgacttggtgtggggaaatggaatcaatactgctgatatggcaccactggatcataccagtgacaagtcacttctcgacgctaattttgagccaggaaagaagaactttctgcatttgacagataaagatggtgaacaacctcaaatactgctggaggattccagtgctggggaagacagtgttcatgacaggtttataggtccgcttccaagagaaggttctgtgggttctaccagtgattatgtcagccaaagctactcctactcatctattttgaataaatcagaaactggatatgtgggactagtaaaccaagcaatgacttgctatttgaatagccttttgcaaacactttttatgactcctgaatttaggaatgcattatataagtgggaatttgaagaatctgaagaagatccagtgacaagtattccataccaacttcaaaggctttttgttttgttacaaaccagcaaaaagagagcaattgaaaccacagatgttacaaggagctttggatgggatagtagtgaggcttggcagcagcatgatgtacaagaactatgcagagtcatgtttgatgctttggaacagaaatggaagcaaacagaacaggctgatcttataaatgagctatatcaaggcaagctgaaggactacgtgagatgtctggaatgtggttatgagggctggcgaatcgacacatatcttgatatcccattggtcatccgaccttatgggtccagccaagcatttgctagtgtggaagaagcattgcatgcatttattcagccagagattctggatggcccaaatcagtatttttgtgaacgttgtaagaagaagtgtgatgcacggaagggccttcggtttttgcattttccttatctgctgaccttacagctgaaaagattcgattttgattatacaaccatgcataggattaaactgaatgatcgaatgacatttcccgaggaactagatatgagtacttttattgatgttgaagatgagaaatctcctcagactgaaagttgcactgacagtggagcagaaaatgaaggtagttgtcacagtgatcagatgagcaacgatttctccaatgatgatggtgttgatgaaggaatctgtcttgaaaccaatagtggaactgaaaagatctcaaaatctggacttgaaaagaattccttgatctatgaacttttctctgttatggctcattctgggagcgctgctggtggtcattattatgcatgtataaagtcattcagtgatgagcagtggtacagcttcgatgatcaacatgtcagcaggataacacaagaggacattaagaaaacacatggtggatcttcaggaagcagaggatattattctagtgctttcgcaagttccacaaatgcatatatgctgatctatagactgaaggatccagccagaaatgcaaaatttctagaagtgggtgaatacccagaacatattaaaaacttggtgcagaaagagagagagttggaagaacaagaaaagagacaacgagaaattgagcgcaatacatgcaagataaaattattctgtttgcatcctacaaaacaagtaatgatggaaaataaattggaggttcataaggataagacattaaaggaagcagtagaaatggcttataagatgatggatttagaagaggtaatacccctggattgctgtcgccttgttaaatatgatgagtttcatgattatctagaacggtcatatgaaggagaagaagatacaccaatggggcttctactaggtggcgtcaagtcaacatatatgtttgatctgctgttggagacgagaaagcctgatcaggttttccaatcttataaacctggagaagtgatggtgaaagttcatgttgttgatctaaaggcagaatctgtagctgctcctataactgttcgtgcttacttaaatcagacagttacagaattcaaacaactgatttcaaaggccatccatttacctgctgaaacaatgagaatagtgctggaacgctgctacaatgatttgcgtcttctcagtgtctccagtaaaaccctgaaagctgaaggattttttagaagtaacaaggtgtttgttgaaagctccgagactttggattaccagatggcctttgcagactctcatttatggaaactcctggatcggcatgcaaatacaatcagattatttgttttgctacctgaacaatccccagtatcttattccaaaaggacagcataccagaaagctggaggcgattctggtaatgtggatgatgactgtgaaagagtcaaaggacctgtaggaagcctaaagtctgtggaagctattctagaagaaagcactgaaaaactcaaaagcttgtcactgcagcaacagcaggatggagataatggggacagcagcaaaagtactgagacaagtgactttgaaaacatcgaatcacctctcaatgagagggactcttcagcatcagtggataatagagaacttgaacagcatattcagacttctgatccagaaaattttcagtctgaagaacgatcagactcagatgtgaataatgacaggagtacaagttcagtggacagtgatattcttagctccagtcatagcagtgatactttgtgcaatgcagacaatgctcagatccctttggctaatggacttgactctcacagtatcacaagtagtagaagaacgaaagcaaatgaagggaaaaaagaaacatgggatacagcagaagaagactctggaactgatagtgaatatgatgagagtggcaagagtaggggagaaatgcagtacatgtatttcaaagctgaaccttatgctgcagatgaaggttctggggaaggacataaatggttgatggtgcatgttgataaaagaattactctggcagctttcaaacaacatttagagccctttgttggagttttgtcctctcacttcaaggtctttcgagtgtatgccagcaatcaagagtttgagagcgtccggctgaatgagacactttcatcattttctgatgacaataagattacaattagactggggagagcacttaaaaaaggagaatacagagttaaagtataccagcttttggtcaatgaacaagagccatgcaagtttctgctagatgctgtgtttgctaaaggaatgactgtacggcaatcaaaagaggaattaattcctcagctcagggagcaatgtggtttagagctcagtattgacaggtttcgtctaaggaaaaaaacatggaagaatcctggcactgtctttttggattatcatatttatgaagaagatattaatatttccagcaactgggaggttttccttgaagttcttgatggggtagagaagatgaagtccatgtcacagcttgcagttttgtcaagacggtggaagccttcagagatgaagttggatcccttccaggaggttgtattggaaagcagtagtgtggacgaattgcgagagaagcttagtgaaatcagtgggattcctttggatgatattgaatttgctaagggtagaggaacatttccctgtgatatttctgtccttgatattcatcaagatttagactggaatcctaaagtttctaccctgaatgtctggcctctttatatctgtgatgatggtgcggtcatattttatagggataaaacagaagaattaatggaattgacagatgagcaaagaaatgaactgatgaaaaaagaaagcagtcgactccagaagactggacatcgtgtaacatactcacctcgtaaagagaaagcactaaaaatatatctggatggagcaccaaataaagatctgactcaagactgactctgatagtgtagcattttccctgggggagttttggttttaattagatggttcactaccactgggtagtgccattttggccggacatggttggggtaacccagtgacaccagcactgattggactgccctacaccaatcagaagctcagtgcccaatgggccactgttttgactcggaatcatgttgtgcactatagtcaaatgtactgtaaagtgaaaagggatgtgcaaaaaaataaaaaaaaacaacaaaaaaagctaaccttctattagaaaaggggacaggggaatgagtaaacttcttttattgcggacaaatgtgcacatagccgctagtaaaactagcctcaaacaggatgctcatagcttaataataaaagctgtgcaaaggccatgaatgaatgaattttctgtttatttcactgatgcacacattacctcattgacaattcagaagtaaatccaacgtgtgttgactcttggaaagcagcaaaaacaggagctgaagaaaagaaattcttggaaccagccgtaacccagtaaggaattgtgaagttgtgtttttattttgtttcattttttgcagagtattaagaacattattctggaacatcagaacgtttcccttagaccgatcccagcaggtggcagctcagattgctgcagtgttgtaattataactgattgtacttaagttatggatgtagagaatatgtttcattcatttattcagcatgtaaataaaattgatcctgttgagttatcataattgcagttcaactatctgccatgattattcttttcacgtatcattcattctgtacatttgtgtacattgagaagtatagcaatctatgtaaatgtaatcctcagtgaggttcctcagtgctaggtcccataggattgtcgttgcccttgttaatgaggtttctctgttcagcggcttcaatttttttctctttgtacatctagttttgaagatttacttcaagtttgaatcttctagaatgcttgtaagtccagttttaatttttagagtcaatttgtagttacatgtagtttaacttttgggaaacgtcttaacattgttctgaataaacttgctaatgaggtcaggtcatggtacagactgatgcagtcaacatgatttcattgcagagtttattagtatcagcaagtttttgctttgctaaataaaagtactcaatgaacacaattctacataaattttgacataccatctaatttataaaaatcaataaaaaaggttttggtaaaactttttcatgccagatgctgtttacaacaatgaacatgccaataaaacatttgttcattctaaaaaaaaaaaaaaaaaaaaaaaaaaaaaaaaaaaaaaaaaaaaaaaaaaaaaaaaaaaaaaaaaaaaaaaaaaaaaacccaaaaaaaaaaggaaaaaaaaaaaaaaaaaaactttttggcccccttggcccaagcaattttaaatttgggcaagttttttaaaggggcccgaatttgggtttaattggccaattccccttaaaggggggggttttacaattaaatggcccgtgtttaaaaaccgtttaattgga

SEQ ID NO: 79632 - DNA, 5179 bp, Homo sapiens
acgacgaaggcggctgtggtagcggcggcggcggcggcggagccctgggtcggtgtctgcgcgctggtgtctgaggcccaggctgaggcctccgctattgctggagcgcaggcggcggagaggatgactgccgctgccattctctcttgagctagcgagccgccgccaccctccaccctcccccggcagggcggagaggagcggccggagtcagcgatggtgcccggcgaggagaaccaactggtcccgaaagagatagaaaatgctgctgaagaacctagagtcttatgtattatacaagatactactaattcaaagacagtgaatgaacggatcactttaaatttaccagcatctactccagtcagaaagctctttgaagatgtggccaacaaagtaggctacataaatggaacctttgacttggtgtggggaaatggaatcaatactgctgatatggcaccactggatcataccagtgacaagtcacttctcgacgctaattttgagccaggaaagaagaactttctgcatttgacagataaagatggtgaacaacctcaaatactgctggaggattccagtgctggggaagacagtgttcatgacaggtttataggtccgcttccaagagaaggttctgtgggttctaccagtgattatgtcagccaaagctactcctactcatctattttgaataaatcagaaactggatatgtgggactagtaaaccaagcaatgacttgctatttgaatagccttttgcaaacactttttatgactcctgaatttaggaatgcattatataagtgggaatttgaagaatctgaagaagatccagtgacaagtattccataccaacttcaaaggctttttgttttgttacaaaccagcaaaaagagagcaattgaaaccacagatgttacaaggagctttggatgggatagtagtgaggcttggcagcagcatgatgtacaagaactatgcagagtcatgtttgatgctttggaacagaaatggaagcaaacagaacaggctgatcttataaatgagctatatcaaggcaagctgaaggactacgtgagatgtctggaatgtggttatgagggctggcgaatcgacacatatcttgatatcccattggtcatccgaccttatgggtccagccaagcatttgctagtgtggaagaagcattgcatgcatttattcagccagagattctggatggcccaaatcagtatttttgtgaacgttgtaagaagaagtgtgatgcacggaagggccttcggtttttgcattttccttatctgctgaccttacagctgaaaagattcgattttgattatacaaccatgcataggattaaactgaatgatcgaatgacatttcccgaggaactagatatgagtacttttattgatgttgaagatgagaaatctcctcagactgaaagttgcactgacagtggagcagaaaatgaaggtagttgtcacagtgatcagatgagcaacgatttctccaatgatgatggtgttgatgaaggaatctgtcttgaaaccaatagtggaactgaaaagatctcaaaatctggacttgaaaagaattccttgatctatgaacttttctctgttatggctcattctgggagcgctgctggtggtcattattatgcatgtataaagtcattcagtgatgagcagtggtacagcttcgatgatcaacatgtcagcaggataacacaagaggacattaagaaaacacatggtggatcttcaggaagcagaggatattattctagtgctttcgcaagttccacaaatgcatatatgctgatctatagactgaaggatccagccagaaatgcaaaatttctagaagtgggtgaatacccagaacatattaaaaacttggtgcagaaagagagagagttggaagaacaagaaaagagacaacgagaaattgagcgcaatacatgcaagataaaattattctgtttgcatcctacaaaacaagtaatgatggaaaataaattggaggttcataaggataagacattaaaggaagcagtagaaatggcttataagatgatggatttagaagaggtaatacccctggattgctgtcgccttgttaaatatgatgagtttcatgattatctagaacggtcatatgaaggagaagaagatacaccaatggggcttctactaggtggcgtcaagtcaacatatatgtttgatctgctgttggagacgagaaagcctgatcaggttttccaatcttataaacctggagaagtgatggtgaaagttcatgttgttgatctaaaggcagaatctgtagctgctcctataactgttcgtgcttacttaaatcagacagttacagaattcaaacaactgatttcaaaggccatccatttacctgctgaaacaatgagaatagtgctggaacgctgctacaatgatttgcgtcttctcagtgtctccagtaaaaccctgaaagctgaaggattttttagaagtaacaaggtgtttgttgaaagctccgagactttggattaccagatggcctttgcagactctcatttatggaaactcctggatcggcatgcaaatacaatcagattatttgttttgctacctgaacaatccccagtatcttattccaaaaggacagcataccagaaagctggaggcgattctggtaatgtggatgatgactgtgaaagagtcaaaggacctgtaggaagcctaaagtctgtggaagctattctagaagaaagcactgaaaaactcaaaagcttgtcactgcagcaacagcaggatggagataatggggacagcagcaaaagtactgagacaagtgactttgaaaacatcgaatcacctctcaatgagagggactcttcagcatcagtggataatagagaacttgaacagcatattcagacttctgatccagaaaattttcagtctgaagaacgatcagactcagatgtgaataatgacaggagtacaagttcagtggacagtgatattcttagctccagtcatagcagtgatactttgtgcaatgcagacaatgctcagatccctttggctaatggacttgactctcacagtatcacaagtagtagaagaacgaaagcaaatgaagggaaaaaagaaacatgggatacagcagaagaagactctggaactgatagtgaatatgatgagagtggcaagagtaggggagaaatgcagtacatgtatttcaaagctgaaccttatgctgcagatgaaggttctggggaaggacataaatggttgatggtgcatgttgataaaagaattactctggcagctttcaaacaacatttagagccctttgttggagttttgtcctctcacttcaaggtctttcgagtgtatgccagcaatcaagagtttgagagcgtccggctgaatgagacactttcatcattttctgatgacaataagattacaattagactggggagagcacttaaaaaaggagaatacagagttaaagtataccagcttttggtcaatgaacaagagccatgcaagtttctgctagatgctgtgtttgctaaaggaatgactgtacggcaatcaaaagaggaattaattcctcagctcagggagcaatgtggtttagagctcagtattgacaggtttcgtctaaggaaaaaaacatggaagaatcctggcactgtctttttggattatcatatttatgaagaagatattaatatttccagcaactgggaggttttccttgaagttcttgatggggtagagaagatgaagtccatgtcacagcttgcagttttgtcaagacggtggaagccttcagagatgaagttggatcccttccaggaggttgtattggaaagcagtagtgtggacgaattgcgagagaagcttagtgaaatcagtgggattcctttggatgatattgaatttgctaagggtagaggaacatttccctgtgatatttctgtccttgatattcatcaagatttagactggaatcctaaagtttctaccctgaatgtctggcctctttatatctgtgatgatggtgcggtcatattttatagggataaaacagaagaattaatggaattgacagatgagcaaagaaatgaactgatgaaaaaagaaagcagtcgactccagaagactggacatcgtgtaacatactcacctcgtaaagagaaagcactaaaaatatatctggatggagcaccaaataaagatctgactcaagactgactctgatagtgtagcattttccctgggggagttttggttttaattagatggttcactaccactgggtagtgccattttggccggacatggttggggtaacccagtgacaccagcactgattggactgccctacaccaatcagaagctcagtgcccaatgggccactgttttgactcggaatcatgttgtgcactatagtcaaatgtactgtaaagtgaaaagggatgtgcaaaaaaataaaaaaaaacaacaaaaaaagctaaccttctattagaaaaggggacaggggaatgagtaaacttcttttattgcggacaaatgtgcacatagccgctagtaaaactagcctcaaacaggatgctcatagcttaataataaaagctgtgcaaaggccatgaatgaatgaattttctgtttatttcactgatgcacacattacctcattgacaattcagaagtaaatccaacgtgtgttgactcttggaaagcagcaaaaacaggagctgaagaaaagaaattcttggaaccagccgtaacccagtaaggaattgtgaagttgtgtttttattttgtttcattttttgcagagtattaagaacattattctggaacatcagaacgtttcccttagaccgatcccagcaggtggcagctcagattgctgcagtgttgtaattataactgattgtacttaagttatggatgtagagaatatgtttcattcatttattcagcatgtaaataaaattgatcctgttgagttatcataattgcagttcaactatctgccatgattattcttttcacgtatcattcattctgtacatttgtgtacattggaaagttttctaatttattataactttctcctctcatggagatgctcaattgctaa

SEQ ID NO: 79633 - DNA, 3290 bp, Homo sapiens
  misc_feature (1178)..(1178): n is a, c, g, or t
ccccgggctgcaggaattcggcacgagcattcatttattcagcatgtaaataaaattgatcctgttgagttatcataattgcagttcaactatctgccatgattattcttttcacgtatcattcattctgtacatttgtgtacattgagaagtatagcaatctatgtaaatgtaatcctcagtgaggttcctcagtgctaggtcccataggattgtcgttgcccttgttaatgaggtttctctgttcagcggcttcaatttttttctctttgtacatctagttttgaagatttacttcaagtttgaatcttctagaatgcttgtaagtccagttttaatttttagagtcaatttgtagttacatgtagtttaacttttgggaaacgtcttaacattgttctgaataaacttgctaatgaggtcaggtcatggtacagactgatgcagtcaacatgatttcattgcagagtttattagtatcagcaagtttttgctttgctaaataaaagtactcaatgaacacaattctacataaattttgacataccatctaatttataaaaatcaataaaaaaggttttggtaaaactttttcatgccagatgctgtttacaacaatgaacatgccaataaaacatttgttcattctgttgtgttattttagtcattaaacttctgtggatgaagaatctgggttaagaatagatttgtcatctttaaatatgacattttgtaatgtgtattggatatctcatttctatgataaaggtatatttacagtaaagttctcataagagaaatgaaaagctgtgttaatatctaactttggggaaccctgtcagtatttcagatccgatttttaccctttttttcttataagaaagataaaattagaaaatactgttagcaaatgtggctctgccatttgaatataatcaccgagaattccatgtcttaaaagtctcctggaatccacaatgaaaaaaaaaatcttttctaaggtatttttctggctaatttttatttgaagaaagctatagcatttagcgaaatttgactgaagtaatgttctgagtttgcattagtgggattggtgatgttctcagaagaaaattggaaacacttgtgatgaattgtctttcagatcacttagattttctgatgtaagaggacagctntttggttctgatacaggcctgcttacttgggatgtagggttagtaaatggggtttctgctttaaaggactgacttgctatcgcacaaaagaggcagacttgtaaacacaatgggctttggagtttggtctgattgggtttggtttagtattcctatgagcgtaaatggtaaaattcttctgatacccactctttagactgtgccttctgctctgttctttgttttatgtttaactgctgtttctaattgcaggtgtattacagatacaaataagagtaaagaaaatatatttcattatagaaaagaaaaaattaaaagcttcttgcttttcagtgcctgatagagtgaaaacacaaagttgcactttaataatttcaataaaagctaatctgtgtcagcctccctctgcttcagagagtcaggtgagcatccataacctaacaggcagagccctagcgatgtggatcaagtttcctgagcccgggggcggtggagcctcatgatctcttatcttttgaggctgaggcaggtcacatgcaacaaattgtgaccctgctccccacaagtcatgcaaaggttttgaagagcttttaccgtggggcagatgaacttgtgtcaaccatgcacaccctgtgagaaccaagtacctgtgtttctaaggcgggcactcaaggtgaggggtgcattctggccaaagaaacaaaagctgtggtttcaggaccatgccgtgtgtagctgatctgtacgggacgtgtatgtaaggaagagcaatcatgatagataagaacagtgtgtgaagcagccctcacactagagtgtttggtcatctcttataatgtaagggaaggtactttaaaattctgggaagatgcgatgaactcatgtcccagtcagaaaataatccaatgaaataagcattggttgccaggccacagttaggaattgtattgtgatacatctagaggccaagagagcaggagagagctaccaacttacactgtggtttaagctaaatgaccgcacagcatcatagcattgcagtgttgttactaaatctggaagtgacctgtgaatgtatggaatacaataaagtcttttattctggttcatttgctagtacttcctttttgattggatactgtagttcttcctctggattttattttgttcagcgtcaaggccctaattttgcaaatgtagtctaaaccacattacgtggactagaggatactctgaattagcaagttttttgtttgctgaataaaactattccatcttaacaattctgtgtaatttttgaaaaacatcaacattttggtcactagtagtccaaaatcttataaggcccatatgtcctgaaaggcaaaactctgtgtatgtgccgatttaccagggagatagtaggacagtttttatgagggtttcaaaggagttcatggcccaaatgaagcttgtggcccacctaggtttagtgtacatgaaattggaagatgcttcttgattgtagttcccatggggaagagggaggctgtgatcatttggttagatacagcattaattgtcacaacttgactttcagaaacaagaatactgcacaaactcaagcatgcattggagcatgtgttactatttagaaaagagtgcagccatcagtaggtcaagctaggagggcaaaagagagttgagaggaatgctctgccccttccccatcacagcactgcccctttccacctcctcaccagctcacctgtacaagagaattgatctcaactgagtgtcagctcaccaggtcagaaattgttattggaccctaaaaccttgcctcacaggtgggcaccaagctccccttccctctgctttccatgtttcccacctgccctctccccacctgttttcagcctcttttataatgcttaagtaacctgcttgaagagtataatttatggagataaaaatactcaatgcttacatttttttcataactgtgccaattgttttgtcaaatgcagttacccactgggcagtgggcttatcaagtgctcagtgcaatcctgtgacttttaagtcattttgcattattaagacaatcttatcttaaagttcagtggtttc

SEQ ID NO: 79634 - DNA, 5115 bp, Homo sapiens
acgacgaaggcggctgtggtagcggcggcggcggcggcggagccctgggtcggtgtctgcgcgctggtgtctgaggcccaggctgaggcctccgctattgctggagcgcaggcggcggagaggatgactgccgctgccattctctcttgagctagcgagccgccgccaccctccaccctcccccggcagggcggagaggagcggccggagtcagcgatggtgcccggcgaggagaaccaactggtcccgaaagagatagaaaatgctgctgaagaacctagagtcttatgtattatacaagatactactaattcaaagacagtgaatgaacggatcactttaaatttaccagcatctactccagtcagaaagctctttgaagatgtggccaacaaagtaggctacataaatggaacctttgacttggtgtggggaaatggaatcaatactgctgatatggcaccactggatcataccagtgacaagtcacttctcgacgctaattttgagccaggaaagaagaactttctgcatttgacagataaagatggtgaacaacctcaaatactgctggaggattccagtgctggggaagacagtgttcatgacaggtttataggtccgcttccaagagaaggttctgtgggttctaccagtgattatgtcagccaaagctactcctactcatctattttgaataaatcagaaactggatatgtgggactagtaaaccaagcaatgacttgctatttgaatagccttttgcaaacactttttatgactcctgaatttaggaatgcattatataagtgggaatttgaagaatctgaagaagatccagtgacaagtattccataccaacttcaaaggctttttgttttgttacaaaccagcaaaaagagagcaattgaaaccacagatgttacaaggagctttggatgggatagtagtgaggcttggcagcagcatgatgtacaagaactatgcagagtcatgtttgatgctttggaacagaaatggaagcaaacagaacaggctgatcttataaatgagctatatcaaggcaagctgaaggactacgtgagatgtctggaatgtggttatgagggctggcgaatcgacacatatcttgatatcccattggtcatccgaccttatgggtccagccaagcatttgctagtgtggaagaagcattgcatgcatttattcagccagagattctggatggcccaaatcagtatttttgtgaacgttgtaagaagaagtgtgatgcacggaagggccttcggtttttgcattttccttatctgctgaccttacagctgaaaagattcgattttgattatacaaccatgcataggattaaactgaatgatcgaatgacatttcccgaggaactagatatgagtacttttattgatgttgaagatgagaaatctcctcagactgaaagttgcactgacagtggagcagaaaatgaaggtagttgtcacagtgatcagatgagcaacgatttctccaatgatgatggtgttgatgaaggaatctgtcttgaaaccaatagtggaactgaaaagatctcaaaatctggacttgaaaagaattccttgatctatgaacttttctctgttatggctcattctgggagcgctgctggtggtcattattatgcatgtataaagtcattcagtgatgagcagtggtacagcttcgatgatcaacatgtcagcaggataacacaagaggacattaagaaaacacatggtggatcttcaggaagcagaggatattattctagtgctttcgcaagttccacaaatgcatatatgctgatctatagactgaaggatccagccagaaatgcaaaatttctagaagtgggtgaatacccagaacatattaaaaacttggtgcagaaagagagagagttggaagaacaagaaaagagacaacgagaaattgagcgcaatacatgcaagataaaattattctgtttgcatcctacaaaacaagtaatgatggaaaataaattggaggttcataaggataagacattaaaggaagcagtagaaatggcttataagatgatggatttagaagaggtaatacccctggattgctgtcgccttgttaaatatgatgagtttcatgattatctagaacggtcatatgaaggagaagaagatacaccaatggggcttctactaggtggcgtcaagtcaacatatatgtttgatctgctgttggagacgagaaagcctgatcaggttttccaatcttataaacctggagaagtgatggtgaaagttcatgttgttgatctaaaggcagaatctgtagctgctcctataactgttcgtgcttacttaaatcagacagttacagaattcaaacaactgatttcaaaggccatccatttacctgctgaaacaatgagaatagtgctggaacgctgctacaatgatttgcgtcttctcagtgtctccagtaaaaccctgaaagctgaaggattttttagaagtaacaaggtgtttgttgaaagctccgagactttggattaccagatggcctttgcagactctcatttatggaaactcctggatcggcatgcaaatacaatcagattatttgttttgctacctgaacaatccccagtatcttattccaaaaggacagcataccagaaagctggaggcgattctggtaatgtggatgatgactgtgaaagagtcaaaggacctgtaggaagcctaaagtctgtggaagctattctagaagaaagcactgaaaaactcaaaagcttgtcactgcagcaacagcaggatggagataatggggacagcagcaaaagtactgagacaagtgactttgaaaacatcgaatcacctctcaatgagagggactcttcagcatcagtggataatagagaacttgaacagcatattcagacttctgatccagaaaattttcagtctgaagaacgatcagactcagatgtgaataatgacaggagtacaagttcagtggacagtgatattcttagctccagtcatagcagtgatactttgtgcaatgcagacaatgctcagatccctttggctaatggacttgactctcacagtatcacaagtagtagaagaacgaaagcaaatgaagggaaaaaagaaacatgggatacagcagaagaagactctggaactgatagtgaatatgatgagagtggcaagagtaggggagaaatgcagtacatgtatttcaaagctgaaccttatgctgcagatgaaggttctggggaaggacataaatggttgatggtgcatgttgataaaagaattactctggcagctttcaaacaacatttagagccctttgttggagttttgtcctctcacttcaaggtctttcgagtgtatgccagcaatcaagagtttgagagcgtccggctgaatgagacactttcatcattttctgatgacaataagattacaattagactggggagagcacttaaaaaaggagaatacagagttaaagtataccagcttttggtcaatgaacaagagccatgcaagtttctgctagatgctgtgtttgctaaaggaatgactgtacggcaatcaaaagaggaattaattcctcagctcagggagcaatgtggtttagagctcagtattgacaggtttcgtctaaggaaaaaaacatggaagaatcctggcactgtctttttggattatcatatttatgaagaagatattaatatttccagcaactgggaggttttccttgaagttcttgatggggtagagaagatgaagtccatgtcacagcttgcagttttgtcaagacggtggaagccttcagagatgaagttggatcccttccaggaggttgtattggaaagcagtagtgtggacgaattgcgagagaagcttagtgaaatcagtgggattcctttggatgatattgaatttgctaagggtagaggaacatttccctgtgatatttctgtccttgatattcatcaagatttagactggaatcctaaagtttctaccctgaatgtctggcctctttatatctgtgatgatggtgcggtcatattttatagggataaaacagaagaattaatggaattgacagatgagcaaagaaatgaactgatgaaaaaagaaagcagtcgactccagaagactggacatcgtgtaacatactcacctcgtaaagagaaagcactaaaaatatatctggatggagcaccaaataaagatctgactcaagactgactctgatagtgtagcattttccctgggggagttttggttttaattagatggttcactaccactgggtagtgccattttggccggacatggttggggtaacccagtgacaccagcactgattggactgccctacaccaatcagaagctcagtgcccaatgggccactgttttgactcggaatcatgttgtgcactatagtcaaatgtactgtaaagtgaaaagggatgtgcaaaaaaataaaaaaaaacaacaaaaaaagctaaccttctattagaaaaggggacaggggaatgagtaaacttcttttattgcggacaaatgtgcacatagccgctagtaaaactagcctcaaacaggatgctcatagcttaataataaaagctgtgcaaaggccatgaatgaatgaattttctgtttatttcactgatgcacacattacctcattgacaattcagaagtaaatccaacgtgtgttgactcttggaaagcagcaaaaacaggagctgaagaaaagaaattcttggaaccagccgtaacccagtaaggaattgtgaagttgtgtttttattttgtttcattttttgcagagtattaagaacattattctggaacatcagaacgtttcccttagaccgatcccagcaggtggcagctcagattgctgcagtgttgtaattataactgattgtacttaagttatggatgtagagaatatgtttcattcatttattcagcatgtaaataaaattgatcctgttgagttatcataattgaacaaagaaagaaaaaactcaagggggggcccgggacccaaatccgcccttaagggaa

SEQ ID NO: 79635 - DNA, 5863 bp, Homo sapiens
  misc_feature (5059)..(5059): n is a, c, g, or t
  misc_feature (5731)..(5731): n is a, c, g, or t
acgacgaaggcggctgtggtagcggcggcggcggcggcggagccctgggtcggtgtctgcgcgctggtgtctgaggcccaggctgaggcctccgctattgctggagcgcaggcggcggagaggatgactgccgctgccattctctcttgagctagcgagccgccgccaccctccaccctcccccggcagggcggagaggagcggccggagtcagcgatggtgcccggcgaggagaaccaactggtcccgaaagagatagaaaatgctgctgaagaacctagagtcttatgtattatacaagatactactaattcaaagacagtgaatgaacggatcactttaaatttaccagcatctactccagtcagaaagctctttgaagatgtggccaacaaagtaggctacataaatggaacctttgacttggtgtggggaaatggaatcaatactgctgatatggcaccactggatcataccagtgacaagtcacttctcgacgctaattttgagccaggaaagaagaactttctgcatttgacagataaagatggtgaacaacctcaaatactgctggaggattccagtgctggggaagacagtgttcatgacaggtttataggtccgcttccaagagaaggttctgtgggttctaccagtgattatgtcagccaaagctactcctactcatctattttgaataaatcagaaactggatatgtgggactagtaaaccaagcaatgacttgctatttgaatagccttttgcaaacactttttatgactcctgaatttaggaatgcattatataagtgggaatttgaagaatctgaagaagatccagtgacaagtattccataccaacttcaaaggctttttgttttgttacaaaccagcaaaaagagagcaattgaaaccacagatgttacaaggagctttggatgggatagtagtgaggcttggcagcagcatgatgtacaagaactatgcagagtcatgtttgatgctttggaacagaaatggaagcaaacagaacaggctgatcttataaatgagctatatcaaggcaagctgaaggactacgtgagatgtctggaatgtggttatgagggctggcgaatcgacacatatcttgatatcccattggtcatccgaccttatgggtccagccaagcatttgctagtgtggaagaagcattgcatgcatttattcagccagagattctggatggcccaaatcagtatttttgtgaacgttgtaagaagaagtgtgatgcacggaagggccttcggtttttgcattttccttatctgctgaccttacagctgaaaagattcgattttgattatacaaccatgcataggattaaactgaatgatcgaatgacatttcccgaggaactagatatgagtacttttattgatgttgaagatgagaaatctcctcagactgaaagttgcactgacagtggagcagaaaatgaaggtagttgtcacagtgatcagatgagcaacgatttctccaatgatgatggtgttgatgaaggaatctgtcttgaaaccaatagtggaactgaaaagatctcaaaatctggacttgaaaagaattccttgatctatgaacttttctctgttatggctcattctgggagcgctgctggtggtcattattatgcatgtataaagtcattcagtgatgagcagtggtacagcttcgatgatcaacatgtcagcaggataacacaagaggacattaagaaaacacatggtggatcttcaggaagcagaggatattattctagtgctttcgcaagttccacaaatgcatatatgctgatctatagactgaaggatccagccagaaatgcaaaatttctagaagtgggtgaatacccagaacatattaaaaacttggtgcagaaagagagagagttggaagaacaagaaaagagacaacgagaaattgagcgcaatacatgcaagataaaattattctgtttgcatcctacaaaacaagtaatgatggaaaataaattggaggttcataaggataagacattaaaggaagcagtagaaatggcttataagatgatggatttagaagaggtaatacccctggattgctgtcgccttgttaaatatgatgagtttcatgattatctagaacggtcatatgaaggagaagaagatacaccaatggggcttctactaggtggcgtcaagtcaacatatatgtttgatctgctgttggagacgagaaagcctgatcaggttttccaatcttataaacctggagaagtgatggtgaaagttcatgttgttgatctaaaggcagaatctgtagctgctcctataactgttcgtgcttacttaaatcagacagttacagaattcaaacaactgatttcaaaggccatccatttacctgctgaaacaatgagaatagtgctggaacgctgctacaatgatttgcgtcttctcagtgtctccagtaaaaccctgaaagctgaaggattttttagaagtaacaaggtgtttgttgaaagctccgagactttggattaccagatggcctttgcagactctcatttatggaaactcctggatcggcatgcaaatacaatcagattatttgttttgctacctgaacaatccccagtatcttattccaaaaggacagcataccagaaagctggaggcgattctggtaatgtggatgatgactgtgaaagagtcaaaggacctgtaggaagcctaaagtctgtggaagctattctagaagaaagcactgaaaaactcaaaagcttgtcactgcagcaacagcaggatggagataatggggacagcagcaaaagtactgagacaagtgactttgaaaacatcgaatcacctctcaatgagagggactcttcagcatcagtggataatagagaacttgaacagcatattcagacttctgatccagaaaattttcagtctgaagaacgatcagactcagatgtgaataatgacaggagtacaagttcagtggacagtgatattcttagctccagtcatagcagtgatactttgtgcaatgcagacaatgctcagatccctttggctaatggacttgactctcacagtatcacaagtagtagaagaacgaaagcaaatgaagggaaaaaagaaacatgggatacagcagaagaagactctggaactgatagtgaatatgatgagagtggcaagagtaggggagaaatgcagtacatgtatttcaaagctgaaccttatgctgcagatgaaggttctggggaaggacataaatggttgatggtgcatgttgataaaagaattactctggcagctttcaaacaacatttagagccctttgttggagttttgtcctctcacttcaaggtctttcgagtgtatgccagcaatcaagagtttgagagcgtccggctgaatgagacactttcatcattttctgatgacaataagattacaattagactggggagagcacttaaaaaaggagaatacagagttaaagtataccagcttttggtcaatgaacaagagccatgcaagtttctgctagatgctgtgtttgctaaaggaatgactgtacggcaatcaaaagaggaattaattcctcagctcagggagcaatgtggtttagagctcagtattgacaggtttcgtctaaggaaaaaaacatggaagaatcctggcactgtctttttggattatcatatttatgaagaagatattaatatttccagcaactgggaggttttccttgaagttcttgatggggtagagaagatgaagtccatgtcacagcttgcagttttgtcaagacggtggaagccttcagagatgaagttggatcccttccaggaggttgtattggaaagcagtagtgtggacgaattgcgagagaagcttagtgaaatcagtgggattcctttggatgatattgaatttgctaagggtagaggaacatttccctgtgatatttctgtccttgatattcatcaagatttagactggaatcctaaagtttctaccctgaatgtctggcctctttatatctgtgatgatggtgcggtcatattttatagggataaaacagaagaattaatggaattgacagatgagcaaagaaatgaactgatgaaaaaagaaagcagtcgactccagaagactggacatcgtgtaacatactcacctcgtaaagagaaagcactaaaaatatatctggatggagcaccaaataaagatctgactcaagactgactctgatagtgtagcattttccctgggggagttttggttttaattagatggttcactaccactgggtagtgccattttggccggacatggttggggtaacccagtgacaccagcactgattggactgccctacaccaatcagaagctcagtgcccaatgggccactgttttgactcggaatcatgttgtgcactatagtcaaatgtactgtaaagtgaaaagggatgtgcaaaaaaataaaaaaaaacaacaaaaaaagctaaccttctattagaaaaggggacaggggaatgagtaaacttcttttattgcggacaaatgtgcacatagccgctagtaaaactagcctcaaacaggatgctcatagcttaataataaaagctgtgcaaaggccatgaatgaatgaattttctgtttatttcactgatgcacacattacctcattgacaattcagaagtaaatccaacgtgtgttgactcttggaaagcagcaaaaacaggagctgaagaaaagaaattcttggaaccagccgtaacccagtaaggaattgtgaagttgtgtttttattttgtttcattttttgcagagtattaagaacattattctggaacatcagaacgtttcccttagaccgatcccagcaggtggcagctcagattgctgcagtgttgtaattataactgattgtacttaagttatggatgtagagaatatgtttcattcatttattcagcatgtaaataaaattgatcctgttgagttatcataattganaaacttatcccacccctctacctcccttcatccccattttacactcttctctttcacctcccctcctacattcctctcactcactctacataatcctctccttctctctatatacctcccctctcttcttctcacactcctttatcatcttcctacttcttatactcactcctctcttcacttcctctcttcctctttatccttcactctcctactacatccatccttcttccactcatccactatctccatcatattatcctatcttcttctccctcctcccttaactcttctctttcccactatttctccttcttcacctcaacggctcctactctctccacactctctcacacttctcctcttctctctctcacttcctctccctctcttctcactttcttcccctcctctctaacctctcatcacctcatactatatcttccattctcatcttctcccaatactactcctataatctcactcctcctttctctctctcattctctatcctttctcctctctcacttcactctctactatttctctctctttctcactctctctatctactattctctctctcctcattctcttcctacttcactctactcactttctcactcttatctattacactctatacatcacactctctctacatcctactcntctctactttccaccttcttctctctccataccttatcctcactactctcttacttactattcactctcttctctcactctctctatctcacccttcttctctaacccctctcaccactttcctctcctctt

SEQ ID NO: 79636 - DNA, 5806 bp, Homo sapiens
  misc_feature (5002)..(5002): n is a, c, g, or t
  misc_feature (5674)..(5674): n is a, c, g, or t
acgacgaaggcggctgtggtagcggcggcggcggcggcggagccctgggtcggtgtctgcgcgctggtgtctgaggcccaggctgaggcctccgctattgctggagcgcaggcggcggagaggatgactgccgctgccattctctcttgagctagcgagccgccgccaccctccaccctcccccggcagggcggagaggagcggccggagtcagcgatggtgcccggcgaggagaaccaactggtcccgaaagagatagaaaatgctgctgaagaacctagagtcttatgtattatacaagatactactaattcaaagacagtgaatgaacggatcactttaaatttaccagcatctactccagtcagaaagctctttgaagatgtggccaacaaagtaggctacataaatggaacctttgacttggtgtggggaaatggaatcaatactgctgatatggcaccactggatcataccagtgacaagtcacttctcgacgctaattttgagccaggaaagaagaactttctgcatttgacagataaagatggtgaacaacctcaaatactgctggaggattccagtgctggggaagacagtgttcatgacaggtttataggtccgcttccaagagaaggttctgtgggttctaccagtgattatgtcagccaaagctactcctactcatctattttgaataaatcagaaactggatatgtgggactagtaaaccaagcaatgacttgctatttgaatagccttttgcaaacactttttatgactcctgaatttaggaatgcattatataagtgggaatttgaagaatctgaagaagatccagtgacaagtattccataccaacttcaaaggctttttgttttgttacaaaccagcaaaaagagagcaattgaaaccacagatgttacaaggagctttggatgggatagtagtgaggcttggcagcagcatgatgtacaagaactatgcagagtcatgtttgatgctttggaacagaaatggaagcaaacagaacaggctgatcttataaatgagctatatcaaggcaagctgaaggactacgtgagatgtctggaatgtggttatgagggctggcgaatcgacacatatcttgatatcccattggtcatccgaccttatgggtccagccaagcatttgctagtgtggaagaagcattgcatgcatttattcagccagagattctggatggcccaaatcagtatttttgtgaacgttgtaagaagaagtgtgatgcacggaagggccttcggtttttgcattttccttatctgctgaccttacagctgaaaagattcgattttgattatacaaccatgcataggattaaactgaatgatcgaatgacatttcccgaggaactagatatgagtacttttattgatgttgaagatgagaaatctcctcagactgaaagttgcactgacagtggagcagaaaatgaaggtagttgtcacagtgatcagatgagcaacgatttctccaatgatgatggtgttgatgaaggaatctgtcttgaaaccaatagtggaactgaaaagatctcaaaatctggacttgaaaagaattccttgatctatgaacttttctctgttatggctcattctgggagcgctgctggtggtcattattatgcatgtataaagtcattcagtgatgagcagtggtacagcttcgatgatcaacatgtcagcaggataacacaagaggacattaagaaaacacatggtggatcttcaggaagcagaggatattattctagtgctttcgcaagttccacaaatgcatatatgctgatctatagactgaaggatccagccagaaatgcaaaatttctagaagtgggtgaatacccagaacatattaaaaacttggtgcagaaagagagagagttggaagaacaagaaaagagacaacgagaaattgagcgcaatacatgcaagataaaattattctgtttgcatcctacaaaacaagtaatgatggaaaataaattggaggttcataaggataagacattaaaggaagcagtagaaatggcttataagatgatggatttagaagaggtaatacccctggattgctgtcgccttgttaaatatgatgagtttcatgattatctagaacggtcatatgaaggagaagaagatacaccaatggggcttctactaggtggcgtcaagtcaacatatatgtttgatctgctgttggagacgagaaagcctgatcaggttttccaatcttataaacctggagaagtgatggtgaaagttcatgttgttgatctaaaggcagaatctgtagctgctcctataactgttcgtgcttacttaaatcagacagttacagaattcaaacaactgatttcaaaggccatccatttacctgctgaaacaatgagaatagtgctggaacgctgctacaatgatttgcgtcttctcagtgtctccagtaaaaccctgaaagctgaaggattttttagaagtaacaaggtgtttgttgaaagctccgagactttggattaccagatggcctttgcagactctcatttatggaaactcctggatcggcatgcaaatacaatcagattatttgttttgctacctgaacaatccccagtatcttattccaaaaggacagcataccagaaagctggaggcgattctggtaatgtggatgatgactgtgaaagagtcaaaggacctgtaggaagcctaaagtctgtggaagctattctagaagaaagcactgaaaaactcaaaagcttgtcactgcagcaacagcaggatggagataatggggacagcagcaaaagtactgagacaagtgactttgaaaacatcgaatcacctctcaatgagagggactcttcagcatcagtggataatagagaacttgaacagcatattcagacttctgatccagaaaattttcagtctgaagaacgatcagactcagatgtgaataatgacaggagtacaagttcagtggacagtgatattcttagctccagtcatagcagtgatactttgtgcaatgcagacaatgctcagatccctttggctaatggacttgactctcacagtatcacaagtagtagaagaacgaaagcaaatgaagggaaaaaagaaacatgggatacagcagaagaagactctggaactgatagtgaatatgatgagagtggcaagagtaggggagaaatgcagtacatgtatttcaaagctgaaccttatgctgcagatgaaggttctggggaaggacataaatggttgatggtgcatgttgataaaagaattactctggcagctttcaaacaacatttagagccctttgttggagttttgtcctctcacttcaaggtctttcgagtgtatgccagcaatcaagagtttgagagcgtccggctgaatgagacactttcatcattttctgatgacaataagattacaattagactggggagagcacttaaaaaaggagaatacagagttaaagtataccagcttttggtcaatgaacaagagccatgcaagtttctgctagatgctgtgtttgctaaaggaatgactgtacggcaatcaaaagaggaattaattcctcagctcagggagcaatgtggtttagagctcagtattgacaggtttcgtctaaggaaaaaaacatggaagaatcctggcactgtctttttggattatcatatttatgaagaagatattaatatttccagcaactgggaggttttccttgaagttcttgatggggtagagaagatgaagtccatgtcacagcttgcagttttgtcaagacggtggaagccttcagagatgaagttggatcccttccaggaggttgtattggaaagcagtagtgtggacgaattgcgagagaagcttagtgaaatcagtgggattcctttggatgatattgaatttgctaagggtagaggaacatttccctgtgatatttctgtccttgatattcatcaagatttagactggaatcctaaagtttctaccctgaatgtctggcctctttatatctgtgatgatggtgcggtcatattttatagggataaaacagaagaattaatggaattgacagatgagcaaagaaatgaactgatgaaaaaagaaagcagtcgactccagaagactggacatcgtgtaacatactcacctcgtaaagagaaagcactaaaaatatatctggatggagcaccaaataaagatctgactcaagactgactctgatagtgtagcattttccctgggggagttttggttttaattagatggttcactaccactgggtagtgccattttggccggacatggttggggtaacccagtgacaccagcactgattggactgccctacaccaatcagaagctcagtgcccaatgggccactgttttgactcggaatcatgttgtgcactatagtcaaatgtactgtaaagtgaaaagggatgtgcaaaaaaataaaacttcttttattgcggacaaatgtgcacatagccgctagtaaaactagcctcaaacaggatgctcatagcttaataataaaagctgtgcaaaggccatgaatgaatgaattttctgtttatttcactgatgcacacattacctcattgacaattcagaagtaaatccaacgtgtgttgactcttggaaagcagcaaaaacaggagctgaagaaaagaaattcttggaaccagccgtaacccagtaaggaattgtgaagttgtgtttttattttgtttcattttttgcagagtattaagaacattattctggaacatcagaacgtttcccttagaccgatcccagcaggtggcagctcagattgctgcagtgttgtaattataactgattgtacttaagttatggatgtagagaatatgtttcattcatttattcagcatgtaaataaaattgatcctgttgagttatcataattganaaacttatcccacccctctacctcccttcatccccattttacactcttctctttcacctcccctcctacattcctctcactcactctacataatcctctccttctctctatatacctcccctctcttcttctcacactcctttatcatcttcctacttcttatactcactcctctcttcacttcctctcttcctctttatccttcactctcctactacatccatccttcttccactcatccactatctccatcatattatcctatcttcttctccctcctcccttaactcttctctttcccactatttctccttcttcacctcaacggctcctactctctccacactctctcacacttctcctcttctctctctcacttcctctccctctcttctcactttcttcccctcctctctaacctctcatcacctcatactatatcttccattctcatcttctcccaatactactcctataatctcactcctcctttctctctctcattctctatcctttctcctctctcacttcactctctactatttctctctctttctcactctctctatctactattctctctctcctcattctcttcctacttcactctactcactttctcactcttatctattacactctatacatcacactctctctacatcctactcntctctactttccaccttcttctctctccataccttatcctcactactctcttacttactattcactctcttctctcactctctctatctcacccttcttctctaacccctctcaccactttcctctcctctt

SEQ ID NO: 79637 - DNA, 5086 bp, Homo sapiens
acgacgaaggcggctgtggtagcggcggcggcggcggcggagccctgggtcggtgtctgcgcgctggtgtctgaggcccaggctgaggcctccgctattgctggagcgcaggcggcggagaggatgactgccgctgccattctctcttgagctagcgagccgccgccaccctccaccctcccccggcagggcggagaggagcggccggagtcagcgatggtgcccggcgaggagaaccaactggtcccgaaagagatagaaaatgctgctgaagaacctagagtcttatgtattatacaagatactactaattcaaagacagtgaatgaacggatcactttaaatttaccagcatctactccagtcagaaagctctttgaagatgtggccaacaaagtaggctacataaatggaacctttgacttggtgtggggaaatggaatcaatactgctgatatggcaccactggatcataccagtgacaagtcacttctcgacgctaattttgagccaggaaagaagaactttctgcatttgacagataaagatggtgaacaacctcaaatactgctggaggattccagtgctggggaagacagtgttcatgacaggtttataggtccgcttccaagagaaggttctgtgggttctaccagtgattatgtcagccaaagctactcctactcatctattttgaataaatcagaaactggatatgtgggactagtaaaccaagcaatgacttgctatttgaatagccttttgcaaacactttttatgactcctgaatttaggaatgcattatataagtgggaatttgaagaatctgaagaagatccagtgacaagtattccataccaacttcaaaggctttttgttttgttacaaaccagcaaaaagagagcaattgaaaccacagatgttacaaggagctttggatgggatagtagtgaggcttggcagcagcatgatgtacaagaactatgcagagtcatgtttgatgctttggaacagaaatggaagcaaacagaacaggctgatcttataaatgagctatatcaaggcaagctgaaggactacgtgagatgtctggaatgtggttatgagggctggcgaatcgacacatatcttgatatcccattggtcatccgaccttatgggtccagccaagcatttgctagtgtggaagaagcattgcatgcatttattcagccagagattctggatggcccaaatcagtatttttgtgaacgttgtaagaagaagtgtgatgcacggaagggccttcggtttttgcattttccttatctgctgaccttacagctgaaaagattcgattttgattatacaaccatgcataggattaaactgaatgatcgaatgacatttcccgaggaactagatatgagtacttttattgatgttgaagatgagaaatctcctcagactgaaagttgcactgacagtggagcagaaaatgaaggtagttgtcacagtgatcagatgagcaacgatttctccaatgatgatggtgttgatgaaggaatctgtcttgaaaccaatagtggaactgaaaagatctcaaaatctggacttgaaaagaattccttgatctatgaacttttctctgttatggctcattctgggagcgctgctggtggtcattattatgcatgtataaagtcattcagtgatgagcagtggtacagcttcgatgatcaacatgtcagcaggataacacaagaggacattaagaaaacacatggtggatcttcaggaagcagaggatattattctagtgctttcgcaagttccacaaatgcatatatgctgatctatagactgaaggatccagccagaaatgcaaaatttctagaagtgggtgaatacccagaacatattaaaaacttggtgcagaaagagagagagttggaagaacaagaaaagagacaacgagaaattgagcgcaatacatgcaagataaaattattctgtttgcatcctacaaaacaagtaatgatggaaaataaattggaggttcataaggataagacattaaaggaagcagtagaaatggcttataagatgatggatttagaagaggtaatacccctggattgctgtcgccttgttaaatatgatgagtttcatgattatctagaacggtcatatgaaggagaagaagatacaccaatggggcttctactaggtggcgtcaagtcaacatatatgtttgatctgctgttggagacgagaaagcctgatcaggttttccaatcttataaacctggagaagtgatggtgaaagttcatgttgttgatctaaaggcagaatctgtagctgctcctataactgttcgtgcttacttaaatcagacagttacagaattcaaacaactgatttcaaaggccatccatttacctgctgaaacaatgagaatagtgctggaacgctgctacaatgatttgcgtcttctcagtgtctccagtaaaaccctgaaagctgaaggattttttagaagtaacaaggtgtttgttgaaagctccgagactttggattaccagatggcctttgcagactctcatttatggaaactcctggatcggcatgcaaatacaatcagattatttgttttgctacctgaacaatccccagtatcttattccaaaaggacagcataccagaaagctggaggcgattctggtaatgtggatgatgactgtgaaagagtcaaaggacctgtaggaagcctaaagtctgtggaagctattctagaagaaagcactgaaaaactcaaaagcttgtcactgcagcaacagcaggatggagataatggggacagcagcaaaagtactgagacaagtgactttgaaaacatcgaatcacctctcaatgagagggactcttcagcatcagtggataatagagaacttgaacagcatattcagacttctgatccagaaaattttcagtctgaagaacgatcagactcagatgtgaataatgacaggagtacaagttcagtggacagtgatattcttagctccagtcatagcagtgatactttgtgcaatgcagacaatgctcagatccctttggctaatggacttgactctcacagtatcacaagtagtagaagaacgaaagcaaatgaagggaaaaaagaaacatgggatacagcagaagaagactctggaactgatagtgaatatgatgagagtggcaagagtaggggagaaatgcagtacatgtatttcaaagctgaaccttatgctgcagatgaaggttctggggaaggacataaatggttgatggtgcatgttgataaaagaattactctggcagctttcaaacaacatttagagccctttgttggagttttgtcctctcacttcaaggtctttcgagtgtatgccagcaatcaagagtttgagagcgtccggctgaatgagacactttcatcattttctgatgacaataagattacaattagactggggagagcacttaaaaaaggagaatacagagttaaagtataccagcttttggtcaatgaacaagagccatgcaagtttctgctagatgctgtgtttgctaaaggaatgactgtacggcaatcaaaagaggaattaattcctcagctcagggagcaatgtggtttagagctcagtattgacaggtttcgtctaaggaaaaaaacatggaagaatcctggcactgtctttttggattatcatatttatgaagaagatattaatatttccagcaactgggaggttttccttgaagttcttgatggggtagagaagatgaagtccatgtcacagcttgcagttttgtcaagacggtggaagccttcagagatgaagttggatcccttccaggaggttgtattggaaagcagtagtgtggacgaattgcgagagaagcttagtgaaatcagtgggattcctttggatgatattgaatttgctaagggtagaggaacatttccctgtgatatttctgtccttgatattcatcaagatttagactggaatcctaaagtttctaccctgaatgtctggcctctttatatctgtgatgatggtgcggtcatattttatagggataaaacagaagaattaatggaattgacagatgagcaaagaaatgaactgatgaaaaaagaaagcagtcgactccagaagactggacatcgtgtaacatactcacctcgtaaagagaaagcactaaaaatatatctggatggagcaccaaataaagatctgactcaagactgactctgatagtgtagcattttccctgggggagttttggttttaattagatggttcactaccactgggtagtgccattttggccggacatggttggggtaacccagtgacaccagcactgattggactgccctacaccaatcagaagctcagtgcccaatgggccactgttttgactcggaatcatgttgtgcactatagtcaaatgtactgtaaagtgaaaagggatgtgcaaaaaaataaaacttcttttattgcggacaaatgtgcacatagccgctagtaaaactagcctcaaacaggatgctcatagcttaataataaaagctgtgcaaaggccatgaatgaatgaattttctgtttatttcactgatgcacacattacctcattgacaattcagaagtaaatccaacgtgtgttgactcttggaaagcagcaaaaacaggagctgaagaaaagaaattcttggaaccagccgtaacccagtaaggaattgtgaagttgtgtttttattttgtttcattttttgcagagtattaagaacattattctggaacatcagaacgtttcccttagaccgatcccagcaggtggcagctcagattgctgcagtgttgtaattataactgattgtacttaagttatggatgtagagaatatgtttcattcatttattcagcatgtaaataaaattgatcctgttgagttatcataattgttgccacactacacacctccactcacccactcccctcctcttcctccttcttctctctcccttctcccctctccccccttccctcg

SEQ ID NO: 79638 - DNA, 554 bp, Homo sapiens
acatctcagtatataaaataatattacttcaccagtaacagatttcattatcttgctgaggagcatcatagcattcaagcatacattaatagaggtggagggctctactggactaatatgtgattaatattttatatgtagggataaaacagaagaattaatggaattgacagatgagcaaagaaatgaactgatgaaaaaagaaagcagtcgactccagaagactggacatcgtgtaacatactcacctcgtaaagagaaagcactaaaaatatatctggatggagcaccaaataaagatctgactcaagactgactctgatagtgtagcattttccctgggggagttttggttttaattagatggttcactaccactgggtagtgccattttggccggacatggttggggtaacccagtgacaccagcactgattggactgccctacaccaatcagaagctcagtgcccaatgggccactgttttgactcggaatcatgttgtgcactatagtcaaatgtactgtaaagtgaaaagggatgtgcaaaaaaat

SEQ ID NO: 79639 - DNA, 502 bp, Homo sapiens
cagacgtaaccagtgcttgttgctggagtggtagcaacagcaaataaacacgtcggggcttgagagcagcaggtctgcagcacgccctccggacagcgtgctgggacgcacagtgggccccgggtctgtgggccaggcattcccatcagaggtcccagggctgatgctccttgccctggcaacctggtgacgcactgaggctggggcctgatgcaagcagaggtgtccagacctgccagggacaggccttccggctagggactgtggccaacaggcttctcagctgacttggctcagcccagggactctgggcgccaccaccaaccccaggcgtccccagaagtggggaggccacactcagtgctgcctgttctgtgagtcctccccacacctggtgagccccggctcagagacgtgccgcagccccagggctggccacgtgccacctcctccccacagttcccagcctgctctttaaacagccgcttcctgccccacgtgg

SEQ ID NO: 79640 - DNA, 835 bp, Homo sapiens
ccaagaacatttaaaaatatgtatttaatattaactctgctataatttccaagcaaactctttgatatcctttataagaaacacttctataatcacttaggaaatctgcataagtctattaaagactcctcagttgcactatgtttatttttgcaaaaacaaactttggctgaaccatttgttttcagcatgtaaagcaggaagcagctgttgctgttgctgttgtatactgagttcctttgaggatgtagagtgattctgcttttttaccttttaccaaatagttcagttgagcatgagtgattaaaaagtataccgaatcaaatatttgtgatgcttggactgtcaagcttctagagagcagagtttatatctggtcaggtccctgtggtatcccagtctctgacgcagcgtctgacacacagtccatgctcaaatccctgttaaaagcatgaatacttagaattaaagtatttattcaaaattatggcatgtgttaacattcgtcagaaagcaaaagacttttttaaatgtggaaaagatttttttctacttacattacatctatcaaagggctttcagatgggtctgtgcagttactagctggtagaaatgaaaacaaagattgtgattagctgttagtagtgtatatgccaatgtttatctaattctttcccttgtcttcttttccaaaaggaaattagatgttagcaggatggtctcagggccaagttcatgtttgttttctaactagtggcacaaccacaagcttccattcttctctatgttactgtaagaaagtggctaattaaaatgtgagggaagagtgtttccc

SEQ ID NO: 79641 - DNA, 674 bp, Homo sapiens
  misc_feature (641)..(641): n is a, c, g, or t
  misc_feature (646)..(646): n is a, c, g, or t
tggcctgcagagaggccccacaagcagtacaggtgatcctgatacgatttaaagtttaacaaccatgttgttttttattttttatttgagacggagtttcactcgttgtccaaggtagagtgcaatggcgcaatctcggctcaccacaacctctgcctgtgtgatggagcaagactccatcacaggagggggggaaaaacaacaaaaaaacaaaaaacactccccagctgatcccagtatgcagtcaatgtcatgcaccgctgctcagatccactctacacactgcttaaggcagagctctgcacataatgccctctgctcagaaacctcagtagctttcagttggtaatcaatttagaacttagagtagaatgcctaattcccatcctcatcctaggccagtgactctcaaaatgttggcagagaccagagatactggtgtcacctgttagatggtggcatctgttagaaatgcatgccaaggctccatccctactcaatcagaaactgggggagaggccccacaagcagtacaggtgatcctgatacgatttaaagtttaacaaccatgttgttttttattttttatttgagacggagtttcactcgttgtccgaggtctgccactgcaccactccagncctgnttgatggagcaagactccatcacaggag

SEQ ID NO: 79642 - DNA, 1012 bp, Homo sapiens
caaggtttgcagccgccacggccgctgctgcgctccggtgcagggcaggctggcgccgagcgaaccagggccgggaactgggagccgggagccgggagccagctgcccgcggagctgcggcggcggcggcatctggggtggtctcagtcccacgaacaccgtggccggcgcccggtggctactgcgcccagcggggctcagggaagagcggtctagacactttttattttggaagaaaggggcaagccccggcgggagcttccttcccggcctggctcgctccccattgcgcccagctccggcccggactctggaagatgactccagggtctgctctgtatattccagcggcggcagttccgggaggcagccgaaagtactaacagttggtagcagcggctagtggaaaagtgagccaaggcggcgcggactcggctctccccgcgccccgcggcactcgctgctcctcgccgctccttccctttggctcccaggcggctgcagcatgaagtggcgcagcgatggccaggagaggtaagaagcccgtggtgagaacgctggaggatctgacgctggactcgggttatggtggcgcggcggactcggtgcgctcctccaacttgtctttgtgctgttccgactcgcacccggcgtccccgtatggcgggagctgctggccgcctctagctgactccatgcacagccggcacaacagctttgacactgtcaacactgccctggtggaagactccgaggggctggactgcgccggccagcactgctcgcggctgctgccggacctagacgaggtcccctggactctccaggagctggaggcgctgctgctgcgttcgcgggatccccgggcaggcccggcggtccccggcggcctgcccaaggacgcgctggccaagctgtcgacgctggtgagccgggcgctggtgcgcatagccaaagaggcgcagcgcctgagcctgcgcttcgccaagtgcaccaagtacgagatccagag

SEQ ID NO: 79643 - DNA, 818 bp, Homo sapiens
tatagccatgaaaggatcaccacaatcaagataatggacatacccatcaccgcccaaaaaatgcccctttagaatcttttcttcccacctctctccccaagcaaccactgttattatagtttccattttctagagttttatataaatggaatcatatcgtatgtactcttttatcagacttctatgactttttatttatttatttttagaaatgggttcttgctgtgttggccaggttggtcttgaacttctgagctcaagcagttctgccacttcagcctcccaaagtgctgggattacaggcatgagccactatgcctagtgtatcactattttaaatagtaaaaaagaattacaattattttcgttattttgagattcactcacgtcatgtgtatcaatatgatttattcctttttatcactgatagtatttcattgtatcgttataccactgtttgatttaatccattcacctgttgattgacatttgagtttcttttctttctggggctatcacaaataaaactatatgaacattcatgtctttgtatagacacccagtcatgtgtccgttaacgacccaggatacattctgagaaatgtgtcatgattttctcattgggcaaacatcatagactgatggtataacttactacacacccaggctatatgatatagcctattgctcctaggctacaaatctgtacagcatgttactatactgagtactgtagacagttgtaacacaacagtaagtgtttgtgtatctaaacctatctaaacaaaaagacacagtaaaaatgtggtatgaaagat

SEQ ID NO: 79644 - DNA, 542 bp, Homo sapiens
gagttcgagaccagcctagccaacatggtgaaaccctgtctctactgaaaattcaaaaaattagccaggcatggtggcacatgcctgtaatctcagctactggggaggctgaggcaggagaatcgcttgaacctgggaggcagaggttgcggtgagccaagatcatgccattgcactccagctgggtgaagaagcaagactccacctcaaaaaaaaaaaaaaaaaaaaaaaaaaagaatggctggaactcactgtgagaaatgcactttatggcaccccacataacacacatacatatttattataattgaaataaaatattctccaaaatacacttaaggtgcaaattaccctgatgttttctatgttatcctatcccatcccttgccactccactccactctaatatatttttgttacaaaaatgcgaattatgacctacctaaatgactttacaacctacaatttgaaaaacatttacttaattggtggatttctcggggctaatcctaaactcagaaaaggcatttgcaaaaaaaaaa

SEQ ID NO: 79645 - DNA, 631 bp, Homo sapiens
gtccaattaaacctctttcttttgtaaattgcccagtctggggtatgtgtttatcagcaggatgaaaatggactaatacaatcctcaattcatatggccaatttctgtgtcatgtgtcaaataagcagttttcacaggaaaatgtgtgtactggaagtattaccaaaactaatctcaggcttcaaatacccgcaaaaattgatggggctgagaagtctcactgctccactcctgtaatattatttaagatgaaaatacggtgtcagaaatactgtgtccacagcatttaatccttggcttttccaaaaatgtctgccaaaccagaactttctttttcaccttcaaagtgtcaaagacacttgggggtgggggggcaggggacagacacagtggctcatgcctgtaaccatagtgctttgggaggttgaggtgggaggatggcttgaggacaggagttcaagaccagcctgggcaaaacagtgagacacccacctctacaaaaaataaaaaaaattagctgggtgtggtggcgtatgtgtactcccagctacttgggaggctgaggtcagaggatcccttgagcccaggagtttgaggttatagcctgggcaacaaagtgagaccctaactc

SEQ ID NO: 79646 - DNA, 319 bp, Homo sapiens
ttctcatgtctgaatttcacacgcacaagtctgaaatgtgaaggtttcttaatgttggttttatggttcgtgtaagatttttgggaaatgaagggctcttcattaggataaaatggtcttaacttcccagagaagaatttcctgacaacgtggctgaagttagatacaaatgttaatatagaagaatgcttttatttgaatttctagcaaatggttttcaactactttaaatatgacctacttgaaagtattatttcttttttaaaactactttttatgtatagatctaagtctgcttgaagctagtagttaaagtgtt

SEQ ID NO: 79647 - DNA, 386 bp, Homo sapiens
gtgctgagaaagaaattaagaaatagaaataccttttctactctgtactctctgggactttattttcaaagtgttgagttctcttattctaatgtcactgaaaatgtagggattttttttgttcggggtccaactctttagggataaagtatccatccttattgttttcctagttcaaactcttgtttgttgtaaggaataaatggagaatatgccagaaggctttcaaactgttcatttctttgcacattagggttgcttttctctcaaataataacaactgctaccattttttcaagctgtatgtgccagaattgtgatgagcattttatatatgttatcacttctctacaacaaccctagaatttaggattattcttttcatt

SEQ ID NO: 79648 - DNA, 290 bp, Homo sapiens
gccgagattgcaccactgcactccaacctgggtgatagagcaaaaaaacaaaagaaagaagaagaatgtaatcccagctattcgggaggctgaggcaggaggattgcttgaacccacagtgaaacctcatctcaaaaaatttttaaaataatgggagaggccaggcgtggtggctcacgcctgtaatcccagcactttgggaggccgaggcagatggatcacctgaggttaggagttcgagaccagcctggccaacatggtgaaaccccatttctactaaaaaatacaaa

SEQ ID NO: 79649 - DNA, 306 bp, Homo sapiens
tggcagaggtggatgctgtgataatccctacaaataaaaggctcatagaaaaaggagtgcaaatcctttcatttactgaagagaaattgtgtctagaaagggtctatgtttagaaacagaaccatcaagaaattggtctgaaatatagggaatcactgtcttcactgattaactacataccagatattagtttacaaaatttcctaaccaagaaacataaactcttcatactatactcttagaatttgtgaaaggaattttcttgtttttgtggtttttttttaaattgtaaatcctatagtaggg

SEQ ID NO: 79650 - DNA, 416 bp, Homo sapiens
gtgttattttcagatttggtttcctatttgttttcctttgtgtaatagccggttttatccttggaccacttatccaattagaatctgacgttgtgctcacatttatataaattcttgtgtgggcacatgaattaagtctccaattgttgctgtgcatattttcccattttgttgctttcattacgttctagttctaaaaggttttaaacttcatatcaataaatatgtgcatctttgcccttttcaattttctcctccttcaaaaaaattttcttctttacagctgaaactgtgctactgcaaatctgtaattctttagttcattgggagttcactgtgatatattatatggcttgtggtctgaatcttgaatttttttcttttgaattatatcttgtattagtaactatttttac

SEQ ID NO: 79651 - DNA, 467 bp, Homo sapiens
tcctgtctcaaaaaaaaggaactcatttggtatagttgcactctaactgccttctaaagctttaaccccccaaaatggatgcatatgggagttttgtcatttgcaggcagagaggaagcatttctgtttctttaaatcatatcaagttgactcaaaccatagattcatgcatttattcattcaatcagtcagccaaccagcatttattgagtgcctactatgtaccaggcactttcctaggtactatataaaactcatcttgcatactatgaatgaatggcagcaaaacatgttataggttccacagctgcagagtgtagaaagatcaaatgtagcgctccttcctaaggttccaagggaagatacagagtcatcttcaagtagagcactctatgatatgcatacattactactggaaaggtacatttgttagcatctcagccatacctaggaaaatcttgtcagcc

SEQ ID NO: 79652 - DNA, 405 bp, Homo sapiens
gcaccactgcactccagcctggggcttgaggttttgccagatggtttggtagagttggagatgttagcaagaaagggattacaatgtaatcattacaatggatctaagccagtgagggagttcagaacaggggaggtgagccaaggtgagaaggtgttagggtgatgaatggatggaagaaagtgtgagctggatgctaggagggggtggttgcagggcacatacttggctttgggattgaagagagacatggttactaggaatgagcaggtgtagtgctgaccatggacgtgggagcctgagatgggttggatgacagggtctttggaggagaggaggtccgaaagctgagaggtatgagggtcccaaactgagggtatggatgttgaaccagcaagagttatg

SEQ ID NO: 79653 - DNA, 282 bp, Homo sapiens
gctttattctgatgaccctagaagctagtctatatcattagaactaaatcagtcttgtaccaagtaacagtttcaaatggcagtgggaaaactgagaggaggggaatgagaagagttcaggccacatctacaaagctccctgcagttgttttggggctgcatatctatagggtgaacaccacttgtttgcaaaagacaatttgttgcacaaacaacttaatagcagtaagaatgaaaataaaaattaaacatacagtttaaaataaaaaagttattgcacta

SEQ ID NO: 79654 - DNA, 413 bp, Homo sapiens
tgtgtcttggctctaccttccctgagtcctgcctgctcttgagtgttgtataactctttgtaacgtgaggcgggcagggtgtaggtagatgctgcatgctgttgaatgttgtggattctatgtgtgctttattttctggggaactagggtgtggtagtgctagctgggtatattggaggccactggcttaaaactgtctttcccatagagtctaatttctaagataattttgttgacaagtttctcttctgggatgaaaatatgtttaattaggttaaacgttggtcattgactagtggtggtggttatgatacttccatgaattcttagcttcagtaaccttcctgagtggggattttatttgggggacaaggagagattcctttcttcctttcattcttcccacctttttg

SEQ ID NO: 79655 - DNA, 234 bp, Homo sapiens
tactggcatctgattttcaaatttttaataattaaatatttacttgaatctaagatatcatcagttgaaaggagtccaatttcagaaatgttaaaatataaaaacacagcatcatcaagttgctaaaatgtgctaatttcacattatataataaacaagaatattctaattactaattttctagagagatttttcataaaatagttgagcatctgatagggcatatgaatccat

SEQ ID NO: 79656 - DNA, 859 bp, Homo sapiens
gcttccggttccggtagcagctagtcacgctcggtaccaggcgcagatcatggcaggcagccggctggaaaccgtagggagcatcttctctcggactcgggacctggttcgggccggggtgctgaaggagaagcccctgtggtttgacgtatatgacgcctttcccccgctgagggagcccgtcttccaaaggcctcgagtgcgatatggcaaagccaaagctcccatccaagacatctggtaccacgaggatcggattagagcgaagttttattcagtgtatgggtctggtcaaagagcttttgatctattcaatccaaacttcaagtctacctgtcaacggtttgtggagaagtacactgagctacagaaacttggagaaacagatgaagagaagttatttgtggaaacagggaaggctttattggcagaaggtgtcattttaagacgagtaggcgaagcaaggactcaacacggaggtagtcacgtttcccggaaatccgaacacttgagtgtcagaccacagactgcgttggaagaaaacgagactcagaaagaagttccacaggaccagcatttggaggcacctgcagaccagtcgaaaggtctcttgcctccctgaaggacctgtatactgtgtatgctggcattcacactctactcactggctgaatgttgagctatttttaaacagttgaactgtgtaaatgtttcttgatctctaaggtattatgtttgccttctcttagttatttctgggttgtcacaaagctcagtatcatggtttgacagaagcagttatgtgaacttttatgttaggacattactaaataaagaattccctagctgcttataaagt

SEQ ID NO: 79657 - DNA, 595 bp, Homo sapiens
cccctttatacaaattaaatttcctggaacggttgtgaaaaggcctaagtaccaaacttgaaaaacgataaaaaaaatatttgtgaaaaagaaggctttatggcaaaagggtcattttaaacgagtagggaagcaaggcctcaacacggaggtagtcacgtttcccggaaatccgaacacttgagtgtcagaccacagactgcgttggaagaaaacgagactcagaaagaagttccacaggaccagcatttggaggcacctgcagaccagtcgaaaggtctcttgcctccctgaaggacctgtatactgtgtatgctggcattcacactctactcactggctgaatgttgagctatttttaaacagttgaactgtgtaaatgtttcttgatctctaaggtattatgtttgccttctcttagttatttctgggttgtcacaaagctcagtatcatggtttgacagaagcagttatgtgaacttttatgttaggacattactaaataaagaattccctagctgcttataaagtaaatttactttgaattgtaaataacatgaagaaacctttataaagattgttcaaatgggactca

SEQ ID NO: 79658 - DNA, 923 bp, Homo sapiens
gcttccggttccggtagcagctagtcacgctcggtaccaggcgcagatcatggcaggcagccggctggaaaccgtagggagcatcttctctcggactcgggacctggttcgggccggggtgctgaaggagaagcccctgtggtttgacgtatatgacgcctttcccccgctgagggagcccgtcttccaaaggcctcgagtgcgatatggcaaagccaaagctcccatccaagacatctggtaccacgaggatcggattagagcgaagttttattcagtgtatgggtctggtcaaagagcttttgatctattcaatccaaacttcaagtctacctgtcaacggtttgtggagaagtacactgagctacagaaacttggagaaacagatgaagagaagttatttgtggaaacagggaaggctttattggcagaaggtgtcattttaagacgagtaggcgaagcaaggactcaacacggaggtagtcacgtttcccggaaatccgaacacttgagtgtcagaccacagactgcgttggaagaaaacgagactcagaaagaagttccacaggaccagcatttggaggcacctgcagaccagtcgaaaggtctcttgcctccctgaaggacctgtatactgtgtatgctggcattcacactctactcactggctgaatgttgagctatttttaaacagttgaactgtgtaaatgtttcttgatctctaaggtattatgtttgccttctcttagttatttctgggttgtcacaaagctcagtatcatggtttgacagaagcagttatgtgaacttttatgttaggacattactaaataaagaattccctagctgcttataaagtaaatttactttgaattgtaaataacatgaagaaacctttataaagattgttcaaatgggactca

SEQ ID NO: 79659 - DNA, 1593 bp, Homo sapiens
gcttccggttccggtagcagctagtcacgctcggtaccaggcgcagatcatggcaggcagccggctggaaaccgtagggagcatcttctctcggactcgggacctggttcgggccggggtgctgaaggagaagcccctgtggtttgacgtatatgacgcctttcccccgctgagggagcccgtcttccaaaggcctcgagtgcgatatggcaaagccaaagctcccatccaagacatctggtaccacgaggatcggattagagcgaagttttattcagtgtatgggtctggtcaaagagcttttgatctattcaatccaaacttcaagtctacctgtcaacggtttgtggagaagtacactgagctacagaaacttggagaaacagatgaagagaagttatttgtggaaacagggaaggctttattggcagaaggtgtcattttaagacgagtaggcgaagcaaggactcaacacggaggtagtcacgtttcccggaaatccgaacacttgagtgtcagaccacagactgcgttggaagaaaacgagactcagaaagaagttccacaggaccagcatttggaggcacctgcagaccagtcgaaaggtctcttgcctccctgaaggacctgtatactgtgtatgctggcattcacactctactcactggctgaatgttgagctatttttaaacagttgaactgtgtaaatgtttcttgatctctaaggtattatgtttgccttctcttagttatttctgggttgtcacaaagctcagtatcatggtttgacagaagcagttatgtgaacttttatgttaggacattactaaataaagaattccctagctgcttataaagtaaatttactttgaattgtaaataacatgaagaaacctttataaagattgttcaaatgggactcaatctgactaggcttgctttgatgtttgttagtatgtgggctggctacatctgattcccgggtacatatttcttctgatccatcagacttatacgtgtacacatgttgtggaaccttggctagctggttttgtctgcagagaatctttgtacttcttgctatagaacgattatctctccacttgagaggccaagctgacttgagctttgtggtaagagtgaggacctgtcattgctgatacacaaagaccaaaactgtaactttaatgtcatggattgagtgtgctggagacagttaacataggcctgcacagactaggctgttcagtaaatacttgttgaatgaatgagtgaacgaatggttatatccagctaaagactggattcatatggtgtagataacaggattgccaagaaaggaggcagctaatttaggtgatgctctccaccagcatccacctgcctccctggggccaaagtgtgcctacaagtccttatcaacttccctgccttcctcgtttccccaggttttactaaatacatgaaatatccctctgagattgcagcctttgtatatgtggtcaagccagtggtttttagctgttagtagtaagctgcttcagaaattccctattttaaaactcatgtagattttctacccagtgattcttt

SEQ ID NO: 79660 - DNA, 582 bp, Homo sapiens
tcataggagaaaaacaagggagagaaaaatctaaacccagcagaagagaaagtttaagaaagcggtcgtcgccaataccaaaattagctatgatattcaggaagaaaaaaatggaaacacgataaccacagtcaataaagaccaaggccacattccattgaccagagctcagccacgcgccacacctggctaaagagactctggctgaagaattccctgaatattttaatgtagctctaggttataacacagaacaaccacaaggtggcagaagaactccattcttgtaaatctcttagttgcttctttatttcatcttccctattccatctaatgttccctgaattttactattttgttggtttgaaaatatgtgtgacttacgtcctttaaaggatttggttcgtaaggttttgaatagactggaatataaaacatttatagaaaagaaaaatacctacagtatgatgttagtgaactattaataatccaattaaataaaatatatttgctttggattaatacatattctgttttgatgtttgctaaataaaactaagcattaggaggccaaatagccac

SEQ ID NO: 79661 - DNA, 521 bp, Homo sapiens
tcataggagaaaaacaagggagagaaaaatctaaacccagcagaagagaaagtttaagaaagcggtcgtcgccaataccaaaattagctatgatattcaggaagaaaaaaatggaaacacgataaccacagtcaataaagaccaaggccacattccattgaccagagctcagccacgcgccacacctggctaaagagactctggctgaagaattccctgaatattttaatgtagctctaggttataacacagaacaaccacaaggtggcagaagaactccattcttgtaaatctcttagttgcttctttatttcatcttccctattccatctaatgttccctgaattttactattttgttggtttgaaaatatgtgtgacttacgtcctttaaaggatttggttcgtaaggttttgaatagactggaatataaaacatttatagaaaagaaaaatacctacagtatgatgttagtgaactattaataatccaattaaataaaatatatttgctttggatta

SEQ ID NO: 79662 - DNA, 1543 bp, Homo sapiens
acacacccccctaaacccacacaaatgaaaccccctctgcggagaagccggctacaggaaattgacttaggcacaggaacttgctaatctcttttgtcacattcggattgctcctgctgccccacacacactaacccaaccatcttggggtggactccctgccagcccaactgttgtattttcagttcttccagtgtgaatcagttaatattctcgggaacgagggagaggttgatcctatgaggaaatcaaccacagtgaaaaggcttgggccgcttttgttttcacctccttttgttgaacaaatttgatttccggagtcagtcattttactgtcaagacatttcttcggcattctgcaacagtttccaacatggctagatccatcagaaactgaagccgtggagaacgctctcggggcctttgccacttcttggagtagaagccgacagagagctgtttggaaacttctccttcacacaccagttgaagactaggctttggaggttttcaaagcagacggtgcttggatgggcagggagaagtaacattctgcaaatcgccgtcagaggtcctgaggacacagacctacctggcttgcattccccttgctgaatggcgtgtgctgcagctgcccactgagggctcttttccctgggattctggacttcagagtaggacagcaggctgggaagatgctgagttccatcaagtgcgtgttggtgggcgactctgctgtggggaaaacctctctgttggtgcgcttcacctccgagaccttcccggaggcctacaagcccacagtgtacgagaacacaggggtggacgtcttcatggatggcatccagatcagcctgggcctctgggacacagccggcaatgacgccttcagaagcatccggcccctgtcctaccagcaggcagacgtggtgctgatgtgctactctgtggccaaccataactcattcctgaacttgaagaacaagtggattggtgaaattaggagcaacttgccctgtacccctgtgctggtggtggccacccagactgaccagcgggagatggggccccacagggcctcctgcgtcaatgccatggaagggaagaaactggcccaggatgtcagagccaagggctacctggagtgctcagcccttagcaatcggggagtacagcaggtgtttgagtgcgccgtccgaactgccgtcaaccaggccaggagacgaaacagaaggaggctcttctccatcaatgagtgcaagatcttctaaaccccaagagacttcacacaacacttatgtatgcaccccaaagactaatggggagagggagggccgggaagccaggaaagcttggtgttttctctgggtacaccccaagcagcgtctccttttggatacagttattgatgaggcttggccactggatgttttcactaactacactctacaagtgaactccttgcccaggccagttagaaaatcccttggggaactgtgatgaatattccatctttgattaaaaaagtgaaatagtctccata

SEQ ID NO: 79663 - DNA, 533 bp, Homo sapiens
cctcagatatctttacaccaaacggaggaatgagggggggcccccccaacaagggggctttccttgccgttcaaattgccatgggaaagggaaaagaaactggcccaggatgtcagagccaagggctacctggagtgctcagcccttagcaatcggggagtacagcaggtgtttgagtgcgccgtccgaactgccgtcaaccaggccaggagacgaaacagaaggaggctcttctccatcaatgagtgcaagatcttctaaaccccaagagacttcacacaacacttatgtatgcaccccaaagactaatggggagagggagggccgggaagccaggaaagcttggtgttttctctgggtacaccccaagcagcgtctccttttggatacagttattgatgaggcttggccactggatgttttcactaactacactctacaagtgaactccttgcccaggccagttagaaaatcccttggggaactgtgatgaatattccatctttgattaaaaaagtgaaatagtctccata

SEQ ID NO: 79664 - DNA, 2443 bp, Homo sapiens
acacacccccctaaacccacacaaatgaaaccccctctgcggagaagccggctacaggaaattgacttaggcacaggaacttgctaatctcttttgtcacattcggattgctcctgctgccccacacacactaacccaaccatcttggggtggactccctgccagcccaactgttgtattttcagttcttccagtgtgaatcagttaatattctcgggaacgagggagaggttgatcctatgaggaaatcaaccacagtgaaaaggcttgggccgcttttgttttcacctccttttgttgaacaaatttgatttccggagtcagtcattttactgtcaagacatttcttcggcattctgcaacagtttccaacatggctagatccatcagaaactgaagccgtggagaacgctctcggggcctttgccacttcttggagtagaagccgacagagagctgtttggaaacttctccttcacacaccagttgaagactaggctttggaggttttcaaagcagacggtgcttggatgggcagggagaagtaacattctgcaaatcgccgtcagaggtcctgaggacacagacctacctggcttgcattccccttgctgaatggcgtgtgctgcagctgcccactgagggctcttttccctgggattctggacttcagagtaggacagcaggctgggaagatgctgagttccatcaagtgcgtgttggtgggcgactctgctgtggggaaaacctctctgttggtgcgcttcacctccgagaccttcccggaggcctacaagcccacagtgtacgagaacacaggggtggacgtcttcatggatggcatccagatcagcctgggcctctgggacacagccggcaatgacgccttcagaagcatccggcccctgtcctaccagcaggcagacgtggtgctgatgtgctactctgtggccaaccataactcattcctgaacttgaagaacaagtggattggtgaaattaggagcaacttgccctgtacccctgtgctggtggtggccacccagactgaccagcgggagatggggccccacagggcctcctgcgtcaatgccatggaagggaagaaactggcccaggatgtcagagccaagggctacctggagtgctcagcccttagcaatcggggagtacagcaggtgtttgagtgcgccgtccgaactgccgtcaaccaggccaggagacgaaacagaaggaggctcttctccatcaatgagtgcaagatcttctaaaccccaagagacttcacacaacacttatgtatgcaccccaaagactaatggggagagggagggccgggaagccaggaaagcttggtgttttctctgggtacaccccaagcagcgtctccttttggatacagttattgatgaggcttggccactggatgttttcactaactacactctacaagtgaactccttgcccaggccagttagaaaatcccttggggaactgtgatgaatattccatctttgattaaaaaagtgaaatagtctccataattttggacgatgaagtgagtttttcaaagaattccatatttaaagacacattttatttaactaataacaaaatgtattgcttttgtatatatttagttttcacacttggaaaatcttttcctacatcctcgaaaccataaactcctctgtgagtgaaatgcttgtacgaagctctgccatatgtttgtagtgttattattttcacctcaagtagaaagtctgttgaaaccacttggctgctggatttaaatgggtaatcaaatttaaaaatgaccataaatgaatctttgcaatttgttttctacttacctgttattcacagttggatataaaatacagttccataagatatcctaatactgcctaatgattttaaagttatcactatatttttctgaaatgataaaacatcattcatttatttactatattgtctttcactcaactccagttatgcactaaatattctcctctcattcaccaagattgattgaaacaccatctttcaggtagagaatcagactgctccaagcaatggcaacagaacttggaacagaagcaagagagtgtcaccttcacttctggtagggtggttcccaggcgactgcaggtcctgtgaaagacaggggtctcaaagttctgttaatttcacaaatttgttataaatttgtctaaactgagctgttgtggcaacataatttatgaatcgtaaggtctagttaggcttattggggggatatctacatatatatgtgtatgtaagggaaaaaaaggtagaatttacagccttcaaaaaagaaaaatcaaattccaagcacaggaataagaaagctatatagcaactgctcagagaacagaaagttatcaggggaaatactgaataaatagacacacacata

SEQ ID NO: 79665 - DNA, 1900 bp, Homo sapiens
acacacccccctaaacccacacaaatgaaaccccctctgcggagaagccggctacaggaaattgacttaggcacaggaacttgctaatctcttttgtcacattcggattgctcctgctgccccacacacactaacccaaccatcttggggtggactccctgccagcccaactgttgtattttcagttcttccagtgtgaatcagttaatattctcgggaacgagggagaggttgatcctatgaggaaatcaaccacagtgaaaaggcttgggccgcttttgttttcacctccttttgttgaacaaatttgatttccggagtcagtcattttactgtcaagacatttcttcggcattctgcaacagtttccaacatggctagatccatcagaaactgaagccgtggagaacgctctcggggcctttgccacttcttggagtagaagccgacagagagctgtttggaaacttctccttcacacaccagttgaagactaggctttggaggttttcaaagcagacggtgcttggatgggcagggagaagtaacattctgcaaatcgccgtcagaggtcctgaggacacagacctacctggcttgcattccccttgctgaatggcgtgtgctgcagctgcccactgagggctcttttccctgggattctggacttcagagtaggacagcaggctgggaagatgctgagttccatcaagtgcgtgttggtgggcgactctgctgtggggaaaacctctctgttggtgcgcttcacctccgagaccttcccggaggcctacaagcccacagtgtacgagaacacaggggtggacgtcttcatggatggcatccagatcagcctgggcctctgggacacagccggcaatgacgccttcagaagcatccggcccctgtcctaccagcaggcagacgtggtgctgatgtgctactctgtggccaaccataactcattcctgaacttgaagaacaagtggattggtgaaattaggagcaacttgccctgtacccctgtgctggtggtggccacccagactgaccagcgggagatggggccccacagggcctcctgcgtcaatgccatggaagggaagaaactggcccaggatgtcagagccaagggctacctggagtgctcagcccttagcaatcggggagtacagcaggtgtttgagtgcgccgtccgaactgccgtcaaccaggccaggagacgaaacagaaggaggctcttctccatcaatgagtgcaagatcttctaaaccccaagagacttcacacaacacttatgtatgcaccccaaagactaatggggagagggagggccgggaagccaggaaagcttggtgttttctctgggtacaccccaagcagcgtctccttttggatacagttattgatgaggcttggccactggatgttttcactaactacactctacaagtgaactccttgcccaggccagttagaaaatcccttggggaactgtgatgaatattccatctttgattaaaaaagtgaaatagtctccataattttggacgatgaagtgagtttttcaaagaattccatatttaaagacacattttatttaactaataacaaaatgtattgcttttgtatatatttagttttcacacttggaaaatcttttcctacatcctcgaaaccataaactcctctgtgagtgaaatgcttgtacgaagctctgccatatgtttgtagtgttattattttcacctcaagtagaaagtctgttgaaaccacttggctgctggatttaaatgggtaatcaaatttaaaaatgaccataaatgaatctttgcaatttgttttctacttacctgttattcacagttggatataaaatacagttccataagatatccta

SEQ ID NO: 79666 - DNA, 2415 bp, Homo sapiens
aagtgtttaccataaagggcagctgtgaggctgtgagatgggagaatcaatctatttattggtcagaaagtggttgttcagtaccttggatttctgagtgggcaaggctggaccctgagccctgggacctctgaagtgaacactgcagggccatttgttcttccagtgtgaatcagttaatattctcgggaacgagggagaggttgatcctatgaggaaatcaaccacagtgaaaaggcttgggccgcttttgttttcacctccttttgttgaacaaatttgatttccggagtcagtcattttactgtcaagacatttcttcggcattctgcaacagtttccaacatggctagatccatcagaaactgaagccgtggagaacgctctcggggcctttgccacttcttggagtagaagccgacagagagctgtttggaaacttctccttcacacaccagttgaagactaggctttggaggttttcaaagcagacggtgcttggatgggcagggagaagtaacattctgcaaatcgccgtcagaggtcctgaggacacagacctacctggcttgcattccccttgctgaatggcgtgtgctgcagctgcccactgagggctcttttccctgggattctggacttcagagtaggacagcaggctgggaagatgctgagttccatcaagtgcgtgttggtgggcgactctgctgtggggaaaacctctctgttggtgcgcttcacctccgagaccttcccggaggcctacaagcccacagtgtacgagaacacaggggtggacgtcttcatggatggcatccagatcagcctgggcctctgggacacagccggcaatgacgccttcagaagcatccggcccctgtcctaccagcaggcagacgtggtgctgatgtgctactctgtggccaaccataactcattcctgaacttgaagaacaagtggattggtgaaattaggagcaacttgccctgtacccctgtgctggtggtggccacccagactgaccagcgggagatggggccccacagggcctcctgcgtcaatgccatggaagggaagaaactggcccaggatgtcagagccaagggctacctggagtgctcagcccttagcaatcggggagtacagcaggtgtttgagtgcgccgtccgaactgccgtcaaccaggccaggagacgaaacagaaggaggctcttctccatcaatgagtgcaagatcttctaaaccccaagagacttcacacaacacttatgtatgcaccccaaagactaatggggagagggagggccgggaagccaggaaagcttggtgttttctctgggtacaccccaagcagcgtctccttttggatacagttattgatgaggcttggccactggatgttttcactaactacactctacaagtgaactccttgcccaggccagttagaaaatcccttggggaactgtgatgaatattccatctttgattaaaaaagtgaaatagtctccataattttggacgatgaagtgagtttttcaaagaattccatatttaaagacacattttatttaactaataacaaaatgtattgcttttgtatatatttagttttcacacttggaaaatcttttcctacatcctcgaaaccataaactcctctgtgagtgaaatgcttgtacgaagctctgccatatgtttgtagtgttattattttcacctcaagtagaaagtctgttgaaaccacttggctgctggatttaaatgggtaatcaaatttaaaaatgaccataaatgaatctttgcaatttgttttctacttacctgttattcacagttggatataaaatacagttccataagatatcctaatactgcctaatgattttaaagttatcactatatttttctgaaatgataaaacatcattcatttatttactatattgtctttcactcaactccagttatgcactaaatattctcctctcattcaccaagattgattgaaacaccatctttcaggtagagaatcagactgctccaagcaatggcaacagaacttggaacagaagcaagagagtgtcaccttcacttctggtagggtggttcccaggcgactgcaggtcctgtgaaagacaggggtctcaaagttctgttaatttcacaaatttgttataaatttgtctaaactgagctgttgtggcaacataatttatgaatcgtaaggtctagttaggcttattggggggatatctacatatatatgtgtatgtaagggaaaaaaaggtagaatttacagccttcaaaaaagaaaaatcaaattccaagcacaggaataagaaagctatatagcaactgctcagagaacagaaagttatcaggggaaatactgaataaatagacacacacata

SEQ ID NO: 79667 - DNA, 2235 bp, Homo sapiens
aagtgtttaccataaagggcagctgtgaggctgtgagatgggagaatcaatctatttattggtcagaaagtggttgttcagtaccttggatttctgagtgggcaaggctggaccctgagccctgggacctctgaagtgaacactgcagggccatttgtttccaacatggctagatccatcagaaactgaagccgtggagaacgctctcggggcctttgccacttcttggagtagaagccgacagagagctgtttggaaacttctccttcacacaccagttgaagactaggctttggaggttttcaaagcagacggtgcttggatgggcagggagaagtaacattctgcaaatcgccgtcagaggtcctgaggacacagacctacctggcttgcattccccttgctgaatggcgtgtgctgcagctgcccactgagggctcttttccctgggattctggacttcagagtaggacagcaggctgggaagatgctgagttccatcaagtgcgtgttggtgggcgactctgctgtggggaaaacctctctgttggtgcgcttcacctccgagaccttcccggaggcctacaagcccacagtgtacgagaacacaggggtggacgtcttcatggatggcatccagatcagcctgggcctctgggacacagccggcaatgacgccttcagaagcatccggcccctgtcctaccagcaggcagacgtggtgctgatgtgctactctgtggccaaccataactcattcctgaacttgaagaacaagtggattggtgaaattaggagcaacttgccctgtacccctgtgctggtggtggccacccagactgaccagcgggagatggggccccacagggcctcctgcgtcaatgccatggaagggaagaaactggcccaggatgtcagagccaagggctacctggagtgctcagcccttagcaatcggggagtacagcaggtgtttgagtgcgccgtccgaactgccgtcaaccaggccaggagacgaaacagaaggaggctcttctccatcaatgagtgcaagatcttctaaaccccaagagacttcacacaacacttatgtatgcaccccaaagactaatggggagagggagggccgggaagccaggaaagcttggtgttttctctgggtacaccccaagcagcgtctccttttggatacagttattgatgaggcttggccactggatgttttcactaactacactctacaagtgaactccttgcccaggccagttagaaaatcccttggggaactgtgatgaatattccatctttgattaaaaaagtgaaatagtctccataattttggacgatgaagtgagtttttcaaagaattccatatttaaagacacattttatttaactaataacaaaatgtattgcttttgtatatatttagttttcacacttggaaaatcttttcctacatcctcgaaaccataaactcctctgtgagtgaaatgcttgtacgaagctctgccatatgtttgtagtgttattattttcacctcaagtagaaagtctgttgaaaccacttggctgctggatttaaatgggtaatcaaatttaaaaatgaccataaatgaatctttgcaatttgttttctacttacctgttattcacagttggatataaaatacagttccataagatatcctaatactgcctaatgattttaaagttatcactatatttttctgaaatgataaaacatcattcatttatttactatattgtctttcactcaactccagttatgcactaaatattctcctctcattcaccaagattgattgaaacaccatctttcaggtagagaatcagactgctccaagcaatggcaacagaacttggaacagaagcaagagagtgtcaccttcacttctggtagggtggttcccaggcgactgcaggtcctgtgaaagacaggggtctcaaagttctgttaatttcacaaatttgttataaatttgtctaaactgagctgttgtggcaacataatttatgaatcgtaaggtctagttaggcttattggggggatatctacatatatatgtgtatgtaagggaaaaaaaggtagaatttacagccttcaaaaaagaaaaatcaaattccaagcacaggaataagaaagctatatagcaactgctcagagaacagaaagttatcaggggaaatactgaataaatagacacacacata

SEQ ID NO: 79668 - DNA, 371 bp, Homo sapiens
tttacagcttaataattattttgggggaaattattcatattacttttaacacacaattacaccatggaatgtacttcattcaatgtgagatgggaaatgtaaagtataaagatcactggttttgtagggaacctatcaataaggaagtcagggcttagttgatgatcgccatggtcatagtactgaattcagagagaaatgcagatcccatgaattcagaactcagtgcacttcagagtgaaatgactgtcttgtaaagcgattttcatattaagactaactcttgttaatactgatgcaaaatcatatccaacaccttgtatttatgtgatgcttcacttttctaaaaggaatttcaattatttgatatt

SEQ ID NO: 79669 - DNA, 709 bp, Homo sapiens
agagttcctggttcccttatcgtgtgacagttctaagtcaattttgtcatgtggttttctgactcacagactagtaagaagttagtaattagagagctaagtagattagggttgttggagatgagaaacccacgttttgggaaaacctggcaagtgacaacttaacatcaaggaagtagtcagaaaagctaaaactgacaaacagaaggtagaagaaagtagctccacactcatgggatgtgaaatctacaagcgtgcatgcccggcaaatgcctctccaatgcactggagcgttttaagtggaaaccactagaatctctgtgtagtctccggaagtggctgtgagggctgcattatctctgcacagcttcctcttggtgggcccagctgtgatctttatggatggcacacatcagctttcaggaaaagcacatgaaaggtgctagggctcttggagctgactgtaggtttgggagttgtctgtctccttgctctagattacagctctgtgtgttgtgtggggtctccatggtttgccaaattatctcttcctcacttagccacaaggctgacagttaggaactatctcttcttgattgcattaggttggctgcttcctgaatgcatatcaaaaggctccttcctttagttcagtgctttcaacctgagctgtgcatcagaatcacctgaggtcctttaaaaaaaaaaa

SEQ ID NO: 79670 - DNA, 456 bp, Homo sapiens
gcgccctctcacgctttttcgcgcttgtgctctcacaccccttttcttgcttctgcgacttcaattcctatgatttctcctagaattcggattactactccctcccttcacgcatttgccacctctatggccaccactatcctcgcgcgacccccgaagtctccgctcccttttccctctcctgcccccgcaacacccccagcccggcagtttgtttaaaggtctgggttaccttgggccccaggcgcgtgatatagaacgtcagcaactgctgctgtccaggcgctcctcagccagccttctctcctgacctctcctcagggctggtcacaagggggccgccccctggcccctcccctctcgacgtgcggcccccaaccccggattctgccctcctgcagtgatgaatggcaccgctgtcccgcgcaggcaggcaaacctcttcctgaaacagac

SEQ ID NO: 79671 - DNA, 272 bp, Homo sapiens
ggggaaactgaggcccagggaggaaaagcactcagccactttattcctatgctccaccctctgagctaatgagctccagaagtgcagactttcaagacagtggcaaaaagccgtctcttcttaggcaggaattgcctctgcctggccatggcactgaccaccccaacccttctaggaattttccagagcaactctgggagctgggaggtgggcagtgagatgggacagactcagcacccaccccattttgcctgcttgttccctgcctcaga

SEQ ID NO: 79672 - DNA, 330 bp, Homo sapiens
ccacatttggttcatgtggaaaggctggctggggctaagacttgcccgtacattagcgacatcatagccagagtgaggacccttagaacagtgcctgtcaagcttttttagtcctagccttttggctgagtcattctttagctcaataatttctactttctaatggaataataacacttgtcaaggtataagcattttttgggaagagctatatggatggttcctaattgaatcacaaaaaatatgcttgtcataaagtctagactaattagaaaactgcaggcctcaaatcctagtgatggaattgtatcaatatattctctacagtta

SEQ ID NO: 79673 - DNA, 511 bp, Homo sapiens
  misc_feature (28)..(28): n is a, c, g, or t
  misc_feature (73)..(73): n is a, c, g, or t
  misc_feature (94)..(94): n is a, c, g, or t
  misc_feature (121)..(121): n is a, c, g, or t
  misc_feature (216)..(216): n is a, c, g, or t
  misc_feature (241)..(241): n is a, c, g, or t
  misc_feature (272)..(272): n is a, c, g, or t
tctcttctcaataaaatacaagatattncatagccaagatgtgcaaatggtctatttggtcactaagtttttnaaagggaaggggcaggggatnagaattcatcggaaccgaacttaggtngagtaccctaattttccttgcacccatgcctgtccaatcagatgactctgggaaacgccaaacaggctgaatcaatgtcttggtgtggttttttncttccagatggtttttttttctcanctataaaaggatctatctttaaaaataaacngtattaaatctgtaacatcaaaggcagaaggttggtgtgtgtgtgtgtgtgtgtgtgtatgggtatgtgtgaaattccacaggaaatctgatacgtagccagaatcaagcaccctcacattactgatttcagggagtatggcactgtgaaccgtgtaagcctgaggtggggaggtgatttaaattctattataagctgatacctactatctaagaccctgtcaaatgatcatatcaaaa

SEQ ID NO: 79674 - DNA, 1256 bp, Homo sapiens
tgtctgtgtgtctttgtgtgtaaaagcaacgcataaacatacccagggctttcacttattttattgaagcaaacaaacaaaaacagccactgggtttgtcttttcccctactcctgcctgagcgccgccgggtttctgagctgctccgggcgcggacctagctcacccgcagccggatgtcggagccggagctgctccccacccggcctcgcccgcgggcgacaaaaccgtccctctggccacgggagagcatcgccttgccaaaatcaactcgcattttcatgtattcaaatgagaaagactgagaagggcgatttcccctgctgggcagtcgacagcgttggaaggaagaagtgccccctagggcctcgcggaaacgggaacaaacctccctcgaggcccccggaaccgatatggcgaccccgcccagacctgggtccccgcggccgcgcgcgtctcccgccgttgtggcccccgagttactgacttttgttcacaccggtcagcgcctgttggaggacgtgctcagccccagccggtccctcctcatccagccgatccccctcctggggagcgcggtctctgctctgtgctgctgaaaggatcctcgggctttcccgctctactttaaaacccctagggctaggggcctaggggagggactggcaatgcacgcttcacacaaagaggtggaaaattagagggaaacgtgacacctcttaggtatccgttagagcagaaaggacctgagcagctgaggtcctactgcgtgccacagacttggcagggtgcttggagatcctggcgtttccccacctgctgctcctgtgtgcaagagctgggaggctggaaacctgggcgagggtaggtcaggacctccattcctctccatcagcagaagcccgcgttaatgcagagcagtgatggaagccgaggggcttggaaaagtcaactatttcatctcctgcctcaaggctggcagcttaaatctaaatccttcctgaagggtcgaccagtgtttagcttctccgtcccaggccggccagcccccgccaatccactcgcgcccctccccccacacacccaggagctttcccacggtctttcagttgtccctggtggtttagctttggctattcatatgtgattaccctcaaattacatggcactatttaacagatgctttaataagaatcatatgccatatccttcacttagaaagaaaataaaaatatattctgccggaagtttttcat

SEQ ID NO: 79675 - DNA, 784 bp, Homo sapiens
aacagagcaagaccctgtctcaaaaagaaagaaagaaatgaggatatgagtttgctgctctttaaatcgatgactttgcagctcttcatctgaagaggtggcgtctgtttctcctgtttgagtgtggcacatccaggagagtggctttgagcagtggtgtggcagacgtgactgtaggccagccctgagctgaggctgccaggggactgcacacttcttctctcagctctgccagctgctgcactgtgtctgggccagcccgctggagcacagagttcagtgcattgggacagctacagcccattgcatcgggacagcccacagcaacaagacccacctgtcgccactgcaggtgcgtgagggtgcccggctgagagcagacaaaccgcctagcaggtggcttttcaagcggaatcacagactagctccatcgctgtggtgaacgttctccccagtgccaggattccacttggcccctgactgcttgagcagccgatgtgacagccatctctctgctgccgtgcatgtcggctgggctggagccagtgcatcaggaagtagacgcagaagtggatcaggagcaaaacattcctgagagctggcagaagctggcgtctggagccgctgggatgcgggtatgggctctctcagtggcggaggaacagcctcctggcagaaccaaaggttgctttgtgccttcgatgctgctgctggccagagtggttttctgtctcagaccctgtaccacgtgtctgttctttctcattttttacttaaaggagaa

SEQ ID NO: 79676 - DNA, 263 bp, Homo sapiens
tccaaacggggaaaccgtcattgaccttgacattgtgccgccttcttcagcctttcaagcccttttggatagaagcccttcccctacagcacacacagtattttcagtgtgcactcagcctaaggctgccttctcccctgagaccccactgcaaaggtgcagcccagcaccccgtgcacacacccccagccgctccctctgcccagatgggctgcccccatttcctccattcagtctgcctggacgggctgccccacctcctg

SEQ ID NO: 79677 - DNA, 545 bp, Homo sapiens
ctgtgaggcctccagtgagaaatgggaggcagttctgggagggggttttttcagtgtcaccaacagagtcaacaaggaaacataattagagggctttgaaatgatctactgaaatacctaaattgatagaaattaatcatactcaatctaggacatgttcctttactccttaaaaaagaaaggaaagatctctaaattcaaagctagattgtaaataggcattcaagaagtattgtcttaaatttacgatgaatttcttgtgagcagaggacgaaacaggtgaattctcaccagactcaaaccagatctcaattcgtagtaatgctaaatcgtcttccgtgttctcagaggttcttttcagtgtctgtcagaacttggcatactttctccatagtacgtagaccttctaatactctgctaaatgaaaccacacttgttatctgaaagtgtgtgaaagaaacaatgtatgaaaatttacatttgatcatccggcattggaaatagtttgaactatttccaaaaatcccttaggggatgaggggtga

SEQ ID NO: 79678 - DNA, 865 bp, Homo sapiens
tcaaatgagagcttacactgttgtttgatttatcaatttttagacttgtttttaatctattgatgaatgtagacattaggtatatccgtctattttgttaagtgaggacctagctttctcatactttctgtatcctttctaaggtattcataaactacttatgaatcaattactagttatcagtagaaaagatttacatttgactgtgcaggtattcacttttataccaagtgatttgcgactgcttgctttcttatagaaacgttatttttcctggagttgataatttgccttgctttttcatttgcctactttttttttttaagtatcataatattttcaacatctctgctacatgtgtatggctattatttttcatatgctcaaaagcatagattattattttattttctagagagctccttcttagacattctgttgttttctccagttttgacatgtttctccccaggcctgctgcacacacgtctgtctggaatttctcttgagcatcttcctgagacttatcttcatccctgtttacttcttctatctttttttttttttttttttttttgaggcagtctcgcttttttcccccgggttggaaccccagggggcttgatcctgggctctcactgtgaaacctctcaaccttctccaatttcggggtgattctctcgggcctatatagccctccgtgaagtaaggcggggatattcacgaggaacccacaccaaccaacacacccaagattaattttttaatatatttgaggggtgtttttcccctaatatgtggcaccaggtctggtctcaagagctcctgtccctcagttgatttgcccacttttgacttcccaaaa

SEQ ID NO: 79679 - DNA, 2331 bp, Homo sapiens
  misc_feature (1001)..(1001): n is a, c, g, or t
  misc_feature (1015)..(1015): n is a, c, g, or t
tcaaatgagagcttacactgttgtttgatttatcaatttttagacttgtttttaatctattgatgaatgtagacattaggtatatccgtctattttgttaagtgaggacctagctttctcatactttctgtatcctttctaaggtattcataaactacttatgaatcaattactagttatcagtagaaaagatttacatttgactgtgcaggtattcacttttataccaagtgatttgcgactgcttgctttcttatagaaacgttatttttcctggagttgataatttgccttgctttttcatttgcctactttttttttttaagtatcataatattttcaacatctctgctacatgtgtatggctattatttttcatatgctcaaaagcatagattattattttattttctagagagctccttcttagacattctgttgttttctccagttttgacatgtttctccccaggcctgctgcacacacgtctgtctggaatttctcttgagcatcttcctgagacttatcttcatccctgtttacttcttctatctttttttttttttttttttttttgaggcagtctcgctttttcacccaggctggagcacagtggcatgatactggctcactgcaacctccaccttccaattcaagtgattctcatgccttagcctcctgagtagctgggattacaggcacccaccaccacacccagctaatttttatatttttggggtttctccatattggaccaagctggtctcaaactcctgtcctcaagtgatctgcccaccttagcctcccaaaatgctgggattacagatgtgagccactgcacccagcctgtttcttgcatcttatatttacttctatttactttcttttctggtgaattatttccatcaacatttgctgcaaaaggagtacacataggccggacgcagtggctcacgcctgtaatctcaacatggtaggctgaggcgggcagattgtctgngctcaggagcttgngcccagcctgagcaacgtggagaaaccctgtctctgctaaaaataaaaaaaaattgggtgcattggcatgcgcctgtggccccagctacctgggaggctagggtgggaggatcgcttgagcccaggaggtcgaggatgcagtgagacaagatcatgccactgcgctccagcctgggtgacagagtgagaccttgtcttaaaaaaaaaaaaaagaaaaaaagtacacagaatatacattttttgtgatctttatttccagtgatgagcactgcacctaacaacagcagaatattcttctcaactacactaggaacattctgcacgctaggccatgaaacctcaatagattaaaatgatagaatgaatacacagtatgttctctgaccacaatagaatgaaattagagtcaataatagaaaggtatttagaaaacccacaaacagctcactcttaaatagtcagtgggccgaagaggaaatcaaaagagaaataagaaaatacactaagaaatacattgagatgaatgaaaatgaagacatggcataccaaaatgtatgggataaagctcaagcaatgcttctagggaaatttatagctgttaatgcctacaataaaaagaaagctctcaaatcagtaatcgattcaccaccataagacactggaaaaagaaaagcatactaaacctgaagacagcaaaaggaaggatgtaatcaagattaaagcaaaagttaatgaaatagagactgggaaaaccagtgaaaccaaaagctggttctttggaaagatcaacaaaattgacaaacctttagctaaacatatcagggtaaaaagagaaaacattcaaattactggaattacaaatgtgctgggtgtggtggcacacacctgtaatcccaacacctgggtgtggtggctcacacctgtaatcccaaggtgggaggatcacttgaggctgggagtctgagaccagactgggcaatatgacaagacctcatctatgcaaaaaaagaaaattcaaaattaggtgggtatggtggtgcatgcctgtagtcccagatactcaagagactgaagcaggaagatcactagagccaaggagttcaagggtgcagtgagctatgatcatgctgctctactccagcctggatgatagtgagactcccaactcatatataaaaaaaaaaaaaaaaaggaaatgaaaccgtagtcgttacctattgtggcaggaaatcactagaaaatgtctcaagctgataatgaagagataattgtataagcctgtcaatcctatcagtaaaaacaagcattacaaaagg

SEQ ID NO: 79680 - DNA, 555 bp, Homo sapiens
ttctcactctaccttcaagacctcgcttcctctgcccattggacctgccagtctctcatgcccacagatctatttgtaaaatctcatgtctgattacatagaacccccgctctagattcttccatggccctgatcactctgtgttataactctgtgtattggctattgtggccagttttctacaagtaaccggatttttcctctgaattttatgggatttctcctcattggcacaatatgcagggctcagggttgtagcacccctcattatgtcgaatgacccatctctacatgtttgtttctcatctccaggattctggtccatgttgaagagttttcaaccaagggaggaacctctctggcaggggacacaagaactgtgtcatcaaattgaaccctgagacagccacaaggccaactggggctctttaagcccctggaggttaggctgatgtgaatagagttcatgctattggctgcactaattgatcccctaatccgggggaaagaaggttgctgttgaacaacaggaaactcagcaaacatgcagacaat

SEQ ID NO: 79681 - DNA, 344 bp, Homo sapiens
tttttttttagatggggtctcgctgtgtagcccaggctggagtgcaatggcgtgatctcagctcactgcaacctctgcctcccgggttcaagcaattctcctgcctcagcctcccaagtagctgggactacaggagcgtgccaccaggcccagctaattttttgtatttttagtagagacgggatttcactgtgttagccaggatagtctcgatctcttgacctctccgcccacctcagtctcccaaaatgctgggattacaggcatgagccaccgcgcccgggccttcagaagtatattttaataaaaatgcttcagaagtatgaaaatggttgtgtagttat

SEQ ID NO: 79682 - DNA, 441 bp, Homo sapiens
ccatggtgttgctttcaggcaacgtacatgtgcctgccatgtataagacaccacctggttaggactgagctttagcctcggagaaggaagaccagagcatccgaaggcaagatacagaagaggaagcatatggcaacgctctctgtaaaaagatggggccgggtgtgggggctcacgcctgtaatcccagcactttgggaagccgaggcaggtggatcacttgaggtcaagagttcgagaccagcctgggcaacatggtaaaaccccatctctactaaaaatacaaaaattagccaggcgtggtggcacgcacctgtagtcccagctgcttgggaggctgaggcaggagaatggcttgaacccaggaggcagaggctgcagtgagctgagattgtgccactgcactctagcctggggaacagagcaagactctgtctcaaa

SEQ ID NO: 79683 - DNA, 7385 bp, Homo sapiens
ggcgccgccggaccgcgccccaccccgcgcgcccgagcagggcgactgtcattagcttcctggacgggacccggggcgggatcctggtgtcctgaaaggggcccgggcgaccctaagaggaagaacttttgggggcggggtccccggtcccgcgtcccctgggcagccgctattgtctacgcgcctcgctgggcggcgcggggggcgtgatcgcggcggccccgggctctgggtgcggagacccaggcggggctgggcccagggcggcggcgggagaagccggggaagccgaagagcctggggaggaggagctgcgagcgcgggagacgagcaggagccgcgcgggccgcggcgagcgcgatgccggcggcggcgggggacgggctcctgggggagccggcggcgcctgggggcggcggcggcgcggaggacgcggccaggcccgcggcggcctgcgagggaagtttcctgcctgcctgggtgagcggcgtgccccgcgagcggctccgcgacttccagcaccacaagcgcgtgggcaactacctcatcggcagcaggaagctgggcgagggctcctttgccaaggtgcgcgaggggctgcacgtgctgaccggggagaaggtggccataaaagtcattgataagaagagagccaaaaaggacacctatgtcaccaaaaacctgcggcgagagggtcagatccagcagatgatccgccaccccaatatcactcagctccttgatattttagaaacggaaaacagctactacctggtcatggagctgtgccctgggggcaacctgatgcacaagatctatgagaagaagcggctggaggagtccgaagcccgcagatacatccgacagctcatctctgccgtagagcacctgcaccgggccggggtggtccacagagacttgaagatagagaatttgctactagatgaagacaataatatcaagctgattgactttggtttgagcaactgcgcagggatcctgggttactcggatccgttcagcacacagtgtggcagccctgcctacgctgcacctgaactgctcgccaggaagaaatacggccccaaaatcgatgtctggtccataggtgtgaacatgtatgccatgttgaccgggacgctgcctttcacggtggagcctttcagcctgagggctttgtaccagaagatggtagacaaagaaatgaaccccctccccactcagctctccacaggtgccatcagtttcctgcgctctctcctggaaccggatcctgtgaagaggccaaatattcagcaggcactggcgaatcgctggcttaatgagaattacacgggcaaagtgccctgtaatgtcacctatcccaacaggatttctctggaagatctgagcccgagcgtcgtgctgcacatgaccgagaagctgggttacaagaacagcgacgtgatcaacactgtgctctccaaccgcgcctgccacatcctggccatctacttcctcttaaacaagaaactggagcgctatttgtcagggaaatctgacatccaggacagcctctgctacaagacccggctctaccagatagaaaagtacagggcccccaaggagtcctatgaggcctctctggacacctggacacgagatcttgaattccatgccgtgcaggataaaaagcccaaagaacaagaaaaaagaggggattttcttcatcgaccattctccaagaagttggacaagaacctgccctcgcacaaacagccctcaggctcgcttatgacacagattcagaacaccaaagccctcctgaaggaccggaaggcctccaagtccagcttccccgacaaagattcctttggctgccgcaatattttccgcaaaacctcagattccaattgtgtggcttcttcttccatggagttcatccccgtgccaccgcccaggaccccgaggattgtgaagaaaccggagccccatcagccagggcccggaagcactggcatcccccacaaggaagaccccctgatgctggacatggtgcgctccttcgagtctgtggatcgcgacgaccacgtagaagtgctgtctccctctcatcactacaggattctgaactccccggtcagcttggctcgcagaaattccagcgagaggacgctgtccccgggtctgccatccggaagcatgtcgcctctccatactcctttgcatccaactctggtctcttttgctcacgaagataagaacagccccccaaaagaggagggcctgtgttgcccacctccggttcccagcaatggccccatgcagcctctggggagccccaattgtgtgaaaagccgaggccggttccctatgatgggcatcggacagatgttaaggaagcgccatcagagtctgcagccatctgcagataggcccctggaggccagcctgcccccactgcagcccctagcccctgtgaaccttgcctttgacatggccgatggggtcaagacccagtgctaacttgggccagcggggtttggggtatctctagaaaacagcaactgaacagagctccacacatctgtcagggtgtgagcactccaaggcctcgcgtggagcatccttagtcccacctgtagctgaatccacagacccaaagcctgcacaacccaacctcgcttagggacccccagagatgctggaatcgctaggagggttggctccaggggcagccaattcctatcattcagatcttccttcctcccaagtactcaccaaccccttccacttcccacttcccccaggcttggggggaaaacagggcatgagccttctggggcactcagattatggactgttaccagatctttcttcacgctgtgctacatgtgtgcctctcacagcagttggccacagttacagggagagaacaatatcacagtcattcatccaggccacgtttcctctgcggagtgtagcagccctgcctttcatagcagggattacctgaaggccagcaggagccgggggcaggcccaggatcctcagaggaagatggagaggagcttcggaccaagatcaaaccaaacagtggggaccccaacagaagagaaagactgaaggagacactcatttcccaagcaagattttgatagatttttgttgttgttgttgttgaaacatgctaatgattgaattatcttttccaaagattttttttaaatgtgatgtcggtaaattgaaataacataattttttaaaacttggatggagagatgagaagcaattccaccaaactcatgttttcacaggagggttcagtgtggagagcaaaaaagctgactgtggtgatttgctgagtgctgtggcccacaggcagggcaagtctcggtggccctgtgttcatcctgttgtttaaggcatagccctgatccttctggaaggcatagaacacggttacagctggttctgtagaaagagggaaaagatgattgtgacaattcagagcataactcagatggcgagaaggcagcattatctctgtgcgatgctgatttcaagctgcccacagaactggtgcggctcagagctcggcgagtttgctgggagctgggagcaggcttgcctggcagagaacctgttcagatacaggccagtttcttcttcgaggaaagccaagctcctcaaacagggttcagtccacgttgtgttttcacacctttctccaaggatcgaaccaaagatgtgtctccagtattgtgtctgtgcccctgtgtgtgttttgtggacagccgtgttgtctgactgtatccagctggcacttgacagggtgcagtcattggtgagaagaatcagaaaaagaagacccatcagcacaggttggataggggttagtgtaggagaccagttacagaatggcctggagtcttcaacttttgaccggtgcaggtgtgaccagagaccacctctgtggccacctcagatagtcatctcagtccaaggatcccaaaacacaaatctagaattgcaaagccagcctttatttccctggcaggcagccttgccagaaggcagagaggcagttctgaatcattctctcattcaccagtggtgacatccttcagtccctcacatctctgacagagcgggacagaatggatatttggctgaccttggtgagacctggagctgcctgtttcttccctaggggatcaccacggctctagggcattctaggatgaggtcagaccccttggccattggtgttattttttgtatagcttcagactgggttccagaacttaccattgaaaacagagcttttaggccaggtgtggtggctcacacctgtaatcccagcactttgggaggccgaggcaggtggatcgcttgagctcaggagttcgagagcagcctgggcaacatggtgaaagcccgtctctaccgaaaaatacaaaaaaaaatagctgggtgtggtggtacgtgcctgtagtcccagctacttcggggactgaggtgggaggatcacttgaacctaggaggtcgaggctgcagtgagccaagatcatgctactgcactccagcttaggtggcaaagtgagaccctgtctccaaaaaaagaaaatagagctttataagcagagagaagaaaataatcatctaagaccatctctccattcgacatgaagtgtaccttttctaaagacggtttccagctgcaacggctccactttgcaggcttgcagggtgtatacctgcgcattgggaacttgctggaacccctgatgcattttccttgagagcaggggtacttccgccttgccgttagcttgtggagaacgtgcttcttattcctggcaggcttcaagaacagctgcacatgtgccgctaactgaccgcgttgccattggcgacctggactctgaactcaggtttattctaaacccagtgagcggtgagggggagtgatgaaaggggatcagctgtatttgtgtgtgtgtgtgtgtgtgagcacctgacaaatctatgaaaccgagtgaaaggagaaatgttagattctttattattttattatatttatatggaaagctcgactctccctttggtaagtccgaagcatgttgtttgttcgaccgtgactgtcttcctcagtctgtgcctgtgattccagtcaccctgtagttactgacagaaattgactggactgtcattgtgtgaagtctaggaggaaatgtccattttaattgtatgatttggtcataagtaaggactatatttatgtcaccattattagatatatgtacttttgtaatgactgtgaaatacacttttccctcactacgactgcttctttatttgctgataaatcttaaaacaactaagtacgttgcaaataatagtacaggtaccatcttttatgtgaagttctttttctttttttgagacagggtcttgctctgtcacccaggctggagtgcagtggcacaatcacagttcactgcagcctcaacctctccagattcaagtgatcctcccatctcagcctcccaagtagctgggactacagttgtgcaccacaatgcctagctaattttttttgtattttgtagaaatggggtttcgccatgttgctcaggctgatctcaaactcctgggctccaacgatctgcccaccttggcctcccaaagtgctgagattacaggcgtgagccactgtgcctggccttatgtaaagctcttgacctagcatctgactggaaacaagcgggaattgcattggggggcattttctgggccagtttccctgccttattttacctgcaataggtgtgcctacaaaagtctttctgacatacacactgcaggtggcagttcaagaagaatcaacctttttcatttggggatattaggatcttccttggagactctgaaaatggcacacaaagaatggcagttatgaacgtgacttctagattttgtccttgtaggaggccttggtcatggataggggaagagggatgatgggatggaatgggagggtgggatctagatgacctcttgaaattgtcccagttactgcttccttcataactgttcacaaaacgtttttcatatataccaccttgtttcccctgggaagtgaggggacgaagccttagagggtgacatagctagaaagtggagaagctcactgttcactgtgcaaagccccagtagtcggattccggggaaaagaacaagtatctagttttgatgacaatgttttcttgtaagaatcccaacactttagaatagaaaaggacctaagattctctggctcagccccagcctttctgaagaagggaaaactagggacccagatggtttaaggacaccccagagtccccagatgagctggcatttgagctggtctggagcagagtttctccctcaaagaacacagagaaatcagagagtggctgccatggtcagagggggatgtcaacaacagatcaagccgtcatcacaacaggtatttctgaagttcctgcagggactaggtcttgcatttttaagtccttttcaaaactgtgcagcttcctgaaccttatgctgtttgtcccatccactcttgaagctggggaaagacagctttctttgggaactctgtctttctcagttgacttcccaagtaagcagcaaacccctggatagccttgttatctactttaggtattaagaggctattgggttttactagattaaatcaataaaacatttcctatagagccatatcatacactgaagcaaattcagaaagaatgcaaaactgctatcttttgggggagtctggaagcctgttggttagtgtatttattttctttgtggggtcttctgtgagctacaggcacagtaagaataattcagagcggtactgggagttggttcaatttcatgtcatcacttttcaatgaagggagtgcatttcctgagtagtaaatgagtatattatttgtggcagcttttctgttaagggagctttccagacatctggttgcaaagacaaataggatatatatttgtacttcttctctgtggacatgtttttgtgacacacagttatctctaggagttgacgtctgtgggcactaagggactgaggttgggggagaaagctgaggaggctttggaagagaaggtgaggagcatttcaggatttgcagtccccctccacatgtatccacatctgagctggtggtgttccaataatgaggcatttggggcaaccaattttggaaggatagaatagctttatgtggagcaaacttgaggatcaattggagttgagtggtttaaaacttaaagatggcacaggaagctgtatcatttacaggtgaaaaaaataaatgggtctgacttca

SEQ ID NO: 79684 - DNA, 5197 bp, Homo sapiens
ggcgccgccggaccgcgccccaccccgcgcgcccgagcagggcgactgtcattagcttcctggacgggacccggggcgggatcctggtgtcctgaaaggggcccgggcgaccctaagaggaagaacttttgggggcggggtccccggtcccgcgtcccctgggcagccgctattgtctacgcgcctcgctgggcggcgcggggggcgtgatcgcggcggccccgggctctgggtgcggagacccaggcggggctgggcccagggcggcggcgggagaagccggggaagccgaagagcctggggaggaggagctgcgagcgcgggagacgagcaggagccgcgcgggccgcggcgagcgcgatgccggcggcggcgggggacgggctcctgggggagccggcggcgcctgggggcggcggcggcgcggaggacgcggccaggcccgcggcggcctgcgagggaagtttcctgcctgcctgggtgagcggcgtgccccgcgagcggctccgcgacttccagcaccacaagcgcgtgggcaactacctcatcggcagcaggaagctgggcgagggctcctttgccaaggtgcgcgaggggctgcacgtgctgaccggggagaaggtggccataaaagtcattgataagaagagagccaaaaaggacacctatgtcaccaaaaacctgcggcgagagggtcagatccagcagatgatccgccaccccaatatcactcagctccttgatattttagaaacggaaaacagctactacctggtcatggagctgtgccctgggggcaacctgatgcacaagatctatgagaagaagcggctggaggagtccgaagcccgcagatacatccgacagctcatctctgccgtagagcacctgcaccgggccggggtggtccacagagacttgaagatagagaatttgctactagatgaagacaataatatcaagctgattgactttggtttgagcaactgcgcagggatcctgggttactcggatccgttcagcacacagtgtggcagccctgcctacgctgcacctgaactgctcgccaggaagaaatacggccccaaaatcgatgtctggtccatgtgccatcagtttcctgcgctctctcctggaaccggatcctgtgaagaggccaaatattcagcaggcactggcgaatcgctggcttaatgagaattacacgggcaaagtgccctgtaatgtcacctatcccaacaggatttctctggaagatctgagcccgagcgtcgtgctgcacatgaccgagaagctgggttacaagaacagcgacgtgatcaacactgtgctctccaaccgcgcctgccacatcctggccatctacttcctcttaaacaagaaactggagcgctatttgtcagggaaatctgacatccaggacagcctctgctacaagacccggctctaccagatagaaaagtacagggcccccaaggagtcctatgaggcctctctggacacctggacacgagatcttgaattccatgccgtgcaggataaaaagcccaaagaacaagaaaaaagaggggattttcttcatcgaccattctccaagaagttggacaagaacctgccctcgcacaaacagccctcaggctcgcttatgacacagattcagaacaccaaagccctcctgaaggaccggaaggcctccaagtccagcttccccgacaaagattcctttggctgccgcaatattttccgcaaaacctcagattccaattgtgtggcttcttcttccatggagttcatccccgtgccaccgcccaggaccccgaggattgtgaagaaaccggagccccatcagccagggcccggaagcactggcatcccccacaaggaagaccccctgatgctggacatggtgcgctccttcgagtctgtggatcgcgacgaccacgtagaagtgctgtctccctctcatcactacaggattctgaactccccggtcagcttggctcgcagaaattccagcgagaggacgctgtccccgggtctgccatccggaagcatgtcgcctctccatactcctttgcatccaactctggtctcttttgctcacgaagataagaacagccccccaaaagaggagggcctgtgttgcccacctccggttcccagcaatggccccatgcagcctctggggagccccaattgtgtgaaaagccgaggccggttccctatgatgggcatcggacagatgttaaggaagcgccatcagagtctgcagccatctgcagataggcccctggaggccagcctgcccccactgcagcccctagcccctgtgaaccttgcctttgacatggccgatggggtcaagacccagtgctaacttgggccagcggggtttggggtatctctagaaaacagcaactgaacagagctccacacatctgtcagggtgtgagcactccaaggcctcgcgtggagcatccttagtcccacctgtagctgaatccacagacccaaagcctgcacaacccaacctcgcttagggacccccagagatgctggaatcgctaggagggttggctccaggggcagccaattcctatcattcagatcttccttcctcccaagtactcaccaaccccttccacttcccacttcccccaggcttggggggaaaacagggcatgagccttctggggcactcagattatggactgttaccagatctttcttcacgctgtgctacatgtgtgcctctcacagcagttggccacagttacagggagagaacaatatcacagtcattcatccaggccacgtttcctctgcggagtgtagcagccctgcctttcatagcagggattacctgaaggccagcaggagccgggggcaggcccaggatcctcagaggaagatggagaggagcttcggaccaagatcaaaccaaacagtggggaccccaacagaagagaaagactgaaggagacactcatttcccaagcaagattttgatagatttttgttgttgttgttgttgaaacatgctaatgattgaattatcttttccaaagattttttttaaatgtgatgtcggtaaattgaaataacataattttttaaaacttggatggagagatgagaagcaattccaccaaactcatgttttcacaggagggttcagtgtggagagcaaaaaagctgactgtggtgatttgctgagtgctgtggcccacaggcagggcaagtctcggtggccctgtgttcatcctgttgtttaaggcatagccctgatccttctggaaggcatagaacacggttacagctggttctgtagaaagagggaaaagatgattgtgacaattcagagcataactcagatggcgagaaggcagcattatctctgtgcgatgctgatttcaagctgcccacagaactggtgcggctcagagctcggcgagtttgctgggagctgggagcaggcttgcctggcagagaacctgttcagatacaggccagtttcttcttcgaggaaagccaagctcctcaaacagggttcagtccacgttgtgttttcacacctttctccaaggatcgaaccaaagatgtgtctccagtattgtgtctgtgcccctgtgtgtgttttgtggacagccgtgttgtctgactgtatccagctggcacttgacagggtgcagtcattggtgagaagaatcagaaaaagaagacccatcagcacaggttggataggggttagtgtaggagaccagttacagaatggcctggagtcttcaacttttgaccggtgcaggtgtgaccagagaccacctctgtggccacctcagatagtcatctcagtccaaggatcccaaaacacaaatctagaattgcaaagccagcctttatttccctggcaggcagccttgccagaaggcagagaggcagttctgaatcattctctcattcaccagtggtgacatccttcagtccctcacatctctgacagagcgggacagaatggatatttggctgaccttggtgagacctggagctgcctgtttcttccctaggggatcaccacggctctagggcattctaggatgaggtcagaccccttggccattggtgttattttttgtatagcttcagactgggttccagaacttaccattgaaaacagagcttttaggccaggtgtggtggctcacacctgtaatcccagcactttgggaggccgaggcaggtggatcgcttgagctcaggagttcgagagcagcctgggcaacatggtgaaagcccgtctctaccgaaaaatacaaaaaaaaatagctgggtgtggtggtacgtgcctgtagtcccagctacttcggggactgaggtgggaggatcacttgaacctaggaggtcgaggctgcagtgagccaagatcatgctactgcactccagcttaggtggcaaagtgagaccctgtctccaaaaaaagaaaatagagctttataagcagagagaagaaaataatcatctaagaccatctctccattcgacatgaagtgtaccttttctaaagacggtttccagctgcaacggctccactttgcaggcttgcagggtgtatacctgcgcattgggaacttgctggaacccctgatgcattttccttgagagcaggggtacttccgccttgccgttagcttgtggagaacgtgcttcttattcctggcaggcttcaagaacagctgcacatgtgccgctaactgaccgcgttgccattggcgacctggactctgaactcaggtttattctaaacccagtgagcggtgagggggagtgatgaaaggggatcagctgtatttgtgtgtgtgtgtgtgtgtgagcacctgacaaatctatgaaaccgagtgaaaggagaaatgttagattctttattattttattatatttatatggaaagctcgactctccctttggtaagtccgaagcatgttgtttgttcgaccgtgactgtcttcctcagtctgtgcctgtgattccagtcaccctgtagttactgacagaaattgactggactgtcattgtgtgaagtctaggaggaaatgtccattttaattgtatgatttggtcataagtaaggactatatttatgtcaccattattagatatatgtacttttgtaatgactgtgaaatacacttttccctcacta

SEQ ID NO: 79685 - DNA, 4611 bp, Homo sapiens
ggcgccgccggaccgcgccccaccccgcgcgcccgagcagggcgactgtcattagcttcctggacgggacccggggcgggatcctggtgtcctgaaaggggcccgggcgaccctaagaggaagaacttttgggggcggggtccccggtcccgcgtcccctgggcagccgctattgtctacgcgcctcgctgggcggcgcggggggcgtgatcgcggcggccccgggctctgggtgcggagacccaggcggggctgggcccagggcggcggcgggagaagccggggaagccgaagagcctggggaggaggagctgcgagcgcgggagacgagcaggagccgcgcgggccgcggcgagcgcgatgccggcggcggcgggggacgggctcctgggggagccggcggcgcctgggggcggcggcggcgcggaggacgcggccaggcccgcggcggcctgcgagggaagtttcctgcctgcctgggtgagcggcgtgccccgcgagcggctccgcgacttccagcaccacaagcgcgtgggcaactacctcatcggcagcaggaagctgggcgagggctcctttgccaaggtgcgcgaggggctgcacgtgctgaccggggagaaggtggccataaaagtcattgataagaagagagccaaaaaggacacctatgtcaccaaaaacctgcggcgagagggtcagatccagcagatgatccgccaccccaatatcactcagctccttgatattttagaaacggaaaacagctactacctggtcatggagctgtgccctgggggcaacctgatgcacaagatctatgagaagaagcggctggaggagtccgaagcccgcagatacatccgacagctcatctctgccgtagagcacctgcaccgggccggggtggtccacagagacttgaagatagagaatttgctactagatgaagacaataatatcaagctgattgactttggtttgagcaactgcgcagggatcctgggttactcggatccgttcagcacacagtgtggcagccctgcctacgctgcacctgaactgctcgccaggaagaaatacggccccaaaatcgatgtctggtccataggtgtgaacatgtatgccatgttgaccgggacgctgcctttcacggtggagcctttcagcctgagggctttgtaccagaagatggtagacaaagaaatgaaccccctccccactcagctctccacaggtgccatcagtttcctgcgctctctcctggaaccggatcctgtgaagaggccaaatattcagcaggcactggcgaatcgctggcttaatgagaattacacgggcaaagtgccctgtaatgtcacctatcccaacaggatttctctggaagatctgagcccgagcgtcgtgctgcacatgaccgagaagctgggttacaagaacagcgacgtgatcaacactgtgctctccaaccgcgcctgccacatcctggccatctacttcctcttaaacaagaaactggagcgctatttgtcagggaaatctgacatccaggacagcctctgctacaagacccggctctaccagatagaaaagtacagggcccccaaggagtcctatgaggcctctctggacacctggacacgagatcttgaattccatgccgtgcaggataaaaagcccaaagaacaagaaaaaagaggggattttcttcatcgaccattctccaagaagttggacaagaacctgccctcgcacaaacagccctcaggctcgcttatgacacagattcagaacaccaaagccctcctgaaggaccggaaggcctccaagtccagcttccccgacaaagattcctttggctgccgcaatattttccgcaaaacctcagattccaattgtgtggcttcttcttccatggagttcatccccgtgccaccgcccaggaccccgaggattgtgaagaaaccggagccccatcagccagggcccggaagcactggcatcccccacaaggaagaccccctgatgctggacatggtgcgctccttcgagtctgtggatcgcgacgaccacgtagaagtgctgtctccctctcatcactacaggattctgaactccccggtcagcttggctcgcagaaattccagcgagaggacgctgtccccgggtctgccatccggaagcatgtcgcctctccatactcctttgcatccaactctggtctcttttgctcacgaagataagaacagccccccaaaagaggagggcctgtgttgcccacctccggttcccagcaatggccccatgcagcctctggggagccccaattgtgtgaaaagccgaggccggttccctatgatgggcatcggacagatgttaaggaagcgccatcagagtctgcagccatctgcagataggcccctggaggccagcctgcccccactgcagcccctagcccctgtgaaccttgcctttgacatggccgatggggtcaagacccagtgctaacttgggccagcggggtttggggtatctctagaaaacagcaactgaacagagctccacacatctgtcagggtgtgagcactccaaggcctcgcgtggagcatccttagtcccacctgtagctgaatccacagacccaaagcctgcacaacccaacctcgcttagggacccccagagatgctggaatcgctaggagggttggctccaggggcagccaattcctatcattcagatcttccttcctcccaagtactcaccaaccccttccacttcccacttcccccaggcttggggggaaaacagggcatgagccttctggggcactcagattatggactgttaccagatctttcttcacgctgtgctacatgtgtgcctctcacagcagttggccacagttacagggagagaacaatatcacagtcattcatccaggccacgtttcctctgcggagtgtagcagccctgcctttcatagcagggattacctgaaggccagcaggagccgggggcaggcccaggatcctcagaggaagatggagaggagcttcggaccaagatcaaaccaaacagtggggaccccaacagaagagaaagactgaaggagacactcatttcccaagcaagattttgatagatttttgttgttgttgttgttgaaacatgctaatgattgaattatcttttccaaagattttttttaaatgtgatgtcggtaaattgaaataacataattttttaaaacttggatggagagatgagaagcaattccaccaaactcatgttttcacaggagggttcagtgtggagagcaaaaaagctgactgtggtgatttgctgagtgctgtggcccacaggcagggcaagtctcggtggccctgtgttcatcctgttgtttaaggcatagccctgatccttctggaaggcatagaacacggttacagctggttctgtagaaagagggaaaagatgattgtgacaattcagagcataactcagatggcgagaaggcagcattatctctgtgcgatgctgatttcaagctgcccacagaactggtgcggctcagagctcggcgagtttgctgggagctgggagcaggcttgcctggcagagaacctgttcagatacaggccagtttcttcttcgaggaaagccaagctcctcaaacagggttcagtccacgttgtgttttcacacctttctccaaggatcgaaccaaagatgtgtctccagtattgtgtctgtgcccctgtgtgtgttttgtggacagccgtgttgtctgactgtatccagctggcacttgacagggtgcagtcattggtgagaagaatcagaaaaagaagacccatcagcacaggttggataggggttagtgtaggagaccagttacagaatggcctggagtcttcaacttttgaccggtgcaggtgtgaccagagaccacctctgtggccacctcagatagtcatctcagtccaaggatcccaaaacacaaatctagaattgcaaagccagcctttatttccctggcaggcagccttgccagaaggcagagaggcagttctgaatcattctctcattcaccagtggtgacatccttcagtccctcacatctctgacagagcgggacagaatggatatttggctgaccttggtgagacctggagctgcctgtttcttccctaggggatcaccacggctctagggcattctaggatgaggtcagaccccttggccattggtgttattttttgtatagcttcagactgggttccagaacttaccattgaaaacagagcttttaggccaggtgtggtggctcacacctgtaatcccagcactttgggaggccgaggcaggtggatcgcttgagctcaggagttcgagagcagcctgggcaacatggtgaaagcccgtctctaccgaaaaatacaaaaaaaaatagctgggtgtggtggtacgtgcctgtagtcccagctactttgccacctaagctggagtgcagtagcatgatcttggctcactgcagcctcgacctcctagattcaagtgatcctcccacctcagtccccgaaggtcgacgcggccgcgaattagtagtagta

SEQ ID NO: 79686 - DNA, 5325 bp, Homo sapiens
ggcgccgccggaccgcgccccaccccgcgcgcccgagcagggcgactgtcattagcttcctggacgggacccggggcgggatcctggtgtcctgaaaggggcccgggcgaccctaagaggaagaacttttgggggcggggtccccggtcccgcgtcccctgggcagccgctattgtctacgcgcctcgctgggcggcgcggggggcgtgatcgcggcggccccgggctctgggtgcggagacccaggcggggctgggcccagggcggcggcgggagaagccggggaagccgaagagcctggggaggaggagctgcgagcgcgggagacgagcaggagccgcgcgggccgcggcgagcgcgatgccggcggcggcgggggacgggctcctgggggagccggcggcgcctgggggcggcggcggcgcggaggacgcggccaggcccgcggcggcctgcgagggaagtttcctgcctgcctgggtgagcggcgtgccccgcgagcggctccgcgacttccagcaccacaagcgcgtgggcaactacctcatcggcagcaggaagctgggcgagggctcctttgccaaggtgcgcgaggggctgcacgtgctgaccggggagaaggtggccataaaagtcattgataagaagagagccaaaaaggacacctatgtcaccaaaaacctgcggcgagagggtcagatccagcagatgatccgccaccccaatatcactcagctccttgatattttagaaacggaaaacagctactacctggtcatggagctgtgccctgggggcaacctgatgcacaagatctatgagaagaagcggctggaggagtccgaagcccgcagatacatccgacagctcatctctgccgtagagcacctgcaccgggccggggtggtccacagagacttgaagatagagaatttgctactagatgaagacaataatatcaagctgattgactttggtttgagcaactgcgcagggatcctgggttactcggatccgttcagcacacagtgtggcagccctgcctacgctgcacctgaactgctcgccaggaagaaatacggccccaaaatcgatgtctggtccataggtgtgaacatgtatgccatgttgaccgggacgctgcctttcacggtggagcctttcagcctgagggctttgtaccagaagatggtagacaaagaaatgaaccccctccccactcagctctccacaggtgccatcagtttcctgcgctctctcctggaaccggatcctgtgaagaggccaaatattcagcaggcactggcgaatcgctggcttaatgagaattacacgggcaaagtgccctgtaatgtcacctatcccaacaggatttctctggaagatctgagcccgagcgtcgtgctgcacatgaccgagaagctgggttacaagaacagcgacgtgatcaacactgtgctctccaaccgcgcctgccacatcctggccatctacttcctcttaaacaagaaactggagcgctatttgtcagggaaatctgacatccaggacagcctctgctacaagacccggctctaccagatagaaaagtacagggcccccaaggagtcctatgaggcctctctggacacctggacacgagatcttgaattccatgccgtgcaggataaaaagcccaaagaacaagaaaaaagaggggattttcttcatcgaccattctccaagaagttggacaagaacctgccctcgcacaaacagccctcaggctcgcttatgacacagattcagaacaccaaagccctcctgaaggaccggaaggcctccaagtccagcttccccgacaaagattcctttggctgccgcaatattttccgcaaaacctcagattccaattgtgtggcttcttcttccatggagttcatccccgtgccaccgcccaggaccccgaggattgtgaagaaaccggagccccatcagccagggcccggaagcactggcatcccccacaaggaagaccccctgatgctggacatggtgcgctccttcgagtctgtggatcgcgacgaccacgtagaagtgctgtctccctctcatcactacaggattctgaactccccggtcagcttggctcgcagaaattccagcgagaggacgctgtccccgggtctgccatccggaagcatgtcgcctctccatactcctttgcatccaactctggtctcttttgctcacgaagataagaacagccccccaaaagaggagggcctgtgttgcccacctccggttcccagcaatggccccatgcagcctctggggagccccaattgtgtgaaaagccgaggccggttccctatgatgggcatcggacagatgttaaggaagcgccatcagagtctgcagccatctgcagataggcccctggaggccagcctgcccccactgcagcccctagcccctgtgaaccttgcctttgacatggccgatggggtcaagacccagtgctaacttgggccagcggggtttggggtatctctagaaaacagcaactgaacagagctccacacatctgtcagggtgtgagcactccaaggcctcgcgtggagcatccttagtcccacctgtagctgaatccacagacccaaagcctgcacaacccaacctcgcttagggacccccagagatgctggaatcgctaggagggttggctccaggggcagccaattcctatcattcagatcttccttcctcccaagtactcaccaaccccttccacttcccacttcccccaggcttggggggaaaacagggcatgagccttctggggcactcagattatggactgttaccagatctttcttcacgctgtgctacatgtgtgcctctcacagcagttggccacagttacagggagagaacaatatcacagtcattcatccaggccacgtttcctctgcggagtgtagcagccctgcctttcatagcagggattacctgaaggccagcaggagccgggggcaggcccaggatcctcagaggaagatggagaggagcttcggaccaagatcaaaccaaacagtggggaccccaacagaagagaaagactgaaggagacactcatttcccaagcaagattttgatagatttttgttgttgttgttgttgaaacatgctaatgattgaattatcttttccaaagattttttttaaatgtgatgtcggtaaattgaaataacataattttttaaaacttggatggagagatgagaagcaattccaccaaactcatgttttcacaggagggttcagtgtggagagcaaaaaagctgactgtggtgatttgctgagtgctgtggcccacaggcagggcaagtctcggtggccctgtgttcatcctgttgtttaaggcatagccctgatccttctggaaggcatagaacacggttacagctggttctgtagaaagagggaaaagatgattgtgacaattcagagcataactcagatggcgagaaggcagcattatctctgtgcgatgctgatttcaagctgcccacagaactggtgcggctcagagctcggcgagtttgctgggagctgggagcaggcttgcctggcagagaacctgttcagatacaggccagtttcttcttcgaggaaagccaagctcctcaaacagggttcagtccacgttgtgttttcacacctttctccaaggatcgaaccaaagatgtgtctccagtattgtgtctgtgcccctgtgtgtgttttgtggacagccgtgttgtctgactgtatccagctggcacttgacagggtgcagtcattggtgagaagaatcagaaaaagaagacccatcagcacaggttggataggggttagtgtaggagaccagttacagaatggcctggagtcttcaacttttgaccggtgcaggtgtgaccagagaccacctctgtggccacctcagatagtcatctcagtccaaggatcccaaaacacaaatctagaattgcaaagccagcctttatttccctggcaggcagccttgccagaaggcagagaggcagttctgaatcattctctcattcaccagtggtgacatccttcagtccctcacatctctgacagagcgggacagaatggatatttggctgaccttggtgagacctggagctgcctgtttcttccctaggggatcaccacggctctagggcattctaggatgaggtcagaccccttggccattggtgttattttttgtatagcttcagactgggttccagaacttaccattgaaaacagagcttttaggccaggtgtggtggctcacacctgtaatcccagcactttgggaggccgaggcaggtggatcgcttgagctcaggagttcgagagcagcctgggcaacatggtgaaagcccgtctctaccgaaaaatacaaaaaaaaatagctgggtgtggtggtacgtgcctgtagtcccagctacttcggggactgaggtgggaggatcacttgaacctaggaggtcgaggctgcagtgagccaagatcatgctactgcactccagcttaggtggcaaagtgagaccctgtctccaaaaaaagaaaatagagctttataagcagagagaagaaaataatcatctaagaccatctctccattcgacatgaagtgtaccttttctaaagacggtttccagctgcaacggctccactttgcaggcttgcagggtgtatacctgcgcattgggaacttgctggaacccctgatgcattttccttgagagcaggggtacttccgccttgccgttagcttgtggagaacgtgcttcttattcctggcaggcttcaagaacagctgcacatgtgccgctaactgaccgcgttgccattggcgacctggactctgaactcaggtttattctaaacccagtgagcggtgagggggagtgatgaaaggggatcagctgtatttgtgtgtgtgtgtgtgtgtgagcacctgacaaatctatgaaaccgagtgaaaggagaaatgttagattctttattattttattatatttatatggaaagctcgactctccctttggtaagtccgaagcatgttgtttgttcgaccgtgactgtcttcctcagtctgtgcctgtgattccagtcaccctgtagttactgacagaaattgactggactgtcattgtgtgaagtctaggaggaaatgtccattttaattgtatgatttggtcataagtaaggactatatttatgtcaccattattagatatatgtacttttgtaatgactgtgaaatacacttttccctcacta

SEQ ID NO: 79687 - DNA, 4868 bp, Homo sapiens
ggcgcagagtcccgcgggcggcgcggaagcggcggcggcgcggccggggcagccatgtcgccattgtctgcggcgcgggcggccctgcgggtctacgcggtaggcgccgcggtgatcctggcgcagctgctgcggcgctgccgcgggggcttcctggagccagcaggtccccacgcatgagcagccgtccagcaggcaggctccggtggagaagcaatggagaataaaagcctggagagctcccagacagacctgaagctggtggcccacccccgcgccaagagcaaggtgtggaagtatttcggcttcgacaccaacgccgagggatgcatcctgcagtggaagaaaatctactgccgcatctgcatggcccagatcgcctactccggaaacacctccaacctgtcctaccacctggagaagaaccaccccgaggaattctgcgagttcgtcaagagcaacacggagcagatgcgtgaagccttcgccaccgccttctccaagctgaagcccgagtcgtcccagcagcccgggcaggacgcgctggccgtcaaggccggccacggctacgacagcaagaagcagcaggagctgacggccgccgtgctgggcctcatctgcgaggggctgtacccagcctccatcgtggacgagcccaccttcaaggtgctgctgaagacggccgacccccggtatgagctgcccagccggaagtacatctctaccaaggccatccctgagaagtacggggccgtccgggaggtgatcctgaaggagctggccgaggccacctggtgtggcatctccaccgacatgtggaggagtgagaatcagaaccgcgcctacgtcacgctggccgcccacttcctgggcctgggcgcccccaactgcctgtccatgggctcccgctgcctgaagaccttcgaggtgcccgaagagaacacggcggagaccatcacgcgagtgctctatgaggtcttcatcgagtggggcatcagcgccaaggtcttcggggccaccaccaactatggcaaggacatcgtgaaggcgtgctccctgctggacgtcgcagtgcacatgccctgcctgggccacaccttcaatgccggcatccagcaggccttccagctcccgaagctgggggcgctgctgtcgcgctgccgcaaactggtggagtacttccagcagtctgccgtggccatgtacatgctctatgagaagcagaagcagcagaacgtggcccactgcatgctggtgagcaaccgcgtctcctggtgggggagcacgctggccatgctgcagcgcctcaaggagcagcagttcgtcatcgccggggtcttggtggaggacagcaacaaccaccacctcatgctggaggccagcgagtgggccaccatcgaggggctggtggagctcctgcagcccttcaagcaggtggccgagatgctgtcggcctccaggtaccccaccatcagcatggtgaagccgctgctgcacatgctcctgaacaccacgctcaacatcaaggagaccgactccaaggagctcagcatggccaaggaggtcatcgccaaggagctttccaagacctaccaggagacgcccgagatcgacatgtttctcaacgtggccaccttcctggacccccgctacaagaggctgcccttcctctccgccttcgagcggcagcaggtggagaatcgcgtggtggaagaggccaagggcctgctggacaaggtcaaagacggcggctaccggccggctgaggacaagatcttcccggtgcccgaggagcctcccgtcaagaagctcatgcggacatccacgccgccgcccgccagcgtcatcaacaacatgctggccgagatcttctgccagacaggcggcgtggaggaccaggaagagtggcatgcccaggtggtggaggagctgagcaacttcaagtcccagaaggtgcttggcctcaacgaagaccccctcaagtggtggtcagaccgcctggccctcttccccctgctgcccaaggtgctgcagaagtactggtgcgtgacggccacgcgcgtcgcccctgagcgtctcttcggatccgccgccaacgtggtcagcgccaagaggaaccggctggctcccgcgcacgtggacgagcaggtgtttctgtatgagaacgcccggagtggggcagaggcggaacccgaggaccaggacgagggggagtggggcctggaccaggagcaggtgttctccttgggggatggcgtcagcggcggtttctttggcattagggacagcagcttcctgtagcgaggaagcgtgttgtcttacaagtcatccccgcagcagcccattggatgctttgctgtaaatacttacccggtcagcttggttttgaacctcagagaccatccactgtctttgacacctagaaggtggaaaaaggaaagagattcgagaagtgagagagggtcgggggcggtggctcctgtctataatcgcagcactttgggaggccgaggtgggcagatcagctgaggtcaggagatcgagaccagcctggccaacatggcgaaaccccgtctctactaaaaatacaaaaattagccaggactgatggcatgtgcctgtaatcccagcttctggaggctgaggccagagaatcgcttgaacctgggaggtggaggttgcagtaagctgagatcgctgcactccagcctgggcgacaagagcgagactctctcaaaaagaaaaaagaagacacaagagaggtggctttgagtgggtttcctttcctcccctattcccggggcccggacgacttctgcttgggaactgccaacgcttctgcttgggaattgcgtgcagcagagcctagaggagctgttccttccttcacagatacttaagacctccaccatgtctgattcgagttctccctgggagggtttagaagaaacgcaggaacattctgggtggcgtcgaaggagcctttcccgatcatcatgtgtgacttctgcgaggtccagatcactgaattcatgtttacattctcgtgcaagcagggacctcttgcttctgagaaatggggaagagaccttttagccaaaatgcccttcttaaaaagagagacctttttttttaatgttcggttaaaaatgtgacagatgagtacaaaaatgcagacacttaacaaaaagcaaacagaaaaaaaagtgtggaatgtgttgtattttcgacaggttgctgccagagagcctgcttcctgctgcctgccgaaatttcactttgcggagttggtccttaaaactgggcggtggccgggcgtggtggctcacgctgaggtcaggagttcgagaccagcctggccaaccaacatggtgaaacctcgtgtctactaaaaatacaagaaactagccagatgcggtggcacccgcctgtaatcccagctactcgggaggctgaggcggaagattcgcttgagcccaggaggtggaggttgcagtgagccaagactacgccactgcactccagcctggaggccagagtgagactccgtctcaaaacaaaacaaaagtgggtggctcacgggtccggaggttatgtcttcggtgtctcagccctaaaagtccagttcccccgtgcggccagcttttccacataaggtgtttttgatttgattaccggaaaggactcttgattcttctcttttaaactgaataccataggggaaatgaattttaaaatattgcccccggaggggttttccgtggctggattcctgcgagttgctttcagtcattcagggaaacagaaagacgttttccaacatgtagaactgctttttaactggaggaaaaatacttcaggaggcttagcatattgcttggattctacgtgcagcgggttctctgcctccgtgaagacaagctgggctggggaggacggtgtctaggagggatgaccccactcagctccaggcagtgttctgccgagaccccaagaactcggggtgtcagagggcaaaggaactacctgcctttcacggctgctgacttctcagggctgcaagcagcacagaatgttatccttacgtcctgagccggtttaagtctgtggaaaaggaagcacgggagaaatccacgtaacctttgctttctttttaagggaagcggttccgccgtgaacttggaaccctcagctccgggtgttctcggcagaagggcagctggaagggacacagtggggcaggctttggggttgctccctgttctgccccgaggccggggacgcagggcagcccacgcctccgtgggctccattctgtagcattgccagcgttctcttcacgtctctaacaatcctttgcttttcctcactcacgtggaaatgtgaactgtcccggctctgtcttcatttttatttttaagccatcgttcccctcctgaacggttgccccttatttaatgctgtaaagttggactgttgttcaataaaccagagcaatgcattagctcctcaaaaaaaaaagaaaaaaaagagaaacaagacaagactaaaacaattagagcaacagcagcgaaacagaacgtgaaggaagagctacagaacaagagacgagagccgaacccaaaaggacgacgggggcgggcggcagatacataacatatacgaaggaggagcgacatcagagacacccagccgccgtgttgtatgacagacggacgcgcctcaaacaggagaattataaaaaaaagcggcgcagcggggcgtcaaaaaaacggcggggggaacaaacagcgtgcgtgatactgtgcagcaaacacctcgggtggggggaagaacagaccaaacacacaaggagacgcacgagagat

SEQ ID NO: 79688 - DNA, 496 bp, Homo sapiens
  misc_feature (486)..(486): n is a, c, g, or t
ggcgcagagtcccgcgggcggcgcggaagcggcggcggcgcggccggggcagccatgtcgccattgtctgcggcgcgggcggccctgcgggtctacgcggtaggcgccgcggtgatcctggcgcagctgctgcggcgctgccgcgggggcttcctggagccagttttccccccacgacctgaccgtgtcgctatagtgacgggagggacagatggcattggctattctacagcgaagcatctggcgagacttggcatgcatgttatcatagctggaaataatgacagcaaagccaaacaagttgtaagcaaaataaaagaagaaaccttgaacgacaaagagacgtgagtcttgctgtgttgcccgggctggctttgcctctggaactcaagcgatcctcccacctcagcctctcgaggagctgggactacaggcgtgcaccatcatttcctcctaaaattgtatgtgctgcatatataaaatganaaatgcttta

SEQ ID NO: 79689 - DNA, 3851 bp, Homo sapiens
gacccggcccgacccttccctccccgcgcgtgtggcctccccgcctgtcccgggtcgggctccaaccaagcagcccccgtgcagccgcccccccgcgcaccctgacacctccgggccatggccggggacccgggggctcgcacgccccgcgcccaagacatcaggcggctctgcctgccgcctgcggtcggccagtgaccgcgcgcccccgccaggccccggaggggaggagcgggcgtcccagggacctcgacccctacccaccccaggcaggtccccacgcatgagcagccgtccagcaggcaggctccggtggagaagcaatggagaataaaagcctggagagctcccagacagacctgaagctggtggcccacccccgcgccaagagcaaggtgtggaagtatttcggcttcgacaccaacgccgagggatgcatcctgcagtggaagaaaatctactgccgcatctgcatggcccagatcgcctactccggaaacacctccaacctgtcctaccacctggagaagaaccaccccgaggaattctgcgagttcgtcaagagcaacacggagcagatgcgtgaagccttcgccaccgccttctccaagctgaagcccgagtcgtcccagcagcccgggcaggacgcgctggccgtcaaggccggccacggctacgacagcaagaagcagcaggagctgacggccgccgtgctgggcctcatctgcgaggggctgtacccagcctccatcgtggacgagcccaccttcaaggtgctgctgaagacggccgacccccggtatgagctgcccagccggaagtacatctctaccaaggccatccctgagaagtacggggccgtccgggaggtgatcctgaaggagctggccgaggccacctggtgtggcatctccaccgacatgtggaggagtgagaatcagaaccgcgcctacgtcacgctggccgcccacttcctgggcctgggcgcccccaactgcctgtccatgggctcccgctgcctgaagaccttcgaggtgcccgaagagaacacggcggagaccatcacgcgagtgctctatgaggtcttcatcgagtggggcatcagcgccaaggtcttcggggccaccaccaactatggcaaggacatcgtgaaggcgtgctccctgctggacgtcgcagtgcacatgccctgcctgggccacaccttcaatgccggcatccagcaggccttccagctcccgaagctgggggcgctgctgtcgcgctgccgcaaactggtggagtacttccagcagtctgccgtggccatgtacatgctctatgagaagcagaagcagcagaacgtggcccactgcatgctggtgagcaaccgcgtctcctggtgggggagcacgctggccatgctgcagcgcctcaaggagcagcagttcgtcatcgccggggtcttggtggaggacagcaacaaccaccacctcatgctggaggccagcgagtgggccaccatcgaggggctggtggagctcctgcagcccttcaagcaggtggccgagatgctgtcggcctccaggtaccccaccatcagcatggtgaagccgctgctgcacatgctcctgaacaccacgctcaacatcaaggagaccgactccaaggagctcagcatggccaaggaggtcatcgccaaggagctttccaagacctaccaggagacgcccgagatcgacatgtttctcaacgtggccaccttcctggacccccgctacaagaggctgcccttcctctccgccttcgagcggcagcaggtggagaatcgcgtggtggaagaggccaagggcctgctggacaaggtcaaagacggcggctaccggccggctgaggacaagatcttcccggtgcccgaggagcctcccgtcaagaagctcatgcggacatccacgccgccgcccgccagcgtcatcaacaacatgctggccgagatcttctgccagacaggcggcgtggaggaccaggaagagtggcatgcccaggtggtggaggagctgagcaacttcaagtcccagaaggtgcttggcctcaacgaagaccccctcaagtggtggtcagaccgcctggccctcttccccctgctgcccaaggtgctgcagaagtactggtgcgtgacggccacgcgcgtcgcccctgagcgtctcttcggatccgccgccaacgtggtcagcgccaagaggaaccggctggctcccgcgcacgtggacgagcaggtgtttctgtatgagaacgcccggagtggggcagaggcggaacccgaggaccaggacgagggggagtggggcctggaccaggagcaggtgttctccttgggggatggcgtcagcggcggtttctttggcattagggacagcagcttcctgtagcgaggaagcgtgttgtcttacaagtcatccccgcagcagcccattggatgctttgctgtaaatacttacccggtcagcttggttttgaacctcagagaccatccactgtctttgacacctagaaggtggaaaaaggaaagagattcgagaagtgagagagggtcgggggcggtggctcctgtctataatcgcagcactttgggaggccgaggtgggcagatcagctgaggtcaggagatcgagaccagcctggccaacatggcgaaaccccgtctctactaaaaatacaaaaattagccaggactgatggcatgtgcctgtaatcccagcttctggaggctgaggccagagaatcgcttgaacctgggaggtggaggttgcagtaagctgagatcgctgcactccagcctgggcgacaagagcgagactctctcaaaaaaaggtagaataaaagtttcagagtaagcaagacctcagaaaaaatattgtctttatatcctttctgaggaagctttctggaggttatgtcttcggtgtctcagccctaaaagtccagttcccccgtgcggccagcttttccacataaggtgtttttgatttgattaccggaaaggactcttgattcttctcttttaaactgaataccataggggaaatgaattttaaaatattgcccccggaggggttttccgtggctggattcctgcgagttgctttcagtcattcagggaaacagaaagacgttttccaacatgtagaactgctttttaactggaggaaaaatacttcaggaggcttagcatattgcttggattctacgtgcagcgggttctctgcctccgtgaagacaagctgggctggggaggacggtgtctaggagggatgaccccactcagctccaggcagtgttctgccgagaccccaagaactcggggtgtcagagggcaaaggaactacctgcctttcacggctgctgacttctcagggctgcaagcagcacagaatgttatccttacgtcctgagccggtttaagtctgtggaaaaggaagcacgggagaaatccacgtaacctttgctttctttttaagggaagcggttccgccgtgaacttggaaccctcagctccgggtgttctcggcagaagggcagctggaagggacacagtggggcaggctttggggttgctccctgttctgccccgaggccggggacgcagggcagcccacgcctccgtgggctccattctgtagcattgccagcgttctcttcacgtctctaacaatcctttgcttttcctcactcacgtggaaatgtgaactgtcccggctctgtcttcatttttatttttaagccatcgttcccctcctgaacggttgccccttatttaatgctgtaaagttggactgttgttcaataaaccagagcaatgcattagctcctca

SEQ ID NO: 79690 - DNA, 3010 bp, Homo sapiens
ccgctacaagaaggtggccaggaaggtggccacgttgagaaacatgtcgatctcgggcgtctcctggtaggtcttggaaagctccttggcgatgacctccttggccatgctgagctccttggagtcggtctccttcctggacccccgctacaagaggctgcccttcctctccgccttcgagcggcagcaggtggagaatcgcgtggtggaagaggccaagggcctgctggacaaggtcaaagacggcggctaccggccggctgaggacaagatcttcccggtgcccgaggagcctcccgtcaagaagctcatgcggacatccacgccgccgcccgccagcgtcatcaacaacatgctggccgagatcttctgccagacaggcggcgtggaggaccaggaagagtggcatgcccaggtggtggaggagctgagcaacttcaagtcccagaaggtgcttggcctcaacgaagaccccctcaagtggtggtcagaccgcctggccctcttccccctgctgcccaaggtgctgcagaagtactggtgcgtgacggccacgcgcgtcgcccctgagcgtctcttcggatccgccgccaacgtggtcagcgccaagaggaaccggctggctcccgcgcacgtggacgagcaggtgtttctgtatgagaacgcccggagtggggcagaggcggaacccgaggaccaggacgagggggagtggggcctggaccaggagcaggtgttctccttgggggatggcgtcagcggcggtttctttggcattagggacagcagcttcctgtagcgaggaagcgtgttgtcttacaagtcatccccgcagcagcccattggatgctttgctgtaaatacttacccggtcagcttggttttgaacctcagagaccatccactgtctttgacacctagaaggtggaaaaaggaaagagattcgagaagtgagagagggtcgggggcggtggctcctgtctataatcgcagcactttgggaggccgaggtgggcagatcagctgaggtcaggagatcgagaccagcctggccaacatggcgaaaccccgtctctactaaaaatacaaaaattagccaggactgatggcatgtgcctgtaatcccagcttctggaggctgaggccagagaatcgcttgaacctgggaggtggaggttgcagtaagctgagatcgctgcactccagcctgggcgacaagagcgagactctctcaaaaagaaaaaagaagacacaagagaggtggctttgagtgggtttcctttcctcccctattcccggggcccggacgacttctgcttgggaactgccaacgcttctgcttgggaattgcgtgcagcagagcctagaggagctgttccttccttcacagatacttaagacctccaccatgtctgattcgagttctccctgggagggtttagaagaaacgcaggaacattctgggtggcgtcgaaggagcctttcccgatcatcatgtgtgacttctgcgaggtccagatcactgaattcatgtttacattctcgtgcaagcagggacctcttgcttctgagaaatggggaagagaccttttagccaaaatgcccttcttaaaaagagagacctttttttttaatgttcggttaaaaatgtgacagatgagtacaaaaatgcagacacttaacaaaaagcaaacagaaaaaaaagtgtggaatgtgttgtattttcgacaggttgctgccagagagcctgcttcctgctgcctgccgaaatttcactttgcggagttggtccttaaaactgggcggtggccgggcgtggtggctcacgctgaggtcaggagttcgagaccagcctggccaaccaacatggtgaaacctcgtgtctactaaaaatacaagaaactagccagatgcggtggcacccgcctgtaatcccagctactcgggaggctgaggcggaagattcgcttgagcccaggaggtggaggttgcagtgagccaagactacgccactgcactccagcctggaggccagagtgagactccgtctcaaaacaaaacaaaagtgggtggctcacgggtccggaggttatgtcttcggtgtctcagccctaaaagtccagttcccccgtgcggccagcttttccacataaggtgtttttgatttgattaccggaaaggactcttgattcttctcttttaaactgaataccataggggaaatgaattttaaaatattgcccccggaggggttttccgtggctggattcctgcgagttgctttcagtcattcagggaaacagaaagacgttttccaacatgtagaactgctttttaactggaggaaaaatacttcaggaggcttagcatattgcttggattctacgtgcagcgggttctctgcctccgtgaagacaagctgggctggggaggacggtgtctaggagggatgaccccactcagctccaggcagtgttctgccgagaccccaagaactcggggtgtcagagggcaaaggaactacctgcctttcacggctgctgacttctcagggctgcaagcagcacagaatgttatccttacgtcctgagccggtttaagtctgtggaaaaggaagcacgggagaaatccacgtaacctttgctttctttttaagggaagcggttccgccgtgaacttggaaccctcagctccgggtgttctcggcagaagggcagctggaagggacacagtggggcaggctttggggttgctccctgttctgccccgaggccggggacgcagggcagcccacgcctccgtgggctccattctgtagcattgccagcgttctcttcacgtctctaacaatcctttgcttttcctcactcacgtggaaatgtgaactgtcccggctctgtcttcatttttatttttaagccatcgttcccctcctgaacggttgccccttatttaatgctgtaaagttggactgttgttcaataaaccagagcaatgcattagctcctca

SEQ ID NO: 79691 - DNA, 2863 bp, Homo sapiens
tccccacactcacccccagcactccacccacattcaccgcagtcatgagccccgggtgtttaatccggacgagggcctgctggacaaggtcaaagacggcggctaccggccggctgaggacaagatcttcccggtgcccgaggagcctcccgtcaagaagctcatgcggacatccacgccgccgcccgccagcgtcatcaacaacatgctggccgagatcttctgccagacaggcggcgtggaggaccaggaagagtggcatgcccaggtggtggaggagctgagcaacttcaagtcccagaaggtgcttggcctcaacgaagaccccctcaagtggtggtcagaccgcctggccctcttccccctgctgcccaaggtgctgcagaagtactggtgcgtgacggccacgcgcgtcgcccctgagcgtctcttcggatccgccgccaacgtggtcagcgccaagaggaaccggctggctcccgcgcacgtggacgagcaggtgtttctgtatgagaacgcccggagtggggcagaggcggaacccgaggaccaggacgagggggagtggggcctggaccaggagcaggtgttctccttgggggatggcgtcagcggcggtttctttggcattagggacagcagcttcctgtagcgaggaagcgtgttgtcttacaagtcatccccgcagcagcccattggatgctttgctgtaaatacttacccggtcagcttggttttgaacctcagagaccatccactgtctttgacacctagaaggtggaaaaaggaaagagattcgagaagtgagagagggtcgggggcggtggctcctgtctataatcgcagcactttgggaggccgaggtgggcagatcagctgaggtcaggagatcgagaccagcctggccaacatggcgaaaccccgtctctactaaaaatacaaaaattagccaggactgatggcatgtgcctgtaatcccagcttctggaggctgaggccagagaatcgcttgaacctgggaggtggaggttgcagtaagctgagatcgctgcactccagcctgggcgacaagagcgagactctctcaaaaagaaaaaagaagacacaagagaggtggctttgagtgggtttcctttcctcccctattcccggggcccggacgacttctgcttgggaactgccaacgcttctgcttgggaattgcgtgcagcagagcctagaggagctgttccttccttcacagatacttaagacctccaccatgtctgattcgagttctccctgggagggtttagaagaaacgcaggaacattctgggtggcgtcgaaggagcctttcccgatcatcatgtgtgacttctgcgaggtccagatcactgaattcatgtttacattctcgtgcaagcagggacctcttgcttctgagaaatggggaagagaccttttagccaaaatgcccttcttaaaaagagagacctttttttttaatgttcggttaaaaatgtgacagatgagtacaaaaatgcagacacttaacaaaaagcaaacagaaaaaaaagtgtggaatgtgttgtattttcgacaggttgctgccagagagcctgcttcctgctgcctgccgaaatttcactttgcggagttggtccttaaaactgggcggtggccgggcgtggtggctcacgctgaggtcaggagttcgagaccagcctggccaaccaacatggtgaaacctcgtgtctactaaaaatacaagaaactagccagatgcggtggcacccgcctgtaatcccagctactcgggaggctgaggcggaagattcgcttgagcccaggaggtggaggttgcagtgagccaagactacgccactgcactccagcctggaggccagagtgagactccgtctcaaaacaaaacaaaagtgggtggctcacgggtccggaggttatgtcttcggtgtctcagccctaaaagtccagttcccccgtgcggccagcttttccacataaggtgtttttgatttgattaccggaaaggactcttgattcttctcttttaaactgaataccataggggaaatgaattttaaaatattgcccccggaggggttttccgtggctggattcctgcgagttgctttcagtcattcagggaaacagaaagacgttttccaacatgtagaactgctttttaactggaggaaaaatacttcaggaggcttagcatattgcttggattctacgtgcagcgggttctctgcctccgtgaagacaagctgggctggggaggacggtgtctaggagggatgaccccactcagctccaggcagtgttctgccgagaccccaagaactcggggtgtcagagggcaaaggaactacctgcctttcacggctgctgacttctcagggctgcaagcagcacagaatgttatccttacgtcctgagccggtttaagtctgtggaaaaggaagcacgggagaaatccacgtaacctttgctttctttttaagggaagcggttccgccgtgaacttggaaccctcagctccgggtgttctcggcagaagggcagctggaagggacacagtggggcaggctttggggttgctccctgttctgccccgaggccggggacgcagggcagcccacgcctccgtgggctccattctgtagcattgccagcgttctcttcacgtctctaacaatcctttgcttttcctcactcacgtggaaatgtgaactgtcccggctctgtcttcatttttatttttaagccatcgttcccctcctgaacggttgccccttatttaatgctgtaaagttggactgttgttcaataaaccagagcaatgcattagctcctca

SEQ ID NO: 79692 - DNA, 2058 bp, Homo sapiens
caagagtggtgccatgaattgcatgcatatttcgtggtggtctacgggttctgtgatacacaagaggcgtgtgccaacaacactttctggttccatattaatcttgatgctgtggcaatctataggctagtcttgatgtactctgaattagcctgaatatctctaactaagttgagctgtcttacttaccaagtttacactgaggatgctgccggtggcccccggcaggatgtactgagatcgctgcactccagcctgggcgacaagagcgagactctctcaaaaagaaaaaagaagacacaagagaggtggctttgagtgggtttcctttcctcccctattcccggggcccggacgacttctgcttgggaactgccaacgcttctgcttgggaattgcgtgcagcagagcctagaggagctgttccttccttcacagatacttaagacctccaccatgtctgattcgagttctccctgggagggtttagaagaaacgcaggaacattctgggtggcgtcgaaggagcctttcccgatcatcatgtgtgacttctgcgaggtccagatcactgaattcatgtttacattctcgtgcaagcagggacctcttgcttctgagaaatggggaagagaccttttagccaaaatgcccttcttaaaaagagagacctttttttttaatgttcggttaaaaatgtgacagatgagtacaaaaatgcagacacttaacaaaaagcaaacagaaaaaaaagtgtggaatgtgttgtattttcgacaggttgctgccagagagcctgcttcctgctgcctgccgaaatttcactttgcggagttggtccttaaaactgggcggtggccgggcgtggtggctcacgctgaggtcaggagttcgagaccagcctggccaaccaacatggtgaaacctcgtgtctactaaaaatacaagaaactagccagatgcggtggcacccgcctgtaatcccagctactcgggaggctgaggcggaagattcgcttgagcccaggaggtggaggttgcagtgagccaagactacgccactgcactccagcctggaggccagagtgagactccgtctcaaaacaaaacaaaagtgggtggctcacgggtccggaggttatgtcttcggtgtctcagccctaaaagtccagttcccccgtgcggccagcttttccacataaggtgtttttgatttgattaccggaaaggactcttgattcttctcttttaaactgaataccataggggaaatgaattttaaaatattgcccccggaggggttttccgtggctggattcctgcgagttgctttcagtcattcagggaaacagaaagacgttttccaacatgtagaactgctttttaactggaggaaaaatacttcaggaggcttagcatattgcttggattctacgtgcagcgggttctctgcctccgtgaagacaagctgggctggggaggacggtgtctaggagggatgaccccactcagctccaggcagtgttctgccgagaccccaagaactcggggtgtcagagggcaaaggaactacctgcctttcacggctgctgacttctcagggctgcaagcagcacagaatgttatccttacgtcctgagccggtttaagtctgtggaaaaggaagcacgggagaaatccacgtaacctttgctttctttttaagggaagcggttccgccgtgaacttggaaccctcagctccgggtgttctcggcagaagggcagctggaagggacacagtggggcaggctttggggttgctccctgttctgccccgaggccggggacgcagggcagcccacgcctccgtgggctccattctgtagcattgccagcgttctcttcacgtctctaacaatcctttgcttttcctcactcacgtggaaatgtgaactgtcccggctctgtcttcatttttatttttaagccatcgttcccctcctgaacggttgccccttatttaatgctgtaaagttggactgttgttcaataaaccagagcaatgcattagctcctca

SEQ ID NO: 79693 - DNA, 1325 bp, Homo sapiens
ggcgcagagtcccgcgggcggcgcggaagcggcggcggcgcggccggggcagccatgtcgccattgtctgcggcgcgggcggccctgcgggtctacgcggtaggcgccgcggtgatcctggcgcagctgctgcggcgctgccgcgggggcttcctggagccagttttccccccacgacctgaccgtgtcgctatagtgacgggagggacagatggcattggctattctacagcgaagcatctggcgagacttggcatgcatgttatcatagctggaaataatgacagcaaagccaaacaagttgtaagcaaaataaaagaagaaaccttgaacgacaaagtggaatttttatactgtgacttggcttccatgacttccatccggcagtttgtgcagaagttcaagatgaagaagattcctctccatgtcctgatcaacaatgctggggtgatgatggtccctcagaggaaaaccagagatggattcgaagaacatttcggcctgaactacctagggcacttcctgctgaccaaccttctcttggatacgctgaaagagtctgggtcccctggccacagtgcgagggtggtcaccgtctcctctgccacccattacgtcgctgagctgaacatggatgaccttcagagcagtgcctgctactcaccccacgcagcctacgcccagagcaagctggcccttgtcctgttcacctaccacctccagcggctgctggcggctgagggaagccacgtgaccgccaacgtggtggaccccggggtggtcaacacggacctctacaagcacgtgttctgggccacccgtctggcgaagaagcttctcggctggttgcttttcaagacccccgatgaaggagcgtggacttccatctacgcagcagtcaccccagagctggaaggagttggtggccgttacctatacaacgagaaagagaccaagtccctccacgtcacctacaaccagaaactgcagcagcagctgtggtctaagagttgtgagatgactggggtccttgatgtgaccctgtgatatcctgtctcaggatagctgctgccccaagaaacacattgcacctgccaatagcttgtgggtctgtgaagactgcggtgtttgagtttctcacacccacctgcccacagggctctgtcctctagttttgagacagctgcctcaacctctgcagaacttcaagaagccaaataaacattttggaggataatcaccccaagtggtcttcaaccataaactttgtgattccaaagtgcccagttgtcacaggtgccataaataattacattttccaacat

SEQ ID NO: 79694 - DNA, 1256 bp, Homo sapiens
ggcgcagagtcccgcgggcggcgcggaagcggcggcggcgcggccggggcagccatgtcgccattgtctgcggcgcgggcggccctgcgggtctacgcggtaggcgccgcggtgatcctggcgcagctgctgcggcgctgccgcgggggcttcctggagccagttttccccccacgacctgaccgtgtcgctatagtgacgggagggacagatggcattggctattctacagcgaagcatctggcgagacttggcatgcatgttatcatagtggaatttttatactgtgacttggcttccatgacttccatccggcagtttgtgcagaagttcaagatgaagaagattcctctccatgtcctgatcaacaatgctggggtgatgatggtccctcagaggaaaaccagagatggattcgaagaacatttcggcctgaactacctagggcacttcctgctgaccaaccttctcttggatacgctgaaagagtctgggtcccctggccacagtgcgagggtggtcaccgtctcctctgccacccattacgtcgctgagctgaacatggatgaccttcagagcagtgcctgctactcaccccacgcagcctacgcccagagcaagctggcccttgtcctgttcacctaccacctccagcggctgctggcggctgagggaagccacgtgaccgccaacgtggtggaccccggggtggtcaacacggacctctacaagcacgtgttctgggccacccgtctggcgaagaagcttctcggctggttgcttttcaagacccccgatgaaggagcgtggacttccatctacgcagcagtcaccccagagctggaaggagttggtggccgttacctatacaacgagaaagagaccaagtccctccacgtcacctacaaccagaaactgcagcagcagctgtggtctaagagttgtgagatgactggggtccttgatgtgaccctgtgatatcctgtctcaggatagctgctgccccaagaaacacattgcacctgccaatagcttgtgggtctgtgaagactgcggtgtttgagtttctcacacccacctgcccacagggctctgtcctctagttttgagacagctgcctcaacctctgcagaacttcaagaagccaaataaacattttggaggataatcaccccaagtggtcttcaaccataaactttgtgattccaaagtgcccagttgtcacaggtgccataaataattacattttccaacat

SEQ ID NO: 79695 - DNA, 647 bp, Homo sapiens
ctacatcataataaagtctacattttacaacgcaaacgaacaaaaatgtcctgctcagtgctgccctgagagcagaggttattccaggattcttgctcgcctctgtaaagggtatccgttctgcagacctttctgccggtcacactgacggcatattgcagagcctgccagggactcacaggggatgacaggggatttatcaggtggttttttactgcactgtcattactgggggcgaatccactttaatacattcatgcctcctgagcctgtgggaattcaagaggaacagaaccagaaataaatgaaccataactccctttggcatcttgcctctctggaggcttaattcttacaaatatgtgctctgctttcaaatcttagtttgatgattttctcttcttctttttcagttttccccccacgacctgaccgtgtcgctatagtgacgggagggacagatggcattggctattctacagcgaagcatctggcgagacttggcatgcatgttatcataggtgatgacttttacagttacttgtgttttttgttttttcggtttttttttttttctgagacaggatcgcagtccgtcaacccgtgctggactgcagtggtgcaatcttggctcactgcagcctcca

SEQ ID NO: 79696 - DNA, 4512 bp, Homo sapiens
ggcgcagagtcccgcgggcggcgcggaagcggcggcggcgcggccggggcagccatgtcgccattgtctgcggcgcgggcggccctgcgggtctacgcggtaggcgccgcggtgatcctggcgcagctgctgcggcgctgccgcgggggcttcctggagccagcaggtccccacgcatgagcagccgtccagcaggcaggctccggtggagaagcaatggagaataaaagcctggagagctcccagacagacctgaagctggtggcccacccccgcgccaagagcaaggtgtggaagtatttcggcttcgacaccaacgccgagggatgcatcctgcagtggaagaaaatctactgccgcatctgcatggcccagatcgcctactccggaaacacctccaacctgtcctaccacctggagaagaaccaccccgaggaattctgcgagttcgtcaagagcaacacggagcagatgcgtgaagccttcgccaccgccttctccaagctgaagcccgagtcgtcccagcagcccgggcaggacgcgctggccgtcaaggccggccacggctacgacagcaagaagcagcaggagctgacggccgccgtgctgggcctcatctgcgaggggctgtacccagcctccatcgtggacgagcccaccttcaaggtgctgctgaagacggccgacccccggtatgagctgcccagccggaagtacatctctaccaaggccatccctgagaagtacggggccgtccgggaggtgatcctgaaggagctggccgaggccacctggtgtggcatctccaccgacatgtggaggagtgagaatcagaaccgcgcctacgtcacgctggccgcccacttcctgggcctgggcgcccccaactgcctgtccatgggctcccgctgcctgaagaccttcgaggtgcccgaagagaacacggcggagaccatcacgcgagtgctctatgaggtcttcatcgagtggggcatcagcgccaaggtcttcggggccaccaccaactatggcaaggacatcgtgaaggcgtgctccctgctggacgtcgcagtgcacatgccctgcctgggccacaccttcaatgccggcatccagcaggccttccagctcccgaagctgggggcgctgctgtcgcgctgccgcaaactggtggagtacttccagcagtctgccgtggccatgtacatgctctatgagaagcagaagcagcagaacgtggcccactgcatgctggtgagcaaccgcgtctcctggtgggggagcacgctggccatgctgcagcgcctcaaggagcagcagttcgtcatcgccggggtcttggtggaggacagcaacaaccaccacctcatgctggaggccagcgagtgggccaccatcgaggggctggtggagctcctgcagcccttcaagcaggtggccgagatgctgtcggcctccaggtaccccaccatcagcatggtgaagccgctgctgcacatgctcctgaacaccacgctcaacatcaaggagaccgactccaaggagctcagcatggccaaggaggtcatcgccaaggagctttccaagacctaccaggagacgcccgagatcgacatgtttctcaacgtggccaccttcctggacccccgctacaagaggctgcccttcctctccgccttcgagcggcagcaggtggagaatcgcgtggtggaagaggccaagggcctgctggacaaggtcaaagacggcggctaccggccggctgaggacaagatcttcccggtgcccgaggagcctcccgtcaagaagctcatgcggacatccacgccgccgcccgccagcgtcatcaacaacatgctggccgagatcttctgccagacaggcggcgtggaggaccaggaagagtggcatgcccaggtggtggaggagctgagcaacttcaagtcccagaaggtgcttggcctcaacgaagaccccctcaagtggtggtcagaccgcctggccctcttccccctgctgcccaaggtgctgcagaagtactggtgcgtgacggccacgcgcgtcgcccctgagcgtctcttcggatccgccgccaacgtggtcagcgccaagaggaaccggctggctcccgcgcacgtggacgagcaggtgtttctgtatgagaacgcccggagtggggcagaggcggaacccgaggaccaggacgagggggagtggggcctggaccaggagcaggtgttctccttgggggatggcgtcagcggcggtttctttggcattagggacagcagcttcctgtagcgaggaagcgtgttgtcttacaagtcatccccgcagcagcccattggatgctttgctgtaaatacttacccggtcagcttggttttgaacctcagagaccatccactgtctttgacacctagaaggtggaaaaaggaaagagattcgagaagtgagagagggtcgggggcggtggctcctgtctataatcgcagcactttgggaggccgaggtgggcagatcagctgaggtcaggagatcgagaccagcctggccaacatggcgaaaccccgtctctactaaaaatacaaaaattagccaggactgatggcatgtgcctgtaatcccagcttctggaggctgaggccagagaatcgcttgaacctgggaggtggaggttgcagtaagctgagatcgctgcactccagcctgggcgacaagagcgagactctctcaaaaagaaaaaagaagacacaagagaggtggctttgagtgggtttcctttcctcccctattcccggggcccggacgacttctgcttgggaactgccaacgcttctgcttgggaattgcgtgcagcagagcctagaggagctgttccttccttcacagatacttaagacctccaccatgtctgattcgagttctccctgggagggtttagaagaaacgcaggaacattctgggtggcgtcgaaggagcctttcccgatcatcatgtgtgacttctgcgaggtccagatcactgaattcatgtttacattctcgtgcaagcagggacctcttgcttctgagaaatggggaagagaccttttagccaaaatgcccttcttaaaaagagagacctttttttttaatgttcggttaaaaatgtgacagatgagtacaaaaatgcagacacttaacaaaaagcaaacagaaaaaaaagtgtggaatgtgttgtattttcgacaggttgctgccagagagcctgcttcctgctgcctgccgaaatttcactttgcggagttggtccttaaaactgggcggtggccgggcgtggtggctcacgctgaggtcaggagttcgagaccagcctggccaaccaacatggtgaaacctcgtgtctactaaaaatacaagaaactagccagatgcggtggcacccgcctgtaatcccagctactcgggaggctgaggcggaagattcgcttgagcccaggaggtggaggttgcagtgagccaagactacgccactgcactccagcctggaggccagagtgagactccgtctcaaaacaaaacaaaagtgggtggctcacgggtccggaggttatgtcttcggtgtctcagccctaaaagtccagttcccccgtgcggccagcttttccacataaggtgtttttgatttgattaccggaaaggactcttgattcttctcttttaaactgaataccataggggaaatgaattttaaaatattgcccccggaggggttttccgtggctggattcctgcgagttgctttcagtcattcagggaaacagaaagacgttttccaacatgtagaactgctttttaactggaggaaaaatacttcaggaggcttagcatattgcttggattctacgtgcagcgggttctctgcctccgtgaagacaagctgggctggggaggacggtgtctaggagggatgaccccactcagctccaggcagtgttctgccgagaccccaagaactcggggtgtcagagggcaaaggaactacctgcctttcacggctgctgacttctcagggctgcaagcagcacagaatgttatccttacgtcctgagccggtttaagtctgtggaaaaggaagcacgggagaaatccacgtaacctttgctttctttttaagggaagcggttccgccgtgaacttggaaccctcagctccgggtgttctcggcagaagggcagctggaagggacacagtggggcaggctttggggttgctccctgttctgccccgaggccggggacgcagggcagcccacgcctccgtgggctccattctgtagcattgccagcgttctcttcacgtctctaacaatcctttgcttttcctcactcacgtggaaatgtgaactgtcccggctctgtcttcatttttatttttaagccatcgttcccctcctgaacggttgccccttatttaatgctgtaaagttggactgttgttcaataaaccagagcaatgcattagctcctca

SEQ ID NO: 79697 - DNA, 603 bp, Homo sapiens
  misc_feature (593)..(593): n is a, c, g, or t
gacccggcccgacccttccctccccgcgcgtgtggcctccccgcctgtcccgggtcgggctccaaccaagcagcccccgtgcagccgcccccccgcgcaccctgacacctccgggccatggccggggacccgggggctcgcacgccccgcgcccaagacatcaggcggctctgcctgccgcctgcggtcggccagtgaccgcgcgcccccgccaggccccggaggggaggagcgggcgtcccagggacctcgacccctacccaccccaggttttccccccacgacctgaccgtgtcgctatagtgacgggagggacagatggcattggctattctacagcgaagcatctggcgagacttggcatgcatgttatcatagctggaaataatgacagcaaagccaaacaagttgtaagcaaaataaaagaagaaaccttgaacgacaaagagacgtgagtcttgctgtgttgcccgggctggctttgcctctggaactcaagcgatcctcccacctcagcctctcgaggagctgggactacaggcgtgcaccatcatttcctcctaaaattgtatgtgctgcatatataaaatganaaatgcttta

SEQ ID NO: 79698 - DNA, 4619 bp, Homo sapiens
gacccggcccgacccttccctccccgcgcgtgtggcctccccgcctgtcccgggtcgggctccaaccaagcagcccccgtgcagccgcccccccgcgcaccctgacacctccgggccatggccggggacccgggggctcgcacgccccgcgcccaagacatcaggcggctctgcctgccgcctgcggtcggccagtgaccgcgcgcccccgccaggccccggaggggaggagcgggcgtcccagggacctcgacccctacccaccccaggcaggtccccacgcatgagcagccgtccagcaggcaggctccggtggagaagcaatggagaataaaagcctggagagctcccagacagacctgaagctggtggcccacccccgcgccaagagcaaggtgtggaagtatttcggcttcgacaccaacgccgagggatgcatcctgcagtggaagaaaatctactgccgcatctgcatggcccagatcgcctactccggaaacacctccaacctgtcctaccacctggagaagaaccaccccgaggaattctgcgagttcgtcaagagcaacacggagcagatgcgtgaagccttcgccaccgccttctccaagctgaagcccgagtcgtcccagcagcccgggcaggacgcgctggccgtcaaggccggccacggctacgacagcaagaagcagcaggagctgacggccgccgtgctgggcctcatctgcgaggggctgtacccagcctccatcgtggacgagcccaccttcaaggtgctgctgaagacggccgacccccggtatgagctgcccagccggaagtacatctctaccaaggccatccctgagaagtacggggccgtccgggaggtgatcctgaaggagctggccgaggccacctggtgtggcatctccaccgacatgtggaggagtgagaatcagaaccgcgcctacgtcacgctggccgcccacttcctgggcctgggcgcccccaactgcctgtccatgggctcccgctgcctgaagaccttcgaggtgcccgaagagaacacggcggagaccatcacgcgagtgctctatgaggtcttcatcgagtggggcatcagcgccaaggtcttcggggccaccaccaactatggcaaggacatcgtgaaggcgtgctccctgctggacgtcgcagtgcacatgccctgcctgggccacaccttcaatgccggcatccagcaggccttccagctcccgaagctgggggcgctgctgtcgcgctgccgcaaactggtggagtacttccagcagtctgccgtggccatgtacatgctctatgagaagcagaagcagcagaacgtggcccactgcatgctggtgagcaaccgcgtctcctggtgggggagcacgctggccatgctgcagcgcctcaaggagcagcagttcgtcatcgccggggtcttggtggaggacagcaacaaccaccacctcatgctggaggccagcgagtgggccaccatcgaggggctggtggagctcctgcagcccttcaagcaggtggccgagatgctgtcggcctccaggtaccccaccatcagcatggtgaagccgctgctgcacatgctcctgaacaccacgctcaacatcaaggagaccgactccaaggagctcagcatggccaaggaggtcatcgccaaggagctttccaagacctaccaggagacgcccgagatcgacatgtttctcaacgtggccaccttcctggacccccgctacaagaggctgcccttcctctccgccttcgagcggcagcaggtggagaatcgcgtggtggaagaggccaagggcctgctggacaaggtcaaagacggcggctaccggccggctgaggacaagatcttcccggtgcccgaggagcctcccgtcaagaagctcatgcggacatccacgccgccgcccgccagcgtcatcaacaacatgctggccgagatcttctgccagacaggcggcgtggaggaccaggaagagtggcatgcccaggtggtggaggagctgagcaacttcaagtcccagaaggtgcttggcctcaacgaagaccccctcaagtggtggtcagaccgcctggccctcttccccctgctgcccaaggtgctgcagaagtactggtgcgtgacggccacgcgcgtcgcccctgagcgtctcttcggatccgccgccaacgtggtcagcgccaagaggaaccggctggctcccgcgcacgtggacgagcaggtgtttctgtatgagaacgcccggagtggggcagaggcggaacccgaggaccaggacgagggggagtggggcctggaccaggagcaggtgttctccttgggggatggcgtcagcggcggtttctttggcattagggacagcagcttcctgtagcgaggaagcgtgttgtcttacaagtcatccccgcagcagcccattggatgctttgctgtaaatacttacccggtcagcttggttttgaacctcagagaccatccactgtctttgacacctagaaggtggaaaaaggaaagagattcgagaagtgagagagggtcgggggcggtggctcctgtctataatcgcagcactttgggaggccgaggtgggcagatcagctgaggtcaggagatcgagaccagcctggccaacatggcgaaaccccgtctctactaaaaatacaaaaattagccaggactgatggcatgtgcctgtaatcccagcttctggaggctgaggccagagaatcgcttgaacctgggaggtggaggttgcagtaagctgagatcgctgcactccagcctgggcgacaagagcgagactctctcaaaaagaaaaaagaagacacaagagaggtggctttgagtgggtttcctttcctcccctattcccggggcccggacgacttctgcttgggaactgccaacgcttctgcttgggaattgcgtgcagcagagcctagaggagctgttccttccttcacagatacttaagacctccaccatgtctgattcgagttctccctgggagggtttagaagaaacgcaggaacattctgggtggcgtcgaaggagcctttcccgatcatcatgtgtgacttctgcgaggtccagatcactgaattcatgtttacattctcgtgcaagcagggacctcttgcttctgagaaatggggaagagaccttttagccaaaatgcccttcttaaaaagagagacctttttttttaatgttcggttaaaaatgtgacagatgagtacaaaaatgcagacacttaacaaaaagcaaacagaaaaaaaagtgtggaatgtgttgtattttcgacaggttgctgccagagagcctgcttcctgctgcctgccgaaatttcactttgcggagttggtccttaaaactgggcggtggccgggcgtggtggctcacgctgaggtcaggagttcgagaccagcctggccaaccaacatggtgaaacctcgtgtctactaaaaatacaagaaactagccagatgcggtggcacccgcctgtaatcccagctactcgggaggctgaggcggaagattcgcttgagcccaggaggtggaggttgcagtgagccaagactacgccactgcactccagcctggaggccagagtgagactccgtctcaaaacaaaacaaaagtgggtggctcacgggtccggaggttatgtcttcggtgtctcagccctaaaagtccagttcccccgtgcggccagcttttccacataaggtgtttttgatttgattaccggaaaggactcttgattcttctcttttaaactgaataccataggggaaatgaattttaaaatattgcccccggaggggttttccgtggctggattcctgcgagttgctttcagtcattcagggaaacagaaagacgttttccaacatgtagaactgctttttaactggaggaaaaatacttcaggaggcttagcatattgcttggattctacgtgcagcgggttctctgcctccgtgaagacaagctgggctggggaggacggtgtctaggagggatgaccccactcagctccaggcagtgttctgccgagaccccaagaactcggggtgtcagagggcaaaggaactacctgcctttcacggctgctgacttctcagggctgcaagcagcacagaatgttatccttacgtcctgagccggtttaagtctgtggaaaaggaagcacgggagaaatccacgtaacctttgctttctttttaagggaagcggttccgccgtgaacttggaaccctcagctccgggtgttctcggcagaagggcagctggaagggacacagtggggcaggctttggggttgctccctgttctgccccgaggccggggacgcagggcagcccacgcctccgtgggctccattctgtagcattgccagcgttctcttcacgtctctaacaatcctttgcttttcctcactcacgtggaaatgtgaactgtcccggctctgtcttcatttttatttttaagccatcgttcccctcctgaacggttgccccttatttaatgctgtaaagttggactgttgttcaataaaccagagcaatgcattagctcctca

SEQ ID NO: 79699 - DNA, 648 bp, Homo sapiens
atacctggaccaagtatgtgggacgtgcagcgggttctctgcctccgtgaagacaagctgggctggggaggacggtgtctaggagggatgaccccactcagctccaggcagtgttctgccgagaccccaagaactcggggtgtcagagggcaaaggaactacctgcctttcacggctgctgacttctcagggctgcaagcagcacagaatgttatccttacgtcctgagccggtttaagtctgtggaaaaggaagcacgggagaaatccacgtaacctttgctttctttttaagggaagcggttccgccgtgaacttggaaccctcagctccgggtgttctcggcagaagggcagctggaagggacacagtggggcaggctttggggttgctccctgttctgccccgaggccggggacgcagggcagcccacgcctccgtgggctccattctgtagcattgccagcgttctcttcacgtctctaacaatcctttgcttttcctcactcacgtggaaatgtgaactgtcccggctctgtcttcatttttatttttaagccatcgttcccctcctgaacggttgccccttatttaatgctgtaaagttggactgttgttcaataaaccagagcaatgcattagctcctca

SEQ ID NO: 79700 - DNA, 1432 bp, Homo sapiens
gacccggcccgacccttccctccccgcgcgtgtggcctccccgcctgtcccgggtcgggctccaaccaagcagcccccgtgcagccgcccccccgcgcaccctgacacctccgggccatggccggggacccgggggctcgcacgccccgcgcccaagacatcaggcggctctgcctgccgcctgcggtcggccagtgaccgcgcgcccccgccaggccccggaggggaggagcgggcgtcccagggacctcgacccctacccaccccaggttttccccccacgacctgaccgtgtcgctatagtgacgggagggacagatggcattggctattctacagcgaagcatctggcgagacttggcatgcatgttatcatagctggaaataatgacagcaaagccaaacaagttgtaagcaaaataaaagaagaaaccttgaacgacaaagtggaatttttatactgtgacttggcttccatgacttccatccggcagtttgtgcagaagttcaagatgaagaagattcctctccatgtcctgatcaacaatgctggggtgatgatggtccctcagaggaaaaccagagatggattcgaagaacatttcggcctgaactacctagggcacttcctgctgaccaaccttctcttggatacgctgaaagagtctgggtcccctggccacagtgcgagggtggtcaccgtctcctctgccacccattacgtcgctgagctgaacatggatgaccttcagagcagtgcctgctactcaccccacgcagcctacgcccagagcaagctggcccttgtcctgttcacctaccacctccagcggctgctggcggctgagggaagccacgtgaccgccaacgtggtggaccccggggtggtcaacacggacctctacaagcacgtgttctgggccacccgtctggcgaagaagcttctcggctggttgcttttcaagacccccgatgaaggagcgtggacttccatctacgcagcagtcaccccagagctggaaggagttggtggccgttacctatacaacgagaaagagaccaagtccctccacgtcacctacaaccagaaactgcagcagcagctgtggtctaagagttgtgagatgactggggtccttgatgtgaccctgtgatatcctgtctcaggatagctgctgccccaagaaacacattgcacctgccaatagcttgtgggtctgtgaagactgcggtgtttgagtttctcacacccacctgcccacagggctctgtcctctagttttgagacagctgcctcaacctctgcagaacttcaagaagccaaataaacattttggaggataatcaccccaagtggtcttcaaccataaactttgtgattccaaagtgcccagttgtcacaggtgccataaataattacattttccaacat

SEQ ID NO: 79701 - DNA, 313 bp, Homo sapiens
actttattggaggaaggaggagcagaaagaggagaaggaaacgttaactcctaaatcacaaggcagaaaggattcctgaaacaaatcagccaaatctgcctcctaggtggttccagacctgccccctcccctccccgtttcttagggcgcggcagtaacatttacccggctccactgcacatcctcctgaccctggccctgcgctcttggcctctgcacatctcatggctggcacctccgtgcgcgctctcatttcatgtttcaccttcaaattgtcctctgtgaacacgtgtatgcatgcacatttattgat

SEQ ID NO: 79702 - DNA, 864 bp, Homo sapiens
aagaagtctcaaaggaaataaaaaaatttttaaactgaatgcaaataaaaatgacaacccaaaatttgtgggacacagctaaaccaatgctaaaatggaaatttacagccttaaatacttatgttagaaaaaaagggcttaaatcaattatttatatcaagggttgccaaactttgcttccctgcttgtttttgtaaataaagttttactggaacacagtcagtattatccatcgctgctttggtattacaacggcagagttgagtagttgtgacagatcatttggtctgcaaagcctgaaatatttactatctggccctttacaaaagatttgccaaactgatccaactattgtcttaagaaactagatacctgcagaagttttcttagaaactgaaataagacaaaggtatatattaataggaaaaaatttacagttaatgaaaaaagaaactagaaagagaacaactaaaaaaaccaaagcaagcaggagaaaataacaaagatcagagtacaaatcaatacaattctaaggagaaaactaatgaaactaagaattttggttgcttaaaaacaatcaacaaaattgataaacctttagccagacttaaaaaaaaaggagggtggctggggtaggggtggcgaatacagagagagaggaaagacaaaaattaacaatattaggaatgaagcggggggacatccctactgacatcccatacagtaaaagaataataaactaacactacaaacaactctatggtcatgaatttgataactttgaagaaatggaccaatgtcttaaaaacacaaacttccaaaactcactgaagaagaaatagtctgaatgatcccgtatctatt

SEQ ID NO: 79703 - DNA, 560 bp, Homo sapiens
cttcttatggcattactgaaactcagaaatgttgctgagattctggaggttctctgggagatctgggagtccttgaggggatgtttctgaggttctggggatgctgctggccttccccattccttctggcctgctgttagcttcttctaagcttggcactttgccctttgaggatttgataatcacaggctcccgcagaaatgcacgtgggcctctgctcctggatgcaaaaattcctcaggtttaatcaacttgaacaaaaacatgagaggaaggaagccctgtcccaaggccttcatgggccagctccaacccgaggggcatagcagctctgtgccaagcccaaatggcagatggccttcactggctcagagtccagaagctttttaggacctcctcccatagtgagcagggcttagccacccgccaatctgtgcccagttgggagacctgctggtttgagctgctccttggatactggcatcagcctcatctgagtgcccacgtgggttcatgctggtcacagcgagggagccctgccctgacccttatgctactct

SEQ ID NO: 79704 - DNA, 824 bp, Homo sapiens
ctgaagggtgtccccgcactgctgtcccccgagctgctctacgcgctggcgcggatggggcacggggacgagatcggcctgggcatcccgcagctcctggaggccgtgctgaagctgctgcccctggacacctatgtggagagtccggctgcagtcatggagctggtgcccagcgacaaggagaggggcctgcagaccccagtgtggacggagtacgagtccatcctacgcagggccggctgtgtgagagccctggcaaagatagagaggtttgagttttatgaacgggctaagaaggcttttgctgttgtggcaacgggggagacggccctctacggaaacctcatcctcaggaagggggtgcttgccctcaaccccctgctgtaggcctggtgaagaccacctgggccggaagaggaactgggggcaccctgagctccagtaccaccactcacaacaggcctcccagtggcagctcccagacctgggccctggccagggctctaggggccggcagtcttggggtgggccctgccaattgggacgagtatccctgatttgtgaaaatgatggaaaaacgttcagtctcaaaaaaaaaaaaaataaaaaatataagaacacaaattacactacaatacacaaaccctcgcggggggtattattatcgggggggggcggaaacaaggggtatgtatacaggcggacagtgtgaactagcggtgttgcgggacccgagagttttgtgtacacaaaaggggggaaaagcgcgggcccccaataaggggcgccggttaaagttacggaaggcggtgttaccgggtaag

SEQ ID NO: 79705 - DNA, 846 bp, Homo sapiens
gagccctcgcgtctgggctgcccccgaggttcttgcggacttgaacttcccggcctcctccatctgccagtgtgggcccatggagatccgtgcagacggcctgggcatcccgcagctcctggaggccgtgctgaagctgctgcccctggacacctatgtggagagtccggctgcagtcatggagctggtgcccagcgacaaggagaggggcctgcagaccccagtgtggacggagtacgagtccatcctacgcagggccggctgtgtgagagccctggcaaagatagagaggtttgagttttatgaacgggctaagaaggcttttgctgttgtggcaacgggggagacggccctctacggaaacctcatcctcaggaagggggtgcttgccctcaaccccctgctgtaggcctggtgaagaccacctgggccggaagaggaactgggggcaccctgagctccagtaccaccactcacaacaggcctcccagtggcagctcccagacctgggccctggccagggctctaggggccggcagtcttggggtgggccctgccaattgggacgagtatccctgatttgtgaaaatgatggaaaaacgttcagtctcaaaaaaaaaaaaaataaaaaatataagaacacaaattacactacaatacacaaaccctcgcggggggtattattatcgggggggggcggaaacaaggggtatgtatacaggcggacagtgtgaactagcggtgttgcgggacccgagagttttgtgtacacaaaaggggggaaaagcgcgggcccccaataaggggcgccggttaaagttacggaaggcggtgttaccgggtaag

SEQ ID NO: 79706 - DNA, 893 bp, Homo sapiens
ctgaagggtgtccccgcactgctgtcccccgagctgctctacgcgctggcgcggatggggcacggggacgagatcgttcttgcggacttgaacttcccggcctcctccatctgccagtgtgggcccatggagatccgtgcagacggcctgggcatcccgcagctcctggaggccgtgctgaagctgctgcccctggacacctatgtggagagtccggctgcagtcatggagctggtgcccagcgacaaggagaggggcctgcagaccccagtgtggacggagtacgagtccatcctacgcagggccggctgtgtgagagccctggcaaagatagagaggtttgagttttatgaacgggctaagaaggcttttgctgttgtggcaacgggggagacggccctctacggaaacctcatcctcaggaagggggtgcttgccctcaaccccctgctgtaggcctggtgaagaccacctgggccggaagaggaactgggggcaccctgagctccagtaccaccactcacaacaggcctcccagtggcagctcccagacctgggccctggccagggctctaggggccggcagtcttggggtgggccctgccaattgggacgagtatccctgatttgtgaaaatgatggaaaaacgttcagtctcaaaaaaaaaaaaaataaaaaatataagaacacaaattacactacaatacacaaaccctcgcggggggtattattatcgggggggggcggaaacaaggggtatgtatacaggcggacagtgtgaactagcggtgttgcgggacccgagagttttgtgtacacaaaaggggggaaaagcgcgggcccccaataaggggcgccggttaaagttacggaaggcggtgttaccgggtaag

SEQ ID NO: 79707 - DNA, 761 bp, Homo sapiens
tcaggagctgcccccatccccaccggggggcctcaggagctgcccctaccctcttctcagcttctgcctggctgaggctagacgtcccacagagtggagagaccagggaggaatttcgggggggcagggcccccatttgcctgagcatcaagtgggtgaaggtggacagggtctgctctgtcccccagatgctgaagcagggtctcggcaccctggccctgcagcccagctcagtgctgggcttggctcctctgcagggagacggccctctacggaaacctcatcctcaggaagggggtgcttgccctcaaccccctgctgtaggcctggtgaagaccacctgggccggaagaggaactgggggcaccctgagctccagtaccaccactcacaacaggcctcccagtggcagctcccagacctgggccctggccagggctctaggggccggcagtcttggggtgggccctgccaattgggacgagtatccctgatttgtgaaaatgatggaaaaacgttcagtctcaaaaaaaaaaaaaataaaaaatataagaacacaaattacactacaatacacaaaccctcgcggggggtattattatcgggggggggcggaaacaaggggtatgtatacaggcggacagtgtgaactagcggtgttgcgggacccgagagttttgtgtacacaaaaggggggaaaagcgcgggcccccaataaggggcgccggttaaagttacggaaggcggtgttaccgggtaag

SEQ ID NO: 79708 - DNA, 335 bp, Homo sapiens
accttgtactttatatactgtactcaatgtaatttgtataacaaagttatactgtattaagccaagtatatttcactctgataattttgagaagtctactatgtcacaaaatctaggaaaatgttaccttagaccctaatctaatcatccttgattgagtcttagtcaccgtagaaatctcacatgatttaaaaaacacaaggataggtagagatttgttaaaggatacaaaattacagcaagataggaggaataagttctagactttttcactggggtccccaacccctgtgccgtagacccatacctggctgcacagctggaggtgagccatg

SEQ ID NO: 79709 - DNA, 659 bp, Homo sapiens
attgggatgattttcaaataatgtgtatatttaatgtggtcattaaaaacatgaaatcaatggcatttcttacaagcaataatatcttgcaggtaaaatgtgattttaagaagtgtttctttaaaaattagttcatgtaattagtatggacacttaagttcgtggtagaaaatagccaattcattcgttcattcaacaaataatggagtgtttacgatgtcgccttggcaacaagggggtaggtgaacagcagtaaacaaaagcggcaaaaatccttgctttcaagcgcctgtcagccagccactgcttcgtgccctgtgcactacctaccttgcttctcaaatcagttgggttattttagggagaataagtattttagccaaggccactcagcgcttaagtgatagaagcagattccaactcaagtctgcatggctttaaaccctgtgttctttcctcaaattaccataattgttgggctaaatgaaactttctcactttgtctcactgacagagctatcattacctgggccctctctcttcccacctgcctcagcactggcttgaggactcaagtccgggaactgttggtggaaatagaaggcatttcagtggatgcctcagcccaggctggtgtgtttttaaaaaaaaaaaaaaaa

SEQ ID NO: 79710 - DNA, 543 bp, Homo sapiens
atactagtagtagaatctaatattccactttcaataatgtataaaacatccaggtaggagatctataaagaaagagagtacttgaacaacactgtacaccagttggactttagggacatatacattacataccactcaacagcagcagaatattcttatacttcagcaacatgttcttctcaaacacaggtggaacatactccaggataaattacatcagacctcaaaacaagtccccccaacattaaaaagataaaagtcatttcaaagatcttttaagatcacaattgagtaaaattagaaatcaatagtgcaagaaagtgggaaattcacaatgacgaaaaaacaatacactcttaaataaccattgggtcaattaggaaatcataaaggaatttaaattatatctcaaggcaagtgaaaacaaaaacacaacatatcaaaacttacaagatccagcaaaagtactaaaaaggaattttgtagcaataaatgcctacgttgaaatctaaggatctcaaatgaacaacctagcttatacct

SEQ ID NO: 79711 - DNA, 1217 bp, Homo sapiens
gcgacagtctattgcactcctgagttactattctatagatgtggtaacacctaggatgaggatcaccagaagtctgcactgttaactcttgaagaataaaggcccaggagcacaatgaagttcaattgaaacatttttatttacctttgctgcagggtaagttgagtttccaatcagggcaagaagggtttctgacctataaaaacaatggttagctgtaaggcatatataaacttttattaaccttggacctgactcaagtaaaaattattacacttatatttactatttaatttatagaagtggcaaactggtgacctttgggcagaatcttacctatagacatgttttgaccccaaaattggaattcattgccaatactgtatttaaaattcagaattcacgagttctagttccacttgaaaatttgagagatctgggaatcctatattcacatttccatctagcaacaggactgagctaaacagtggctatcccctttacctgggtatttgtatatttacaacatgcttagaacactgtttcttgcattagagacaaagcagtatacaaaagtgaaaattttactgccctcacagagcttactttcaaaatgttcttcacttcaccacatccagtccttttccctggctagtctctataggtcttggcatttcctaatgtcaataaatactctgcctttctctaaaactgtcagtctccaacaggaatctcatgaagaactaatccaaacatggtgaggtatgaaatttcatttttaaaggactagatcttacacagtggcatagcagctcctttagctttcttgattttattccccaagaaataaaatcattactgctttgtaaagcatttttagtgatatatttagtaataaaaagccaggtttaagataatgctatttttctactatgtaagacaaccttatgatttacagtaagtgaaactggtaaaaggtaaaatacaaaaaaagcatactttcctctattgatcaagtttgcagtgagtgctttgtttgatatataagagaatttaggaaattctaacccagtgccctgcttttatagattaaaagaccaaaagtagtggctgacatcgggaaggaaacgtgagcccctacctcagtccttgcaccaaaattaattccagaaggatcaaagatgtaatcaaaaatttaaaaaaagaaaccaaaggat

SEQ ID NO: 79712 - DNA, 4309 bp, Homo sapiens
agcgggagccggaggagggggaaggagggaggggagagcggtggcggcggctgcgccgggctgtgagtctctcgccgccggaggaagatgaggctgaagattggattcatcttacgcagtttgctggtggtgggaagcttcctggggctagtggtcctctggtcttccctgaccccgcggccggacgacccaagcccgctgagcaggatgagggaagacagagatgtcaatgaccccatgcccaaccgaggcggcaatggactagctcctggggaggacagattcaaacctgtggtaccatggcctcatgttgaaggagtagaagtggacttagagtctattagaagaataaacaaggccaaaaatgaacaagagcaccatgctggaggagattcccagaaagatatcatgcagaggcagtatctcacatttaagcctcagacattcacctaccatgatcctgtgcttcgcccagggatcctcggtaactttgaacccaaagaacctgagcctcctggagtggttggtggccctggagagaaagccaagccattggttttgggaccagaattcaaacaagcaattcaagccagcattaaagagtttggatttaacatggtggcaagtgacatgatctcactggaccgcagcgtcaatgacttacgccaagaagaatgcaagtattggcattatgatgaaaacttgctcacttcgagcgttgtcattgtcttccataatgaaggatggtcaaccctcatgagaacagtccacagtgtaattaaaaggactccaaggaaatatttagcagaaattgtgttaattgacgatttcagtaataaagaacacttaaaagaaaaactggatgaatatattaagctgtggaatggcctagtgaaggtatttcgaaatgaaagaagggaaggtttaattcaagcacgaagtattggtgctcagaaggctaaacttggacaggttttgatataccttgatgcccactgtgaggtggcagttaactggtatgcaccacttgtagctcccatatctaaggacagaaccatttgcactgtgccgcttatagatgtcataaatggcaacacatatgaaattataccccaagggggtggtgatgaagatgggtatgcccgaggagcatgggattggagtatgctctggaaacgggtgcctctgacccctcaagagaagagactgagaaagacaaaaactgaaccgtatcggtccccagccatggctgggggattatttgccattgaacgagagttcttctttgaattgggtctctatgatccaggtctccagatttggggtggtgaaaactttgagatctcatacaagatatggcagtgtggtggcaaattattatttgttccttgttctcgtgttggacatatctaccgtcttgagggctggcaaggaaatcctccgcccatttatgttgggtcttctccaactctgaagaattatgttagagttgtggaggtttggtgggatgaatataaagactacttctatgctagtcgtcctgaatcgcaggcattaccatatggggatatatcggagctgaaaaaatttcgagaagatcacaactgcaaaagttttaagtggttcatggaagaaatagcttatgatatcacctcacactaccctttgccacccaaaaatgttgactggggagaaatcagaggcttcgaaactgcttactgcattgatagcatgggaaaaacaaatggaggctttgttgaactaggaccctgccacaggatgggagggaatcagcttttcagaatcaatgaagcaaatcaactcatgcagtatgaccagtgtttgacaaagggagctgatggatcaaaagttatgattacacactgtaatctaaatgaatttaaggaatggcagtacttcaagaacctgcacagatttactcatattccttcaggaaagtgtttagatcgctcagaggtcctgcatcaagtattcatctccaattgtgactccagtaaaacgactcaaaaatgggaaatgaataacatccatagtgtttagagagaaaaaaataaaccaataacctacctactgacaagtaaatttatacaggactgaaaaccgcctgaaacctgctgcaactattgttattaactctgtatagctccaaacctggaacctcctgatcagtttgaaggacattgataaactgtgattttacaataacattatcatctgcagttactgtttacaagactgcttttaccttaaactttgtagatgtttacatctttttgttgtgttttaagatgatgttggtaatttgtgcctttagctctgttttattagacagagttaaagcatgttgtcttctttgggattacactcaggggtctgaaaggcagtttgatttttatttttaacacacttgaaaaaaggttggagtagccagactttcatatataacttggtgattatcaacctgttgtgtctttatttaattttacatctttttgaagcactgccacaggttattagccaaggtggccttccttcacagtcatgctgcttttttgaaaggtgaatttcaacacatttagtgcctctttcatttctcagtatatatttcaagagcttgtgatgaaatctataggatggtaatgatggacttgtcacctgtatggggaatacttttactactcagaaatgaatttatgtgctgccatttgctataaagttgaactttgtatggcttgaaaaagaaatgacaatatggaacatcccaaggctgtcccatagggttggaagttgtgtagcattcactcccttacctactggcattcccagtgccctctgtccatacctacttctaggattgcaaaggagtcttccaactagagaaaaattgtccactgacatttgggatttacttttctccaatacctgccaatacagaaaactattatcagttgttattgttatcccttgaaagcgagggtgacaaaaacaacaaaacaccgttataaacacatcaaaggttcattctgactgaggtaagactttccaagcccttgttagattaggccttataaaacttgtgtgcattataacctaagctgtgcaacctgtgaagccaagagtgaactgatgtttcatttatattttcatccaaatgacattatctgcacgtttttaaaatttaaaaacaaaggactatttaaaaatacagtttattaacaaacgtgaactactttctgttacattaggtgttccctagtgtttcttaatttctttttagaaagtgtatttttattagtatttttccggtgaacagaagatttgtttggatttaaacatttactaagacagtacctattaggaaaaccaaatattgcaaatggtcaattcgattttaatttctcaaaagatactctgttatccagaagattaaaatgcctacattgagtgcttaaaaaaaaaaaacaactgtgatgatgtgagcagaatggcaagtaagttaagcatttttgatcctgtaatcatggtatcattacaatgaaaggaattcacaaactactgccagaggaagtttgttttttaatttaagagggaaatataacctataaatttgtttcttccaagcttagctcttaaatttggagactcaaagttaaacatcctcaacagagttttatttataattttgaattgtcaatttgtattttgctactgatctgtgatcaaccattttaactttcatctctagggatgtttaacatttataattgcaaaataaaccaactataaaaaaagaaactaagagagaattggtactttaattacttgtgtgtttgcaaataggctccattttccatgttgagtagattataaccttattaactatgcataggcctaagaaaggtggcaatgaactgtgcatgtaaattttaaatgggtactttgtgcaattcgttaaaagaagatactctatgaatatgattctatatattgaaatcagaaaacctaccaaacaaaaacatcagaagctgctgccataatgactattttctactgtaggctgctttggaaataattcccatatccttgctttgtaagttggtaatatcactatgcatttctacacattttataaatttgatttatgcagattttgatacactgtatgtttctgtagaaattgtataaatattcaaaattttattaggataaatttgagaaacttacgtatatcttaattctgggttgcttgttttttaggtgacaaaaataaaatattgtattttaattc

SEQ ID NO: 79713 - DNA, 4306 bp, Homo sapiens
cttattgtccttctttattgggagggaggggagagcggtggcggcggctgcgccgggctgtgagtctctcgccgccggaggaagatgaggctgaagattggattcatcttacgcagtttgctggtggtgggaagcttcctggggctagtggtcctctggtcttccctgaccccgcggccggacgacccaagcccgctgagcaggatgagggaagacagagatgtcaatgaccccatgcccaaccgaggcggcaatggactagctcctggggaggacagattcaaacctgtggtaccatggcctcatgttgaaggagtagaagtggacttagagtctattagaagaataaacaaggccaaaaatgaacaagagcaccatgctggaggagattcccagaaagatatcatgcagaggcagtatctcacatttaagcctcagacattcacctaccatgatcctgtgcttcgcccagggatcctcggtaactttgaacccaaagaacctgagcctcctggagtggttggtggccctggagagaaagccaagccattggttttgggaccagaattcaaacaagcaattcaagccagcattaaagagtttggatttaacatggtggcaagtgacatgatctcactggaccgcagcgtcaatgacttacgccaagaagaatgcaagtattggcattatgatgaaaacttgctcacttcgagcgttgtcattgtcttccataatgaaggatggtcaaccctcatgagaacagtccacagtgtaattaaaaggactccaaggaaatatttagcagaaattgtgttaattgacgatttcagtaataaagaacacttaaaagaaaaactggatgaatatattaagctgtggaatggcctagtgaaggtatttcgaaatgaaagaagggaaggtttaattcaagcacgaagtattggtgctcagaaggctaaacttggacaggttttgatataccttgatgcccactgtgaggtggcagttaactggtatgcaccacttgtagctcccatatctaaggacagaaccatttgcactgtgccgcttatagatgtcataaatggcaacacatatgaaattataccccaagggggtggtgatgaagatgggtatgcccgaggagcatgggattggagtatgctctggaaacgggtgcctctgacccctcaagagaagagactgagaaagacaaaaactgaaccgtatcggtccccagccatggctgggggattatttgccattgaacgagagttcttctttgaattgggtctctatgatccaggtctccagatttggggtggtgaaaactttgagatctcatacaagatatggcagtgtggtggcaaattattatttgttccttgttctcgtgttggacatatctaccgtcttgagggctggcaaggaaatcctccgcccatttatgttgggtcttctccaactctgaagaattatgttagagttgtggaggtttggtgggatgaatataaagactacttctatgctagtcgtcctgaatcgcaggcattaccatatggggatatatcggagctgaaaaaatttcgagaagatcacaactgcaaaagttttaagtggttcatggaagaaatagcttatgatatcacctcacactaccctttgccacccaaaaatgttgactggggagaaatcagaggcttcgaaactgcttactgcattgatagcatgggaaaaacaaatggaggctttgttgaactaggaccctgccacaggatgggagggaatcagcttttcagaatcaatgaagcaaatcaactcatgcagtatgaccagtgtttgacaaagggagctgatggatcaaaagttatgattacacactgtaatctaaatgaatttaaggaatggcagtacttcaagaacctgcacagatttactcatattccttcaggaaagtgtttagatcgctcagaggtcctgcatcaagtattcatctccaattgtgactccagtaaaacgactcaaaaatgggaaatgaataacatccatagtgtttagagagaaaaaaataaaccaataacctacctactgacaagtaaatttatacaggactgaaaaccgcctgaaacctgctgcaactattgttattaactctgtatagctccaaacctggaacctcctgatcagtttgaaggacattgataaactgtgattttacaataacattatcatctgcagttactgtttacaagactgcttttaccttaaactttgtagatgtttacatctttttgttgtgttttaagatgatgttggtaatttgtgcctttagctctgttttattagacagagttaaagcatgttgtcttctttgggattacactcaggggtctgaaaggcagtttgatttttatttttaacacacttgaaaaaaggttggagtagccagactttcatatataacttggtgattatcaacctgttgtgtctttatttaattttacatctttttgaagcactgccacaggttattagccaaggtggccttccttcacagtcatgctgcttttttgaaaggtgaatttcaacacatttagtgcctctttcatttctcagtatatatttcaagagcttgtgatgaaatctataggatggtaatgatggacttgtcacctgtatggggaatacttttactactcagaaatgaatttatgtgctgccatttgctataaagttgaactttgtatggcttgaaaaagaaatgacaatatggaacatcccaaggctgtcccatagggttggaagttgtgtagcattcactcccttacctactggcattcccagtgccctctgtccatacctacttctaggattgcaaaggagtcttccaactagagaaaaattgtccactgacatttgggatttacttttctccaatacctgccaatacagaaaactattatcagttgttattgttatcccttgaaagcgagggtgacaaaaacaacaaaacaccgttataaacacatcaaaggttcattctgactgaggtaagactttccaagcccttgttagattaggccttataaaacttgtgtgcattataacctaagctgtgcaacctgtgaagccaagagtgaactgatgtttcatttatattttcatccaaatgacattatctgcacgtttttaaaatttaaaaacaaaggactatttaaaaatacagtttattaacaaacgtgaactactttctgttacattaggtgttccctagtgtttcttaatttctttttagaaagtgtatttttattagtatttttccggtgaacagaagatttgtttggatttaaacatttactaagacagtacctattaggaaaaccaaatattgcaaatggtcaattcgattttaatttctcaaaagatactctgttatccagaagattaaaatgcctacattgagtgcttaaaaaaaaaaaacaactgtgatgatgtgagcagaatggcaagtaagttaagcatttttgatcctgtaatcatggtatcattacaatgaaaggaattcacaaactactgccagaggaagtttgttttttaatttaagagggaaatataacctataaatttgtttcttccaagcttagctcttaaatttggagactcaaagttaaacatcctcaacagagttttatttataattttgaattgtcaatttgtattttgctactgatctgtgatcaaccattttaactttcatctctagggatgtttaacatttataattgcaaaataaaccaactataaaaaaagaaactaagagagaattggtactttaattacttgtgtgtttgcaaataggctccattttccatgttgagtagattataaccttattaactatgcataggcctaagaaaggtggcaatgaactgtgcatgtaaattttaaatgggtactttgtgcaattcgttaaaagaagatactctatgaatatgattctatatattgaaatcagaaaacctaccaaacaaaaacatcagaagctgctgccataatgactattttctactgtaggctgctttggaaataattcccatatccttgctttgtaagttggtaatatcactatgcatttctacacattttataaatttgatttatgcagattttgatacactgtatgtttctgtagaaattgtataaatattcaaaattttattaggataaatttgagaaacttacgtatatcttaattctgggttgcttgttttttaggtgacaaaaataaaatattgtattttaattc

SEQ ID NO: 79714 - DNA, 4253 bp, Homo sapiens
agcgggagccggaggagggggaaggagggaggggagagcggtggcggcggctgcgccgggctgtgagtctctcgccgccggaggaagatgaggctgaagattggattcatcttacgcagtttgctggtggtgggaagcttcctggggctagtggtcctctggtcttccctgaccccgcggccggacgacccaagcccgctgagcaggatgagggaagacagagatgtcaatgaccccatgcccaaccgaggcggcaatggactagctcctggggaggacagattcaaacctgtggtaccatggcctcatgttgaaggagtagaagtggacttagagtctattagaagaataaacaaggccaaaaatgaacaagagcaccatgctggaggagattcccagaaagatatcatgcagaggcagtatctcacatttaagcctcagacattcacctaccatgatcctgtgcttcgcccagggatcctcggtaactttgaacccaaagaacctgagcctcctggagtggttggtggccctggagagaaagccaagccattggttttgggaccagaattcaaacaagcaattcaagccagcattaaagagtttggatttaacatggtggcaagtgacatgatctcactggaccgcagcgtcaatgacttacgccaagaagaatgcaagtattggcattatgatgaaaacttgctcacttcgagcgttgtcattgtcttccataatgaaggatggtcaaccctcatgagaacagtccacagtgtaattaaaaggactccaaggaaatatttagcagaaattgtgttaattgacgatttcagtaataaaggtatttcgaaatgaaagaagggaaggtttaattcaagcacgaagtattggtgctcagaaggctaaacttggacaggttttgatataccttgatgcccactgtgaggtggcagttaactggtatgcaccacttgtagctcccatatctaaggacagaactacatgtactgtgcctctaatagattacatagatgggaatgattattccattgaaccacagcaaggtggggatgaagatggttttgccagaggggcctgggactggagtttactatggaaacgtattcctctaagccacaaggaaaaggccaaaagaaaacataaaactgaaccttatcggtccccagccatggctgggggattatttgccattgaacgagagttcttctttgaattgggtctctatgatccaggtctccagatttggggtggtgaaaactttgagatctcatacaagatatggcagtgtggtggcaaattattatttgttccttgttctcgtgttggacatatctaccgtcttgagggctggcaaggaaatcctccgcccatttatgttgggtcttctccaactctgaagaattatgttagagttgtggaggtttggtgggatgaatataaagactacttctatgctagtcgtcctgaatcgcaggcattaccatatggggatatatcggagctgaaaaaatttcgagaagatcacaactgcaaaagttttaagtggttcatggaagaaatagcttatgatatcacctcacactaccctttgccacccaaaaatgttgactggggagaaatcagaggcttcgaaactgcttactgcattgatagcatgggaaaaacaaatggaggctttgttgaactaggaccctgccacaggatgggagggaatcagcttttcagaatcaatgaagcaaatcaactcatgcagtatgaccagtgtttgacaaagggagctgatggatcaaaagttatgattacacactgtaatctaaatgaatttaaggaatggcagtacttcaagaacctgcacagatttactcatattccttcaggaaagtgtttagatcgctcagaggtcctgcatcaagtattcatctccaattgtgactccagtaaaacgactcaaaaatgggaaatgaataacatccatagtgtttagagagaaaaaaataaaccaataacctacctactgacaagtaaatttatacaggactgaaaaccgcctgaaacctgctgcaactattgttattaactctgtatagctccaaacctggaacctcctgatcagtttgaaggacattgataaactgtgattttacaataacattatcatctgcagttactgtttacaagactgcttttaccttaaactttgtagatgtttacatctttttgttgtgttttaagatgatgttggtaatttgtgcctttagctctgttttattagacagagttaaagcatgttgtcttctttgggattacactcaggggtctgaaaggcagtttgatttttatttttaacacacttgaaaaaaggttggagtagccagactttcatatataacttggtgattatcaacctgttgtgtctttatttaattttacatctttttgaagcactgccacaggttattagccaaggtggccttccttcacagtcatgctgcttttttgaaaggtgaatttcaacacatttagtgcctctttcatttctcagtatatatttcaagagcttgtgatgaaatctataggatggtaatgatggacttgtcacctgtatggggaatacttttactactcagaaatgaatttatgtgctgccatttgctataaagttgaactttgtatggcttgaaaaagaaatgacaatatggaacatcccaaggctgtcccatagggttggaagttgtgtagcattcactcccttacctactggcattcccagtgccctctgtccatacctacttctaggattgcaaaggagtcttccaactagagaaaaattgtccactgacatttgggatttacttttctccaatacctgccaatacagaaaactattatcagttgttattgttatcccttgaaagcgagggtgacaaaaacaacaaaacaccgttataaacacatcaaaggttcattctgactgaggtaagactttccaagcccttgttagattaggccttataaaacttgtgtgcattataacctaagctgtgcaacctgtgaagccaagagtgaactgatgtttcatttatattttcatccaaatgacattatctgcacgtttttaaaatttaaaaacaaaggactatttaaaaatacagtttattaacaaacgtgaactactttctgttacattaggtgttccctagtgtttcttaatttctttttagaaagtgtatttttattagtatttttccggtgaacagaagatttgtttggatttaaacatttactaagacagtacctattaggaaaaccaaatattgcaaatggtcaattcgattttaatttctcaaaagatactctgttatccagaagattaaaatgcctacattgagtgcttaaaaaaaaaaaacaactgtgatgatgtgagcagaatggcaagtaagttaagcatttttgatcctgtaatcatggtatcattacaatgaaaggaattcacaaactactgccagaggaagtttgttttttaatttaagagggaaatataacctataaatttgtttcttccaagcttagctcttaaatttggagactcaaagttaaacatcctcaacagagttttatttataattttgaattgtcaatttgtattttgctactgatctgtgatcaaccattttaactttcatctctagggatgtttaacatttataattgcaaaataaaccaactataaaaaaagaaactaagagagaattggtactttaattacttgtgtgtttgcaaataggctccattttccatgttgagtagattataaccttattaactatgcataggcctaagaaaggtggcaatgaactgtgcatgtaaattttaaatgggtactttgtgcaattcgttaaaagaagatactctatgaatatgattctatatattgaaatcagaaaacctaccaaacaaaaacatcagaagctgctgccataatgactattttctactgtaggctgctttggaaataattcccatatccttgctttgtaagttggtaatatcactatgcatttctacacattttataaatttgatttatgcagattttgatacactgtatgtttctgtagaaattgtataaatattcaaaattttattaggataaatttgagaaacttacgtatatcttaattctgggttgcttgttttttaggtgacaaaaataaaatattgtattttaattc

SEQ ID NO: 79715 - DNA, 4016 bp, Homo sapiens
agcgggagccggaggagggggaaggagggaggggagagcggtggcggcggctgcgccgggctgtgagtctctcgccgccggaggaagatgaggctgaagattggattcatcttacgcagtttgctggtggtgggaagcttcctggggctagtggtcctctggtcttccctgaccccgcggccggacgacccaagcccgctgagcaggatgagggaagacagagatgtcaatgaccccatgcccaaccgaggcggcaatggactagctcctggggaggacagattcaaacctgtggtaccatggcctcatgttgaaggagtagaagtggacttagagtctattagaagaataaacaaggccaaaaatgaacaagagcaccatgctggaggagattcccagaaagatatcatgcagaggcagtatctcacatttaagcctcagacattcacctaccatgatcctgtgcttcgcccagggatcctcggtaactttgaacccaaagaacctgagcctcctggagtggttggtggccctggagagaaagccaagccattggttttgggaccagaattcaaacaagcaattcaagccagcattaaagagtttggatttaacatggtggcaagtgacatgatctcactggaccgcagcgtcaatgacttacgccaagaagaatgcaagtattggcattatgatgaaaacttgctcacttcgagcgttgtcattgtcttccataatgaaggatggtcaaccctcatgagaacagtccacagtgtaattaaaaggactccaaggaaatatttagcagaaattgtgttaattgacgatttcagtaataaagaacacttaaaagaaaaactggatgaatatattaagctgtggaatggcctagtgaaggtatttcgaaatgaaagaagggaaggtttaattcaagcacgaagtattggtgctcagaaggctaaacttggacaggttttgatataccttgatgcccactgtgaggtggcagttaactggtatgcaccacttgtagctcccatatctaaggacagaaccatttgcactgtgccgcttatagatgtcataaatggcaacacatatgaaattataccccaagggggtggtgatgaagatgggtatgcccgaggagcatgggattggagtatgctctggaaacgggtgcctctgacccctcaagagaagagactgagaaagacaaaaactgaaccgtatcggtccccagccatggctgggggattatttgccattgaacgagagttcttctttgaattgggtctctatgatccaggtctccagatttggggtggtgaaaactttgagatctcatacaagatatggcagtgtggtggcaaattattatttgttccttgttctcgtgttggacatatctaccgtcttgagggctggcaaggaaatcctccgcccatttatgttgggtcttctccaactctgaagaattatgttagagttgtggaggtttggtgggatgaatataaagactacttctatgctagtcgtcctgaatcgcaggcattaccatatggggatatatcggagctgaaaaaatttcgagaagatcacaactgcaaaagttttaagtggttcatggaagaaatagcttatgatatcacctcacactaccctttgccacccaaaaatgttgactggggagaaatcagaggcttcgaaactgcttactgcattgatagcatgggaaaaacaaatggaggctttgttgaactaggaccctgccacaggatgggagggaatcagcttttcagaatcaatgaagcaaatcaactcatgcagtatgaccagtgtttgacaaagggagctgatggatcaaaagttatgattacacactgtaatctaaatgaatttaaggaatggcagtacttcaagaacctgcacagatttactcatattccttcaggaaagtgtttagatcgctcagaggtcctgcatcaagtattcatctccaattgtgactccagtaaaacgactcaaaaatgggaaatgaataacatccatagtgtttagagagaaaaaaataaaccaataacctacctactgacaagtaaatttatacaggactgaaaaccgcctgaaacctgctgcaactattgttattaactctgtatagctccaaacctggaacctcctgatcagtttgaaggacattgataaactgtgattttacaataacattatcatctgcagttactgtttacaagactgcttttaccttaaactttgtagatgtttacatctttttgttgtgttttaagatgatgttggtaatttgtgcctttagctctgttttattagacagagttaaagcatgttgtcttctttgggattacactcaggggtctgaaaggcagtttgatttttatttttaacacacttgaaaaaaggttggagtagccagactttcatatataacttggtgattatcaacctgttgtgtctttatttaattttacatctttttgaagcactgccacaggttattagccaaggtggccttccttcacagtcatgctgcttttttgaaaggtgaatttcaacacatttagtgcctctttcatttctcagtatatatttcaagagcttgtgatgaaatctataggatggtaatgatggacttgtcacctgtatggggaatacttttactactcagaaatgaatttatgtgctgccatttgctataaagttgaactttgtatggcttgaaaaagaaatgacaatatggaacatcccaaggctgtcccatagggttggaagttgtgtagcattcactcccttacctactggcattcccagtgccctctgtccatacctacttctaggattgcaaaggagtcttccaactagagaaaaattgtccactgacatttgggatttacttttctccaatacctttgctgcagggtaagttgagtttccaatcagggcaagaagggtttctgacctataaaaacaatggttagctgtaaggcatatataaacttttattaaccttggacctgactcaagtaaaaattattacacttatatttactatttaatttatagaagtggcaaactggtgacctttgggcagaatcttacctatagacatgttttgaccccaaaattggaattcattgccaatactgtatttaaaattcagaattcacgagttctagttccacttgaaaatttgagagatctgggaatcctatattcacatttccatctagcaacaggactgagctaaacagtggctatcccctttacctgggtatttgtatatttacaacatgcttagaacactgtttcttgcattagagacaaagcagtatacaaaagtgaaaattttactgccctcacagagcttactttcaaaatgttcttcacttcaccacatccagtccttttccctggctagtctctataggtcttggcatttcctaatgtcaataaatactctgcctttctctaaaactgtcagtctccaacaggaatctcatgaagaactaatccaaacatggtgaggtatgaaatttcatttttaaaggactagatcttacacagtggcatagcagctcctttagctttcttgattttattccccaagaaataaaatcattactgctttgtaaagcatttttagtgatatatttagtaataaaaagccaggtttaagataatgctatttttctactatgtaagacaaccttatgatttacagtaagtgaaactggtaaaaggtaaaatacaaaaaaagcatactttcctctattgatcaagtttgcagtgagtgctttgtttgatatataagagaatttaggaaattctaacccagtgccctgcttttatagattaaaagaccaaaagtagtggctgacatcgggaaggaaacgtgagcccctacctcagtccttgcaccaaaattaattccagaaggatcaaagatgtaatcaaaaatttaaaaaaagaaaccaaaggat

SEQ ID NO: 79716 - DNA, 1887 bp, Homo sapiens
agcgggagccggaggagggggaaggagggaggggagagcggtggcggcggctgcgccgggctgtgagtctctcgccgccggaggaagatgaggctgaagattggattcatcttacgcagtttgctggtggtgggaagcttcctggggctagtggtcctctggtcttccctgaccccgcggccggacgacccaagcccgctgagcaggatgagggaagacagagatgtcaatgaccccatgcccaaccgaggcggcaatggactagctcctggggaggacagattcaaacctgtggtaccatggcctcatgttgaaggagtagaagtggacttagagtctattagaagaataaacaaggccaaaaatgaacaagagcaccatgctggaggagattcccagaaagatatcatgcagaggcagtatctcacatttaagcctcagacattcacctaccatgatcctgtgcttcgcccagggatcctcggtaactttgaacccaaagaacctgagcctcctggagtggttggtggccctggagagaaagccaagccattggttttgggaccagaattcaaacaagcaattcaagccagcattaaagagtttggatttaacatggtggcaagtgacatgatctcactggaccgcagcgtcaatgacttacgccaagaagaatgcaagtattggcattatgatgaaaacttgctcacttcgagcgttgtcattgtcttccataatgaaggatggtcaaccctcatgagaacagtccacagtgtaattaaaaggactccaaggaaatatttagcagaaattgtgttaattgacgatttcagtaataaaggtatttcgaaatgaaagaagggaaggtttaattcaagcacgaagtattggtgctcagaaggctaaacttggacaggttttgatataccttgatgcccactgtgaggtggcagttaactggtatgcaccacttgtagctcccatatctaaggacagaactacatgtactgtgcctctaatagattacatagatgggaatgattattccattgaaccacagcaaggtggggatgaagatggttttgccagaggggcctgggactggagtttactatggaaacgtattcctctaagccacaaggaaaaggccaaaagaaaacataaaactgaaccttatcggtaaagactattactttattttcttatgttgaatgtttatctaagttcttttttttttcttccccatgaactcgtataaatgtgtgggtccatacatacgcttccatttgatctttgctgccatcaacacaatacagaaccatttgcactgtgccgcttatagatgtcataaatggcaacacatatgaaattataccccaagggggtggtgatgaagatgggtatgcccgaggagcatgggattggagtatgctctggaaacgggtgcctctgacccctcaagagaagagactgagaaagacaaaaactgaaccgtatcggtaatcactaaatcacttacatatttttcttttctccagttgctgctaacctattaacctcttgccaagctaaagattcgttattaaaactgtagatgttgtctcagattctgaaagaacatctttccttacactgtttcagagctttcaatctgctccatttgctccattgtaattgcttttaccctaaatgtgatgtccactactgagacgtacacactttcattggggaaagaaaaataatgtaacatggcatttgttccacgtacaagtgaaaaaaagataaaatcttagttatcctgtcctactggattagacatcaaattttattcttttgatgacagtgtcattctataaatttaaaatacataaattactttaatccaac

SEQ ID NO: 79717 - DNA, 1123 bp, Homo sapiens
agcgggagccggaggagggggaaggagggaggggagagcggtggcggcggctgcgccgggctgtgagtctctcgccgccggaggaagatgaggctgaagattggattcatcttacgcagtttgctggtggtgggaagcttcctggggctagtggtcctctggtcttccctgaccccgcggccggacgacccaagcccgctgagcaggatgagggaagacagagatgtcaatgaccccatgcccaaccgaggcggcaatggactagctcctggggaggacagattcaaacctgtggtaccatggcctcatgttgaaggagtagaagtggacttagagtctattagaagaataaacaaggccaaaaatgaacaagagcaccatgctggaggagattcccagaaagatatcatgcagaggcagtatctcacatttaagcctcagacattcacctaccatgatcctgtgcttcgcccagggatcctcggtaactttgaacccaaagaacctgagcctcctggagtggttggtggccctggagagaaagccaagccattggttttgggaccagaattcaaacaagcaattcaagccagcattaaagagtttggatttaacatggtggcaagtgacatgatctcactggaccgcagcgtcaatgacttacgccaagaagaatgcaagtattggcattatgatgaaaacttgctcacttcgagcgttgtcattgtcttccataatgaaggatggtcaaccctcatgagaacagtccacagtgtaattaaaaggactccaaggaaatatttagcagaaattgtgttaattgacgatttcagtaataaagaacacttaaaagaaaaactggatgaatatattaagctgtggaatggcctagtgaaggtatttcgaaatgaaagaagggaaggtttaattcaagcacgaagtattggtgctcagaaggctaaacttggacaggttttgatataccttgatgcccactgtgaggtggcagttaactggtatgcaccacttgtagctcccatatctaaggacagtacatttctatgaccagaaccacgagcacactccggccgagctacaagctcggaccggtatcactcgccgt

SEQ ID NO: 79718 - DNA, 528 bp, Homo sapiens
ttttttctctgtggtattttacggaaatgtatagtcctttgctcttagagaaagaacccattccagtgttgacttcaagaccataagttatttcaaaactatgtaaagattgacaatccagtaataacctgtcactacacatacccagattttccctgtaaactgtaatatttaacatgaaatgttaaattctgatgccagagttcatcaaaaactaaactgttgcctgctttttgcgtctttattcatttttttagatcagaggcttcgaaactgcttactgcattgatagcatgggaaaaacaaatggaggctttgttgaactaggaccctgccacaggatgggagggaatcaggtaaaccaccttacttttgtgtttaagttgttccgtattgagggccatcaggtttattgatcacagagtgatctttgtactttggttttcgatttggtaattttgtttgttttgataaagtaaaacattctgtaaaaaaattgacagtgttaaaacattcacttaaatgatg

SEQ ID NO: 79719 - DNA, 3227 bp, Homo sapiens
tattgagtggccatgtgaggaggtaagcaggcctgagactgggtagagagatggttttgccagaggggcctgggactggagtttactatggaaacgtattcctctaagccacaaggaaaaggccaaaagaaaacataaaactgaaccttatcggtccccagccatggctgggggattatttgccattgaacgagagttcttctttgaattgggtctctatgatccaggtctccagatttggggtggtgaaaactttgagatctcatacaagatatggcagtgtggtggcaaattattatttgttccttgttctcgtgttggacatatctaccgtcttgagggctggcaaggaaatcctccgcccatttatgttgggtcttctccaactctgaagaattatgttagagttgtggaggtttggtgggatgaatataaagactacttctatgctagtcgtcctgaatcgcaggcattaccatatggggatatatcggagctgaaaaaatttcgagaagatcacaactgcaaaagttttaagtggttcatggaagaaatagcttatgatatcacctcacactaccctttgccacccaaaaatgttgactggggagaaatcagaggcttcgaaactgcttactgcattgatagcatgggaaaaacaaatggaggctttgttgaactaggaccctgccacaggatgggagggaatcagcttttcagaatcaatgaagcaaatcaactcatgcagtatgaccagtgtttgacaaagggagctgatggatcaaaagttatgattacacactgtaatctaaatgaatttaaggaatggcagtacttcaagaacctgcacagatttactcatattccttcaggaaagtgtttagatcgctcagaggtcctgcatcaagtattcatctccaattgtgactccagtaaaacgactcaaaaatgggaaatgaataacatccatagtgtttagagagaaaaaaataaaccaataacctacctactgacaagtaaatttatacaggactgaaaaccgcctgaaacctgctgcaactattgttattaactctgtatagctccaaacctggaacctcctgatcagtttgaaggacattgataaactgtgattttacaataacattatcatctgcagttactgtttacaagactgcttttaccttaaactttgtagatgtttacatctttttgttgtgttttaagatgatgttggtaatttgtgcctttagctctgttttattagacagagttaaagcatgttgtcttctttgggattacactcaggggtctgaaaggcagtttgatttttatttttaacacacttgaaaaaaggttggagtagccagactttcatatataacttggtgattatcaacctgttgtgtctttatttaattttacatctttttgaagcactgccacaggttattagccaaggtggccttccttcacagtcatgctgcttttttgaaaggtgaatttcaacacatttagtgcctctttcatttctcagtatatatttcaagagcttgtgatgaaatctataggatggtaatgatggacttgtcacctgtatggggaatacttttactactcagaaatgaatttatgtgctgccatttgctataaagttgaactttgtatggcttgaaaaagaaatgacaatatggaacatcccaaggctgtcccatagggttggaagttgtgtagcattcactcccttacctactggcattcccagtgccctctgtccatacctacttctaggattgcaaaggagtcttccaactagagaaaaattgtccactgacatttgggatttacttttctccaatacctgccaatacagaaaactattatcagttgttattgttatcccttgaaagcgagggtgacaaaaacaacaaaacaccgttataaacacatcaaaggttcattctgactgaggtaagactttccaagcccttgttagattaggccttataaaacttgtgtgcattataacctaagctgtgcaacctgtgaagccaagagtgaactgatgtttcatttatattttcatccaaatgacattatctgcacgtttttaaaatttaaaaacaaaggactatttaaaaatacagtttattaacaaacgtgaactactttctgttacattaggtgttccctagtgtttcttaatttctttttagaaagtgtatttttattagtatttttccggtgaacagaagatttgtttggatttaaacatttactaagacagtacctattaggaaaaccaaatattgcaaatggtcaattcgattttaatttctcaaaagatactctgttatccagaagattaaaatgcctacattgagtgcttaaaaaaaaaaaacaactgtgatgatgtgagcagaatggcaagtaagttaagcatttttgatcctgtaatcatggtatcattacaatgaaaggaattcacaaactactgccagaggaagtttgttttttaatttaagagggaaatataacctataaatttgtttcttccaagcttagctcttaaatttggagactcaaagttaaacatcctcaacagagttttatttataattttgaattgtcaatttgtattttgctactgatctgtgatcaaccattttaactttcatctctagggatgtttaacatttataattgcaaaataaaccaactataaaaaaagaaactaagagagaattggtactttaattacttgtgtgtttgcaaataggctccattttccatgttgagtagattataaccttattaactatgcataggcctaagaaaggtggcaatgaactgtgcatgtaaattttaaatgggtactttgtgcaattcgttaaaagaagatactctatgaatatgattctatatattgaaatcagaaaacctaccaaacaaaaacatcagaagctgctgccataatgactattttctactgtaggctgctttggaaataattcccatatccttgctttgtaagttggtaatatcactatgcatttctacacattttataaatttgatttatgcagattttgatacactgtatgtttctgtagaaattgtataaatattcaaaattttattaggataaatttgagaaacttacgtatatcttaattctgggttgcttgttttttaggtgacaaaaataaaatattgtattttaattc

SEQ ID NO: 79720 - DNA, 1160 bp, Homo sapiens
  misc_feature (1125)..(1125): n is a, c, g, or t
  misc_feature (1139)..(1139): n is a, c, g, or t
  misc_feature (1160)..(1160): n is a, c, g, or t
agcgggagccggaggagggggaaggagggaggggagagcggtggcggcggctgcgccgggctgtgagtctctcgccgccggaggaagatgaggctgaagattggattcatcttacgcagtttgctggtggtgggaagcttcctggggctagtggtcctctggtcttccctgaccccgcggccggacgacccaagcccgctgagcaggatgagggaagacagagatgtcaatgaccccatgcccaaccgaggcggcaatggactagctcctggggaggacagattcaaacctgtggtaccatggcctcatgttgaaggagtagaagtggacttagagtctattagaagaataaacaaggccaaaaatgaacaagagcaccatgctggaggagattcccagaaagatatcatgcagaggcagtatctcacatttaagcctcagacattcacctaccatgatcctgtgcttcgcccagggatcctcggtaactttgaacccaaagaacctgagcctcctggagtggttggtggccctggagagaaagccaagccattggttttgggaccagaattcaaacaagcaattcaagccagcattaaagagtttggatttaacatggtggcaagtgacatgatctcactggaccgcagcgtcaatgacttacgccaagaagaatgcaagtattggcattatgatgaaaacttgctcacttcgagcgttgtcattgtcttccataatgaaggatggtcaaccctcatgagaacagtccacagtgtaattaaaaggactccaaggaaatatttagcagaaattgtgttaattgacgatttcagtaataaaggtatttcgaaatgaaagaagggaaggtttaattcaagcacgaagtattggtgctcagaaggctaaacttggacaggttttgatataccttgatgcccactgtgaggtggcagttaactggtatgcaccacttgtagctcccatatctaaggacagaactacatgtactgtgcctctaatagattacatagatgggaatgattattccattgaaccacagcaaggtggggatgacctcgtaactttgaacccaaagaacctgagccttctggagtgggttgtggnccttgaggctttgntgaactaggaccctgccacan

SEQ ID NO: 79721 - DNA, 291 bp, Homo sapiens
aacaagaaagtaggcaaagttctaatactttggtagccagcactggctaaagtgcaacttgttagcagacaatattgaaggtatttcagaagtattttactcgttgccttttactatcaatgtagtgaccatgtgttttgaacagattagtattatttaattcctttggttagacataggaattaaacttcttttattctcaaagtctcacatacttgtaatctcctgatgggctcttcttacccactgcacagataaacccaattcactgagacagtgttattgcagtaa

SEQ ID NO: 79722 - DNA, 562 bp, Homo sapiens
caataatttcatcttatagcaaggagacattccaacgttcccatgttttattttctgagaacagtgggacagatctgtagtaatggaatattatttgcaaaagggttacatatgacacaagtaagtgttctgacataaagttttatttagttcagtggcatgtgctgttgggagccatacaccataaaatatatatatcccaaaataaatctagaatattttcacctccaatttcagtaattggcatatgatttgtgagacgcatctgtttttgtatgaggtttaatcactagcaatctgtttaaagaatccagtcctatacacagttggactcattcttgaaacctttaaatgctccctcatagtttttcagttatttggaagttgcattgggtcaaactgaactccttgagtttggtgtaaattccttttttctgcttattatagtgaaacttcagcatgtttcttagtaaactcccataccattgaaatgcttaagccagttggctttcagtctcatgccttatttcctccaaggcatgcctcaacgcattgtttgtct

SEQ ID NO: 79723 - DNA, 757 bp, Homo sapiens
ctgccctgctctctggtcttttcagtttgcctctttttacggaactgcgtcctacagtggagctgggcacagcaactggatcccagccttcttagcccgctgttcttgggctagagccccatccgatgagtagggactggctggaggaagggggctgtccgtcatgctcaccaggaatttagcctcttcaactgggtgctggggtgagaaatgctggcatctgtccctcctggccctccgacggtggctccgtgccctcaaaagaaggatgatcccttcctggtcccgcctgacccgggggagctcggcccctgctgtgctgtcagcctcgccccggccgcccgcgctgacccccgcccggctcacagcaccgctggccgcagcctctcaccgagagctcctgccctcagcctccagccggagaaggactccccatcccagcagagctcagctcagcgggcacgcgcacgacgcagaaatccttgatttctcaggttaggcgacggctgaattataaacacgggcctcgctggaccacggacccgccaggttctcccgcaacttgcggagctcctggaccggcccttcccagaggcgcagcgctgagtcccaggagcaggacctgaaccaggaaggggaggggcgagcacagtcctgcctcctcctccccgcacagtgctgggggaatgacccccactgccttcttctcctcccccaacactgcagggggaatgacccccactgtcttctcctccca

SEQ ID NO: 79724 - DNA, 418 bp, Homo sapiens
gcctaatttgtagatatcctcaagaagattatgagtcattctcactaccggaatctgttcctctattttgtttaccaatgggtgcaaccattgaatgttggccatcaaatagcaaataccctctgcctgtattttctacttttgttttaactggagcctcagctgaaaaggtttatggtgctgctattcagttttatgaaccatactctgaggagaatctcacagaaaagcagagacttcttttgggtttaacatcagcagatgggaagtctgatagttccaaaacaattcatactaacaaatgcatctgtcttctttctcactggcctttttttgatgcattcaggaagtttctgacttttctgtatcgttattccatctctgggcctcatgtccttccaattgagaagtaagttaa

SEQ ID NO: 79725 - DNA, 368 bp, Homo sapiens
cttgccggttattgtcagaattttttgttttgtcaacatgctgggtgtgaattgatatcttcttgtgattttatttctcatttctctggtgacaaggtaggttgtatatctttttaaatctttggttttaggaattgaaaatgtcttcattatgtcttttcttcgtctttacctttgtttatggtaccttttatgacatagaagttttcagtatggatttagctagatagcccaatcttttttatgatctttgcttcctgtttcttgttttaaaaattctttgctactctaggaacataaagacctccactacattttcctctgacagattcgaagttgtttccattcttgtgtatttcatccatttt

SEQ ID NO: 79726 - DNA, 2266 bp, Homo sapiens
atggcgtgcaggcagagaggaggctcttggagtccctcaggctggttcaatgcaggctggagcacctacaggtcgatttctctcttcttcgcccttgtgacttcagggaactccatagatgtttctcagttggtaaatcctgcctttccaggcactgtcacttgcgatgaaagggaaataacagtggagttcccaagcagtcctggcaccaagaaatggcatgcatctgtggtggatcctcttggtctcgacatgccgaactgcacttacatcctggacccagaaaagctcaccctgagggctacctatgataactgtaccaggagagtgcatggtggacaccagatgaccatcagagtcatgaacaacagtgctgccttaagacacggagctgtcatgtatcagttcttctgtccagctatgcaagtagaagagacccaggggctttcagcatctacaatctgccagaaggatttcatgtctttttccttgccacgggtcttctctggcttggctgacgacagtaaggggaccaaagttcagatgggatggagcattgaggttggtgatggtgcaagagccaaaactctgaccctgccagaggccatgaaggaaggcttcagcctcttgattgacaaccacaggatgaccttccatgtgccattcaatgccactggagtgactcactatgtgcaaggtaacagtcatctctacatggtgtctctgaagcttacatttatatctcctggacagaaggtgatcttctcttcacaagctatttgtgcaccagatcctgtgacctgcaatgccacacacatgactctcaccataccagagtttcctgggaagcttaagtctgtgagctttgaaaaccagaacattgatgtgagccagctgcatgacaatggaattgatctagaagcaacaaatggcatgaaattgcatttcagcaaaactctgctcaaaacgaaattatctgaaaaatgcctactccatcagttctacttagcttcactcaagctgacctttctccttcggccagagacagtatccatggtgatctatcctgagtgtctctgtgagtcacccgtttctatagttacaggggagctgtgcacccaggatgggtttatggacgtcgaggtctacagctaccaaacacaaccagctcttgacctgggtactctgagggtgggaaactcatcctgccagcctgtctttgaggctcagtctcaggggctggtacggttccacatacccctgaatggatgtggaacgagatataagttcgaagatgataaagtcgtctatgaaaacgaaatacatgctctctggacggattttcctccaagcaaaatatctagagacagtgagttcagaatgacagtgaagtgttcttatagcaggaatgacatgctactaaacatcaacgttgaaagccttactcctccagtggcctcagtgaagttgggtccatttaccttgatcctgcaaagctacccagataattcctaccaacaaccttatggggaaaacgagtaccctctagtgagattcctccgccaaccaatttacatggaagtgagagtcctaaacagggatgaccccaacatcaagctggtcttagatgactgctgggcgacgtccaccatggatccagactctttcccccagtggaacgttgtcgtggatggctgtgcatatgacctggacaactaccagaccaccttccatccagtcggctcctctgtgacccatcctgatcactatcagaggtttgacatgaaggcttttgcctttgtatcagaagcccacgtgctctctagcctggtctacttccactgcagtgccttaatctgtaatcgactctcccctgactccccactgtgttctgtgacctgccctgtgtcctctaggcacaggcgagccacaggggccactgaagcagagaaaatgacagtcagcctcccaggacccattctcctgttgtcagatgactcctcattcagaggtgtcggctcatctgatctaaaagcaagtgggagcagtggggagaagagtaggagtgaaacaggggaggaggttggctcacgaggtgctatggacaccaaagggcacaagactgctggagatgttggttccaaagctgtggctgctgtggctgcctttgcaggtgtggtggcaactctaggcttcatctactacctgtacgagaaaaggactgtgtcaaatcactaaatgggcttctaaataaagcagtcaaaat

SEQ ID NO: 79727 - DNA, 370 bp, Homo sapiens
tattaacatgagagctacaggcacacaggtattgacacacttttaaaatgtgcatcatcatagacagggctagacagagccaatctggggttgcacctgttcactgctactttggcccctgaaaagttttgtagcaaatcatctggccctgtgttttcagcactgttctgatctgaactcttagtcctctcagtcctttgggtccagctgttggaccacctcagaggcctactctgcattcatgtcctggcacatctgaccctgttgtttgattcaaggcacacctaccatgttctaatacttaaattattgtatagctactaagtaatgtacactaaatgccatcacagagcctagttacagattttta

SEQ ID NO: 79728 - DNA, 504 bp, Homo sapiens
actttttttaatctgagacatttcttctgtcttcctttatcttccatgacattggtatttttgaagcattaaggccaattattttgcagaacgtctctcaatttggagttgtctgatgttttctcattacttaggttttgcatttttggcagtacttcagaagtgatttgtttctcagtgcatcacactggaagacacaagatgttgctttattgcattattgatgttgttcacttttattttggagacaagttctcactttgttgcccaggctgcagtgcagtggcacgatcttggctcgctgcaggcttgacctcctgggctcaagtgatcctaccacctcggcctcagaagtagctgggaccacagcagtacactaccaggccctgctaattttttttttattgtggagacagggtctccctatgctgtccaagacggtgtcgaactcctgggttcaagtgatcctcccgtgtcaggctcccaaagtgctgggattatgat

SEQ ID NO: 79729 - DNA, 817 bp, Homo sapiens
gtttacccaccatttgtatacaggagtacaacagcacagtgtggttgagactacagggcaaacattgtgctaagttagatttcaaagaatttttgatcaggatgcaaaccaagagaccgtttttgaaaacattgccaaaccagttgctgggagtcctacaggaactggatcaacccagcaagtctgcagttcccaaggtcttcaggatgaggcaccagtgcagttatgtagtatttttccgccaaagtgatatgttttaaactgacagattttcattgttccatttgatgctaatattttcttctaacaatagcttttctcttaatgatgccttttacttatgtaaacatgtttttctcataaaaacttaaatagtcattttgctttttattaatggaatcaccaccaagcaatctttataagattgtcatttatatggctacattaaataacacagttctgttttcatacatagaaattctaataatataaaaaattatgtagccaaaaatattgaaacatttatacatgaaaagcttgagtcacagaaacctagggttgaaaggaacttcaaggtctttagccttcctccaagaaatataacttacaaaagtgagcagaagtttttatatattcacttgcccttaggctcttaatttaactccacactgagcattttcgacactgacttgttttgagaaaggttatcataagggagcttttccgtttctgctacctcaaatgcgtgtatcttttttcttagcctttcttcctttactcttctctcagaaatatttctctttactatccttactac

SEQ ID NO: 79730 - DNA, 208 bp, Homo sapiens
gggctgctcctcttctgtgttctgccatcctgaagccagaaggaccaccttggctgctctgtcctgtgcccgacccatccattccaggcccctagctcactttccagatggccctgggtgcaccccacatctccagctcccttggcccaggccccctcctctgcatcagccctgctgtggtttcagccaccctcctcgtctgaggcca

SEQ ID NO: 79731 - DNA, 181 bp, Homo sapiens
aaaataaagatgatttaggtagtttgatagtatagttagaaggaagtattttgcagaggcagtgaagtgtactataatgtagaacatactgttcagtcgtaatcattggtagatttgagcaggaatttccaagtaaattttatttacttacgtatggttggcaatcactgtttcttctatt

SEQ ID NO: 79732 - DNA, 230 bp, Homo sapiens
ggggctgaacgtactaatgtgctatgctcacgtctctcttcctcttataaagtcactagtttcactctgatgataacccattaattcattaaccctttaatatactgatctatgaattaatctattcatgggggtagaaccctcttgatccaatcaccctcaaaggccccacctctcaacactgccacattggggatcaagtttcaacatgagttttggagaggacattc

SEQ ID NO: 79733 - DNA, 430 bp, Homo sapiens
agcaatccagggataacaggttctgaatgagaaattgctgagatgacctttaagaagcagataaaacatgtttaggtgatgaaataggagaggcgcgctctgatatatgtatacgttttgtgtgatatatacacatacatatagatctatacatgtgcacatacatagacacatcttcaaacccacacttacctgtacatgtgtacataatatacatgcactgatccacacatgcccatagcaatctgtgtccctgatactccatgctaccctattttggaatgcttggaaatcagcttgctttgaatttgaggacttcctattacagatggtgccaatgaatgagaaaaaggagcaggaaactgctccaccatcttctaggcttctgagtcatttccgtgttaccacttgctttttgatgatgcatgtt

SEQ ID NO: 79734 - DNA, 829 bp, Homo sapiens
gttgccttgaatggcagctgaatgcaccagcgggatccttggcagcaatgcccaggcactgaagtcgggcattcaggagagctaaatggagaaaagaaacttgagcaaactgcttcctggaacactgagaacctgaatgggaaattaagaagaaccagattctttctattcttccaccagccaaggtgatgagcacaaaaggatccatcttatacagtgcttgccagcttccataatactactcaccacgatgttgaaatcacctgttccagaaccagtcctgtcctttgacaagaaggatttaattatcagtagtggtggggactggctggagagaggaaaaacacttcaaggactctgccacctttcgtagatggagagtgcaaagtttgtaccatggaactccttctctaacagttactctgtggcagtgcctatttcaaacctcccttaacttctgattgtatagatgtttgtttcatttgttcatctgtttgttcacttagtcagagatgttttaagccttaagagaaatagtggactagaaaatgccttggaaaagtacaaagttcaatccaagtaaactgtttttaaactaggaatttatgaagcctaaaatataaaatgtatatacatggatatgctctgaagtgaggtagaggggtagaaatcaacattgtgatattgtactatagttttgcaagatgttaccattgggggaaaatgtttgaagggtatacgggatatctctgccttatttcttacaactgcatgtgaatctacagttatctcaaaataaaaatttaattaacaattgattacaaaaaaa

SEQ ID NO: 79735 - DNA, 374 bp, Homo sapiens
ctctttgttggatgtgaaaataatcttttgggaaatgtgtgcttagaccttgatgtgatgcatagggacaaatttctaattctatttgcttcctaagaaaatgaaatgttactaaataaacagcgtcagggcaaggagtccaggtccataaagaaaaacttgcacagcatggtgaataaaattaataatggtgtattgcagattttaaaattgctaaaagagtaaatttcaaatgctctcatcataaaaaatattagtatttgagggaatgggtatgttactagcttaattgaattattccacattgcattcatatattataacatcactttgtaccccataaatttacataattagaaattgtcaatttacaa

SEQ ID NO: 79736 - DNA, 208 bp, Homo sapiens
ccagctctcctctaaaagcccttttgggggatcgtttcccaaagtgatgggagggtaactaaatgtattccggcacggagcctgcagcagcaaggctgcttgattaagaatgaattacactttcatcagcacagacagaaaattgattcacaaggctgcattgtgatcatcttgttcctaaagcaagggaaggttgggggagacacag

SEQ ID NO: 79737 - DNA, 563 bp, Homo sapiens
tatatgacttaacatatgaggctgcataaacatctctagtagttgtccaactggtgcttctggttctgcctccccagaaagtggatgacctgggccaccctccaccactgccctgtaaggccatgggacacacagcccatcagttctcttcatgtggtcatcccctgttagatgggagaaaatacacctgcctcatttttgtaccttctgtgtgaacattccacgacagaacttcactaaatgtgtgatgaagaactgaatgaatgaatgaatatgagagaaaatgaataaatggctcagatcctgggctggaagtctgtgtatgaggatggtgggtagaggagggtctgtttttcttgcctttaagtcattacttctcattttggggcaggagcacaggctttgaatgcagaccgactggactttaattctggctttactagttgtgattgtgtgatcttgtacatgttacttaaaccctctgtgcctgtttctttatctgtaaaatggagataataagatgtcaaaggactgtggtaagaattaaatgctttaaacaaatc

SEQ ID NO: 79738 - DNA, 376 bp, Homo sapiens
taagatgaagcagtcaacttcactgggtcaaaagttacactggactggacatagcatctcacacctgtaatcccagcactttgggaggccgaggtggggaggattgcttgaaaccaggatctagaaaccagcctgtgcaacaaagcaagacgtcatctctacaaaaaagtaaaataaattatctggacatggtggcatatgcctgtagtcaccgctacttgggaggctgaggcaagaggatctcttgaacccaggactttcaggctgccatgagccatgactgtgccactgcactccagcctgagctttacagtttagagtaagaccctgtctctatataaaaataaataaagttacactgatgctgagtcactta

SEQ ID NO: 79739 - DNA, 829 bp, Homo sapiens
ttaaaaaaaaaactttatctcacgcttttcatcaagagctgtaatcagtgagcctgtgtacttccttttccctgccagatagttgttcctggctggaagacattttatgatatttatttgatgacacacacctgctgagtggatgaaaagcaactgttcctggggatgacctacttcaagggcgcagtcagcttctgaggccttcagcaggttatcctgaaatcattttagttcaccttgatatcacctgttgaacatatctaagactggtgtattcgcagacttgttgtaggcacagttgctaaccccagggaagagatttcggagtcagtaactactttgtcagtgtattgagactgggaagacacgctgctttaccaaacctactctgagcatatggagtgctgttcttggcactcgggatgcgcatcagcccagggacctgccagctgggagcggacccctagaaggggatctagtgggaacataagtaagtatggtccagcacagaagggatggatctgaggaagaaggcatggaggatgaggatccgaggtgagggaaagggccatgaaaaaatttctgacgaagtgttctcctgggagtttccagcacagagagagatttccagttgagatcagggaagagcaaggaatatttgaaatgcatggagacactgtcaccagttcatcctttgaaggcaacatgtcttggcatgttcatttctattctacaaacatttatggaacacatgctgttgagacatggcaggccttaggtagtgaagataaaatataaataatccatgtcgctctcccaacatgtatac

SEQ ID NO: 79740 - DNA, 715 bp, Homo sapiens
ggtagacgagtgtcttacagagcctgtgtgggaagcaaaaggcaagggtgtagttcacaggcagaagcgagctgtgacattgtcagtgcagcgtgtaagtgtggctcctcacaggcggccattgattgtgagacctcatcttgctctgaagatttcccggtggctgtcatgcattgcttctcaaaagccttgcactgtgataaggtttaaggagacagattgttgcaacaatagccacttctaaggaatgttattatgtcactgcagatgatgtttttaagaggtgattcagaatgatagtttcgtgattacggaaaggagttccttctcaaactgcaaaaggaaagatgaaaatagtcatgaagcctccagaactgaaattgggcaccttttatgatggatatttactttaattcaatgcaacacatatttatggggcatagactgtatcaaatacttaataaaacccattcagtttggagctcacacctaagctgcgctgtaattggattttcttaatattcattaaaaacacaaaacaatattattttacttttttttggtatttgcatttgttgcttatagtttgtggggtgaagcaaagtggtgtgaagttgaagaagggcactatgaattaagccacacaaatgcctctaagcactgctaggagatttagaaataattacttagtcctcttaacagccatgtggggtag

SEQ ID NO: 79741 - DNA, 839 bp, Homo sapiens
ggctgtcagtggggcctggtcagtgacatcctggtcagcaggctcctagtcagagggagcccaatcaataaacctggtcatcgggggcctgaaattatccttgaaccagaaaaaaaaatccccaattcaacactccatttttgtgaagagctggttccgaattctgggtcactttttggaaaaaatatctgttgtggtaaacagtgctgcatctgtgatctcaagtctctactggaattggatagagatggtgaatttcagccagagcgcccaaagaactcgtgtcccgcgctcctgaacgccatcagccgccgcacctccatcttccctcctcccacgagtctcctgctccccgtgactctggcctcctcgcagtgttgctgggccacgtcaggaagtgctggaggacgtggcattgcaccaacaccaggcggccagccgtgtggctcatcccgcaaatcaggctcttcctgtgcatggagatggagtccctctggaggcagcccgtggccctgttctcgggcaggtggagcatggagacgactgggaacttcactagacacgcatccagccggttcaagggcttgtcgcgccgtgcaccagcttgcaggagaaagcccaacgcctcgccaagcacgaaggcctcccttcccgacttgatgaaggcagagtagcggttgaggttgcggctcacagtgaccgagctcctgcccacgtggggacccagggagccgtcgagctccagcccaggcttggacctgaagaagctggaaccgcgaacgccaacagggacagtcgaaaaaagcaaaagaaaaatcccaacaaaatcctgtctccct

SEQ ID NO: 79742 - DNA, 1214 bp, Homo sapiens
ggctgtcagtggggcctggtcagtgacatcctggtcagcaggctcctagtcagagggagcccaatcaataaacctggtcatcgggggcctgaaattatccttgaaccagaaaaaaaaatccccaattcaacactccatttttgtgaagagctggttccgaattctgggtcactttttggaaaaaatatctgttgtggtaaacagtgctgcatctgtgatctcaagtctctactggaattggatagagatggtgaatttcagccagagcgcccaaagaactcgtgtcccgcgctcctgaacgccatcagccgccgcacctccatcttccctcctcccacgagtctcctgctccccgtgactctggcctcctcgcagtgttgctgggccacgtcaggaagtgctggaggacgtggcattgcaccaacaccaggcggccagccgtgtggctcatcccgcaaatcaggctcttcctgtgcatggagatggagtccctctggaggcagcccgtggccctgttctcgggcaggtggagcatggagacgactgggaacttcactagacacgcatccagccggttcaagggcttgtcgcgccgtgcaccagcttgcaggagaaagcccaacgcctcgccaagcacgaaggcctcccttcccgacttgatgaaggcagagtagcggttgaggttgcggctcacagtgaccgagctcctgcccacgtggggacccagggagccgtcgagctccaggtatgcacctctgcccagtgcacctggatcgttcaccgtcatggagctgccatcccacttgtcgtcccagtcatcatcactgccctagctggcctagttgccaccaaggagctgctgaggccacggcttcagggcatccctaccgcctggaaatcctgcgctggctgctggaaggcactctgtggtggcaccagctgcggctgcagtagcagctggaaagcactgagagatggcttcaaggaggcaggcagtgcaccgggcagggccttgaaacctctgggtggtacaatggccatggcacagtgggtcaaggcacaggggcagccatggcgcgctgggccagtccagggttgcagaccacttgcactgcagatataaggccagggttgctgaggccatgagcccctgcgagtcagcccttgatgtcctgctcactacacaggctcagcacttcatgttctcatagatc

SEQ ID NO: 79743 - DNA, 665 bp, Homo sapiens
cttccaggtcataagtaggtaagagacaaactgttgcattctttcgagaccttgatcggcctcccactgaaacacaatttagtctggctcagggaatctgtatttttatatcaacaatagggcagaggaagccatcagatatggatttgtctcaggggagcagagggatggctttgggtcctgtctgtcatttgtctacgaggaatttccttctgggcaaattttgagggaggtggtggctttttagtctccgtagccatcttattcaggagtggactgggaggcaggtttgcctgagcagtacccagcttgactcttcccttggcttggtaattttggggcctgagatggattttcctttcacagggtgtagcaggcttagtgccagggcccagaagacttttaggcatcaggaaagtggtttaatgccttctaaaatcagaataaacacagtgcagcctgggctatagtcatctttctaccaacgcagttatgaaacatcattggtaatactttagcccagaggaggggcccacagaggctgtaatgccaggctgcccgctattcccaatggaggctggtcggaggacgtggctcagagtgaaggccaagggggccttccctgaaccccagagtggaggggccacctgcccaaaggcgcagcc

SEQ ID NO: 79744 - DNA, 634 bp, Homo sapiens
cattactctagaaagttccttcatatgaaaatatggaatgcctcatgaatttatatgccgttcttgtgcagtagtatttatagaaaaaaaaaaaggtttaacaaggcttgttttctctaaaaaattacctggtcacaatagctctcttttttagtgtgctgaaggaggcagctgaattatacataaagttgagatggtcatttataagattcactagaacagggttctgcaaactgcaaatatgtctgccatctgattttggtgaatgaagttttactggaacacagatgaagaaaacctgcttgatatcacacagtcaggagtcaactgagttggggctttgaacttaggtttatctgatgccaaagtttgtgatgctcttcaaccatttagggtaccgcagagtgtggattttgaatcacctgcatcagcatcattttaaaatatagattctgtggtcctgaccaggtctctgaagtcagaatatgaagtggagctaggaatctaacttcttaacaagttccctagatgcctaagggtatccctgaatgatacagtttgtttgaaagactgaaaagcccaaagctggcccttttgggaaatagcagtaaatcattgatatgtgaaggttccc

SEQ ID NO: 79745 - DNA, 836 bp, Homo sapiens
cttctttgttctgtcagccactatagagttgaaagcaaatatggacatctgtgttactttgatattcagaattctatatctgtgcaactcctagaaatgcatgttctcaaagagagaacagttttttttaggagatctgttgcccctttttggttctttaaaatgtattgtattatgaagtgcttcttttttcaatatggggggaaaagaaatagagacagagctggggggggtggggggaggagagagagagactgcttcctttgcttaatgttataagttttatacacaactgtactgttatttcttgcaagtattcttgtatttcattaagagaggtaatttttaaagtgaggccaggctaaatattatcttattatcttatacattgaaaagtacaagatattctaagattaaatttcggttggttcttctctaggaatctacatatgtactaattaataccttgcttgcttattaccaagttcctctcattttacatttatgcaggcttcagtcagagcatcctgcatttaaatcttggatacaagcttcttcctcctgacccagtttaatgctacaagtatgaagggtgaaggagagtactttgcatattggagtcacttgggacttgtgtgggaaggcttttgttttgcctaatttcacaaggtgacaagagttcactcctcagctggaagataaacttagataaattaactgaaaaccatttttcactctttctcacttcacctccaacacactttccttttagaatggcttctgcctgttcctttaagttcctccacttgccaaaaaaaaaaaaacgtagatgacgc

SEQ ID NO: 79746 - DNA, 765 bp, Homo sapiens
cccgtctctactaaaaatacaaaaaattagccgggtgtggtggcgcacttctctagttccagttactcggaaggctgaggcaggagaatcacttgaacccaggaggcagaggttgcagtgagccaagattgtgccattgtactccaccatgggcgacaagagtgaaactccatctccaaaaaaaagaaaattacgctaaatatttttgttcagccattttaacatatattaaatgtaaaatctagtatgtttattgagttaattatgagtaaataaatgtaaaacttggattgtgttgtcagctttttaaactcttatttcagtattaggtatattcagatgcttacaaagacatttttagacaactgagcatcaggatttatcacataggtcaaaaatttaaataaacaagtggctatattatgtggcccatgtgtggagcagttttgcttttgttcagtaacagatgaattaagagccttgcccaggaatcttggttcaggatgggtggtctacacatggtctgcttgttaagtaccagtccattatgtgccaggtagtgattcctatttcagagatgagaagagaaccatgagaaaaagtaggcctgtgtaagattaaaagtaagactgcaggcctggtgcagtggttcacacctgtattcctagcactttgggaggccgaggcaggcggatcacttgaggtcaggatttcgagatcagcctggccatggtgaaaccccatctctagtaaaactacaaaaaa

SEQ ID NO: 79747 - DNA, 504 bp, Homo sapiens
taatagacaacctatagaatgggagaaaatatatgtaaattatacatctgacaaagaactaatatccagaatctacaaagaactcaacaagaaaaaaaccaaccccacaagcgggcaaaggacatgaacagacatttcccaaaagaagacatacaagcaacctaaaataatctaaaataatttttaaaaagaaaaaatgcttgacagagttttgatagtacttagtaaaaagttatatctagtggctttttgtttgtttgtttttgttttgtttttaagaaatagtctctgtttcccaggctggagtacagtggcgcaatcttggctcactgcagcctcgaactcctgggctcaggcgatcctccggcctcagcctcccaagtagctgttataggcatgcaccaccactcccgactaatatatctgctatcaataacataattgtttccctttgtgcttatttaggaaataaacacttttatgcttttgatttttatgttgtga

SEQ ID NO: 79748 - DNA, 1016 bp, Homo sapiens
agtgagactccatctcaaaaactaaactaaactaactaaataaataaaacaaacaaaatcttgaaaaaattaaagaattttatctatctaaattcccctttccttctccctaacacgaaaagctctatcctgttaaccatgttttgaaactccataaaccaacacatacatggttagttgattttttttttttttttaataatagagatagggtttcaacatgttgcccaggctggtcttgaactcttgggctcaagcaatctgcccacctcagggtcagctggtttttacaaaatggcaaagacaatcaaatggataaatggtagtcatgtcaacaaatggtgttgcagctgggcatggctgctcacgcctgtaatcccaacactttgggaggctgaggcaggaggatggcttgaggccaggagttcatgaccagcctggacaacatagcaagaccctgtcactaaaaaaaaagaagcagcagctgtgtgtggtgctatgtgcctgtagtcccagctacttgggagcctgaggtgggaggattgcttgagtttgaggctgcagtgacctgtgattgtaccactgcactctattcagcctggttgacggaggaagactctgtctcaacaacaaacaaacaaacaacaagtgatattggaataactagtcgtgcatatgtttttttaaaaaagagagaaccttgaccacctctaccttacaacttaacaaaagttatttcaaaatggatcatagacctaaatccaacctcaaaattaaaatacttcccgaaggaaacatagcagaaaatctttgtgagcttagattaggaaaaaagtttcttagatatagcttctatatccatgaagcataaacaaaaacatatgctaaactagatttcataaaaattaaaaacatctgattttcaaaagacactcttatgaaaatggaaaaacaaaccacaaactgggaaaaaatgtttgcaaggcacataaatgataaaggacttttattgagaa

SEQ ID NO: 79749 - DNA, 826 bp, Homo sapiens
tagagttatacaaagtcttttgtttccttttctctaagaagagttatttctgtttgaaagaggtctttaagcttgtatttcaaacaactcccggcaaatatctccctagttaagtaaatgcagagatagccaatactaaaattcatctgtaaagtgatcatactatgaatttagctccttctcgggttgtgacttgaagagtttatgattcagtgtttcccagttgtgatatactgaccattaaaaccttggaagttggtgttaggaaacccacagcgtggtggtttatagcttgccgtgctttgaaatattccctatcatccaatttcaaaagatacttctaagctcatgggagcaaatgtcattacggagaagctttcaaaatcatctagagataaaagagtcactctgctcaaacaaggaaaacccaccacaacagtgagctagagccactaatctcattgtgtttattttaatcagtacctcctctcataacaaataatcctgatttttcatttgtggtagttatgtaaaagttctggttaaaatgttcatttgaatattagaaagtcagttgattgtaagaaaacattaagtaaaaataatgtgtgaatatggcaaaatgtgaagacagcatgctgatgactgggaaaaatctgtctaaatacacttttttccccaaaggaagaattattttaaagaaaagttggtagggcatattttaagactgtctatcttcttttgaaggaaaatcacttagcttaagtggaacattaggtttcctgtttcctgtcatagtttttctaaattacattcagtacagcaa

SEQ ID NO: 79750 - DNA, 501 bp, Homo sapiens
caacagttagcatcttatggtacaatttgttttacctctgacctctcctcaccctgacttatatacatgaaatttaaataagtgtaagtgatttcgtgctgtgtatctcattgtgatccttactattttatttcatataaccttaagttttaaactttatttatgttgccatgtttttactgctgcttactgctacatggtaatccacagtatatggcagccatattttcactacccattttcctcagtgtttgccatccaaattgctttcaatttccttttaccacatgttcatcatgtcctatcgtggaactttgcaaggatttctttagaatatatacccaggagcagaattgctgggtgacagaatatatgtttatgattaatttaaccaatccctatcagatgcgtccccacataaatactttggtctttacagactccagcaataaccttctcatcatccatgccagcccttaacgttttccagcttactcatgt

SEQ ID NO: 79751 - DNA, 287 bp, Homo sapiens
gtctgagcaagcgtgggcatgggacaccatccaggcaagcagcatgagtaagactcgtggagaagtgtgtgcttgtggtctttctgtcttcctgggctttgctgggggcccattggagtggccagtggggcctcgttgtcacagctgacacagagcagggcccaggccacccggcttctctctccctgtggttgtgagcgccggggtccttgggccgccatagagacaggccagacaggctctggtcatctcagcggatgcctccgagccgcctttcccttttgaag

SEQ ID NO: 79752 - DNA, 554 bp, Homo sapiens
tatttgggcatttaggcaaaaacagcaaatgacatatacaggaaatgattagattaccatcagtcttttttgacagaaacatgttttttccaaaaggaaatggaactacataattaaggaaagaaagaaaaagtgagccaaagaatttataatatatccagcaagactgactttaaagtataaaggacacaaacaaactgttgtgaacatgcaaagacctcagaattttattcccctgagcccttcctgaggaatctatgagagaatgaatcttagataatgaacataatgagagaaccatcactataaagacagagagcagtaaacatgcaattacttgtggaattaagactgaatgagggttaaaggtagagggtatagtttgtaatgaatgtatgcccagatggtagatatagtatgactataggataaagtaaatgaaaacttacgggattctggaatgctagtatactctatgtccttgagaccaagattttcaaaatagaagaaaggagatacagatgtaatacagaagaggttaagtaagtttttaa

SEQ ID NO: 79753 - DNA, 427 bp, Homo sapiens
tgagaaaaccaaaagcatgaaattctgaagactggagatgacttaacaagaaatgacagttatagaaatcaatgacttgactgaggattatccaagaatgagccttcccagtgccaagggatgaaggcctaagagattgatcatcactgcttccatgggaagattttttataaacaggagaaatgaggaaaggaaaatagctccgagcagtctgaagtctgcaaggtgtgcagggccagagagacatgagtatgtatatgatgccacactatgcctaggaaaagtttagtccttgtgcccctgactagctgcctcgcccattatcttcatgttcctagaatttgtaacacaaagaacaatgtacaacctataaatagcttatgttattttaatgtaaatttttggtaaacaactcaggaactgcctc

SEQ ID NO: 79754 - DNA, 192 bp, Homo sapiens
cagcagtggcgccggacgcggcggcagtgaggggccggtgaggcgctgggtggggcgggggttcccggatttcgcaaatggaaatgcaggactcctggttaagtttccagcgcggagaaacacgcatactttctgagtggtgtcctctgcaatatccgggcagcggagcgcggcaggacgcaccggcgggca

SEQ ID NO: 79755 - DNA, 1228 bp, Homo sapiens
aaaatttatttttgacacctaatgtacatatttatggggtgcaatgtgatgtttcgatacatgtatacattataatgatcaaattagggtgattagcatatccatcacctgaaacacggtgtttttgtggtgagaacatttaaaatcctctcctctagctattttgaggtacacaataccttattagttttttgttttttaaaacaagatcttgctctattgcccaagctagagtgcagtgccatgattatggctcactgcagccttgaactcccttgttaagtaatcctctcacctcagcctccttagtagctggtactacaggtgtacaccattgtacccagctaattttattatttttttgtagagttggggtcttactatgttgcgtgggctggtctcagactcctggctagcattaagcgatccttctgcctcagtctcccaacatgctggggttacaggcatgagccacagtgcctgggtccacagtaccttactgttgactgtagtcactctgctgtgcaataggataccaaatcttactccttttttctcttttttgagacaggtacttgatctcacccaggctggagtgcagtggcaggcgtgctcatagctcactgcaaaccttaaatacctggggttaagcagtcctcccaccttagcctcccaagtagctaagactacagacatgcatcaccaggcctggctaattttttatcttttaaaatattgacataggggtctccctatgtcacccaggctagtcttaaactcctggcctcgaacagtcctatctcaggctcccaaagtgctgggattacaggtgtaagtcactgcactgggcccctcctgtctaattgtaactttttagctgttcaccaccttctccccatccctcccactaccacctccagtccctggtaaccactgttctatgtactattcactacttatagatcaacgtttttagacttggcatgtaagtgaaaatgtggcatttgtctttctgtatctggcttattttcacttaatgtattgtcctctaggttcattcatgttataaataacaggatttcattctttttaatagctgaatagtgttcctttgtgtatatatatcacattttctttatccattcattcactttgaacacttaagtcagttatatcttggctattgtgtatagtcctgcaataaacatgggattgcagatacctcttc

SEQ ID NO: 79756 - DNA, 910 bp, Homo sapiens
gtcaaataatttcagtggaaactgcatggcccgcgaagatgaaaaccaggacctgtggtgttatacgcagaacccggtgaaaaatgagaatgcaaggcccctttgaaaaattaagaatctgaagacagtgatggcaaagcattaaaccaaggttgggccccttctaaatgtggggccctgcgtgactgtaatttgctcacccttgaagccatccctgcctaaaatatccactatctggtcatttacagaagaaagcaaaaattgtgggtcctgcattaagagcagagctgggagtgagatcttgggcttcaggggcatcagcctgatgcaggactacagatgcctcaggcctgagtgtaatcaaaagataccaagaaacgaggttcatgtaatttaccaaggactagtgttggtttagttcctctttcttctttcatctttgttgagttttctgtgctcagcgtgtccttaatggtcattgcagcttgctccatttcattggagtgttttaaaccctctttcttgcagtttccccgagaggatgtgctcctgtttgatgtccgtcccttacagtatgttattgtagcacatgcactctggcagaagggctagttgaaacgcgatgctgttgtttttaagctcctagaagtaacagtgctaattgggattgtgatcaactgtgcttgcccaggaccatcagggggcaaggaccacatgggggtcatggggaaggtggttctttattacctttgttatggctgcaacccttctaggctagctatagtgtttggacttgtagtcaaatataatcctgcattaaaatcaaacaggcagtagcattccaaaaagtctactgttacgggctgtattctgtcttccctgcaaattcagatgttgaagtcctaacccc

SEQ ID NO: 79757 - DNA, 348 bp, Homo sapiens
tggtgtacacaagtagacacaaggatagaagaacatggagagacagttgggcttgataggaaataagaatcccagatgttctcaacagttaataatttatctacatactgtaataaaatccctgatgtcctgtagatactcactaagctttataaacttggttaaaaatacactcactttttccaacagaatttttagaaattatttcctcgcaaatcaatctgattataaaatctaactttaagcttgattttaccatggtaaagctaactttaccataaccatcatccgctctggacaataccaaggaaaagacctatgcattatatgaagttgtacacactccat

SEQ ID NO: 79758 - DNA, 5548 bp, Homo sapiens
agcggacatacgccagcgccggtgacgcgccggccgctctcccttagtccgcattcgctccagggttttgggaccctaggttgcggagtccttaccctaccctggcctctcgagcagttgtccccataactcggaatctagagccgctgttgcgaggcaggagcacgtggcagtcaagtagcttcccagtcccgaacgccgcccgtccccaccccgccgtggccactagcaacgacctctgtgaagttggagaggcggtaacggaggcactccccctgctgcaccccgccgtttctacggggctcagaaaccagtttgtttgtttcgtcggggtagtgtcgacctgtcttacgggcgtcgcccgagacaggacggagtcaaacccgtggtatcaactgaagacgagtgtcaggatgtcattttcaaaatgcgggatggtacctctgctttattaagccccgtaggaagactgccacacctagactgatgcttattagtcatcaccgttattcctactaacgtcctgtgtcactgagttttttaaatgtctagcatatctgtaaagatgccttagaaaaagaatcatggagaagtatgttagactacagaagattggagaaggttcatttggaaaagccattcttgttaaatctacagaagatggcagacagtatgttatcaaggaaattaacatctcaagaatgtccagtaaagaaagagaagaatcaaggagagaagttgcagtattggcaaacatgaagcatccaaatattgtccagtatagagaatcatttgaagaaaatggctctctctacatagtaatggattactgtgagggaggggatctgtttaagcgaataaatgctcagaaaggcgttttgtttcaagaggatcagattttggactggtttgtacagatatgtttggccctgaaacatgtacatgatagaaaaattcttcatcgagacattaaatctcagaacatatttttaactaaagatggaacagtacaacttggagattttggaattgctagagttcttaatagtactgtagagctggctcgaacttgcatagggaccccatactacttgtcacctgaaatctgtgaaaacaaaccttacaataataaaagtgacatttgggctctggggtgtgtcctttatgagctgtgtacacttaaacatgcttttgaagctggcagtatgaaaaacctggtactgaagataatatctggatcttttccacctgtgtctttgcattattcctatgatctccgcagtttggtgtctcagttatttaaaagaaatcctagggatagaccatcagtcaactccatattggagaaaggttttatagccaaacgcattgaaaagtttctctctcctcagcttattgcagaagaattttgtctaaaaacattttcgaagtttggatcacagcctataccagctaaaagaccagcttcaggacaaaactcgatttctgttatgcctgctcagaaaattacaaagcctgccgctaaatatggaatacctttagcatataagaaatatggagataaaaaattacacgaaaagaaaccactgcaaaaacataaacaggcccatcaaactccagagaagagagtgaatactggagaagaaaggaggaaaatatctgaggaagcagcaagaaagagaaggctggaatttattgaaaaagaaaagaaacaaaaggatcagattattagtttaatgaaggctgaacaaatgaaaaggcaagaaaaggaaaggttggaaagaataaatagggccagggaacaaggatggagaaatgtgctaagtgctggtggaagtggtgaagtaaaggctccttttctgggcagtggagggactatagctccatcatctttttcttctcgaggacagtatgaacattaccatgccatttttgaccaaatgcagcaacaaagagcagaagataatgaagctaaatggaaaagagaaatatatggtcgaggtcttccagaaaggcaaaaagggcagctagctgtagaaagagctaaacaagtagaagagttcctgcagcgaaaacgggaagctatgcagaataaagctcgagccgaaggacatatgggaatcctgcaaaacctggcagctatgtatggaggcaggcccagctcttcaagaggagggaagccaagaaacaaagaggaagaggtttatctggcaagactgaggcaaataagactacagaatttcaatgagcgccaacagattaaagccaaacttcgtggtgaaaagaaagaagctaatcattctgaaggacaagaaggaagtgaagaggctgacatgaggcgcaaaaaaatcgaatcactgaaggcccatgcaaatgcacgtgctgctgtactaaaagaacaactagaacgaaagagaaaggaggcttatgagagagaaaaaaaagtgtgggaagagcatttggtggctaaaggagttaagagttctgatgtttctccacctttgggacagcatgaaacaggtggctctccatcaaagcaacagatgagatctgttatttctgtaacttcagctttgaaagaagttggcgtggacagtagtttaactgatacccgggaaacttcagaagagatgcaaaagaccaacaatgctatttcaagtaagcgagaaatacttcgtagattaaatgaaaatcttaaagctcaagaagatgaaaaaggaaagcagaatctctctgatacttttgagataaatgttcatgaagatgccaaagagcatgaaaaagaaaaatcagtttcatctgatcgcaagaagtgggaggcaggaggtcaacttgtgattcctctggatgagttaacactagatacatccttctctacaactgaaagacatacagtgggagaagttattaaattaggtcctaatggatctccaagaagagcctgggggaaaagtccgacagattctgttctaaagatacttggagaagctgaactacaacttcagacagaactattagaaaatacaactattagaagtgagatttctcccgaaggggaaaagtacaaacccttaattactggagaaaaaaaagtacaatgtatttcacatgaaataaacccatcagctattgttgattctcctgttgagacaaaaagtcccgagttcagtgaggcatctccacagatgtcattgaaactggaaggaaatttagaagaacctgatgatttggaaacagaaattctacaagagccaagtggaacaaacaaagatgagagcttgccatgcactattactgatgtgtggattagtgaggaaaaagaaacaaaggaaactcagtcggcagataggatcaccattcaggaaaatgaagtttctgaagatggagtctcgagtactgtggaccaacttagtgacattcatatagagcctggaaccaatgattctcagcactctaaatgtgatgtagataagtctgtgcaaccggaaccatttttccataaggtggttcattctgaacacttgaacttagtccctcaagttcaatcagttcagtgttcaccagaagaatcctttgcatttcgatctcactcgcatttaccaccaaaaaataaaaacaagaattccttgctgattggactttcaactggtctgtttgatgcaaacaacccaaagatgttaaggacatgttcacttccagatctctcaaagctgttcagaacccttatggatgttcccaccgtaggagatgttcgtcaagacaatcttgaaatagatgaaattgaagatgaaaacattaaagaaggaccttctgattctgaagacatgtgtttgaagaaactgacacagatttacaagagctgcaggcctcgatggaacagttacttagggaacaacctggtgaagaatacagtgaagaagaagagtcagtcttgaagaacagtgatgtggagccaactgcaaatgggacagatgtggcagatgaagatgacaatcccagcagtgaaagtgccctgaacgaagaatggcactcagataacagtgatggtgaaattgctagtgaatgtgaatgcgatagtgtctttaaccatttagaggaactgagacttcatctggagcaggaaatgggctttgaaaaattctttgaggtttatgagaaaataaaggctattcatgaagatgaagatgaaaatattgaaatttgttcaaaaatagttcaaaatattttgggaaatgaacatcagcatctttatgccaagattcttcatttagtcatggcagatggagcctaccaagaagataatgatgaataatcctcaaaatgttttttaatcctcaactatatgaaagcatttgaatttggcttatcagaataacaagcttcagtgggaaatacagcaattatttatttaaaaaatcagatttaagatggactttcttattgcatgagatggagaaacatgccatttttcaatgaagattctaatattttatctattttgttcattgaattccatggtttctcataaaatatatactttattaaatcatccaaccaaagcataggaaacattgacccagaacctgacttaatggttttgaagatttactatgcaatagggtaactttgagtttcagcaaatgtctttaggttgaaggaattacctatgtcatgaaggacctgtctgtggtttttcaatggagtctttaagcatgatcttttttctgtctagtacttgttttcattctggccagcagttctacattaaatcaccttgtcaagggctctgtttacatctatacattttgaagatgaaatttttagccttaaagtttatattctcaagtccttttacaatcagtgtgtctcctgaactagcacacaggctgtagaaacagtcttagaaatcattgaaagatttgattatgaaagaatagcaaaattatatttcttgacatataaaaagttggtttaatgcctttatttctctttaaggaccagaaccaggaatactatatcgaaaaattagtctgtggatttaacactgacttagcatatagcttaaagttgctcttttggtttttaacttcctccatacataagcttcaaggacaataagatgttaaaaaggaggaaataattatttttattttgacactgtgacagttttggtaactaggatcctagggagggaaatgtttgcctgttgaacttctttctgttatgagaggatttagttaggtcattaagatgttgatcacacagcttcaatcacaatatgccaagtataacctggtttcgttagaggtgtctacagtccagatgttcttcgtaataaaagcaaagtttttgaacctctgagtccaaagcaggctggttggcataatatgtaatttgaaaaataaaatcttatcttgcagcactatcagtatgttgaatttattatgtatattatttctaatatccgaaactaaatacttgattttttaatatgtgtgtttattttatgatattgctattaaatttttattatctacctgaagtatat

SEQ ID NO: 79759 - DNA, 2231 bp, Homo sapiens
  misc_feature (317)..(317): n is a, c, g, or t
  misc_feature (1586)..(1586): n is a, c, g, or t
ttcatttactattttctttttcctcccatttaagatgtccagtaaagaaagagaagaatcaaggagagaagttgcagtattggcaaacatgaagcatccaaatattgtccagtatagagaatcatttgaaggtcagataaattatgcgagagagttaaaaaatcctaagacattaataaatctttttgtgaatgcattcttaggaaaaagataccatttttgcttaaaaacatacgcatatgaatatcagcttgattcaaggacaatactgatatcatgcctgcatttttttttttttttaaattgagacagtctcnctcagtggcccaggctggagtgcaggggcatgatctcggcttactccaacctctgcctcccaggttcaagtgattcttatgcctcagcctcccaactgtgcctgtataatttaatactggctgttattagtgattgctttaaaagaagcaatgcagtaagtgcaagaatttggacagagcaagaacagtaatttacatattttttaactgaacttcctgtaagtgctgccaccactaccactgagaaaatgttctgatctttagaaagtatcctcactcagtatgctcctctgtacctcactattataatagtgaggtatgttgaaagttttctcaggttcttaaagtattatagctataatgctgttttggaactatatgcattatatttaataatgcaggtattaagataaggcaaagcttctctaaaggcaggtcaaagtggtttattgaagtcctacccaaatattctcattattataaatttctgtaacttaatttctgtaaactaaaaaccaggtaatctagattgaaagtagaagataattgaaatgactcagggacatatcacataccagtttcagagtctgaattagagctaaagttactacattcccagatgaactctgtgtctactataagtctcttctacttttataaaaatgtgattcaattaatacattatgtcacaaggtactgtattttttatgctggcagtgaaatgaagatttatatttcatgtgaaagagtacaaaattaaccaactcttccttttcaggaccttgaattttcctttatctttctcctggcatctatcctttagtttctttttttgttgttgttaacaaaattttaatatttcaagttaaaaggttttgagcaaatattccagcagatgttttggatttatattgactgcttcacatagaaacatctgtgtgattcaaaaggggtagcgtattttaaaaataaggctttattatttctcttagttttagaagaatacatgctagcatcaaacataaatgatagcatagtatatgtaattttttgctttttgttatgctacatacattataacatctatatacatataaatagtgaattatagttttcaggagtttttttcacattataatttctcacatgtatatttggatgatctttccaggtcaatcataaaaagtcatacagattcttaattagctttatcatatagattcttatcccagtggcacattacaaacagtagatcaaaagaagatatgngcaccacgagtgacaagaatgtcaccacaaagtataagaaataaatactcctggaggctggatgcggtggctcacaattgtaatttcagcaacttcgggaggctgaggtgggaggatctcttgagcccaggaatttgagatcagcctgggaaacatagggtgtttgtagaccccatctctacaaaaatttaaaaaattagccaggtgtggtggtgtgtgcctgcggttccacctactctggaagctaaggtgggaggtttgcttgagctcgggaggtcgaggctacagtgagccatcatcgtgccattgcactctaacctggaccctgtctcaaaagaaaaaaaaaatactgctggaaataaggccatagcacagtcagtgaaagaagtgagaactaggaaaactgttctttgagttgtgatagtctcagtactatgtagtgattcagaaaatgttaaaagtgatattggccactcttccttacttaagaagtaagggatggaaagaatcatcaaagtgttcttctaagctggacacagtagcatgggcttgtagtcctagctattggggaggctgaggcgagaggttcccttgagcccaggagctcaaggtcagcatgagcaaaatattgagacactttttctt

SEQ ID NO: 79760 - DNA, 964 bp, Homo sapiens
agcggacatacgccagcgccggtgacgcgccggccgctctcccttagtccgcattcgctccagggttttgggaccctaggttgcggagtccttaccctaccctggcctctcgagcagttgtccccataactcggaatctagagccgctgttgcgaggcaggagcacgtggcagtcaagtagcttcccagtcccgaacgccgcccgtccccaccccgccgtggccactagcaacgacctctgtgaagttggagaggcggtaacggaggcactccccctgctgcaccccgccgtttctacggggctcagaaaccagtttgtttgtttcgtcggggtagtgtcgacctgtcttacgggcgtcgcccgagacaggacggagtcaaacccgtggtatcaactgaagacgagtgtcaggatgtcattttcaaaatgcgggatggtacctctgctttattaagccccgtaggaagactgccacacctagactgatgcttattagtcatcaccgttattcctactaacgtcctgtgtcactgaggacacattcagctaacgtattttagcaggtggagtgaggttgaagattcctgtgacagcgatgccatagagagaatgtactgtgccccagaggttggagcaatcactgaagaaactgaagcctgtgatggtggaagcttgggtgctgtccctctttgaacttctcactggcaagactcctggttgaatgccatcccagcaggaattaattctcacactacttttgaacattgccagaaatggtgtctcctgaagaaggctccggtccaatcattccaacaggctcttggcagttcaatccctccgggaacgacactggtcgctggacattggccgcctgttgaaggcatttcactctcatccattcttaccccggggcattgggccgaactcgtggcataaccgtatggggagattcccccatctggt

SEQ ID NO: 79761 - DNA, 598 bp, Homo sapiens
agcggacatacgccagcgccggtgacgcgccggccgctctcccttagtccgcattcgctccagggttttgggaccctaggttgcggagtccttaccctaccctggcctctcgagcagttgtccccataactcggaatctagagccgctgttgcgaggcaggagcacgtggcagtcaagtagcttcccagtcccgaacgccgcccgtccccaccccgccgtggccactagcaacgacctctggtagaacgtgtaggaggaaggcaggctaagctggtagggcagctccctccctgcatggcaaccctcgtccggtttactagcggagtgactcgagaacaccaggtattgtatcgttctacgatgcgcgtggtatgttgtgcgaaccatgtactgtaccggagcgatcggcgccggagtaccagggacgggacgtctccaaataccgcggtgggttagtccaacgtgcagagcatcggagctgctaccaggctgtagggagcacgtacttcgaggggacccctatgtcaagtcttggtacttgtggtagcctcgcttgcttggcttagaacgagactttgggtttagtctttcaggatg

SEQ ID NO: 79762 - DNA, 289 bp, Homo sapiens
tatactaaatttattaaaaaataaagtaattgctctacagtgtatgtcagtcaccgtgtcactaggtgataggaatttttcagtgtcattataatcttatgggaccagcatcatatatgcgatctgctgtagaccaaaaacaacattaatgtggcacatgactgtgtctttaacttctccaataattttatttttcttctagtactgtagagctggctcgaacttgcatagggaccccatactacttgtcacctgaaatctgtgaaaacaaaccttacaataataaaag

SEQ ID NO: 79763 - DNA, 339 bp, Homo sapiens
gacatacagtgggagaagttattaaattaggtcctaatggatctccaagaagagcctgggggaaaagtccgacagattctgttctaaagatacttggagaagctgaactacaacttcagacagaactattagaaaatacaactattagaagtggtaaggagaaactggtagtttttctatactagaagtaatattattaaaaatctaattatgtattttaagatgtttccattttaagtgaattatttttaattatctttctcttataataattttttaattagattgagaatgattgtgttttctagggggattgtccaaatggtagtcttgagtttt

SEQ ID NO: 79764 - DNA, 5674 bp, Homo sapiens
agcggacatacgccagcgccggtgacgcgccggccgctctcccttagtccgcattcgctccagggttttgggaccctaggttgcggagtccttaccctaccctggcctctcgagcagttgtccccataactcggaatctagagccgctgttgcgaggcaggagcacgtggcagtcaagtagcttcccagtcccgaacgccgcccgtccccaccccgccgtggccactagcaacgacctctgtgaagttggagaggcggtaacggaggcactccccctgctgcaccccgccgtttctacggggctcagaaaccagtttgtttgtttcgtcggggtagtgtcgacctgtcttacgggcgtcgcccgagacaggacggagtcaaacccgtggtatcaactgaagacgagtgtcaggtgtggagagtctcagtgccccctttcagtctggactgtgagctgctgctggttagacagtcttggtttctctttcaggatgtcattttcaaaatgcgggatggtacctctgctttattaagccccgtaggaagactgccacacctagactgatgcttattagtcatcaccgttattcctactaacgtcctgtgtcactgagttttttaaatgtctagcatatctgtaaagatgccttagaaaaagaatcatggagaagtatgttagactacagaagattggagaaggttcatttggaaaagccattcttgttaaatctacagaagatggcagacagtatgttatcaaggaaattaacatctcaagaatgtccagtaaagaaagagaagaatcaaggagagaagttgcagtattggcaaacatgaagcatccaaatattgtccagtatagagaatcatttgaagaaaatggctctctctacatagtaatggattactgtgagggaggggatctgtttaagcgaataaatgctcagaaaggcgttttgtttcaagaggatcagattttggactggtttgtacagatatgtttggccctgaaacatgtacatgatagaaaaattcttcatcgagacattaaatctcagaacatatttttaactaaagatggaacagtacaacttggagattttggaattgctagagttcttaatagtactgtagagctggctcgaacttgcatagggaccccatactacttgtcacctgaaatctgtgaaaacaaaccttacaataataaaagtgacatttgggctctggggtgtgtcctttatgagctgtgtacacttaaacatgcttttgaagctggcagtatgaaaaacctggtactgaagataatatctggatcttttccacctgtgtctttgcattattcctatgatctccgcagtttggtgtctcagttatttaaaagaaatcctagggatagaccatcagtcaactccatattggagaaaggttttatagccaaacgcattgaaaagtttctctctcctcagcttattgcagaagaattttgtctaaaaacattttcgaagtttggatcacagcctataccagctaaaagaccagcttcaggacaaaactcgatttctgttatgcctgctcagaaaattacaaagcctgccgctaaatatggaatacctttagcatataagaaatatggagataaaaaattacacgaaaagaaaccactgcaaaaacataaacaggcccatcaaactccagagaagagagtgaatactggagaagaaaggaggaaaatatctgaggaagcagcaagaaagagaaggctggaatttattgaaaaagaaaagaaacaaaaggatcagattattagtttaatgaaggctgaacaaatgaaaaggcaagaaaaggaaaggttggaaagaataaatagggccagggaacaaggatggagaaatgtgctaagtgctggtggaagtggtgaagtaaaggctccttttctgggcagtggagggactatagctccatcatctttttcttctcgaggacagtatgaacattaccatgccatttttgaccaaatgcagcaacaaagagcagaagataatgaagctaaatggaaaagagaaatatatggtcgaggtcttccagaaagaggaattctgcctggagttcgtccaggatttccttatggggctgcaggtcatcaccattttcctgatgctgatgatattagaaaaactttgaaaagattgaaggcggtgtctaaacaagccaatgcaaacaggcaaaaagggcagctagctgtagaaagagctaaacaagtagaagagttcctgcagcgaaaacgggaagctatgcagaataaagctcgagccgaaggacatatggtttatctggcaagactgaggcaaataagactacagaatttcaatgagcgccaacagattaaagccaaacttcgtggtgaaaagaaagaagctaatcattctgaaggacaagaaggaagtgaagaggctgacatgaggcgcaaaaaaatcgaatcactgaaggcccatgcaaatgcacgtgctgctgtactaaaagaacaactagaacgaaagagaaaggaggcttatgagagagaaaaaaaagtgtgggaagagcatttggtggctaaaggagttaagagttctgatgtttctccacctttgggacagcatgaaacaggtggctctccatcaaagcaacagatgagatctgttatttctgtaacttcagctttgaaagaagttggcgtggacagtagtttaactgatacccgggaaacttcagaagagatgcaaaagaccaacaatgctatttcaagtaagcgagaaatacttcgtagattaaatgaaaatcttaaagctcaagaagatgaaaaaggaaagcagaatctctctgatacttttgagataaatgttcatgaagatgccaaagagcatgaaaaagaaaaatcagtttcatctgatcgcaagaagtgggaggcaggaggtcaacttgtgattcctctggatgagttaacactagatacatccttctctacaactgaaagacatacagtgggagaagttattaaattaggtcctaatggatctccaagaagagcctgggggaaaagtccgacagattctgttctaaagatacttggagaagctgaactacaacttcagacagaactattagaaaatacaactattagaagtgagatttctcccgaaggggaaaagtacaaacccttaattactggagaaaaaaaagtacaatgtatttcacatgaaataaacccatcagctattgttgattctcctgttgagacaaaaagtcccgagttcagtgaggcatctccacagatgtcattgaaactggaaggaaatttagaagaacctgatgatttggaaacagaaattctacaagagccaagtggaacaaacaaagatgagagcttgccatgcactattactgatgtgtggattagtgaggaaaaagaaacaaaggaaactcagtcggcagataggatcaccattcaggaaaatgaagtttctgaagatggagtctcgagtactgtggaccaacttagtgacattcatatagagcctggaaccaatgattctcagcactctaaatgtgatgtagataagtctgtgcaaccggaaccatttttccataaggtggttcattctgaacacttgaacttagtccctcaagttcaatcagttcagtgttcaccagaagaatcctttgcatttcgatctcactcgcatttaccaccaaaaaataaaaacaagaattccttgctgattggactttcaactggtctgtttgatgcaaacaacccaaagatgttaaggacatgttcacttccagatctctcaaagctgttcagaacccttatggatgttcccaccgtaggagatgttcgtcaagacaatcttgaaatagatgaaattgaagatgaaaacattaaagaaggaccttctgattctgaagacatgtgtttgaagaaactgacacagatttacaagagctgcaggcctcgatggaacagttacttagggaacaacctggtgaagaatacagtgaagaagaagagtcagtcttgaagaacagtgatgtggagccaactgcaaatgggacagatgtggcagatgaagatgacaatcccagcagtgaaagtgccctgaacgaagaatggcactcagataacagtgatggtgaaattgctagtgaatgtgaatgcgatagtgtctttaaccatttagaggaactgagacttcatctggagcaggaaatgggctttgaaaaattctttgaggtttatgagaaaataaaggctattcatgaagatgaagatgaaaatattgaaatttgttcaaaaatagttcaaaatattttgggaaatgaacatcagcatctttatgccaagattcttcatttagtcatggcagatggagcctaccaagaagataatgatgaataatcctcaaaatgttttttaatcctcaactatatgaaagcatttgaatttggcttatcagaataacaagcttcagtgggaaatacagcaattatttatttaaaaaatcagatttaagatggactttcttattgcatgagatggagaaacatgccatttttcaatgaagattctaatattttatctattttgttcattgaattccatggtttctcataaaatatatactttattaaatcatccaaccaaagcataggaaacattgacccagaacctgacttaatggttttgaagatttactatgcaatagggtaactttgagtttcagcaaatgtctttaggttgaaggaattacctatgtcatgaaggacctgtctgtggtttttcaatggagtctttaagcatgatcttttttctgtctagtacttgttttcattctggccagcagttctacattaaatcaccttgtcaagggctctgtttacatctatacattttgaagatgaaatttttagccttaaagtttatattctcaagtccttttacaatcagtgtgtctcctgaactagcacacaggctgtagaaacagtcttagaaatcattgaaagatttgattatgaaagaatagcaaaattatatttcttgacatataaaaagttggtttaatgcctttatttctctttaaggaccagaaccaggaatactatatcgaaaaattagtctgtggatttaacactgacttagcatatagcttaaagttgctcttttggtttttaacttcctccatacataagcttcaaggacaataagatgttaaaaaggaggaaataattatttttattttgacactgtgacagttttggtaactaggatcctagggagggaaatgtttgcctgttgaacttctttctgttatgagaggatttagttaggtcattaagatgttgatcacacagcttcaatcacaatatgccaagtataacctggtttcgttagaggtgtctacagtccagatgttcttcgtaataaaagcaaagtttttgaacctctgagtccaaagcaggctggttggcataatatgtaatttgaaaaataaaatcttatcttgcagcactatcagtatgttgaatttattatgtatattatttctaatatccgaaactaaatacttgattttttaatatgtgtgtttattttatgatattgctattaaatttttattatctacctgaagtatat

SEQ ID NO: 79765 - DNA, 5464 bp, Homo sapiens
agcggacatacgccagcgccggtgacgcgccggccgctctcccttagtccgcattcgctccagggttttgggaccctaggttgcggagtccttaccctaccctggcctctcgagcagttgtccccataactcggaatctagagccgctgttgcgaggcaggagcacgtggcagtcaagtagcttcccagtcccgaacgccgcccgtccccaccccgccgtggccactagcaacgacctctgtgaagttggagaggcggtaacggaggcactccccctgctgcaccccgccgtttctacggggctcagaaaccagtttgtttgtttcgtcggggtagtgtcgacctgtcttacgggcgtcgcccgagacaggacggagtcaaacccgtggtatcaactgaagacgagtgtcaggatgtcattttcaaaatgcgggatggtacctctgctttattaagccccgtaggaagactgccacacctagactgatgcttattagtcatcaccgttattcctactaacgtcctgtgtcactgagttttttaaatgtctagcatatctgtaaagatgccttagaaaaagaatcatggagaagtatgttagactacagaagattggagaaggttcatttggaaaagccattcttgttaaatctacagaagatggcagacagtatgttatcaaggaaattaacatctcaagaatgtccagtaaagaaagagaagaatcaaggagagaagttgcagtattggcaaacatgaagcatccaaatattgtccagtatagagaatcatttgaagaaaatggctctctctacatagtaatggattactgtgagggaggggatctgtttaagcgaataaatgctcagaaaggcgttttgtttcaagaggatcagattttggactggtttgtacagatatgtttggccctgaaacatgtacatgatagaaaaattcttcatcgagacattaaatctcagaacatatttttaactaaagatggaacagtacaacttggagattttggaattgctagagttcttaatagtactgtagagctggctcgaacttgcatagggaccccatactacttgtcacctgaaatctgtgaaaacaaaccttacaataataaaagtgacatttgggctctggggtgtgtcctttatgagctgtgtacacttaaacatgcttttgaagctggcagtatgaaaaacctggtactgaagataatatctggatcttttccacctgtgtctttgcattattcctatgatctccgcagtttggtgtctcagttatttaaaagaaatcctagggatagaccatcagtcaactccatattggagaaaggttttatagccaaacgcattgaaaagtttctctctcctcagcttattgcagaagaattttgtctaaaaacattttcgaagtttggatcacagcctataccagctaaaagaccagcttcaggacaaaactcgatttctgttatgcctgctcagaaaattacaaagcctgccgctaaatatggaatacctttagcatataagaaatatggagataaaaaattacacgaaaagaaaccactgcaaaaacataaacaggcccatcaaactccagagaagagagtgaatactggagaagaaaggaggaaaatatctgaggaagcagcaagaaagagaaggctggaatttattgaaaaagaaaagaaacaaaaggatcagattattagtttaatgaaggctgaacaaatgaaaaggcaagaaaaggaaaggttggaaagaataaatagggccagggaacaaggatggagaaatgtgctaagtgctggtggaagtggtgaagtaaaggctccttttctgggcagtggagggactatagctccatcatctttttcttctcgaggacagtatgaacattaccatgccatttttgaccaaatgcagcaacaaagagcagaagataatgaagctaaatggaaaagagaaatatatggtcgaggtcttccagaaaggcaaaaagggcagctagctgtagaaagagctaaacaagtagaagagttcctgcagcgaaaacgggaagctatgcagaataaagctcgagccgaaggacatatggtttatctggcaagactgaggcaaataagactacagaatttcaatgagcgccaacagattaaagccaaacttcgtggtgaaaagaaagaagctaatcattctgaaggacaagaaggaagtgaagaggctgacatgaggcgcaaaaaaatcgaatcactgaaggcccatgcaaatgcacgtgctgctgtactaaaagaacaactagaacgaaagagaaaggaggcttatgagagagaaaaaaaagtgtgggaagagcatttggtggctaaaggagttaagagttctgatgtttctccacctttgggacagcatgaaacaggtggctctccatcaaagcaacagatgagatctgttatttctgtaacttcagctttgaaagaagttggcgtggacagtagtttaactgatacccgggaaacttcagaagagatgcaaaagaccaacaatgctatttcaagtaagcgagaaatacttcgtagattaaatgaaaatcttaaagctcaagaagatgaaaaaggaaagcagaatctctctgatacttttgagataaatgttcatgaagatgccaaagagcatgaaaaagaaaaatcagtttcatctgatcgcaagaagtgggaggcaggaggtcaacttgtgattcctctggatgagttaacactagatacatccttctctacaactgaaagacatacagtgggagaagttattaaattaggtcctaatggatctccaagaagagcctgggggaaaagtccgacagattctgttctaaagatacttggagaagctgaactacaacttcagacagaactattagaaaatacaactattagaagtgagatttctcccgaaggggaaaagtacaaacccttaattactggagaaaaaaaagtacaatgtatttcacatgaaataaacccatcagctattgttgattctcctgttgagacaaaaagtcccgagttcagtgaggcatctccacagatgtcattgaaactggaaggaaatttagaagaacctgatgatttggaaacagaaattctacaagagccaagtggaacaaacaaagatgagagcttgccatgcactattactgatgtgtggattagtgaggaaaaagaaacaaaggaaactcagtcggcagataggatcaccattcaggaaaatgaagtttctgaagatggagtctcgagtactgtggaccaacttagtgacattcatatagagcctggaaccaatgattctcagcactctaaatgtgatgtagataagtctgtgcaaccggaaccatttttccataaggtggttcattctgaacacttgaacttagtccctcaagttcaatcagttcagtgttcaccagaagaatcctttgcatttcgatctcactcgcatttaccaccaaaaaataaaaacaagaattccttgctgattggactttcaactggtctgtttgatgcaaacaacccaaagatgttaaggacatgttcacttccagatctctcaaagctgttcagaacccttatggatgttcccaccgtaggagatgttcgtcaagacaatcttgaaatagatgaaattgaagatgaaaacattaaagaaggaccttctgattctgaagacatgtgtttgaagaaactgacacagatttacaagagctgcaggcctcgatggaacagttacttagggaacaacctggtgaagaatacagtgaagaagaagagtcagtcttgaagaacagtgatgtggagccaactgcaaatgggacagatgtggcagatgaagatgacaatcccagcagtgaaagtgccctgaacgaagaatggcactcagataacagtgatggtgaaattgctagtgaatgtgaatgcgatagtgtctttaaccatttagaggaactgagacttcatctggagcaggaaatgggctttgaaaaattctttgaggtttatgagaaaataaaggctattcatgaagatgaagatgaaaatattgaaatttgttcaaaaatagttcaaaatattttgggaaatgaacatcagcatctttatgccaagattcttcatttagtcatggcagatggagcctaccaagaagataatgatgaataatcctcaaaatgttttttaatcctcaactatatgaaagcatttgaatttggcttatcagaataacaagcttcagtgggaaatacagcaattatttatttaaaaaatcagatttaagatggactttcttattgcatgagatggagaaacatgccatttttcaatgaagattctaatattttatctattttgttcattgaattccatggtttctcataaaatatatactttattaaatcatccaaccaaagcataggaaacattgacccagaacctgacttaatggttttgaagatttactatgcaatagggtaactttgagtttcagcaaatgtctttaggttgaaggaattacctatgtcatgaaggacctgtctgtggtttttcaatggagtctttaagcatgatcttttttctgtctagtacttgttttcattctggccagcagttctacattaaatcaccttgtcaagggctctgtttacatctatacattttgaagatgaaatttttagccttaaagtttatattctcaagtccttttacaatcagtgtgtctcctgaactagcacacaggctgtagaaacagtcttagaaatcattgaaagatttgattatgaaagaatagcaaaattatatttcttgacatataaaaagttggtttaatgcctttatttctctttaaggaccagaaccaggaatactatatcgaaaaattagtctgtggatttaacactgacttagcatatagcttaaagttgctcttttggtttttaacttcctccatacataagcttcaaggacaataagatgttaaaaaggaggaaataattatttttattttgacactgtgacagttttggtaactaggatcctagggagggaaatgtttgcctgttgaacttctttctgttatgagaggatttagttaggtcattaagatgttgatcacacagcttcaatcacaatatgccaagtataacctggtttcgttagaggtgtctacagtccagatgttcttcgtaataaaagcaaagtttttgaacctctgagtccaaagcaggctggttggcataatatgtaatttgaaaaataaaatcttatcttgcagcactatcagtatgttgaatttattatgtatattatttctaatatccgaaactaaatacttgattttttaatatgtgtgtttattttatgatattgctattaaatttttattatctacctgaagtatat

SEQ ID NO: 79766 - DNA, 5410 bp, Homo sapiens
agcggacatacgccagcgccggtgacgcgccggccgctctcccttagtccgcattcgctccagggttttgggaccctaggttgcggagtccttaccctaccctggcctctcgagcagttgtccccataactcggaatctagagccgctgttgcgaggcaggagcacgtggcagtcaagtagcttcccagtcccgaacgccgcccgtccccaccccgccgtggccactagcaacgacctctgtgaagttggagaggcggtaacggaggcactccccctgctgcaccccgccgtttctacggggctcagaaaccagtttgtttgtttcgtcggggtagtgtcgacctgtcttacgggcgtcgcccgagacaggacggagtcaaacccgtggtatcaactgaagacgagtgtcaggatgtcattttcaaaatgcgggatggtacctctgctttattaagccccgtaggaagactgccacacctagactgatgcttattagtcatcaccgttattcctactaacgtcctgtgtcactgagttttttaaatgtctagcatatctgtaaagatgccttagaaaaagaatcatggagaagtatgttagactacagaagattggagaaggttcatttggaaaagccattcttgttaaatctacagaagatggcagacagtatgttatcaaggaaattaacatctcaagaatgtccagtaaagaaagagaagaatcaaggagagaagttgcagtattggcaaacatgaagcatccaaatattgtccagtatagagaatcatttgaagaaaatggctctctctacatagtaatggattactgtgagggaggggatctgtttaagcgaataaatgctcagaaaggcgttttgtttcaagaggatcagattttggactggtttgtacagatatgtttggccctgaaacatgtacatgatagaaaaattcttcatcgagacattaaatctcagaacatatttttaactaaagatggaacagtacaacttggagattttggaattgctagagttcttaatagtactgtagagctggctcgaacttgcatagggaccccatactacttgtcacctgaaatctgtgaaaacaaaccttacaataataaaagtgacatttgggctctggggtgtgtcctttatgagctgtgtacacttaaacatgcttttgaagctggcagtatgaaaaacctggtactgaagataatatctggatcttttccacctgtgtctttgcattattcctatgatctccgcagtttggtgtctcagttatttaaaagaaatcctagggatagaccatcagtcaactccatattggagaaaggttttatagccaaacgcattgaaaagtttctctctcctcagcttattgcagaagaattttgtctaaaaacattttcgaagtttggatcacagcctataccagctaaaagaccagcttcaggacaaaactcgatttctgttatgcctgctcagaaaattacaaagcctgccgctaaatatggaatacctttagcatataagaaatatggagataaaaaattacacgaaaagaaaccactgcaaaaacataaacaggcccatcaaactccagagaagagagtgaatactggagaagaaaggaggaaaatatctgaggaagcagcaagaaagagaaggctggaatttattgaaaaagaaaagaaacaaaaggatcagattattagtttaatgaaggctgaacaaatgaaaaggcaagaaaaggaaaggttggaaagaataaatagggccagggaacaaggatggagaaatgtgctaagtgctggtggaagtggtgaagtaaaggctccttttctgggcagtggagggactatagctccatcatctttttcttctcgaggacagtatgaacattaccatgccatttttgaccaaatgcagcaacaaagagcagaagataatgaagctaaatggaaaagagaaatatatggtcgaggtcttccagaaaggcaaaaagggcagctagctgtagaaagagctaaacaagtagaagagttcctgcagcgaaaacgggaagctatgcagaataaagctcgagccgaaggacatatggtttatctggcaagactgaggcaaataagactacagaatttcaatgagcgccaacagattaaagccaaacttcgtggtgaaaagaaagaagctaatcattctgaaggacaagaaggaagtgaagaggctgacatgaggcgcaaaaaaatcgaatcactgaaggcccatgcaaatgcacgtgctgctgtactaaaagaacaactagaacgaaagagaaaggaggcttatgagagagaaaaaaaagtgtgggaagagcatttggtggctaaaggagttaagagttctgatgtttctccacctttgggacagcatgaaacaggtggctctccatcaaagcaacagatgagatctgttatttctgtaacttcagctttgaaagaagttggcgtggacagtagtttaactgatacccgggaaacttcagaagagatgcaaaagaccaacaatgctatttcaagtaagcgagaaatacttcgtagattaaatgaaaatcttaaagctcaagaagatgaaaaaggaaagcagaatctctctgatacttttgagataaatgttcatgaagatgccaaagagcatgaaaaagaaaaatcagtttcatctgatcgcaagaagtgggaggcaggaggtcaacttgtgattcctctggatgagttaacactagatacatccttctctacaactgaaagacatacagtgggagaagttattaaattaggtcctaatggatctccaagaagagcctgggggaaaagtccgacagattctgttctaaagatacttggagaagctgaactacaacttcagacagaactattagaaaatacaactattagaagtgagatttctcccgaaggggaaaagtacaaacccttaattactggagaaaaaaaagtacaatgtatttcacatgaaataaacccatcagctattgttgattctcctgttgagacaaaaagtcccgagttcagtgaggcatctccacagatgtcattgaaactggaaggaaatttagaagaacctgatgatttggaaacagaaattctacaagagccaagtggaacaaacaaagatgagagcttgccatgcactattactgatgtgtggattagtgaggaaaaagaaacaaaggaaactcagtcggcagataggatcaccattcaggaaaatgaagtttctgaagatggagtctcgagtactgtggaccaacttagtgacattcatatagagcctggaaccaatgattctcagcactctaaatgtgatgtagataagtctgtgcaaccggaaccatttttccataaggtggttcattctgaacacttgaacttagtccctcaagttcaatcagttcagtgttcaccagaagaatcctttgcatttcgatctcactcgcatttaccaccaaaaaataaaaacaagaattccttgctgattggactttcaactggtctgtttgatgcaaacaacccaaagatgttaaggacatgttcacttccagatctctcaaagctgttcagaacccttatggatgttcccaccgtaggagatgttcgtcaagacaatcttgaaatagatgaaattgaagatgaaaacattaaagaaggaccttctgattctgaagacatgtgtttgaagaaactgacacagatttacaagagctgcaggcctcgatggaacagttacttagggaacaacctggtgaagaatacagtgaagaagaagagtcagtcttgaagaacagtgatgtggagccaactgcaaatgggacagatgtggcagatgaagatgacaatcccagcagtgaaagtgccctgaacgaagaatggcactcagataacagtgatggtgaaattgctagtgaatgtgaatgcgatagtgtctttaaccatttagaggaactgagacttcatctggagcaggaaatgggctttgaaaaattctttgaggtttatgagaaaataaaggctattcatgaagatgaagatgaaaatattgaaatttgttcaaaaatagttcaaaatattttgggaaatgaacatcagcatctttatgccaagattcttcatttagtcatggcagatggagcctaccaagaagataatgatgaataatcctcaaaatgttttttaatcctcaactatatgaaagcatttgaatttggcttatcagaataacaagcttcagtgggaaatacagcaattatttatttaaaaaatcagatttaagatggactttcttattgcatgagatggagaaacatgccatttttcaatgaagattctaatattttatctattttgttcattgaattccatggtttctcataacctgacttaatggttttgaagatttactatgcaatagggtaactttgagtttcagcaaatgtctttaggttgaaggaattacctatgtcatgaaggacctgtctgtggtttttcaatggagtctttaagcatgatcttttttctgtctagtacttgttttcattctggccagcagttctacattaaatcaccttgtcaagggctctgtttacatctatacattttgaagatgaaatttttagccttaaagtttatattctcaagtccttttacaatcagtgtgtctcctgaactagcacacaggctgtagaaacagtcttagaaatcattgaaagatttgattatgaaagaatagcaaaattatatttcttgacatataaaaagttggtttaatgcctttatttctctttaaggaccagaaccaggaatactatatcgaaaaattagtctgtggatttaacactgacttagcatatagcttaaagttgctcttttggtttttaacttcctccatacataagcttcaaggacaataagatgttaaaaaggaggaaataattatttttattttgacactgtgacagttttggtaactaggatcctagggagggaaatgtttgcctgttgaacttctttctgttatgagaggatttagttaggtcattaagatgttgatcacacagcttcaatcacaatatgccaagtataacctggtttcgttagaggtgtctacagtccagatgttcttcgtaataaaagcaaagtttttgaacctctgagtccaaagcaggctggttggcataatatgtaatttgaaaaataaaatcttatcttgcagcactatcagtatgttgaatttattatgtatattatttctaatatccgaaactaaatacttgattttttaatatgtgtgtttattttatgatattgctattaaatttttattatctacctgaagtatat

SEQ ID NO: 79767 - DNA, 3825 bp, Homo sapiens
  misc_feature (2678)..(2678): n is a, c, g, or t
  misc_feature (3153)..(3153): n is a, c, g, or t
  misc_feature (3349)..(3349): n is a, c, g, or t
agcggacatacgccagcgccggtgacgcgccggccgctctcccttagtccgcattcgctccagggttttgggaccctaggttgcggagtccttaccctaccctggcctctcgagcagttgtccccataactcggaatctagagccgctgttgcgaggcaggagcacgtggcagtcaagtagcttcccagtcccgaacgccgcccgtccccaccccgccgtggccactagcaacgacctctgtgaagttggagaggcggtaacggaggcactccccctgctgcaccccgccgtttctacggggctcagaaaccagtttgtttgtttcgtcggggtagtgtcgacctgtcttacgggcgtcgcccgagacaggacggagtcaaacccgtggtatcaactgaagacgagtgtcaggatgtcattttcaaaatgcgggatggtacctctgctttattaagccccgtaggaagactgccacacctagactgatgcttattagtcatcaccgttattcctactaacgtcctgtgtcactgagttttttaaatgtctagcatatctgtaaagatgccttagaaaaagaatcatggagaagtatgttagactacagaagattggagaaggttcatttggaaaagccattcttgttaaatctacagaagatggcagacagtatgttatcaaggaaattaacatctcaagaatgtccagtaaagaaagagaagaatcaaggagagaagttgcagtattggcaaacatgaagcatccaaatattgtccagtatagagaatcatttgaagaaaatggctctctctacatagtaatggattactgtgagggaggggatctgtttaagcgaataaatgctcagaaaggcgttttgtttcaagaggatcagattttggactggtttgtacagatatgtttggccctgaaacatgtacatgatagaaaaattcttcatcgagacattaaatctcagaacatatttttaactaaagatggaacagtacaacttggagattttggaattgctagagttcttaatagtactgtagagctggctcgaacttgcatagggaccccatactacttgtcacctgaaatctgtgaaaacaaaccttacaataataaaagtgacatttgggctctggggtgtgtcctttatgagctgtgtacacttaaacatgcttttgaagctggcagtatgaaaaacctggtactgaagataatatctggatcttttccacctgtgtctttgcattattcctatgatctccgcagtttggtgtctcagttatttaaaagaaatcctagggatagaccatcagtcaactccatattggagaaaggttttatagccaaacgcattgaaaagtttctctctcctcagcttattgcagaagaattttgtctaaaaacattttcgaagtttggatcacagcctataccagctaaaagaccagcttcaggacaaaactcgatttctgttatgcctgctcagaaaattacaaagcctgccgctaaatatggaatacctttagcatataagaaatatggagataaaaaattacacgaaaagaaaccactgcaaaaacataaacaggcccatcaaactccagagaagagagtgaatactggagaagaaaggaggaaaatatctgaggaagcagcaagaaagagaaggctggaatttattgaaaaagaaaagaaacaaaaggatcagattattagtttaatgaaggctgaacaaatgaaaaggcaagaaaaggaaaggttggaaagaataaatagggccagggaacaaggatggagaaatgtgctaagtgctggtggaagtggtgaagtaaaggctccttttctgggcagtggagggactatagctccatcatctttttcttctcgaggacagtatgaacattaccatgccatttttgaccaaatgcagcaacaaagagcagaagataatgaagctaaatggaaaagagaaatatatggtcgaggtcttccagaaagaggaattctgcctggagttcgtccaggatttccttatggggctgcaggtcatcaccattttcctgatgctgatgatattagaaaaactttgaaaagattgaaggcggtgtctaaacaagccaatgcaaacaggttggactgtgatgatccatgaattcatccatgtgtgtaattttgtcgtttgtcatacatagcttagtacctacactttgtggatgttttctccattgttcacatatgatgttttttgcctcttgggtacaataattttctgaggtgcaaatttggcccttgattactctgtgaaagcatgtagctttccagttcagcctgatttttgtgtcttgtttgtgggtttagactgaatatactatttaaaggaacatgtgataacattctgccaacataattataacattttatcacccacttcctttaaataaatcaggatataaatctaaattgaatcacactttatgcagaaccccagtgcatttttcgcccttttcttcatcacttcaaagcctacttttctctttgttgtcttagcatgctttctcttcaccttcatctctgatttataactctttgtgatcctgttcatcatattatttcttttcttccattgaattaataatggtaactgattaatatgtacttgagnagagataaatgattgaggtaaatataaattaacgtttatatacacattataaattatatacagaagcctgatatatgaagcatctattttttgagaaaggaaggttacagacttacacatatgcatattttttatgaatagtgagacaaattttgtgggaggcttttattctccagaattattgatctttctagtatatatattgtttaattagtaaactttatttttagagcgatttggggttcacagcaaaatggagtggaaagtacagagagttcctatgtaccccttcctcacacatgcacaacctctgtattgacatcctcatttgagtgataacgtttgttatgatcaaacatcgatccattatcacccaaagtccatagtttacattagagtttactcttggtattgtacactccatggcttttgacgaatgtataattataggtatccaccactgtaatatcatacnaaataatgtgactgccttcaaaatcccctgtgctccacctccctccaacctccctcccaactcttggcaaccactggttgctttactgccttcatagttttagcttttctagaatatcatatacttggaatcatatagtatgtggcctttcacactggcttttctcacttactaatatgcatttaaggtgcctccntatatcttcatagtttcataccttatttcttcttaacactaatatcccattgtatttatgtagcatactttttttttttttttttggtaatttttttttttgagacaggttcttgttctatccccaggctggagtgcaatggcatgatcatggctcacttgcagccttgacctctggggcttaagtgaccctcccacctcagcctcctgaacagctgggactacaggtgcttgccaccatgtgtggctgattttttaaattttttgtagaatggagtcttgctatgttgcccaggctggtcttgaactcctgggttcaagcagtcctcctgcactggcctcccaaagtgctgggattacaagcatgagccaccatgcccagccagaatggatgtactacactttatccattattctactgaaggacatcttggttgcttttaagttatggcaattatgaataaagcttctacaaac

SEQ ID NO: 79768 - DNA, 1853 bp, Homo sapiens
agcggacatacgccagcgccggtgacgcgccggccgctctcccttagtccgcattcgctccagggttttgggaccctaggttgcggagtccttaccctaccctggcctctcgagcagttgtccccataactcggaatctagagccgctgttgcgaggcaggagcacgtggcagtcaagtagcttcccagtcccgaacgccgcccgtccccaccccgccgtggccactagcaacgacctctgtgaagttggagaggcggtaacggaggcactccccctgctgcaccccgccgtttctacggggctcagaaaccagtttgtttgtttcgtcggggtagtgtcgacctgtcttacgggcgtcgcccgagacaggacggagtcaaacccgtggtatcaactgaagacgagtgtcaggtgtggagagtctcagtgccccctttcagtctggactgtgagctgctgctggttagacagtcttggtttctctttcaggatgtcattttcaaaatgcgggatggtacctctgctttattaagccccgtaggaagactgccacacctagactgatgcttattagtcatcaccgttattcctactaacgtcctgtgtcactgagttttttaaatgtctagcatatctgtaaagatgccttagaaaaagaatcatggagaagtatgttagactacagaagattggagaaggttcatttggaaaagccattcttgttaaatctacagaagatggcagacagtatgttatcaaggaaattaacatctcaagaatgtccagtaaagaaagagaagaatcaaggagagaagttgcagtattggcaaacatgaagcatccaaatattgtccagtatagagaatcatttgaagaaaatggctctctctacatagtaatggattactgtgagggaggggatctgtttaagcgaataaatgctcagaaaggcgttttgtttcaagaggatcagattttggactggtttgtacagatatgtttggccctgaaacatgtacatgatagaaaaattcttcatcgagacattaaatctcagaacatatttttaactaaagatggaacagtacaacttggagattttggaattgctagagttcttaatagtactgtagagctggctcgaacttgcatagggaccccatactacttgtcacctgaaatctgtgaaaacaaaccttacaataataaaagtgacatttgggctctggggtgtgtcctttatgagctgtgtacacttaaacatgcttttgaagctggcagtatgaaaaacctggtactgaagataatatctggatcttttccacctgtgtctttgcattattcctatgatctccgcagtttggtgtctcagttatttaaaagaaatcctagggatagaccatcagtcaactccatattggagaaaggttttatagccaaacgcattgaaaagtttctctctcctcagcttattgcagaagaattttgtctaaaaacattttcgaagtttggatcacagcctataccagctaaaagaccagcttcaggacaaaactcgatttctgttatgcctgctcagaaaattacaaagcctgccgctaaatatggaatacctttagcatataagaaatatggagataaaaaattacacgaaaagaaaccactgcaaaaacataaacaggcccatcaaactccagagaagagagtgaatactggagaagaaaggaggaaaatatctgaggaagcagcaagaaagagaaggctggaatttattgaaaaagaaaagaaacaaaaggatcagattattagtttaatgaaggctgaacaaatgaaaaggcaagaaaaggaaagg

SEQ ID NO: 79769 - DNA, 541 bp, Homo sapiens
ggcaacagagtgagactctgtctcaaaaaactaataaattaataaaaataaatataaaaaattaaaattatgtgttcaaatacattaaatatatggcaatgaaaatgaggcctagcatgactgactgcattttgctcctaacccttcctaccctgtggtgacatcttccaggctaactgctttttcttatttctgcacataggccaagctatctatgggagggatttagcttacagtttaactttaaagcacagatgataataatcccttccccaaactaactcctgagaagatagagaggttgtatacacaagtaacagtgttatgctgaagatttataagagcagtgtgacctgacaaaggacgaacaattttcaccatccccttgggctcccactgcagcccatgtctgtcattgtcagacctcttcacctcaagcgcctccttcttcctcccttccctaacgtacaaggagccggaaaatcgtattaatttaagatggttcttcaggatgttacttcaccatctgttcagtttggtg

SEQ ID NO: 79770 - DNA, 487 bp, Homo sapiens
aaaggctccacaggtggcaatcccactgcaatggctaccactcccgagagtcccctagagtccgtcccaggggtgctggcatgaagtcagatgctctgttatcttcttgatcctctccctcttccccctcttctcttcctctctgctgtcatctctgctcttctcccacttcttcatttttatagtactattggtattattattaagacactgaaatacctctcatctagccatagagcaggcatttgatcttgattgaatgaatgagtgacagaatgaaggaacaacaggcctgctcaatgcaaccttctctggggactgtgtaccctgagccattatgacacagaatcagtccaaacaaggtgttaatcatattagctgtgagtgcttcgcagagtctgaagggcaaagaactccacaggtcagtttttattgtggtggagggaagagggggtagcagaaaggtccacagagaggaatttctcat

SEQ ID NO: 79771 - DNA, 361 bp, Homo sapiens
gggcacagcaggggtgggccggttcacctcctggctttgaagaaatgggttctctcctatggcatctgtgattcccaaagtcctcaatcaagcaggaagggggtgagtcgatggctcttcccaaggccttctcctcccatggacggcttctctgtccgagttctctcgccgtttctccccctttactccatcccaagaggcacttgtgagcttcaagggcatcttctaaatattacattcactcagtgccccaaagaggacagcctgttcttagaacattgctcaattctttctcctgcggtaaggattcagtttgttttattaagaactagtgtggcataagttcattctcatccaaaaa

SEQ ID NO: 79772 - DNA, 542 bp, Homo sapiens
acctcgatattcctaaaggggtggaatttttgttctaatttctaaggtacttttgcgcttagatggttttaactgtagtctctgccaacaaaggccactcataacccccagtctgaacggaccctaccctgttcaaggcccagagctgtggggcatcctagccctgctaggagaggctgcaatgctcccggcatggacgagaggggagcatggaagcccagagtccctgccactgctgctgctgcacaaagccacgacaactggttgcacaggccttgtgtctctcaatcagcagccccaagaaaggtctctgagagtgcgccattctctttctcctgagcttgctcttttgcttacctttagacgatgacttcagcgagaaagacagatgagcaaatgtcactttcatgcagatagttcacccaactgcataagtgctctcaatgggagaactttcagcacactgaagtctatttaaaaatagtgggagaagggaagttacttctcttttaaaagtgctaataataataacattaatacga

SEQ ID NO: 79773 - DNA, 631 bp, Homo sapiens
gtctcactgtattgctccgtctggtcttgaactcctggcgtcaagcagtcggcctccaaaagtgctggcattacaggcgtgagccaccagacccggccaagagaggttctgactggggagaacccatggggagttggtcgtttccggctgacacagagcggggcagccctcgcctcggctgggggagctgggggtgatgagccaagccagggagttctggggggttgggggatcatcctggggagggcgtggttagaaggcaagggccgtgagaaactctttcaggagtctgggaagggacccagcgttggaaagccacgttgaatttgctgggaggaggattccaggaagtgcgggccgtggttgtgctgtaccaccaggacgggaggtccaggcctctggggcccggaggccttggtgggagcgcggtggcggatggggagaccgtgcttgcagctgttctcggagccccggtgctgggtgctgggcggggtgggtgcccaagagtgggggcatctgaagctgaggctgcgcggggcggggtgggaggtgggtgggtcccggaggtctgtaacggctgggtccaggcctgggccgtccccgagggggccgcaccggactcattctgaat

SEQ ID NO: 79774 - DNA, 777 bp, Homo sapiens
gtggactgcaaggatcctgggcgattttctagtcctgactccatatgacagatggacacaaagagccagaaaggattttaaaacaatctatcacctatctttgaccatatggactaaaattgatatccaccaatagacactgatgcctgcaagtcaacagcataaagagtggtaaagtcagtgctgcaaaagatgaaatgtttttaatgtgctctggaggctaaccatccaagaccaagatgtcagcaggattggttcctgagggccttgaggaagaatctgttccaggactttccctttggcttgccattggccatattctctctgtgtcttctcacgtcttccctctgtatttgtttccaaatttcctcttcttataaggacagtagtcatattggaaaaaggaacaccctaataacctaattttaacttgattacctctttaaagaccttatctccaaataccatcacattctgaactattaaagattaatgcgtcaatatatgaattttgtgaggggcagggagacagaatacaaccaacccacaacacccagatacatagcgaaatcttcttcttctaggccccctgtgcctgtgtccaccacttcatcccccaattagctatatttgaaaaagtaagagggaaagaacagttggagggggaagagagagagaaagaagacagacaacttagattatgtgccctagatgttggccttacaaaacgggagcaaatcttaaccaatcattgtagcaaaacctttgtttatgaag

SEQ ID NO: 79775 - DNA, 351 bp, Homo sapiens
gcaggagggcggcagcagcagcatctgcaggtgcagctgagagtgggggacagaagaggagtaactgtcacagcgagccccaagaccctggggtgccacagctacatcctagagcactgtccatcagaactttctgcaatggtggaaagttctatgacagtcactagccacgtgggactcttacactcttgaaatgtggctggtgtatcagaggacctgaattttaaattgtattacatttcccataatcagcacggtggctcacacctgtaaccccagcactttcggaggccaaggcgggcggatcacctgaggtcaggagttcgagaccagcctggccaacatggtgaa

SEQ ID NO: 79776 - DNA, 764 bp, Homo sapiens
ttctgtactcagccagctgctgctgaggtgggaggaaaagtcctggctgggagaattgagctagtgcagcacacgtaaaaaagcgattccgatgggtcctttgaaagcttttctcttctccccttttcttctgcggagtcaaagtagaggggtgaggttggtcttcttgttactgaccctgcatttgggaaactgtgttgataaggcagatgatgaagatgatgaggatttaacggtgaacaaaacctgggtcttggccccaaaaattcatgaaggagatatcacacaaattctgaattcattgcttcaaggctatgacaataaacttcgtccagatataggagtgaggcccacagtaattgaaactgatgtttatgtaaacagcattggaccagttgatccaattaatatggaatatacaatagatataatttttgcccaaacctggtttgacagtcgtttaaaattcaatagtaccatgaaagtgcttatgcttaacagtaatatggttggaaaaatttggattcctgacactttcttcagaaactcaagaaaatctgatgctcactggataacaactcctaatcgtctgcttcgaatttggaatgatggacgagttctgtatactctaagattgacaattaatgcagaatgttatcttcagcttcataactttcccatggatgaacattcctgtccactggaattttcaagctatggataccctaaaaatgaaatttgagtataggtggagaaaaggcctc

SEQ ID NO: 79777 - DNA, 321 bp, Homo sapiens
cgtgtatgtgtttagtatcctcattgttcctagccaggcatacagtcattcactcctgagcccactgctcttggcaatatggcttctaggaattccatcacttcatcatgaatgtcatcaataactactaactgccaaattcaaaggatattttttcttttatttatttattttttttttttgaaatggagtctcactctgttgcccaggctagagtgcagtggcgtgatcctggctcactgcaaactccatctcccaagttctagtgattctcctgcctcagcctgggcgacggagggagactccatctgaagaaaaaaa

SEQ ID NO: 79778 - DNA, 1930 bp, Homo sapiens
tggcctctcagagcctcttggatccccacagggtaatgggtgtccgatgtcacgggggactctgtgatccgtgttcccctgaccctcctagtgcacaacttggccgggctcactgggctcctgcaccactgcctgtcaggtccgctgccagccccaagccccccaccagccatgagctcctccagaaaggaccacctcggcgccagcagctcagagcccctcccggtcatcattgtgggtaacggcccctctggtatctgcctgtcctacctgctctccggctacacaccctacacgaagccagatgccatccacccacaccccctgctgcagaggaagctcaccgaggccccgggggtctccatcctggaccaggacctggactacctgtccgaaggcctcgaaggccgatcccaaagccccgtggccctgctctttgatgcccttctacgcccagacacagactttgggggaaacatgaagtcggtcctcacctggaagcaccggaaggagcacgccatcccccacgtggttctgggccggaacctccccgggggagcctggcactccatcgaaggctccatggtgatcctgagccaaggccagtggatggggctcccggacctggaggtcaaggactggatgcagaagaagcgaagaggtcttcgcaacagccgggccactgccggggacatcgcccactactacagggactacgtggtcaagaagggtctggggcataactttgtgtccggtgctgtagtcacagccgtggagtgggggacccccgatcccagcagctgtggggcccaggactccagccccctcttccaggtgagcggcttcctgaccaggaaccaggcccagcagcccttctcgctgtgggcccgcaacgtggtcctcgccacaggcacgttcgacagcccggcccggctgggcatccccggggaggccctgcccttcatccaccatgagctgtctgccctggaggccgccacaagggtgggtgcggtgaccccggcctcagaccctgtcctcatcattggcgcggggctgtcagcggccgacgcggtcctctacgcccgccactacaacatcccggtgatccatgccttccgccgggccgtggacgaccctggcctggtgttcaaccagctgcccaagatgctgtaccccgagtaccacaaggtgcaccagatgatgcgggagcagtccatcctgtcgcccagcccctatgagggttaccgcagcctccccaggcaccagctgctgtgcttcaaggaagactgccaggccgtgttccaggacctcgagggtgtcgagaaggtgtttggggtctccctggtgctggtcctcatcggctcccaccccgacctctccttcctgcctggggcaggggctgactttgcagtggatcctgaccagccgctgagcgccaagaggaaccccattgacgtggaccccttcacctaccagagcacccgccaggagggcctgtacgccatggggccgctggccggggacaacttcgtgaggtttgtgcaggggggcgccttggctgtggccagctccctgctaaggaaggagaccaggaagccaccctaacactcggccagacccgctggctcccaggccctgagaggacagagatgaccacatccctgctggatgcaggacccgtccaaagatgccccggggaggggtgtcagcccacgttgctggcctttggggtcaagaggagtagggatcccaggctgccctggacttagaccagtgtctgaggtggtaacagcggccgcaggccagggttggcctagacctgggatttgtggggaaagctgctggtgtgaccagctgagcacccagccaggagacctgcagccctgcgccttccagaagcaggtcccaaataaagccagtgcccacctgc

SEQ ID NO: 79779 - DNA, 1379 bp, Homo sapiens
tggcctctcagagcctcttggatccccacagggtaatgggtgtccgatgtcacgggggactctgtgatccgtgttcccctgaccctcctagtgcacaacttggccgggctcactgggctcctgcaccactgcctgtcaggtccgctgccagccccaagccccccaccagccatgagctcctccagaaaggaccacctcggcgccagcagctcagagcccctcccggtcatcattgtgggtaacggcccctctggtatctgcctgtcctacctgctctccggctacacaccctacacgaagccagatgccatccacccacaccccctgctgcagaggaagctcaccgaggccccgggggtctccatcctggaccaggacctggactacctgtccgaaggcctcgaaggccgatcccaaagccccgtggccctgctctttgatgcccttctacgcccagacacagactttgggggaaacatgaagtcggtcctcacctggaagcaccggaaggagcacgccatcccccacgtggttctgggccggaacctccccgggggagcctggcactccatcgaaggctccatggtgatcctgagccaaggccagtggatggggctcccggacctggaggtcaaggactggatgcagaagaagcgaagaggtcttcgcaacagccgggccactgccggggacatcgcccactactacagggactacgtggtcaagaagggtctggggcataactttgtgtccggtgctgtagtcacagccgtggagtgggggacccccgatcccagcagctgtggggcccaggactccagccccctcttccaggtgagcggcttcctgaccaggaaccaggcccagcagcccttctcgctgtgggcccgcaacgtggtcctcgccacaggcacgttcgacagcccggcccggctgggcatccccggggaggccctgcccttcatccaccatgagctgtctgccctggaggccgccacaagggtgggtgcggtgaccccggcctcagaccctgtcctcatcattggcgcggggctgtcagcggccgacgcggtcctctacgcccgccactacaacatcccggtgatccatgccttccgccgggccgtggacgaccctggcctggtgttcaaccagcagcccacgttgctggcctttggggtcaagaggagtagggatcccaggctgccctggacttagaccagtgtctgaggtggtaacagcggccgcaggccagggttggcctagacctgggatttgtggggaaagctgctggtgtgaccagctgagcacccagccaggagacctgcagccctgcgccttccagaagcaggtcccaaataaagccagtgcccacctgc

SEQ ID NO: 79780 - DNA, 2213 bp, Homo sapiens
cgggttcaagcaattctcctccctcagactcctgagtagctgggattacagaaaccctcttgtgagcacgcctgaatttggaggatcacgtcacaagctctcaatagccacttgaactcatggccttaaagagcacaagtatcggcctttgtcttagtcaagctttcgaggagcaactcagcaattctgttaccgataatcacctaacagtttacacattcaaaaccactgggaagccacagaccaggcaccgtgggatggggaagtggagactgagaggctgctgccggggaaatatgcagtgcagacaagagggtaatgggtgtccgatgtcacgggggactctgtgatccgtgttcccctgaccctcctagtgcacaacttggccgggctcactgggctcctgcaccactgcctgtcaggtccgctgccagccccaagccccccaccagccatgagctcctccagaaaggaccacctcggcgccagcagctcagagcccctcccggtcatcattgtgggtaacggcccctctggtatctgcctgtcctacctgctctccggctacacaccctacacgaagccagatgccatccacccacaccccctgctgcagaggaagctcaccgaggccccgggggtctccatcctggaccaggacctggactacctgtccgaaggcctcgaaggccgatcccaaagccccgtggccctgctctttgatgcccttctacgcccagacacagactttgggggaaacatgaagtcggtcctcacctggaagcaccggaaggagcacgccatcccccacgtggttctgggccggaacctccccgggggagcctggcactccatcgaaggctccatggtgatcctgagccaaggccagtggatggggctcccggacctggaggtcaaggactggatgcagaagaagcgaagaggtcttcgcaacagccgggccactgccggggacatcgcccactactacagggactacgtggtcaagaagggtctggggcataactttgtgtccggtgctgtagtcacagccgtggagtgggggacccccgatcccagcagctgtggggcccaggactccagccccctcttccaggtgagcggcttcctgaccaggaaccaggcccagcagcccttctcgctgtgggcccgcaacgtggtcctcgccacaggcacgttcgacagcccggcccggctgggcatccccggggaggccctgcccttcatccaccatgagctgtctgccctggaggccgccacaagggtgggtgcggtgaccccggcctcagaccctgtcctcatcattggcgcggggctgtcagcggccgacgcggtcctctacgcccgccactacaacatcccggtgatccatgccttccgccgggccgtggacgaccctggcctggtgttcaaccagctgcccaagatgctgtaccccgagtaccacaaggtgcaccagatgatgcgggagcagtccatcctgtcgcccagcccctatgagggttaccgcagcctccccaggcaccagctgctgtgcttcaaggaagactgccaggccgtgttccaggacctcgagggtgtcgagaaggtgtttggggtctccctggtgctggtcctcatcggctcccaccccgacctctccttcctgcctggggcaggggctgactttgcagtggatcctgaccagccgctgagcgccaagaggaaccccattgacgtggaccccttcacctaccagagcacccgccaggagggcctgtacgccatggggccgctggccggggacaacttcgtgaggtttgtgcaggggggcgccttggctgtggccagctccctgctaaggaaggagaccaggaagccaccctaacactcggccagacccgctggctcccaggccctgagaggacagagatgaccacatccctgctggatgcaggacccgtccaaagatgccccggggaggggtgtcagcccacgttgctggcctttggggtcaagaggagtagggatcccaggctgccctggacttagaccagtgtctgaggtggtaacagcggccgcaggccagggttggcctagacctgggatttgtggggaaagctgctggtgtgaccagctgagcacccagccaggagacctgcagccctgcgccttccagaagcaggtcccaaataaagccagtgcccacctgc

SEQ ID NO: 79781 - DNA, 2068 bp, Homo sapiens
ggggtgtcccctgggggagggccaaccccagtgtgtccactcctccccggccaaactggtcacctctgtcacctctgctgcacccggccccttcgttgtcagtatcggcctttgtcttagtcaagctttcgaggagcaactcagcaattctgttaccgataatcacctaacagtttacacattcaaaaccactgggaagccacagaccaggcaccgtgggatggggaagtggagactgagaggctgctgccggggaaatatgcagtgcagacaagaggtccgctgccagccccaagccccccaccagccatgagctcctccagaaaggaccacctcggcgccagcagctcagagcccctcccggtcatcattgtgggtaacggcccctctggtatctgcctgtcctacctgctctccggctacacaccctacacgaagccagatgccatccacccacaccccctgctgcagaggaagctcaccgaggccccgggggtctccatcctggaccaggacctggactacctgtccgaaggcctcgaaggccgatcccaaagccccgtggccctgctctttgatgcccttctacgcccagacacagactttgggggaaacatgaagtcggtcctcacctggaagcaccggaaggagcacgccatcccccacgtggttctgggccggaacctccccgggggagcctggcactccatcgaaggctccatggtgatcctgagccaaggccagtggatggggctcccggacctggaggtcaaggactggatgcagaagaagcgaagaggtcttcgcaacagccgggccactgccggggacatcgcccactactacagggactacgtggtcaagaagggtctggggcataactttgtgtccggtgctgtagtcacagccgtggagtgggggacccccgatcccagcagctgtggggcccaggactccagccccctcttccaggtgagcggcttcctgaccaggaaccaggcccagcagcccttctcgctgtgggcccgcaacgtggtcctcgccacaggcacgttcgacagcccggcccggctgggcatccccggggaggccctgcccttcatccaccatgagctgtctgccctggaggccgccacaagggtgggtgcggtgaccccggcctcagaccctgtcctcatcattggcgcggggctgtcagcggccgacgcggtcctctacgcccgccactacaacatcccggtgatccatgccttccgccgggccgtggacgaccctggcctggtgttcaaccagctgcccaagatgctgtaccccgagtaccacaaggtgcaccagatgatgcgggagcagtccatcctgtcgcccagcccctatgagggttaccgcagcctccccaggcaccagctgctgtgcttcaaggaagactgccaggccgtgttccaggacctcgagggtgtcgagaaggtgtttggggtctccctggtgctggtcctcatcggctcccaccccgacctctccttcctgcctggggcaggggctgactttgcagtggatcctgaccagccgctgagcgccaagaggaaccccattgacgtggaccccttcacctaccagagcacccgccaggagggcctgtacgccatggggccgctggccggggacaacttcgtgaggtttgtgcaggggggcgccttggctgtggccagctccctgctaaggaaggagaccaggaagccaccctaacactcggccagacccgctggctcccaggccctgagaggacagagatgaccacatccctgctggatgcaggacccgtccaaagatgccccggggaggggtgtcagcccacgttgctggcctttggggtcaagaggagtagggatcccaggctgccctggacttagaccagtgtctgaggtggtaacagcggccgcaggccagggttggcctagacctgggatttgtggggaaagctgctggtgtgaccagctgagcacccagccaggagacctgcagccctgcgccttccagaagcaggtcccaaataaagccagtgcccacctgc

SEQ ID NO: 79782 - DNA, 2228 bp, Homo sapiens
ggggtgtcccctgggggagggccaaccccagtgtgtccactcctccccggccaaactggtcacctctgtcacctctgctgcacccggccccttcgttgtcagtatcggcctttgtcttagtcaagctttcgaggagcaactcagcaattctgttaccgataatcacctaacagtttacacattcaaaaccactgggaagccacagaccaggcaccgtgggatggggaagtggagactgagaggctgctgccggggaaatatgcagtgcagacaagaggttcctgctactctcacctcatcagagttgttttctaccaggaaccagccccagccccagccccagcccctgctggcagatgctccggtaccctgggctgtggcttccaggctgtgcgtgactccagggcagggctgtggccaccagggccaggacgagggtccgctgccagccccaagccccccaccagccatgagctcctccagaaaggaccacctcggcgccagcagctcagagcccctcccggtcatcattgtgggtaacggcccctctggtatctgcctgtcctacctgctctccggctacacaccctacacgaagccagatgccatccacccacaccccctgctgcagaggaagctcaccgaggccccgggggtctccatcctggaccaggacctggactacctgtccgaaggcctcgaaggccgatcccaaagccccgtggccctgctctttgatgcccttctacgcccagacacagactttgggggaaacatgaagtcggtcctcacctggaagcaccggaaggagcacgccatcccccacgtggttctgggccggaacctccccgggggagcctggcactccatcgaaggctccatggtgatcctgagccaaggccagtggatggggctcccggacctggaggtcaaggactggatgcagaagaagcgaagaggtcttcgcaacagccgggccactgccggggacatcgcccactactacagggactacgtggtcaagaagggtctggggcataactttgtgtccggtgctgtagtcacagccgtggagtgggggacccccgatcccagcagctgtggggcccaggactccagccccctcttccaggtgagcggcttcctgaccaggaaccaggcccagcagcccttctcgctgtgggcccgcaacgtggtcctcgccacaggcacgttcgacagcccggcccggctgggcatccccggggaggccctgcccttcatccaccatgagctgtctgccctggaggccgccacaagggtgggtgcggtgaccccggcctcagaccctgtcctcatcattggcgcggggctgtcagcggccgacgcggtcctctacgcccgccactacaacatcccggtgatccatgccttccgccgggccgtggacgaccctggcctggtgttcaaccagctgcccaagatgctgtaccccgagtaccacaaggtgcaccagatgatgcgggagcagtccatcctgtcgcccagcccctatgagggttaccgcagcctccccaggcaccagctgctgtgcttcaaggaagactgccaggccgtgttccaggacctcgagggtgtcgagaaggtgtttggggtctccctggtgctggtcctcatcggctcccaccccgacctctccttcctgcctggggcaggggctgactttgcagtggatcctgaccagccgctgagcgccaagaggaaccccattgacgtggaccccttcacctaccagagcacccgccaggagggcctgtacgccatggggccgctggccggggacaacttcgtgaggtttgtgcaggggggcgccttggctgtggccagctccctgctaaggaaggagaccaggaagccaccctaacactcggccagacccgctggctcccaggccctgagaggacagagatgaccacatccctgctggatgcaggacccgtccaaagatgccccggggaggggtgtcagcccacgttgctggcctttggggtcaagaggagtagggatcccaggctgccctggacttagaccagtgtctgaggtggtaacagcggccgcaggccagggttggcctagacctgggatttgtggggaaagctgctggtgtgaccagctgagcacccagccaggagacctgcagccctgcgccttccagaagcaggtcccaaataaagccagtgcccacctgc

SEQ ID NO: 79783 - DNA, 465 bp, Homo sapiens
cctccaatgtcccagtagcaaagttaaaatgaaaagagatgggtgaaattaattttaataatatattctttttttttttttaagatggagtctcgctctgtcgcccaggctgaagtgcagtgactcagtcttagctcactgcaacctccgcttcccgggttcaagcaattctcctccctcagactcctgagtagctgggattacaggtgaccgccaccatgccctgccaatttttatatttttagtagagacggagtttcaccatattggccaggccggtctcaaactcctgacctcaggtgatctgcccgcctcagccttccacggtgctgggattacaggcgtgagctaccatacccggcctaattttaataatatgttctatctatcccagtatgtcagatattttccttattttcattgcaacatgtaatccatattaaaattatgaatgagatattttac

SEQ ID NO: 79784 - DNA, 569 bp, Homo sapiens
ggggtgtcccctgggggagggccaaccccagtgtgtccactcctccccggccaaactggtcacctctgtcacctctgctgcacccggccccttcgttgtcagtatcggcctttgtcttagtcaagctttcgaggagcaactcagcaattctgttaccgataatcacctaacagtttacacattcaaaaccactgggaagccacagaccaggcaccgtgggatggggaagtggagactgagaggctgctgccggggaaatatgcagtgcagacaagaggttcctgctactctcacctcatcagagttgttttctaccaggaaccagccccagccccagccccagcccctgctggcagatgctccggtaccctgggctgtggcttccaggctgtgcgtgactccagggcagggctgtggccaccagggccaggacgagggtgaggagggggaggcatcacctcaggcacaaaattttaggggcagcaaagcactcccatcaccagaatacatactgtgtccatgcagtgttcttacacatcaaaattcatgaaaaaaaatccagaatggaa

SEQ ID NO: 79785 - DNA, 666 bp, Homo sapiens
ctttatactgagcactgtgtcaggcttttcaccaccaaagagcctcatagcaccagctgcagagaccaaaaataatgtttttttaaagctacggacgtatgattttggtgaaggttgagggtagcaatgggaaagaaagaattattaaaattggaaacctgcaattccaaagacaacaaaactacagatagactgaaaagtacaaagaagatagcaggctactgaattaaccttgggagttgggaccaggttgtcctttgtagaactggataaatcattcagacttccaggctttcagtagagagaaaaagcagttgtttctgggtatatggacaggagttaaggctgagttgacaagtcaaaacttcttgtcctcagcacccctgactttcctctatgtgtccttttgtttcttctcctttgaatagtgtgtcctgcacaggaaatggttatatttgttagcttctttcctaggtcttattggagtacaaagtaaatcttgtgtaagacataatctctgtccactaggaccccgtaatttaataggggaaataagacatgctcaagaaaggagattttatacatagagtatgaaatagtgctatggataaattataataaaaccagagatttagtttttttaaaaaatgagaatactttgatatt

SEQ ID NO: 79786 - DNA, 449 bp, Homo sapiens
tcactttttttcttctgattttaaagtaaatgaaaacacttttgtgggtccccaagattatcatgccttcagggcctgaaagacacaccaggctcttttcttattgaggattcagcgccatctggtggttctcatctcgcaagggtgcccagccacttccgctctgcagaaaaaggttcatcggcaaaattttcattcagagaatactgactaagcctaaccgctctgattactgcttgactcagatccaaactgcccgacactgggctttgaggctgtctgattggcaggagctaaagtgagacttcaagaagacaacgagagcccagtagtgaccacaaatcagctgaggaaagccaacagtccaactttttcatcagattgttagtgcagtaattttcctcatttttgtgcttgaggcaacatatcgaagagaatataaaaagaag

SEQ ID NO: 79787 - DNA, 299 bp, Homo sapiens
attcattggtcgacctgaaaataggagaaattagagatgctcttttgtatttttaagctaatgaaacaaattcagggcagataccattatgactgacttataagagactgtaaaaatgcttgtgttaaactgagtattgtgttttgaatgctaaggtaaatgaatctttagttgaggtttggaaacctttttgatacatacagatttgttgaacttgggagtagcattgggacaccagtctgttttggttgtgtttattaggatctaatatttgaagtctaaattataaaaagaatatc

SEQ ID NO: 79788 - DNA, 1151 bp, Homo sapiens
gatgggaggactgcttgaggccaggagttcaagaccaacctggccaaaaatactttttataaaaagaaaatacttcttgtagaagtgctggttcagtaatttaatagctacaagactttgtagctacaagcctttgttataaagtacagaagactactgcaacttaatcattaaatttatcatcactttccttggcagtagttgaagaatgcatctcttatgctgcttagctgttagtacatgctggttatttatgtctgactttccactattttcaatattaaataaacagttgcataacgcggagtttcaaaataatttatgattaatcaatgtttagtattccaaataaactcccaaaactcacactttaaactttaggattcaaatgtagagaaaaaacagaacagcaaccaaagactgaacctgatcatcttatagcccatcactacaactttcacaaagctaaactcaaaattaaccattatcagggttttacgaacccgaaaactaaaaattgaagtgcaattaaataattgaagtgcaaaatactatggcagaaaaaaaaccagctaattgccaaattttcctaattttttgaaaaaagctgaccacaggaaacctaaagaccattaaatgcagcatccgttctccacacgatacctaacatccctatttaaccacttttacattgtccttacacttatgagtcaactgtaaataagagcaaaaataaatgcataatctttatgttgactaagactttcacatgtactaactgtaaaatctaacagctaactcaagcttatgtatctggtagtagccacaatttagtgtcttgcttccagatttcatgttaggatgattttggcataatgtatttcccataagatctaggaaaaaaaaaaaaaaagatctctaccaactcccaaaaaagccaagaccagactgccccaagcagtcaaatggaacagcaaggaaaaccacagcaatttccttaaccaacatagtaccaaaaaagtaaaactgaattcaataaccaagaaataatttaccaactataggaaatctgggaaaaatatactaaagttatcatctcagactgccaactgtattcttcatgcatttcattaaatacatgagttttcagg

SEQ ID NO: 79789 - DNA, 647 bp, Homo sapiens
catcatgcaacctcagaagtagaagcagatggagttagaaaagctacattctagttggagacaagatattgagaaaacttgttccatacatgagctcaaatttctccacctgtaaggtggtcatattgcttgctgatttcagaaggcttaagccattggttaaaaggccttttgtgctcaataatcaagaagctgctttaaaaaataatcaagaagctgctttgattgctgataatttactagagtgacagtatccacagaaaaatttcatttatatagaaagttattatataagaaatctaaaatatgagtttgccttcaaaaacttagcctggtttaaggaagtttaaggttttaggggagtgggagtgagtgaaggaggaggttgtagaagagaatggaggaggaaattgagaaaagacaagctgaacaaaggaagaatttatctgtgcctctgagactagttcttcccgggaatcttacccctaccactggactgttttttcaaaggcaaagatcacctattgttcaactctgcatctcccacacagcatatctaccactatgtagagagtagttgcttgttgcttgataagtgtttaacaaatggtaaaacacttttttttttttggagatggagtttcatc

SEQ ID NO: 79790 - DNA, 406 bp, Homo sapiens
ctcatttctcctcagtgtaattatgtttcccctgtggtttttttccccttccttcgacaagttggaattcccactgccttggaatcccatgagggattggtcccaggacccccttcgttaccaaaatcctaaggatcctcaaaggccctgatatgaaatcgcataatatttgcatataatctgcgcacatcctcccatatactttgaatcaactctagattacttataataccgagtgcaatgtaatttttatactgttttgtttttaaatttgtattatttttattgttgtattgttatttttatttagctccaaatattttcgatctgaggttggttgaatctatggacatggaatctgtgaatatggagggccaactgtacaaataaaaatcaccacacatta

SEQ ID NO: 79791 - DNA, 293 bp, Homo sapiens
aaaacttttggcagatttctgattgccctaggaagcatcttcgccccagcaaggagcatttccttccattgaacacgcaatctacagggaattaggacatgttcttacgctgtgacttttggagcattttattttcttttttctagttcaaaattttcctggaaaataatgaagtgaactcagacaccacaggctctataattatgagatttttgtggaaaatcctggggacaatttggcttaatgcatatttatttaaatgtcataaaagtcaactcatcaaagttgtaggg

SEQ ID NO: 79792 - DNA, 1697 bp, Homo sapiens
cagctgccttgcacagcctcgcaatgagctgccacaactgctccgacccccaggtcctttgcagctccgggcagctgttcctgcagcccctctgggaccacctgaggagctgggaggccctcctacagtcgcccttcttcccggtcatcttctccatcaccacatacgtgggcttttgcctgcccttcgtggtcctggatatcctgtgctcctgggtgcccgccctgcggcgctacaagatccaccctgacttctcgccatccgcgcagcagctgctaccttgcctggggcagaccctctaccagcatgtgatgtttgtgttccccgtgacgctgctgcattgggcccgcagcccggccctcctgccccacgaagctcccgagctgctcctgctgctgcaccacatcctgttctgcctgctactcttcgacatggagttcttcgtgtggcacctgctgcaccacaaggtgccctggctgtaccgcaccttccacaaggtgcaccaccagaactcgtcctcgttcgcgctggcaacgcagtatatgagcgtctgggaactgttttctttgggcttcttcgacatgatgaacgtcacactgctcgggtgccacccgctcaccaccctgaccttccacgtggtcaacatctggctttccgtggaggaccactccggctacaacttcccttggtccactcacagactggtgcccttcgggtggtacgggggtgtggtgcaccacgacctgcatcactctcactttaactgcaacttcgctccgtactttacacactgggacaaaatactgggaacgctgcggactgcatctgtcccagcgcggtgatgtggctgcggtgggtgcccctaagactcgggactgctgtgcctttcacacttgaatgaagagaaacacctgagctatatatttttttaaagcaactaacttattgctttatgtttatctatgaaaaccatagataaaatctgatgcatttttgtaatctgacaaagtaatttacatactgtttgtgtatcaatacaattttgtgttcttggtattcttagtctagctcacctcaatagccttgaatcctgcatatgaattagacattcatcactggcatatttagaatatctctaaaaggacttgtttgtagaataaggaattttctatgtttcaaagtgttctaaaacctggctaaaagaatgtatttttgtggatggtgttgacttctgactctaaaagcaatcaaacatgtttctgctggacagtgaccaagaattatagtaccttcttatatttttttatagaactgtatatttattttgaaagaaatgttattcgtgctttaaaaaggaaaaaaaaccatgaatccaaataagtattgacttccgtttcactggtattttgactgataaaaaagggaagagggagcgggcataccaagtgtccttctaagcctccatcagcctcaccatggaaagagaggaatctgggtgtagggtgttctgttgggggttgttagagaaaaggaggcaggagaaggggctctgtttgttgtgctctagcaatttcatggaggaaaaacacgctaatattcttaatgcttttcagctgatttctgtataacaggcaaatgataggattactctgtaaagtttcatagaaagattaacgctgagcagtcaaaaaaaatat

SEQ ID NO: 79793 - DNA, 1644 bp, Homo sapiens
cagctgccttgcacagcctcgcaatgagctgccacaactgctccgacccccaggtcctttgcagctccgggcagctgttcctgcagcccctctgggaccacctgaggagctgggaggccctcctacagtcgcccttcttcccggtcatcttctccatcaccacatacgtgggcttttgcctgcccttcgtggtcctggatatcctgtgctcctgggtgcccgccctgcggcgctacaagatccaccctgacttctcgccatccgcgcagcagctgctaccttgcctggggcagaccctctaccagcatgtgatgtttgtgttccccgtgacgctgctgcattgggcccgcagcccggccctcctgccccacgaagctcccgagctgctcctgctgctgcaccacatcctgttctgcctgctactcttcgacatggagttcttcgtgtggcacctgctgcaccacaaggtgccctggctgtaccgcaccttccacaaggtgcaccaccagaactttgggcttcttcgacatgatgaacgtcacactgctcgggtgccacccgctcaccaccctgaccttccacgtggtcaacatctggctttccgtggaggaccactccggctacaacttcccttggtccactcacagactggtgcccttcgggtggtacgggggtgtggtgcaccacgacctgcatcactctcactttaactgcaacttcgctccgtactttacacactgggacaaaatactgggaacgctgcggactgcatctgtcccagcgcggtgatgtggctgcggtgggtgcccctaagactcgggactgctgtgcctttcacacttgaatgaagagaaacacctgagctatatatttttttaaagcaactaacttattgctttatgtttatctatgaaaaccatagataaaatctgatgcatttttgtaatctgacaaagtaatttacatactgtttgtgtatcaatacaattttgtgttcttggtattcttagtctagctcacctcaatagccttgaatcctgcatatgaattagacattcatcactggcatatttagaatatctctaaaaggacttgtttgtagaataaggaattttctatgtttcaaagtgttctaaaacctggctaaaagaatgtatttttgtggatggtgttgacttctgactctaaaagcaatcaaacatgtttctgctggacagtgaccaagaattatagtaccttcttatatttttttatagaactgtatatttattttgaaagaaatgttattcgtgctttaaaaaggaaaaaaaaccatgaatccaaataagtattgacttccgtttcactggtattttgactgataaaaaagggaagagggagcgggcataccaagtgtccttctaagcctccatcagcctcaccatggaaagagaggaatctgggtgtagggtgttctgttgggggttgttagagaaaaggaggcaggagaaggggctctgtttgttgtgctctagcaatttcatggaggaaaaacacgctaatattcttaatgcttttcagctgatttctgtataacaggcaaatgataggattactctgtaaagtttcatagaaagattaacgctgagcagtcaaaaaaaatat

SEQ ID NO: 79794 - DNA, 411 bp, Homo sapiens
cattgtgcttttctagtgatactgttctgaaggctggatccaacagaaattgtgtgtgtgcagagatgtgtaaataagaatgcgatattatagtcatgtgtcacataacctttcggccagtgattaactgcctacgaaattgtggtcccatatgattataacggagctgaaaaattcctattgcctagtgaagtcagatccctcctaatgttgtagtgcaaagcattcttcacgtgtttgtggtgatgctggtgtaaacgaccccactgtgctgcttctagtggtataaaggtatagcaatactgttatatatatagtacataatacttgataataaatgactgtgttactggtttatatatttactatactttctattgttattttagagtatattccttctatgtatac

SEQ ID NO: 79795 - DNA, 638 bp, Homo sapiens
ctaaggatgaggtgaaggaagtgctgcaggccctggaggagctggctgtgaactatgaccagaagtcccaggaggtggaggagaagagccagcagaaccagcttctggtggatgagctgtctcagaaggtggccaccatgctgtccctggagtctgagttgcagcggctacaggaggtcagtggacaccagcgaaaacgaattgctgaggtgctgaacgggctgatgaaggatctgagcgagttcagtgtcattgtgggcaacggggagattaagctgccagtggagatcagtggggccatcgaggaggagttcactgtggcccgactctacatcagcaaaatcaaatcagaagtcaagtctgtggtcaagcggtgccggcagctggagaacctccaggtggagtgtcaccgcaagatggaagtgaccgggcgggagctctcatcctgccagctcctcatctctcagcatgaggccaagatccgctcgcttacggaatacatgcagagcgtggagctaaagaagcggcacctggaagagtcctatgactccttgagcgatgagctggccaagctccaggcccaggaaactgtgcatgaagtggccctgaaggacaaggagcctgacactcaggatgca

SEQ ID NO: 79796 - DNA, 527 bp, Homo sapiens
ctccactagactgagttccttaagagaggggctatctgtgattcatctctatatccatgcattagttagtgtaagctgggctgaggtaatggactccacagtttataattgctatacaccatataagtttgtcatagaatagctgtccctcatcataatgattcagggacccaggttttttccatctgtggttctacatatcctagggcttttttgggtctctgcatctgccaaaggaaaaggaaagagagtatggaggatggaatttgcttcctaaaaactttcaccaggaaaacagcacacatcacttctgctcatattccactagccagagctcagtggttgggcctcaactagcttcaagggaggctgggaaatacggactacatgtgtcctcagggagaagagaaggatgtgggttttggtaaacagacaagacagtacagcctctagtaccatccccatggtcccacttaggtctcggggcagagtagacattcagtgagtgcttattgaggaaatggata

SEQ ID NO: 79797 - DNA, 330 bp, Homo sapiens
ttttgtgttcttttggtggtattatgtctctttgtttttcatgttttttgttgctttatgttaataatctgtgcatttgaagaagtaaggacttattccagactttgcatactgggattttctggggaagcctttcaccagtcagctcatccagagatccagagattctgagcaggtcatctggtgtggtcctctggcagacttactactggagcccttggactttgtgcctggatcagcaggtgggtgggcctggtacctgggtctctgggtctgtcgggttggacctggagccttggatcccctgttcattggatctgtaagggtagg

SEQ ID NO: 79798 - DNA, 225 bp, Homo sapiens
ctctcacttctcaccaggcacccacaaagcccccaggcagctccatctttccaatccaatcccattatcccaatctctaccccaggatcccccaaactcctcccacttcacctctgccacagacccgctcgcccccaaacttcagcctcccctcatctgccctcaccacccacagcccctcctacctagccctctcccgcgccgggcccgcgggctccccacatt

SEQ ID NO: 79799 - DNA, 470 bp, Homo sapiens
tggcttggtaatgaaagatcatagatacgaaatgaaaaatcaatgatgatgaaaaatgctttcaatttagaaatcaggagaactaggaaaagttctacagtagttccgaatcatctactatcacgttctgtgcccttgggcaactcaattaaagaagtatctagtaagtgctgtagtaggtactgggtgatctctaaggtcacggttatctctcaatttctttctattgatgccactaccattagaagactacctaaagagttctgaaggaactcaagggtgagcttgtggaaccactgccaaaaggaataggcttgatttctaccgaagaaagtacaagttggcaatgagtcccatctctaagaagggttttagaagggggcttggagccccatgcccatgagtgcctatttcagatccatgtaactttttgagataaaggataaagagtagaatcattgattgctcat

SEQ ID NO: 79800 - DNA, 356 bp, Homo sapiens
cccagctactcgggaggctgaggcaggagaatcacttgaacctgagaggtggaggtagcagtgagctgagatcacaccgctgcactccagcctgggcgacagagcaagactccctttcgaaacaaacgaaacaaaacaaaaaacaatctaaaaagttaaaaccgctcttagcctgtgggagatacaaaaacaggtggccgagtggatttgacccatgggtcctagtttgcccactcacccctggcctagccaaggtagtcatcccagggggtactgatggggcaggtggcttgagaaatttccaagggtccatttctggagagcgtggttttgtgctgtttgaacgatatcaacct

SEQ ID NO: 79801 - DNA, 481 bp, Homo sapiens
agggagggggacatgatctcatttggtcttcccaataactccctgccagaaagagacagagccccaaattgcagtgaggaagctgaggcttagaggacatccctgcacatgtctggggtgtcatatcatcatcggaggagctgggactcaaacccagctctggaacctgctctgtccccagctccatgataacattgtgtgaggtgctgggtgcagctcccaactcctccctgctcaaccatgctctgttagcctgtggtctacagagtggcttcctccagggatgtcttgatgtcttgcctttttttgtatctgaatctcttctaaactggtgcttttcaaactcagtctggagcttttagacatgaatgtgagtgttttctccatcttggtactgttgctgtcttgagagaataattctttgttttggggcagtcctttgcattgtaggatgtttaacagcatcccaggccttttccca

SEQ ID NO: 79802 - DNA, 435 bp, Homo sapiens
gaactcctcacctcaagtgatccgcccgcctcggcctccctaagtgctgggattacaggcatgagccacctcgcctggtcagattcactgtttatatttcaaagctgttcaaacatagatgtattgtaacaaaagataatgcaatgcttatgcttagaacatgcagtgcattctatttttcagttcattttgctaatgctacttttgaccacttaatcaatttacaacccattaaaggtttgagaaccacagttttaaaaatagtaatctagagacagaattgtgaattcagatgtattctgagtttttcttcctaatggccttttaaaagtgtttgtgttttgtgtctggtgaaaaacagatctcatacttggaaagcaaacatgatcctcaaatgagatttggaattcaaaaaaaattttttttttggtaaat

SEQ ID NO: 79803 - DNA, 829 bp, Homo sapiens
tgtcagttggttcctggtaggattctgggtacgaaaggagatacaccgggagctactgctcacgtttaattctgtggccttgcaccctgtgtcatgcgaatagggccaagtaggagacggaaacacaaccgactcggaaaatgccttctgtgaacttgaaaaggaaaaagaggaattaggttgaaacaacttactgggaagtcagtacttgcaaactgtaaattgggcataaaactgaaagaagaaaattcaaatttgtgggtaaaaaatcagggtgttaaaatattgaacgtgaatcaataaaaatagatttagctttatttccctccgttttggccttcagggtgtggattcatgcattcccctgcaatgctgcaaacccaatcagaacatgaggttagatcataggaaccagaaaatgaaagtgaccacaggcagggctgacatggtgcagactcacagtggatgctgtgtgacggctgagagaagcagcgggagtgtgaaaagacatgcgaatttcagtaaaataaactaggtagtaactgagtaaaattaattatctaaactgaccaaataacttattattatggataaattattactttatagaaaggacttttgaaataaaacttactttaaatatttcaatatgtcatttttaaaagaacctcagactcacaaatctaatgatttatcatttaaaaagtttcttcttttaaaaaactcaataaagtgaaaatatcccattgctttcatcatcacctgatcatctttgccttttgcttctgtttgtcacacgtagaaaaatgcagacttattttcatcactt

SEQ ID NO: 79804 - DNA, 315 bp, Homo sapiens
gcacaaccaaaaaggtggaggcaaagagagggcaaaacgggattcctaggtcactcattatacttggggccttcagatcctgctactttatcccctaggaccttgaagaaccagtgtcttgaggacagaaaaatcaaggtatcagatttgttcggtagtgctcctgcttggggctgtagggttagtgatggccaggaggtggttacagcctactgtgtttctggtgcccactgagctttgctggagcagctggaacaagtaacagtcacacaactcatgttgttatcagtgatgtccacattatcaggtggtcaa

SEQ ID NO: 79805 - DNA, 515 bp, Homo sapiens
atagcttaaaatgaaccatttaaacactttttggttatacagctcaatagcatttagatagatgcacattttgtgcagtcatcaccactatccatctccagaactttttcatcatcccaaactgaaactctgtactccttaaacagtaactccccattttctcctcctcaggctcctggtaaccactgttctacttcctgtctgtacaaatttgactgttctaattacttggtatgaatggaatcatacaatatttgccctgttgtgtttggcttattccacttagcattatgttttcaaggttcggccgtgttgtagcacatatcagaatttaattcctttttaaggctgaataatattccattttacttgtataccacattttgtttatccttttatctgccagtgaacatttaagttgtttgcaccattttggctatcaagaataacattgctataatcagtggtgctttctgttcttttaagtatatgcctagaaatagaattgctggatc

SEQ ID NO: 79806 - DNA, 916 bp, Homo sapiens
cctgttggccgagtggagactggtgtactcaaacccggatatggtggtcacctttgctccagtcaacgttacaacggaagtaaaatctgtcgaaatgcaccatgaagctttgagtgaagctcttcctggggacaatgtgggcttcaatgtcaagaatgtgtctgtcaaggatgttcgtcgtggcaacgttgctggtgacagcaaaaatgacccaccaatggaagcagctggcttcactgctcaggtgattatcctgaaccatccaggccaaataagcgccggctatgcccctgtattggattgccacacggctcacattgcatgcaagtttgctgagctgaaggaaaagattgatcgccgttctggtaaaaagctggaagatggccctaaattcttgaagtctggtgatgctgccattgttgatatggttcctggcaagcccatgtgtgttgagagcttctcagactatccacctttgggtcgctttgctgttcgtgatatgagacagacagttgcggtgggtgtcatcaaagcagtggacaagaaggctgctggagctggcaaggtcaccaagtctgcccagaaagctcagaaggctaaatgaatattatccctaatacctgccaccccactcttaatcagtggtggaagaacggtctcagaactgtttgtttcaattggccatttaagtttagtagtaaaagactggttaatgataacaatgcatcgtaaaaccttcagaaggaaaggagaatgttttgtggaccactttggttttcttttttgcgtgtggcagttttaagttattagtttttaaaatcagtactttttaatgggaacaacttgaccaaaaatttgtctcagcatttagtgacccttaaattaaaaaagtttcatgagaaaaaaaaaaaagaaa

SEQ ID NO: 79807 - DNA, 591 bp, Homo sapiens
cctgtaatcccagccctttgggaggccgaggcgggaggatcacttgagcacaggagttcaagaccagcctgagcaacacggtaagaccccatctctacaaaaaaaattaaaaagttgggcaggtgtggtggtatgtgcctgtggttccacctgctcgggaggctgaggtgggaggattgggcccaggaggtcgaggctgcagtgagctatgatcgtgccactgcactccagcctgggcgacagagcaagaacctctctcaagaaaatataaaataagccttcatttatgtaatgatcaaaataagcctaatataaatgaaaatagtgaaaactagtgcaaatgttatgctaacagagagctgaactatcaaactcctttaagacttaggttagagctctaacatgtgagtgctttccatactcttccttttcactaggaaatggctttcattaagaacaagtcagtcagtggctgggcacagtgacacatgcctgtggtcccggcactttgggaggccaaggtgggtgcattgcttgagtatgggagttcgggaccagcctgggcaacgtggtgaacctgtctctctacta

SEQ ID NO: 79808 - DNA, 395 bp, Homo sapiens
ggaaattaggttggttattaacatgtatagatggaactggggtgaaaaaaaaaaggaaatgggaatggagtggaagggttgggtgggagagacacttcacagtattctttttgttttgactttggaaatgttactatttcataaacttaaaaaaatgcaaaaaaaaaatatcaaaactaggtaggaaggagaacaaaatgaaatataaccagaaaggaataaacctaacacattttgagtgaatcacaaagccaaaccaaaaaagaactaatttaagtcacttttaaacttggtgtttaactacctacactcagtctaaaaacgaaaataaggataaagaaatagtgaactctagttagttggtctttctttacagcagtatgggatggcaactg

SEQ ID NO: 79809 - DNA, 1415 bp, Homo sapiens
  misc_feature (1155)..(1157): n is a, c, g, or t
  misc_feature (1164)..(1164): n is a, c, g, or t
  misc_feature (1179)..(1179): n is a, c, g, or t
  misc_feature (1188)..(1189): n is a, c, g, or t
  misc_feature (1203)..(1205): n is a, c, g, or t
  misc_feature (1208)..(1208): n is a, c, g, or t
  misc_feature (1210)..(1210): n is a, c, g, or t
  misc_feature (1212)..(1212): n is a, c, g, or t
  misc_feature (1224)..(1224): n is a, c, g, or t
  misc_feature (1234)..(1234): n is a, c, g, or t
  misc_feature (1238)..(1238): n is a, c, g, or t
  misc_feature (1243)..(1243): n is a, c, g, or t
ttatattttgagaaacctccatactgttttggcatagatagtggctgcacaattttgcattcccacccagcatacaagggttccaattcctccatatcctcaccaacactcttttgtttttttgatagtagtcatcataacaggtgaggtgatattaaggagtacttctgcactgaggcacttgtctcaactatatttttgttgtactttcaggagactaatagatctgtggaaatttatcaaatctttgctcatttttttaacttctgagagctcttctttaatctgagtgttcctttttatgaaattgttgatgaaaaaagccgaacaagtgtaaaatattttaagagatttattctgagccaaatatgagtgaccacagcccatgacacagccctcaggaggtcctcagaacatgtgcccaaggtggctaaggtacagcttagttttatatattttagggaggcataagatatcaaatacatttaagaaacacattggtctggtttagaaaggtgggacaactcaaagcaggggcttccagactataggtaaatttaaacattttctggttgacaataggatgagtttatctgaagacctgggatcaacagaaaagaaatgttcaggttaagataaaggattgtggagaccaagtttcactgtgcagaggaagctctcagagagcagacttcagagagcaggtggtaaaatatttcttatcagacttaaaagggtacctgactgttagttgattatctcttggatctggaaaggaaggaaggaaaacaaaggggaaaggggactcattatagaatgtggatttttcccacaagagactttgcagggcaatttcaaggtatggcaaggaaatatatttttgggtaaaacatttttattttcttccttgttatgccagagtcagattggaaagtcaagatatacagggttaaataaaacccacctgatgagaatttatgatttgtagggcatgactctctaggccccttagacaggaatttgggcaagatttaacaaatcagagctgagtcctcaaaatcctattattgtttcatgaatatggtttaagaatattaattacggagggcacggtggctcatgcctgtaatcccagcactttgagaggctgaggcnnnagaatcncttgaacctgggagncagaggttnnagtgagccaagatnnngcnantncactccagcctnggtgacagantganactcngtctcaaaaaagaaaatgaaagaaaaggacaaagtaacaggaagaaaagaaaaccgtcatgtcaaagagctaatgcccttcatatatgaaaagttcttccaaattcgtaagaaaaatgttcaaaaatgatcacttcaatagaaaaataggcaaaggacatgagccaatttac

SEQ ID NO: 79810 - DNA, 451 bp, Homo sapiens
ctgtggttcacatgaatacaccccggcaactctcagctgccagagctggaatctggcaacttccctggacgggaaaggctagcccaccgcccgggaagtgaggtgcgggcaacaaaagaacacagggtggggcccagaaacggacgggacaaatggagcaacacagattttccagaaggcctcatcagcgcaagcagccagcaacaggttgcccttgttgcagaagtcacataacctaatcaactctgaatcttttctctcctccccactatctagaaacagctcaggacttaggactctgttaacttctctgtccacaagaaaaacttctctgtgctcacaggcacacacacagaatctgaggagaaagaggaaattacagaggacacccgtttactaatgatgtgggggggggcggtggtggcttcaagagcgtagtttgggagcgaag

SEQ ID NO: 79811 - DNA, 326 bp, Homo sapiens
aatgcaaataaagcggacattttttacctattagatcacttggaaagaaaaaaaaactaaaatcaatgtttcatgctacatattatctgtatatgagcagatatacacattttacaggtcaattttattgtattttggtaattgtctttcctttatcttctcttatttagtctttagatttaaaattgaaactgttgttgttgtactgaatgctaatgcagtgcaaaccaagacagtatgttttacatggcctgaatagattctttgtcactcccttaggaaaaatacgttgttcatctcatggaaataaacctttatatatagaa

SEQ ID NO: 79812 - DNA, 314 bp, Homo sapiens
gttctgtacttgcacagttggaggcatttactgctttatatttaattgtctgtttactcatcattttcctactctatactataattttaaatggcagggcattttcttgttcactcttgaattctcactgcacttgacactgggtagtcactcaataaatagttttggatggcactttgccaatctggacttttcagctcaatatacatgataaataggcaggctttaggcctggctatccatttttggccactttatcactggctaccagcatgtgaacaagtcttgcaggaatagcataagattatggcaca

SEQ ID NO: 79813 - DNA, 357 bp, Homo sapiens
ccctttacccccaagtttaaacttaaatttgtaccttaaataagattgtttaacttagtgtctgacaataaaaatatcttctgaagtcagtttatagtgttagttaataaatgaggaaatacatgatcatactataaagatggtagtaacatccggggcggcattgactgcgattttctggaatacattcagtttagcactgactaataatgaactgtaatctagctcattatacatagaattgctcataaatcactagctcacttctacatgagctgaaggctcgctcaaaaatccaagttagtgttttccaacttcccagctagcaaagggaaggaaggaaatgaaaagaaggaa

SEQ ID NO: 79814 - DNA, 481 bp, Homo sapiens
agctactcagttgggaggatcgcttaagcctgggaggtacaggctgcggtgagccatgatcatgacaccacacaccagcctggtgacagacttgttgacagaccctgtctcaaacaaaataaaaacaacaggcagtaataaaaccttctagccaccaagcctagagagttttattaatgagaatagtgagttgtgagttttgctaaatatgcggtttctttgaattccagttttatacagaaagtataaagctcttgtcaaaattttacagtaacagtaccaaaattaaaaataactaaatctctttttttttttttggattaaggtgatttgttatttcttttttttttaattatactttaagttttagggtacatgtgcacaatgtgcaggttagttacatatgtatacatgtgccatgctggtgtgctgcacccgttaactcgtcatttagcattaggtatatctcctaatgctatcc

SEQ ID NO: 79815 - DNA, 583 bp, Homo sapiens
caattttctgcgcaatgtcatccattcccatagcacctctatgcttacaaacccctaactctgtatctttaagtccttatgtctggcatggtatgcctgcaactacatattaccaacggtacacatccatttggatgtctcattaacatctacattcaacgtatctaatatcaaactcaattattttcccaaagaactcactctgcctaatctcactgtcctggttaaggactaaaaaaattggtgccattcattactttctccccctcatttttatttgccctaaccactgtgtaggttgatacttgttcagccttcaaattcttcataatcattaattcaaaaactgtctactagattttgagtgcctactaggtggatgaagatgcagaggtagaaaaactagacataatttcttgccctcatgtggtgaaggaaatgggcacaaataaaaaccacaattaattatgcaataacaatgcacagttaagtgttgtgatggagagatacagggggtgttaagttgtgtactgtaataaaaagtccttagtctgaagaaaaggaaaaccattctttatgaggg

SEQ ID NO: 79816 - DNA, 2232 bp, Homo sapiens
aggtggagatggcagtgagccaagatcgcaccattgcattctagcctgggtgatggagtaagacggtctcaataaataaatagataataaagatgaagtagacatcacctatttgtaaattataacagaaaagattaccatccagaattaaaagtacctggaagccaccacacccagacaataacaaatatttcttcaggatctattagaagcccaaatctgaggtatagtaggccttaaaatttactttgaaccttcatgccagtatttggggaagaagtaaagagaaaaggggagaaggtaggagtttaaagaacaatcctatttctggctgaaggggataaccagcaaattataaagacaaatcgctatccgtgtgttgtgctcagtgctgattcatcaaaggaaacaagcagtgtgcactggagttttcagcaagaatctcaaagaagagaagagattagttgagttgaacttttaaagctgaagtaggccaggcatggtggctcacttgaggtcgggagttcaagaccaggctggccaacatggcaaaaccccatctctgctaaaaatacaaaaaaattagccaggcatggtggcgcatgctgagtgtaatcccagctacttgggaggctgaggcaggagaatcacttgaacctgggaggtggagatggcagtgagccaagatcgcaccattgcattctagcctgggtgatggagtaagacggtctcaataaataaatagataataaagatgaagtagacatcacctatttgtaaattataacagaaaagattaccatccagaattaaaagtacctggaagccaccaagaagcacatagtttgacagcaaagtgaacaagtaaggcaggcgcagtggctcacgcctgtaatcccaacactttgggaggcagaactgggtggatcacttgagatgaggagtttgagaccagcctggccaacatggcaaaatcccgtctctactaaaaacacaaaaaaattagataggcgtgtgcctgtaatcccagctacttgggagactgaggcaggagaattgcttgaacccaggatgcagtgaaggttgcagtgagctgagatcctgctactgcactccagcctaggtgacagagcgagactccatctcaaaaaaaaaaaaaaatagtgaacaaataaaccacaaaacataggaaactaaatatgctctatatcatggataatcaagagaaattttgtttttgtttttggtagagatgaggtctcactatgttgcccagggtagtctcaaactcctgggctcaagtgatcctcccacctcagcctctcaaggtgttgggattacaggcatgagcccctgtgcctggccagaaatgtatttttataagacatacatactattaggttcattgcagcattgtttataatagtaaacaaatggtcccaatgtcaatttccatcagtaaggactctatttgctgtgtattcaaatcttttataacaggaatgcgtgtattttgtgtaagaaagaatagtaggctatggaggagggggtgatagcagcagagagaagcataaaagacctctttggcaggaaggatggcttccagaccagctaagtggagcaagcatgttttgaaggacactggctctaatagggagttagcatggggtgggtcacagaacgtatttgatcaggcaaagaggactcttgccatccaagcctgttccctcagataaatggggataattcatatgtcataagccaaataaatgagggaatgaaacatacgtaactaataataaaaagtgttaaaatttattgggcatttaactgagacaatctggttccagagcctgctctcaatcccaatgatgtgctaccttcacatcctagttacgccactgactagctttgtgactttggacaagttatttaacatcccaggatctgttttttacctgtgtaaaaatgcatatatagtacctttttcacaagcctcaaaacgaatataggccttcctcataggattattgaaagattgagttaaacattggtttagcttaggaacagcatctggcacatagtaagtgttcagtgaacgttagctattaccatcatcactattaatgtgtgctagtgactgtcctgagttacattatctaatctaatttgtaatcctctgaacatggcattcactctcctttagatgaggaaataaagctcagactggga

SEQ ID NO: 79817 - DNA, 1023 bp, Homo sapiens
  misc_feature (127)..(127): n is a, c, g, or t
ccaccagatttcatgtagaggcccaagctgcagtttcccaagagcagtttcatggggattcgcgtggaccgggtggatgtccaggaccaaggaagtgtgcctcctggttaggggtcaaggccagtcnccgctctgccagaaacggggtcggcgttgaggaagtgaggatgggagagaaacaagggggcactgaacctgcaggtgctgacgttctgaattccagactccaggcacgcgtggcgaattcggcacgagactctatttgctgtgtattcaaatcttttataacaggaatgcgtgtattttgtgtaagaaagaatagtaggctatggaggagggggtgatagcagcagagagaagcataaaagacctctttggcaggaaggatggcttccagaccagctaagtggagcaagcatgttttgaaggacactggctctaatagggagttagcatggggtgggtcacagaacgtatttgatcaggcaaagaggactcttgccatccaagcctgttccctcagataaatggggataattcatatgtcataagccaaataaatgagggaatgaaacatacgtaactaataataaaaagtgttaaaatttattgggcatttaactgagacaatctggttccagagcctgctctcaatcccaatgatgtgctaccttcacatcctagttacgccactgactagctttgtgactttggacaagttatttaacatcccaggatctgttttttacctgtgtaaaaatgcatatatagtacctttttcacaagcctcaaaacgaatataggccttcctcataggattattgaaagattgagttaaacattggtttagcttaggaacagcatctggcacatagtaagtgttcagtgaacgttagctattaccatcatcactattaatgtgtgctagtgactgtcctgagttacattatctaatctaatttgtaatcctctgaacatggcattcactctcctttagatgaggaaataaagctcagactggga

SEQ ID NO: 79818 - DNA, 581 bp, Homo sapiens
aagtgatccacccgtcttggcctcccaaagtgctgggattacaggcatgaactactgtgctcagctatttttagtctcactctatcacccaggctggaatgcagtggtgatcatagctctgacatcatgcttggctccaatatcatgcctccaacatcatccttggctaattttttttagaagttttttgtagagatggggtctcattatgttgcccaggctggtatcaaactcctgggctcaagcagtcctcccaccttggcctaccaaagtgctgggactacaggcatgggctaccatgcccagcctatcaaaatgtactttaagaaagagatcatatttatttattgtctgtatattagatgttcatttgatttcttgaacaatttgacttggttctgaaattgtttttgaaattgtgcattgtaaaacaatttagatatgtttgaccagcaggaattaaacaagccagtttaggtggaatgagaatgtcccacggtggtgaactaggtgatttgaaccaaccctcgtgctaaaaacaacttgtcttggtggttaaagtgcaaaaattttgtggagaa

SEQ ID NO: 79819 - DNA, 297 bp, Homo sapiens
cgcagcgacggaaccgggcttcttttttaaagaatcaatgtgagggaagggtgcagagccgcgttattttagggagacattgtcgcactccccctcccacgtgtaggtagcatctggggtgcgtgcgccctgttcgcagaccccatggagagacgctggcggcggcagatggggctcctttcacggttgcagccggcagtaacccgaccccgccggcgcagagactgaagaagcgcaggggacagcggcgagctgcgaacaaaagcccttggcgcggggccgaagcccaggacgcgg

SEQ ID NO: 79820 - DNA, 668 bp, Homo sapiens
agtgtggggaccaggttgctcttggatttgggggttgatatggatgccatgcaagcaggtgcctcagtgaaaactaagacgagggctagctcaagactggaaaattcagctcatggctatgactgaaccaaaacaaatctggtagttttcctaccaattaatcacttaaatttgcttgcaaattgactgaaatcagccaagggactgatttcattttggatttggtaaacagaatgaacatttgaacctatctaccgagaagattcacctctccttgccaaccacttggagccatcagtccgaacccgtcgagacataagcattccagttctacaggaactagatcattagagaaaaagcaagtcatctctctgtgagggaacagtcaacccggccaggtgagagtggtgacagctttattatataaagagggaaaaacacctttaacttgttaggtgctgggattggtcaggaggaatctgaaaccacaaactctttgttctagttgcaaccacatcattcaatggagaatgtctgtaattgggcacattagctagtaacacttcagacactgcccactacagatccttcctcttcaaggatgtcatttcattttataaggcaacccagatctgccttaagacatggtttcccatttacctggagac

SEQ ID NO: 79821 - DNA, 486 bp, Homo sapiens
tgtggagaagtctgtgaaactatgaactgggaaaagccagtttgaaaatgttgcttcaccttgctcttacatcttcttgacaattgatcttatgctgtgaaatggtagatttctgccaattattagaagactctcttagaagggggtagtaggaaatctacatagtgttacaaactagaaaagcctttaaagatagttttgttcccacatacccttttagaaactaaaagttaagactagtgatgctcttgacttacctaagatctcacgattagttaacagcaaagcaggtttctgttctttttagtttgaaacattcagcttcagcagtcaacttttgtgtgtggttactttaatgtaaaaatatttgtaaaaccttaataacattaaaaaataggtataattccaccgtcatagatagcaatgctgtgtaatagaaatacatgaaccttatatgtaattttaaattttctagtaggtacatta

SEQ ID NO: 79822 - DNA, 309 bp, Homo sapiens
tctcaaaaaaaaaaaaaaaaaaaaaaaaaagaacgtaggtgagaccctgcgccttctgcacgcctggagctggctcctggggctccccacctggcctgggacagaagtggtgggtgggctggatggagggttgagccagtccctgtagggccttagttttgagggggcctgtttgggattggaggtttgcagctctggacccccctttccagggcagctgttctagcatgggttccaggtacttaacatattgttcagactttgttattagagatacgcatttttgtaattttaataaaaacacatcta

SEQ ID NO: 79823 - DNA, 698 bp, Homo sapiens
agcagagctgtttggtagcagaattttcagtttccctatcctttccaggtcaaagggaatgatatgtgccaccatgggcccagtcgctgaggtcagttccctgagccctgtgcgtaaatgtgggctctgtgtgcaggtctttatcctgccagtcctttgatgtgcaggggattgctcctgcacctcctgagccttcagcttctttctttccaagtgctgggcattcatttcgtcttcctcttcaatgaagtctttttctctttctctttcaagaaatgtgcctttgtgtcctctgtgctagtgaagctagaccatcatttgcactgactacaaggtttagaagtctcaaccttgtctagcttgctgtttatgtgggtcctataggactttggagtcatcctccggaaacaagaactagaccatcctgggtcttgatgtgaaatcagccatttagagagacccctatctcttcttccagggcagggttgagcaaagcagcctctgtctgagaaagcttaggctgctggatgttattctgaaagatgatatttattgctcacccccagcaaagaataagagttacacagaagacaggatggcaaaattgggcagtctcccagctccaggtcaggctttctttgtggctgttgtgaagcattgcgaattctcagcgcatcagaaagacacattctaatttg

SEQ ID NO: 79824 - DNA, 305 bp, Homo sapiens
gtcttctatttaggagaaatcagacgaaactgtcatcttatatataggtcaaaaatggtttccataaccacccacctcacatgcttactgaaattcattaagtaatagatggggtggggggcgggaggtttacaggtcggcaaaggaggcaaggctagagtgatccatgtggcagtggattagagtggcaggcatcagtatgaacacatgtttagctcaatatagatacagatggctacatagagaaatatttatggatatgtgcatatacacaaattagtaagacacacattactaatcctggc

SEQ ID NO: 79825 - DNA, 368 bp, Homo sapiens
catccggggcatggacagcccccggggtgcccgcccgcgcccccgtcgccgcgtcgcgtgcggatcaccaggcagcacctggacagctccagagtcggggaagcgccatggttcctgcgcagaaaggatgcgggttggggccggcagatcctgccaggactaggggccttccctttccatcaggagcctgcaagagaaacaagaaaacattagaggggcttctgtgtagggggagggcaagttgagtctatctttcctcttgtaggtactaattaaacacctgctgtgtgcctggtactgtgcagggtgggacaggcatcatagcaactcacagtggtcccctcttcttggagcccatagtctagtag

SEQ ID NO: 79826 - DNA, 378 bp, Homo sapiens
ttatgccaacaatttataccaaaattatacctgttcacattgccaccagcaatgtatgagactacctgtttgggggaatttctgagtttttttgttaatcataactgcagtaggtagaattaaccaactgatttttttattttataaaattgatctaggattgaaggaattaagctcaagccacaggttctctgtcctgatgataatcattgtacttttgagtggcaatttgatctcatgtgtatctaaatccataaaatagcaacagaacaggaatcaattgtgtttttaaaacgcaaacctttggatggtttcattacttaatgcagactcgtgcatttaaatgggaagctaaattgaatgccataatcatattgt

SEQ ID NO: 79827 - DNA, 391 bp, Homo sapiens
atcccctaatggctctttacacaatagtcagtgggactcactattgatgcgactgtatgtcaactgtcattgaaataacctgacatagatccaaaattgaccatactccctaatactcatttcaagacaatgttagttgtaattcttggaatgctactgtatgggcttcaggggtttataaacctcctgaagttaaatgaagaattatatgtattttttcatctgaactgagaaaagatgttaaaactacagaggataacaaagaaatatatatgtacaactgcctagaattaataatatctcatcatatttgctttggatttttctatatgtaaagcaaataaaacattactgactcagtcgtctccctttcctctttcccccttcagta

SEQ ID NO: 79828 - DNA, 499 bp, Homo sapiens
aaaattttaaacttagttaaaatacacacacattgttttatattagctttttttaagttactagaaggaaacaaataaaaaatgccaaaaagtcaaagaatctcccctctcatccccagtttgatttaagcatccttgattgggcctcttatttcatgataccagtcgcacaaatttaatcattaaaataaaaatgtactgctccgccctttagattatctgcggccaaactgaactcttctctacccatccaaacttgcttattacacaaatgatacgaccagacatcctgttgtgttagagaccaatggtcacctttcctatcatttatctttgatatcctgggttgattttgccccctaaaatattgttcatctgtcagcttctctttatctccatcaccattcatcctgggccagtccaggaaagcctggattctggaatatcctcccagtcaagagtctttccaagcagctgctctgctccagtaaatgttctg

SEQ ID NO: 79829 - DNA, 467 bp, Homo sapiens
tggcttacttttgtcttttgttgagttgtaagagttctttatatattctggatacagatcatttattgaatatacagtttgcaaatattttctcattctgtgcattgtcttttcactttcttaatgtgagttctctaaatttgttcctttttcaagattgttttggctattctttcaacaattgtttctgaattgtactactgtactgcttttgttaaatttattcctaagtattttattccatttgatcctaatgtaaatgaaattgtttacttagttttatttttggattgctcattgctagtttatataaatacatttgtaggttgtatcctacaaccttgctgaatccgtcttttctagtagttttttcttgattccttgaatttctgtatacatgatgtcctctataaacaaaggtagttttatttctaaataaaatgttacaaaaactccaaaatactttt

SEQ ID NO: 79830 - DNA, 1757 bp, Homo sapiens
gccttctggcagtttctgggagctgcgaacgcgccgccccggggctcggcggccggaaacgctggcttcggagccttaggcgccgcggcctttccttgttttccgcccagtccacgccgccatggccaagtggggccaggggaacccccactggatcgtggaggagcgggaggacgggaccaacgtgaacaactggcgctggcgcggctggcggcggcctccttccgggatctggggagggccgggccgcgggagccggggctgccctggggtctgtgcggggccgcggggccagggggtcagggggccgccccccctcagctgctggacgcagggctcggccttcgcctctcggctcgggagagtccttgagtacggagaccggctaggagggttgcagctgcctctttttgaaagttgggttgggccccaagagtgacttccgacagacctttccactcccaccgtctgtggcctgagggccttcccttctcctcccgcccacccctctggatgtttcggggagttagaagggagctggattgagagactgtgttaggggcgggggtatggaacgtagtggaaagggcagaaatttggatctcagttcgcgcccaccccgcaggcgcctcccgcgagccgggccctctgtgagtgagacaagctccccttcctttacgcgcctcacctggcgcgtggggagaggtcggcagccctccgccgcagaacctccggaagggatgtcctctgccctgcgcctctggccggggctgtggtccctccaggccgtcgaggggatgctgaggccggtccccagaggagcatgacttggctggtccggaggagctctgagggcatgggcaatcttggctcgctgcaacctcagcttccagagttcaagcgagtctcctgcttcagcctcatgagtagctgggactacagatgcgtgccactacgtccgtctgatgtttgtatttttagtagagacagggtttcaccatgttggtcaggctgctctcgaactccagatctcgtgatccgcccgcctgggcctactaaagtgctgggattacaggcgtgagctagatctgactttctagtgtcctagccttggcccgatggacatgtcatttctctcagctcgtttctgtcccctaaagtgagaatattgcctgggaagattacattagacgatgtatatgcgaagacacttgatagctggtattgtcatgattctgattagttcactactgctactttccctgtggcctaggctttgcctatttccagtgggcgagctagctagatcctcctcccttaaataagccagtgtttttaagacagaatactacttgcatagtggacaataatatcttaaagaactgagcaggatgaaaagaatttgatagaaagcaggtttgaggagcacattggaggttggcaggtttcgaggctgcttgagaggacttgggccgatctgggctgggcttggacgtgaccctggcacccaggcaggtggatcccagctggggcttccattcacgactttctggtccctggcaggacagagcgggatgccaccagcttgtccaaaggggaagttccaggagctcctggtgggcatcgttgtggagaatgacgcctggccgcggcgagatcacgagttgaagcaggtggaaggggaggcttcgtgcagcagccgcaaaggaaagctgattttcttctatgagtggaacatcaaactgggctggaaaggt

SEQ ID NO: 79831 - DNA, 1412 bp, Homo sapiens
gccttctggcagtttctgggagctgcgaacgcgccgccccggggctcggcggccggaaacgctggcttcggagccttaggcgccgcggcctttccttgttttccgcccagtccacgccgccatggccaagtggggccaggggaacccccactggatcgtggaggagcgggaggacgggaccaacgtgaacaactggcgctggcgcggctggcggcggcctccttccgggatctggggagggccgggccgcgggagccggggctgccctggggtctgtgcggggccgcggggccagggggtcagggggccgccccccctcagctgctggacgcagggctcggccttcgcctctcggctcgggagagtccttgagtacggagaccggctaggagggttgcagctgcctctttttgaaagttgggttgggccccaagagtgacttccgacagacctttccactcccaccgtctgtggcctgagggccttcccttctcctcccgcccacccctctggatgtttcggggagttagaagggagctggattgagagactgtgttaggggcgggggtatggaacgtagtggaaagggcagaaatttggatctcagttcgcgcccaccccgcaggcgcctcccgcgagccgggccctctgtgagtgagacaagctccccttcctttacgcgcctcacctggcgcgtggggagaggtcggcagccctccgccgcagaacctccggaagggatgtcctctgccctgcgcctctggccggggctgtggtccctccaggccgtcgaggggatgctgaggccggtccccagaggagcatgacttggctggtccggaggagctctgagggcatgggcaatcttggctcgctgcaacctcagcttccagagttcaagcgagtctcctgcttcagcctcatgagtagctgggactacagatgcgtgccactacgtccgtctgatgtttgtatttttagtagagacagggtttcaccatgttggtcaggctgctctcgaactccagatctcgtgatccgcccgcctgggcctactaaagtgctgggattacaggcgtgagctagatctgactttctagtgtcctagccttggcccgatggacatgtcatttctctcagctcgtttctgtcccctaaagtgagaatattgcctgggaagattacattagacgatgtatatgcgaagacacttgatagctggtattgtcatgattctgattagttcactactgctactttccctgtggcctaggctttgcctatttccagtgggcgagctagctagatcctcctcccttaaataagccagtgtttttaagacagaatactacttgcatagtggacacatattttgacctgacaggatgggcttctttggacctgggcgtctg

SEQ ID NO: 79832 - DNA, 309 bp, Homo sapiens
tctcctatttctcttttcccacttcttcccctcacccctgccccaattctaaagccatcatctttgtatttcagttgactggtatgcaatattatgaccctgttactgatttagaatatacttacgtcttcctgtttatatttgttcagccctgggtgacagagtgagagaccctgtctccaaaaacaacaacaacaacaaaaaagaaacaacttttttttgtgagtgaagcttgcttgtaataggtcatttaaaaggttaaaaatattgtgtagagtaacatctccatttcatttggaaaaaatatgt

SEQ ID NO: 79833 - DNA, 386 bp, Homo sapiens
cttttcgctttgactttgtcacatccaactcaccatgtttctcaggaatgctgaaccagtcggttcttttagccagctatgtaagagcatctgctctctttgattcgaaacacctgcttgaaaaatggagctaaagcttgggagaagcccgtcaggttgtacgtatgccccaagccaagaaaaacatttcctaggcagctggccccaggtttctgctttttgggaaccacaaaatcgctccccagattttggaggccggcacaagcttttctgttgctaagtgaaggcattttgtaacctgctcgcaccatggttccatactaacatatcaacgcaccagatggacagggtgtcattccagaataaaagagtccttcaaacccaga

SEQ ID NO: 79834 - DNA, 442 bp, Homo sapiens
catgctcccagcccctgcccctacatccttcatcctggcctccttgggctcccaagacagcgctggccaacatcacagtgacctcccacatgccagcccagtgggcacctctcagcccttcccttacatcacctggtggcagcatttgacatggtcgacccagcccccagcccccagaaccccctgtacttcctccttccctgtcatccctggttactgccacttattctcctgcccttgagtttccagggtttcatcactggcctcttctcatctgtgacctccctgggagagctcatccatctgggctgtctgctgcctgtggatgctgattattcacaatgtcctgccctagccctgatgcttctgtaccctgggccatttctccagctgcctactggacaattgactgccccacagacacctcaagcttacagtagta

SEQ ID NO: 79835 - DNA, 630 bp, Homo sapiens
ttaaataccaagcaggtataaaacaggcagctaatttgattaaggaattgaaatgaagcagtcacattaaaaaagatggtaaatctaatttttcggatgaataataatgtcttaaatttgatttccagtgtttctatgtattatataaaactaattctagttaacaaagttgaatttgctgcatatagaaatgaattaagaatattttcatacgtggatcaaaacttcacaaacccagagggcttttcctacactctgtttggagtcttttctgactgctcatattccacacagtactttgatacatgtaaagtgcaaggcaccttgctagagagcataggagctatactaagatatagagtcctgccacaaatacacacaaaataacatgaatacaaagtgtcctaaaagtcatgccaaataaaacagagcatataactgggcagagggatggagagtcacatgctggaggaggtgagcgttgacatggtcttatgggatatgaacttgagatgttgaagtagaactgagacatttctggaaaactagatgtatgaacagaagcaggaggaataggagatggtttggaaaacagcaagcagctcagtttcttgggtgatccaggagaag

SEQ ID NO: 79836 - DNA, 576 bp, Homo sapiens
aaatgccaagtggtagtggtgggcaactgtagtcccagctactcaggaggctgagataggagaattgcttgagcctgggaggcaaaggttgtggtgagtcaagatggtgtcactgcactctaggtgacagagtgagaccctgtctcaaaaagtaaataaataaataaataactgaaatatttactttatacttcagtaatgctgattgtgttttgcaaaatttatgttgttcttgtattttaaaaatataaagtttttattagctcccaaaggccatattatagacagtatatctgtgtaagaataccaccaatatattgagaacatgataaaaacttctcctactgtctctttaatgcttatttgaaaattttctcattagtctattattaatgattgtaatgtattttctatgaagttttactgttcttcattgaatagcaatgattcacaatgtcttctcttcatgagtacacacagttaaaaactgcagatatctaaagaattatttttcatagtatatctatgttgtattcagcattttatgcattaaaatctctcttattatcaattcta

SEQ ID NO: 79837 - DNA, 531 bp, Homo sapiens
tcactcagcgtaacgcccttgaaatgtatccgggttgttgcacgtatcagtagttcattccttttattctatgatatggatgtatcatagtttattcagtcattcaccttgtgaagagcatctatctgatctgattccagtttttggctattatgaataaagctactgtgagcaaacatggttctaaagctgctatgaacaatcaggttttggtgtagatgtaagttttcatttctctgaaataaatgttcacgtgtgcaattgcttggtcataaggtaatatcatttttggttttgttaagaaaacatcatacactttcccacaataccattttactatcacccagcaatgtgtgagactcggtttctctgtatccttgtgagcatttggtgttgtaactatttattttaactatgccaaaagttgtgtagcttgtgttcttaatatccattttcctaatgcctgatgatattgaacatatttccttgtgcttttttgccacttccttcaataaaaaatctcctcatttt
